United States Patent Application Publication US 2017/0114356 A1 - sequence listing, part 72

SEQ ID NO: 105182 - DNA, 1525 bp, Zea Mays
cacacccgtgtcttccaccaagaggaagccgccgccgatgccgcctccgcctgcatacccgctcccgcccgcgcccgccgcgcttgccggtgcccccgccccggccaaggtttgtgtcgctactcgctagactagaattccgcgcgcggacctttgccggccgagccgttctgcggcatctcgacggggacaaccatgcgaatttccttggcgtccacgttgacgccacctgagccaccaccggtgaaggccggctggccgctgacctccgagacaggggaggcgcccgagctccacaacggccgcgggcctcgacgactgggctaaggccgagcgctcgtcgaagttggactgccgctgcgtcagccccctcgaccgctgcgacaccgacaaccagcgcaccgtgacgtggagcctatcgtcctccgccacctcggcctccatctcggcgcgcccgccctacagcgacaacacgtccgggtccacatgcagcgacgcgatggctgccgtggtgtcagggaactggtccacgatgagcgtccgcgcggcgcagaacttgaagaggaacagcagcagtgtgtaccatatgatgcactggagggcaggcttgagcacgcggccagcctcgcgaggacgaccagcttctgcagcgtgtccgctgccaggaaccggagattcatggcgtacaggtcgttggtggagatgaagtggaaggatttgaatcaaggttcatttattttcaggcgtggaaagtattgcagatagatgtctctattttcacgtcatcattagttgatgttcaggtatattgtctttaacatctatgtattttctatgaataaattatctcatggaagttatattccttttctagaaatcgttggagagaatgttatccaaaggaaatattttaattggccatagcttacatagagatttatgcggtaaggtgtggtttgtattttttgtctgatctatctgatgtgtcaatcagatgtgtactttgcgtttagttgaacatgtttctttactgtttttagtaccatttaattcaattggtctcattcttctattttgcagccttaaagattgattactctcaagttattgatacaacatacatatttaagtatgcaaatttaccgactactgcatcaccttccttgaacagtctgtgcaaggctgttttggagtatttagttcgagaagaaggagaaccacataattgcttaaaggatgcagaagctgcaatgaatctagttcttgcaaagcttaagaatgagtttaatgaccccattgaaattgctgcaagtattgtaagcgccaaaaaaagatgttcttaaatcttaccattagtatagatgatgccaccttacttctttgtggtaccttcctaggtaactgaatctgattttgtgaagttgctcgctcatagaattctagtgtcttattatgactatggatgagacttttgtgatgtaattgatgagactatggatttaaatattattatgtgattgtgtgt

SEQ ID NO: 105183 - DNA, 633 bp, Zea Mays
gagcacgcggccagcctcgcgaggacgaccagcttctgcagcgtgtccgctgccaggaaccggagattcatggcgtacaggtcgttggtggagatgaagtggaaggatttgaatcaagaaatcgttggagagaatgttatccaaaggaaatattttaattggccatagcttacatagagatttatgcgccttaaagattgattactctcaagttattgatacaacatacatatttaagtatgcaaatttaccgactactgcatcaccttccttgaacagtctgtgcaaggctgttttggagtatttagttcgagaagaaggagaaccacataattgcttaaaggatgcagaagctgcaatgaatctagttcttgcaaagcttaagaatgagtttaatgaccccattgaaattgctgcaagtattgtaagcgccaaaaaaagatgttcttaaatcttaccattagtatagatgatgccaccttacttctttgtggtaccttcctaggtaactgaatctgattttgtgaagttgctcgctcatagaattctagtgtcttattatgactatggatgagacttttgtgatgtaattgatgagactatggatttaaatattattatgtgattgtgtgt

SEQ ID NO: 105184 - DNA, 91 bp, Zea Mays
catgtcgacgcatcaattcacatgacataatgtcatgcgtaaacaacagcatatataaatatataaactttgccctgtagtattatactcc

SEQ ID NO: 105185 - DNA, 585 bp, Zea Mays
cgtgtgtcgaaccttggccttggggatgaccttgacggctacgtcctggcccttgtgctcgcccttcttggccttggcggagcacgtgtagccgaagtgaccgcggccgacctcctcgccgaggtcgtactttgcgaagaagtgcttcgagaagccgaagctcttgtccaggccgagctccggctcgccgccctcggggatggacgcctcgttgggcttgaccgagccgtgccgccgcgcgaggagagcgcggatgtgcttggcgggcgacggcggtgggaaagggcgcttgaacccgccgcgcgccggcgtggacgcgacgctcgagttcgccggcgagcccttgtagctggacggcgggagcgggctcggcaggtagaacgggaacttgggctgcttcggcgtgcccggcttcgccgtgggcgcggccgccgacggcgaggtcggcccgtccccactgtcacccgctccggaggctacatggggatcctcctccgcctcggcctccgggatttgcgtcggcttgccatggcaaagccccatggaccgaatcaagagctggaggagagctctagctcaacgacg

SEQ ID NO: 105186 - DNA, 89 bp, Zea Mays
cctctcaattttgtcacacctatgtatagtatgtattttcagtcagtggcggaggacaaaataataatgaggtatagctgaagaaggac

SEQ ID NO: 105187 - DNA, 111 bp, Zea Mays
acttttgctttttaggctcagtaccctccagtaaattttgctcttctttttgtgcacactttttccctcctcctttcagttgcttggatggatgcatccctctttcttggc

SEQ ID NO: 105188 - DNA, 1740 bp, Zea Mays
atccatcttctctcaaacgagtccacatccacatcggcgtgctcccgagccctgaacgctgtccctgacccgttcacccgtcgcaggcgagcagcagacagccagaggagacgtcgcgcctgtgcctaccatggacgagaaggagttctggcgcatgctcgacctcttccccgtcgtccgctcccgtgactattgcgtaatcctcctctcctccgccaggccccactatcactctccttttctctctgcctatgcagctaagtccggggttctgatttggggacgtcccaaatcccaagccgcgatctgtggcgtgtaactcgattggtaattcggggcaccatagtctaatcgtcctttctatcgattccggtgacccgatctcctgttgcgacacgcactgttgtcagattgcagctccgggctccgagatcagctcgatgtttgcagaaatagttgcggtagaggaccatgtagcctttggtcagaggatgaattaaaggtgatagcacattagcatccttgaatagaatttacgatgctacctttgtaggatgcaatgctgcaacgaagaaagagaagagaagcgaattttatccatgtgccctgaacagcctagtttttcttcccttcttttgagggtaaagggggattactcattttctccctttactataaagaatgcccctgcagaatgggaccatacatatattaacactccctgcctaataatagttggaatgcttctaaaggggggttccaggtttagtctgttactcctagcctctcaagttaagcagtctactattagtcttgtactgttcttcccgtgccatttaagaaagtaggctattgttggcctcttaaagtgggtaagtattagtgacaaactttgaaggtagagatcgacaaagttgttgctatctctgcgttgagctacacatagtcacgcaatgtcataaatgcttgtttctatttgagttcaaggtttgtggttcagagagtattgcatggggggatggccgcatgggactttggtggtatgcatgcatttatctaaatagaaaactgggttgaaccagaacaaagggtaatgtattaaataagcacattggcatgcaatcataagttcatcacctatgtggcagatgtcccattgcagaagtaactgaataaatatggttagttcttttttcctgtttgcagaccttttgagcatgaactgatgcaattttttttgggaggcaaatgtaggctgatcctggaacatctatcagaggaaccagacagcgatcacgagttcaggaggcagcgaagggcaatgacaaggactcatccgacgcacaagatttatttatgcagaagttgaagatggctgcagagaaaaagattggaacaacaaaagcagagttcttctgcaaggcatttgaagaaactcatgagaagcttgtttacaaagagctgaatttggatgctgctaagaagtttctgagcgcatatgagagctgatgatgaacagtaggtagatgctgctcaaggataggcaggtgtcaatgatcctagaaagttgttgatgctgtcgagattttgatcattgacaaacttgtgttgtgtgcagacagtagacatccctttttggtcagctacacttcttttttcagagaaacttttgaagttgtccaattgtacgctgatatacgtttttctcggtttgctcgtcccccttttttcgctctagaa

SEQ ID NO: 105189 - DNA, 825 bp, Zea Mays
atccatcttctctcaaacgagtccacatccacatcggcgtgctcccgagccctgaacgctgtccctgacccgttcacccgtcgcaggcgagcagcagacagccagaggagacgtcgcgcctgtgcctaccatggacgagaaggagttctggcgcatgctcgacctcttccccgtcgtccgctcccgtgactattgcgctgatcctggaacatctatcagaggaaccagacagcgatcacgagttcaggaggcagcgaagggcaatgacaaggactcatccgacgcacaagatttatttatgcagaagttgaagatggctgcagagaaaaagattggaacaacaaaagcagagttcttctgcaaggcatttgaagaaactcatgagaagcttgtttacaaagagctgaatttggatgctgctaagaagtttctgagcgcatatgagagctgatgatgaacagtaggtagatgctgctcaaggataggcaggtgtcaatgatcctagaaagttgttgatgctgtcgagattttgatcattgacaaacttgtgttgtgtgcagacagtagacatccctttttggtcagctacacttcttttttcagagaaacttttgaagttgtccaattgtacgctgatatacgtttttctcggtttgctcgtcccccttttttcgctctagaagctctgaaactaaccaatccaggtaacccgtctactaacccatctgtagggtgacaatccgtacgaccgtacccatcttaggacttgttcggttattcctgttacctatggattggatgagattgaaaaaatttgagaagaaa

SEQ ID NO: 105190 - DNA, 718 bp, Zea Mays
aatgtattaaataagcacattggcatgcaatcataagttcatcacctatgtggcagatgtcccattgcagaagtaactgaataaatatggctgatcctggaacatctatcagaggaaccagacagcgatcacgagttcaggaggcagcgaagggcaatgacaaggactcatccgacgcacaagatttatttatgcagaagttgaagatggctgcagagaaaaagattggaacaacaaaagcagagttcttctgcaaggcatttgaagaaactcatgagaagcttgtttacaaagagctgaatttggatgctgctaagaagtttctgagcgcatatgagagctgatgatgaacagtaggtagatgctgctcaaggataggcaggtgtcaatgatcctagaaagttgttgatgctgtcgagattttgatcattgacaaacttgtgttgtgtgcagacagtagacatccctttttggtcagctacacttcttttttcagagaaacttttgaagttgtccaattgtacgctgatatacgtttttctcggtttgctcgtcccccttttttcgctctagaagctctgaaactaaccaatccaggtaacccgtctactaacccatctgtagggtgacaatccgtacgaccgtacccatcttaggacttgttcggttattcctgttacctatggattggatgagattgaaaaaatttgagaagaaa

SEQ ID NO: 105191 - DNA, 1139 bp, Zea Mays
gaccgcccccgcctccgcccgcctgcatgcaaaccccgccgagcttccaaacacgccgccaacgcagccaacgccaccgcaatccgcccgcccgcgcacaccacgccgcgagctcgccgcaattcgctcgcccgcaaacaccgccgcagtccattggccacgaccccgccgcaatcccgagcaagccgtagaaacgcctgcctcgcccccgcagtcctccccgatgagcacgcgctcgcgaagtccgtcaagtgccgcctcgggccgccccgatgatgcgctctcattcgctgacctccactccaagctctctgttttcttcgaggaatccatatgcggcggcgcaatcatcttcgactacatcccggcatggcgccgggtgtcgactgccgactgccgacttctggcctggttttgaagcagacggcgaggacattcatgcctcgcactcctctgacccacagagagataagccctgcttccgtcttgctctgctctcccggcgacaacacgccatccaggcagcaagctgcaaacggtcaatggtgtcacgccgtgctgccgactgttcccatgcagcgccgtgcgcgaaggtgaagcctgggcgctgcaagatccagtaccgcggcatccggcagcggccgtggggcaagtgggcggcgaagatctgcgaccccgtgaagggtgtccgcgtctggctcggcacctaccccaccgtcgaggccgccgcgcgcgcatacgaccgcgccgcgaggcgcataaggggagccaaagccaaggtgaacttccacagcgacacctcctcctgcgtcaccgtgccgacgacggcgtcgaggtctactgctgctgccgccgcacaggccccggccgttctcccaccgcctaaggtggaggcacagactgagctgtccgacgaggtcaaggagttgtccgaggagctgatggcctatgagaactacacaaacttcctcggcatcccttacatggagggagggaccacagctgcaagtgccaccacagctgccgcctccgccgccgccgaagaatcgcaggtcccggctccggccgggctatggagcttcgaagattactactacccatcgtctcagtcgctctttactgaatgatgaacgtgattt

SEQ ID NO: 105192 - DNA, 210 bp, Zea Mays
ttactgctcaatcaattacttttctcatgcaaatacctccagttgagtactactttggctcctgagcctgatgacatatattggtctaatctttggttaccctacaagcaactctagattcggcacatagtcacacttatgtgttctatcgttttcatggttgtattccttacaccagtgacatttatacaaggtttaactcagctgtaa

SEQ ID NO: 105193 - DNA, 95 bp, Zea Mays
ctggtgcagacccattcattattcatatggacgcaacaacggttggtgcagtggcgcccgtgtgagtggtggctgtcggggccgccagtgcaagg

SEQ ID NO: 105194 - DNA, 2142 bp, Zea Mays
ccattctaaaaaaaatccccgatctactacctttctcctcctctctcacggtctcacctctagtttccaggatgacaaaatatgggatcagattcgattcgtgagcctgtagaacaaggatgctcctccaatccatactaaattgaacccacgcagcagacatccgcgcgcagtacgtccccttcgcgaagcaccgccatcctcaccacgccgccgagtcgggcggcgcatgcgccatggcgttcctattcggcgcattcctgggcctggtggtgggcgtggccgtcgtgatggcgttcgcgcgattcgagaacagccgcgccgagcagcgccgtgagctggctgctacagctgcagctttctcgaagttgactgtacaggatttgaggaagctcatcccacccgagttttatccatcatgggtttcattcacacaaaagcagaagcttaaatggctgaatcaagagctgacaaaaatctggccatttgtcaatgaggctgcatcagagttgatcaaaacttctgtggagcctatttttgagcagtacaagtcattcatcctggcctccctccatttctcaaagttgacacttggtactgttgctcctcagtttactggtgtttcaatcttggagagtgatgattctgccatcatcatggaacttgagttgcaatgggatggcaatcccaatatagtacttgacatccaaacaacacttggaatttctcttcctgtacaggtgaaaaatattggattcacaggagtacttcggctcatatttaaaccgctggtgtctgaattcccctgttttggagctgtttgctgttctttaagggagaagagcaaggtggaatttaccctcaaggttattggtggcgaaatgactgctattccaggaatttctgatgcaattgaggggacaatacgtgatactattgaggatacactgacatggccgaatcgcataattgttcccattgtacctggagactatagtgacttggagttgaaacctactggggtattagaagtaaaactggtggaagctagggacctaaagaacaaggatcttgtgggaaagtcggacccttttgcattgatatacatacgtccattgcatgataaaacaaagaaaagcaaaacaattaacaatgatttgaatcccatctggaatgagcactatgaatttgtggttgaggacatatctacgcagcacttgactgtaaaaatttatgatgatgaaggactccaatcatcagagatcattgggtgtgctcgagtagacttagctgatatacagccaggaaaagtgaaggatttatggttagatcttgtgaaggacctggaaattcaacgagacaagaaacctcgtggtcaggttcacctggagctcctctactacccttacgcgaagcatgaaggggttcctaatccttttgctaatcagattcaactaacttcattggagaaggttctcaaaaccgagtctaatggatatgatattaatcagaggaaaaatgttattatgagaggagtcctttcggtgacggtcatatctgcagaggagttgccacctatggacattggtggcaaggctgacccatttgtggtcctgtacttaaagaagggagaaaccaaaaagaagacaagggttgtgacagacacgctaaatccaatatggaaccagacatttgatttcatggtagaagatgcactgcatgatttgctcatggtggaagtatgggaccatgatacatttggaaaggattacatagggaggtgcatcttgacactgacgagagttatactcgaaggtgaattccaagatacctttgtcttgcaaggtgccaaatcgggaaaactaaacttgcatttcaagtggacgccacagccaatctatcgtgatcgtgacagggatcagtgagacttgtaaacgaaaaaggccgataaacacttatccccaacggtgctatgtatattagtcgttctgtatttacaaaatcccacggttcttatagccacgtgaccaaaaagagatcaacccaccgacctgtattttctcctttgtgatgcaagtcagcaagtgcatggacctgtatatttgagtcgttaatgaataggaaatgctgttactatgctgc

SEQ ID NO: 105195 - DNA, 558 bp, Zea Mays
tcaccaaacacgaacaggcttttcgtcgaatgcccaaaccgcacagaaacccagaccacatttgtccacagggcaatgcagccaaaacaaaagggggacaaatctgatgcttatatactcgccgccacactcaaacatgcatttcatcgaacacctagtgcactccaaaactgaactcacggagaggagaggcggccccagactccagcccccgcgctacccacgccgccgctggcttagagaagcccgaggaggaggagcaggaggacggcgggcgccacggcgaggacgaggagcagctcggagccggcgacccgcgcgtgggcagcggcctcgcgccgcgccgctgcgatctcggcgctgcggaggagcccctcggaccggagccgcgcgagctcctgcagcgcaagctcgcgcacggtcatttcgaagagatggaaggggagcggcgtgcgtagcaaacatgcgcggggccgatagcgggcgaggacgaggggttagggggagttaccgctgcggcggccgaggagggagagtaggaggtccggcggcgatcct

SEQ ID NO: 105196 - DNA, 2385 bp, Zea Mays
gtttgccacggtagtatcgtaggagcagcacatcgaagatgctacggcctcaagcccgtccggcccacgggatactggactggcccacctatacaagtatgcgtagtttgggcttccgtctgcagcattgtaaagtttgttctgcagcccatggcctggcctccgctaccacgagtagggttgatcaaacttgatcggccgctctatcatgagctgtgtctatcttgaatttgagcccgtcgcacttgccaggtcgggcgtgggccaacgtaaaaagagtgacgtttcttcaccaatcaccctgcgtttcttctcctgttcatcacccgtgcgtgcgctctctctctttctcgtgcggcaactgcgaggccgccgacgcccgacggcagggtgcccaggccttcttcggtcccatcgcgaggccatagttgcatcattcgcctgagacgactgcccaccgccaggactgatctcctcactaggcgcgtagaggtgaagagaataacttgacaatgagcagcataggcacaggttacgatctgtctgtcaccaccttctccccagatggtcgtgtcttccaggtcgaatatgctaccaaggccgtcgacaacagcgggactgttgttgggatcaagtgcaaagatggcattgtcctgggtgttgagaagctggtaacctcaaagatgatgctggaagggtcaaaccggaggatccattcagtgcaccggcactctggcttggctgttgctggtttagcagcagatggcaggcaaattgtttcaaggacgaagtcagaagctgccagttatgaaaaggtctatggagaacccattcctgttaaggaattggctgatcgtgtggcaagttatgttcatctttgcacgctgtactggtggctcaggccttttggctgcggtgttattcttggaggttatgatagggatgggccacagctctacatgatagaaccctcaggagtttcttataaatactttggtgctgcattagggaaggggagacaggctgcaaaaactgagatagaaaagttgaaactttcagagcttacgtgccgggaaggcattgttgaagttgcaaagataatttatggagtgcatgacgaagcgaaggataaagctttcgagttggagttgagctggatctgcgatgaatcgaaccaccagcatcagaaggttccaaatgaactgttggagcatgccaaagctgctgcccaggctgctcttgaggagatggatgccgactaagagacacgatgatttgcccaaacttggtgttttcggtggtgttgatatctctgatcccttggggggggggggacccactaggggtaggcacatttcaaccgaaaaccgagccgaactggaatcaaggttttttcggtttttcgattcggtgtcggttttcctttcttacgaaccgaaaagatcggctcggcttcggtttctatttgctggacaccgatacaaccgaacttactgcagtctaatgtcctgtgtggcgcgcgttcaactggacctggacaatttgcagtgcagcccaccgaagcccaaaagacaccaacgcacagcttcatagtccataccagctagcccaattatttattaccaaacgtctagggctccaggccaagccacacgcccaaagtccaaaccatgccgcatcgtatagacagaagcgcttttggcctgcccctggtggctctcacgtcggcgtgtcgtgcgccagcgtggtgcatctgtggaaccagcagcgagcggcacctcgcgagaactgcggcgggcggcgcagctctctggaaagagcgcggcggcaacgcggagcagtcgatgggcggcgacgactgcggaagccagcagcagacacacgaagacgattcttttggtagaaactgaacaccgaacgaagtctacctcgacggcagcgtctacgtcgacggctggagtactgcactgagatacgaagtttagctgcaccaaagaaacagaaccgattggtcggtttaaaccgattgcccacgacccactggacatggccagtttcacacagcctacgttttgatccatgtcatgtagaactccaaccacggttgagtgtctcgctaggtaacgagcgaaaactggggaattttctcgttctcggtccacactgggatacgaaagccagctcggattttagtgtatttcggtttcaaatttgaaaatataataattgaatggtcaacaaaacggtttttgaaatttcaaaacgagaatgtaatccctgactccgaccatggaagtctggaatctagattgactgatatcagcgctgtggatgccttggcgtcttgaggaactttttagcttctgctgtaccggttacgcagac

SEQ ID NO: 105197 - DNA, 2038 bp, Zea Mays
aactatctctctcaaaaaacatcctctccgaatccctgtcagtcgccaacctctctcccctccaaaccctagctagctcctcctatcgggagagattcgatctcgcccttctcgccgtgggaccgtcggcgcatgtcctccggcggcaaccccaacccaaccggcgctcccacccagccgcgtccaatgcatcagcagcagcagcctcaaacgggcggctcaccggcaacgcccatgacccacctccgccctccctccctcgccggctcccccttccagggcctcttccacacgccgcccacccacaaccccgccttccagatccacatgggtgcctcgtcatcaccccagactccgctcatggccgccactgcaggatcggccaagcgccccccgcaaaagccccctgtccggcccctggcacccggctcaacctcgtcggccgcagcggcctcggcggctgccgcgtacaaggctgcggccgcggcggcggccgttgccaactctgggggcgtcgacctcacccccgccgcgcggcgcaacaagaagcgcaaactccccgagaagcagctccctgaccgcgtcgccgcgctgctcccagagtccgccctctacacgcagctgctcgagttcgaggcccgcgtggacgccgcgcttgcgcggaagaaggtagacatccaggaggcgctcaagacgccgccctcgctccagcgcacactccgcatctacgtcttcaacaccttcgccaaccaggggcctcgcaccatcccaccgcccaagaatgctgacccgccaacctggtcgctcaagatcattggtcgcgtgctggaggacggcgccgagctggatccttccagtgttgtgcccaagcacaacccagtgtaccccaagttctcccaattcttcaagagggtgactatagcgctggacccctctctgtacccagagaatccgctcatcatctgggagaatgcacggacagctgcccagcaggaagggttcgaggtaaagaggaaaggggataaagagtttgttgcaaacatccggctggagatgaactacaatcctgagaagttcaagctgtcacagccgcttatggaggtgcttggggtggaggtggacactcgcgcacgggtgattgctgccctctggcagtatattaaagcaaagaagcttcagaacccaaatgatccttccttcttcatgtgtgaccctcaattgaagaaggtgtttggggaggacaagctcaagtttgcaatgctgtcacagaggatatctcagcatctgtctgccccgccacccatcaatttggagcacaagattaagctgtcggggaatgaagcgcatagcagtgcttgctatgatgtgctggtggatgttcccttcccgctgcagaaagagatgatggcattccttgccaacacagagaagcacaaggacattgaggcctgcgacgaggtgatatctgcttcgatcaagaagatccatgagcatcgcaggaggagggccttcttcctgggtttcagccagtccccagtggagttcatcaatgctctgatagcttcccagagcaaagatttaaagctggttgctggcgaggcgaataggaacattgagaaagaaagacgtgccgacttctataaccaaccatgggttgaagacgccgttataagatacttgaaccgcaaaccggctaacgagggcctaggtggtggtgctggtggttcttgaggcgtggatttctcctagctattttagtgtataaacaaattatctgttctgtattggcagtaaatttcagacgtattagtgaagagatttgttcagtgttgtgaaatgatgttcaggctagtcattgtatgtttatgttgtgttctatattgtcaagtgctgaactgaaccgtaatgttgcttggtgtggccctgaaaatagtaagcctaaatcacattcaaaaaaactggaatgcaggatgatgatagtagcctttccataattcctggagctggaagaagctttgaggtgtagatgccttttgtc

SEQ ID NO: 105198 - DNA, 150 bp, Zea Mays
atgggatcgaggaacgggaacgtggtacgcggtacgctacaaaaactaggatttaacactactggaacgagattgttcccacgttcccggaacggaacgaatgttcccggaacgaggaacgtggccaagttcccagttcccggttactaa

SEQ ID NO: 105199 - DNA, 2125 bp, Zea Mays
atgcaccgccgcacacgccacacgggcacggcgccttcgtctccaacacggcgactaattaaccccactgattccgacgaccgagctcccccacactttttcctggcaaaccctgcacgcctccgcaaccgcaaccgcgtcgtcggcgtgcgcgatcccgagaggcccagccatcagcttccttggcggggtgtgtatgcgcgtacgtcggccgtgaccagatcggctgagccaaggccatggcggaaccggccctcctcccgccggaccccttcgcggacctccccttccccgaatttcaggcgcccatcgacggcgacagcttcgcgcttgaggacttcgatctggaggatctggacctggacgtggacttcgacctcgacctcttcggctcggacgggcaaccctcgcaaccgcccccgctcgcgacctcgtcctcctcggccgggtctccggttggaggctcgtcctcttccggtgccgtcggggacggcggagggctgaggaatgaggagtcttcggagtcgtcttcgaggagcgcgagcggcacggatggcagcggcaaggggaagggggaggaggacgaagcgaagcggcgcgcgcggcaggtacgcaaccgcgagagcgcgcacctgtcgcggcagaggaagaagcagtacgtggaggagttagagggtaaggtgaaggccatgcaggccaccatcgccgacctctccgccaggatctcctgcgtcaccgccgagaacgccgctctcaaacagcagctgggtggcgctgctggggccgcgccgccgccgatgccgatgtaccccacgatgtattctttgccgatgccgtggatgcacccatcgtatcccatgcgtggatcgcaggtgccgctcgtgccaattcctcggctgaaacccccgcagcctgcatctgctgtagcagagccaccggccaagaaggctaggaagaccaagaaggttgcaagtgttagtctcctggggttgatttgcgttgcaatgctttgtgggtgtttgattcctgcagtaaatcggatgtatgactctgttgatgctggagaaggtgctgcatacggtccatctcatcgtgggagggtgctggctgttgaggggcctcatgataatgtttcagatggtgtcgatccaaagccgccacagcgtgccagtgagacgcttccagcactgttgtatctaccaaagaatgggaagcatgtcaagattaatgggaatcttgttattaagtcgattgttgctagtgagaaagcttcattgcagatgtctggcaatgatgggaagcgtcctcaaaaccaagaggaggagactagactggcaattcctggctatgtgactccattgaaagctggagaggttatggaatcaaccgaaggaatgatgaacaatgaactgttggcgttagctcctgcagatggaagcatgtatagggaggaggatggattgctgccacagtggtttagtgaagcaatgtctggccccctgctgagctcaggaatgtgcactgaagttttccagttcgatgtgtccccatcatctgctcatccaaatggcatcattcctgtctattccaatgccatgtcaaactcgtcacagaacttcactcaagatcttccccctgctcgtgttcgcacggtcaagaacagaaggatttcgtactccgaggccattcctctgagaggttcaacatccaacgacactgagcacctcaagagctttggcagtacgaagcctgtttcgtcagtggtcgtctctgtgctggctgatcccagagaggctggcgatggggatggtgagggaaggatctcttcaaaatcattgtcccgcatcttagttgtcgttcttatagatagtgttaagtatgttacgtactcttgtgtcctgccgttcaaaagccatagccctcacctttaggtctgggttttggacgtgagttgataaagctgacctatacattttatagcagaagaggtgtaagacagctgcctttgttcatttattcaagttttgtgtgctccatgatgtattttggccttgtgaactttgatgatgtcgcagggcttttcgtagtcatccgcagagtatgggccaaccggcctgatcgtccg

SEQ ID NO: 105200 - DNA, 2238 bp, Zea Mays
gtgccgtctagtcttccgcccctcttcttcccgggagagctcgagctcctcctcttcctatcgctgcgtgcctcgcagctccgccagctgcaccttccacccctccctagcggtatatggcatccccgtcctcctgcaacgccacgggcgtgccgttcaccctgctgggcgcgctcatcaccgccggacccgccgcctggccggcctgcgtcggcggcggccgcgccttcctccgggactacgcgcggcgcgggaccaacgcgctgctgtgggcgggcctcctcgccgtcacctggctcctgctcctccgcgtcgccgcgcttctccgcctctgggcgctcggctcccgcatcccggggccccgcgcgctaatcgccgaccccgggctcgcctccgtcttgcgcaacggcggcgacatctccggttttctatcaaaattgcatgggagatatggcccagttgttcgcctgtgggtgggaccctcccagctacttgtatcagtcgtagatcctactctagttaaagaggtgctgtcaaaggctaaagataagttaccattgactgggaggacatataatttagcttgtggaagacttgccttgtttgtgtcctcgttccagaaggtgaaaaggacaagagattctctgaaaatattcttgaatgaaagacttacagttggtactggtcaaagctcattcaaaattattgatgctgtcctgaatagaatcgactctattatgtccaaggattttatggacactagatctttctcccagcacatggcatttaatattatcagtgcaactcttctgggtgatgccttcttcgattggtctgatgctgctgcgtatgaggaacttcttatgttggtcgctaaagatggttgcttctgggcttcttacacaattcctccattttggaggcctagctataggaggtatcagaccctatgtgctaagctgaagatattaacagagagcgtcatcagaaaatcaagataccaaaatagttcgcttcaccattttgatcagagatcttgtcagaaaagtgaggggacagatccacatagaagtgttttagacaacatgatgcgaagtcattgcctccatggggctgctaaaggaccacttaatttagaagaggaaacatgtggaaacatcatgggtttgatgttgcatggtatttccacttctgctaacttgattggtaacattttgacaaggcttgtcttgtttcctgaattgcaagatcagctacatgaggagattgtttcagtctgcaataaatcatctaaagtggaggttgatgatctgcttaggatgcaagttctacttgctactgtatgtgaatctgctcgccttttgcctgctggacctcttctgcagcgatgttctttgaaacatgatttgactcttggctcaggtgtcactgtgccagcgcgatcaatattagtagttcctctgcatctcgtgcaaatggatgcttctgtttggggtgatgatgccgaccagtttaatcctcatcggttccttaaaagggacattgatcttggagaaatattaggagcacctaaaggatcaactaggttaaatatttccagtgagtgtaccaaggccgaatcatttcttccatttggttctggaagtcgagcatgtgttgggcagaagtttgtggttctggcaatatcgatgttgattgccagtctgctccgcagctatgaggtacaacctcatccaagtttgtctaaagaaatggacacaacagttgatagcagccaccttcatcttccaaaccctaagatcatcctcaccaaaagaaggatctgaagggagagtttggcaaacgaaaatctggcacgtttgctttcactgtattgtttttcactggtgttacaccagtatatgatctttagtttcctaccgtcgtttggaccatgctgaagtttggaaaggcgaccttgacgatgcggaagtgccttttttcctccggatttttgacagaccctgtgtgcttcgttggatctaagtttttgtcaggtttttggagcacagggctgttagatcacaggagacgtatgctgatgtgtataaacagactcgttttttcagttggggttttctcctatctgtggagaatgtaattaatgtccaacgcatgatgtcgctcgccacatatattttattgtatcttacttgcatataaacatgtgagcttattgtttggaccataatttgtgat

SEQ ID NO: 105201 - DNA, 1239 bp, Zea Mays
gtccttttgacctccattaactattgcgatagattgatttactttttttaacaataaatcacatgtttgtttcgtaatcaatcttttcaagtgaaaaaagcttaataaagccaacgagacctgaacgtgacaacataagccacgaagatgttggtgcatgcgtactaaacactcacttcaccagcaaaactacaaaccccaccaacaaaaggaccagctggccgaagccgaacggccgagccgccgagaccgcccagttggagcccggcggagccggcgagtagtcgccggatcccgtgctggtgctgagcacgaccacgacccagtcgccctcgctcgcgatcccggcgccggagaactggctgtcgttgaggaaccggttgtactgcgacttggtgtagttggcgaggacgacggcgggggcgaggcccggcacgcacgccggcatcacctggccgtcctcggtcaccgacgcgttgaggtggcagcggtccaggtacctggggtagtccgggaactgctgctcggtgccgatgacggtgttggcgcccgtcgtgttggtgcactcctgccccttgaactgcctcgcgagctgctcggccaggcacgccgcgttcttgttctcggacagcgccgggaccttgagcgaggacctgtagctgttgatgcccttgaggagctgcgcgtcattgcctggaaagggggaattccgtcagtctcctaccagaacagcgctagatttttttttcatctttagacgccatgaggattaatcgcgatcgagcacttgggagtgaatcgtgtgcgacagacagagagacaggccaaggcaagcctgtataaaaatacactgtgttcccattctcaacgacacctctgctctgggtgcagatcttgcagcaaacggccgagctgactctgggcattggatatcaatcatacttgtggttagcagcagacagaagagcctgagctcgtgcggctgctaaaacaattcccggcaacagtccaagccacgagaccacgtccacccgattcgtacgtagctggtgcacattgccagatcaccagaaggcgagaacgcagtgcggcgcactagatccgcgggaacccagccagctgccagcctagtgtgacaagtcaggagaagggagatgaagaagcttaccgtcggatctggcgcagtgcaggagggaggaggcgaggacgagggcgcagaggagggagatcctggaattc

SEQ ID NO: 105202 - DNA, 847 bp, Zea Mays
tctcggagcatccactgccattcatggacggcagacgattccatcctctcggttcatgaaggtgctcttcctgcgcctcggcttctccggcgtcgcagacatgaagatccgccgctccgagtggggcggggccctggtcgcgccgcgcaggtccgggtcgctgtcggcgcgcatcagcgccgcgctgtccggtggcctggtgctggcgccgccggcggtggaggagaaggtggaggtcaactccaccatattccccaagggcccgccggtgccactcccggttcagaagatggccaggcacatcgacaccaccgaggtgagcaggggccccgacgacctgccgggctactgggtcgtcaccggcgccaagctctgcatggaaggcggcaaggtcgccctcaaggtcaagtactcgttgctcatcgcagtgcaagaggaccctgaaggacactgacgctttgaggcctccattgccatcgtccacgcctcaactctgtctgtctgttgtgttgccgcggtgtaaagttcagttctgggcaactacgttgtacagaatacagtgtgcccagaggctgatgttttttggtttgttcacttagttcttgcaaatctaggaacagtttaggtttagatataatacagagaaattacctgattcgattgagcattcaatacatgagaaattagtgctggctgcatctgcaatttcatcaaaatttggcacggtcctgcaacagatgattttctttcgcaggtatgggctgcataagacatccacaaagcaaaatagaagaaacaacatctttgctttgtaagtttaggtacacattgtcctccccatcgtcca

SEQ ID NO: 105203 - DNA, 278 bp, Zea Mays
aaacttgtatctatttataatgagaaacccggtatggacagcaaacttgtatcaaagatggtagcttatggcaatgaggtgtgtttatgtttttggtttgttaatggcaggaagcggatggaaagaagattcagatccagctgacagggttcatggaaaagaacacagtgaagttcatgaaggagctgtggagccttctcctcagtgcgcagcagaatgccagtggggtgcctcaacagtttctggatgaaaaggaggctgagatacatcagaaaaag

SEQ ID NO: 105204 - DNA, 984 bp, Zea Mays
gcaataagcagataaccagcagcagcatatacatatgttaatggaagaaggcatcaaagagggggcaagcaaagcagcgggagcggcggccaccgaagcaggcgaggcgaacaagagcacgacggcgatgtcggacgtgacgttcaagagcatcggcgacgtgctgaagctgctgccgacggcgacggtgatcgtgtacgaggtgctgaacccgatcgcgaccaacgcgggcgactgcggcggcgctgccgccgggtacaaggtcgccacgggggtgctgctggggctctccgccttcttctgcgccttctcgaccttcaccgacagctacgtgggcgccgacggcaaggtcaagtacggcctcgtcacgccccggggcctcctcccattcaacgacggcggcggcggcggcggggcggcgaggagggacttctccaggtaccggctggggttcccggacttcgtgcacgccgccttcgccgtcgccgtgttcgcggcggtctccctgctggccgacgccaacaccgtggcgtgcttctacccgtcgctcagggaccagcagaagaaggtggtcatggcgctccccgtcgtcgtcggcgccgtcgccagcgtcgtcttcgccctcttcccctccacgcgccacgggatcgggtacccgccgtccaagcccgaggcgagcgcgctcgtcgcgtcgcagtagcgcgcggcgccgacgagagtcggggtcgagagctccattggtttcgcgcgaagttgtttgtatctataaatacgtacctctgtgcatacgtcatgcgtgtatcagtgtatgtatgcgtgacgttttcccacgcttgctttcatcgtctgacctgaccagtccctccaaaatcactgtgacccagagcaaggcagccagcttcacctggttcggcttaatacacttttgtatggattttcttttctatctttatctattacattaacatacagagtattaataca

SEQ ID NO: 105205 - DNA, 426 bp, Zea Mays
atggcgcggccaagcctggcggctcgatgcggcttcgtggccagccccggcggcgccctggccctcgcagccccatccccatgctcctcccctggcgtggcgcggcaattagccgacatggtggcccgccagccatggccgtgcatcctgctccctgtacccctcggcgtcccggcatgcgacgcggccaagcctggcctgcccgtagtggctagggcgagccccccccctccgttgctggcatgccctcccctgcgcggcaggccgtcaagccctttgtgcgcgacttcgttctccttgcgatggccggttcctatgtgcgcgctgtttctgctgattgaagaagagcataggaaatcccaccatccggatcttctgtggttgcgtccgctgcgactccggtatagcctcgttttcgtccaatag

SEQ ID NO: 105206 - DNA, 1841 bp, Zea Mays
aaacacccctaaattacgattattgttacggaagaggtgctcctctctctatctcccccacgatctccgttccttcccctccccgatctccccaatccgaccagaccggcaggcaccttcgactcgagcggagcaggcgaggcagagatggcgctgcgacgggcgctcctcagatcggtcaacttctcccccgacagcaaggctgcaattgagtacttttattctttctcaagggcacagtctgcttgttctctcaatggtgctggtctttgtcctgctagtagatcatttagcacccaggctgccactacgtcaagcacaccacagcctccacctccaccaccccctccagagaagactcactttggtggtctcaaagatgaggatcgcatttttcaccaacctctatggtctgcatgacccttttctgaaaggcgcggtgaagagaggtgactggtataggaccaaggatttggtgattaagggggcagactggatagttaatgaaatgaagaaatcaggtcttcggggtcgtggaggtgcaggttttccctctggtctgaaatggtcctttatgcccaaggtttctgatggacgcccttcttatcttgttgttaatgctgatgagagtgagcctggaacttgcaaagatagagaaatcatgcgccaagacccccacaagcttctggaaggatgccttattgctggagttggaatgagggcatcagctgcttacatctacattcgaggtgaatacgtgaatgagcgtctcaacctcgagaaagctcggcaggaagcatatgcagctggacttctcggtaagaatgcttgtggatctggttatgattttgatgtgcatattcattttggtgctggtgcgtacatctgtggtgaagagactgccctattagagagccttgaagggaagcagggcaaacctaggctgaagccacctttcccagccaatgctgggctttacggctgccccacaactgtgaccaatgttgaaactgtggctgtatccccaacaattcttaggcgtggtccagaatggttcgcaagctttgggcgcaagaacaactccggaaccaaactctactgcatctcaggtcatgtgaacaagccttgcaccgtggaagaggaaatgagcatacctctgaaggagttgctcgagaggcactgtggaggtgtgagaggaggatgggacaacctgcttgcagtaattcccggcggttcatccgttccccttttaccaaagcacatatgtgacgatgtgttgatggactacgacgcgctgaaggctgtgcagtctggattgggtaccgcagctgtcatcgtgatggacaaatctacggacgttgtcgacgcgattgccaggctgtcctacttctacaaacacgagagctgtgggcagtgcacgccctgccgagagggcacgccctggctctggatgatcatggagaggctcaaggttggtgacgcgaagctagaggaaatcgacatgcttcaggaggtcacgaagcaaatcgaagggcatactatctgtgccctcggggacgctgcggcgtggcctgtgcagggacttatcaggcacttcaggccggagttggagaggaggatccgcgagcgagctgaaagggagctgttggcggcttctgcatgatgtgccagccgcatgtactagttttctgatttctttctaccgaaataatacaaactgatggagctcctttctgtgtaagcaaatgctagcattcctgatttctttgaaccgtttatgtggatgtttatttgatgcactcaagcatctgacggattttgatggactaggtacacctttt

SEQ ID NO: 105207 - DNA, 1880 bp, Zea Mays
aaacacccctaaattacgattattgttacggaagaggtgctcctctctctatctcccccacgatctccgttccttcccctccccgatctccccaatccgaccagaccggcaggcaccttcgactcgagcggagcaggcgaggcagagatggcgctgcgacgggcgctcctcagatcggtcaacttctcccccgacagcaaggctgcaattgagtacttttattctttctcaagggcacagtctgcttgttctctcaatggtgctggtctttgtcctgctagtagatcatttagcacccaggctgccactacgtcaagcacaccacagcctccacctccaccaccccctccagagaagactcactttggtggtctcaaagatgaggatcgcatttttcaccaacctctatggtctgcatgacccttttctgaaaggcgcggtgaagagaggtgactggtataggaccaaggatttggtgattaagggggcagactggatagttaatgaaatgaagaaatcaggtcttcggggtcgtggaggtgcaggttttccctctggtctgaaatggtcctttatgcccaaggtttctgatggacgcccttcttatcttgttgttaatgctgatgagagtgagcctggaacttgcaaagatagagaaatcatgcgccaagacccccacaagcttctggaaggatgccttattgctggagttggaatgagggcatcagctgcttacatctacattcgaggtgaatacgtgaatgagcgtctcaacctcgagaaagctcggcaggaagcatatgcagctggacttctcggtaagaatgcttgtggatctggttatgattttgatgtgcatattcattttggtgctggtgcgtacatctgtggtgaagagactgccctattagagagccttgaagggaagcagggcaaacctaggctgaagccacctttcccagccaatgctgggctttacggctgccccacaactgtgaccaatgttgaaactgtggctgtatccccaacaattcttaggcgtggtccagaatggttcgcaagctttgggcgcaagaacaactccggaaccaaactctactgcatctcaggtcatgtgaacaagccttgcaccgtggaagaggaaatgagcatacctctgaaggagttgctcgagaggcactgtggaggtgtgagaggaggatgggacaacctgcttgcagtaattcccggcggttcatccgttccccttttaccaaagcacatatgtgacgatgtgttgatggactacgacgcgctgaaggctgtgcagtctggattgggtaccgcagctgtcatcgtgatggacaaatctacggacgttgtcgacgcgattgccaggctgtcctacttctacaaacacgagagctgtgggcagtgcacgccctgccgagagggcacgccctggctctggatgatcatggagaggctcaaggttggtgacgcgaagctagaggaaatcgacatgcttcaggaggtcacgaagcaaatcgaagggcatactatctgtgccctcggggacgctgcggcgtggcctgtgcagggacttatcaggcacttcaggccggagttggagaggaggatccgcgagcgagctgaaagggagctgttggcggcttctgcatgatgtgccagccgcatgtactagttttctgatttctttctaccgaaataatacaaactgatggagctcctttctgtgtaagcaaatgctagcattcctgatttctttgaaccgtttatgtggatgtttatttgatgcactcaagcatctgacggattttgatggactaggtacaccttttcatagtagaaacaaacttgagggttgtaccgtgtgtata

SEQ ID NO: 105208 - DNA, 1327 bp, Zea Mays
atcgctgctgctttattttgaccgccacacggaccctggttttctcgtccccgatggccatgcaccccctataaaaaaaggctcatactcgaacatacaagtcacacacaactcgctcgcaacacacacacacacacagagagagagagaggggggggaaagccggcagcatccatccatcgagatggtgaagaaaatgggagctagccgagcgcttgtgttggcagcagcaatgctggccatggccgtggcggccaagggtgccctgctgctgacggacaaggacctggagtcggaggagagcatgtggagtctgtacgagcggtggcgcagcgtgcacaccgtgtcgcgggacctcagggagaagcagagcaggttcgaggcgttcaaggcgaacgccaggcacatcggcgagttcaacaagaggaaagacgttccctacaagctcggcctcaacaagttcgcggacctgacgcaggaggagttcgtcagcaagtacacgggcgccaaggtcgtcgactccgaggccgccgccaggctcgccagcggcgtgcgcgtgtcgtccagcgacgagtcgccgccgcagctggccgcctccgtcggcgacgcgcccgacgcgtgggactggagagaccacggagccgtcaccgccgtgaaggaccaggggcagtgcggcagctgctgggccttctcggcagtgggcgcggtggagagcgtcaacgccatcgtcacgggcaacctgctcacgctgtcggagcagcagatgctcgactgctccggcgccggcgactgcacctacggcgggtacacgtactacgccatgctgtacgccatcagtaacgggcttaccctcgaccagtgcggcaagactccctactaccagcgctacgacgcccagcagcatctaccctgcagattcgacgcgaaaaagcctcctgtggtgaagatcgacagcatgtacgtgatgaacaacgccgacgaggccgccctgaagcgggcagtgtacaagcagccggtgtccgtgctcatcgacgccggcggcatcggctactacagcgagggcgtcttcacggggccgtgcgggacgtcgctgaaccacgccgtgctgctcgtcggctacggcgccaccgcggatggcaccaagtactggatcgtcaagaactcgtggggcgccgactggggcgagaagggatatttccgcctcaagcgcgacgtcggcacccagggcggtctctgtggcatcaccatgtaccccatttatcccatcaagaactgcccctgcccggcggcggcggctgctgttgcggcctactagcggccggagaga

SEQ ID NO: 105209 - DNA, 1614 bp, Zea Mays
aaaaaaaagtcccgtcgttttcctcacagttccttcgctctctggcctccgcttccactcccgcccgccccgccgtcgcgatgcacaagacggctcaggcctggttcaccggcgggaccgccgcctcctccggcgccgctgccgagtcgcagccgtccctgctcgctgactggaactcgtacgccgccacccgctccgacgcctcctcctcctccccgctccccttcgacatcgaagccgccgtccgctccgccaacgacaccgtctccggcaccttaagctcggtgaccaagggcgtgcgggagctgccggggagcttccagagcgccaccagcagcttcccctccggaaaggctctcatgtacttcggcctcttcctcgccaccggcatcttcttcgtcttcatcgccttcgcgctcttcctccccgtcatggtgctcatgccacagaagttcgccatctccttcacgctcgggtgcgcgctcatcattgcctcgctcttcgcgcttaaggggccagccaaccagctcgcccacatgacttccaaggagaggctaccgttttcagttggatttattggatgcatggtcggtacaatttatgtttctatggtgcttcacagctatttcctctctgtgatcttctcagtccttcaggtatgtccttggccagtgcaatttttgtctggtctgtattttttcaaatcttgctatactgtagaggtcacttgttttagtgctttaggcacacttcctgtttgtgaaacatctaaaacaggctgataatctgaataatgagttcacaatcagtgtcttcttcatttcgaagaggaaggaaagagtttgccttctccttcactcccaaaaaagaaaaagaaaacaaaataattctccttccctacttctctatcgaacaatacagtatcgtgataagctgtcatctggtctatggcttgtgaaactgcaatccctcagcattatcttgcgcattttgcttttcagactcatgcaatttttctctcttttctcaacccaggttctggcccttgcatattacaccatatcctacttccctggaggatctagtggactgaaattcatctcgtctggtctcttgtcctcggcaacaagctgttttggtcgatgaccttcctttgtcaattgtcatacatttatttgatcataccatgttatcgctttaagatttttgtatgtagctgctgatcatccctttgaggctttgtttggtactctagtattgactctaatcctcatgtgttgaggtggattgatgtgtaaattagtttatgttacacctcaatccacctcaatacatgtggattttggtcaatactagagtacccaaactaggtctgatagagattccatggtgtttcctctcctgtttgtttgtctagacttggactggtgttgaatatatagattatagtgtggaaatgattcgtcgcccctgtatctcattgactctgtgtcccttgtggctgtagattgtgaaagaaatatgctatgaccaatttaaaggtaacgctgtgggatgatgttgagattattgcaattctagaattgcattataaattgtcacgataattctacc

SEQ ID NO: 105210 - DNA, 1075 bp, Zea Mays
tcccgtcgttttcctcacagttccttcgctctctggcctccgcttccactcccgcccgccccgccgtcgcgatgcacaagacggctcaggcctggttcaccggcgggaccgccgcctcctccggcgccgctgccgagtcgcagccgtccctgctcgctgactggaactcgtacgccgccacccgctccgacgcctcctcctcctccccgctccccttcgacatcgaagccgccgtccgctccgccaacgacaccgtctccggcaccttaagctcggtgaccaagggcgtgcgggagctgccggggagcttccagagcgccaccagcagcttcccctccggaaaggctctcatgtacttcggcctcttcctcgccaccggcatcttcttcgtcttcatcgccttcgcgctcttcctccccgtcatggtgctcatgccacagaagttcgccatctccttcacgctcgggtgcgcgctcatcattgcctcgctcttcgcgcttaaggggccagccaaccagctcgcccacatgacttccaaggagaggctaccgttttcagttggatttattggatgcatggtcggtacaatttatgtttctatggtgcttcacagctatttcctctctgtgatcttctcagtccttcaggttctggcccttgcatattacaccatatcctacttccctggaggatctagtggactgaaattcatctcgtctggtctcttgtcctcggcaacaagctgttttggtcgatgaccttcctttgtcaattgtcatacatttatttgatcataccatgttatcgctttaagatttttgtatgtagctgctgatcatccctttgaggctttgtttggtactctagtattgactctaatcctcatgtgttgaggtggattgatgtgtaaattagtttatgttacacctcaatccacctcaatacatgtggattttggtcaatactagagtacccaaactaggtctgatagagattccatggtgtttcctctcctgtttgtttgtctagacttggactggtgttgaatatatagattatagtgtggaaatgattc

SEQ ID NO: 105211 - DNA, 1312 bp, Zea Mays
gacagactgtagcaataattggtcgctccccgatccatctgggtttcgcctgccagcggcgagatgtccttcttcttccgggccgcatcgcggcagcgcccgttgccgcaggagatcgcgcgctccctcaaggactccctcgttgccctcgacaccaagaccggcgccaaggctctcgaggatgctgagaaaaacatacttacattgaggcatacgcttgctggcgatggagaagtggaaccaaatcaagagcaggttttgcagatagcccttgagatttgcaaggagggtgttctttccctctttgttcagaatcttccttcattgggttgggaggctagaaaggatcttgtccactgctggtgtattttgttgagacagaaggttgatgaaagctattgttgtgtccagtatattgaaaatcattttgatcttttggatttccttgttgtttgctataagaacttggaagtcgcgttgaattgtgggaacatgttgcgagaatgcataaaatatcctacacttgcaaaatatatattggagtcaagcagcttcgagttgtttttccagtatgttgaattgtcaaacttcgatattgcatctgatgctctgaacactttcaaggatttgctaaccaaacatgaagatgccgtctctgaatttctgagctcacattatgaacagttttttggactctacacaaaacttttatcttcaactaattatgtgacacgaagacaatcagtgaagtttctttcagagtttctgttggaggccccaaatgctcaaataatgaagcgttacattttggaagttcattacttaaacattatgatgggcctgctaaaggattcaagcaaaaatatcaggatatgtgccttccacatttttaaggtatttgttgccaatccaaacaagcctcgtgagattattcaggttttggttgagaatcacagagaagtgttgaagctactccacaatctccccacaagcaaaggtgaagatgaacagcttgatgaggagagagatttaattatcaaagaaatcgagaagcttgtgcggttgtcagtataaaccctcaggaaattcgagcgtatccttgaagacatactgtgcaatatgctgccttgtatagagcttgtttttcatgtatggaaaaaaagtttggccacaaattgcattcttcacgagaacacttagcatttctgtcagaaaattattttcgtgtagcagaatttgcaacaggaataatctgcattatggtgtggtgttgataccattaaggattggtgaaagtgcctgccatttgaaa

SEQ ID NO: 105212 - DNA, 1323 bp, Zea Mays
gacagactgtagcaataattggtcgctccccgatccatctgggtttcgcctgccagcggcgagatgtccttcttcttccgggccgcatcgcggcagcgcccgttgccgcaggagatcgcgcgctccctcaaggactccctcgttgccctcgacaccaagaccggcgccaaggctctcgaggatgctgagaaaaacatacttacattgaggcatacgcttgctggcgatggagaagtggaaccaaatcaagagcaggttttgcagatagcccttgagatttgcaaggagggtgttctttccctctttgttcagaatcttccttcattgggttgggaggctagaaaggatcttgtccactgctggtgtattttgttgagacagaaggttgatgaaagctattgttgtgtccagtatattgaaaatcattttgatcttttggatttccttgttgtttgctataagaacttggaagtcgcgttgaattgtgggaacatgttgcgagaatgcataaaatatcctacacttgcaaatgctctttcagatatatattggagtcaagcagcttcgagttgtttttccagtatgttgaattgtcaaacttcgatattgcatctgatgctctgaacactttcaaggatttgctaaccaaacatgaagatgccgtctctgaatttctgagctcacattatgaacagttttttggactctacacaaaacttttatcttcaactaattatgtgacacgaagacaatcagtgaagtttctttcagagtttctgttggaggccccaaatgctcaaataatgaagcgttacattttggaagttcattacttaaacattatgatgggcctgctaaaggattcaagcaaaaatatcaggatatgtgccttccacatttttaaggtatttgttgccaatccaaacaagcctcgtgagattattcaggttttggttgagaatcacagagaagtgttgaagctactccacaatctccccacaagcaaaggtgaagatgaacagcttgatgaggagagagatttaattatcaaagaaatcgagaagcttgtgcggttgtcagtataaaccctcaggaaattcgagcgtatccttgaagacatactgtgcaatatgctgccttgtatagagcttgtttttcatgtatggaaaaaaagtttggccacaaattgcattcttcacgagaacacttagcatttctgtcagaaaattattttcgtgtagcagaatttgcaacaggaataatctgcattatggtgtggtgttgataccattaaggattggtgaaagtgcctgccatttgaaa

SEQ ID NO: 105213 - DNA, 545 bp, Zea Mays
tgcagtgtcatcaaactcgatcggatgttgctaacaataaacggtacagacagattgctaatagcaacctggataaaatggtttataaacattttagagattttttcggagatagagagagagactgtgtgtgtttttgaggaaagagtgagaaatgctatggtaattcttttcccggtgaactgggcctctgtgtcggcctggtagagcccagaaattattagcccacggagcgaatccacaaaggacgtgccctcccccctcgttccgatgtttgtttcggttgcgtcaggtcagcctccctctccggatcccccacctgctccgccgccggccaacgcatcgctccccttggcagccaggttcgcgtcgggctctctccttccctttgccgtaaaccggtgccgtcgcgccgattcgtccccgaatctggagggggcgaagggcgcttagtttacctattttgttccattctgatttggtctcgccgaatgcatcgcctgcgtcgctgggatctgcgctggcgcgtgtgtgacgcgcctgcg

SEQ ID NO: 105214 - DNA, 857 bp, Zea Mays
atagagagagagactgtgtgtgtttttgaggaaagagtgagaaatgctatggtaattcttttcccggtgaactgggcctctgtgtcggcctggtagagcccagaaattattagcccacggagcgaatccacaaaggacgtgccctcccccctcgttccgatgtttgtttcggttgcgtcaggtcagcctccctctccggatcccccacctgctccgccgccggccaacgcatcgctccccttggcagccaggatgacagaagcaccatttctgccacgtgagaggctcttcaagctgcaacatcatttccagaacatgaccaagcacacctacctgaaagggcgctacgatgtgatcacctccgttgccatccctcttgcacttgctgcctccagcatgttcatgattgggcgtggagtttacaacatgtctcatggaattgggaaaaaggagtgatctaccacgggttaactagtttttctacttggcatggaagtaccatccagactatgaagtcttctttgcttgctaaataatactgtcaaagaacaagtcgactacatttttgcatcatatttctgtttgtatttgtggatatgaaatgccatcaacttgaagatcagcattgttactattttggttaattactccattcctgtcgctgtttgtgtcctttcaattgaagctagccttatatttttttctgaggtccagtcatcttactcagttcatcagctgctccgcaccacgtcatgcacaaatctcaaatctggctgaagcatgcacgcaagaggcatcttgtgcacaaaactgtcaaaccaagcggaaattatggtcaattgctatcttaggctagg

SEQ ID NO: 105215 - DNA, 1670 bp, Zea Mays
agttctttgctttgcccttcctccgcccccttcctccccccgcgctgcctgccgtaggtacgggaagggaaaaaagtcggcgccaaatctccgcatccattcgcacgccgcgattcttgtgcgcgatccgccgcgcgatgatgatcccgtggggcggcgtggggtgttgcctcagcgctgcggcgctgtatctcctcgggaggagcagcggaagggatgcggaggtgctgcggtcggtggcgagggctggcagcatgaaggatttagctgctatcttggacactgcaagtaaagtcctaccacttgtagttgccgtctctgggagagttggttcagacacaccacttatatgccaacaaagcggcatgagaggtgtgatcgttgaggaaacggcagaacaacacttcttgaagcacaacgatgctggatcctggattcaagattctgcagttatgctttctgttagcaaagaggttccatggtatctggatgatggaactggacgtgtatatatggttggtgctcgttctgcagctggtttaattttaactgttgccagtgaggtttttgaggagtcagggaggacacttgtacgtggaactctagattatttacaagggttgaagatgctgggagtaaaacgaactgaaagggttcttccaactggaatctcattgacagttgttggtgaggctattaaagatgatgttggaactattagaattcagcgaccgcataaaggacccttctatgtatcaccaaaaagcatcgatcaacttattatgaatcttggaaaatgggccaagttataccgccttgcttcaatgggctttgcaacatttggtgccttccttcttgcaaagcgtgcaatacaacattttctagaaagaaagcgccggcatgaactgcaaaaaagggttcttaatgcagcagcacaaaggcaagctagagaagctgaagggagcattggttcatcggacacagagcctaacagtaaaaaagaccaattagtgttggacatatgtgtcatatgccttgagcaagagtacaatgctgtttttgtgccgtgcggtcacatgtgttgctgtatggcatgctcttcacatttgacaaactgcccgctttgccggagaagaattgaccaagctgtcagaacattccgccattgacggtgataccacgtgcactgcttttgaaaccagttggctattggaagtgctggctcctgtcaaccaacgatatgaactgcaaaactgggtcgtagcagcttcttcatggagtttgcttttcgaacagaacagcgagtgatgcaagttgcaagctcatgattggcagttaagaaagataccctactgagatagtgccaatgggtgctcttgcatgtaatgtactactactacaactgtgtacaggacacttgtgtaaatgcacataggttagcagcttgcttcttgactaacacctaatgggcatttatgttgtgctaaccgaatgacaaaattagctcgtttagttgtgataatcgttttttctagtgagtggggaatgatacggatatctccgttcttttgtgctcacaggatcataagaaacagaaaagatttgtaacatgttctatattttactgctcattttgtaacctgaatgtgaggacaacatgttggcgcatt

SEQ ID NO: 105216 - DNA, 774 bp, Zea Mays
atgtgcccctccactaggcgcttcgctccgcgtcgccaattgccaacaaccaccgagatccagcgtaggaaacgagataatctggcggcgagaaacaaaggcaaggtcgtgcccctgctcaggtgccccacaccacgcgttaccctaaacccttcccctgtctggcatgctgtccccgccctccttgagcccgaggtagctcccgctcgcccgccacttctctccaccaccaccgcatcccgtctctcgcgcacgcacagagatttacataaccacctcggatttaccctgaaactgcctccaaaaattctggatgcaacatcaaatactgccacatatgacctgttagttgcatgtatcaattgtggcataaaccatttatcaaatctgatattgtctcatgttaccaaagaaaagagactgagagaccgcaccgagccagataagaggcatgctcatttctctaaaggatttatttattgttcttgggatgcttcttggttgtatagtggcactaggttggtgttacatgtatgcctccagcacaccattatgtctcatgatgggaattggaatgtgctggtcgttttagtttttctagatgcagggcgacaccgatggaggccgacgaagcgggcggacgtggactacgctagggtggggtggttccaggtgtggcacattgcacaggcgaagccccaagaggccacagccgcagaggtgtgtgtcgtgcgtggggattatgatatccggattatgattcaagaaaagtga

SEQ ID NO: 105217 - DNA, 1816 bp, Zea Mays
accgaaatgcatgtcctaaaccctaacgtagctcctacactgcaccgccaacttcaccgcacgagccaaaacggcggccatgtccgtccgccccagtcctacccggcttatgcacgcggcgaagagtggtgccgtcgtcacccttcgcaggtgcagcctcacctccaggagcgccttcttcctcgaccaatttgcctccgtccaggcttcgaccgagctcgtgaacctcctcctgggcgaccatcgcattgaatgtgacgctcgtgaacctcctcccgagttcgtgaacctcctctcacacgccaatccccttactctgttgtgcctccgccccctcccagcatctagcgcgcactgccatcctctgcgccccatcgtctaccgtgaggcatccatccctccttctcccacacactcggatcctccgaacacgccaccaagctcaacgcgatggccgcaccccgcctccctgccccaccgccggcgaggtgcaccgtcgccaccagaggacgagcacgagcaacagaagaccttgaggagaagcccaccatcgaggatatgtccgtcttctccgctgccactgtgccgcctcgcccagccacgcagatacgtggatttgatccaccaccagctcgagtttttgcttggcattgccctggagttggatgcattcaagtattgtaagatccttcttttttggttatttccttgcataaatatcattttgcgatgatgttttgttaaaatactactgattgccattacaccgataagcccaactaggggatgacttgataaccttgcttaccaatattgttattatttgattagtgcaaatagttgcttcatatggaggatgcacaggtgcaaacaatcttgataagaatggtaaactagactggtatgccagacatgtctactatttttcacatgtttttagtcacctgtttgagtgatggtgaaccttacaatgacacctgacagaactatctcaatcccgcgtttattttagaggagatttcgagtgggtgagcgcggcaacgacatgttgacaggagacggcgggaagcgctcgacaagctaattaacttgaaaggagaggatcacggtcaagtcagtcgggattaagaaagagttcgatgctgatagggtctttgggcaggagtatgcacaaggtagcctcagtgataacttctttgcgatcattgtgccgactgagtacgattgtttaacggccagcactaggaagaaggaaattgttgatgtcatagttaaggctttcaagagcacatgagtatgaacctgaggtggcttgctggcgtacatggagtggtgacagattgcatgctggtagttgatgaaactggtgggatatttgagaaaggtggaatttagatctactgtaagcagtgggaaaagtaggctatttcctgtagaggttctatttaataatgaaaatggaataggcattgaaaaaacaagagatgaagctcaagctcaagatgctgagaaaactctccaaaatttaaagaaatttggtagagaagagtcaaaatctcagccaggaaacacactcgatgatgaggatataaagctattaggtgatgatgaggatgctttagcagatgatgaatgaaggacatcgctgttggagaagtacctatgttgattgcagggttttgcaatggattgtcttatctctaaagattgtagtctaggtatctaaacgaggaactaacatgtactagattgtattgtcgtagatgtttgtttgtgagagaacatttgtgaagttacggggtgaccagttgatcac

SEQ ID NO: 105218 - DNA, 716 bp, Zea Mays
gtttgttccttgtaggctaggtcgattattttggagcccgatttattctctgtaggctggttcttttttagcccagtttgcctggaagaacagagggcagcagatatggatctgttgcctggaagaacagagtcgagtggaaaagaaaacaatttgttctgccatagcggtctcgtgtatggacatgaatctgttgcctggaagaaccgagttgagtggaaaagaaaacaatttgttctatggatccccaatctgtagtcttatctgatggtgaaggaggtcctttattcgatcccaatctgtagtctgatggataccacttcacatttctttttaataatgtgcgagtagtttggtggaatgctttatggtgaccttgcaagatttgttctatgtttgctagggatcaaaacaaaactgtcttatttgtagcatatctttttcattagcggctttaaagtgattgttgtaagcctttattatgtagtgacaatagagtactgctaaaaggatcatttttacacactccactatgaaaccgatttctcaatcaatttgtttgacatttgataattaatacagtaatactcgcctgcttgcttctgtccttgttttgatctttagatcagttctagataaagactaaataacatcaatattgtagtaatggctaacacaacatgttctaggcttggggaaacccgaaatatggcact

SEQ ID NO: 105219 - DNA, 342 bp, Zea Mays
ggtgaagttgttctgctgttccagccagtgctaatcctctcccttgctgcagagttaagttgttcctgagctgtgtcaaccccccctgtgtggtgagcacactcatagttctcacctcgctgtggccagaagtacgccgccacagaccgaagacatggatagccctgctctaccccgcgtcatccccgcccaggttcttgcgaacactattgtcgtgaacgcgaagaagaagtggaagtgactgaagaaaagacatcaccacctttggaatctcaggcagagacttggctctacttcgacatctgcgagtccgagcctgactcacctactaacaaaggcaag

SEQ ID NO: 105220 - DNA, 3300 bp, Zea Mays
tccttcctgatacattcgtgtctcccatcgccaggtagatccctttcctcacgccacgccgagagagaaaagatagagggagaggcaagagtcgcatcgcagacccagaccacgccgccgccacctccgccgccacttccgccggtgatcgagtcgcgtcggcgctaccttcaagctagaagacaataagcatcggcagacatgttcggctccaccaacccatttgggcagtcgtccacaagcccatttggccagacctcgtttggaactccacagggatttggccagtcttccactgctgccaacaatccttttgccccaaaaccatttggcagcccgaccacagcttttggggcacagaccggaagctcgctctttgcaactacatccactggtgcctttggccagcagcaatccactcccgcatttggcacaacatccactggtgcctttggccagcagcaatccactcccacatttggcacaacatcctcatctcagtttgggagctctacaccagccttcggtgcatcccccactcctgcctttggtgccacatcctctggatctttgttcggacagaagccaagttttgggggttttggatcatcttctagccagtcaagtccttttggtaacacgttccagcaaacacaaccaacatttggcagcagcacttttggttcatcaactccgccggcgtttggtgccacggctcctgcatttggcacaactacaccagcctttggcaccacaactgcaccagccttcggtgccacgactagcccagcatttggttcaacttcaacatctttatttggtgcttctagcgccccaatgtttggttcttcagcctttggcacatctgctactggttttggaacttcagggactacagcatttggtgtgagtagtactactccgggttttggatcatcaagcacaccttcatttggcacatcagctagtgcgttcagttttggttcgtcaccatcttttggacaaacagcagtttcctctggtagcactccctttggaacaactccctcaccttttggtgcaccagctcctgcgtttggctcacagacagcagcaccaacttttggacaaccacaatttgctaatcaagctggaggaaccagaataaaaccttattctcaaacaccagatgttgacagtgctactagtggtactcagcctgctgcaaaacttgattccatatcagcaatgcctgagtacaaagagaagagtcatgaagaattgaggtgggaagactaccagcgtggagacaagggtggaccgaacacttctggaactcaaacattggcacctagctttccatcaccaatacaacataacacttttgcttcgacaagtaatccgttctcaacgaacccattttcaacaaacaacccgtttgctcctaagcccactacaactactagttcaccattcaacacctcatttaacaatgcatcagttgcaagttcgagtctattcacatcatcccctggtaccacaatgtttgggcaaccaggtgtttctacacttccagctccagcaagtaattcaccatcattatttggaaatatcaatcctgctcctgctacatcgtcaatatttgccacgtcagtgacgaataatccaagtccattcggcactggcacatcattggctaacactcaatcagccccactattttcctcagcatttgctcaaccgacatcaagtacaccggctttctcctctgggagcctatttggctcaactaatcctggcagtctgtttaccagcagcggtccttcacttttttcaacaccaacatttcaaccatctgcccctgctcagagttcgaacatgttctccttccaacccccaattcaaccagcagcttctaccggtggactcccttttttccccaacacaaatcaggccttgacgggacagccaacttctagcctgtccagtatggtcatgcagtctgctcttgtttcaaatccatttgggatgcttccagcaatgcctcagatgtccatcgggaatggtggatcttcaccttcagttcaatatggaatatcaagtttgccggttgcggagaagcctcttccaagtagatcattgtccatggcggttcctaggcatttgtcacagagaaggataaaactgctgccaagaaaatataatccaatatctgatggcaaggttccattctttgctgatgatgaagaatctccagcaacaccaaaggcagatgcttttttcatccctagagagaacccaaggaacctggtaattcgtccaattgagcagtggtcttcacggagagaaactggccggcaatatactgcaaagaatgttactgattcgaacaaatatgaagatgcttccattgaaagtgagcgtggtaagtctgccatgtcaccaagcagcaggccacctgcagtggaaaatgacaaacagcatgaggccagggccatggctcaacatgcgaatggaaatggtacttcagttgagaggctgttgcctaagcttccacgtgcagattacttcacagagcctagtatagaggagcttgcggccaaagaacgtgcggagccaggctactgcggtcgagtgagggacttcgttgtgggtcgacatgactacggcagcatcaaatttttcggggagacggacgtgaggtgcctcgatctggagtcaattgtggagtttaacgaccgggaggttattgtgtacaaggacgatagcaagaagccccctgtgggcgaggggctgaacaaggctgcagaggtgactctactgaacatcaagtgcgtaaacaagaagaccggggagccgtgccagggggcaagagtggagaggtacagggagatgctggtgaagaaggcggaggagcagggcgcagagtttgtgtccttcgacgctgtcaagggagagtggaagttcagggtgaagcacttcagcgcctacgggctttggtgaaatcctggggagttaagtagtttgtttgttctgatggaacaacgctttacgctcttgtcaattaccatgcttggatctgttgtgctgcttctgtacaatgttgctgctgttaaaatgcttgcaaattgcactgctctgctgctgaaaacaggagcagcagtagaaactaccgcaacaggagggcgtgctacctgctactgttatgtattattattattatactatattctaagtataataagacttagttttttaaatacatgaatattactttatgcacttagatatatgctatgtatggagagaaaataattatat

SEQ ID NO: 105221 - DNA, 362 bp, Zea Mays
gggagcacagaagggatctacaatctctgatgaaaacaacaaagcgactgcaatgggaggggatattcaggaaatatacgacaaactaaaagattcttcattgcccgaaggctttttcacagaggaacggccttggaaggatgtatatatatcacagaactccttaattgtatcaaagaggatcatctgaaggattttgaacaagagtattgtttagcagaaaagatagaggccacaaaggccgggtctctttcaacccttccctctctcaaacggtccctcggaccgagtgagcttctcttctcaaatcaaagccgggaacaaaacttccccgcaagggccaccacacaattggtgcctct

SEQ ID NO: 105222 - DNA, 156 bp, Zea Mays
atgaagcactcggcggtgaggctggggctggtgaaatcacatagaaacgaattgccaggaaatcacaaactgcaccgcacagctcgttgttcgttgcatagaagactcaaactttgtcagcggcatccagtgatgtgccgccctctgaactcctga

SEQ ID NO: 105223 - DNA, 216 bp, Zea Mays
atgcacccttcttcgcctccctccccctccactgctccttccacaacgacgcatagagcaaaaaccgaggaggcgatgacgaccgcaagacgctgctgcctgcgaagctatatggcgacaacgagccgctgctggcgcccaaggtcgcggtcaacgacagcgacttcaacccaatcccggaggacgaggagaaggggaaatgatgccctattttga

SEQ ID NO: 105224 - DNA, 468 bp, Zea Mays
atgagttctactgctgctctggctcctcgtcctcctattccgccgcgtcgaccaggtcgtgctctgctcgccgaggccacaagcgcgctgttccataccgaggcagagaaaaggcggaagggcgtgtggatcgagatcgacagctgcggcgacgacaaccagatcgagaggagcagcgccgtggccagcgaagggagcaccgtcacggccgcagcgtccgcgggctccacagccacgtcggggacatgccgccgggctccgcgggcgggttgtgctgctggcgggaagaagccgagggaagcagacgtgatcatgcaatggttttcgcggccgcaagctgggccggccaccgagaatgacatctgcgccgccgtcggcgacaactccggcacgagcaaggcgatacgctggctgctgaagcaggtgggcggaaatgcgggcgggcgggtaaagggattcgttggataa

SEQ ID NO: 105225 - DNA, 712 bp, Zea Mays
acccaagtcgaccccaagcgcggaccaatccgcaggatgatgctgatggacgaaccggaagatggataatctgaacgagtaccaagccaaaggatactcgccaagtcgtcgtctaacaacactaacccagtgttactcaggcaagccccagtgcatgcaaccccttccttgtgtttttaaataattttttcacactttaagtctagtgaaatgtgcattaggtttataggagtttcttggaaccctttgatgcattgccttccttgatatccatacctttatagatacttctgatgaagtatcaaaatatgatttacaaaattgcttagccctgcttagatcttgtggatagaggttgtcttttgcattaaggccttgctcaggggttatcctgaggaaagatggcttctacctgcaagattattttcattgggagcaatggtgggatcttactgcaaagttccctataatgctcttttcatcctaaggaatacaaacaatcctaaggatggaagtacttaaatcgggacttgggctaggaacaggtgatgttctacccaggttgattaaggattggatgcgtatgtagccttgatgatcgaggaccctttaactggtcacatgcctcgtcatgggtaagctttgcctcgggtagactaaggccaaaataagataacacgcaatgggagtggggcggtggcgagagtagcgt

SEQ ID NO: 105226 - DNA, 2654 bp, Zea Mays
cgcggccgaaggcttcctgttccaaaccatgcgtgcctgccagcacgctggcacgcagcactgcagcagcgcaaactcccgatcagatccacagcgattcggccaagtccccagcccttctcccgccgcatcaccaccaccacctcttctctgccccctcgatctccagatcgccttcgcaattcctccgtgtagcgcccctgtcctgggcgagcacgagcgcgcgtgcgcgcccagatctgcgcggtctcgccggcgatggcgtgcattaagagcgcgcatcgggcggcgctaacggcgctggcgccggacgcgccgtacctcgccgcgggcaccatgaccggcgccgtcgacttgagcttctccgcatccgccaacatcgagatcttccgcctcgacttccagtccgactccacggacttgccgatcctcgcctccgcgccctccccggaccgcttcaaccgcctctcctggtcgcgcccaggcgccgtcgagggcgactccttcgcgctcggactcctcgctgggggcctcagcgacggctccgttgccgtgtggaacccactgagcatgatcagctccgaggggaaagcggaggacgccatggtcgcgcgccttgagaagcacaccggaccggtgtgtggactggagttcagcgagctcacgccgaatcggctcgcttctggggctgagcagggggagctttgcatctgggatctcaagaatcccgttgagccaatcgtgtacccgccactcaagagtgttgggtcccatgcccaagctgaaatctcttgtttatcctggaatcccaagtttcaacatatagttgcctcaacttcgagtaatgggatgacagttgtttgggatttaaggaaccagaaaccactgactagtttttcagattcaaatagaaggaaatgctctgtgcttcaatggaatccagatatgtccacccagctgattgttgcatcagacgatgacaactctccctcactgagagtttgggatgtgaggaagaccatttcaccagtaagagaatttgttggccattcaaaaggtgtaatcgctatgtcgtggtgcccctatgatagttcattcttgcttacatgttcaaaagacaataggacaatttgttgggacactgttagtggagagattattagtgaactacccgcaagtgctaattggaactttgaccttcactggtaccggaaaataccaggtgtcattgcagcatcctcatttgatgggaaaattggcatatacaacctagagttctctggtctttatgcgactggtgatgctgttggtgccccagtgcgtccaagggctccagctccaaaatggttgaaatgccccaccggtgcatcttttggtttcggtggtaaacttgtttctttccatccggtggcacccacccaaggtgcacaaacatctacatctgaggtgcatgtgcacaatttggtgattgagcaaagtctggtgagccgatcaactgaatttgaagctgctattcagaatggtgacaaaagttcgctgcgtgctctgtgtgaaaaaaaatcacaagaatctttatctgacgaggagagagaaacctggggcttcttaagggttatgtttgaggacggggattttgcaaggacaaaattgcttgctcatcttggcttcgaaccacctcaggcaccgcctgcaagttcaactgatgaattgagccaaacattggcagatacacttaatattgatcatgctgcagtaaccgataatgcggatgcccagtttcttattgataatggggatgattttttcaacaatcctcgaccttcagaggctagcttggctgaagaatcagtttctacaaatggtcaacagatagaacaggaagtttctggagattctgtgccatcagatccatcaattgacaaaagcattcaacatgcgttggtggttggagactacaaaggggcagttaaccagtgtcttgcttctaatcgtatggctgatgctttggttatagcccatgccggtggttctgctctctgggaaagcacaagaaaccattatctcaagaacagtatctcgccctacttaaaggttgtctctgctatggtgggcaatgatttaatgagttttgtgagtacctggccactaagttcatggaaggaaactcttgctctgctttgcacatttgcacagaaagaggagtggcatattttgtgtgacacacttgcgtctaggcttctgaatgtcggtgatacactagctgcgaccctctgttatatttgtgctggaaatattgacaaagctgttgaaatatggtcccgcaccttgaaatctgaagatggtgggaagacttatgttgatcttctccaggatttgatggaaaaaaccattacgcttgcccttgctacgggccagaagagatttagcgcgtcactgtctaagcttattgagaactacgctgaattgctggctagtcaaggtcttcttaaaactgcaatggagtatttaaaactgttgggatcagatgaacactcgcatgagctggcaattttgagagatcgaattgcatgttctacagaaggtcacttcaaacatatatcactttattttctcttccgttattctgtctttcattggtttgaagttttccatct

SEQ ID NO: 105227 - DNA, 4167 bp, Zea Mays
cgcggccgaaggcttcctgttccaaaccatgcgtgcctgccagcacgctggcacgcagcactgcagcagcgcaaactcccgatcagatccacagcgattcggccaagtccccagcccttctcccgccgcatcaccaccaccacctcttctctgccccctcgatctccagatcgccttcgcaattcctccgtgtagcgcccctgtcctgggcgagcacgagcgcgcgtgcgcgcccagatctgcgcggtctcgccggcgatggcgtgcattaagagcgcgcatcgggcggcgctaacggcgctggcgccggacgcgccgtacctcgccgcgggcaccatgaccggcgccgtcgacttgagcttctccgcatccgccaacatcgagatcttccgcctcgacttccagtccgactccacggacttgccgatcctcgcctccgcgccctccccggaccgcttcaaccgcctctcctggtcgcgcccaggcgccgtcgagggcgactccttcgcgctcggactcctcgctgggggcctcagcgacggctccgttgccgtgtggaacccactgagcatgatcagctccgaggggaaagcggaggacgccatggtcgcgcgccttgagaagcacaccggaccggtgtgtggactggagttcagcgagctcacgccgaatcggctcgcttctggggctgagcagggggagctttgcatctgggatctcaagaatcccgttgagccaatcgtgtacccgccactcaagagtgttgggtcccatgcccaagctgaaatctcttgtttatcctggaatcccaagtttcaacatatagttgcctcaacttcgagtaatgggatgacagttgtttgggatttaaggaaccagaaaccactgactagtttttcagattcaaatagaaggaaatgctctgtgcttcaatggaatccagatatgtccacccagctgattgttgcatcagacgatgacaactctccctcactgagagtttgggatgtgaggaagaccatttcaccagtaagagaatttgttggccattcaaaaggtgtaatcgctatgtcgtggtgcccctatgatagttcattcttgcttacatgttcaaaagacaataggacaatttgttgggacactgttagtggagagattattagtgaactacccgcaagtgctaattggaactttgaccttcactggtaccggaaaataccaggtgtcattgcagcatcctcatttgatgggaaaattggcatatacaacctagagttctctggtctttatgcgactggtgatgctgttggtgccccagtgcgtccaagggctccagctccaaaatggttgaaatgccccaccggtgcatcttttggtttcggtggtaaacttgtttctttccatccggtggcacccacccaaggtgcacaaacatctacatctgaggtgcatgtgcacaatttggtgattgagcaaagtctggtgagccgatcaactgaatttgaagctgctattcagaatggtgacaaaagttcgctgcgtgctctgtgtgaaaaaaaatcacaagaatctttatctgacgaggagagagaaacctggggcttcttaagggttatgtttgaggacggggattttgcaaggacaaaattgcttgctcatcttggcttcgaaccacctcaggcaccgcctgcaagttcaactgatgaattgagccaaacattggcagatacacttaatattgatcatgctgcagtaaccgataatgcggatgcccagtttcttattgataatggggatgattttttcaacaatcctcgaccttcagaggctagcttggctgaagaatcagtttctacaaatggtcaacagatagaacaggaagtttctggagattctgtgccatcagatccatcaattgacaaaagcattcaacatgcgttggtggttggagactacaaaggggcagttaaccagtgtcttgcttctaatcgtatggctgatgctttggttatagcccatgccggtggttctgctctctgggaaagcacaagaaaccattatctcaagaacagtatctcgccctacttaaaggttgtctctgctatggtgggcaatgatttaatgagttttgtgagtacctggccactaagttcatggaaggaaactcttgctctgctttgcacatttgcacagaaagaggagtggcatattttgtgtgacacacttgcgtctaggcttctgaatgtcggtgatacactagctgcgaccctctgttatatttgtgctggaaatattgacaaagctgttgaaatatggtcccgcaccttgaaatctgaagatggtgggaagacttatgttgatcttctccaggatttgatggaaaaaaccattacgcttgcccttgctacgggccagaagagatttagcgcgtcactgtctaagcttattgagaactacgctgaattgctggctagtcaaggtcttcttaaaactgcaatggagtatttaaaactgttgggatcagatgaacactcgcatgagctggcaattttgagagatcgaattgcatgttctacagaagagaatgataatgttagttctgtttctgaaagcacgggcactccttccccctatgtcacaaatcaaccttataccaccccagaccattctcagaatgtttaccaggtacctcaaccatacaatgtgccaagcaatacatattcagaagcttacccacaacaaggtacaggagcctatggatacaacaatgcatatcaacctcagcaaccagccaatatgtttgttccacctagcacacctcccaacactcagcaacagccaggcccttcacatgtaccagtgcctcagcaaacagtaaagacatttactcctgcgaacccagctggtctaaaaaacccgggacaatatcagcaacctaataccttaggttcccagctttacacgggcgctacgaatcaaccgtattcttctggaccatctgctccttatccaagcggacctccaacaacatttcatcagcctgtagcacctgttcaatatcagagtgctgctccaccagtatcttcttttggtccaaccacccctgtaccaggaacagtccctaaccagatgtttccccattctgctgctactaactcgacttccaggtttatgccatcgaacaatcaaagctttgctccaaggccaggtttaagtcctgtgcagccctcaagtccaacacaggtgcaggcacagccagctcctcctgcacctcccgcgactgtgcagacagctgatacgacaaaagtgtctgctgagctgagacctgttattggtacactaaccagactattcgacgagacgaccaaagccttgggaggatcacaagctactcaagcaaaaaaacgtgaaattgaggacaattcgaggaaaataggggcattattttcaaaactaaatagtggtgacatatctccaaacgtttcatcaaaactcattcagctgtgcagtgcgattgatgctagcgattttgtcaccgcgatgcacctccaggtactcttaacgacaagcgactgggacgagtgcaacttctggcttgcggcattgaagcggatgatcaagacaaggcagaatttcagaatgtaaaccttgtgtggccttctcctgcacccagttatgtacacaccttttcccgctgcttgccagaaatgatagcgtttgcggttcagaggattctccagcacagcggttgttatcatgcagcttttgctctgggcctttgattctgcctgcgagttggtgaaatcgccctgatacttccgtgctcttatatacatttcgataatagttttggtttttctgacatctactgtaaggtgacctgttgctgggttgttggttatctgaatattaattgtaagaggccacttagtctgttatagctggtggatcgcctttatcaaacaatattttttttttttgcactgagaattctgtcagttcggacattcgaagaactctagatggttaatacgagtgacagtggcttgtttttttattggtactgtcaaaaagaaatcaataaacctgtggatttttgaggtccgtattgcctgttggacgtgccgcttgtgctcttcgcagccgttgacttccggctaggatgcc

SEQ ID NO: 105228 - DNA, 1958 bp, Zea Mays
aacctctaaccgccaattgttttctatactcttttgctaagccgagccatacccgcccgctccttttctcatagtcatccgggaaacattctctcgacggccatggtgcagcagcagcaacagcacagaatctacatcttgcagttcaggaagggcgggccggagcaggaggtgtcatgcaaggtgtcgcagcccaagggcggcggccggcggccggtcatgtactactaccaggaccacggcagcggcggcggcaagaacggcaagaaggtgcaacctagggcgctgggcctgcggcgtttcttgggcatgctcttcctctccttcctctgcgtggggacgctgttcgtggcgcccgtgtccttcctctccttcgtgcatagcgacgaaggcggctcggcggcagcggcagcggcagcggcggcgaccgccgccgtgcgtggcggggtgtccgagccgtgctcggccgtggggaacgacagcctctgctgcgaccgcacgtcggagcgcgcggacatctgcttcgcgaagggggacgtgcgcatgcactcggcgagcgcgtcgttccagctcgtgtccgccggcaacagctcggcggcggcggaggaggaggagcggatacgtccgtacacgcgcaagtgggaggcgaacgtgatggcgacgatcgacgaggtgcgcctgcgccgcgtgctccccggcgacgccgcgcggtgcgacgtgcggcacgacgcgccggccgtgctcttctccaccggcgggtacacgggcaacgtgtaccacgagttcaacgacgggatcctgccgctgttcgtgacggcgcaccacctccggcggcgcgtggtgctggtgatcctcgagtaccacgactggtggatgaccaagtacggcgacgtggtgtcgcagctgtcggcgttcccgccgatcgacttcgccgccgaccgccgcgtgcactgcttccccgagttgatcgccggcctgcgcatccacggcgagctgaccgtggacccggcgaggacgcccgaggggaagagcatcggcgacttccgcaggctcctggacgacgcgtaccgcggccgcatcggattcctggagcgcctggagcggcgcgcggctcgcaagcgcctgcgccagcgccgccaccgccgcggcggcggcggcggcgcgcctccagctccaggaggtcctcgcgaggaccgtcccaggctggtgatcgtgtcgcggacggggtcccgcgtgatcgagaacgaggcggacgtggcggcgctggccgcggacgtcgggttcgacgtgcgcgtgatccggcccgagcgcacgacggagctgtgcaagatataccgggagctgaacggcagcgacgccatggtcggcgtgcacggcgccgccatgacgcacttcctgttcatgcggccggggaaggtgttcatccaggtggtgcccctgggcacgcactgggcggccggcgcctactacggcgagcccgcggcgcggatggggctgcgctacgtcgggtacaggatcctccccgaggagagctcgctgtcccgcgagtaccccaccggcgaccccgtgctgacggaccccgccggcgtggcgcagcgcggctgggacgtgaccaagaaggtgtacctggaccggcagaacgtgcggctggacctggcgcgcttccgggaggagctcgtcagggcgcaccggtacctggccggcggcggccgagagcgcccgagtgatgtcgtcggacgggtttgactggtctcgattaaccaatggacatcgcctggctggcctcctctgctctgctatagttttcattcccaccaattttttcccctttggtttggttagtagtatacactgacttgacctgacaattctttgcatcagtttttgtttcgtcgtcttgtacctatgatccatccatccatgatagtaaagagagggagagagagagaatatacagt

SEQ ID NO: 105229 - DNA, 1103 bp, Zea Mays
ccgacaggtaggcccgaacccgaagggtctcggctccaaaagcctattccgtttccgcctcctccagcctgtcctcctgcctcgtacgtcctctgcgcggtacccggggagtcctcttgtccgcaccatcgcctccgctccgattcgccgactcggcgcgggcgggcgagacgtggatctcgacggaggagactccgaccatcgctccatggaggccgcggactctgaatccgtcatctccaccttcacctgcccgcactgtcagcgggaggttccatcttcaaacattgcattgcacagcgcgcactgcgctcggaaccttcagaagtgcgaacattgcggagatatggttgccaggaagcttatggatgaacactacgatgaaaaccatgctccgtagagcgcgagctatgggatcttcatacaggcatacaatgcccacaaaggatgctcgcgtgccaatactgtcagtttgaactgcctgcagttgatctttttgaacatcaggatctgtgtggaaatcggacagaatattgtcaaagttgcaggaagtatatcagacttcgtgaatggattggacatgaactccagttccatacgattttgaatgctgcatcagaactttcaagtgacaggactcgagcagcagcagagcagccagtaccaaagccagcccgacctgctactggttcgcttcacaaacaactgctcttgacggttgcagtaactggagttgcagttttgattggatcaatactgtaccaaggtaaggggaagtagttccggggatagtaatttcacgccccttgatgtgtaaattccctcataaccaaaagagtacagtttagaccccagttgagggaaacaaaaaagaagaaagaaagagagagtacagctgagattacaacatttatggaaggaccaatgaagctatgtcgttgttctatgtaaatggtaattttcccatcaaacttgtgggcgtttggtaacctatgcaaaatttgttacaactgcaaaagttgtaatatcttatggattcatggacaaactgtgatgtgcagtcagtcaaaaataacttatcctaatacatttgccacccaaaa

SEQ ID NO: 105230 - DNA, 1100 bp, Zea Mays
ccgacaggtaggcccgaacccgaagggtctcggctccaaaagcctattccgtttccgcctcctccagcctgtcctcctgcctcgtacgtcctctgcgcggtacccggggagtcctcttgtccgcaccatcgcctccgctccgattcgccgactcggcgcgggcgggcgagacgtggatctcgacggaggagactccgaccatcgctccatggaggccgcggactctgaatccgtcatctccaccttcacctgcccgcactgtcagcgggaggttccatcttcaaacattgcattgcacagcgcgcactgcgctcggaaccttcagaagtgcgaacattgcggagatatggttgccaggaagcttatggatgaacactacgatgaaaaccatgctccgagcgcgagctatgggatcttcatacaggcatacaatgcccacaaaggatgctcgcgtgccaatactgtcagtttgaactgcctgcagttgatctttttgaacatcaggatctgtgtggaaatcggacagaatattgtcaaagttgcaggaagtatatcagacttcgtgaatggattggacatgaactccagttccatacgattttgaatgctgcatcagaactttcaagtgacaggactcgagcagcagcagagcagccagtaccaaagccagcccgacctgctactggttcgcttcacaaacaactgctcttgacggttgcagtaactggagttgcagttttgattggatcaatactgtaccaaggtaaggggaagtagttccggggatagtaatttcacgccccttgatgtgtaaattccctcataaccaaaagagtacagtttagaccccagttgagggaaacaaaaaagaagaaagaaagagagagtacagctgagattacaacatttatggaaggaccaatgaagctatgtcgttgttctatgtaaatggtaattttcccatcaaacttgtgggcgtttggtaacctatgcaaaatttgttacaactgcaaaagttgtaatatcttatggattcatggacaaactgtgatgtgcagtcagtcaaaaataacttatcctaatacatttgccacccaaaa

SEQ ID NO: 105231 - DNA, 1140 bp, Zea Mays
ccgacaggtaggcccgaacccgaagggtctcggctccaaaagcctattccgtttccgcctcctccagcctgtcctcctgcctcgtacgtcctctgcgcggtacccggggagtcctcttgtccgcaccatcgcctccgctccgattcgccgactcggcgcgggcgggcgagacgtggatctcgacggaggagactccgaccatcgctccatggaggccgcggactctgaatccgtcatctccaccttcacctgcccgcactgtcagcgggaggttccatcttcaaacattgcattgcacagcgcgcactgcgctcggaaccttcagaagtgcgaacattgcggagatatggttgccaggaagcttatggatgaacactacgatgaaaaccatgctccgatgaattgctcactttgcaaacacacagtagagcgcgagctatgggatcttcatacaggcatacaatgcccacaaaggatgctcgcgtgccaatactgtcagtttgaactgcctgcagttgatctttttgaacatcaggatctgtgtggaaatcggacagaatattgtcaaagttgcaggaagtatatcagacttcgtgaatggattggacatgaactccagttccatacgattttgaatgctgcatcagaactttcaagtgacaggactcgagcagcagcagagcagccagtaccaaagccagcccgacctgctactggttcgcttcacaaacaactgctcttgacggttgcagtaactggagttgcagttttgattggatcaatactgtaccaaggtaaggggaagtagttccggggatagtaatttcacgccccttgatgtgtaaattccctcataaccaaaagagtacagtttagaccccagttgagggaaacaaaaaagaagaaagaaagagagagtacagctgagattacaacatttatggaaggaccaatgaagctatgtcgttgttctatgtaaatggtaattttcccatcaaacttgtgggcgtttggtaacctatgcaaaatttgttacaactgcaaaagttgtaatatcttatggattcatggacaaactgtgatgtgcagtcagtcaaaaataacttatcctaatacatttgccacccaaaagttctcgtc

SEQ ID NO: 105232 - DNA, 1569 bp, Zea Mays
atcacttttccttccgatcagatcctctcagttatcatggcgggcggcgccttcaccgagaagggcaagcaatatccggggaagatgacggtgttcgtcttcctcacctgcctcgtcgcctcctccggcggcctcatcttcggatacgacattggcatctcaggcggcgtgacgtccatggacccgttcttgaagcgcttcttcccgtcggtgtacgccaaggagcaggaggtggtggagaccaaccagtactgcaagttcgacagcgtgctgctgacgctcttcacctcctcgctctacctcgcggcgctcgtcgcctccctcttcgccggctacatcaccaagaggtgcggccgcagggtgtccatgctcggcggcggcgccatcttcctcgtcggcgccgtcctcaacggcctcgcccagaacgtggccatgctcatcatcggcaggatctttctcggcattggcgtcggattcagcaatcagtccgtgccactgtacctgtcggagatggcgccggcgaagatgcgcggcatgctcaacatcagcttccagctcatgaccaccgtgggcatcctcgtcgccaacctgatcaactacttcacggccaagatccccggcggctggggctggcgcatcgggctcggactggccgccgtccctgccgtcatcatggtcggcggctccatcttcctccccgacacgcccaactccctggtcgcccggggcaaggtggagagcgcccgcgccatgctccgccgcatccgcggcaccgacgacgtctcgctggagttcgacgacctcgtggcggccagcgaggccagcgaggccatccagaacccgtgggggaccctcctgcagcgccggtaccggccgcagttggtgatggcggtcctcatcccgacgctgcagcagctcacggggatcaacgtcgtcatgttctacgcccccgtgctgttcaagaccatcgggttcggcggcaccgcctcgctcatgtcggccgtcatcacgggcctcgtcaacatgttctccaccttcgtctccatcgccaccgtcgaccgcctcggccgccgcaagctactccttgagggcggcatccaaatgatccttgcacagttcgtgcttgggacgctgatcgcggtcaagttcgggacgacgggcgtggcggccatctcgcggccgtacgcgatcggggtggtgttctgcatctgcgtcttcgtgtcggcgttcgcctggtcctggggcccgctggggtggctggtgcccagcgagatcttcccgctggagatccgctctgcagcacagagcgtggtggtcgtcttcaacatgatcttcaccttcatcatcgcgcagatcttccttatgctgctctgccacctcaagttcggcctcttctacttcttcggcgcatgggagatcgccatgacactcttcgtctactttttcctgccggagaccaagggaatccccattgaggagatggaccggatctgggccaaccactggtactggaagcggttcgccgtcgacggcggccgcaaggtcgagctcacgtccaccgccgtatag

SEQ ID NO: 105233 - DNA, 1300 bp, Zea Mays
ctttatccgccacccaaacccggcgaaccgcccgccccgccgcgccagccaatccccacctcaaataacccccgtcgaccgcggccgcggccccacccgcccgccgaggggaaataataacaaacaaagcgcgcacatccacacgccactgccgcacgaatcgagccgccgaaaaggcgcaggcgaagccagcggggagagaaaacgggcgggatccccaccgcctcgcgcgcagcggcggcggcggcggcaatggaggtcacctcctccccctcgccttccgcgccgccgccggcctcctcgaagccggcgctccagctcaaccccgcggccgtcctcctccgccgcctgccgaccccgaccccaacagcggcgacgcccgtcaccgcgacggcgccccccgcgcggcccgccaccgcgtccaacccgctcgcggccttgctcgtccccttctggcgcgggctgcggcgagcgccgaaacagccggtccaccccgcctccgccgccgcggcgcggagggcggcggagcagcaggaggcggaggccgaggcggaggcgcggcagctggtggggtgcgcggtgccgctgttccggccgtacgtggcacagctgccgtggcacggcggcgcgcgggcgtggctgtcgaagctgttcccgcgctacggccactactgcgggcccaactggtccagcggcaaggaggccggctccgtgctctgggaccgccgccccgtcgaccacctcgacttctgctgctactgccacgacatggcctacgacacccacgaccaggcccagctcctccgcgccgacctcgccttcctccgctgcctcgagggcagtcggcacacgcccgcgcgcgacggcatcgccgccgcagccatctaccgcgccatgtgcatcttcggactgaagacgatcctgatcccgtaccggacgaacctcgtgcggctgcagacggggcccaactacgcggatttcttcgccgatttcgtgaagagggtcgcgtcgtcgtcgggcaggccgaccggcggcgagaagcagaggctgtgaacgaatttgctcgcctcgtcctacatgtaaaggtggtagatcgagccgaattggttggggccttggggggatgagatcgtagtgattgtctatataggtagcttgagtttttttttaatccagatatggccagggaaattgagtcttcctgtgtgtgtgtgtctaattgggtaattgtagcaactgattcgaaatttaaactttggggtttctactgtgaatatagcaaatgtctaattgggtaaca

SEQ ID NO: 105234 - DNA, 1449 bp, Zea Mays
cccaaacccggcgaaccgcccgccccgccgcgccagccaatccccacctcaaataacccccgtcgaccgcggccgcggccccacccgcccgccgaggggaaataataacaaacaaagcgcgcacatccacacgccactgccgcacgaatcgagccgccgaaaaggcgcaggcgaagccagcggggagagaaaacgggcgggatccccaccgcctcgcgcgcagcggcggcggcggcggcaatggaggtcacctcctccccctcgccttccgcgccgccgccggcctcctcgaagccggcgctccagctcaaccccgcggccgtcctcctccgccgcctgccgaccccgaccccaacagcggcgacgcccgtcaccgcgacggcgccccccgcgcggcccgccaccgcgtccaacccgctcgcggccttgctcgtccccttctggcgcgggctgcggcgagcgccgaaacagccggtccaccccgcctccgccgccgcggcgcggagggcggcggagcagcaggaggcggaggccgaggcggaggcgcggcagctggtggggtgcgcggtgccgctgttccggccgtacgtggcacagctgccgtggcacggcggcgcgcgggcgtggctgtcgaagctgttcccgcgctacggccactactgcgggcccaactggtccagcggcaaggaggccggctccgtgctctgggaccgccgccccgtcgaccacctcgacttctgctgctactgccacgacatggcctacgacacccacgaccaggcccagctcctccgcgccgacctcgccttcctccgctgcctcgagggcagtcggcacacgcccgcgcgcgacggcatcgccgccgcagccatctaccgcgccatgtgcatcttcggtgagcccagttccccgttgccgatcttcgcgccgtagcctgaaaacctagcatatcgatgaagcgattggtcagcctgcgtccgtgcgtgctttcaggactgaagacgatcctgatcccgtaccggacgaacctcgtgcggctgcagacggggcccaactacgcggatttcttcgccgatttcgtgaagagggtcgcgtcgtcgtcgggcaggccgaccggcggcgagaagcagaggctgtgaacgaatttgctcgcctcgtcctacatgtaaaggtggtagatcgagccgaattggttggggccttggggggatgagatcgtagtgattgtctatataggtagcttgagtttttttttaatccagatatggccagggaaattgagtcttcctgtgtgtgtgtgtctaattgggtaattgtagcaactgattcgaaatttaaactttggggtttctactgtgaatatagcaaatgtctaattgggtaacagtgggttgcatagctattagcaaatgtggtgatgccctttgttgaaaagagaatttgagcttc

SEQ ID NO: 105235 - DNA, 3079 bp, Zea Mays
ccaactgagtagggacagagagggcgggcaccatcacgcggccccagatcctagccacgctcccgcacccactcttccatcgcacgcacgggcgagtgcggcagatcgctggcggatccaatgctgctgccctggtagctgctgcaccgcgcggctgctggtttggtgccctccggctgcggcgccgggtcactttcgatgtgaccatctgaggaggaaaggatggcggcttcggcggcggcagcgcctgggtcggctgagaggcaggcgcgcggcggcgcggcgtcggcgatcggcaacgcggtatttaagagtggccctctcttcatatcatcgaaaggaattggatggaaatcatggaaaaaacgttggttcatcctcacacgaacgtcactggttttcttcaagaatgatcctagtacattaccacagagaagtggtgaagtgaaccttacattgggggggattgaccttaataattctgggagtgtagtggtcagggaagacaaaaggctgctgaccgtcctttttccagatggccgtgatggtcgcgcctttaccttgaaggcagaaagttctaaagatttgttcgagtggaaaacatcactggaagaagctcttgcacaagctccaaatgcagctcttctgatggggcataatggaatatttcgcaatgacacaacagatgtgtatgaagaggctattccaaattggagagagaagagacctaccaaatcactagttgttggcaggccaatactacttgcactggaagatatagatggcagtccttcttttctggaaaaagctttgtgtttccttgagaaacatggaataaaggtggaaggaattttgcgtcaagctgcagatgtggaggaggttgacaggagattgcaagaatatgagcaaggaaggacagagtttgcaccagaagaggatgctcatgttattggtgactgtgtaaaacatgttctccgggagcttccatcttctcctgttccagcttcctgctgtacagcattattggaagctttccgtctggacatcaaggaatctcggatcaaatctatgcgtgcagcaatatctgaaacatttcctgagcctactaggcggctgctacagagaattttgaaaatgatgcataccgttgcttctcatactgccgagaatagaatgactccatcagcagttgctgcatgtatggccccactcttgttgcgtccccttctttctggtgaatgcgagctggaagatgattttgacatgagtgatgacagtgctgctcagcttattgctgctgcaaatgctgctaacagcgctcaaggcattgtaactactctattagaggaatacgagagtatattcaatgatgagcactttaggtgctccttatcacctgattctcaaacaggagatagtggaagtgaagaatcaactgatgatgaaactgtggatatcaaggataatgggtttcatgatgcagaaaatgatgtagatcaagaattagatgatgccgagcgaatactgaatggaaaattgagtgaaaccagtgcatgtgtccatgctgacctccatgactacaagcaggaagttaatggcaacgattcagacgctgagctctttgttgaggataacacatttgaaccaaatgtaaatttaaatgatactcccctaagtcgtttaatagaaaatggaaagaaaccatcaaatctggcgtccagtcatgaaactccattatcagtgggagaaattctttcgtctttggatgctggagttccattacctggtcgtgcagctgaatattccaaggacagactctctagcaaacccaatggaattcagcagcatgtgaagcgtactaacttatggggacggagcaatgcaagaaagggccaacgttcagagttagttgatccttcaagtgaagaagagcttgctattcaacgacttgaggtaatgaagaatgacctacaggtcaggattgcaaaggaggctagaagtaatgcaatcctacaggcaagtttagaaagaagaaaacaagcactacatgagcgccgtgtggctctggaacaaaatgtgtcaaggttgcaagagcagctacaggctgaaagggatcttagagctgcactggagattggattaagcatgtattcttcacaattttctagctcgcactccatggactcaaagacaaaggcagagcttgaggaaattgctctcgcagaagctgatgttgcaagattaaaacagaaggttgcagagctgcatctccaactcaatcaacagcgccagcaccagtatggctcttcggtagatgcaaatgattgtcctccgcaccttccaaatcatctctcacagaacactgtccaaactggatttgataggaccgttgctttttgtaatcaagagaagcaaagaaatgaggagagcttgccgtgcacatcccactggagaagcatcaaacagcatgtgctctctcaggattcttcaaggcctttctcccgaaagcattcctcagacacctccttgagtgattcaatggaggcatcaacaagtgtgcttgcagagggcgggccactgttggtgaacatcgccagaacaacagaaggtgttgaatacgggagacctccgactgtgccgtcatctactctagttgaactaacaaccaggctagatttcttcaaagaacggcggtcacaattgatggaacagctccacagcctcgatttagggcatggatccgcgtcccatggtttcccatacaaatcttcatctccctggaacaacccaaggtagggggcttgttcagttgctgcattaccgcgcatctgtatattcttggtataggatcccttttgtttcactttatctctgtagaagctggtctcgtttttgtttcacttgttatctctgtagaagctggtagtgagaatgtatataccccttgcctgccttcacttgttttgctagtgcttccagcggacatttttcgagcgtgatttttgttttgcttttgtatttattgtgtatgtaatgactcaaggggaaatatatagatgcgtctttttttcttggggat

SEQ ID NO: 105236 - DNA, 881 bp, Zea Mays
cagggcatgccgggcaacggcctgccgctgcggcggtggctggttgcctgcgtgcgcccggcgcggcgcgaggcgcggctggcggtgtggggcggcgggggcacgcggggagcggagcccgggcaggcggcgggggaggtgatggtggagcacctgggccacgtggtgtgccgcgccgacgggttccgcgtcggccgccccgcgccggtgctgggcatcggggaccggctcgaggccgggcgcacgtacctcgtcgtccctgccgaccgcctcccttgcgccgctggcgggacgggcggggtcgtcaccgcggcgtcgctcgcaacgctctcgcgcggcaagcggcaggcgccggctggaccacggaactgcccgttcgagtacgccaaggacggcgacgggcgcacggtgatcagggtcgcggaggagttcctcgtcagggccgtcgcgggtggcgccaacgccggcaggaatggaaagccgcgcggtggggacggcgacggcgacggcgacggctgcgggtcggccgcgctttgcagcacgcctgagctgaggaaacactatgagcagctggtgggcgccgtgaggggccgcccgtggtcgccgcggctggacaccatcgcggagcgcaaagggcggcggaggctcgccgacgtcgtaagccccgggaggctgtcgccggcacgattgctggggatgggcaaggacaaagggctcagcttcagctagcacctagcaggtacagcggcatgcatcaaccaagaaaagaagccaccggcaaggaccatcttagtctcaggcgcacctgtttttttttccctcgacaagggtttgcacagccacctctcagtgtaactaaactaaacacagctatattcaga

SEQ ID NO: 105237 - DNA, 1560 bp, Zea Mays
gaattccgattcccaatccagcaaaccctaccagccttttgcaaactcagagagggacccgatggcacccaaggcggagaagaagccggcggcgaagaagcccgcagaggaggagcccgcggccccggcggagaaggctcccgctgggaagaagccgaaggcggagaagcggctcccggcgggaaaatccgccggcaaggaaggcggtgttgacaagaaggggcggaagaaggccaagaagagcgtggagacgtacaagatctacatcttcaaggtgctgaagcaggtgcacccggacatcggcatctcctccaaggccatgtccatcatgaactccttcatcaacgacatcttcgagaagctcgccggcgaggcggccaagctcgcccgttacaacaagaagcccaccatcacctcccgggagatccagacctccgtccgcctcgttctacccggcgagctcgccaagcacgccgtctcggagggcaccaaggccgtcaccaagttcacctcgtcctaagctcctttcgagtaggtccttaagcgccgtggcgccttttgactgtatggaatgtttgtcatctgaaagttgatctgagcagtgcaatatataattctggcatactattctcgcaatcgttttggggttcagaatgggactgacatcagagtaatatgtggcataccttctgatcctctgtactcgagaggattttgttgtggataagccacttgctgcctttgtttggtggataattgcttcgagcataagaaacagtgtatgctgctataaacatctatttgctatgtgacggcatctgcctgccagttgaacggtttcctcgatcatcttactgtgcaagtctctgtcatctgattgtgcaattctgaaacaactgttattccatcgtctcgaatcttgggagtacagtcaataatttacgtttgcggtgctaatatcgacattgaatagttgaatacggtgaccaatccaaatgcagtcttttttaatattgtgtgaaggctgggttatgaacaggtaggattcatgaatctctttgttgggatggctggattgtaatcatgtagaaatcatgaatccttttgttttaggaaaggtgagtttaactaggaatggctgtgggctacttgttaatatatcatagaagtccattttcttgtacttatgtactattaagtgatgtcaggttctgttaggttagtaattgtctgattctcacccttgcattcttccaatccaacttgttcttctaaatatactgttcagtacttgtgcttgttatttttttacacagacatgagttatatgtttgcttttttctcaaacactgtcagctgggtatcattatattaataatgagagcaaaacatgactcacaaaacacacaaccacacttccaaagttctttcaaattactttgaaaccattgttttctctgttttctcattgtcgagttggtttgactcgttgacggtccctttgtagtccaatttgaagtgttgttctatacgacttgcctttatcaatcacggcgtgca

SEQ ID NO: 105238 - DNA, 2626 bp, Zea Mays
atacacatttcaatccaatcctaacgacacatggcactactgttatgcattcgaagaaagaaaacaagaagcgctcacgccgtcacgcgtccggaagccaagctggtcgcccgtccgccatcctttccaaatctgcaccaaatcggcctcctgcctgaaacacacgcgaggggccttctcccgcggcctccccgctcgcgtagccccggcgcccgctctctgctgctctagggtttgccttcaatggggaaccagaaaaggcggggattgatgagttagagacattcatgggcaaaagggtcatttcgcgtctagttggcaccaaggtccgttaaacttttctggtgcagaagaaatttcgatcttttataatggcacgcagcggctctagcgataagccaatcctctcccttcccagagccgtagcgggctagtggcgactgactggggtcggggtcgggcgaggcattcctccctctgcgctttgctggcaacgacgacgaatagggttctgtagggaccgagattctggatacctcactcccttgattcagaatgactccactgagtcattgctccgttggcaatgtcagcctgtttcacatcggaagctacaggaccacccgagaaatccagataagaaggttccagggctcggcgaggtattcgagagtagcatcgccgtcgcctcggagactgctgcagccgcaaacagcgttccacctgatcagtatctacaagagaagaagctggtcctctccccagaggccaagaaccttgtccgcggcgaccgtggggactgatgtcactgtggaggatctgaatccgtctccctcggaggaagcctccgatgggaactctgaggctgcacctgacgccgttgatgcgagcgagcaggccgaggctagcacgggacaagcctcttctgctcgcaaattgggacgcaacatacggaagagcgagatgcctcctctgaatgaggaggatctagtgcctggcgcatcttttactgggaaggtgatgtctatcaagccattcggagttttcgttgacattggggcattcacagaaggccttgtccatatctccagagtaagtgatgggttcgtgaaagatatatcttctctcttcactgttggacaagaggtgtcagtgagattgcttgaagcaaataaggaaacaaagcgtatctctctgacgatgagggaaggcgatgactatgtcaagcctcaaaaagaaatgccgaaggctgcaaatggtgggcggagtgccaccgcaactcctaaaagctcgccaaggcaaacaagggaaaggcaggaactcaaggagacacttgagtcaaaatatgtaccagggcaatctctgaatggcactgtgaaaagcacaacgagagcagggacatttgtgacgttgcctgatgggagtgaaggattccttcccagagaagaggaagcattggcgttatttacccttatcggacaatctgcaatggaaattggtaaacagataagggttaaagtactgaatgttgcacagggtcaggccactttgacgatgaaaggggtggaagatgatgaagacgatctgaagacgctaaatatggagcttaagcgggactggtccagagggactaatgcgttcgagttggctttccgtaggaacaaagagatatctgcattcttggatcagagggaaaggaccaaagtgccggctgatacttcagtttctgctccggaagctgaaagctatcaggaggaagctgctccagaagatgaggaaagtagtgaagaattgagctctgtgtcagaagtagcaactgatgtttctcctcctgtatctgatgcctcctctcaggtgggaattcagtattctacttctgtggcaaatgctgctgaggaccaaactgtaggatctgaaagttcacctacaattagtgttgaactgtcctccaacgggaccccagatagctctattgtgtcttcagtttcagaaactgcagataaacctactgaacctgaagaatcttcagcggtagaagaggttcttgtaactgcaagcagcgaggcagggaaagaaccagctgctgacactgaggctgtaccagccttgaatgagaaaactggtgccgaggttgctgctgctgctggagttgcacaagcaagcaccacgacaggtctgtagtaattttatcagtgagtcagcgatggtgtcccctaaaagctttcacatgcaataatctgataagccatgacttatctgcaaaagcctcttgaagaagcaactctgcctaattagaatagaatagggggtgctataaatagattgcaagaaacctgttcaagctactgttttttcccagttatttttattcgaattttttgttacatggatgatggatgtttcacacattggtaccaatcattgagttctgcccctgatagccaaaagggtggatcctgcatagatcatgaaactctccttctaatgtattattttgatcaatcatttatccacatttgcaaaaaaaaaaaaaaatctttgatttatgtatcttgtgacatgtcagctgcatagttttgctcaaactatttttatatgacaaaaaacatgttacttgtctgctggc

SEQ ID NO: 105239 - DNA, 3615 bp, Zea Mays
tcccgcggcctccccgctcgcgtagccccggcgcccgctctctgctgctctagggtttgccttcaatggggaaccagaaaaggcggggattgatgagttagagacattcatgggcaaaagggtcatttcgcgtctagttggcaccaaggtccgttaaacttttctggtgcagaagaaatttcgatcttttataatggcacgcagcggctctagcgataagccaatcctctcccttcccagagccgtagcgggctagtggcgactgactggggtcggggtcgggcgaggcattcctccctctgcgctttgctggcaacgacgacgaatagggttctgtagggaccgagattctggatacctcactcccttgattcagaatgactccactgagtcattgctccgttggcaatgtcagcctgtttcacatcggaagctacaggaccacccgagaaatccagataagaaggttccagggctcggcgaggtattcgagagtagcatcgccgtcgcctcggagactgctgcagccgcaaacagcgttccacctgatcagtatctacaagagaagaagctggtcctctccccagaggccaagaaccttgtccgcggcgaccgtggggactgatgtcactgtggaggatctgaatccgtctccctcggaggaagcctccgatgggaactctgaggctgcacctgacgccgttgatgcgagcgagcaggccgaggctagcacgggacaagcctcttctgctcgcaaattgggacgcaacatacggaagagcgagatgcctcctctgaatgaggaggatctagtgcctggcgcatcttttactgggaaggtgatgtctatcaagccattcggagttttcgttgacattggggcattcacagaaggccttgtccatatctccagagtaagtgatgggttcgtgaaagatatatcttctctcttcactgttggacaagaggtgtcagtgagattgcttgaagcaaataaggaaacaaagcgtatctctctgacgatgagggaaggcgatgactatgtcaagcctcaaaaagaaatgccgaaggctgcaaatggtgggcggagtgccaccgcaactcctaaaagctcgccaaggcaaacaagggaaaggcaggaactcaaggagacacttgagtcaaaatatgtaccagggcaatctctgaatggcactgtgaaaagcacaacgagagcagggacatttgtgacgttgcctgatgggagtgaaggattccttcccagagaagaggaagcattggcgttatttacccttatcggacaatctgcaatggaaattggtaaacagataagggttaaagtactgaatgttgcacagggtcaggccactttgacgatgaaaggggtggaagatgatgaagacgatctgaagacgctaaatatggagcttaagcgggactggtccagagggactaatgcgttcgagttggctttccgtaggaacaaagagatatctgcattcttggatcagagggaaaggaccaaagtgccggctgatacttcagtttctgctccggaagctgaaagctatcaggaggaagctgctccagaagatgaggaaagtagtgaagaattgagctctgtgtcagaagtagcaactgatgtttctcctcctgtatctgatgcctcctctcaggtgggaattcagtattctacttctgtggcaaatgctgctgaggaccaaactgtaggatctgaaagttcacctacaattagtgttgaactgtcctccaacgggaccccagatagctctattgtgtcttcagtttcagaaactgcagataaacctactgaacctgaagaatcttcagcggtagaagaggttcttgtaactgcaagcagcgaggcagggaaagaaccagctgctgacactgaggctgtaccagccttgaatgagaaaactggtgccgaggttgctgctgctgctggagttgcacaagcaagcaccacgacagccactatttctcctacccttgtcaagcaattgcgtgaggcaactggagcaggcatgatggactgcaaaaaggctcttgctgaaacagggggtgacatagataaagctcaagaattcctacggaagaaagggttggcggctgctgacaagagggctggcagagcaacagctgagggaagagttggctcttacatacatgacagcagaatcggggtccttattgaagtgaattgtgagactgactttgtgtctcgaggtgacattttcaaagagttagttgacgatcttgccatgcaaattgctgcttgccctcaagtgcagtacatctctattgacgacgtccctgaggagcttgtgaagaaggagaccgagctggagatgcagagggaggaccttttgtcgaagcctgagcagatccgggctaagattgtcgaagggcgtgtaaagaagaggcttggagaattcgcgttgttcgaacagccattcatcaagaatgacaaggtcacaataagtgagtggctgaagcaaactatagctacaactggagagaatatgaaggtcaggagatttgcccggtacaacctaggtgaagggctggagaagaaaagccaggattttgctgctgaagttgcagcccagacagcagcgaagccgccaccatctgctcctcccaaggaggacaagcctgctgaaacaacagaatccgccgagaagaagccggctgttgcagtttcagcctcgttggtgaagcaactccgagacgaaaccggcgctggcatgatggactgcaagaaagctctggccgagtctgacggcgaccttcagaaggctcaggagttcctgaggaagaagggcctctcatccgcagacaagaaatcctctcggctagccgccgaaggactggtcggctcctacatccacgacagccgcatcgggtgcatgatcgaggtcaactccgagaccgacttcgtggcccgcaacgacaagttcagggagctggtgaacgacctcgcgatgcaggtggtagcgtgtccgcaggtcgactacgtctcggtggacgacatcccggagagcgtcgtcggcaaggagaaggagatcgagatgcagagggaggacctgcagtcgaagcccgagagcatcagggagaagatcgtggaagggcggatcgcgaagaggctcggcgtgatggccctcctggagcagccctacatcaaggacgacagcaagacggtgaaggatctcgtgaaggagacggtcgcctcactcggggagaacattaaggtgcggaggtttgtccggtacaccctgggcgaggactgatcggtgtgaggtcgggcagcgatccctccgtcgcagcgcagcgcagccctggcatgagaagtcgggcacgtttttggcatgagaaggtctgtgactcggttccatctgtaattccgtatcacctgttactgctgttcgtggttcagaagagtaagaggggttggttagtatatccatcaaagcatatatatatatacaacattaaggcaaattgaattttgtatcttttatctgtgcttcgtttcaaaacatgatcgaattgtagcatggacgtatggtcttggccaatgtaattgtcttg

SEQ ID NO: 105240 - DNA, 2298 bp, Zea Mays
ttgtcagtgcagccaagcaaaacaatggtgcctttaaattttcatgcagcttccagtttttgtttggtaggaatacttgctttcggcaattgttgtaggtggaatacccacaacatgatggtgttaaggatctccttgctttaatttatttcctctaacgatttgcctctgctgcgcagggttctgtagggaccgagattctggatacctcactcccttgattcagaatgactccactgagtcattgctccgttggcaatgtcagcctgtttcacatcggaagctacaggaccacccgagaaatccagataagaaggttccagggctcggcgaggtattcgagagtagcatcgccgtcgcctcggagactgctgcagccgcaaacagcgttccacctgatcagtatctacaagagaagaagctggtcctctccccagaggccaagaaccttgtccgcggcgaccgtggggactgatgtcactgtggaggatctgaatccgtctccctcggaggaagcctccgatgggaactctgaggctgcacctgacgccgttgatgcgagcgagcaggccgaggctagcacgggacaagcctcttctgctcgcaaattgggacgcaacatacggaagagcgagatgcctcctctgaatgaggaggatctagtgcctggcgcatcttttactgggaaggtgatgtctatcaagccattcggagttttcgttgacattggggcattcacagaaggccttgtccatatctccagagtaagtgatgggttcgtgaaagatatatcttctctcttcactgttggacaagaggtgtcagtgagattgcttgaagcaaataaggaaacaaagcgtatctctctgacgatgagggaaggcgatgactatgtcaagcctcaaaaagaaatgccgaaggctgcaaatggtgggcggagtgccaccgcaactcctaaaagctcgccaaggcaaacaagggaaaggcaggaactcaaggagacacttgagtcaaaatatgtaccagggcaatctctgaatggcactgtgaaaagcacaacgagagcagggacatttgtgacgttgcctgatgggagtgaaggattccttcccagagaagaggaagcattggcgttatttacccttatcggacaatctgcaatggaaattggtaaacagataagggttaaagtactgaatgttgcacagggtcaggccactttgacgatgaaaggggtggaagatgatgaagacgatctgaagacgctaaatatggagcttaagcgggactggtccagagggactaatgcgttcgagttggctttccgtaggaacaaagagatatctgcattcttggatcagagggaaaggaccaaagtgccggctgatacttcagtttctgctccggaagctgaaagctatcaggaggaagctgctccagaagatgaggaaagtagtgaagaattgagctctgtgtcagaagtagcaactgatgtttctcctcctgtatctgatgcctcctctcaggtgggaattcagtattctacttctgtggcaaatgctgctgaggaccaaactgtaggatctgaaagttcacctacaattagtgttgaactgtcctccaacgggaccccagatagctctattgtgtcttcagtttcagaaactgcagataaacctactgaacctgaagaatcttcagcggtagaagaggttcttgtaactgcaagcagcgaggcagggaaagaaccagctgctgacactgaggctgtaccagccttgaatgagaaaactggtgccgaggttgctgctgctgctggagttgcacaagcaagcaccacgacaggtctgtagtaattttatcagtgagtcagcgatggtgtcccctaaaagctttcacatgcaataatctgataagccatgacttatctgcaaaagcctcttgaagaagcaactctgcctaattagaatagaatagggggtgctataaatagattgcaagaaacctgttcaagctactgttttttcccagttatttttattcgaattttttgttacatggatgatggatgtttcacacattggtaccaatcattgagttctgcccctgatagccaaaagggtggatcctgcatagatcatgaaactctccttctaatgtattattttgatcaatcatttatccacatttgcaaaaaaaaaaaaaaatctttgatttatgtatcttgtgacatgtcagctgcatagttttgctcaaactatttttatatgacaaaaaacatgttacttgtctgctggc

SEQ ID NO: 105241 - DNA, 1807 bp, Zea Mays
ctagtatgtgccagcaagtgtaggggatgacacctgggcccgtgtgtgtttgatatggagagagagaggccgtagcaggggtactttggggcatacgaaaatacggatacccgcaatgatatctagagcgtacaaagtggcgtctgcacgtagaattacaatagcaccgtttcgaatatgataaatattataaatccgtacaagttgcaatggtacggtttcacttcattcttatttaaatgtgtcccaaccgagagtgtggtgaaaaaaatagaataaaacctgagtttgtgccgcactaccgcgagcaaaaaaaaatgtcaaaattcttctctttaaaaaatggtctaattcatcacctcaaattcaatctggaacaatgatttggattggatcaatttctatgcaaaaacacagttatcgccctgagcccctgacgctggctgaaccgacaaacaacagcaataattcatagttgaagacaggcacagggcgagaccgccgtcatggacactgagaccgaggggaaggcggcggcggtcgaggagatgagggagtggtgcgtcgctctccccaaggtggagctccacgcccacctcaacggctccgtccgcaactccaccctcctagaacttgcaaaacatctaggcgacaaaggagtcattgtttttgaagatgttaaggatgtgatcatgaagagtgatagatctcttccagagtgtttcaagctttttgatctgtttcatatacttacaactgatcatgatacagtaacaaggattgctaaggaggttgaaaagatcttgctgcagacaatgttgcatatttggaaataagaacacacctaagaacaatgaggcaaaggggatgaccaagaggtcttacatggatgctgttattaaaggtctgaaagcagttgaagatgttgatgtcgaattatttggttctaatttcagaacaaatgaaacactaagttctaagcttttggatggtgtcacaaagaaaaagaagatatatgttaggctccttcttagtattgatcgccgcgagacaacttcggctgcattggataccgttaatctagccgtggaaatgatggaccaaggtgtcataggcattgacctttctggcaatccagtcgtgggggaatgggaaacatacctgcctgccctacaacatgctaaaaatatgggaatccccgttacaatccactgtggagaggtggcgaaccggaaggaaatccaagcagtgctggacttttgccctcagaggctgggtcatgtatgctgtctgaatgatgtagaatggaagaagctcaagtctctgatgattccggtagagatatgtttaacctcgaatgttatgacaggaggtgctccttccctagagcttcaccactttgctgacctctacaatgcgaagcaccctttgtccctgtgcacggatgattccggcctgttttcgacaagcctctcaaatgagtattacctcgttgcaacaactttcggcctcagcaagttcgagctgttccagctggcccaggatgcagtgcagtttgtttttgctgatgatgtggtgaagaagtctctgaaggaggtgttcaagcatgctgaaaagaggctgctcatgtgggatgaacttgctgcaccaagctagtgtacgtacccgttatgagatcagtatgtatcaacccaattgtatgatttatatatggttgtgtaacttttcgtttatgcacctattatatgtgtaccgtttttcaacgtcttagtagaaggtcccgctcgcgcaaccattggacacacaa

SEQ ID NO: 105242 - DNA, 121 bp, Zea Mays
cttcctgccgattaccagaagattcagggtttaagtacacccttcttataaggccagatggcccaaacccctggcccaataggcctaatcacaaacaaaattcaattactcagattactcc

SEQ ID NO: 105243 - DNA, 1787 bp, Zea Mays
attgataaaataaatattacactttatcttagccaaaagctcgaaaatgtatgtgttaaaaacgagtccgaccctctttttttacagctcaattgattgttcgtcctctttagctaacaaggtgatattatataggagcgttatgctacatgtggtttggtgtcgtatagaaattatgtggtttatcacggtccatatttggtttaacggcctatatatagtataacggcatattagtagatgagaagtagggaaaatgaacagactatacgttttgcatgtggtgtatgatttcgcatatggtgtatctctactactccttaagaaaggagcgtaggcgtgcacaccaacccgttctgcctccgcttcgatcatggggtggtcgcgctttcgtcgccgccatcaacggtgtcgctatctcctccctatccggcgtccgcgatgctcgccacccctcctcccccacgcgtcggacgctcgccatgctcgcctccctcccctccggtccgcctcgctccccttccgcccttccgtcgcgtgcgcttggaaaaaggtccagcagccccaaactccccagcggggccatctcgcccacctctccctgcacgccggatccccgccgtccccaccatcgcctgtgttgggtccgacccagtccgctcatgcctcgacgcgcagttctcgcacaccgtccgcggcggcgtccgcctcgcgccggtctcgcacaccgtcccgcagcggatccaatcacgcctcctcaccctccgctgcctcctcccatcccctctcccatcgaatccgcgattccgcgtccacagtggataccgtgagctcgcccccgcctccatggctccatcctccgctcgcgattcccccgtgcccgttggaagggggtcacggatcctcacacggttcctgctgcactacctccgcgctgccacgcgcaggccgccgacgcttgagcgggagggcaccgcgctcgctggcctcgcggacacggccgtccacggcatggcgctcgtcgagggcacgacgttctcgtgccggggcctcttctgagtgctccggatcgtgtcggcggtggggctgagcagggagtgccgtcacaagctggagcggctcatggggctgatgctggtccaggccacgctcgacgacctccttgtctccagcgacgacggcggcgacgtgtacattgtcaacctggtcatgaggctggtcagggtgttcgtggcctccaaagaggaggcagacgcgccgtcggagaggatgcggaaggtggggcgcctggtcgacaagtacctcgacgaaatctcgcaggaccaggggctgaaggtgtccaagttcctcaccgtctccgagagcctgccggactcggccagggactgctacgacggcgtgtaccgggtgctggacatctacctcaagatggcatatcccaaaaccgctctacttacaaggatggcaaacatgctcatccaaatgagtcttcagaacccccttactttggctcatccgtgagcattttacagaagcaaccagccaaggaaccccatatggatggggacaatccgaatggctctgctaacagagatgattagcggcaaggtatcattgcatcaatttgtgtattatcttgagtatacatggatgtgcatagcctgtgtggattttgttcgccaaagctttggccccagtacgtgtttgttacctccaccaatattctgtatgcattcatcatattgaagctaaaaagtcattgtgcttttgtagacctgtgtttttgt

SEQ ID NO: 105244 - DNA, 103 bp, Zea Mays
ctttcagtagttcatacacgaaacattatctacccacttgcttttggtgatattgtatgttcatacacaaagaatgatatagaaccaccaaagagttgattgt

SEQ ID NO: 105245 - DNA, 2934 bp, Zea Mays
ataccagcaacccaagcaactccccacgttctctgtccttccaagacccaggctttcagttccagccccacctcgcctagcttctcccctccccttcccaaaccctacaccccgggccttcgccgtccccgactcaccgccgggcgccggccacccccatagcgcagcgccggcgccgaactgaactcttccgtgcggtcggccgcgcgtacggccacccccctcggcgccgcccgccgcctttgatgtctcccacctgcgacctcggcttcctctggccccggtcgcagaagagcccccaagaggtctcccgagcggccgcttccggagcccagcgattggcctccccacggcagccgaaatgagcggcggcgagaagatgttgctgtttgggtcctttacagaggacgagactaagttgttccagggtcagcctctcaaaagtccaaataaaagcgtcagcaaagaatgtgaacggacggagatccagtttggcaccctgaacttttcagtgctgagtttagagaaggtatctacttccagtgttgttcttcctgcaaaatcagcaaacagcgagaccagtgccatcacaaaggagaatacatgcagtaatgaaaagaaagctgcaggatcaagccttccaaatggcagagccattctggctaatggatgcccccctgttaatgttcctgccaacaatgatttatttgagaatgtgaagaagacagaagctgttgtcccaccagttgtgcctgtaaaaagcatcagcaatccaacaccacaaatgacattggaggtgcataacgatggcaccgaacccactcaaagcagaaagttagacaaggaaagggaaattactgaaaatggtagcccaattgtcgatacacccattgctgcagctccagcagaagaggcagtcacaaacctaaataagaaaacctcacagaacatgcccttgattccacaaggcttgaggaacacaggaaatatctgctttctgaatgcaactttgcaggcattgctttcatgctcgccttttgtccaccttttacaggatctgaggaaccgtagtatacctaagtttggctacccaactctgcgtgcatttgttgagttgatctctcaattcgatgtgcttgacgagtcagttaacaagaaaaaagagaaggctactactgttgctgcaaagccacttaatcctgccatgtttgatgatgttctcagaaactttacaccagatgtgccggctggaataactgctcggccaaggcaggaagatgctcaagagtttttaagttttgccatggatagagtgcatgatgaactgctgaagcttaatggtaatggtttggattcaaaggagggtatggttgtttcttcttctgctgatgatgcttgggagacagttggaagaaagaacaaatctgcaatagttagaacacatagttttgttccctctgagctaagtgctatttttggagggcagctacagagcgttgtgaaagctgcaggtaacaaagcatcagctactgttcaaccctttctactgcttcatcttgatatattcccagatgctgttcagacacttaatgatgcacttcgtctgttctctacccctgaatctttggaaggatacagaaccactgctggaaaggctggtttggtgacagctagaaagtcattcaagatacacgcccttccaaagataatgatcctgcacttaaagaggttcagttatggaaataatgggagcactaaaatctacaagccactcggcttcacatctgaactggttcttagtcgtgatctgctgagctcaccatcacaagagggtagaaaatatgagcttgttgcaaccatcactcatcatgggagggacccttacagaggtcactacactgctcatgcaaagcatgccgacgggcaatggcttcgctttgacgatgacgctgttgtgcccgttggcgagaacgatgtcttgcatgaccaagcatatgttctcttctacaaacaagtctgaaagcactacgtagttgattagttgctctttcgtatcgccgttgcttaaacagccagatataccgtctaactatcgtcctattaatgtagtcaccgagtaacagcagcagagtattatgtgaagcaccctggtgctgcacgtgtttattatcatatgcttggtcatgatgtggcgagaggggggatttgtcttcagcccattttgaggttctgtaaaaattcaactgtcatcattgcaatgagcagcgaagtaatcatggtcagccctgtcgctggcagctgccgaaatgggttgtgtgcatgtggcatgccgtggttggcaattggttgttgagaagacattgccattagcttagccatgtgccgtgtctctgggagtgtcaagaggtgcagggcaatgttagctggtgtatgtgccttgcaagcatgactagcatgttataaaaagcttcgaattattcgttttgaaggtgtcatgtccctgtcaaggagtcgtcctgacgtctgtaaggaaggtgtgcggccgacatggacttctctttgtggctttctgaggaatggactgaagtggctgcgacttaggaaatctggtatagcgcaaatgttctggagcaaactgagctagtctggttgcaatctgttgctaaactaccatcggttatacctgctgacagacagtgcaactggcgtaggttgctttatgttacacctgttgtttggtggtaaaatcagtggtccatcagtgcttcctacggccttcgtttcaaggaccgattcttcttcagtggatgctgacagctagacatcccgaaagtcatctggagagtagctcggcacatgtagcatcctggagtcgttgacaactcagttccatctgaatcataggacaactgaagcaaagcgaggtagtaatgg

SEQ ID NO: 105246 - DNA, 156 bp, Zea Mays
atgacccgcgagaggggggctgcgcccgagctagagggtgggcgggggttgggacaatgcagtgcccaggcgagagggtttgctgggaggatggagctcaagcttcttggagatttgtggaatggagaggatgagagatctgcgtcaacaccatag

SEQ ID NO: 105247 - DNA, 1336 bp, Zea Mays
cagggaatgagggaaggaaaccgcccctttctctgggtccaggcccacacggcccaactacttatccccgtcgtcgtcctctattgtacccgagctgctcccctctccgcccgcccgccgcccactgccgcctcgctcgcctagggagacaacttctactagcttcctcccctaccgcctgccgcccaatcagccatggcggatcccactgagagggaccagttcacggacgacgaggaggaagaagactacctggaggacggcgagcaaggccttggaagcgaggacgaggaaggaggaggagcggggggcaagaggaagcggctgggaaataccctgggtgggatcggcaagcgtggggtgtgctacctcagccgcgtcccgccgcacatgaacccgtcgcacatccgccagatgctttccaagtacggcgaggtgctcaggatttacctcgtgcccgaaggtcaaggtcatcacaagcatactagtgttaaagcgaaggcttactcggaagggtggattgaatttgcaaagaagagtgttgccaagagagtggctaatctgcttaatggtgaacaaataggcggtaagaagagatctccattttattatgacatttggaacattaaatacctcaggaagtttaaatgggatgatctggttggtgaaatggctgagaaaactcatatcagagagcagaaattaaccttggagatagcagcagcaaagaaacaacgcgatcactacctgtccaacattgaaaaatctcgcgcgttgaaacacattcaagagcgcaggaaaaagaggcagaagacagaaggagcagaagccagtaatgtcccagaaacaaaaactgcccgttcaattcctcaaaagaaaccagttgtggagacagatgccaaaactaaatccacgctttcaaaagacattttggctggcgttttcgggggttcatcatgaccacctcctatctttcggcatggattggtgcatgccaaactgaatggagtgctgcaagatcatcgagttcatattctacttcgaatttttgtagatgaagtcagtttttttttcttgggggtaagtaggaactttcagaaacattttgttctgctgacattgccccggaagattttctgggacctgaccattttgatgtgaaaggactgttgattgccagcgctgtttgaacaggaatctttgtaaaactgaaacacatgttctcttctagttgaacaaatatcacgaggaactgccattggcgttatctcttccttggctgggattttcagtgcttcagcttgcagctatgctgtggcctgtgggtgctggatga

SEQ ID NO: 105248 - DNA, 1444 bp, Zea Mays
cagggaatgagggaaggaaaccgcccctttctctgggtccaggcccacacggcccaactacttatccccgtcgtcgtcctctattgtacccgagctgctcccctctccgcccgcccgccgcccactgccgcctcgctcgcctagggagacaacttctactagcttcctcccctaccgcctgccgcccaatcagccatggcggatcccactgagagggaccagttcacggacgacgaggaggaagaagactacctggaggacggcgagcaaggccttggaagcgaggacgaggaaggaggaggagcggggggcaagaggaagcggctgggaaataccctgggtgggatcggcaagcgtggggtgtgctacctcagccgcgtcccgccgcacatgaacccgtcgcacatccgccagatgctttccaagtacggcgaggtgctcaggatttacctcgtgcccgaaggtcaaggtcatcacaagcatactagtgttaaagcgaaggcttactcggaagggtggattgaatttgcaaagaagagtgttgccaagagagtggctaatctgcttaatggtgaacaaataggcggtaagaagagatctccattttattatgacatttggaacattaaatacctcaggaagtttaaatgggatgatctggttggtgaaatggctgagaaaactcatatcagagagcagaaattaaccttggagatagcagcagcaaagaaacaacgcgatcactacctgtccaacattgaaaaatctcgcgcgttgaaacacattcaagagcgcaggaaaaagaggcagaagacagaaggagcagaagccagtaatgtcccagaaacaaaaactgcccgttcaattcctcaaaagaaaccagttgtggagacagatgccaaaactaaatccacgctttcaaaagacattttggctggcgttttcgggggttcatcatgaccacctcctatctttcggcatggattggtgcatgccaaactgaatggagtgctgcaagatcatcgagttcatattctacttcgaatttttgtagatgaagtcagtttttttttcttgggggaatctttgtaaaactgaaacacatgttctcttctagttgaacaaatatcacgaggaactgccattggcgttatctcttccttggctgggattttcagtgcttcagcttgcagctatgctgtggcctgtgggtgctggatgatggtaggaagacacaagggaacacgagcgattgggatggatatgcagccatgcagtgtggggtgatctgttcttgcccgaggaatggaacatgatgctgtgatcatgacatcgagattggtgagagataaggttgtgcaagctgaccaccatgaccaccgtttcagaacttgtttcgataacgagtattattatacttgtgttgtagtggaatttaaactaa

SEQ ID NO: 105249 - DNA, 1076 bp, Zea Mays
acgatcctggcatcctgctcagagcgcgacgatggggcccgtaggcctgcagtgcgcggtgaacagcctcgcggagaagaggcccctggccaccttcctgagatcgaacgcagctcccgcgcggggcgcagaggaacgcttcgacgatcccctgctgatgtgctcgcgcagcgtgaggttctcctgcctcatcacgtccatggacgacgccagctgcctgatcacctcccgcttctcctcgtccttcccggccagctccgccctgagcgccgccgcgctctcctcggccgccttctgcagcgccgcgttctgcgccttgagcctctcgatctccgcgcgcatctgctgctccgcctgctcacgctgttcttgctgctgctgctccggcggcggcggcggcgactccgtcttggccatccccgcacgcgccagctgctctgcctcgtattcttcctgcccggggtcgtccacttcggactccgagtcgtacgtagaggccgagcaggaggagcgaggagtggtcctgccgttcgtcgacgaccggctctgtgtgcaggaagacaggccgaacaccgtgtgccgtgtgccgctgccgtgcttcagcaggtcgtactgctccgccagcgagcggtgcgtgcggtacaggtcgccgagcatgtccaccagcaccggccgcttcttgtagtacatttcggcgcgctgggcgaacgagtccgcgtcttggtcgatcagcttcagcatttgcttggtcttgtcatccagctctgagaccgacaagcagcacaataacctctcgtcagtaagcagtggtagtttcatcactttcatccatcagagcccaaaggtcctagagataactacaacaaggttataaattcccatgtggccatgtaaagtcaagtgcacgtgagcaatagattcagttgtgaagtaatgtcaagtgcaaatgagcaatctagattaaagatacctacagcatgctaaaacgattctgatgaccttaaactaaccctgtggattgtcaagacacttttcgggtaaatgatcattagagaaattcccaggtaaactcaaaa

SEQ ID NO: 105250 - DNA, 1753 bp, Zea Mays
atgccaagacccaatccccatggagtcatggacaaggcaggctccacgtcctttgtccctgtccacgccgaggacaaagtcacgacaccaaatccctcccaggcatcacagaccccattctccccccacatcagcacagctcaggaagcttcccatcctccatggcctaaatcatgtctgacacttgacagttcacaaaaaggtcccgtttcgtggaccaatgtcttgcttcggttgaaaggcgcggtatctgctgctgcttctgtggagttattaggcttcgatttgggggtgggggccggtggtttcagcgtgggaggaccgcgaaaggcgatgctttcagcagcatgatccaggagatgaagggcgagatcggcgccatctcgtcgcgcggcgtgctacggctccggccggggagccacgccggggccgggcgagcgccggcagccgagccggacgaggcgccgcgggagggctgctgggcgcagttgcctctcgagcttctgcgtatggtgctggtcagggtcgaggaccaggagccgcggtggccgggccgcagcgccgtcgtggcgtgcgcctgcgtctgccgctgctggagggccgccgtcaaggagatcgtgcgcgtgctggaggcgtctgggaaactcaccttccccatctctctcaagcagggatgcccctctcaaatgtttcatcaggaggaaccgggctgctcagtcgtattctttgtgccttggagtcactgatgggttagctgatgatgggaaattttctacttgctgcacgcaaatgccgtaggcctgcatgcactgaatacctgatctcgcttgatgcgaagaacacatcagctggttcctacattggcaagctaagatcaaacttcttgggaacaaagtttaccgtctatgatgcccatccaccttgtgccagagctgcggtttcaaaggggtacatgatcggctcagcccatgtttctcctggggtacctgctgggaattatccggtttctcacatttcttactatgcgactttgggttctagggtgccaagaaagatgaagtgtgtcatggacagcatccccgtctcagcgattaaaggaggagggactgctcccacgcagaccgagttcccatccatgagctccagctccttcgcatcggttccattcttcactaggaaaccaggccaccgtccggacagttgtccaggtgttccgccgggtacccagaacgaaaccaagacggtgctgaagaacaagtcccccaggtggcaccagccgctgcagtgctggtgcctcaacttccacgggcgggtcacggtcgcgtctgtgaaagaacttccagctggtggtggcttcgggcgagagtaaggctagctgcagcggcatccgccacactcgcactccttagccctgtagccatttaggatgacgcctgaagctctgtagccatttagggtgacgcctgagctgtaacggcgtgcgctaaacgggtccctacctgctacagccgtaggtgaagacgcgcacgtcccccagataagggaagcactgtagcgcccccacagtgctctcctatttaatagttgaacaaaaatagaaataaaagatgaatagggttagataataatattttatagttgtagtggggtataggggataatatagggagaaccgctgcgggagatgaaaatttagggggtgaaatgttgatgatgtgacacaaaaaagtgatataagaggaaaaatttagag

SEQ ID NO: 105251 - DNA, 1458 bp, Zea Mays
cgaccggccggcggcaacaacacgtgcgagcagcgaccgacctgcaacaccaaaccaaccaagcaacccacgagacgagacgagaagcacatgctgcgctgtcgccctggtagagcgagcgaggcacgggccacgccacggtccccctactcctccggatcgatcgggggagtagtgtctcagacctcgccggacttggcgaaccgccccttgatccgcatccggccgtcagcgcgggccttgcgcgactcgtaccggatctgcttgccgaacctgtgcgcaagcaagagcagcgagagctagcgacgtgagagcgactgtggtgtcgatcggagctaccactactccggctcgcccgctcacctcctgttcttccgcttctccttgtagcgcgagatcaccgtgccgcggtcggggtgggccacgtcgtagccgcccttcttttccgtcaccggcaccagcgccgtcgtggccaacagctgcggtcgcggggccgtttcctcgtctggcttgttgccgctattgtccacgtcgccgccgctgctgagcgtgacgctggcggggaagatctccgacatgtccacgaacgaggacaggcacggctcgtccggcgccggagcagcctgctcgcgcgcctcctccacctccacctccgcccggcgcgcgtcgacgtcacaggcggtcgcgatccacgcctcctgctcctgtcaccagttcatgcatgtcgttgcttagaaatttgatgagatcctgttgcccttggaaatatgtagtttagaattgccatatataaactagtagatgctgtaatgtgtgcagctgcagcagagaagtgactgaacactgaaccaaacctcgtgggaaggcactgctgcgaaagccatggtcgctgcatcatgccaggcggcgtcagcgtcagcagcgtcgagagccccgaagtctgcggcggctccaatgtcgagctccggcgacgcccatggaggcagctgctcgccgtcacccggctccagctccgcgtaagacgccgccacggccgccgcctccgacttggcgagctcctccagctgccggattaccacgtcagccagctcaccgccggagctccggttctaggtcgccatatcaagacaaccattagagaagaggaaaaagaatcccgttttttttttgtttggtttcatttaacaatggctcttgtagcagggcagcagccgaagcagcaccgtacctttggggacggcggtgcgaggagcggatggaggccatgacaagatgtggtaggaacgaccacgtcctccaagcacaccacctggggctcctcccaggtggaccaccaaccgacgtccccgcccgccgccgccgccttctcgtcgtacccggcgacgccgaggatggccgcgagctcggcgatcgaagggcacccggcgtactcttccaccgcgtcatggtcgtggtgga

SEQ ID NO: 105252 - DNA, 2236 bp, Zea Mays
cgcccctaaccccgccttccgcttcccacccgcccgcctgcctccccgcgccgccgcctccggatcgcggcctccctccctcctgcgccgaagcttcgcgcgctcggcccgccccatgcttcgccgcgggtgaccgacgcctccacggccggccatgggctgcgtgcacggacgccccaccacctccagccccgcgcccgccgccacctcctctcgccgccgggaccagcccgcggcctcccagccgcaccaggaaggggtcgattcctccgacgccgcgcctccagcggacgccgcggcgccggagcagccggcggccgagaagcctgagaaggtcaagcgggagcggcggtcgcggtcgtcgcgctccgcagccaccgcggcggcggcgcacgccgaggtgcgcctgggcgggagcttcgccaacaaggcgcgcggggagcaggtcgccgctggctggcccgcctggctctccgccgtcgccggtgaggccatcgatggctggacccctcgccgcgccgactccttcgagaagatcgacaagatcggccagggcacgtacagcaatgtgtacaaggcgcgggactcgctcagcggcaagatcgtggcgctcaagaaggtgcgcttcgacaacctggagcccgagagcgtgcggttcatggcgcgcgagatcctcatcctgcgccgcctcgaccaccccaatgtcatcaagctcgacgggctcgtcacctcccgcatgtcctgcagcctctacctcgtcttcgactacatggtccacgacctcgccggcctcgctgccagccccgacatcaagttcacgctgccccaggtcaagtgctatatgcgtcagctcttgtcagggctggagcactgccacaaccggggagtgcttcatcgcgacatcaaggggtcaaacctgcttttggacaacaacggtgtgctgaagattggtgatttcggtctggcgtccttcttcgaccccaaccataaacagccaatgacgagtcgggtggtgacactctggtaccgccctccagagttgctgctgggtgcgacggattatggagttggcgtagacttgtggagtgcaggatgtatactggctgaattgctggctggaaagcctattatgcctggacggactgaggtggaacagctgcataaaatttttaagctatgtggctctccgactgaagaatattggaaaaaatcaaagttgccccatgcaactatatttaagcctcaacagccatacaaaaggcgaatagcagatacattcaaagatttccctcaatcagcacttcgactgatcgagacactacttgcaatcgatccatctgaccgattaactgcaacttctgcattgaacagtgatttctttaaaacagagccttatgcgtgtgaaccatcaagtctgccccaatacccgccaagcaaagagatggatgccaaacgaagagacgaagaagctagacgattaaaggctgctggtggtagagctaatggagatggaacaaggaagacaaggacacgggaccggcctagggctgttccagctccagaggcaaacgccgaactgcaagcaaatattgataaaagaaggttaataactcatgcaaatgcgaagagcaagagtgaaaagttccctccgccgcatcaggatggcgcacttggatttcccttgggctgttcgaaccacatggaaccttcatttgaacccccagacccttcttccttcagcactgtatttccttacgaaaaaagcaccgtgccaacctggtccggaccattggcggactctgcagctggcaaccagaagcggaaacacaagtctggccgctcctcgaaacaaccagcaaccgcccgtgctagatgatacacatcatgccatgcttagtccaaaccaaatcttcaatacctcccaaagaaataccttgcagtggttcctacaaactgggatacctgattcggaatcaagagctacagcaatgaactgttttcttttcctcagatccattcatgtacgcattttttttcctgagcatcgagcaatgtataggctggagatggagctggattagtcagttatgtacattaggttctcttttccattcttacaagcagcaacatgtcagtttagatttattcgagtgaggaatggagctggtaggtcaacttagcaagctatcattctacatagatacttacaatcaattgaaatattttttacttttta

SEQ ID NO: 105253 - DNA, 1774 bp, Zea Mays
aaactctcctcgagctcaatgacggcaatcgccatggccgagcttccacttcactacagctactacctcctcgtcaccatcttgatccctctgctagccgccatcccactcctccgcctccacagttcggcggcccggcgccggcgcagcggcgcggcgccgctccctcctccgtcgccgtgggcgctcccggtggtcggccacctccaccacctggcgttcgcgggcgcgctcccgcaccgcgccatgcgcgacctcgcgcggcgcctcggcccgctcatgctgctccgcctcggcgagctccgcgtcgtggtggcctcctccgccgacgccgcgcgcgaggtgatgcggacccacgacctcgccttcgcgacgcggccgctcagccccaccgccatggcgctgctcggcgacggcagcctcggcctcgtgttcgcgccctacggagacgggtggaggcagctgcgcaggctctgcaccgccgagctgctcagcgcgcgccgcgtccgctcgttcagggtcgtgcgcgaggacgaggtccgtcggcttctccgctccgtggcggcaaaggcctcgccggtgcggcagcagaagcagcaggcgctggtcgacctgaccgagatggtgtcggcgtacgtggccgacgcgtccgtgcgcgccatcatcggcagcaagttcagggacagggacacgttccttcgcctgctggagcgccgcctccggaacgtgcccgcgcagagcctgccggacctcttcccgtcctggcgcttggcgacgctcgtcagcccgacgctgcggctcctgaagcgcgagcgccgggacatgatggcgttcatcgacaccatcatccaggagcaccaagacagcagaggcgccgccgacgacgacgacgaggaagaggacttgctcgacgtgctgctgaggatccagagggaggacgagctggatccacccctcaccaccgagaacatcaaggctgtcatcatcgatatattcggaggaagcagcgagacatcggcgaccacgttgcagtggaccatggcggagctcatgaggaacccaagagtaatgcgtaaggcgcaggacgaggtccggcgagggatcgccgggcaggagacagtcacggaggacagccttagcggcctgcgctacctgccactcgtgatcaaggaggcgctccggctgcaccctccggcgccgctgctgatcccacgggagtgccgggcggcgtgccgggtcctggggttcgacgtgccggcgggcgcgatggtcctggtcaacgcgtgggccatcggcagggaccccagtgcctgggacgcgccggagcagttctcgccggagcggttcgagggcgtaggcgccgccgacttcagagggacggacttcgagttcatcccgttcggggccgggcggcggatgtgccccggtatagcgttcgggctggccaacatggacctcgcgctcgcctcccttctctaccacttcgactgggcgctgcccgacggtgtggagcccggccagctggacatgacggaggcgccggggatcacggctcgccgcctctcccacctcctgctcgctcctaccgtccgcgtgccgctgcaaggggagtgagtagactggagtctcgctcgcatgagctttttgatgctcccttgtgaagttgtgatgatcgtgatcctcatccccctgcagagcaaacaaaaatcgttttttactgtacaaacccgcctgacatgtctggaaatcaccccattacatcattccgacgaag

SEQ ID NO: 105254 - DNA, 526 bp, Zea Mays
aaccaagttcagtttcattccgttccaaacaaagaggcaacagttctaaaaattctgactagctatttcaatttatttcagttccacggtgtattgtacatggttcatcgcgcgcaaccagaaacattcccttggtggtgactggtgaggacgaccgcgcgcgttgggagggcgcaggctcagtgcttgcttattccaggagctaccgctacggacatggcgccatctatagagcagagtggaacagaatctccgccattacctgtttgccggacggaacagtgggctcaccccactcaaggaccttcttctctagcgcctcaaagtctcctttcccagcctgttccaatccataaaagcaatgttacaacgcactgacaaaccgcagttccaaatccagtccttggcagacaagaaattgaaactacaaaaaactaggaagcgccatacctcgatcaaggcaccaatctcactatcaaagctctggtaccgcttgcggacgagagcatctagggaaccatcctaa

SEQ ID NO: 105255 - DNA, 699 bp, Zea Mays
aagttctctcttaagatcagtgttcagaagagtttggtaaccctctcttccaccccaaaacacatagttttcaccacctaggtaataaccaacctccaaagctttcttaacttgtgcagccgcatatgcatatactttaacctctgggctgcaatattagtgaagagtgctcttagcctctagacaagctaagtgccaacagtttaaggttaccctaacctggagctgctttgccagctcaactatctcatccaagttagcatttgtttcctgcaatgtttttcccatcaggggcaatatccctatcatggaagcaccatttgtcaacccccagcttctccatgaactcaaagtgagctctcactgcaataccatggccaacgaatttgtgccgtcctcccaaggccaaacctttgtaggcgcaccaaaaggatcagcaccagtaccacggaacgtgtgccagaacgcaacactgaagcgcatccagtcctagtagcagaacaaataagcataaatgttgacttcatcctacagcgtgcaaaggttttacctttacagtgtaaaagagggggtacagtgaaaactaaacaaagccagcagatggggttcactactgatcataccttcatcttctttccgagaatgacttcctccttgttataccacttataagcaagagggttcttgcttgttggaccc

SEQ ID NO: 105256 - DNA, 660 bp, Zea Mays
acagtcacatttaaatctgctattgggaatgaaaggtctagccatgggcctactgctgatggggattttggcgtttccattagtgcacctggtggtgcagttgctcctgtaccaacttggacgcttcaatctcgcatgctcatgaatggcacttccatgtcatctccttctgcctgtggtggggtagctcttcttgttagtggcatgaaggttgaaggcattccattaagcccttattctgtaccaagcataatagagaatacagccgcatctataagtaatgcacctgaggagaaactgaccacaggaaatgggcttttgcaagttgatagggcttttgaatatgcccagcaggctaacaagttgccacttgtttcttatagaatctcaatcaatcaagtgggaagtcaatatttttcctcgaaaagcacaggagaattgcgccctatctctactactaattatgtcagtactgtaggagtccacacacccggtgcacattctgccacgcgcatccgccccgcaaccgcccgcggtgaaccctcccccgcataccgccgacagccccgtatctcgcagcccccaaatcccgctccggctcctcaccagcgcaatccacgtggtgccctcgacccatggagcatcgatataaaagcataa

SEQ ID NO: 105257 - DNA, 237 bp, Zea Mays
atggcgcttaggggttcatgggtgcggccagttcaacacctactacccgtgataaccgacaaggtgcttgcttgtactcggcggaagtggagtttatttacgacgcccgacatcagcctcgtatctgtcgatctgctcgtgcccgaagcacgagctgtaccggtggacgctggagattgtggtgtaggccgtgatgtgtgggcgctggcgcttgtcttcgcgtctgagccattctga

SEQ ID NO: 105258 - DNA, 1441 bp, Zea Mays
ccgcggtgtggccgccacctcatcacaggcgcccaccactaccaggccaccccaaaacgcaacgcatcgcgacggctccccaaccccaacaagtctcttggccaggtctccctctccccggctctccgccttcctcttccagtccccgcgcgcgagatcgccgccccgtgtgggccctagatcccgatggcctcgcgccgccgcaccctgctcaaggtcatcatcctcggcgatagtggggttgggaagacttccttgatgaaccaatatgtgaacaagaagttcagcaatcagtacaaggctacgatcggcgcggatttcctcaccaaggaggtgcagttcgaggacaggctcttcactctgcaaatatgggacactgctggccaggaaaggtttcagagtctcggcgttgcattctaccggggagcagattgttgtgtcctagtctatgatgttaattctatgaaatcatttgacaacctgaataactggcgagaagagtttctaattcaggctagcccatcagatcctgataatttcccttttgttctgttgggtaacaaagttgatgtagatggtggcaacagccgcgtggtatctgagaaaaaggcaaaggcatggtgtgcttccaaagggaacatcccgtactttgagacgtctgctaaggacggaacgaacgtggaagacgccttccagtgtatcgtgaagaatgctctgaagaatgagccagaggaagaactgtatgtgccagataccgtggacgtggtgggtggcaaccgggcccagagatcatccgggtgctgttaaggcacgaggcatcacgaggcgttgtgaccatcatcgtcggttatgcagtgaccaaacaataccttagcattgctgggtctccgtggttatctacgtatccgtattccatttgttacctttccagtctcactgctatgtacccaagggcgcctgtcaattcggtggactttgtgcagtttcatcagtagcgtcataccttgtgaatacaattggccaaaataagaggaagtgtaaactaaagttcatgctttatggttttgtgttgtattaactcgtccgccttttcctcgctttctgcttcagtgcaaacatgttaatgccatcgcttaggctattcattaagagtagttttatcgcattgtttctaaggctattatgtaaacatttgcctagaaaacaatatccagagtttcaaaaactctgttagagcatgtataatcccttttagggctagtttagaaattccattttctaaagaatttttattttttaatggaaattagtttatttttttcttggaaaaatagatatattttggaaaaatagtgttcccaaactaacccttaatatgaggtttctatgggattgaaaatatataagttatgatcaaaggctttagattataacatgtatt

SEQ ID NO: 105259 - DNA, 1221 bp, Zea Mays
cttctggttggttggcttgttttctttgagctgtgatgtaattcagatatgtgaacaagaagttcagcaatcagtacaaggctacgatcggcgcggatttcctcaccaaggaggtgcagttcgaggacaggctcttcactctgcaaatatgggacactgctggccaggaaaggtttcagagtctcggcgttgcattctaccggggagcagattgttgtgtcctagtctatgatgttaattctatgaaatcatttgacaacctgaataactggcgagaagagtttctaattcaggctagcccatcagatcctgataatttcccttttgttctgttgggtaacaaagttgatgtagatggtggcaacagccgcgtggtatctgagaaaaaggcaaaggcatggtgtgcttccaaagggaacatcccgtactttgagacgtctgctaaggacggaacgaacgtggaagacgccttccagtgtatcgtgaagaatgctctgaagaatgagccagaggaagaactgtatgtgccagataccgtggacgtggtgggtggcaaccgggcccagagatcatccgggtgctgttaaggcacgaggcatcacgaggcgttgtgaccatcatcgtcggttatgcagtgaccaaacaataccttagcattgctgggtctccgtggttatctacgtatccgtattccatttgttacctttccagtctcactgctatgtacccaagggcgcctgtcaattcggtggactttgtgcagtttcatcagtagcgtcataccttgtgaatacaattggccaaaataagaggaagtgtaaactaaagttcatgctttatggttttgtgttgtattaactcgtccgccttttcctcgctttctgcttcagtgcaaacatgttaatgccatcgcttaggctattcattaagagtagttttatcgcattgtttctaaggctattatgtaaacatttgcctagaaaacaatatccagagtttcaaaaactctgttagagcatgtataatcccttttagggctagtttagaaattccattttctaaagaatttttattttttaatggaaattagtttatttttttcttggaaaaatagatatattttggaaaaatagtgttcccaaactaacccttaatatgaggtttctatgggattgaaaatatataagttatgatcaaaggctttagattataacatgtatt

SEQ ID NO: 105260 - DNA, 2586 bp, Zea Mays
ggacataatcttttagagtgttctacaaaggaccgagaatattcttttagaggtggaatttagaggacgctgctcgagacaggcttagttggaaagtctctggtcactggggagtcttgaggcattctgcattgctggacacggtcttatccgatgtccgctgaaaaaaatctgcgatctcaacagagagacacgccggcagcaacagctagccagcgatggcgccgcccgccgtcgccgcgtcggcattccctttccgcctcttctccgcggaggcgcgccggaacaataagagcggccgaggcaagcggagcgccgccaggccgctcaagtcctcgcccccacctcgccctccctcctcctcttccgtcataggcggcggcgtcgcggccaccacgttcacgcggctcccactccgcgatgcgccagagtccaccgaggtcacgctcgaccgcttccccaccgccccggccaacccgggggcgcccgctctcacgctcgggagtgtccaacggctggagaacgaggagttcgatgttgggtggaggcccaactctgtcgcgcggatccctctgcgggactcgtcggacggtgtggagctcaccattggccagttcgaggcccgcgcggccggcaggaagagcactggcggtcgcgggtttacgcggcaaacggtcgaacgccttggcgacgacggtgagggggaggagctcgtagtcaccagcctcgatgtgttcgaggtcaaaaacggcaggagagatcgtggtcttgttcccgaagtgctcgacgacggcgacgacgtcgtggtgttcgacccggactacggcgtcgacagcgacgacgaggaggaggagttcgagatgttcccgttcgacaaaagtcatcatgaagaagctgatgccgttccacgcgcggagatcggtgaggtagagtatggcgacgagaatgatgacaacgacggtgacgaggttgtagtgttctacgcagactacgacgaggaggaggactctgaggaagacggctacgaggttgagaacgcggaggaaggggaaggtgatgtgaaggagaagggagtgccggcagtgatgcggtgtttcgacaccgccaagatattcgccaaggccggggacggcgggaacggcgtggttgcgttccgccgcgagaagtacgtgccgtacggggggccgtcaggcggcgacggaggccgcgggggcgacgtgtacgtgcaggtggacggggagatgaactcgctgctgccgttccgcaagtccgtgcacttccgcgccggccgtggtgcgcacggcatgggccagcagcaggccggggccaagggcgaggacgtcgttgtgaaggtgccgccggggacggtggtgcggacctcagatggaggcgtggagcttcttgaactgatgaagcccgggcagcgcgcgctgctgctccccggtggccgcggcggccggggcaatgcggcgttcaagtccgggacgaataaggtgcccaggatcgcagagaagggggagaaaggcccagaaatgtggctagagttggagctgaagttagtcgccgatgtagggattgtaggtgctccaaatgctgggaagagcactctcttgagcgttattagtgctgccaagccagctatagccaattatccttttaccacattgctaccgaaccttggcgtggtctcattagattttgatgctacaatggtagttgctgaccttcctggcttactggaaggcgctcatcgtggttatggtttgggtcatgagttcctaaggcatagtgagcgatgctctgtattggtgcatgtcgttgatggttctgcacaacaaccagaatatgagtttgaggcagttcgcttggaactggagttatttagcccgtctctggttgacaaaccctatgtggtggtgtacaataagatggaccttccagaggcatctgagagatggaatacatttaaagaaaggctacagtctgaaggcattgaacctttctgcattagtgcaataaacaggcagggcacacaggacgtcattcatgctgcttacaagcttctgcagaaagagaggcaaaggatgaaggaaactgaaggatggagcgggacagaaaatctgaaccacgtgtctgaggcaataaaaaaggaaagacgtgcacccatgaatgagtttgaggttttccatgataagggtacaaatacatggaatgttgtcggagctggaatccagcgtttcgtccagatgactaactggcagtactcggattccttgaaaaggtttcagcatgccctagaggcatgtggcgtgaaccgggctcttatgaaacagggagttaaggagggtgatacggtgataattggcgagatggaaatggtttggaacaacgaaacggatagagcacgcccgtcaaagacgatgaacacgcaagatgatgctgtccgttggcccgaatttggctagagcagcaatagttcttgaggctcttcgcacctgtagaggtaaaatcttactgaaaagcttggcactggccttaactgaagcatcggatcacataataaaaacaaaaactccagtgaatcat

SEQ ID NO: 105261 - DNA, 2736 bp, Zea Mays
ggacataatcttttagagtgttctacaaaggaccgagaatattcttttagaggtggaatttagaggacgctgctcgagacaggcttagttggaaagtctctggtcactggggagtcttgaggcattctgcattgctggacacggtcttatccgatgtccgctgaaaaaaatctgcgatctcaacagagagacacgccggcagcaacagctagccagcgatggcgccgcccgccgtcgccgcgtcggcattccctttccgcctcttctccgcggaggcgcgccggaacaataagagcggccgaggcaagcggagcgccgccaggccgctcaagtcctcgcccccacctcgccctccctcctcctcttccgtcataggcggcggcgtcgcggccaccacgttcacgcggctcccactccgcgatgcgccagagtccaccgaggtcacgctcgaccgcttccccaccgccccggccaacccgggggcgcccgctctcacgctcgggagtgtccaacggctggagaacgaggagttcgatgttgggtggaggcccaactctgtcgcgcggatccctctgcgggactcgtcggacggtgtggagctcaccattggccagttcgaggcccgcgcggccggcaggaagagcactggcggtcgcgggtttacgcggcaaacggtcgaacgccttggcgacgacggtgagggggaggagctcgtagtcaccagcctcgatgtgttcgaggtcaaaaacggcaggagagatcgtggtcttgttcccgaagtgctcgacgacggcgacgacgtcgtggtgttcgacccggactacggcgtcgacagcgacgacgaggaggaggagttcgagatgttcccgttcgacaaaagtcatcatgaagaagctgatgccgttccacgcgcggagatcggtgaggtagagtatggcgacgagaatgatgacaacgacggtgacgaggttgtagtgttctacgcagactacgacgaggaggaggactctgaggaagacggctacgaggttgagaacgcggaggaaggggaaggtgatgtgaaggagaagggagtgccggcagtgatgcggtgtttcgacaccgccaagatattcgccaaggccggggacggcgggaacggcgtggttgcgttccgccgcgagaagtacgtgccgtacggggggccgtcaggcggcgacggaggccgcgggggcgacgtgtacgtgcaggtggacggggagatgaactcgctgctgccgttccgcaagtccgtgcacttccgcgccggccgtggtgcgcacggcatgggccagcagcaggccggggccaagggcgaggacgtcgttgtgaaggtgccgccggggacggtggtgcggacctcagatggaggcgtggagcttcttgaactgatgaagcccgggcagcgcgcgctgctgctccccggtggccgcggcggccggggcaatgcggcgttcaagtccgggacgaataaggtgcccaggatcgcagagaagggggagaaaggcccagaaatgtggctagagttggagctgaagttagtcgccgatgtagggattgtaggtgctccaaatgctgggaagagcactctcttgagcgttattagtgctgccaagccagctatagccaattatccttttaccacattgctaccgaaccttggcgtggtctcattagattttgatgctacaatggtagttgctgaccttcctggcttactggaaggcgctcatcgtggttatggtttgggtcatgagttcctaaggcatagtgagcgatgctctgtattggtgcatgtcgttgatggttctgcacaacaaccagaatatgagtttgaggcagttcgcttggaactggagttatttagcccgtctctggttgacaaaccctatgtggtggtgtacaataagatggaccttccagaggcatctgagagatggaatacatttaaagaaaggctacagtctgaaggcattgaacctttctgcattagtgcaataaacaggcagggcacacaggacgtcattcatgctgcttacaagcttctgcagaaagagaggcaaaggatgaaggaaactgaaggatggagcgggacagaaaatctgaaccacgtgtctgaggcaataaaaaaggaaagacgtgcacccatgaatgagtttgaggttttccatgataagggtacaaatacatggaatgttgtcggagctggaatccagcgtttcgtccagatgactaactggcagtactcggattccttgaaaaggtttcagcatgccctagaggcatgtggcgtgaaccgggctcttatgaaacagggagttaaggagggtgatacggtgataattggcgagatggaaatggtttggaacaacgaaacggatagagcacgcccgtcaaagacgatgaacacgcaagatgatgctgtccgttggcccgaatttggctagagcagcaatagttcttgaggctcttcgcacctgtagaggaagatgccagtgggttgacgtgcatgaagcaggatgcagatctttggcatggttgttttgaggagggccacgggtgggcggcgcggcacatgttgtagagaagttgtaggggaagatgagcacgacgctcgacgcggcgatttattaaaatgcttgtatacaacggtgttagtacgcaaacaaaacaatgatagattcaatacacgtagctcgctcttgtctgatgtagtca

SEQ ID NO: 105262 - DNA, 847 bp, Zea Mays
ggaatgtgatatttttttaaaggccagtttaggaactacgttttcccgtagaatccttattttttcaagaaaaaataaactggaaaataagaattccataggaaaacgtggtttccaaactattctaaaaaatgggctaaaaaaaatcgaccgtcttcctcccaacccaagtggatgtgcaggaccgcgaacacgaggaggcaggggagcagcatccacaaccacaagccatggcggggaggactaacatccccactaacaactccgccctcatcgcaatcatcgccgacgaggacaccgtcactggcttcttgatggccggcgttggcaatgttgatctgcgcaagaaaaccaattacctcctcgtcgacaacaagacgacagttaaacaaatcgaggacgcgttcaaagaatttactgcaagggaggatattgctattgtgctcatcagtcagtatattgccaacatgataagatttctggtggatagctacaacaagccagtccctgctattctggagatcccatccaaggaccatccatatgatccagcgcacgactcggtgctgtctcgagtgaagtatctcttctctgcggaatcggtggcgtctgataggcgatgaaggcatccttgtgtagtagtaccctttggtgtatctgttttgttatgtattgaaaagaagtggcatgcgtccgagcgagacagcaaacaataataatggttgtggaaccaaaccaacacctttttttctttcataaaaggttggaatgctattttgttgctttgtactgtatttggttggttaatagagagtaataaaatgcgattgtcatgttgcacagtact

SEQ ID NO: 105263 - DNA, 817 bp, Zea Mays
aaactattctaaaaaatgggctaaaaaaaatcgaccgtcttcctcccaacccaagtggatgttcgtgcctatatcacagcatcagaaattcagaatcgatccgatctccgcttgcgctgagctccatcagattcaattctctgcaggtgcaggaccgcgaacacgaggaggcaggggagcagcatccacaaccacaagccatggcggggaggactaacatccccactaacaactccgccctcatcgcaatcatcgccgacgaggacaccgtcactggcttcttgatggccggcgttggcaatgttgatctgcgcaagaaaaccaattacctcctcgtcgacaacaagacgacagttaaacaaatcgaggacgcgttcaaagaatttactgcaagggaggatattgctattgtgctcatcagtcagtatattgccaacatgataagatttctggtggatagctacaacaagccagtccctgctattctggagatcccatccaaggaccatccatatgatccagcgcacgactcggtgctgtctcgagtgaagtatctcttctctgcggaatcggtggcgtctgataggcgatgaaggcatccttgtgtagtagtaccctttggtgtatctgttttgttatgtattgaaaagaagtggcatgcgtccgagcgagacagcaaacaataataatggttgtggaaccaaaccaacacctttttttctttcataaaaggttggaatgctattttgttgctttgtactgtatttggttggttaatagagagtaataaaatgcgattgtcatgttgcacagtact

SEQ ID NO: 105264 - DNA, 751 bp, Zea Mays
aaactattctaaaaaatgggctaaaaaaaatcgaccgtcttcctcccaacccaagtggatattcaattctctgcaggtgcaggaccgcgaacacgaggaggcaggggagcagcatccacaaccacaagccatggcggggaggactaacatccccactaacaactccgccctcatcgcaatcatcgccgacgaggacaccgtcactggcttcttgatggccggcgttggcaatgttgatctgcgcaagaaaaccaattacctcctcgtcgacaacaagacgacagttaaacaaatcgaggacgcgttcaaagaatttactgcaagggaggatattgctattgtgctcatcagtcagtatattgccaacatgataagatttctggtggatagctacaacaagccagtccctgctattctggagatcccatccaaggaccatccatatgatccagcgcacgactcggtgctgtctcgagtgaagtatctcttctctgcggaatcggtggcgtctgataggcgatgaaggcatccttgtgtagtagtaccctttggtgtatctgttttgttatgtattgaaaagaagtggcatgcgtccgagcgagacagcaaacaataataatggttgtggaaccaaaccaacacctttttttctttcataaaaggttggaatgctattttgttgctttgtactgtatttggttggttaatagagagtaataaaatgcgattgtcatgttgcacagtactgttt

SEQ ID NO: 105265 - DNA, 258 bp, Zea Mays
atgaccatccggatgaacctggcgatgctcatcatcagagctggttgcctggttctccaagttctcgtcgtccttgtgcccaatggcatcagacaggtggtgacaacacatcaccgtgatgcacgcgagactcctgaggacatcattcgtaaacgaagggagagggagcaggagtcagtgacggctaaagctaaacagaggaccatcagaatccaatttataaacacaggccaaaataaaggggacctgcaagcatga

SEQ ID NO: 105266 - DNA, 588 bp, Zea Mays
aaactactactcatctagaaagacaaaaaaaggcgtcaacttgaattcacctgtgataccgagtagtactccaccaatacatatccaacctcggtgctgcagagcaaagagaccaacaagtacaacacaggccatgaatacgatccatcctgtgcaaccagcaagttcgtcaagatgatgatatatttgtcgagaaaggaaaacaccgaatatagtttatagctcaatatttcccaaaccagttcttgctactactttatatatagattcatcgatggcagtgtttttaacattcgagtaagtttgaaaatttatacaactaggaaaaaaatattcgagcactgaatgaagtgatttttttggagtatttgagactccgcacctaacctaatttttttttgtctatgaatagccttacagacagccgtgggacacctttgaacgaaacggacatcagaacaggagtccgtgagtggaagctataggtagcacggagattgcacacgccacgtcagagtcccatcctgtccagcagcagcgcatagctggggggacaaatggttttgtcaagtattgatgaggcatgaa

SEQ ID NO: 105267 - DNA, 6075 bp, Zea Mays
ggcaggggaggacagcgaagagagagagagagagaggggagaccggggggcaagcctgggaggggccgaggaggcccgcttacgaatctcgcgatccccaatccggaagcctcgattcgccgatccgggctcggccggggagagagggatcccgccgatcggggggcgctcgtgctgcaccgattcgagctcgctccctgctctgcccgcgcggggtgcgttcctgcggaggtccgcgccgggccggtagctgctgcgtgctgcctggtggctgctgctaggtaggtggttaggcggcggcaggaggatgcgggcggcggccgcgtagcgccagcgcaggcgcagcagccccggcatgggcgacgacgccgagctcgaggagggggaggcctgcgcctgcggggacgacaccgccttcgtcgaccccgatgtcgcgctctcttacattgacgaaaagcttcaagacatacttggccatttccagaaggacttcgaaggaggcgtttctgcagataatctagggtcaaaatttggtgcatatggttcatttttgcctacgtaccagcgctctcctcttcctcaaactagaagtccccctaaggcaggaaatattacctcaaaatctccctttcaccagtcgaatgaggacttgtctcagaaacctccagctgtggcagtttcatctaccccccaaagtaatggtcctgtggtgcctttttctggtgattcaattaaaaaggaaatacgcccatccacaaagtctgaaaggggttccgtctcccatgattcatatgggccatcaaaatgtagtgaccaaaacagacttaaagtccggataaaggttggctctgataatgttttggcaagaaataatgcagctatctacagtggcctgggccttgatatttcttcaccttcatcaaacgaggatagccctgatggccgtgggagcctgtcccctgaagttaacaatgtgccacatgaatctccacaaaccattcttcagatcatgacatgcttttcagttcctggaggcttcctgttatcccctctaccagccaatatcttgcagttgacaaaaaaggtcgtgtcttcatcaaagaagtgggaatcaaatgtggatgtagaaaatgtacaagaatcatatgaaggccatgtggctaaaagggtgaaatctgatggtaacaaaaagaggctgatagatgcaaaaaattcaaagaacaaaaatgatattagtgcagttatgaaaaaggagattgatatggaattagttgctggtcaaaagatagtatctgaagctcttaaaatatcattgctgtctgaccccagagctatggatgcaaaaggtgagaatcgtcttgaagaggagccagcagaaaacaacttggttggaattagagatgctcgattgaaagagcggtgcaccaagactgactccatgacagtcaaagtggaacctgccaaagcagaggtgatggaatgtttagagaacagtagttttggcagttcagaaatggatctttcagcagtgaaagggaaatcaaaacccaagacagaaaagggtgaggcaactttagaagataggaatacaactaatgacaaagacctaatatcagataggaagcaaaaaaagaaaataaaatctgggagtaaatataatgcctctaactttgaaggtagcattagcaatgttataaacgaaggagcttcagctgttttccacatgggaaaaatttctggtctagaagctttgccttatgacacaaatggggaaaataattccaagagtgaggtcaaaaaaatgcagagagaacaaaaggccaatgtttcgacgtcttctgatttcctggaggaggagaaacacattcattcttctgctgcagttaaggagagaagtgacatgcaatcaaaacctatccatactggaaagaaacccaaagcaaaatcacatagagatgttagggacaacaattttcctgaaggatcttatggaagcaaggaacaggattcattggagaataaaagtgcctttggagatccccggccaaaggaaaaaccatggaagtttgacagcgaggactctgatgcacctgggatctcgaggaaggatagttcttatgtaaagcttgacaaacacctggctactgaggagcagaagatgcatatacttccacctgccactgcttcaactgcgaatgcagcttttatacatgcagccccagtcgtaatagaggaacattgggtgtgctgtgacatatgccagaaatggcgtctcctaccttatgaaatgaatccttcagatcttcctaagaagtggaaatgtagcatgctacagtggctacctgggatgaataggtgtgagattagtgaagaggagactacaaatgctctgaatgcactgtatgtccctgcccctgcaaatggtattccttcagttggccttcctcatgttgcttcatcaggactagtaacatccagcactcccaatatgaatggacatattgagcagagtaggaaaagaaagaatgttctaagtgatggaaattttgtggctgagggttctcaccaaacacagggttcaggtcatccaatgagcaaccaacatgctcccaataaaagtaaaactcatactgatggtatccagtatcctattgatagagattctgtaagcaaatcagttgacccaacaattaaaaagcaaaggtccaaaagcaaacatcacagtagctattctgatggagtagatcttgttgaaagacctaagaagcattctaaagtaaaaagcaagagagacttggatcgtgatgaatacaaagcttctaaaaaaatcaggaaagaagagcgccattttgatagagatcggaaccttggatccggtttagctagtcgtgatgttcccgatgaggccaaggcttttcctgtgaagtcagtaacgtcaaagggttcaggtgaaaggagtgatctttcttcatcaaagcaaaaaaatgtctcacatcataaccatttggaaaattccaagaaagcaaggcaagattatgtaggttttcctgaagacgagagcaaggaatattttcaccagtcagatgtgcaaagatcagatttgtctagtaagaagaggatagtgaagaaatgggaggagagtcagtacaatccagtagctcaggtaagcaaaggagctatcaaggaaacctatagggatcagaacttaaaggaagcaaagttgatgtcattgaattctgaagaactgttttctatgacgagctccaaaccaccgaaagctcaacatgctgatcaggttttgttttatgatggggggcgtacgaacagcgagttagttgaggataacacacactttagtggcaaaacaggtctccctgagcaagaaaatagtctttctgataaggctttagacttgggcaaacctgctagtgatgtggcctatattcagacttcagctgtaacttcaagttcttcaaaggcttcagtctcacaaaaaaagaagcagaccactcaagctatgaagacatcgtcaattgagtctctttctttgtcaccacagagaaactctaacattgacaatgtctctgcctctcatagtagagtttcaggtaaggatggatctctgaatgctaactcaagcactgtgccggccatggcaaaacaactaaatactcaagttggtgtagcagtcaatgatcaatggtctagtgaacctattttggttggttcttcccgaagaaaatctgatagagataatggacaggttcagttaactcaaggtcatgcctctgatggtattcatcctgaaaggggtttgaatgaggacctgcagcctgaatctgggagaaaggattccaatataaaaaactcccatattcctaaaagttctaaccatttgcattctggtgaaaaaaataactataatacagatggctctcctatgcaaccaggaaagcatcttgttgatccaaagacaccagtcttggataaaggtgattcaagtatgcatgaaaataagaaaagtgcaaattctcttcaagatagaaatggatcaactcattgcccaccagatggaaatcctctgctcggtttaccatctggaaaagagaaatcatatctcaaaaacaacaggcaagattcacagaagcctaaaccccagatctcacctctgaaagaaagcaaattggattcccattccactccattaaaacctaatgggtcaaaattgactccacaatcaagacaatacaatgctgaaaatggagggcgacatggcactgcaaaacaagcaattcgtagtcctgctgatacttttagtccagctaggaaggacaatacttcaactgcgtatgctctcaaagaagcccgtgatttaaagcataaggctaatcgtttgaaggaagaaggaaaagagcttgaaagtacaagactctactttgactccgccttaaaatttttgcatgttgcatcacttttggaacctcctagctttgatggtttgaaacaaggcgatgcagcccagagcatgtattcagatactgcaaaactttgcaactttgttggtcacgcgtatgaaaaatgcaagaagatggctgctgctgctttagcatacaagtgtgttgaagttgcttatctgaaggctgcatactgcaagcacccaactgcaagcaaggatagacaagtgttacaggcagttgtacagactgctccaggtgaatcaccatcatcttcagcctcagacattgataatttaaataacaatggattatccaagggcccttcaagcaaggatgccaattcaccacaagtggttggaaatcatttgttgctggccactcgaaatcaaccacacttgatgcggttactagcttatacaaatgatgtcaatagtgcctttgaggctactcggaagtctcacatggcaattgcttctgcttctggcaatcacgaaaatggagttgatggtctttcttcagtaaaaacagtgctggattttaacttccgaagtgtgaatgatctactaaggtttgtgcggatttcaatggagtctatcagctgctgatgtgtgcagaatctgagaaagtgccatctgatggaagttcctgttggatgtttaatctaattaactttgtttttgatgaagtagcatgaagctgaatataatccaacagtgcaaaagcataggtctttcatttgagcttgctggtcaacttgtacagagagtgatcatatttcttctttttttacgttgattacacccaattagtatatatagttgcatacccacttggatgatttagttagtgaggaacacaagtgaagatgagctttgcactgttcaatgcttctgcttggaagaaggatgctcttgtggccgcagttcgttgttatctggaaagtggcttgctactgagcattctcttactacatgatgtaaattgtgaatctccatcaaggctggcttatggctgaagagtcagtatcatagtttcctttgatggtaactcttagttaaggtcaaatgatttatgtgccttttttaagtgctactacttgatgctgctatcttttttttttggccagggagaggacagcaaagccagctaatctcgctatccaagaaatcggctagtagttttttcccttttgaaccttgtcacgatgccttgtcttctggataaagttcacgcaggtttcaaataagaaatcacatggactatcagacttgtatggaatatggatgctgtacaaagatttctaatgtacattagtctaactttttttttcgtgatccccgaaatgccgactatcaccagcgcatgtacatgtatatatacatacaataaaggttggggcatttttaccacgtgctggtctctatgtatgacgcctttggttccgtccaacttttagtctttcacatttttgaaattttgtgacattctagttttttgttaggatagcgtctagtactgggaatttgttgcagaatgcaaaataaattccgtgctgtacaacttgtagccgagtttcaggtcgtcgagtgaagtgatggtaactgctcgccgaatttgc

SEQ ID NO: 105268 - DNA, 5915 bp, Zea Mays
ggcaggggaggacagcgaagagagagagagagagaggggagaccggggggcaagcctgggaggggccgaggaggcccgcttacgaatctcgcgatccccaatccggaagcctcgattcgccgatccgggctcggccggggagagagggatcccgccgatcggggggcgctcgtgctgcaccgattcgagctcgctccctgctctgcccgcgcggggtgcgttcctgcggaggtccgcgccgggccggtagctgctgcgtgctgcctggtggctgctgctaggtaggtggttaggcggcggcaggaggatgcgggcggcggccgcgtagcgccagcgcaggcgcagcagccccggcatgggcgacgacgccgagctcgaggagggggaggcctgcgcctgcggggacgacaccgccttcgtcgaccccgatgtcgcgctctcttacattgacgaaaagcttcaagacatacttggccatttccagaaggacttcgaaggaggcgtttctgcagataatctagggtcaaaatttggtgcatatggttcatttttgcctacgtaccagcgctctcctcttcctcaaactagaagtccccctaaggcaggaaatattacctcaaaatctccctttcaccagtcgaatgaggacttgtctcagaaacctccagctgtggcagtttcatctaccccccaaagtaatggtcctgtggtgcctttttctggtgattcaattaaaaaggaaatacgcccatccacaaagtctgaaaggggttccgtctcccatgattcatatgggccatcaaaatgtagtgaccaaaacagacttaaagtccggataaaggttggctctgataatgttttggcaagaaataatgcagctatctacagtggcctgggccttgatatttcttcaccttcatcaaacgaggatagccctgatggccgtgggagcctgtcccctgaagttaacaatgtgccacatgaatctccacaaaccattcttcagatcatgacatgcttttcagttcctggaggcttcctgttatcccctctaccagccaatatcttgcagttgacaaaaaaggtcgtgtcttcatcaaagaagtgggaatcaaatgtggatgtagaaaatgtacaagaatcatatgaaggccatgtggctaaaagggtgaaatctgatggtaacaaaaagaggctgatagatgcaaaaaattcaaagaacaaaaatgatattagtgcagttatgaaaaaggagattgatatggaattagttgctggtcaaaagatagtatctgaagctcttaaaatatcattgctgtctgaccccagagctatggatgcaaaaggtgagaatcgtcttgaagaggagccagcagaaaacaacttggttggaattagagatgctcgattgaaagagcggtgcaccaagactgactccatgacagtcaaagtggaacctgccaaagcagaggtgatggaatgtttagagaacagtagttttggcagttcagaaatggatctttcagcagtgaaagggaaatcaaaacccaagacagaaaagggtgaggcaactttagaagataggaatacaactaatgacaaagacctaatatcagataggaagcaaaaaaagaaaataaaatctgggagtaaatataatgcctctaactttgaaggtagcattagcaatgttataaacgaaggagcttcagctgttttccacatgggaaaaatttctggtctagaagctttgccttatgacacaaatggggaaaataattccaagagtgaggtcaaaaaaatgcagagagaacaaaaggccaatgtttcgacgtcttctgatttcctggaggaggagaaacacattcattcttctgctgcagttaaggagagaagtgacatgcaatcaaaacctatccatactggaaagaaacccaaagcaaaatcacatagagatgttagggacaacaattttcctgaaggatcttatggaagcaaggaacaggattcattggagaataaaagtgcctttggagatccccggccaaaggaaaaaccatggaagtttgacagcgaggactctgatgcacctgggatctcgaggaaggatagttcttatgtaaagcttgacaaacacctggctactgaggagcagaagatgcatatacttccacctgccactgcttcaactgcgaatgcagcttttatacatgcagccccagtcgtaatagaggaacattgggtgtgctgtgacatatgccagaaatggcgtctcctaccttatgaaatgaatccttcagatcttcctaagaagtggaaatgtagcatgctacagtggctacctgggatgaataggtgtgagattagtgaagaggagactacaaatgctctgaatgcactgtatgtccctgcccctgcaaatggtattccttcagttggccttcctcatgttgcttcatcaggactagtaacatccagcactcccaatatgaatggacatattgagcagagtaggaaaagaaagaatgttctaagtgatggaaattttgtggctgagggttctcaccaaacacagggttcaggtcatccaatgagcaaccaacatgctcccaataaaagtaaaactcatactgatggtatccagtatcctattgatagagattctgtaagcaaatcagttgacccaacaattaaaaagcaaaggtccaaaagcaaacatcacagtagctattctgatggagtagatcttgttgaaagacctaagaagcattctaaagtaaaaagcaagagagacttggatcgtgatgaatacaaagcttctaaaaaaatcaggaaagaagagcgccattttgatagagatcggaaccttggatccggtttagctagtcgtgatgttcccgatgaggccaaggcttttcctgtgaagtcagtaacgtcaaagggttcaggtgaaaggagtgatctttcttcatcaaagcaaaaaaatgtctcacatcataaccatttggaaaattccaagaaagcaaggcaagattatgtaggttttcctgaagacgagagcaaggaatattttcaccagtcagatgtgcaaagatcagatttgtctagtaagaagaggatagtgaagaaatgggaggagagtcagtacaatccagtagctcaggtaagcaaaggagctatcaaggaaacctatagggatcagaacttaaaggaagcaaagttgatgtcattgaattctgaagaactgttttctatgacgagctccaaaccaccgaaagctcaacatgctgatcaggttttgttttatgatggggggcgtacgaacagcgagttagttgaggataacacacactttagtggcaaaacaggtctccctgagcaagaaaatagtctttctgataaggctttagacttgggcaaacctgctagtgatgtggcctatattcagacttcagctgtaacttcaagttcttcaaaggcttcagtctcacaaaaaaagaagcagaccactcaagctatgaagacatcgtcaattgagtctctttctttgtcaccacagagaaactctaacattgacaatgtctctgcctctcatagtagagtttcagtcaatgatcaatggtctagtgaacctattttggttggttcttcccgaagaaaatctgatagagataatggacaggttcagttaactcaaggtcatgcctctgatggtattcatcctgaaaggggtttgaatgaggacctgcagcctgaatctgggagaaaggattccaatataaaaaactcccatattcctaaaagttctaaccatttgcattctggtgaaaaaaataactataatacagatggctctcctatgcaaccaggaaagcatcttgttgatccaaagacaccagtcttggataaaggtgattcaagtatgcatgaaaataagaaaagtgcaaattctcttcaagatagaaatggatcaactcattgcccaccagatggaaatcctctgctcggtttaccatctggaaaagagaaatcatatctcaaaaacaacaggcaagattcacagaagcctaaaccccagatctcacctctgaaagaaagcaaattggattcccattccactccattaaaacctaatgggtcaaaattgactccacaatcaagacaatacaatgctgaaaatggagggcgacatggcactgcaaaacaagcaattcgtagtcctgctgatacttttagtccagctaggaaggacaatacttcaactgcgtatgctctcaaagaagcccgtgatttaaagcataaggctaatcgtttgaaggaagaaggaaaagagcttgaaagtacaagactctactttgactccgccttaaaatttttgcatgttgcatcacttttggaacctcctagctttgatggtttgaaacaaggcgatgcagcccagagcatgtattcagatactgcaaaactttgcaactttgttggtcacgcgtatgaaaaatgcaagaagatggctgctgctgctttagcatacaagtgtgttgaagttgcttatctgaaggctgcatactgcaagcacccaactgcaagcaaggatagacaagtgttacaggcagttgtacagactgctccaggtgaatcaccatcatcttcagcctcagacattgataatttaaataacaatggattatccaagggcccttcaagcaaggatgccaattcaccacaagtggttggaaatcatttgttgctggccactcgaaatcaaccacacttgatgcggttactagcttatacaaatgatgtcaatagtgcctttgaggctactcggaagtctcacatggcaattgcttctgcttctggcaatcacgaaaatggagttgatggtctttcttcagtaaaaacagtgctggattttaacttccgaagtgtgaatgatctactaaggtttgtgcggatttcaatggagtctatcagctgctgatgtgtgcagaatctgagaaagtgccatctgatggaagttcctgttggatgtttaatctaattaactttgtttttgatgaagtagcatgaagctgaatataatccaacagtgcaaaagcataggtctttcatttgagcttgctggtcaacttgtacagagagtgatcatatttcttctttttttacgttgattacacccaattagtatatatagttgcatacccacttggatgatttagttagtgaggaacacaagtgaagatgagctttgcactgttcaatgcttctgcttggaagaaggatgctcttgtggccgcagttcgttgttatctggaaagtggcttgctactgagcattctcttactacatgatgtaaattgtgaatctccatcaaggctggcttatggctgaagagtcagtatcatagtttcctttgatgggagaggacagcaaagccagctaatctcgctatccaagaaatcggctagtagttttttcccttttgaaccttgtcacgatgccttgtcttctggataaagttcacgcaggtttcaaataagaaatcacatggactatcagacttgtatggaatatggatgctgtacaaagatttctaatgtacattagtctaactttttttttcgtgatccccgaaatgccgactatcaccagcgcatgtacatgtatatatacatacaataaaggttggggcatttttaccacgtgctggtctctatgtatgacgcctttggttccgtccaacttttagtctttcacatttttgaaattttgtgacattctagttttttgttaggatagcgtctagtactgggaatttgttgcagaatgcaaaataaattccgtgctgtacaacttgtagccgagtttcaggtcgtcgagtgaagtgatggtaactgctcgccgaatttgcacta

SEQ ID NO: 105269 - DNA, 440 bp, Zea Mays
ggcagcgacacagacgtgacgtcggtccatcgagacgagatccgaggatgtccgggtcgggcggcggcgtgtgggtgttcaacaagaagggcgtgatgcagctggagcagctggcgccggcgagccggaaggcgctggtgtacttgccgacggacgaggtggtgcggtcggtggaggcgctggagcggaggctgggggcgctggggtgggagcgctactacgagaaccgcagcgtcgtgcagctccacaggcgcggcggcggcgccgacctcatcaccatcccgcgcgacttcgccggcctccgctccacccacatgtacgacgtcgtcgtcaagaaccgccaccacttcaaggtcgtcgaccgagacgcctagctggcaagcagctccgtcgtcgccgatggtctcggcatgcatcatgcgtgtgtgcacagttgctca

SEQ ID NO: 105270 - DNA, 990 bp, Zea Mays
cgccgatcaaccagcaagatggccaccgagacaacgtgcgctcctcccgtaacgggacccactcgccgatcaaccagcaggatggccaccgcgccaccggacgaccctcctcatcctcctccggcggaggcgggcgccgccacgccaagccgttcgagaccgtcggggttcgagcagctagacgggcgagtcaaggagctgacctcgtcgcaggcggagttgctggagaggatccagaagctgaaacatgaggtgcagaactggcgctccaatgtagagacgcaggtcaagacataccagaatgaactccaggatctcaagaaaggacttgactctgaagtggaacagctgaaatcggaaatgaaggcggttaggtctgcggtacaggaagagaaaggcaatctacctgcacaaaataccgactttagagacgaacaataaaaatgcaggacaagcttggcagacaccaggccaagcacagtattgaagagcaaacagcaacacagccgtgaattggtgcttccttgcagaggtgaagggctgttctgctggatattcagatcctttcaatggatcaaaaggggggaaagctggcagatacacggaatcacatgaagtattcatttttttaatatataccagcaagtttccaagtgcaaatatctctataacagtgagcaatttcaagagtaatgtacaagaactgcttgttttgtaacaattccatgactactaatactactattacaaacttaatcttgaaataaaatctgcacagcctcctattgttccagtgttctaaacatgcttaaaacaaaaataaaatttgttacccaatgaggaattggaatctggaggtggccatgtaatattgcacgtcagcatgtaatcatttctgcaattttgctgcttcatcacagctagctgagatctccttatgtcatttaactgaaatgcaacagtctagtactccatcccaccttgtaaact

SEQ ID NO: 105271 - DNA, 1614 bp, Zea Mays
ctaagaaaccttaacatctttccggttatctgtgtgaaggcttcctacaagggcagaatatagggagtcatctgggatcaatccagctttcagcatatcatcatacagctggaacgccgcctctgatctcccttccttcgccagacctgatatcagagccgtataggccacgacattaggttccgttcccctctgcttcatctcttcgaatagcttcagcgccacatccacctttccattgacacagtgcccatgaactagcgatgcataggtgtatacatctggaacaaaccctttcttctccatctcctttctgaacctctcagcctcacggatgctccccttcttggtgtacccatcaatcataacattgtaggtcacaacactgggcgtcgcccctttctctgccatttctcggaacagccttctagcctccaccatgtcgccatccttgcagtgtatgctgatcagtgtagtgtaagtgacgtaatttggcacgacacccatctcgatcatgatgtgcaatagagtctttgcctcatccaatctattcaccctgcacagtccacaggccagtgtgttgtatgtgtagatgtccagttcgacgcccattttctccatggccgcctttattttaagagcatcgtccaccatccctttgcgacaatagccatcaatcatggtattgaaaatgatttggttaagccctacaccttgcccttgcatgtctgccagcaacatctctgcagcctccatctgcccaatcttgcagaacccgttgatcaatacaccatatgtacgctcgtttggctcgacgccattgccaacgcattcatccaaaaccttggcggccctccgcatgttccctgctcggcaatacgcgttgatgacggcggtgtacaggtacacatcccccacaacattattcgccttcatctcattaaacagagcctcgaccttgctgatgtccctggcggtcgacaaactatccacaaggatcgtatacgtcccgaccgtcgcctcgatgccttcgttctccatgatctctagaatctcctggacccgcccgtcatccttttgtcgcacgtaacagtcaagcagcgagttgtagcacagcgcattcagactcacgccgtggcgaggcatatcgtcgagcagccggcgcgcgtcgtccacgcgccccgacttgcagagcccgtcgacgacgacggacgcggcgagcggcgagacggagcccgggcacgagccgagcgcccgctccaggaggcccgcggcgtccgcgaggcgcccggcgcggcggagcgagagcagcgaggacgtgagcgagcgcgggtcgaggctgccgaggcgggacacggcggcgtcgagcgcctcggccgcgcggcacgccgcgcccgcgtccgcgtacgcgcggaagagcatatcgtggaacgccgccacggcgtgcggcggcgcgccgcgcgggagcgacgaggcagcgaggtccgcgaacggcaccgccagtaggcgcggcgtgagcagggaccggagcgcggacctggcggcggcgaagcgccgcgcggtaaggagcgacgcgaaggcggcgagcggcggcaaggcggcggaccccgccat

SEQ ID NO: 105272 - DNA, 1419 bp, Zea Mays
atgacggattggaacaatatcacgatacttccaacatgtctaagtactatcactataactcgagctgaacatgagctgacctcgtcgcaggcggagttgctggagaggatccagaagctgaaacaggaggtgcagaactggcgctccaatgtagagacgcaggtcaagacatgccagaatgaactccagggtctcaagaaaggacttgactctgaagtggaacagctgaaatcggaaatgaaggtggttaggtctgtacaggaagagaaaggcaatctacctgcacaaaatacgactttagagacgaacaatagcaatgcagaacaagcttggcagacaccaggccaagcacagtattgaagagcaaacagcaacacaggcgtgaattggtgcttccttgcagaggtgaagggctgttctgctggatattcagatcctttcaatggatcaaaaggggggaaagctggcagatacacggaatcacatgaagtattcatttttttaatatataccagcaagtttccaagtgcaaatatctctataacagtgagcaatttcaagagtaatgtacaagaactgcttgttttgtaacaattccatgactactaatactactattacaaacttaatcttgaaataaaatctgcacagcctcctattgttccagtgttctaaacatgcttaaaacaaaaataaaatttgttacccaatgaggaattggaatctggaggtggccatgtaatattgcacgtcagcatgtaatcatttctgcaattttgctgcttcatcacagctagctgagatctccttatgtcatttaactgaaatgcaacagtctagtactccatcccaccttgtaaactgaataacattatggagttaattctggacttccgacctcttcagttgctacagggtaacttacaaaaacttaggttgctttcccttaaaagcgaagctgcctaagaaaccttaacatctttccggttatctgtgtgaaggcttcctacaagggcagaatatagggagtcatctgggatcaatccagctttcagcatatcatcatacagctggaacgccgcctctgatctcccttccttcgccagacctgatatcagagccgtataggccacgacattaggttccgttcccctctgcttcatctcttcgaatagcttcagcgccacatccaccttcccattgacacagtgcccatgaactagcgatgcataggtgtatacatctggaacaaaccctttcttctccatctcctttctgaacctctcagcctcacggatcctccccttcttggcgtacccatgaatcataacactgtaggtcaaaacactgggcgtcgcccctttctctgccatttctcggaacagccttctagcctccaccatgtcgccatccttgcag

SEQ ID NO: 105273 - DNA, 108 bp, Zea Mays
atggcgcggccaggccctagccggcagctgcccaacgccagggctggcgatagcggggcgtccgcggttcgaggcggcggcttggggattcgttaccaggcgatatga

SEQ ID NO: 105274 - DNA, 1342 bp, Zea Mays
tcatccccccctcccctggcattgcttgccacccctgcaactgcaactgcaacacagagaaagatagcgctagccagaggatcagctccggtcatccagtgaagctcaggctactctacctcgctctcggccatggcgtcaggggaagcagcagagccactgcagtacacgaccaccgcgctgcgggtgtccatccactgcgagggctgcaagaagaaggtcaagaaggtgctccacagcatcgaaggcgtgtacaaggtgacggtggacgcggcgcagcacaaggtgacggtcaccggcagcgtggaagccgacgcgctcgtccggcgcctgcacaaggccggcaagcaggcggcgctctggcccagctcgccggcacccgtcgaggccaagaagaagcccgaggaggtcgcgcctgccgcgttgccagcggcagccgccaacaaggacgctagggcccaggagaagaagccggccaaggacaagaaggccgactacgccgacgccgcggcgcaacccagcaaggacaagacggtcgacataggcgaggccgcggcgaagctcagcaaggacgagaaggccgacaaaggcgaggccgcggcgaaacccagccagcaggacaagaagactggcaaatgcgagccggccccggagacgaagaagggctcccctgcgccggggaagcagcaggacgccgcggaggaggctggcgcggacaagcccggcggcggcggcaagaagggcaagaaggacaagaatccaaacaagccgaaggacagcggcgattgcgaggccccggccgagaagcaggcgtcgccggggcccgagagcccgcgcgggcacggcggcgccttcccgtactacgcggcgcacccggtgctgagctgctacaacgtggcgcacccggtgctgagctgctacaacgtggcgcacccgagctcgagcgtggcgtactacgcgcccgcggccgtggtgccgtacggcgggttcccgcccatggtgccggcggagttcatgtacggcccgccgggcatgcaggagtctagcatgttcaacgaggacaacgccaactcgtgcagcctcatgtgatgtctcatgtctgtcacgcacgcgccgccgctacctatctacacgacaaaattaggcggtcaaagctcttgttgaccagagattaattctttgaattgctcatcagcgcgtcatgtaaaaatcagatgatggtaatagtatattctagttctaggagcgttcagcagtgcactgctactgctaccacttgcattccttctgtgtgcagctatgaactcgtggtaggacaggacagaaattcgaatttctcgtg

SEQ ID NO: 105275 - DNA, 1439 bp, Zea Mays
tcatccccccctcccctggcattgcttgccacccctgcaactgcaactgcaacacagagaaagatagcgctagccagaggatcagctccggtcatccagtgaagctcaggctactctacctcgctctcggccatggcgtcaggggaagcagcagagccactgcagtacacgaccaccgcgctgcgggtgtccatccactgcgagggctgcaagaagaaggtcaagaaggtgctccacagcatcgaaggtacgtgcgtgcggtcctacgtttcaccgtgctggcgaaggacagacaggctgctgactgaccgggctagctgttgctgttgccttcaggcgtgtacaaggtgacggtggacgcggcgcagcacaaggtgacggtcaccggcagcgtggaagccgacgcgctcgtccggcgcctgcacaaggccggcaagcaggcggcgctctggcccagctcgccggcacccgtcgaggccaagaagaagcccgaggaggtcgcgcctgccgcgttgccagcggcagccgccaacaaggacgctagggcccaggagaagaagccggccaaggacaagaaggccgactacgccgacgccgcggcgcaacccagcaaggacaagacggtcgacataggcgaggccgcggcgaagctcagcaaggacgagaaggccgacaaaggcgaggccgcggcgaaacccagccagcaggacaagaagactggcaaatgcgagccggccccggagacgaagaagggctcccctgcgccggggaagcagcaggacgccgcggaggaggctggcgcggacaagcccggcggcggcggcaagaagggcaagaaggacaagaatccaaacaagccgaaggacagcggcgattgcgaggccccggccgagaagcaggcgtcgccggggcccgagagcccgcgcgggcacggcggcgccttcccgtactacgcggcgcacccggtgctgagctgctacaacgtggcgcacccggtgctgagctgctacaacgtggcgcacccgagctcgagcgtggcgtactacgcgcccgcggccgtggtgccgtacggcgggttcccgcccatggtgccggcggagttcatgtacggcccgccgggcatgcaggagtctagcatgttcaacgaggacaacgccaactcgtgcagcctcatgtgatgtctcatgtctgtcacgcacgcgccgccgctacctatctacacgacaaaattaggcggtcaaagctcttgttgaccagagattaattctttgaattgctcatcagcgcgtcatgtaaaaatcagatgatggtaatagtatattctagttctaggagcgttcagcagtgcactgctactgctaccacttgcattccttctgtgtgcagctatgaactcgtggtaggacaggacagaaattcgaatttctcgtgaatttaat

SEQ ID NO: 105276 - DNA, 1126 bp, Zea Mays
gcccgcagaaaagaaggctggtggtcgccgctgcacgcggcccagtccacccacgagtacaaacagcggcagctcgcctccacgcgagccaagcgcccgcaaaaccctagccccgcccgccccaaaccctaggcggctacggtctccgatcccggggtcacgtcctaatggcatcttcgccggacttgttccccaacgttaccttctccgacgtctccgaagccgcagcagggcctgcggccgagggggccaccgccgcgttcggtctcggcgccgccactggagccccgcgcctcagcctcgtgaaggccgaggcggagcccacggtcgagatcgaccttgccgacgcgcaggtatttaagttgggaccgacggagtggctgtgtgtgtgcgacgagtcggaggctaaggatggcgtggaagagaagtcattttcaagagcaattaaggttgttcttaggacagaagctgagagcaaagccttctctttagcttttcaacgatggcaacaccaagttattagtggaaaagctggtgagcggctggagaatggatcaataattgcttcgaaaaacaaattcgatacaaaaattgaggcatcatcagcaaagatgtatttccactactatggccagctattacatcagcaaaacatgttacaagattttgtgcggacaggaacatactatgctgctgtgatggaaaaccgttctgacttcgagggtcgagttgtggttgatgttggggctggaagcggtattctttcgttatttgctgtccaggctggtgccagacatgtatatgcagttgaggcatctgaaatggctgaacatgctcaacgtctaatctctgggaacccatctcttggacaccggatcacggtcatcaagggcaaggttgaggaagtagtgcttccagagaaagctgacatactgatttctgaacctatgggaacccttttggttaatgagaggatgctagagtcttatgtcatagctagagacagattacttgctccagatggtaaaatgtttccaacaaccggaaggtatattccccacttagaattaaatgctaaattttaactgctcttgaatcttgaaagtctttgattcatctggtaaac

SEQ ID NO: 105277 - DNA, 2056 bp, Zea Mays
gcccgcagaaaagaaggctggtggtcgccgctgcacgcggcccagtccacccacgagtacaaacagcggcagctcgcctccacgcgagccaagcgcccgcaaaaccctagccccgcccgccccaaaccctaggcggctacggtctccgatcccggggtcacgtcctaatggcatcttcgccggacttgttccccaacgttaccttctccgacgtctccgaagccgcagcagggcctgcggccgagggggccaccgccgcgttcggtctcggcgccgccactggagccccgcgcctcagcctcgtgaaggccgaggcggagcccacggtcgagatcgaccttgccgacgcgcaggtatttaagttgggaccgacggagtggctgtgtgtgtgcgacgagtcggaggctaaggatggcgtggaagagtcattttcaagagcaattaaggttgttcttaggacagaagctgagagcaaagccttctctttagcttttcaacgatggcaacaccaagttattagtggaaaagctggtgagcggctggagaatggatcaataattgcttcgaaaaacaaattcgatacaaaaattgaggcatcatcagcaaagatgtatttccactactatggccagctattacatcagcaaaacatgttacaagattttgtgcggacaggaacatactatgctgctgtgatggaaaaccgttctgacttcgagggtcgagttgtggttgatgttggggctggaagcggtattctttcgttatttgctgtccaggctggtgccagacatgtatatgcagttgaggcatctgaaatggctgaacatgctcaacgtctaatctctgggaacccatctcttggacaccggatcacggtcatcaagggcaaggttgaggaagtagtgcttccagagaaagctgacatactgatttctgaacctatgggaacccttttggttaatgagaggatgctagagtcttatgtcatagctagagacagattacttgctccagatggtaaaatgtttccaacaaccggaaggattcatatggctccattttctgacgaatacctttatgttgaaatggcaaacaaggctctcttttggcagcagcacaatttttttggtgttgatctcacacctttacatggttcagcattccagggatacttttcacagcctgttgtggatgcatttgacccaagattattaatttctccaccaacatatcatacacttgattttactagcatgaaggaagaggagctttacgagattaatattcctctgagctttgtagcttctgttggcactagagtacatggactagcttgttggtttgatgtattgtttaatgggagcactgtgcaaaggtggcttaccactgctccaggatcccctacaactcactggtaccaactacgatgtgtgctttcacagccattgtatgtcatggccggccaagaaataactggccatcttcgtctcgtagcccatagtgctcaaagctacacaatatacttgacaatgtcagctaaaatgtggggtgtgggtgcggagcaaggcggtatcctacagacatctactgggaaacttgaactgaaggagccatactacaggttgtctcagccacaatcctgcacgttgccacaagatcagcaacagcagcaattgccatctttgcaggcacagggatcggagcagcagatgcaggaagggctcagcccagccttcacgatagaccaagattgcctcaactagacagcctggagtcgcgtatgctaggattccagcaacgagctgaggtctgtacaagcacaagagtttagagtagccgatattgtcaggcgttagctgccaaaggctaatatcacgatcgaggtgtaccgtgtacgagaccattcctgagttgcgcagctggcagctaaactgcggtcgcgccttctccgagggaatcgagaaaaaggaaattataaagtgtatttggtttcaggtaaagtgaagagcgaagggcacccttaacaaggacgggtgtatgttgtttgatatat

SEQ ID NO: 105278 - DNA, 2124 bp, Zea Mays
gcccgcagaaaagaaggctggtggtcgccgctgcacgcggcccagtccacccacgagtacaaacagcggcagctcgcctccacgcgagccaagcgcccgcaaaaccctagccccgcccgccccaaaccctaggcggctacggtctccgatcccggggtcacgtcctaatggcatcttcgccggacttgttccccaacgttaccttctccgacgtctccgaagccgcagcagggcctgcggccgagggggccaccgccgcgttcggtctcggcgccgccactggagccccgcgcctcagcctcgtgaaggccgaggcggagcccacggtcgagatcgaccttgccgacgcgcaggtatttaagttgggaccgacggagtggctgtgtgtgtgcgacgagtcggaggctaaggatggcgtggaagagaagtcattttcaagagcaattaaggttgttcttaggacagaagctgagagcaaagccttctctttagcttttcaacgatggcaacaccaagttattagtggaaaagctggtgagcggctggagaatggatcaataattgcttcgaaaaacaaattcgatacaaaaattgaggcatcatcagcaaagatgtatttccactactatggccagctattacatcagcaaaacatgttacaagattttgtgcggacaggaacatactatgctgctgtgatggaaaaccgttctgacttcgagggtcgagttgtggttgatgttggggctggaagcggtattctttcgttatttgctgtccaggctggtgccagacatgtatatgcagttgaggcatctgaaatggctgaacatgctcaacgtctaatctctgggaacccatctcttggacaccggatcacggtcatcaagggcaaggttgaggaagtagtgcttccagagaaagctgacatactgatttctgaacctatgggaacccttttggttaatgagaggatgctagagtcttatgtcatagctagagacagattacttgctccagatggtaaaatgtttccaacaaccggaaggattcatatggctccattttctgacgaatacctttatgttgaaatggcaaacaaggctctcttttggcagcagcacaatttttttggtgttgatctcacacctttacatggttcagcattccagggatacttttcacagcctgttgtggatgcatttgacccaagattattaatttctccaccaacatatcatacacttgattttactagcatgaaggaagaggagctttacgagattaatattcctctgagctttgtagcttctgttggcactagagtacatggactagcttgttggtttgatgtattgtttaatgggagcactgtgcaaaggtggcttaccactgctccaggatcccctacaactcactggtaccaactacgatgtgtgctttcacagccattgtatgtcatggccggccaagaaataactggccatcttcgtctcgtagcccatagtgctcaaagctacacaatatacttgacaatgtcagctaaaatgtggggtgtgggtgcggagcaaggcggtatcctacagacatctactgggaaacttgaactgaaggagccatactacaggttgtctcagccacaatcctgcacgttgccacaagatcagcaacagcagcaattgccatctttgcaggcacagggatcggagcagcagatgcaggaagggctcagcccagccttcacgatagaccaagattgcctcaactagacagcctggagtcgcgtatgctaggattccagcaacgagctgaggtctgtacaagcacaagagtttagagtagccgatattgtcaggcgttagctgccaaaggctaatatcacgatcgaggtgtaccgtgtacgagaccattcctgagttgcgcagctggcagctaaactgcggtcgcgccttctccgagggaatcgagaaaaaggaaattataaagtgtatttggtttcaggtaaagtgaagagcgaagggcacccttaacaaggacgggtgtatgttgtttgatatattatattcttgctaggaattaattattttcatgttaagtatgtttaattcaatttgcttcatacaa

SEQ ID NO: 105279 - DNA, 1966 bp, Zea Mays
cccacgagtacaaacagcggcagctcgcctccacgcgagccaagcgcccgcaaaaccctagccccgcccgccccaaaccctaggcggctacggtctccgatcccggggtcacgtcctaatggcatcttcgccggacttgttccccaacgttaccttctccgacgtctccgaagccgcagcagggcctgcggccgagggggccaccgccgcgttcggtctcggcgccgccactggagccccgcgcctcagcctcgtgaaggccgaggcggagcccacggtcgagatcgaccttgccgacgcgcaggtatttaagttgggaccgacggagtggctgtgtgtgtgcgacgagtcggaggctaaggatggcgtggaagaggtgagcggctggagaatggatcaataattgcttcgaaaaacaaattcgatacaaaaattgaggcatcatcagcaaagatgtatttccactactatggccagctattacatcagcaaaacatgttacaagattttgtgcggacaggaacatactatgctgctgtgatggaaaaccgttctgacttcgagggtcgagttgtggttgatgttggggctggaagcggtattctttcgttatttgctgtccaggctggtgccagacatgtatatgcagttgaggcatctgaaatggctgaacatgctcaacgtctaatctctgggaacccatctcttggacaccggatcacggtcatcaagggcaaggttgaggaagtagtgcttccagagaaagctgacatactgatttctgaacctatgggaacccttttggttaatgagaggatgctagagtcttatgtcatagctagagacagattacttgctccagatggtaaaatgtttccaacaaccggaaggattcatatggctccattttctgacgaatacctttatgttgaaatggcaaacaaggctctcttttggcagcagcacaatttttttggtgttgatctcacacctttacatggttcagcattccagggatacttttcacagcctgttgtggatgcatttgacccaagattattaatttctccaccaacatatcatacacttgattttactagcatgaaggaagaggagctttacgagattaatattcctctgagctttgtagcttctgttggcactagagtacatggactagcttgttggtttgatgtattgtttaatgggagcactgtgcaaaggtggcttaccactgctccaggatcccctacaactcactggtaccaactacgatgtgtgctttcacagccattgtatgtcatggccggccaagaaataactggccatcttcgtctcgtagcccatagtgctcaaagctacacaatatacttgacaatgtcagctaaaatgtggggtgtgggtgcggagcaaggcggtatcctacagacatctactgggaaacttgaactgaaggagccatactacaggttgtctcagccacaatcctgcacgttgccacaagatcagcaacagcagcaattgccatctttgcaggcacagggatcggagcagcagatgcaggaagggctcagcccagccttcacgatagaccaagattgcctcaactagacagcctggagtcgcgtatgctaggattccagcaacgagctgaggtctgtacaagcacaagagtttagagtagccgatattgtcaggcgttagctgccaaaggctaatatcacgatcgaggtgtaccgtgtacgagaccattcctgagttgcgcagctggcagctaaactgcggtcgcgccttctccgagggaatcgagaaaaaggaaattataaagtgtatttggtttcaggtaaagtgaagagcgaagggcacccttaacaaggacgggtgtatgttgtttgatatattatattcttgctaggaattaattattttcatgttaagtatgtttaattcaatttgcttcatacaa

SEQ ID NO: 105280 - DNA, 780 bp, Zea Mays
atggcggaggaccagaccaaccccagcggcccagccccagcaagcggggaggagagggaggtggtggtggagcaccagcaggaggagccgaggaggagggccccgaagctgaggtacctggacttcgtccaggtggcggcggcgcaggccgcggtgtgcatcgcggcgctctacggcctcgccaaggaccacgccggcccgctccgtcccggcgtcgacgccgtcgagtccgccgtcaagggcgtcgtcggccctgtctgcggcctgcccctcgacgtcctcgccttcgtcgaccgcaagcaagggtttatttcgaggaatcaaattaacaacgatgtagtaacaggtgcacgaggtgggcaaacatctcccgggcgcgctgaaggcggcgtcggcgcgggcgtacgcggtggcgcgggagctggcggccgaggcgcagcagtcgctcgctcgccaaggcggagccggtggtccggggtgtgtacggccgcgtggagcccactgcgagacctgtacgtgcggtacgagcccgcggcggagcacctggccgtctccgcttggcgctcgctcaacggcctgccggtgttcccgcacgtcgcgcagatcgttgtgcccaccgccgcgcactgggccgagaagtacaaccgggcggtcgccacagcggcggatcacggctacgccggggccacgtaccttcccaccatccccaccaagcgcatcgccaaggtgttctcgtcgcgacggaggccgagtcccagtagtgtgcggcaggcagggtag

SEQ ID NO: 105281 - DNA, 98 bp, Zea Mays
atgtgccgcggtagcggcacgccgggccatctggcacagcccgtttcgctagtcgggcctgacgggccgtgccgggtcggcccgtgccggcccgtttg

SEQ ID NO: 105282 - DNA, 3654 bp, Zea Mays
gccgatccgaggccaaagggagggaggagacccctttccctctcgccgccgcacgatggtcgacaccaggcggagctccgcggccaagcgccggggcccgtccgaggactcctccccgtcgccgccgacgacgcaggcggacccgacgacggcgggcttgccggtggagcccgcgtcgcccccgccgtcgtccgggagccgatcgggcaagcgcgccaaggtcgcggttgcgcgggcggaggaccccggtgcgccgcgcggcaaggcggtggaccccgccgcggtcgacgtgctcgacagctccgtggcgaacctgcagggcgtggcgaggccgccggccgccaacgtggccgcgtcctccgccgtgtccaattccgtaggtgcgttgggggttttccgcctggctgcgccgacgggatttacctttacggttgggtctgcttattcggctgcttttgtggttccagggaggaggaagaggaatcagtctgtgagggcgatcccgacgggcgaggggacgctctggaagccgaggcccgccggtggccgcgctgaggcctggggcagattgatttcccagtcttccgagtatccctcaattccaatttatactactcatttcactattggcaatggcggaaagtgtgacttgaaactcactgagacatctcctgggccacttatttgcaaactgaagcatgttaagaggggtgctgcccttgagatctacatgaacaaagttgtccatgtcaatgggaaggccttggacaaagctgctaaagtcaccttgatcggtggtgatgaagtcatgtttgtttctcttgggacacatgcttatatatttcagcaacttctagaggaaaaagcaagcacaccatctttgtgttcaaaatgtgtcattcaacaagaacaatatccagttgtcaaagtgggtatgggaaacccgttgggtacccgaaacccgcttgggtatgagtttgggcaaaattttatacccgtcatggataaggagatagtcagcagtttatgtaagactgtgggggagcaaagctaccacccttctgaggaaaatatgacatttggtcgacaccaacttttgaaggatgatttgaagaaagcagctataagtgcaagtgatatatcagaatcatttgataattttccatattatcttagtgaaaataccaaaaatgttcttttgtcatcatcgtatgtaaatctatgctgcaaggaatccactaagtggacaaaggatatatcttctctttgtaaaagggtactattatctggcccaccagggtctgagatctaccaagaattactggttaaggcacttaccaaatcctttggtgctaagctgcttgtcatagattattcgctgctgtctggtgggcagccttcaaagtcaaaggaatcaaaaccatacaaaaaaggtgatagggtgaggtacattggtcctattcaatcatcagggtttatgtttgagggacagagagctcctgattatggttcacagggtgaagtgaggcttacttttgcggaaaatggatcctcaaaagttggagtcagatttgataaacagatccccgggggcattgatcttggaggcagttgtgagcttgatcatggcctattctgttcagttgattctctatgcctcgatggtccaggatgggaagatagagccaaacattcatttgatgttgtgtttgagtttgcctctgaagaaagtcaacaggtgcctgtaatcctatttctgaaggatgttgagaaaatatgtggaaataattacacctaccatggtctaaagaataagcttgaaagtttcccagctggagtttttattgttgggtcccagattcagacagatgctcggaaagataagtcaaacaatgggtctccttggctcaagttctcatatagccaagcagcaatacttgaccttgcatttcaggatagctttggtcgggcgggtgaaaaaaataaagaagcactcaagatgtcaaagcatataactaaacttttcccaaataaagtgacaattgaatcacctgaggatgaaacggaactctcccagtggaaacagctattgggtcgtgacattgaaattcttaaggcaaaggctaattttttgaaaatacaatcttttctaacccgccatggtatggaatgtactgatttagaatcagtggtttgtgttaaagatcgtaatctgacaagcgaatgtgtcgataaaatagttggttatgctttgagttatcaactcaaggatcaccctattcaaactcctggaaaggatgcgagagttgtcctttccggtgtaagccttaagtatggaattgatttgttggaaagtatccaaagtggccctaagaagaagagcacaaagaagtcactcaaggatgttgtcacagagaatgaatttgaaaaacgtcttcttccagatgtcatccctccagatgagattggtgttacctttgaggatattggagcattagaaaatgtcaaggaaactttgcaggagttagttatgcttcctttgcaaaggcctgagttgttctccaaaggacaacttatgaagccatgtaaagggatattgctttttggtccacctggcaccggtaagaccatgcttgccaaagctgttgcaacagaggctggtgctaattttatcaacatatcaatgtcaagcattgcttcaaagtggtttggagagggagaaaaatatgtgaaagctgttttttcacttgcaagcaaaatttctcctagtgttattttcgtggatgaggttgatggcatgctgggtagacgtgagaatccaggggaacatgaggccatgcgcaagatgaaaaatgagtttatggtgaactgggatggtcttaggacaaaagacaaagaacgtgttctggtacttgctgccactaataggccatttgatcttgacgaggctgttgtcaggaggctccccaggaggttgatggttaacttgccagatgcacccaacagaaagaagattcttagcgtgatactagcaaaagaagatttggcagatgatgtagatctggaggcgttagcaaacctgacagatgggtattcaggcagtgatctgaagaacctgtgtataactgcagcacatcgtcccataagggaaattcttgaaagagagaagaaggagagaaccttagctgaagcagaaaataggccagccccacctcagtgctgtagcggcgacgttcgctccctaaagtttagtgatttcaagcacgcacatgagcaggtttgtgcgagtatatcatcggattcaaaaaatatgaatgagctcgttcaatggaacgacctctacggagaaggcgggtcgaggcacaagacaccgttgagctactttatgtagcctaacgtttttttagatgatttgtacatacagaagcagcctttgtataggtgtgtttccagttaattttgctggaaacatttattcatgtcgggtttcgtttctataatcatatcagcttgtgtctgcatctagtgtagcctgagcttctgattagttattaatttatttcagtccgttggatcttgcgtcctggtatagtctgtgaaaggtctcgacggagattcatttggatttatttaatagtctggatgatatggtaa

SEQ ID NO: 105283 - DNA, 3555 bp, Zea Mays
gccgatccgaggccaaagggagggaggagacccctttccctctcgccgccgcacgatggtcgacaccaggcggagctccgcggccaagcgccggggcccgtccgaggactcctccccgtcgccgccgacgacgcaggcggacccgacgacggcgggcttgccggtggagcccgcgtcgcccccgccgtcgtccgggagccgatcgggcaagcgcgccaaggtcgcggttgcgcgggcggaggaccccggtgcgccgcgcggcaaggcggtggaccccgccgcggtcgacgtgctcgacagctccgtggcgaacctgcagggcgtggcgaggccgccggccgccaacgtggccgcgtcctccgccgtgtccaattccgtagggaggaggaagaggaatcagtctgtgagggcgatcccgacgggcgaggggacgctctggaagccgaggcccgccggtggccgcgctgaggcctggggcagattgatttcccagtcttccgagtatccctcaattccaatttatactactcatttcactattggcaatggcggaaagtgtgacttgaaactcactgagacatctcctgggccacttatttgcaaactgaagcatgttaagaggggtgctgcccttgagatctacatgaacaaagttgtccatgtcaatgggaaggccttggacaaagctgctaaagtcaccttgatcggtggtgatgaagtcatgtttgtttctcttgggacacatgcttatatatttcagcaacttctagaggaaaaagcaagcacaccatctttgtgttcaaaatgtgtcattcaacaagaacaatatccagttgtcaaagtgggtatgggaaacccgttgggtacccgaaacccgcttgggtatgagtttgggcaaaattttatacccgtcatggataaggagatagtcagcagtttatgtaagactgtgggggagcaaagctaccacccttctgaggaaaatatgacatttggtcgacaccaacttttgaaggatgatttgaagaaagcagctataagtgcaagtgatatatcagaatcatttgataattttccatattatcttagtgaaaataccaaaaatgttcttttgtcatcatcgtatgtaaatctatgctgcaaggaatccactaagtggacaaaggatatatcttctctttgtaaaagggtactattatctggcccaccagggtctgagatctaccaagaattactggttaaggcacttaccaaatcctttggtgctaagctgcttgtcatagattattcgctgctgtctggtgctgtactaatcctgctcatggtttcctcaggtgatagggtgaggtacattggtcctattcaatcatcagggtttatgtttgagggacagagagctcctgattatggttcacagggtgaagtgaggcttacttttgcggaaaatggatcctcaaaagttggagtcagatttgataaacagatccccgggggcattgatcttggaggcagttgtgagcttgatcatggcctattctgttcagttgattctctatgcctcgatggtccaggatgggaagatagagccaaacattcatttgatgttgtgtttgagtttgcctctgaagaaagtcaacaggtgcctgtaatcctatttctgaaggatgttgagaaaatatgtggaaataattacacctaccatggtctaaagaataagcttgaaagtttcccagctggagtttttattgttgggtcccagattcagacagatgctcggaaagataagtcaaacaatgggtctccttggctcaagttctcatatagccaagcagcaatacttgaccttgcatttcaggatagctttggtcgggcgggtgaaaaaaataaagaagcactcaagatgtcaaagcatataactaaacttttcccaaataaagtgacaattgaatcacctgaggatgaaacggaactctcccagtggaaacagctattgggtcgtgacattgaaattcttaaggcaaaggctaattttttgaaaatacaatcttttctaacccgccatggtatggaatgtactgatttagaatcagtggtttgtgttaaagatcgtaatctgacaagcgaatgtgtcgataaaatagttggttatgctttgagttatcaactcaaggatcaccctattcaaactcctggaaaggatgcgagagttgtcctttccggtgtaagccttaagtatggaattgatttgttggaaagtatccaaagtggccctaagaagaagagcacaaagaagtcactcaaggatgttgtcacagagaatgaatttgaaaaacgtcttcttccagatgtcatccctccagatgagattggtgttacctttgaggatattggagcattagaaaatgtcaaggaaactttgcaggagttagttatgcttcctttgcaaaggcctgagttgttctccaaaggacaacttatgaagccatgtaaagggatattgctttttggtccacctggcaccggtaagaccatgcttgccaaagctgttgcaacagaggctggtgctaattttatcaacatatcaatgtcaagcattgcttcaaagtggtttggagagggagaaaaatatgtgaaagctgttttttcacttgcaagcaaaatttctcctagtgttattttcgtggatgaggttgatggcatgctgggtagacgtgagaatccaggggaacatgaggccatgcgcaagatgaaaaatgagtttatggtgaactgggatggtcttaggacaaaagacaaagaacgtgttctggtacttgctgccactaataggccatttgatcttgacgaggctgttgtcaggaggctccccaggaggttgatggttaacttgccagatgcacccaacagaaagaagattcttagcgtgatactagcaaaagaagatttggcagatgatgtagatctggaggcgttagcaaacctgacagatgggtattcaggcagtgatctgaagaacctgtgtataactgcagcacatcgtcccataagggaaattcttgaaagagagaagaaggagagaaccttagctgaagcagaaaataggccagccccacctcagtgctgtagcggcgacgttcgctccctaaagtttagtgatttcaagcacgcacatgagcaggtttgtgcgagtatatcatcggattcaaaaaatatgaatgagctcgttcaatggaacgacctctacggagaaggcgggtcgaggcacaagacaccgttgagctactttatgtagcctaacgtttttttagatgatttgtacatacagaagcagcctttgtataggtgtgtttccagttaattttgctggaaacatttattcatgtcgggtttcgtttctataatcatatcagcttgtgtctgcatctagtgtagcctgagcttctgattagttattaatttatttcagtccgttggatcttgcgtcctggtatagtctgtgaaaggtctcgacggagattcatttggatttatttaatagtctggatgatatggtaa

SEQ ID NO: 105284 - DNA, 640 bp, Zea Mays
aagtagaagcagcaaaattagcaaggatggagtacactcaaattataaggtctgtttgggatagcttcaacccatggttgcttcatagaggccaagatgaaataagacctctaaattccttctcatttttactatatcacaaaaatacagaaaagactcactacacactagtttcttgatcacaatgctgctgcaaaatccacccaaaaaacgagtcatcacccaagatgcgcaagttggcacgcatggcctcatctgcggcagcccatgtctcgacggccccatccccgacgatccgcatagccaacgcctcgagcctcgacgggccaatcgcggcccattcagcggcgaggagctcctggacccgctcctccacggcggcccggttgccccacaggcccctgagaatggtctgagaagaggacttcccgacggcagcctcgaactggtccactgtgacgatggcatcgtcggatgcgagcgcgggggaacctccgccgtggaccgcttggcgcgcgcggccgtcggggcgcgcgaagagagccctggcgacggcgtcgaagtcgggcgcggaggccgcgaggaatgccgcgacggcgatgtgggcggctgcgatgggggaggcgcagggcgggagcga

SEQ ID NO: 105285 - DNA, 240 bp, Zea Mays
atggaggatttagagctgttcaatgatgcagacataggcatatctgaaaatccaggtcccgtgatgtcttcaccaccgccttgttcaagttccttaccgctagttgcattaggtgcaaataatgttaatgaggagaaagggagacgtgatgttgcaagtgagatggagatgtattgtaatctaggactcaatgagggggaaacgacagaggaaaatgcaagagatgaagccgtcaaatga

SEQ ID NO: 105286 - DNA, 971 bp, Zea Mays
agagccgattcgtcagcacgaggttcatcagcggaaaaataatcatcatctccgcaattctgcttaaagtcgactgactgaagattgcagaggatgcgagtagagtagtgcaccatttttattttgtcatcttcagacttcagtaacataacagaagcgtcagaggactgaggtctgagcctctgaggagggggagggagagggacagagctacagaggatgctacgcctgcggttccggccagctcccctgtcactgaagctggccttcaccgtctccctcgccgtctccttctccgtctcctgctgcgcctcctcctcatactcgtcccgcacatcatccagatcgccgcaggccgtagccgcggacctcctctccgtgctcgccggccctcgcgccgcggcgcgggtaccggcggcggaggcctcgcggctccgcgcctgcctccggttcctcgccccggccaaccccacggcccaaaaggtctcgtcttggagccgcggaggcccccggaagttcctcctcgatggttgcgatgcgggggcggctgaggcggacgagatggtgatgtggccgccggccccggtcttggacctggcgcggctggccgttgactccggaggcgatcccggtgccatccaccgcgcgctcgacccaacaatgctgccggtgccagatgttgagggttcccagaagaataaatgccatctcacaagaacaccgtatgggaggcgctttgccaatgaggagatcaattcatattttgcattcttgttcgaattgattgtggcacgggcaccttcggttggattaaatgtatcactgaatcgctatgatttgttccatgggcatcttttccttgcatcggagacaggacggcttggaattctgtaagtgccttgaatacttgcgtaggctttgttcctgactttctactgtcagatctcctttcagtagaatactgcagaaga

SEQ ID NO: 105287 - DNA, 1088 bp, Zea Mays
agagccgattcgtcagcacgaggttcatcagcggaaaaataatcatcatctccgcaattctgcttaaagtcgactgactgaagattgcagaggatgcgagtagagtagtgcaccatttttattttgtcatcttcagacttcagtaacataacagaagcgtcagaggactgaggtctgagcctctgaggagggggagggagagggacagagctacagaggatgctacgcctgcggttccggccagctcccctgtcactgaagctggccttcaccgtctccctcgccgtctccttctccgtctcctgctgcgcctcctcctcatactcgtcccgcacatcatccagatcgccgcaggccgtagccgcggacctcctctccgtgctcgccggccctcgcgccgcggcgcgggtaccggcggcggaggcctcgcggctccgcgcctgcctccggttcctcgccccggccaaccccacggcccaaaaggtctcgtcttggagccgcggaggcccccggaagttcctcctcgatggttgcgatgcgggggcggctgaggcggacgagatggtgatgtggccgccggccccggtcttggacctggcgcggctggccgttgactccggaggcgatcccggtgccatccaccgcgcgctcgacccaacaatgctgccggtgccagatgttgagggttcccagaagaataaatgccatctcacaagaacaccgtatgggaggcgctttgccaatgaggagatcaattcatattttgcattcttgttcgaattgattgtggcacgggcaccttcggttggattaaatgtatcactgaatcgctatgatttgttccatgggcatcttttccttgcatcggagacaggacggcttggaattctgaggagttgcgtgtcatttcattaagaggaagaaccgagtacagctagaggaaagtatcctcaaataccatacaacactctgaaaatagaataaagtaaaaaataacaacagaacaacccagatacaagactagcataggaatagatgtgtctttgatggatgtaatcctagcttgatcacagcccttatggtggcta

SEQ ID NO: 105288 - DNA, 1180 bp, Zea Mays
agagccgattcgtcagcacgaggttcatcagcggaaaaataatcatcatctccgcaattctgcttaaagtcgactgactgaagattgcagaggatgcgagtagagtagtgcaccatttttattttgtcatcttcagacttcagtaacataacagaagcgtcagaggactgaggtctgagcctctgaggagggggagggagagggacagagctacagaggatgctacgcctgcggttccggccagctcccctgtcactgaagctggccttcaccgtctccctcgccgtctccttctccgtctcctgctgcgcctcctcctcatactcgtcccgcacatcatccagatcgccgcaggccgtagccgcggacctcctctccgtgctcgccggccctcgcgccgcggcgcgggtaccggcggcggaggcctcgcggctccgcgcctgcctccggttcctcgccccggccaaccccacggcccaaaaggtctcgtcttggagccgcggaggcccccggaagttcctcctcgatggttgcgatgcgggggcggctgaggcggacgagatggtgatgtggccgccggccccggtcttggacctggcgcggctggccgttgactccggaggcgatcccggtgccatccaccgcgcgctcgacccaacaatgctgccggtgccagatgttgagggttcccagaagaataaatgccatctcacaagaacaccgtatgggaggcgctttgccaatgaggagatcaattcatattttgcattcttgttcgaattgattgtggcacgggcaccttcggttggattaaatgtatcactgaatcgctatgatttgttccatgggcatcttttccttgcatcggagacaggacggcttggaattctgttccatgctaaagaatacccagcatttaacaaggaattgtttccttataatttgggatattgccaggcaggatctaatgtaccatatgatgattcgatgaatttgcgcaatgtactttggttagcacctttgccatcaaaggagacaaaagcttggttagcaccaggttcggcgatactgaacactcaaccatgttcatgtattataacttgctgttttcctgataataaatcaggcctgtgctgtgtatctaatctgtttccaatccctatttctacgcgtaaactta

SEQ ID NO: 105289 - DNA, 1489 bp, Zea Mays
agagccgattcgtcagcacgaggttcatcagcggaaaaataatcatcatctccgcaattctgcttaaagtcgactgactgaagattgcagaggatgcgagtagagtagtgcaccatttttattttgtcatcttcagacttcagtaacataacagaagcgtcagaggactgaggtctgagcctctgaggagggggagggagagggacagagctacagaggatgctacgcctgcggttccggccagctcccctgtcactgaagctggccttcaccgtctccctcgccgtctccttctccgtctcctgctgcgcctcctcctcatactcgtcccgcacatcatccagatcgccgcaggccgtagccgcggacctcctctccgtgctcgccggccctcgcgccgcggcgcgggtaccggcggcggaggcctcgcggctccgcgcctgcctccggttcctcgccccggccaaccccacggcccaaaaggtctcgtcttggagccgcggaggcccccggaagttcctcctcgatggttgcgatgcgggggcggctgaggcggacgagatggtgatgtggccgccggccccggtcttggacctggcgcggctggccgttgactccggaggcgatcccggtgccatccaccgcgcgctcgacccaacaatgctgccggtgccagatgttgagggttcccagaagaataaatgccatctcacaagaacaccgtatgggaggcgctttgccaatgaggagatcaattcatattttgcattcttgttcgaattgattgtggcacgggcaccttcggttggattaaatgtatcactgaatcgctatgatttgttccatgggcatcttttccttgcatcggagacaggacggcttggaattctgttccatgctaaagaatacccagcatttaacaaggaattgtttccttataatttgggatattgccaggcaggatctaatgtaccatatgatgattcgatgaatttgcgcaatgtactttggttagcacctttgccatcaaaggagacaaaagcttggttagcaccaggagtactagttgtcttggacgcacatcctgatggaattatctatcaagagatgatacgtgactatgttcagattgttagaacagtatacgaagatgatcttggggagaacacagttgatgtcaattatctgaatgtggcaaatgcagctcccgtagatagaatttacatttgttgaagtcatatgtaccgctatttgttttcccatggtgtgatttgatttgatttctgagaaccggacgtcaatgcatcatcctcatgtccaccaaagcaattgttcccgttcccatgaccgctgctgtgtatttcacatgtttatttgtttaattaaaaatgctcaacgaagcaacgatttgttgttaagttttacagtgtgctgttttgtacattccgtacacttttatctttgattgtgttgagtttgagtgtacagg

SEQ ID NO: 105290 - DNA, 683 bp, Zea Mays
ttaaaactcaaagaagtgggtaatgagccgaagtgtatggaaatactgatttttttactcatgatgtttctattttttatgtaggttccatgctaaagaatacccagcatttaacaaggaattgtttccttataatttgggatattgccaggcaggatctaatgtaccatatgatgattcgatgaatttgcgcaatgtactttggttagcacctttgccatcaaaggagacaaaagcttggttagcaccaggagtactagttgtcttggacgcacatcctgatggaattatctatcaagagatgatacgtgactatgttcagattgttagaacagtatacgaagatgatcttggggagaacacagttgatgtcaattatctgaatgtggcaaatgcagctcccgtagatagaatttacatttgttgaagtcatatgtaccgctatttgttttcccatggtgtgatttgatttgatttctgagaaccggacgtcaatgcatcatcctcatgtccaccaaagcaattgttcccgttcccatgaccgctgctgtgtatttcacatgtttatttgtttaattaaaaatgctcaacgaagcaacgatttgttgttaagttttacagtgtgctgttttgtacattccgtacacttttatctttgattgtgttgagtttgagtgtacagg

SEQ ID NO: 105291 - DNA, 250 bp, Zea Mays
ctcgaaagaaaatactgctaatttatattactccatatatgtttgtagcacacagcgtgaatacagaatgctcattatgcccatggtgcacaacaaactactgggattagccatgacatggtcaaaaaatagcatatcggagcagatacaaatgggacgattcaccaccatcaacaaaatctcactatggctctacactagcaaaacagcattgatacagccatcgttctccgggttgtttgtaacttga

SEQ ID NO: 105292 - DNA, 787 bp, Zea Mays
aattttttcctctccttttaatataacaggccttccccaaagcgaattgaaggttcaaatggaagaactctgcaactcgaattccgaacaaggctatcacttccccctttttactggaggaaaagttgaaggggagcagggagctgcaattcatgttgttttgtttgatgctggcactggctgtgttgtatcctctggaccagagccgtctgccaatcttgacatcgttgttctagaaggtgatttcaacaatgaagatgaggagggctggaccggagaagagtttggcagtcacgttgtgaaggagcgtgagggaaagcggcctattttaactggtgatctacaagtcacactaaaagaaggtgtggggacaattggggagcttacattcacagataactctagctggataaggagtaggaaattcagacttggcttgaagattgcctcaggattttgtgagggtgttcgcattcgtgaggcaaaaacagaagcctttatggttaaggaccatagaggagaattgtacaagaagcactatccacctacactgaaagatgaggtctggaggttggaaaaaatagggaaggatgggtcattccataagaggctgaacaaatctggaatatctacagttgaggatttccttaggcttgtggttcgggatccatagaaattacgcagtgtaagtttgtgtgtgcggtgttattaacttattcttactatactttcatgtgttttggttgctggttataaatgctgttttgtgatagatacttggtagctg

SEQ ID NO: 105293 - DNA, 1882 bp, Zea Mays
atgttcccgattcaaattcccaccccggcggccgccggccttgttcgcacccttacaacgccgccgtcagctttccaatctaccacccacgcgccgtttctcagcggtgtcattaacagcgctgcagcccgcagctgccgcaagcgccgctacgccgatgcccacgagggcgcctcctcacctcgccgccgccgccgccgccgcttcctcctcgtccccaactcgttcctggccggccggtccttcgctctccgtactctcgctagcgccctccacaagcgccgccacgacgccgccacctcctcggctcgcccctccagtcgccgcctccgccttctaagccccgtccttttccccgccctccggccgcttagcccccgcgtttcgctagccaccgccccgcgtagccaccgcaagattcacgtcgacgacgcccgccgcgccgtctctactccctgtcgccgccgcagacgtagcagtctgcttcccagggtcagacacttccgcccattcgcactccgtttcctcctcacgcccggtgcattaagccctcaccgtcgccggaaacccgccgaggtagacatgggcaacctcatctcacagttactgtggaagagcaccagggacggtgtatcagaggcgcacacgaagcggctcgatgggtcgccggaagtggtggatctcacagtggagccagagcttgaaaataacgatgccgtggggaggatgtttggagaccggagcgtccctgcactggggtcatcaaagtcgccggagaagaaggcaacgttctacgaggagccgcacggtagaagattacaggagtcaggattcaagaagctcaagcttgccgagctgcctgatccgctggacaatacgtctaaggaggatctatctgaactattcacacctctaagtgacaaagacgaaagagaagtcaatgctctgttgtgtagtagtgatgacagtgataaaatcgtagtgatacatacgccttctaacatcgagattactaaagagaaacttcaatgcttgaggcctcgtgggtggttgaatgatgaggtcattaatctgtacattgaactgttaaaggagagggaaaaaagggaacccaacaggtttttgaaatgccatttcttcaatacattcttctacaagaggcttacttgcggaatagctggttatgattaccagtctgttaggagatggacaacattcaagaggctgggttatggacttgtcgagtgtgagaaaatctttgttccagtgcatagaaatgcacattggtgtttggcactaataaacatgaaggataaaacattgcagtatcttgaatctcttgttggttggggccgtgatgtactggacatactggctagatacatcgtggatgaattgaaggacaagagtaacatagaggtagaacctagttcgtggactgtagtgtcagagtctttgcccttgcagcagaacgggtgggactgtggcatgtttatgcttaaatacattgatttccatagcagaggtatcaaaccatctttcagtcaggaacacatgatgtattttaggaaacgaatagcaaaagagatcatggcattaagagccgactgaagaacaccattctgacattgtctcaagtcaggtatttgctttcaaatagcagagatgtgattcttctaaggctgttggtgtgaattcaagtccatgtcgccacaccttttgtaggcttgtatttttttaggacctgattttggtagggaaaagaggggtaaggtaaaacaatgaaaaacgtaggagttcggaaatagttcggcaaaatggccacacctatgtaattgcattgaaactgactaaagctagtgcaaggaactgacacttagtt

SEQ ID NO: 105294 - DNA, 3395 bp, Zea Mays
cacaagcctttcctcctcttcgtcacccaccgccgacggctagccatgtccgccgagcccacctctccgcctctatcgacggcgcaggtccgcgggagcctcatcccgccgcttccagacgacttggctgtccactgcatcgctctcttgccgcgcgccgcgcacccatccctggccctcgtctcccgcgctttccacgccctcctgtgccgccacccggagccgctcctcgccgcgcgccgcaccctccgctgctccgaaccccacgtcctcctctccctccgcccaccctcctccgcgtcccctatcttcttcctcctgctcccgcaccccgggtggcccccgctcccgcttccctcccctcccgtccccgtctcgtcctccgcgtcggccgccaccgacggcgcccggctcttcctcgtcggcggatccgtatccgcggtcccctctgcgtccgtgcagatcctggacccccgggccagatcctggtccgccggcccgcgcctgtcctctacgcgggagttcgccgcggccgtcgcgcactccggggcgctgttcgtcgccggcggctgcatcccctcgtcccctttctgggccgaggctctcgacctctccactccgaacgccaagtggagagccgtcgccagcccggcccacctccgcgagaagtggatgcacggctgcgcgtcgctcgacgggaaggtcgttgtggtggcggaccgtggcggcttgtcctacgatccttcggcgccacctgcggaggcgtgggcaccggtgtcgccggtgcttgacatgggatggaagggccgagctgcagtggttgagggaatcctctactcttacgattacctgggacaggtcaaggggtatgatccgtacactgattcttggagcacagtggaggggttggagggggagctacctaagttcttgtgcggcgccacacttgccgatgttggaggattgctctacttggtttgggaaggaaagtggaaagggaaattaaaaggtaagatggaaatgaggagcatggtagtgattgaatgggccagcattcagattacaagggtccaagagggacggctaagaggaaaggttgtctctagggacactgttctgttcccggatatgccaagaggttcaacgatcacacattgcattgcattggagttgtgatgcagcagatgcagatgtaaagcaggttccaacgatgattcaggcggtttgttccacttatattggctttcaaggcttgctggctaacggttgatatcatggggccattgcaacagaaaaatacttcagttgtgttgattagatatgccatcagttagtccagtcggtgctgattatgctgatacattcatgacacggttatattcagccagtgtaccatttattagtagttgtatagcaggtactctgttagtcttgcccctgttcccaaacaaactcttttagcggtcacacttgttagatattatttcggggtgtttgaatgtactagacctaatagttagtagctaaaattagttgaagagattcaaacaccctagctaatagttcaactatttgttagctaataattcaactattagttatttttagtaaattagttaatatttagctagctatttgttagctagatacttgcactagcaaatttttagccagctaactattagctctaatgcattcaaacaccctattagtgtatctgtacgaagtctcttgagttgtggcaccgataggttgcattctgaggcatcattagagtatacccacctatttttgtgccaaaatgccatgccatggatcacatctcagtactagccatgtcaaagaaacgttctttcatcctcaggcatcaaatgatggaattttagtatgtcactgaattgcaggaacaatattcccgaagtatcgcaatgccttcatcgcaactccttgagtgatcccatcattctaaagatatatgtaagaattggaagttcaaaattggtccgcctagaatttctgtgcatcttagagcatctccaagaggggtcttattaaacaaggttgtatattgaaatatagggcttgggacctaagagcaactccagtagttctctaaaagacttcctaaatcaataatttaggtagttaacatgaaaactattctccaacagttctctaaatgaactttctaaatttaacaacttgtcatctaacctcattttctctctacatttggcaaccatttaacaactccctaaacaaaaatgttgactgcattatatagtttttgtgacttattttttatgtggataaatacaaaacaaaattacaacctatatttagagaactattggagaactcatatttttttactctaaaagtcatttagcaacttcttaaatctgtaatttagagagctaaaatttacataactattggagttgctctaagcggtgaccctatttcatcaaaatttatcaaatgattatagggtttggcatctgaggttctaaatatagtatcacatatattgaagtcctatccttattttctcttaatctacaactatttattttcttagatagcattatttgaggccaaactgttggagtaaatttcttttgaggcactaaacactttaataatggttctatttcaattctaaggcgctattttagagttctttgttagagatgctccatgtaaaacttactccctttggtgtcctattagttgttgttttggataaggtttgagtcaaacttataaaattttgactataaataattttttgttgtttatttttgaaatctaatatttatatgcatcgatttatattaaaaagtattttttttataaaagtataaatgaattaagagtttatttgtatatttttttaaatatttgtcaaagttatattttggagaccgtctaaacgacaactaatagaacaccgaagtgagtaatctttagccaagcgtgttgctttttttacttgcagggagcagacaatgctaagcctcgtggtcacggtgtgtttcgattcgactggctacaggtgttcggacggctacaaatgcaatacataaagataaaatactaaaatagttatagccgcagtcggattaagccacagtcaggattaaaaccgtagtaaacagccatggttgagcgcttgggaaggacatcatccgcttggaatcttcaggtctttgaagtagcgaagtttgacggcaaagaaactacctggactagccactgtaaggtgtagatggatattacttgttttgtttctatattttctctccggattcggatataaatataaatattatcgagttttggcggttcgagtgactattgatattttatatatttactagtcagttgctcgt

SEQ ID NO: 105295 - DNA, 1461 bp, Zea Mays
gcctttcctcctcttcgtcacccaccgccgacggctagccatgtccgccgagcccacctctccgcctctatcgacggcgcaggtccgcgggagcctcatcccgccgcttccagacgacttggctgtccactgcatcgctctcttgccgcgcgccgcgcacccatccctggccctcgtctcccgcgctttccacgccctcctgtgccgccacccggagccgctcctcgccgcgcgccgcaccctccgctgctccgaaccccacgtcctcctctccctccgcccaccctcctccgcgtcccctatcttcttcctcctgctcccgcaccccgggtggcccccgctcccgcttccctcccctcccgtccccgtctcgtcctccgcgtcggccgccaccgacggcgcccggctcttcctcgtcggcggatccgtatccgcggtcccctctgcgtccgtgcagatcctggacccccgggccagatcctggtccgccggcccgcgcctgtcctctacgcgggagttcgccgcggccgtcgcgcactccggggcgctgttcgtcgccggcggctgcatcccctcgtcccctttctgggccgaggctctcgacctctccactccgaacgccaagtggagagccgtcgccagcccggcccacctccgcgagaagtggatgcacggctgcgcgtcgctcgacgggaaggtcgttgtggtggcggaccgtggcggcttgtcctacgatccttcggcgccacctgcggaggcgtgggcaccggtgtcgccggtgcttgacatgggatggaagggccgagctgcagtggttgagggaatcctctactcttacgattacctgggacaggtcaaggggtatgatccgtacactgattcttggagcacagtggaggggttggagggggagctacctaagttcttgtgcggcgccacacttgccgatgttggaggattgctctacttggtttgggaaggaaagtggaaagggaaattaaaaggtaagatggaaatgaggagcatggtagtgattgaatgggccagcattcagattacaagggtccaagagggacggctaagaggaaaggttgtctctagggacactgttctgttcccggatatgccaagaggttcaacgatcacacattgcattgcattggagttgtgatgcagcagatgcagatgtaaagcaggttccaacgatgattcaggcggtttgttccacttatattggctttcaaggcttgctggctaacggttgatatcatggggccattgcaacagaaaaatacttcagttgtgttgattagatatgccatcagttagtccagtcggtgctgattatgctgatacattcatgacacggttatattcagccagtgtaccatttattagtagttgtatagcaggtactctgttagtcttgcccctgttcccaaacaaactcttttagcggtc

SEQ ID NO: 105296 - DNA, 1754 bp, Zea Mays
gcctttcctcctcttcgtcacccaccgccgacggctagccatgtccgccgagcccacctctccgcctctatcgacggcgcaggtccgcgggagcctcatcccgccgcttccagacgacttggctgtccactgcatcgctctcttgccgcgcgccgcgcacccatccctggccctcgtctcccgcgctttccacgccctcctgtgccgccacccggagccgctcctcgccgcgcgccgcaccctccgctgctccgaaccccacgtcctcctctccctccgcccaccctcctccgcgtcccctatcttcttcctcctgctcccgcaccccgggtggcccccgctcccgcttccctcccctcccgtccccgtctcgtcctccgcgtcggccgccaccgacggcgcccggctcttcctcgtcggcggatccgtatccgcggtcccctctgcgtccgtgcagatcctggacccccgggccagatcctggtccgccggcccgcgcctgtcctctacgcgggagttcgccgcggccgtcgcgcactccggggcgctgttcgtcgccggcggctgcatcccctcgtcccctttctgggccgaggctctcgacctctccactccgaacgccaagtggagagccgtcgccagcccggcccacctccgcgagaagtggatgcacggctgcgcgtcgctcgacgggaaggtcgttgtggtggcggaccgtggcggcttgtcctacgatccttcggcgccacctgcggaggcgtgggcaccggtgtcgccggtgcttgacatgggatggaagggccgagctgcagtggttgagggaatcctctactcttacgattacctgggacaggtcaaggggtatgatccgtacactgattcttggagcacagtggaggggttggagggggagctacctaagttcttgtgcggcgccacacttgccgatgttggaggattgctctacttggtttgggaaggaaagtggaaagggaaattaaaaggtaagatggaaatgaggagcatggtagtgattgaatgggccagcattcagattacaagggtccaagagggacggctaagaggaaaggttgtctctagggacactgttctgttcccggatatgccaagaggttcaacgatcacacattgcattgcattggagttgtgatgcagcagatgcagatgtaaagcaggtcaccttgatcagcattttaaaagttccaatttcttcattcagctgtactgctgcctgcttgcgagaagtgagctagttcttggtcactggaatgcccttcagcgtcagtaaatagtcacctattctcgttactgctgtaggttccaacgatgattcaggcggtttgttccacttatattggctttcaaggcttgctggctaacgggagcagacaatgctaagcctcgtggtcacggtgtgtttcgattcgactggctacaggtgttcggacggctacaaatgcaatacataaagataaaatactaaaatagttatagccgcagtcggattaagccacagtcaggattaaaaccgtagtaaacagccatggttgagcgcttgggaaggacatcatccgcttggaatcttcaggtctttgaagtagcgaagtttgacggcaaagaaactacctggactagccactgtaaggtgtagatggatattacttgttttgtttctatattttctctccggattcggatataaatataaatattatcgagttttggcggttcga

SEQ ID NO: 105297 - DNA, 766 bp, Zea Mays
aagtcaaaatctctactaattttttccaatctcatctaatccatgtgatataggaataaccgaacaaaaccttagcggacagggatgggagcaatttaatctccacggggattgaaacagcaaaaagttagtccctgttaaatatatattggacggatgatatttatgtttggaaccaagcttgtatcattattcagtttgtgttcttgaatgtctggatcacagtcattgataaatgacttgtcagcatttcacctgcacaggtcaccttgatcagcattttaaaagttccaatttcttcattcagctgtactgctgcctgcttgcgagaagtgagctagttcttggtcactggaatgcccttcagcgtcagtaaatagtcacctattctcgttactgctgtaggttccaacgatgattcaggcggtttgttccacttatattggctttcaaggcttgctggctaacggtaatttgtcattgttttatgcgaataagtttgctgcaatgctttagcactgtgtataattaagctgttttgctaataggttgatatcatggggccattgcaacagaaaaatacttcagttgtgttgattagatatgccatcagttagtccagtcggtgctgattatgctgatacattcatgacacggttatattcagccagtgtaccatttattagtagttgtatagcaggtactctgttagtcttgcccctgttcccaaacaaactcttttagcggtcacacttgttagatatta

SEQ ID NO: 105298 - DNA, 989 bp, Zea Mays
cctgcgcgccgcaactacgtggtcatgcctgttgcgcggtggtggcacacaacaaaactcgatggatccatcccgccgccacacgcccgtttccttcccttttcccgcagtccggatccagtccacggcccacgggttgctggctgcctggcttccgggccccaccaccaccacagcgaccgcgggacgcgggtgccgcgtgctcgctttcacgagcacgacgagctcggcttcggcgtgagccagcgtcgtacggctcatccgccccgtcctcggtcgctatttctctgattctctccatttcccttgctccctaccgtcgcggaggaagacaagacgcgcgcgcagaagcacacctgctcgggctacattaggaggacagcttcttcggccggcgacatggcggagaagggcgcgttgcagtcggcgagggagtgggtggtcgaccacaagctccgggccgtcgggacgctgtggctcagcggcatcgtcggctccatcgcctacaactggtccaggcccgggcatgaagaccagcgtcaagatcatccacgccaggctgcatgctcaggctctcacgctggctgccttggctgggtccgcgctggtggagtactacgaccaccagcaagggtcaggatcgaaagttcaccaatatgcaaagcagttcctttcatctgatagcaatagcggccaacaaaaggagtagctagccagtgtccttgcgaagtgcaagcagcggagtgggcgttatttcctgatcaaataattttgcctatggcacattctgtggaaactttgacggatctttgcctgcttttctatgcgatgtaagctgctgaaacctgcactcatcaaatgttgtgtatgcagatggtaccatgcatttgtttccctgaatggcttcaaatgaaatgaatgtttttttttatcggtatgcatcatgggacgtcacaacgattttagctgtttgtctaagtcgagttcag

SEQ ID NO: 105299 - DNA, 1506 bp, Zea Mays
aacacgagtgttccattcctcctactgggcccgacttccaagttccaacaaaccggcccaccaacccgctgcgctcaaatggcaaaccacatatcctatataaatatcgccagctgcatcgtcgactggataccctagccgccacacctaacgacccacacgagcaccaagccgaggggaggggcgatggcgagaggtgtggtgtcagcgaagggcggcacggccgcgggcaagaagaaggggtcggtcgccttcacgatcgactgcaccaagcccgtggaggacaagatcatggagatcgcctcgctcgagaagttcctgcaggagcgcatcaaggtcgccggcggcaaggccggcaacctcggcgaatccgtcatcatctcccgcgagaagaccaaggtcaccgtcacctgcgacgggcccttctccaagaggtataccacgctgaactgcttactgttactctgtacccctaaaggtcatgaatgtacttgtgcagatatgtgcagtttctggctttgtgctgtttgtgtaaatggtatttctgggtctgtgctatgtactagaaactgtgcatgatattgataggtcaatgatatgaatgtagaaactcggattggtccattttccagttcaattatgtggttcacttgattttcgtagtgatgattaatttcgcttattacataattacgtgtagttttgtcaatgcaaaagtccaaaggtttagtgcattctatctttaaccttgtgtaattgcaaatggaatttgtagttctttttcaccttccaagaatccaatctatttcaagcttgattaagtttataggaatatcattgatatttatgttttcgaataggtgttttctatgaaaatgcatttcacaatgaatctaataatacttattcggtttcatagatgtgtgtgcgttttatagatttggtcaaacttgaaattgattatgaagtgagaattgcactattttgggacggagggatcagcagatatttgatatgattatatgacatcattatttagcaagaacgacattacggttagcaaatgtatggacttgaaatattttttctgtgtagtgtgtacccttaactaaagcatacacctgatgaaacaatcaaaagatacctgctgtttcttaccgtctaatataacatactgaatctgttcggtttagtctgatagtagtatccttatctgttgtcaccaggtatctgaagtacttgaccaagaagtacttgaagaagcacaaggtgcgagattggctccgtgtgattgcagccaacaaggaccacagcgtctatgagctgcggtacttcaacattgctgagaacgagggcgaggaagaagattagactgcattgcacttatatctcagttttgaactcattgaatttgatacttgtacccgtagttttgcaaatgcccccatgttatgctctggtgaattttggatggtttatttatttgaaaaatctttgcatttggct

SEQ ID NO: 105300 - DNA, 789 bp, Zea Mays
aacacgagtgttccattcctcctactgggcccgacttccaagttccaacaaaccggcccaccaacccgctgcgctcaaatggcaaaccacatatcctatataaatatcgccagctgcatcgtcgactggataccctagccgccacacctaacgacccacacgagcaccaagccgaggggaggggcgatggcgagaggtgtggtgtcagcgaagggcggcacggccgcgggcaagaagaaggggtcggtcgccttcacgatcgactgcaccaagcccgtggaggacaagatcatggagatcgcctcgctcgagaagttcctgcaggagcgcatcaaggtcgccggcggcaaggccggcaacctcggcgaatccgtcatcatctcccgcgagaagaccaaggtcaccgtcacctgcgacgggcccttctccaagaggtatctgaagtacttgaccaagaagtacttgaagaagcacaaggtgcgagattggctccgtgtgattgcagccaacaaggaccacagcgtctatgagctgcggtacttcaacattgctgagaacgagggcgaggaagaagattagactgcattgcacttatatctcagttttgaactcattgaatttgatacttgtacccgtagttttgcaaatgcccccatgttatgctctggtgaattttggatggtttatttatttgaaaaatctttgcatttggctgctcctatatgaacaaaaaatttaagagaagctcttaagagaatttaaagaatgtgaagctatgaacaaggaagg

SEQ ID NO: 105301 - DNA, 1152 bp, Zea Mays
gagctggcagcactctcactcgctcgtctcttccctggctcctatgcgcgcgtgacggcttggctcgcccttgaccttttggatgcatgccggtgacaactggcgacgagcatcgccattggcagcatcagttctgcctcatccagcaactgttttcttatagtacagtatctccagcaggcaccgcagcatcccctaccctagctagatcggccagcttggttggagagttaaaaacaagtgccgacatggcgcaccttctgtgtttaaagttccacttccaccgagcactgaccacccactgagcccgtgaattcgccggccgggccctagctagctattagtctactatataagtggagatgccttccaccgtgtagcacgcaaccagacagcaccagcagtctgcgcgcactccgcagtcggtcgtggagctctcgagcaaaagcgcgcgacatcgtcggagctagctacgcgtgcgcgctccggccggcggatcggatcggatggcgtcgtccaaggcgctcctcctgttggctgccgccgccgtcgctgcggcgtgcctggtcggcgccgcggacgccaagttcggccggctgggacggctcgtcatcaccggcgtcgtgccctgcaacaccggcagcctcatcgacatcgccagctcccccgccttcccgaacgcggacgtggagctgcggtgcgcgggcagggtggtggcgggcgcgacgaccaacaccaacggcaccttctccatggagctggacatgaccaacgcgctggccgcgttcatcggcggctgcacgctggtggtggacacgccgctcgtcaagtgcaacgccgacctcaccgacgtcggcagcctcgtctcctacctgcagggcccgctcacgcgcctgctcggcggcatcttccacctcttccccgccggcttctccttccacgtccgacgagcctgacgtcgtatctagctagagctttgtacgtacgtactactggacaacacaatcaaactttaaacatgctgctgagagctatatatatatatatagctacaactacaaatgtaaaatgtttctagacatgtgtaatgctacgtacaaactgaaacgaagttgaaccaaaataaacagttgggaggcacagtacgtagcg

SEQ ID NO: 105302 - DNA, 2720 bp, Zea Mays
atgacgaagctgacctcggagctactgcggccggtggttccggcggcggcgctggacgaggcggcgctgctgcgctacctggtggccaacgtcccgggcttcccgggccccgcgcccgcgctatcgctgacccagttcgggcacggccagtccaaccccacctactgcatccacgcctccgcgcccggcggggggcagcccaggcgctacgtgctcaggaagaagccgcccggggccatcctccagtccgcgcacgccgtcgagcgcgagtaccagtcatttcctatcgggaagcaggttctcaaagctctgggggatcacacagatgttcctgtcccgaaggtttattgtctctgcacagatgcaagtgtaattggaactcctttctatataatggagtatctggaaggaataatatatcctgatagcgcgttgccgggggtaactccatctaaaaggcgggctatatatttgtctactgccaaaactttggctgctatacacaaagttgatattaatgccattggattacaaaagtatgggagaagagacaattattgcaaaagacaggtagaaagatgggagaggcaatatcttgcatccactggcgaagggaagcctgcacgttaccagaggatgcttgatctagctcgttggttgaaagaacatgtaccagaagaagattcctcaccaggaccaggaacaggccttgtgcatggtgattaccgccctgataatctagtttttcatccaacagaggaccgagtaattggcgttattgattgggaactatctactttggggaatcagatgtgtgatgttgcttatagctgcttgccatatattatcgatgcagcacccagtgcaaggacttcttatggagggtttcaagatactggcattccagatggaattcctcaactggaagagtacctttctatatactgctcttttgctgcaagaccctggcctgctgcaaattggaagttctacattgctttttctttgtttcgtggggcatctatctatgcaggagtatatcacagatggactatgggtaatgcatcaggtggtgagcgcgctaaatttgctggcagggttgctaacgctatgattgactgtgcctgggacttcataaatagagtaaatgtcctgcaagaactgccttctaagggttctcaagtcttaggagcatcgtggcaagaatttcacagagaggaagaaagttcaacttctgaaaagaatcaaggaaaatttgttcctagtgaaaaggttatgcagcttcgaaagaaactaataaagtttatcgaagatcacatatacccaatggaggctgagttctacaaacatgcacaatcaacctcaagatggacaattcatccagaagaagaaaatcttaaagcattggcaaagaaggagggcctatggaacttgtttattccgctagacagtgcagcgagagctagaaagctattgtttgaagaccattctcaaatttcccttggaagttcgaataatcttttgctgggcgcgggtcttacaaatcttgaatatggatatctgtgtgagattatgggacgttcagtttgggctccacaaatatttaactgtggtgcacctgatacaggtaacatggaggtcctgttgaggtatggcactaaggagcaacagaagcaatggttagttcctttattggaagggacaattcgttctggatttgcaatgacagaaccacaagttgcatcttcagacgcgacaaatatagaatgctcaatatccaggcaaggagatttttatgtgataaatggaaggaagtggtggaccagtggagctatggatcctaggtgcaaaatcctgatattaatgggaaagacagatttttctgcacctaagcataagcagcagtccatgattttagtggacatcaacactcctggggtgcagataaagagaccattgttagtctttggttttgatgatgcacctcatggacacgcagagattacatttgaaaacgtgcgtgttccagtaacaaatatcctgcttggagaagggcgtggttttgagattgctcaaggaagacttggtcctggaaggttacatcattgcatgaggctagtaggagcagcagaacgtggcatgaatctgatggtagagagggccttaaacaggaccgcatttggaaagaggattgcacagcatggttcctttttatcagatcttgcaaagtgtcggattgaactggagcaggcaaggcttttagtccttgaagctgccgatcaactcgatcgacatgggaacaagaaagcacgtggtatcctcgcgatggccaaggttgcagctccaaatatggccctgaaggtgcttgacatggcgatgcaagttcacggcgcagctggtgtctcgtctgacacggtcttgtcgcacctatgggcaacggctaggacactgcggattgcagacggccccgacgaggtccatctcgggacaatcgccaagctggaactgcggagggctaggttgtaactcgagggcgatgtacagctcgcccgtcttgcgaatgaataaagaaggaacatcacccgtcgtcatttaacgtccatgtgaatacttagatgaataaataaatcctactttcagtagcagttactcttattttcaataaaccatatataatatcaatctttaataaatcatatcatttactcatcttcattaaa

SEQ ID NO: 105303 - DNA, 1384 bp, Zea Mays
catgtagtgtacagcatcgccttgcacacaccatatcacaagcaagcgccaacgatcgagcagaaagaagatcgtcgagatcgagcataagccatggcggcctctgtttctgcctcttgccttattagcctgtcgtcgttggcggtggtgctggtggcgctggcgtcggcggcgtcggcgcagctgtcgtcgacgttctacgacaggtcatgccccaacgcgctgtccaccatcaggagcggcgtgaactccgcggtgaggcaggagcctcgcgtgggggcgtcgctgctcaggctccatttccacgactgctttgtccggggctgcgacgcgtcccttctgctgaacgacacgtcaggggagcagagccagggcccgaatctaactctgaacccgaggggcttcgttgtcgtgaacagcatcaaggcgcaggtggagtccgtgtgcccggggatcgtctcctgcgccgacatactcgccgtggccgcccgcgacggagtcgtagcgctcggcgggccttcgtggacagttctactagggcgaagggactctaccgcttcattcccaggccagacaagcgacctcccacctccgacgtctagcctccgacagcttttgtctgcgtataacaagaagaacctcaacccaaccgacatggttgcactctcaggagctcacacgatcggacaggcgcagtgctcgagcttcaacgaccacatctacaacgacaccaacatcaactccgccttcgcggcgtcgctcagggccaactgccccagggcaggcagcaccgcccttgcgccgctggacaccacgacgcccaacgcgttcgacaacgcctactacaccaacctgctgtcccagaaggggctcctgcactcggaccaggagctcttcaacagcggcagcaccgacagcacggtcaggagcttcgcgtccagcacgtcggccttcaacagcgccttcgccacggccatggtcaagatgggcaacctcagcccccagaccggaacccaggggcagatcaggcgcagctgctggaaggtcaactcgtaagctactagctactacgcccaatatgcaatgcgttatggcaggcagatcagagccaataggcctctcagctcgttctctagctgtgtacctgtacgtgtgtgtgactggtgttggtcgagtaagtgtacgtactacatggatggtgcagagagagagatatatatcgatctggtggtggccaccttattatcgcatgcatatgtgtactgtattagcacgacactattagacacatttattgatggtaccatgctatgcttgtaaacgtacccagccattgacctagatatgacactatagtgtctaatcgtattgtgtgctaacacca

SEQ ID NO: 105304 - DNA, 1312 bp, Zea Mays
gaccgaccgaccgacatgcagtgcaggaagaaagaaggcatcagcaagcaaggccctataaataatgcatgcatggactattcgctttgcacacaacaggcacttgtgacgagcagcaaggaagcggcaggtatatctatctatatagtagagtaggctagcaggtaccgcgcagctagccatggctgcctctgcttcttgcctgcttagcctcttggtggtggtggtgctggcggcgctggcctcggcgcagctttcgtcgacgttctacgacacgtcgtgccccagcgcgctgtccaccatcagcagcggcgtgaccgcggcggtggcgcaggaggctcgcgtgggggcgtcgctgctcaggctgcacttccacgactgctttgtgcagggctgcgacgcgtccgttctgctgaacgacacgtccggggagcagaaccagattccgaaccagactctgaatcctaggggcttcgatgtctttgacagcatcaaggcgcaggtggaggcggtgtgcccggggatcgtctcctgcgccgacatcctcgccgtagccgccagggacggagtggtcgcgctcggcgggccttcgtggacagttgcactggggagaagggactccactgcttcgttcccggcacagacgagcgacctcccgcctcctacgtccagcctccagcagcttctgcgcgcgtatagcaaaaagaatctcaaccaaaccgacatggttgctctctcaggtgctcacacgatcggacaggcgcagtgcttgagcttcaacgaccacatctacaacgacaccaacatcaaccccgccttcgccatgtcgctgaggaccaactgccccgcgtccggcagcagcagcctggcgcctctggacgccatgacgcccaccgctttcgacaacgcctactacaccaacctgctgtcccagaggggcctcctgcactcggaccaggagctcttcaacaacggcagcgccgacagcacggtcagcagcttcgcggccaacgccgcagccttcaccagcgctttcgccacggcgatggtgaagatggggaacctcagcccactcaccgggtcacaggggcaggtcaggatcaattgctggagggtcaacggctaggacggacggacggacgttattagcagacgactgagaacgaacgatcatatctatctctactacttctatactatacttaaagcaccagtttcaacggttgtcgtgcgtcatttttttacaaaaatcaccctcagtttttctcgggttaacccgcagtccctcatcccacgcctccctccttatctc

SEQ ID NO: 105305 - DNA, 639 bp, Zea Mays
agaaagaaacgaccaaattagcaagcaggcagttacagacgcggccgcgacggcacatcgccgccgtagtccttgaccttgctccacaaccccggcccgactcggcgtcctccgccaccctcctcctgggcagcgccgacggggggatatggcatcggaggacgtggtgggcaagagcaggggcgacacggccgtcaccaccatcgtcaacctggcggaggaggccaagctcgcgcgcgagggggtcaaggcgcccggccaccagatcctcaccatctgcaagtcgctcgtcgccggcggctcagcaggcggagtgggaggggcactagcggacagctcggcaacggtgaaatagtcgacaggtggttcttaccccgcgcgcgagctcagtgtctatgtcttcccccgccccttgtaggaacacacctgtgctgatctgatctgatctaacaacttacgtctcaccatcctgaggacacgcctgtgctgatcgatgccctgagctcagacggttctgcctgcaagaagctggagtcatccacgacagccccgttcgcaggtctggttcgtcgtcagactctgactctctctactctcttaacaaatagcaaatggttcctcattgtaatctacgcaata

SEQ ID NO: 105306 - DNA, 2209 bp, Zea Mays
agaaagaaacgaccaaattagcaagcaggcagttacagacgcggccgcgacggcacatcgccgccgtagtccttgaccttgctccacaaccccggcccgactcggcgtcctccgccaccctcctcctgggcagcgccgacggggggatatggcatcggaggacgtggtgggcaagagcaggggcgacacggccgtcaccaccatcgtcaacctggcggaggaggccaagctcgcgcgcgagggggtcaaggcgcccggccaccagatcctcaccatctgcaagtcgctcgtcgccggcggctcagcaggcggagtgtgagtccccttctcttggctcgcctccacccctgccccgatcctctgtctctcgtcgtcagtcgtcaccgtcccgctcctccagacctcctgggcttcgatttgtcctcacgtgcgtctgccactccgttggtctaccctgattgggttcggcttcctggggattttgttgtcgtaggctacctagagtttcgatccgtgtaggtgttctcaggctcctggtacagggaattgggggtttccgtgatgcttggcacggggtgtgcgtgcttggcctggcttctctcagctttatgcccgatcgttgggcgccgcccgtgtgatctgggttggattcgcaccggtcttaaaccctgcacgcgagccaccactcagatctcggtccgttgactggtcccttggtttgattcgctgagaagccacatgaggaaatacctcgacatcgggcgattaaataaatttgccagggggatgctccagttttggttgatctattattaattctctggacaagattccattcccccaaaaataatgcgtatgcgtctttgccagttgccatattggtccccttttcacctttttaattgtgtgttttgttccttctcaatattgctgttaaataaattgctaggcgatgcgttcagtattctgcacagagtcccctgaccaggggatgaatttgcttctgcgaaggaaattgtaaatctgtgacataatgacctgtctttctggtttggtcagtgctctgtaataaccaacagatccacctgaaatggaacaattcgccactgacttcatgcatcagaattttgctgttgatgtctctatccagccaccttaactaattggtattagtttagatatattcagcttttttgagtagtatactgttcttcctgttgtcacctgtcatcactgccatcatctacatcaccaacactgaaggcctaccagcatttactttatttgatacactttgttggtacaagactatggtgacttgatcttgtcttcctttgctacttggaatatcttctcctaggggaggggcactagcggacagctcggcaacggtgaaatagtcgacaggtggttcttaccccgcgcgcgagctcagtgtctatgtcttcccccgccccttgtaggaacacacctgtgctgatctgatctgatctaacaacttacgtctcaccatcctgaggacacgcctgtgctgatcgatgccctgagctcagacggttctgcctgcaagaagctggagtcatccacgacagccccgttcgcaggtctggttcgtcgtcagactctgactctctctactctcttaacaaatagcaaatggttcctcattgtaatctacgcaatattcgggtgtcctctttcatacatgctttggtaaagactgttgtaccatgcgatgaggtttctcttcaatctattccaggtttcgatcattattgaacaacagttcatggatatgcaaattttgaatttgattctctgatgcccacagaactgaaagcgtggtaaccttcgaccagttcttcatcttctgtatttccatagcttgaattttctcgctctccatcttatcactagaaccacaaatagattacgaaactttttctcttaacaacataacacatatttgtacataaattaccgtgacattatatgtttccgttgcaacgcacgggcactcacctatttaaaatataagtgtttagtttagtagaacaacaccttaggagaaactttgtgtgctacatttcatgccaaagtgtaattttgtttggtatcacatttaaattattttgatatgacctaaaataaatcaatacattcatacgtatataaatatgcaactatatctaaataaaaaggaataaat

SEQ ID NO: 105307 - DNA, 2952 bp, Zea Mays
agaaagaaacgaccaaattagcaagcaggcagttacagacgcggccgcgacggcacatcgccgccgtagtccttgaccttgctccacaaccccggcccgactcggcgtcctccgccaccctcctcctgggcagcgccgacggggggatatggcatcggaggacgtggtgggcaagagcaggggcgacacggccgtcaccaccatcgtcaacctggcggaggaggccaagctcgcgcgcgagggggtcaaggcgcccggccaccagatcctcaccatctgcaagtcgctcgtcgccggcggctcagcaggcggagtgggaggggcactagcggacagctcggcaacggtgaaatagtcgacaggtggttcttaccccgcgcgcgagctcagtgtctatgtcttcccccgccccttgtaggaacacacctgtgctgatctgatctgatctaacaacttacgtctcaccatcctgaggacacgcctgtgctgatcgatgccctgagctcagacggttctgcctgcaagaagctggagtcatccacgacagccccgttcgcaggtttcgatcattattgaacaacagttcatggatatgcaaattttgaatttgattctctgatgcccacagaactgaaagcgtgattgcaatccccattgtgccaacagtgagggtggttatcactttcaccaagtttgtccccctcatcgagcctgaggagttcttcactattgactaatgaagttatttttagaaacaatggtcaaggaccccactctggctctatagtatataacagaagctcaccacacaagatcgataaccctttcagatcatactataccaagctgctacttcacttcagtagaacaattgatcacacacaagaagttcagatcagaaaatgcaggctgtcgctactcccatcaggttctcggatgtgttcccatcaagggctgaccgtggagaagagcacggtggtggttagtgtccctgttgttgtcacggcggtggttccgtgaagatcaagaggagcaaggatgttgtcaagttcaaggtgcgcccgttgcaactccaacctgttcccccccaattcagcaccaaagacagattcgttgtaaggaacttcaaaatctggaggcgcttaggatgccccagcccgctgcttttgtctccgtgcagccgtccgatggtcaacccacgccgagcaacgtctcgaacaagaatatgaagcacggtggcaaggtgttgttcttggatggcgccggggaggtcgccatcaccatcagtcgcaactcgcaacagcctctctccacagtccctgcacccggtgaatcttccggtgaatatgcggtctgtgacttattcgcagagccaaaattaccaacaagatgatttccataaaactgttgcacggaccttgagccaaggatcaacaccgatgagcatggattttcatccacttcaacaaactcttcttcttgacaatggccacttctccccaagcgaaaaaaatctgctagaagaccttagagggctttaacattgggatggatatttgggcccttaccttgctttaagtggagattcagttttctgttttcacttaatatgacaactgaagagcgaaagactttgaagggcacagagtcttcagctccttctgttcctcctgatggaggagtcagcaaggaacctaaaaaagggggagattacccaatgggaggacaactggtccagcacgccgctcatccaagggcaactggactctagaaaaggtaaagttggcactctggtttcctaaattcgttaatagcatgcattttcagtacaacatttgaataatgatgtaaataacctatcttagttagctttgttgaatgttatgcatttttagttaggctcatttgctcattacttttttattttgcttgatctgttaatgaaataaaaagtaccctgtccttaaggtgcgtgaactctgtaatccttgttgatttccgaccatgaatcagctgaattgttattttttatcatgtattgttaggtacagagttcatgcccataccatttatattattcttagcctgcccataccactttgatttcatttttcgtccatgtttcagttgaattttcctaacaaactatggtgttaatgccatggatgcttgtgtgtattggtggtttgctattctcacgtgtggtttccttgtggtgttgttctgaggtctacttaacacttttgtcgtggttgtatggtgttgggattcactaggaggtctacttaacacttttgtcgtggttgtatggtgttgggattcactaggaggtctacttaacacttttgtcgtggttgtatggtgttgggattcactaggaatgcgatcgtagcggctcgagctcttccttaccaagaggaacacaaacagagctcaggtttttttttattttgctctgcattatctactgcttctccatttgataagtaaccgatcaattttttgaatattttgagcacatcggaggtgtaggagttggtgaacacccatgatctgtagatgtcgcagttggaagggtccaggaagatttatgcacagggagatgattatcacgagtacttcaagcgctcatttgaggaagacatcgctgcgcaagtgcctcaaggagtggaatggggttacaactattgattgggggaaatcaggcagaggagggcatgttgacggaccaagtggcgaggcaaaattttctaatgattttgaagttcattatattggcagtagctgatgatcccttctgtgatggaccgagtaaaccaagcaattcgggatattcaactccactttgatgactgtgtgtaccagcatgagatgttgattacaattcacgacatatttattgttgtttattttttatttttcatattatagtgatgtttgttgttccgtatc

SEQ ID NO: 105308 - DNA, 447 bp, Zea Mays
atggcgcccaataagtccatagcttcacctgcgctcctactcctttggggctcaaggacccacaccggctcccagtacatctgcacctacgccagcaccaatgtgtgctccggctccaacactagcaccaacgcctgctacgacacctacaccgtcttcaactccgacacctgccccgacccctaccctagctccgacgtctgcccctacaccagcaccggcacctacacctacgccagcactagctccgactccggtgcctgctcccacgccagcaccaacacttgcccctatcttggctccgacacctacccctacgccagcactagctccaattctggtgcctgcacacacgccagcaccgacacctgtccctaccttggctccgtcttttacccctacaccagcaccaactcctactccaggccagcaaaaattcaaaaataa

SEQ ID NO: 105309 - DNA, 702 bp, Zea Mays
atgaactcctggttccacttccacaggctgcggcgcaagagagccggggcaggggcgatcgcgaacgccgccgccgccgaacccccgccgccaccaccctgctcgccgaacagggcgtcctactacgtgccgagccgggaccgcgccgtcccgcgccgcccggacaacaaccccaagctccgggacacgcagttcccgcgcagcccgcaggcgagcgacaatgtcttcgacgtcgtcgcccgctccagcccggcgccggagctcaagctacggcccatcctcacgaggccgcctcccaggcccgacggcggcggcggcgcggccgtgtctcccacgggcagggtgcgcccacccccagggttccaccacgccgccacgccggaccgccgcaggcggaacaaggcggaggaggaggcctgcacgcggcgtgccagcgggctccggcaggcgtacgagggcctggtggtggtggtggagtcggcggaccccgaggaggacttcctggagagcatggcggagatggccacggccaacggcgtgcggtcgccgcggggcctggaggagctcctcgcctgctacctcgcgctcaacgccgccgaccaccaccgcgcaatcgtcgccgcgttccgccgcgcgtggatgcacctccacctcctgcgccgctgcatgcatgagcacgagtcgtgtgtcgtggcagattag

SEQ ID NO: 105310 - DNA, 315 bp, Zea Mays
atgtattatcagcagcaaaatgtcactggagacgcctgtcaaccggcttccaaccatgggccttgctgtagatatcacttgttatctttcgaattctgcggcttccttgttccaccagtctttttcccttctttgtctggacgaggtagaggccggcggtgccggcgaagactccccaggaggcggcagccacgatgtcggtggattgggggcggctgcgcggggagacgaagcggaagaggccggagctcgacgccgggagtgccatcgccgccgctaatctccgctttttctctctctgaggcaggccggtga

SEQ ID NO: 105311 - DNA, 1674 bp, Zea Mays
cttgtcttcgtctcgtctcgccacaggcacagccagccctatcgatcggcggtacggtgtctgccaagccaagtgccaaccgcaaccgcccccgcgccgagcgagacgatggagacgacggagatggcggcggccgccgccgccgccctgtgctgcgcgctggcgctctacctgtaccacgcgctgtggctggcgcccgggcgggtgcgcgccgcgctgcgggcgcagggcgtcgcgggcccgcgcccctccttcccctacggcaaccgcgcagacatgaggcgggcgaccgcggcgcaccgcggcggcggcggcggcgtcgtgcacgactaccgccaggcgctgttcccacactacgagcggtggaggaaggagtacggccccatcttcacctactccatcggaagcatggtgttcctgcacgccagccggtccgacgtggtccgggacctctgcctcagcgtgtcgtcgctggacctcggcaagagctcctacatgaaggtcacgcaccggccgctcttcggcgacggcatcctcaagtccagcggcgaggcctgggcgcaccagcggaggctcatcgcgcccgagttcttcccggacaaggtgaagggcatggtggacctcatggtcggctcggccacggcgctggtggcgtcgtggggggacaggacgggcggcggaggcgtggagctcaagatcgacgacgacatcagggcctactccgccgacgtcatctccaggacgtgcttcggcagcagctacgtcaagggcaagaggatcttcgcggcgatcagggagctgcagaaggcggtgtccaagcccaacctgctggcggagatgaccggcctcagcttcctcccgacgaggactaacagggaggcgtggaggctcaacagggtcgtgagggacctggtgctggacgtcgtcagggagggcggggacgacgacaggaacctactgaacgcgatgctccgcagcgcttcttcctccggtggctgcagcggcgaccgcgtggcggtggaggagttcgtcgtggacaactgcaagaacatctacttcgccggctacgagaccacggcggtgaccgccgcctggtgcatgatgctcctggcgctgcacccggagtggcaggacctggtgcgcgacgaggtgcgccaggcatgcggcggcggcgacttcgcgtccctgcacaagatgaagaagctgacgatggtgatccaggagacgctgcggctgtacccggcaggcgcggtggtgtcgaggcaggcgctccgcgacgtgaccctcggcggcgtgcgcgtgccggcgggcgtcaacatctacgtgcccgtctcgactatgcacctggacccggagctgtggggcgccgacgcgcgggagttcgacccggggcggttcgcggacgaccaccagcggcagcggcagccgcacgcgtacctccccttcggcgccggcgcgcgcacctgcctcggccaggccttcgccatggccgagctcaaggtcctgctggcgctcgtgctgtccaggttccggctcgcgctgtcgccggcctacgtgcactcgccggcgctcaggctcatcgtggagcccgagcacggggtgcggctgctgctcaccaacgtggagcccaggggtgctagctagatgggcctcactggaccgggtatttaattc

SEQ ID NO: 105312 - DNA, 1498 bp, Zea Mays
cggtgtctgccaagccaagtgccaaccgcaaccgcccccgcgccgagcgagacgatggagacgacggagatggcggcgtcgtgcacgactaccgccaggcgctgttcccacactacgagcggtggaggaaggagtacggccccatcttcacctactccatcggaagcatggtgttcctgcacgccagccggtccgacgtggtccgggacctctgcctcagcgtgtcgtcgctggacctcggcaagagctcctacatgaaggtcacgcaccggccgctcttcggcgacggcatcctcaagtccagcggcgaggcctgggcgcaccagcggaggctcatcgcgcccgagttcttcccggacaaggtgaagggcatggtggacctcatggtcggctcggccacggcgctggtggcgtcgtggggggacaggacgggcggcggaggcgtggagctcaagatcgacgacgacatcagggcctactccgccgacgtcatctccaggacgtgcttcggcagcagctacgtcaagggcaagaggatcttcgcggcgatcagggagctgcagaaggcggtgtccaagcccaacctgctggcggagatgaccggcctcagcttcctcccgacgaggactaacagggaggcgtggaggctcaacagggtcgtgagggacctggtgctggacgtcgtcagggagggcggggacgacgacaggaacctactgaacgcgatgctccgcagcgcttcttcctccggtggctgcagcggcgaccgcgtggcggtggaggagttcgtcgtggacaactgcaagaacatctacttcgccggctacgagaccacggcggtgaccgccgcctggtgcatgatgctcctggcgctgcacccggagtggcaggacctggtgcgcgacgaggtgcgccaggcatgcggcggcggcgacttcgcgtccctgcacaagatgaagaaggtcgtacctgacgatggtgatccaggagacgctgcggctgtacccggcaggcgcggtggtgtcgaggcaggcgctccgcgacgtgaccctcggcggcgtgcgcgtgccggcgggcgtcaacatctacgtgcccgtctcgactatgcacctggacccggagctgtggggcgccgacgcgcgggagttcgacccggggcggttcgcggacgaccaccagcggcagcggcagccgcacgcgtacctccccttcggcgccggcgcgcgcacctgcctcggccaggccttcgccatggccgagctcaaggtcctgctggcgctcgtgctgtccaggttccggctcgcgctgtcgccggcctacgtgcactcgccggcgctcaggctcatcgtggagcccgagcacggggtgcggctgctgctcaccaacgtggagcccaggggtgctagctagatgggcctcactggaccgggtatttaattcggcccagtagtcaaataatctgccatagtataaacttcgtgaagcctgagttcggcag

SEQ ID NO: 105313 - DNA, 1343 bp, Zea Mays
cttgagtgggagtgctgtggatgagaggccggttcagctgtcagctcagccccatcttcacctactccatcggaagcatggtgttcctgcacgccagccggtccgacgtggtccgggacctctgcctcagcgtgtcgtcgctggacctcggcaagagctcctacatgaaggtcacgcaccggccgctcttcggcgacggcatcctcaagtccagcggcgaggcctgggcgcaccagcggaggctcatcgcgcccgagttcttcccggacaaggtgaagggcatggtggacctcatggtcggctcggccacggcgctggtggcgtcgtggggggacaggacgggcggcggaggcgtggagctcaagatcgacgacgacatcagggcctactccgccgacgtcatctccaggacgtgcttcggcagcagctacgtcaagggcaagaggatcttcgcggcgatcagggagctgcagaaggcggtgtccaagcccaacctgctggcggagatgaccggcctcagcttcctcccgacgaggactaacagggaggcgtggaggctcaacagggtcgtgagggacctggtgctggacgtcgtcagggagggcggggacgacgacaggaacctactgaacgcgatgctccgcagcgcttcttcctccggtggctgcagcggcgaccgcgtggcggtggaggagttcgtcgtggacaactgcaagaacatctacttcgccggctacgagaccacggcggtgaccgccgcctggtgcatgatgctcctggcgctgcacccggagtggcaggacctggtgcgcgacgaggtgcgccaggcatgcggcggcggcgacttcgcgtccctgcacaagatgaagaagctgacgatggtgatccaggagacgctgcggctgtacccggcaggcgcggtggtgtcgaggcaggcgctccgcgacgtgaccctcggcggcgtgcgcgtgccggcgggcgtcaacatctacgtgcccgtctcgactatgcacctggacccggagctgtggggcgccgacgcgcgggagttcgacccggggcggttcgcggacgaccaccagcggcagcggcagccgcacgcgtacctccccttcggcgccggcgcgcgcacctgcctcggccaggccttcgccatggccgagctcaaggtcctgctggcgctcgtgctgtccaggttccggctcgcgctgtcgccggcctacgtgcactcgccggcgctcaggctcatcgtggagcccgagcacggggtgcggctgctgctcaccaacgtggagcccaggggtgctagctagatgggcctcactggaccgggtatttaattc

SEQ ID NO: 105314 - DNA, 1433 bp, Zea Mays
caagcatgcatatgcatggttaagcaaccagtataatctgcgcgtgcaggccccatcttcacctactccatcggaagcatggtgttcctgcacgccagccggtccgacgtggtccgggacctctgcctcagcgtgtcgtcgctggacctcggcaagagctcctacatgaaggtcacgcaccggccgctcttcggcgacggcatcctcaagtccagcggcgaggcctgggcgcaccagcggaggctcatcgcgcccgagttcttcccggacaaggtgaagggcatggtggacctcatggtcggctcggccacggcgctggtggcgtcgtggggggacaggacgggcggcggaggcgtggagctcaagatcgacgacgacatcagggcctactccgccgacgtcatctccaggacgtgcttcggcagcagctacgtcaagggcaagaggatcttcgcggcgatcagggagctgcagaaggcggtgtccaagcccaacctgctggcggagatgaccggcctcagcttcctcccgacgaggactaacagggaggcgtggaggctcaacagggtcgtgagggacctggtgctggacgtcgtcagggagggcggggacgacgacaggaacctactgaacgcgatgctccgcagcgcttcttcctccggtggctgcagcggcgaccgcgtggcggtggaggagttcgtcgtggacaactgcaagaacatctacttcgccggctacgagaccacggcggtgaccgccgcctggtgcatgatgctcctggcgctgcacccggagtggcaggacctggtgcgcgacgaggtgcgccaggcatgcggcggcggcgacttcgcgtccctgcacaagatgaagaagctgacgatggtgatccaggagacgctgcggctgtacccggcaggcgcggtggtgtcgaggcaggcgctccgcgacgtgaccctcggcggcgtgcgcgtgccggcgggcgtcaacatctacgtgcccgtctcgactatgcacctggacccggagctgtggggcgccgacgcgcgggagttcgacccggggcggttcgcggacgaccaccagcggcagcggcagccgcacgcgtacctccccttcggcgccggcgcgcgcacctgcctcggccaggccttcgccatggccgagctcaaggtcctgctggcgctcgtgctgtccaggttccggctcgcgctgtcgccggcctacgtgcactcgccggcgctcaggctcatcgtggagcccgagcacggggtgcggctgctgctcaccaacgtggagcccaggggtgctagctagatgggcctcactggaccgggtatttaattcggcccagtagtcaaataatctgccatagtataaacttcgtgaagcctgagttcggcagagattccgtgaataaaaacgattacaaaatc

SEQ ID NO: 105315 - DNA, 1260 bp, Zea Mays
gtgcatggtgcatctatatatatccggtaataatccatgcatggaagttttaacgatatgtttatttcggtagctgatcaatttctcgatcggcagatacggacggacacgggcagcaattcggtcccgcgtcccccggacgcgctcttcccatcgctgaaggccagagagaagggtggcatggctataaacaggcagcgctgtcctcgcgcctctccctgcccggcccgcgtcgtcgtcgtccctcccgaaacaaaagaagctattttgacaccacacacacacacagaggagagaagataagagaacgaggggcagggcagccagcgccgctagctgaagcagggcagggcaagagaatccgtacgtcgaggtgcaggtcgtaggtaggatggacgcggaccagcagggcgtggttgcggcggcggtgaagccggcgctggccaaggggacgccgtcggcgtcgttccggctccgcaacgggagcctgaacgcggtgcgcctccgccgcgtgttcgacctgttcgaccgcaacggggacggcgagatcaccgtggacgagctggcgcaggcgctggatgcgctgggcctggacgccgaccgcgccgggctgtccgccaccgtcggcgcctacgtgcccgacggcgccgcgggcctccgcttcgaggacttcgacaagctccaccgcgcgctcggggacgccttcttcggcgcactgggaggccaggacgacgccaccgccgcggcggacggcgccggcgccggcgccgaggaggacgagcaggagatgcgggaggcgttcaaggtcttcgacgtcgatggcgacggcttcatctccgccgctgagctgcaggaggtgctcaagaagctcggcctccccgaggccagcagcatggccaacgtccgggagatgatctgcaacgtcgaccgcgacagcgacggccgcgtcgacttcaacgagttcaagtgcatgatgcaggggatcaccgtctggggcgcctgactgacctcatcgtcgtactgtgtggcaactggcatggtggtcccgcatttcgtcgagacagtcctgcgtctgcgtctctaattgaagaattctttagtatcgtccttcacatcactggtctagtggtgatgagaatgccctgtcctgtgtgtgtgtcacataaccatggtatgtaatgtcatactgtaaattaggtatatgatgatgatgacagctgataagaaaatgtatcaaactgggctattctaatcattgtc

SEQ ID NO: 105316 - DNA, 183 bp, Zea Mays
atgaccgtcgaggacgctgacaccgttgtcaccatgcatctcgacctcggcttcatggtcttcaaccggatacctgactatcatggcattataaagcatccaatggatttttcgacaataagaaagaagcttgataagggaattccaacttggagcgatttgaggagatattctctgcaatga

SEQ ID NO: 105317 - DNA, 396 bp, Zea Mays
gatctgaaggcatgtactattctattgaggggagcaagttgaaaattggtgcccactaatagtctagtgatctagccggatgaaattgtcgacaaggccattagcatcatgcaggttacctccaagcatctcatgtatatctgcaaggagaatctgcactcacgaaaggcattgagtgcaatagaggtgaaggaactgcgcgaagccctttaagttattgctgaagttttgaacctagattcactcttgtgctagagtttggtgtagtcctcgattataaactgtgtacaatgttaatgtagtgacatagtttgtatgatgcagttcatagtgatgtttgaagctatttgtatgaactgtgtcctggacatagtttgtatgatgcaattcatagtt

SEQ ID NO: 105318 - DNA, 4165 bp, Zea Mays
atggaggcggtgaaggcgtcggaggcgcgccgcgacccgccgctgctgcgggcggtggagctgtcccgcgtcgtcgccgaagagggcgcgggcgccgagctggccgggatcctcgtctccaacctctgtttcgcgcacaactcgccctcgctctggaagctcctgggccaagccgtcgcgtcccgcctcctctgcccgctccacgtcctcgcgctcctcacccctagggtgttgccgcagcggcgagcgcagcctgaggcgtatcggctgtatctggagctcctcaagtgtcacgccacgtcgtcgttgctggcgatggaggctgggcctaaccgtgacaacatactcgaggattgtggctttccatctgtgatggcagaggggcaagagagtgtatatgccattgaggggccacagcctatggacttagacattaaaaggggatctactgagaaccaaaatgagcatcgcgaacagttacgccggaagaacactttcatggctttggacgtgttgcatatgatggctgctgatagaaagattcaatcatttctgagcttgatattcctgaacatgtatattttctcataccctttctcacggtggtcgtctatgtattacccacctatggataaatttaacttcaactggttgcaactaagggttaggcctgaaaagttcagttctctacgccagaggttgagttctattgaagcacacaaggtgaccttggagactctactgccttctggacacaaaattaatgacttgttaataaacatctggagagtttgcaaagcaggctatcaaccaaataacaaacacattctgggtgttcttggtaatatgggatccggtggctcccttctgggccagcttactggagctgggaggcctgcctgctggataatatttgatatatatgtggagaatgcaattgatgggaagcatctaagtgttacatcagctatcgggattataaaagaaatgaccaagacaatgcaagtgcttaatgaagcaagctggcaggaaacatttaaagctctttggatttccacccttcgtcttgtacaacgggctagagaacctcttgaaggaccgattcctcatctagatgcaaggttatgcatgttgttagctcttataccattatcaattgccgcgattcttcaagaggaaagtgatatgtttggagttgaagggaacaaaattcttccacaaagacaagggcttatatcatctctccaggatctgatccagtattcaggacttcttgtaccaccttcatcagtggtgaatgcagctaatgctgcagcctcaaaagcagcaatatttaaggccaactataaggctggggctggcaacactagcatgatggaccagactgactcttcaatgaaagctgctgggaacatgctccatctcattatcgaagcctgtatctcgagaaagttgattgatacatctgcttacttatggcatggttatgttgtaccatctaggactttaaaagatacagctttgccccaagaatccccctggctgaactttatgaaagggtctcaactttcagaaccccttattgatgctctggtcgcaactcctgcttcaagtgttgcggaattggacaagttatacagtgtagcaacaaatggttcagaagaagaaaaaacagctgctgcaaagattctttgtggcgcatcacttgttcgtggctggaacattcaggaacatgtggtcagtatggtggtcaagctattatcagcttctttaccctcagattcctcaacttcaactcctgggagcatgagccactaccttgctcatatgtctacgttgaacgaaatcttactcggtgtgtcttatggtgatgtcatccacattctttcgttgtatggaatggttccagatgttgccgtggctttaatgccactatgtgaggcttttgggtcaatagcaccgccacctaatcacaagtctaccattcttggtgaaacatctgtttatttggtcttctcctgtgcatttctttgtcttcttcgcttgtggaagttttatagaccccctcaagagtattgtcttactggtcgtggaggctcagtaaagctggaactgactctggactatctgttgttgatgcacaataatcgcattttctcaaattcgtctgcccctaatagggattcttacaacagtatgggctcagtcaatgaggtctctgctcagccgatttatattgattctttccccaagctaagtgcttggtatttccagaatcaagcttgcatcgcctctacactttctggtctttgcaacaaaaaccctgtccatcaagttgcgaacaaaattttgaatatgatttgccgaaaaatgaataaaggtggagtatcatctagtaatctttcatctacttctagtagtagcgttagtggttcttctgtaagtgcatcggatgattcttaccaaaggcctgctgttcctgcttgggaatttttagaagctgttccttttgtacttgaagctgttctgacagcatgtgctcatgggcggctttccagccgagacttgactacaagcttaagggatcttgtggactttttgcctgcttctcttgctgcaattgtaagctacttctcagcagaaattacacggggaatctggaaacctgttccaatgaatggaactgaatggcccagtcctggtgcttctcttcattccattgaagctgaagtaaaggaaattcttgcatctgctggtgttcagattaacagctgctatccacgtggtgtgccgccaatgcttcctttgcctatggctgcacttgtcagcttgacaattacatttaagctagataggagtttggagtacattcaaggggtcattggacatgcactagagaactgcgcagggggaagttcctggccaagcatgcccattatcggggcattgtggacacagaaagtgcgaagatggcatgacttcattgtcctctcttgtatgcgttctccatttggcagagacaaagatgcagttgcgcagctcatccgaagctgcttttcgtcctttctgcagtcatcatccagtggttctgacataatcgcaaaccgtggagttggggctttattaggggactcaatcacggatcaaggtcttaggctcccaatggcacctggtttcgtctacctgagaacatgtcgaactttccatgacacatacttcgttagtgaagtgatcctcaagcaagtgattgaatgggctcacaaacttgcaaatggatggtctttcaatgggcctccgcagttgaaatcaggccggacaccactatcttgtgcagcatctatggcgcatcaggtcgcgatgcttggtggtggtctcctatgcatagcaggtggaccacttgtggtccaggtgttgtatgaagacacactaccgacactgctgctgtcagccagagaacagagtttgaaagaccctgggccagtttctagcacactccaaggttacgccatggccaacatgctcttttactgtggtagcctactttggggagcggacaggagttctcctgtcatgaaattgtctttcctctcgaggcggccacgggtggtgagaaaccacatggatttcatagctggtgtactggacggacacattcttctgggctgtgacccgggtacctggaaagcgtatgtttctcagtttatgttcctggtggtgaagtttgttccatcatggttgccggacataaagctggacacgctaaagaagatagcagctggacttcggagttggcatgaacatgaccttgctctatcccttcttgagcgaggaggaccacaagcaatctctgttgtagtcgagacctttctgtgatcctgccatttggacattttgccccccacctgacatcgcagccgctgttagggtttgaagtcggtggtctgaggtctagctgaagtaatcaggatgacccttccagaattccacttgagcaaccaggataactgatgtttttctcatgtatggcgaacccattttgtttttgtgaattcaatacggaagaacattcaacctactagagtctagagtgtattgacatcagccctaacatgtaacctatgggaatttcattaactttattgcactgacttcagccctaacttgt

SEQ ID NO: 105319 - DNA, 107 bp, Zea Mays
agagaatcagtcgagtagatatggatggcctcaaatcgaaattcgcagtttacacgaccaaaaaagggaactacatgatcctgtggaactcacattttttggttggc

SEQ ID NO: 105320 - DNA, 1935 bp, Zea Mays
ccgcctcgatcaaagcaaacccccaggcccccaacccgcccagcgccctgcccccccgccgcagtgagtgagatgatcatcggaggggcagcgggcgccgggaacccgaggaggaggaggacgcaatgaaggcgcagccgctgctaccggcggcgctcaagaggcggaggggcccgcgcgtggcggtgcttgcgctcgtcctctgctccctgctcgtgcccttggccttcctcttcgaccgcgccccctccgggtacgtgacgacggaggagcggcaccgacaggaggtcgttctgccttcgttggatcacgtggagaagaggcgtcgcagtggcgctgacagtggagagcgacaggatgcgccggagaagatccccagaagtagtgcaggaacgattcatcaacgaacaccagagaagaacatctccaaaggcagtgctgcagtcattcatcaacaaacaccggagaagaacatctccaaaggcagtgctggagtcattcatcaacaaacaccagagaagaacatctccaaaggcagtgcaggagtcgttcgtcagcataagcaaattggtagcaacacgacaagggatgatgctaaaccaaaagaactgctacttcatgtcatttcacaagtttcttattttaagacatcttccgttgaggttgtgttgaaaaatcttgcggcttctgtagtgatcaactcaactgtgagcagttgtaaggagccaggataccttgcttttcatatcctaactgatgctcagaacttttatgccatgaaacattggtttaccaggatttcgtataaaaatgcagctatccatgtcataaactatgaagcaattgttttggaaaaacttccaaagtatactatccggcagctgtttttgccagaggagttccgtgttctgattaggagcactaagcagcctactgaaaacactagaatgaaatatctgtcactgttcagccactcacattttgttattccagaaatcttcaagtatctaaacaaggtggttgtgttggatgacgatgtagttgttcaacgtgatctgtctttcttgtggcatattgatatgggagacaaggtaaatggcgctgccgagttttgcgatctgaaacttggtgaaatgaaaaatgtcttgggtaaaacagcatatgatcccgagtcgtgtgtatggatgtcgggggtgaatttgattaatttggataaatggagggagcataatgtcacagagaactatctgttgctcatgcaaaagttcgaattcaaggatgagctgtccctgcgagcagcagcatttcctctgagcttgctatccttccaacatctaatatatcccctagatgaaaaattgaccctggctggacttggatacgattatggaatcgatgaagaggttgcgcggagatctgcatcattgcactacaatggcaacatgaaaccttggcttgaattaggtataccggactacaagaagtactggaagaggtttcttgaccgaggagatcgatttatggacgagtgcaacgtaaatccgtgatgcagatggacccaagatgagaacaattgagtaaatctgggacgcagagctggacctgaaatcagaacaacatcagcaagccttaccgaagcttgtgtcgacgagaacgaatactagtggtgaagccaggattttttgagttggatattcccaacctgaaagtagtgtacacaagagtatatacggtagcataaatttgagtaaatgctggggactacgatccatcgacctccctctacggtaacaaaaaaattcaaatcagtcgacttcatcttacaaaatcttcatgaaatacagataattgtacatgctacgaaacgagataacaatgtcaattgcgctataaaatttggatttgggatatagagaagtgaattattgcacaaca

SEQ ID NO: 105321 - DNA, 2337 bp, Zea Mays
gaaggcggaagccaccggcgccagcacggcgaaatcggggcgggcagcagcaggagcagcacgcaccgtcgcagcgcggtcagggccagtataaaaacgccgtcgcattccaaagccgccggtttccacacaccacgccacagccagccgggggtggttcggcatcggcttcggcaggcagagcactttccatccggccctcgcctcctcgcgctgcatctcccctgacccctgtgccttgtccgcccgcggcagatcctgaggcggctcgcacttccgtgttccgtccgccgcgcttccctttgcccacgccacgcgatcccaatttccaaacccgagcgaggtcaactcaaagtacccgcgccgcgcgtacgccataaacgttgcctgccgcgtcttccgaccgtcccccacgccacgacgcagtcgcagcagatccaccaccgacgcgcgcgccgcgcgccccgacgcggagcgctggatcccgcgcagcaggaggcggccaacccgtcgccgtcgcagtctcccccggcccccgcaagcggcggccgcggcgtccgctaccgcacgccctcgtccccggacctcctgctcctccccgccgaccccaagatgcgccgctactccgcgctgcccaacggcggccgccaggagacgctggccgaccgcgcgcaccgctaccggggcgtcttgctcgtcgtcctcgccccgctcgcgctcgtctccctcgtgctcctcctcatgccgcgctcgcccgccggcgccacggccggcgccaggaggtccggcccgcccggggccgacaagtacgccgtcatcttcgacgccgggagctccggcagccgcgtccacgtcttccgcttcgacgccaacctggatctcgtccacattggcagcgagatcgagctcttcgtccagataaaaccggggcttagccactacgccaacgatccccgggaggccgccgagtcgctcgtctctctccttgacgatgccaagcgagtggtgcccgcggaattgcgcgaccaaactcctgtcagagtcggggccaccgcagggctgagaaatttgggtgcacaaaaatcggaggcgatattgcaagcggttagggacattcttcgcgaaaagagttcctttaaaaaccaaccggattgggttacagttcttgatggaacgcaggaaggtgcatacgaatgggttaccatcaattatctgttgggaaacttgggaaagacttatgcagacacagttggagtagtggatcttggtggtggatctgtccaaatggcatatgctattgcagagaaggatgcagaaaaggctcctaaaccatccgagggggaagatgcatatgtgaagaaattgttcctcaaaggaaccacatattatctttatgttcatagttatttgcattatgggttgctggcagctagagcggaggtcttaaaagctggcaatggcaatggttacagcaactgtatgttagagggatttcaagggaaatacaagtatggcgacgattcatttgaagcatccggtccaccttccggtgctagttactcaaaatgcaaggatgatgcagtgaaagcccttaaagttgatgaagcatgcacccacatgaagtgttcttttggtggcatttggaatggtggtggtggtgctggacagaagaatctctttgtagcgtcctttttctttgatagggctgctgaggctggatttgttaacgccaatgcgcctgtcgctaaggttaaaccatcggacttcagacaagctgcggagcgcgcttgctcgttgagcgtgaagaacgccgaggccaccttccctggtgtacagaaggatagcattccatatatctgcatggacctcgtttatcagtacacattactcgtggaaggattcgcattcttgcaggcgtcgatccggaccacgagatgaccttggtaaagaaggtcccttacagcgacgcctacgtcgaagccgcatggccgcttggcagtgccatcgaggttgcatcttcgtagtaggaaggaaacacagtttagcaaggtaacatcggacggcattcttgtcatgaagttttgcgttgagagtccccactcctccacttcctcctcttgatcgcttgaattcgcacactcaatccattcatcttactatacggtacgggtagcgtctctcggctctacttggttccagcgggcattgttgtaagctctgttattaatatttgtatactactaatgcaagtaagattggagcctcaattcttctttttgacctccaatatatataatactggaatgcacctgatacaagtgccatcattttttgctc

SEQ ID NO: 105322 - DNA, 2326 bp, Zea Mays
gaaggcggaagccaccggcgccagcacggcgaaatcggggcgggcagcagcaggagcagcacgcaccgtcgcagcgcggtcagggccagtataaaaacgccgtcgcattccaaagccgccggtttccacacaccacgccacagccagccgggggtggttcggcatcggcttcggcaggcagagcactttccatccggccctcgcctcctcgcgctgcatctcccctgacccctgtgccttgtccgcccgcggcagatcctgaggcggctcgcacttccgtgttccgtccgccgcgcttccctttgcccacgccacgcgatcccaatttccaaacccgagcgaggtcaactcaaagtacccgcgccgcgcgtacgccataaacgttgcctgccgcgtcttccgaccgtcccccacgccacgacgcagtcgcagcagatccaccaccgacgcgcgcgccgcgcgccccgacgcggagcgctggatcccgcgcagcaggaggcggccaacccgtcgccgtcgcagtctcccccggcccccgcaagcggcggccgcggcgtccgctaccgcacgccctcgtccccggacctcctgctcctccccgccgaccccaagatgcgccgctactccgcgctgcccaacggcggccgccaggagacgctggccgaccgcgcgcaccgctaccggggcgtcttgctcgtcgtcctcgccccgctcgcgctcgtctccctcgtgctcctcctcatgccgcgctcgcccgccggcgccacggccggcgccaggaggtccggcccgcccggggccgacaagtacgccgtcatcttcgacgccgggagctccggcagccgcgtccacgtcttccgcttcgacgccaacctggatctcgtccacattggcagcgagatcgagctcttcgtccagataaaaccggggcttagccactacgccaacgatccccgggaggccgccgagtcgctcgtctctctccttgacgatgccaagcgagtggtgcccgcggaattgcgcgaccaaactcctgtcagagtcggggccaccgcagggctgagaaatttgggtgcacaaaaatcggaggcgatattgcaagcggttagggacattcttcgcgaaaagagttcctttaaaaaccaaccggattgggttacagttcttgatggaacgcaggaaggtgcatacgaatgggttaccatcaattatctgttgggaaacttgggaaagacttatgcagacacagttggagtagtggatcttggtggtggatctgtccaaatggcatatgctattgcagagaaggatgcagaaaaggctcctaaaccatccgagggggaagatgcatatgtgaagaaattgttcctcaaaggaaccacatattatctttatgttcatagttatttgcattatgggttgctggcagctagagcggaggtcttaaaagctggcaatggcaatggttacagcaactgtatgttagagggatttcaagggaaatacaagtatggcgacgattcatttgaagcatccggtccaccttccggtgctagttactcaaaatgcaaggatgatgcagtgaaagcccttaaagttgatgaagcatgcacccacatgaagtgttcttttggtggcatttggaatggtggtggtggtgctggacagaagaatctctttgtagcgtcctttttctttgatagggctgctgaggctggatttgttaacgccaatgcgcctgtcgctaaggttaaaccatcggacttcagacaagctgcggagcgcgcttgctcgttgagcgtgaagaacgccgaggccaccttccctggtgtacagaaggatagcattccatatatctgcatggacctcgtttatcagtacacattactcgtggaaggattcggcgtcgatccggaccacgagatgaccttggtaaagaaggtcccttacagcgacgcctacgtcgaagccgcatggccgcttggcagtgccatcgaggttgcatcttcgtagtaggaaggaaacacagtttagcaaggtaacatcggacggcattcttgtcatgaagttttgcgttgagagtccccactcctccacttcctcctcttgatcgcttgaattcgcacactcaatccattcatcttactatacggtacgggtagcgtctctcggctctacttggttccagcgggcattgttgtaagctctgttattaatatttgtatactactaatgcaagtaagattggagcctcaattcttctttttgacctccaatatatataatactggaatgcacctgatacaagtgccatcattttttgctc

SEQ ID NO: 105323 - DNA, 2297 bp, Zea Mays
ctgcgcggcatgaccagacggcacacggcagcacgcatcgttcccaccaaaccagattgtcactgggcagcggcgacaagaccaagagcgtgacgcggcacggtcgtcggaggcccagcgctcccctcctcctcggtcgtaacgcaggcggccgcccaccgcgccgccgaaacaaaaaacctagcagcaaccagcaaccccacgcgaccacggacggaccggccatggcatctgcacgggctgctgctgcctgctgatagagtggacaatgcatgagctgctgcagatagaacgctgccggccgggtctgctgctgatagatgcatgtatagatagagacactgctgcagctgcagctgcagtgcagatatatagaacgctagctgccggccggtgcagaccacgggaggcgcgggcgcgcgctataaaagccgagccagtgggcgcggccagtgtcacaactcacaattcacatcgaggtctcagcttcaggaaagggaaggaagcatgttcgggcaccaccaccaccacggccacggcgggcaccaccaggccccgccgccgcacgagcagacgctgttcaggatcttctgccgcgccgacgaggcgtactgcctcaccgtgcgccacgacgccgtcgtcctcgcgcccaccaacccccgcgacgagtaccagcactggtacaaggacatgaggcacagcacgaaggtgaaggacgcggagggccagccggcgttcgcgctcatcaacagggccaccggcctcgccatcaagcactcgctcggccagtcccatcccgtgaagctggtgccctacaacgcggagtacctggacgagtcggtgctgtggacggagagccacgacgtgggcaagggcttccgctgcatccgcatggtcaacaacatccacctcaacttcgacgccttccacggcgacaaggaccacggcggcgtgcacgacggcaccaccgtggtgctctgggagtggtgcaagggccccaaccagagctggaaggtgctgccctggggggacgaggcctacgcgccgcgcccgtacgctcctcctccgcctgcccaggtggaaccaggctacggcgggtaccgtcccccggctgcagggggctacgcgccgccgcctccgcctgcccaggtggaaccaggctacggcgggtaccctcctccaccagctgcagggggctacgcgcctcctcctccgcctgcccaggtggaaccaggctacggcgggtaccctcctcccccagctgcagggggctacgcgccgccgcctccgcctgtgcctgtgcaggagcctggctacggcgggtaccgtcctccatctgctgggggctacccggcggggtacgggtacagcaacctgcctcgcgctctggcgtctgaacagaccgtccgcgtctactgcaaggccggcgaagggtacagcctcaccgtcaggaacggcaccgtgtgcctggcgccaaccaaccccagggacgagttccagcactgggtgaaggacatgaggcacagcactagcatcaaggacgaggaagggtacccagcgttcgcgctggtgaacaaggtcaccggcgaagccatcaagcactcgctgggacagagccacccggtacgccttgtgccctacaaccccgagtacgttgacgagtcggtgctgtggacggagagccgcgacgtcgggcacggcttccgctgcgtgcgcatggtgaacaacatctacctcaacatggacgccttccacggcgacaaggaccacggcggcgtccacgacggcaccaccgtcgtcctctgggagtgggccaagggcgacaaccagcgctggaagatcctgccctggtgaacgtgaacagagacgagctagatgaatccaaggaaccttacctagctgctgccgccgccgcctaattcgtcctcctccgctctagctgttatctgtctgtgtcttcgcgtcctcggttcctgaatggacgaataatatatagcatgcatgtacggctagcgaccatgtctgaatgacatcttcgttgctgctgctgctgctactgctacctgtccgtttggtgttctaaaagactctgatgagtggttctgaatgtctgcatttcaagtttgctgtgtgatgttaatgtaccgtgcgtaccagagctgctgctcctcctaaaatctttatctacctttgttttgatttttgcctgcttatggttatggcaacactgccacaacaatggccttttttatttcaaactttctataaaataaatatataaaaaaataactttgtgc

SEQ ID NO: 105324 - DNA, 1633 bp, Zea Mays
ccggccggtgcagaccacgggaggcgcgggcgcgcgctataaaagccgagccagtgggcgcggccagtgtcacaactcacaattcacatcgaggtctcagcttcaggaaagggaaggaagcatgttcgggcaccaccaccaccacggccacggcgggcaccaccaggccccgccgccgcacgagcagacgctgttcaggatcttctgccgcgccgacgaggcgtactgcctcaccgtgcgccacgacgccgtcgtcctcgcgcccaccaacccccgcgacgagtaccagcactggtacaaggacatgaggcacagcacgaaggtgaaggacgcggagggccagccggcgttcgcgctcatcaacagggccaccggcctcgccatcaagcactcgctcggccagtcccatcccgtgaagctggtgccctacaacgcggagtacctggacgagtcggtgctgtggacggagagccacgacgtgggcaagggcttccgctgcatccgcatggtcaacaacatccacctcaacttcgacgccttccacggcgacaaggaccacggcggcgtgcacgacggcaccaccgtggtgctctgggagtggtgcaagggccccaaccagagctggaaggtgctgccctggggggacgaggcctacgcgccgcgcccgtacgctcctcctccgcctgcccaggtggaaccaggctacggcgggtaccgtcccccggctgcagggggctacgcgccgccgcctccgcctgcccaggtggaaccaggctacggcgggtaccctcctccaccagctgcagggggctacgcgcctcctcctccgcctgcccaggtggaaccaggctacggcgggtaccctcctcccccagctgcagggggctacgcgccgccgcctccgcctgtgcctgtgcaggagcctggctacggcgggtaccgtcctccatctgctgggggctacccggcggggtacgggtacagcaacctgcctcgcgctctggcgtctgaacagaccgtccgcgtctactgcaaggccggcgaagggtacagcctcaccgtcaggaacggcaccgtgtgcctggcgccaaccaaccccagggacgagttccagcactgggtgaaggacatgaggcacagcactagcatcaaggacgaggaagggtacccagcgttcgcgctggtgaacaaggtcaccggcgaagccatcaagcactcgctgggacagagccacccggtacgccttgtgccctacaaccccgagtacgttgacgagtcggtgctgtggacggagagccgcgacgtcgggcacggcttccgctgcgtgcgcatggtgaacaacatctacctcaacatggacgccttccacggcgacaaggaccacggcggcgtccacgacggcaccaccgtcgtcctctgggagtgggccaagggcgacaaccagcgctggaagatcctgccctggtgaacgtgaacgtacgttgcttgtcttttgccgtatatacatctatctgtatattaattgactattagttcaccttgttgtcttatatacgcagagagacgagctagatgaatccaaggaaccttacctagctgctgccgccgccgcctaattcgtcctcctccgctc

SEQ ID NO: 105325 - DNA, 1267 bp, Zea Mays
actccgccccaccactggtcaacgaatctttcctgcactgtcctgtccgccgccgctcaacctcatcggaactccactcctcctcacccccacagcaactcccacctcatggagaaagctgcgcacgttgccgccggcgcgacgcaagagcaggaatcgtctccgaacaggcttgacgacgcagcgaggcatcatggctctgctgaagcgattcctgaaagacttgcggtggtcacaggaggaaacaaaggagttggcctagaagtatgccgccagcttgctctcaagggtgtgacagttatccttacagcaagggatgagaaacgaggaaaagatgctgccgagacccttcgccgtgaatgccaactcccaaatatcatattccatcagctcgatgtcagagatgatgatagtgccaccacattggcccggtatgtagaaagaagatatgggaagctcgacatcttggtgaacaatgcagctatttcaggaattgtagcagatgaggaaggcctgaaagctcttaacattgatgcagagacatggacatctggcagggcagctaatcttctgaaagaagtattccagaataccaatgatgaggcattcaactgtctgaataccaattactatggatgcaaacgggtaacagaagctcttcttccacttctgaagctatctacatcaggaggagcaaggattgtcaatgcctcctcacttgcgtcggagctgaagagaatgccaaatgagaagctgcgaaacgatttgagcaacattgacatctgggacgaggaccggatagaagcagtgctcgacacattcttggaggacctgaggagcgggcggctggaagaggctgggtggcccgtgatgctaccagcctacagcgtatcgaaaatggtcatcaatctgtacaccaggatcatggcaaggaggtatccggagatgcgcatcaactgtgtgcgacctggctttgtcaagacggacatcaactggaatctgggggtcctgacgcctgaacaaggtgcgagagggccagtcatgctagctctcctccccgatgatggaccaactgggtgctattttgatcagacagaaatggtgaacgtctggtgattgaatatttgtcgtctgctagtttattttagaactaaaccgctagaaataaaaaagagcggatggagtgttataactttcctgaattcatgatgacataaacacatacacatggtaaaacgttcttatgatcagttggtgtagtttccat

SEQ ID NO: 105326 - DNA, 1367 bp, Zea Mays
ctggtcaacgaatctttcctgcactgtcctgtccgccgccgctcaacctcatcggaactccactcctcctcacccccacagcaactcccacctcatggagaaagctgcgcacgttgccgccggcgcgacgcaagagcaggaatcgtctccgaacaggcttgacgacgcagcgaggcatcatggctctgctgaagcgattcctgaaagacttgcggtggtcacaggaggaaacaaaggagttggcctagaagtatgccgccagcttgctctcaagggtgtgacagttatccttacagcaagggatgagaaacgaggaaaagatgctgccgagacccttcgccgtgaatgccaactcccaaatatcatattccatcagctcgatgtcagagatgatgatagtgccaccacattggcccggtatgtagaaagaagatatgggaagctcgacatcttggtgaacaatgcagctatttcaggaattgtagcagatgaggaaggcctgaaagctcttaacattgatgcagagacatggacatctggcagggcagctaatcttctgaaagaagtattccagaataccaatgatgaggcattcaactgtctgaataccaattactatggatgcaaacgggtaacagaagctcttcttccacttctgaagctatctacatcaggaggagcaaggattgtcaatgcctcctcacttgcgtcggagctgaaggtgtggagctcctgcattcctgcacgaacagagaagatatctatgttactcaccctgattatattgttgccagagaatgccaaatgagaagctgcgaaacgatttgagcaacattgacatctgggacgaggaccggatagaagcagtgctcgacacattcttggaggacctgaggagcgggcggctggaagaggctgggtggcccgtgatgctaccagcctacagcgtatcgaaaatggtcatcaatctgtacaccaggatcatggcaaggaggtatccggagatgcgcatcaactgtgtgcgacctggctttgtcaagacggacatcaactggaatctgggggtcctgacgcctgaacaaggtgcgagagggccagtcatgctagctctcctccccgatgatggaccaactgggtgctattttgatcagacagaaatggtgaacgtctggtgattgaatatttgtcgtctgctagtttattttagaactaaaccgctagaaataaaaaagagcggatggagtgttataactttcctgaattcatgatgacataaacacatacacatggtaaaacgttcttatgatcagttggtgtagtttccatatgtcactttgaatgatttgttgttctttgttggtgttgag

SEQ ID NO: 105327 - DNA, 2327 bp, Zea Mays
tccgccgccgctcaacctcatcggaactccactcctcctcacccccacagcaactcccacctcatggagaaagctgcgcacgttgccgccggcgcgacgcaagagcaggaatcgtctccgaacaggttgtagcccccctctgcttcctccgcctgcgctgttaaatactgcgtctgttcatgcggtagctgtacatgacaggagtggttgaagaatcgacgagcagaacaagcctgttccagccccgtgttcgacgcctcactctttttagtcttactattgtgcattgctagtagtatacgtagctacgtgcgaaagaaagaaagaaagaaaggtctttctatgatctgaaacaatggtcaaccaaaagcagctttatagcaatctgcggtgccgattcagctgtatatctcttaatgaaaacgatgcattttgagtcgcatctttttttctttctttcgaaaagcaaccggcaagaattagctggtcatttattaataaagaagaagcgaatacacagactgagactaagaaccaaccccaagagcaaaatttgagtcacatccttgtttcctgaaacaaaaccttttttagatgatggagaaaccagagagaaggatacatgtaacattgtggcaattttggggctagtagcagatctaggatttattttagggtatgctgttcaaaatttttcatacagaatttggtagatttattttagcaattctgtaacaactgtagaaattgcaccaagattcgttatagatgcactaagggactgtttggttcgtaactaactgtgacactttgactaggttaggcaaagtatggcaagctaggcagcgaactaaatagaccctaagtaaaacggtaaggcctaagttcaaggattaagttaaaatcatccactaaatacaaatatgaaaagttgaatttagagacttacattgttgtttttactgttttatttgatgcttttgaagggacatgattgtcttgcttattctccattctccagcctctagtttttttattttttgccgcttcattgatctgatgcagtaacaagaatcatgttcaaccacaggcttgacgacgcagcgaggcatcatggctctgctgaagcgattcctgaaaggtgattcgatcctcttccagagccatgtcgttctttcatgaatgctaatattggccagtgcatcagacttgcggtggtcacaggaggaaacaaaggagttggcctagaagtatgccgccagcttgctctcaagggtgtgacagttatccttacagcaagggatgagaaacgaggaaaagatgctgccgagacccttcgccgtgaatgccaactcccaaatatcatattccatcagctcgatgtcagagatgatgatagtgccaccacattggcccggtatgtagaaagaagatatgggaagctcgacatcttggtgaacaatgcagctatttcaggaattgtagcagatgaggaaggcctgaaagctcttaacattgatgcagagacatggacatctggcagggcagctaatcttctgaaagaagtattccagaataccaatgatgaggcattcaactgtctgaataccaattactatggatgcaaacgggtaacagaagctcttcttccacttctgaagctatctacatcaggaggagcaaggattgtcaatgcctcctcacttgcgtcggagctgaaggtgtggagctcctgcattcctgcacgaacagagaagatatctatgttactcaccctgattatattgttgccagagaatgccaaatgagaagctgcgaaacgatttgagcaacattgacatctgggacgaggaccggatagaagcagtgctcgacacattcttggaggacctgaggagcgggcggctggaagaggctgggtggcccgtgatgctaccagcctacagcgtatcgaaaatggtcatcaatctgtacaccaggatcatggcaaggaggtatccggagatgcgcatcaactgtgtgcgacctggctttgtcaagacggacatcaactggaatctgggggtcctgacgcctgaacaaggtgcgagagggccagtcatgctagctctcctccccgatgatggaccaactgggtgctattttgatcagacagaaatggtgaacgtctggtgattgaatatttgtcgtctgctagtttattttagaactaaaccgctagaaataaaaaagagcggatggagtgttataactttcctgaattcatgatgacataaacacatacacatggtaaaacgttcttatgatcagttggtgtagtttccata

SEQ ID NO: 105328 - DNA, 1903 bp, Zea Mays
gaggagaacactggggaactagtggagtaacaaagtaacccattggtcgagatcacttcgccgccgccgctttcgagatctccgggtggagcaagcgagcaaaggcagcagccatgtcgctccgcgtgctgaaccctaacgccgaggtgctcaacaagtcggcagcgctgcacatgaacatcaacgccgccaagggcctccaggacgtgctcaagaccaacctcggccccaagggcaccatcaagatgcttgtgggtggagctggtgacctgaagctgacgaaggatgggaacaccctcttgaaggaaatgcaaattcagaacccaactgcaatcatgattgcgaggacggctgtggcacaggatgacacaagtggtgatggcacaacctccactgtgctatttatcggggagctaatgaagcagtctgagcggtgcatcgatgaaggaactcatccaagattcttggttgatggttttgatgttgctaagagagcgtgtcttgattttctcgataagttcaagacgccagtcgttactggtgaagaacctgacagagataccttaaaaatggtagcaagaacaacacttaggacaaagttgtatgaagggttggctgatcagttgactgatattgttgtgaatgcagttctgtgcattcgcaaaccagatgaaccaattgatctatttatggtggaaataatgcacatgcgccacaaatttgatgttgacacccgtctggttgagggtctggtcctggaccacggttctcgtcaccctgacatgaagcgcagggcagagaattgttacatcttgacctgcaatgtctcattagaatatgagaaaagtgaaatcaatgcaggatttttttactcaaacgcagaacaaagagagaaaatggttgctgcagagagacgccaagttgatgaacgtgtcaaacagattattgaattgaaaaataaggtttgtgctggaggcgataaaaactttgtggtgatcaatcagaagggcattgaccctccatctctggacctccttgctagagcggggattattgctcttcgaagagcaaagaggagaaatatggagaggcttgtgctagcatgtggtggtgaagctgtcaattcagttgatgagttgactgaagattgtctaggctgggctggtcttgtctatgagcatgttcttggagaagaaaagtacacatttgtggagaatgtgaaaaatcctcgctcttgtactatactgattaaaggacctaatgaccataccattgcacaaatcaaggatgctgtccgtgatggtctaagatctgttaagaacacagttgaggatgaagcagttgtgctgggtgctggtgcttttgaggttgctgcaaagaagcatcttatcgacaatgtgaagaaaaccgtcaaaggacgagcacaacttggggtggaggcgtttgcggaagctcttcttgttatacccaagactttggctgagaactctggtttagatactcaagatgtgattgtttctctccagaatgagcatgaccgtggattagttgtggggttgaaccatcactctggggatccgattgatccccagatggaaggcatcttcgacaactactctgtgaagcgccagatcatcaattctggacccatcattgcatcccagttgctgcttgtggatgaagtgatcagggcaggccgcaacatgaggaaaccgacttagatttttgtcgccacctagccgagacttatttgttctaccttttgttttggttttgtgcctagtagtgatctggatgatacgtttgacttgagttggtcccatttcacgaagcaggtcgcattcgctttttttttttgggattactgcgtgcttccattttaacatgggattttagttttatc

SEQ ID NO: 105329 - DNA, 2079 bp, Zea Mays
aagagcaaatcacaacccgcactcgcccaaaaccctactgctcccgctccgctcctgcttggtcgagatcacttcgccgccgccgctttcgagatctccgggtggagcaagcgagcaaaggcagcagccatgtcgctccgcgtgctgaaccctaacgccgaggtgctcaacaagtcggcagcgctgcacatgaacatcaacgccgccaagggcctccaggacgtgctcaagaccaacctcggccccaagggcaccatcaagatgcttgtgggtggagctggtgacctgaagctgacgaaggatgggaacaccctcttgaaggaaatgcaaattcagaacccaactgcaatcatgattgcgaggacggctgtggcacaggatgacacaagtggtgatggcacaacctccactgtgctatttatcggggagctaatgaagcagtctgagcggtgcatcgatgaaggaactcatccaagattcttggttgatggttttgatgttgctaagagagcgtgtcttgattttctcgataagttcaagacgccagtcgttactggtgaagaacctgacagagataccttaaaaatggtagcaagaacaacacttaggacaaagttgtatgaagggttggctgatcagttgactgatattgttgtgaatgcagttctgtgcattcgcaaaccagatgaaccaattgatctatttatggtggaaataatgcacatgcgccacaaatttgatgttgacacccgtctggttgagggtctggtcctggaccacggttctcgtcaccctgacatgaagcgcagggcagagaattgttacatcttgacctgcaatgtctcattagaatatgagaaaagtgaaatcaatgcaggatttttttactcaaacgcagaacaaagagagaaaatggttgctgcagagagacgccaagttgatgaacgtgtcaaacagattattgaattgaaaaataaggtttgtgctggaggcgataaaaactttgtggtgatcaatcagaagggcattgaccctccatctctggacctccttgctagagcggggattattgctcttcgaagagcaaagaggagaaatatggagaggcttgtgctagcatgtggtggtgaagctgtcaattcagttgatgagttgactgaagattgtctaggctgggctggtcttgtctatgagcatgttcttggagaagaaaagtacacatttgtggagaatgtgaaaaatcctcgctcttgtactatactgattaaaggacctaatgaccataccattgcacaaatcaaggatgctgtccgtgatggtctaagatctgttaagaacacagttgaggatgaagcagttgtgctgggtgctggtgcttttgaggttgctgcaaagaagcatcttatcgacaatgtgaagaaaaccgtcaaaggacgagcacaacttggggtggaggcgtttgcggaagctcttcttgttatacccaagactttggctgagaactctggtttagatactcaagatgtgattgtttctctccagaatgagcatgaccgtggattagttgtggggttgaaccatcactctggggatccgattgatccccagatggaaggcatcttcgacaactactctgtgaagcgccagatcatcaattctggacccatcattgcatcccagttgctgcttgtggatgaagtgatcagggcaggccgcaacatgaggaaaccgacttagatttttgtcgccacctagccgagacttatttgttctaccttttgttttggttttgtgcctagtagtgatctggatgatacgtttgacttgagttggtcccatttcacgaagcaggtcgcattcgctttttttttttgggattactgcgtgcttccattttaacatgggattttagttttatcgatggttttaacatcctcctatgaggaaacaaagcctctagagagacgaggttgccttcccgaagttagtgccaccaaacttgctgcatggaacatgaagaagcaatgtttataacaatgttattatcaagtaatccgatgtgatggataaaatattggt

SEQ ID NO: 105330 - DNA, 1931 bp, Zea Mays
aaatcacaacccgcactcgcccaaaaccctactgctcccgctccgctcctgcttggtcgagatcacttcgccgccgccgctttcgagatctccgggtggagcaagcgagcaaaggcagcagccatgtcgctccgcgtgctgaaccctaacgccgaggtgctcaacaagtcggcagcgctgcacatgaacatcaacgccgccaagggcctccaggacgtgctcaagaccaacctcggccccaagggcaccatcaagatgcttgtgggtggagctggtgacctgaagctgacgaaggatgggaacaccctcttgaaggaactcatccaagattcttggttgatggttttgatgttgctaagagagcgtgtcttgattttctcgataagttcaagacgccagtcgttactggtgaagaacctgacagagataccttaaaaatggtagcaagaacaacacttaggacaaagttgtatgaagggttggctgatcagttgactgatattgttgtgaatgcagttctgtgcattcgcaaaccagatgaaccaattgatctatttatggtggaaataatgcacatgcgccacaaatttgatgttgacacccgtctggttgagggtctggtcctggaccacggttctcgtcaccctgacatgaagcgcagggcagagaattgttacatcttgacctgcaatgtctcattagaatatgagaaaagtgaaatcaatgcaggatttttttactcaaacgcagaacaaagagagaaaatggttgctgcagagagacgccaagttgatgaacgtgtcaaacagattattgaattgaaaaataaggtttgtgctggaggcgataaaaactttgtggtgatcaatcagaagggcattgaccctccatctctggacctccttgctagagcggggattattgctcttcgaagagcaaagaggagaaatatggagaggcttgtgctagcatgtggtggtgaagctgtcaattcagttgatgagttgactgaagattgtctaggctgggctggtcttgtctatgagcatgttcttggagaagaaaagtacacatttgtggagaatgtgaaaaatcctcgctcttgtactatactgattaaaggacctaatgaccataccattgcacaaatcaaggatgctgtccgtgatggtctaagatctgttaagaacacagttgaggatgaagcagttgtgctgggtgctggtgcttttgaggttgctgcaaagaagcatcttatcgacaatgtgaagaaaaccgtcaaaggacgagcacaacttggggtggaggcgtttgcggaagctcttcttgttatacccaagactttggctgagaactctggtttagatactcaagatgtgattgtttctctccagaatgagcatgaccgtggattagttgtggggttgaaccatcactctggggatccgattgatccccagatggaaggcatcttcgacaactactctgtgaagcgccagatcatcaattctggacccatcattgcatcccagttgctgcttgtggatgaagtgatcagggcaggccgcaacatgaggaaaccgacttagatttttgtcgccacctagccgagacttatttgttctaccttttgttttggttttgtgcctagtagtgatctggatgatacgtttgacttgagttggtcccatttcacgaagcaggtcgcattcgctttttttttttgggattactgcgtgcttccattttaacatgggattttagttttatcgatggttttaacatcctcctatgaggaaacaaagcctctagagagacgaggttgccttcccgaagttagtgccaccaaacttgctgcatggaacatgaagaagcaatgtttataacaatgttattatcaagtaatccgatgtgatggataaaatattggt

SEQ ID NO: 105331 - DNA, 1013 bp, Zea Mays
atgggcccatgttggccacgcaaggcacgcacgcatgagacacaggagtacagccgtacaggacacagccgccgcctgttcgtgttccttcctgtgcgagtcggcgaacggcgaggcgtctccggagtccggactgcggctgtggacagcgactctgtgacggcgactcggcgaagccccaagctgccaagcccccaggtgctggttggaatggcaagtacagcatgctttgtgattgtcagtaagaatgacatcccaatctatgaggcagaagttggatctgcacccaaaaaagaagatttgtcttatcaccatcagtttattctgcatgctgcattagatgttgttcaggatctagcatggacaacaaatgcaatgttcctgaagtcagttgatagattcaatgaccttgtggtgtctgtttatgtaactgctggtcatatcctttacaaagtgacgatgacagttcttttcttgttccaaatggcatttgactgtgcatcattatgttcggttttcaaagtttggtcatggcagtgctatattttctttaactgcaactctggcacataccagattcatgctgcttcatgactcgcgtagcgaggatggaataaaaagcttttttcaagaggtccatgaactttacatcaagatattcctcaacccgctttacctgcccggctctcgcatcacatcctctcatttcgataccaaggtgagggcgctcgcgaggaggtacctgtaatacgggcatatgctggggtttcatcgtaaagcaggcacgccgatttttttgtgccatcatcatctgataacacatacgtctaatttttcttggcgttggctttgttatgaccgacctatggatcattttttttttcgagaacaaaatgacttgtctaatttttcttggcgttggctttgttatgaccgacctatggatcatttttttttcgagaacaaaatgacttggcgataatgttcaaactttaattgattgtgtcgtgcat

SEQ ID NO: 105332 - DNA, 888 bp, Zea Mays
atgggcccatgttggccacgcaaggcacgcacgcatgagacacaggagtacagccgtacaggacacagccgccgcctgttcgtgttccttcctgtgcgagtcggcgaacggcgaggcgtctccggagtccggactgcggctgtggacagcgactctgtgacggcgactcggcgaagccccaagctgccaagcccccaggtgctggttggaatggcaagtacagcatgctttgtgattgtcagtaagaatgacatcccaatctatgaggcagaagttggatctgcacccaaaaaagaagatttgtcttatcaccatcagtttattctgcatgctgcattagatgttgttcaggatctagcatggacaacaaatgcaatgttcctgaagtcagttgatagattcaatgaccttgtggtgtctgtttatgtaactgctggtcataccagattcatgctgcttcatgactcgcgtagcgaggatggaataaaaagcttttttcaagaggtccatgaactttacatcaagatattcctcaacccgctttacctgcccggctctcgcatcacatcctctcatttcgataccaaggtgagggcgctcgcgaggaggtacctgtaatacgggcatatgctggggtttcatcgtaaagcaggcacgccgatttttttgtgccatcatcatctgataacacatacgtctaatttttcttggcgttggctttgttatgaccgacctatggatcattttttttttcgagaacaaaatgacttgtctaatttttcttggcgttggctttgttatgaccgacctatggatcatttttttttcgagaacaaaatgacttggcgataatgttcaaactttaattgattgtgtcgtgcatcgcag

SEQ ID NO: 105333 - DNA, 1312 bp, Zea Mays
gggacctaattttagctatgtgtgtttggatctgataaactacaactaaaatggcacatacttactacacttactactgattttgttgtacagattcatctaaaatggcacatacttactacacttactactgattttattgtgaaaggacagcaacagctcaaggcagacaaagaccatggcacaaatctcacacttgtccaaacctacaagtatcatcaggaagatagcttgaaaaaatcgtgaatgagacttgtatgtggctgtgaatgaacaattgtgtgattaggatttgtttattgtgagcttttccgattacaattaccgtttcccgatcaattccgagctattttgctcggatttatccgttttcgatataccggaatttaccggtcgttatccgtttccgactttcccgtttaccgattccggccgaacaaaaaattatgcgggtgaaaacggtgagaggttttttccgaccgttaccgaccattttcacccttagatattgggctgtgttaaaattttctaataaccggtttttatgttgaatggcatttcatcctgactatctttattattcttttctttgcaacatctgaagttgttcgggggaattttttctaggtgctggttggaatggcaagtacagcatgctttgtgattgtcagtaagaatgacatcccaatctatgaggcagaagttggatctgcacccaaaaaagaagatttgtcttatcaccatcagtttattctgcatgctgcattagatgttgttcaggatctagcatggacaacaaatgcaatgttcctgaagtcagttgatagattcaatgaccttgtggtgtctgtttatgtaactgctggtcataccagattcatgctgcttcatgactcgcgtagcgaggatggaataaaaagcttttttcaagaggtccatgaactttacatcaagatattcctcaacccgctttacctgcccggctctcgcatcacatcctctcatttcgataccaaggtgagggcgctcgcgaggaggtacctgtaatacgggcatatgctggggtttcatcgtaaagcaggcacgccgatttttttgtgccatcatcatctgataacacatacgtctaatttttcttggcgttggctttgttatgaccgacctatggatcattttttttttcgagaacaaaatgacttgtctaatttttcttggcgttggctttgttatgaccgacctatggatcatttttttttcgagaacaaaatgacttggcgataatgttcaaactttaattgattgtgtcgtgcat

SEQ ID NO: 105334 - DNA, 838 bp, Zea Mays
gagcagcatatccatactgaattaataaggtctatgcctaatcttaccatttgttaacttgctctggcagaaagaagatttgtcttatcaccatcagtttattctgcatgctgcattagatgttgttcaggatctagcatggacaacaaatgcaatgtgagtattttattagttttgtgttttgttcaggacctagcatggagctagttagttttgcattgggctgcgggcgaagaatgaaatcatatccaaatgttattcttctagcattttatgtaccgtttacctcacctagaaacttttgtttgtttacattttcttttcctccccaggttcctgaagtcagttgatagattcaatgaccttgtggtgtctgtttatgtaactgctggtcataccagattcatgctgcttcatgactcgcgtagcgaggatggaataaaaagcttttttcaagaggtccatgaactttacatcaagatattcctcaacccgctttacctgcccggctctcgcatcacatcctctcatttcgataccaaggtgagggcgctcgcgaggaggtacctgtaatacgggcatatgctggggtttcatcgtaaagcaggcacgccgatttttttgtgccatcatcatctgataacacatacgtctaatttttcttggcgttggctttgttatgaccgacctatggatcattttttttttcgagaacaaaatgacttgtctaatttttcttggcgttggctttgttatgaccgacctatggatcatttttttttcgagaacaaaatgacttggcgataatgttcaaactttaattgattgtgtcgtgcat

SEQ ID NO: 105335 - DNA, 924 bp, Zea Mays
agaaaaacaactcattgctcttcgagagttagagctgttttgttttattgttaggagctagagcattaaaaccgtagcttataccaactcttccaacgttcttctcatacatcatttaaaaaaatataggagaatctgttttgtaaaacgaattataaaacaaatctccttcaaaagataaaggagccggaggagtcagagctaaaacgataaaccagagcccggcctaaatgtgacggccgctctagtggaagcgcgtataaattgggggaaggaaaattccagcggacgagcgctctagccgtttttcctcgtcctcgatccagcccctgccgcttccagctccgatcgatctgatccctccccaccaccacgcccatggcggaccaactcaccgacgaccagatcgccgagttcaaggaggccttcagcctcttcgacaaggacggggatggttgcatcacgaccaaggagctgggaactgtcatgcgttcactggggcaaaaccctacagaggctgagctccaggacatgatcaatgaggtcgatgccgatggcaacggcaccatcgattttccagagtttctgaaccttatggctcgcaagatgaaggacaccgactctgaggaagagctcaaggaggcctttcgtgtgtttgacaaggaccagaacggcttcatctctgccgccgagctccgccatgtcatgacaaatcttggggagaagctaactgatgaggaggtagacgagatgatccgtgaggctgatgtcgatggtgatggccagattaactacgaggagtttgttaaggtcatgatggccaaatggagccacttggaaaacctaaacatgcaacagggtaatgtctcagttatcttttatttaccaaaagttatctcaccgctgggtgttctcccttacctc

SEQ ID NO: 105336 - DNA, 1689 bp, Zea Mays
gccgtttttcctcgtcctcgatccagcccctgccgcttccagctccgatcgatctgatccctccccaccaccacgcccatggcggaccaactcaccgacgaccagatcgccgagttcaaggaggccttcagcctcttcgacaaggacggggatggtacggttcgctctcctcatactctctttctctctctctctctccgtgttccttcggatctgtcctccgtgggtggagatgctcggcgtacgtggctgcctgtgtagtggcattgccgcccgcaagtctgtttagacggggtagatccgatacatcccggatgtggacggagtccgcggcggggctcgatcgcgtcgctgtcctgtgcatttctccctaccagtggcggaatcggcgatgtggaccttaggtttatctgctctttgaccatttcgccactgacaatcatgtttgtttggattgttacgctgtgaatcaatacgagacgtggccaagtgattttttttctgggagcagtgtaacctttgacccagtctggtcgtggtctgtgtagcatgatgaagttgtagcaggctgattgctaccaaaacattttcaattcattagtcttttcatgctccaggttgactgaagttagaagaggttaaagatcgtgctcagtttgtccaagtaattttcctagtaattgtgcgatccagcttcaacgttgaacgacatgtttcttgttctaccttgttcctgtgcagtagttgacccccaaaaaggaaaactgggaccgactgctattggggaaacggcacccacactgattggctcaattccagtggctatgcgtgctcggtcaaaacatgatgatttaccacttagaaactgccctgctttccacatagcatttcaaacttttcgattaagatattaccaccttttgacatctgggttctccctaacttgctgaattatttctctcttcagtcactactttacctagttataattacagaaatggttgtgccgtatcttgtacaggttgcatcacgaccaaggagctgggaactgtcatgcgttcactggggcaaaaccctacagaggctgagctccaggacatgatcaatgaggtcgatgccgatggcaacggcaccatcgattttccagagtttctgaaccttatggctcgcaagatgaaggacaccgactctgaggaagagctcaaggaggcctttcgtgtgtttgacaaggaccagaacggcttcatctctgccgccgagctccgccatgtcatgacaaatcttggggagaagctaactgatgaggaggtagacgagatgatccgtgaggctgatgtcgatggtgatggccagattaactacgaggagtttgttaaggtcatgatggccaagtgagccacagaagcataagctcaaggcagagaggattgtgcattgcatattagtcaagatgcaatgcaactcttatttcatcgacttccagtgaaacattctgctagttgtagtttttgaaaggcaatgcagttgctgctttgttcttccctccagtgtgttttcagaactgttgattcatgtgaaactgtaatgattgccctccctgctgtgtcttggttgcagttgaaaccatatgtagctacattccccctcccaccacctccacacatcaacttctgcttcaccttttttagc

SEQ ID NO: 105337 - DNA, 990 bp, Zea Mays
tcttaaggccaactttcttgtgtttgtcgaaacttaggctgtgcttgggagagttgagctcacatggagcaggacaaaagaaccaaggtgctgtgcctgcatggcttccgtacaagcggcgcttttctgaagaagcagatcagcaaatggcacccttccatacttcagcagtttgagatggtcttccctgatggcgtcttcccagctggtggaaagtcggagatagagggcatatttccaccgccgtacttcgagtggtaccagttcaatatggaattcactgactacacaaatctggacgagtgcatttcatatctatgtgattacatggtgaaaaatggcccttttgatggcctgctcggattctcccagggcgcaacacttttggcccttttggtaggctaccaagcacagggcaaggtgctgagtgatcatccgccaattaagttcgtggtctcaatatctgggtgcaagttcaaggacccaagcatctgtgatgtcacttacaaagacccgatcaaggtgaaatcagtgcactttattggagagaaggactggctcaaggtaccttcggaggagctggcttctgcctttgatgagcctctcatcataaggcatcctcatggccacactgtccctaggcttgacgatgtgtctgtgaaacagctttctgaatggagctcgtgcatcctggaagaccttgagactgcaatcgttcctgaggccttagattcgggcaacccatctgataaggaagctattagtgcagaattcgcagaaaacctggtgactgcttgaggcttgtccactttcgtggcatggttggtttggttgcatttgaaacttgtaccgtttctactgagtagtgcgtggaacttgtttgatcgcatgtgtatttgcattggcaaaacaataaagcgctatcttctgaatcaaatggattcagacatcaagtacaaagtattgttggatgcaacattgactgggatt

SEQ ID NO: 105338 - DNA, 2895 bp, Zea Mays
cgcctgagattctcgcagggactagtttgtggcggaatctcaaacccaggaacctgtgaatcctcgacacttgtgaaacatgagaaggttctttttcttcgggtcccctgctgcaaacgctggtgagggagccgggcaaccggtcaatgatagcaggactggacatagaaagacagatgagggaaaggacatctccaccgcgagattgtcgagatccagaagccgtcgtcagaagcggaataaggaggaaccggctaaccccaaacaactcaggaggtccatgtccttctcatccccggccagaagcagctgtgtggaggaacgatgctttagcttctcgggtgatgttccgtgctctttgtacgatgaatctgatgcaccccaccatgccaaagatgtcgctcccgacatgtggtctccagaagggaatccgttctctagagaatatgcaataagaaccccgaaagatcattctgccatggaaaatgattctcctcgttcaaaatactgttcttgctcagcagggcactctcctgttagctctcctgtcgctatacagtgcagatcaacaagactaggcaatttattaaacaggaacgaagtactagatcgttacattgatagagggcatggagatgcaatcgtagatgagaaacagaagcagtgcgtacctacggtttctaatttgggaaggccacctcgaccccactctacagtaccatccataccgagaccattcaaagagacaacggaaagctacccagatgtggacttaaacgacgccttcctttggcgacttgctcaagagggtataggagatacccacaagattacaactatgtgcagtgcatctagacgccacataaacatgtcagatgcttctgaaagagaaagtgcaacaactgttgaagatatttatgaagatttgcaagatgtgagacttccaaatgttatctgcccctccacttgtcctaactcagcggtagaagaaactgatgacatgttgcttcaaagagttaaggaagttgagtcaaggtttactattccttgtggagatgaatatgaatttagcatgctcaggtataaatcatcaacctcaaatgacatgtttcagttgatccagcaattgactgaagataggaaacagttagcatatgaattgtcttcagagatcaaagcacgtgttacagaaagatttgctgccaaagagcaatacaaacaattaaagaaagaattggacaacagaactagaaggctggagaaggagaagagtgaagtacaaactacactggaaggagagatggatagaaggtcagatgattggtctatcaggctatcaagatttcaatctgaagaagagagactacatgaacgggtgagagaacttgcagagcagaatgtgtcatttcagagagaagttacttctcttggagcaactaaggctgaagctttaatgaaagctgcgagtttggaaacgcaaaatagcaaactaaatgacgatctagagaaactaaaaaatgagcatgagaaactgcattattcctcaacagatttgcaggctcgctttgctgagattgtagaggaaagggaccacatccgagaatatttgaaggccaaggagggagagaacaaagcattgcacaaagtaattgcaagactacaaacaacatgtaatgagcaggaaagaacaatcacaggcatgagacaaggatgcatagacgaattaggtaggaaatttgttgagtacagcaccaatgataaaacgagaaaattacaaatggaacttattagactgactggggtggagcaaaagttgagaggtgaaattcgatcttgtaatcttgaagtaaaatctctcagacaagagaacattgcactcttaaatcgtttacaaggtgctggaaatggagcaagcttctcctcgattcgacttgatcaggagcttcaagctagggtggacaacctgcaaatgcaaggcttgtcactacttgataagattagccaactttgtaccaaattgctggatctgatgaaacataagagacatgaaaatgaatatttgtgtggcaatgatgtgtcaacattcagtgattacatatttgagtaccagagcatcaaaggaggaattgaaggtctgaagctaagtttgaaagcaataaattctatactagctgaaaagcaaaatgctaaagaaaaatctggtgaaattgtagctgaaggtagtccttccaaagatcaaacggatgattttggactcaagctgaaagaagaggctatgctgaatagagtactgaaggaggcagtcttgtcaaaagaagttgccattgaacaattgcaatctgatctggcatcttcacttcgcatccaagacgttatgagaaacgagatccagagggttcaggatgagctttcttgcataacccacaaagctaagcagttggagcttcaggtatccaagaaggatgagtcaatcgatgagatccaacaggatttccaggaatctgcaaaggagctggctgctcttcgtggaacactgaaaacagtgacggaggagagggacctgtcgtggcaggaggcgaagcagctgagacgaaacatcagcatcatgcaggacgaggttgtatcgctgaagaagaagatcgaagccctggacgaagacatacttgtgaaggaggggcagatcacaatattgcaggacagcatcgacaagccgttcgacatcatctgcagcccaagatcgatgagggagttcgatatggcgtgaagacggctgctgttttgtagcgtatgcatgaaggattttttgcatcaagggcaagatgcatggagtataatgtgttggaagttgacagtagacccaacaacacattgcattctggtcaattgtttctgtct

SEQ ID NO: 105339 - DNA, 2857 bp, Zea Mays
aacatgagaaggttctttttcttcgggtcccctgctgcaaacgctggtgagggagccgggcaaccggtcaatgatagcaggactggacatagaaagacagatgagggaaaggacatctccaccgcgagattgtcgagatccagaagccgtcgtcagaagcggaataaggaggaaccggctaaccccaaacaactcaggaggtccatgtccttctcatccccggccagaagcagctgtgtggaggaacgatgctttagcttctcgggtgatgttccgtgctctttgtacgatgaatctgatgcaccccaccatgccaaagatgtcgctcccgacatgtggtctccagaagggaatccgttctctagagaatatgcaataagaaccccgaaagatcattctgccatggaaaatgattctcctcgttcaaaatactgttcttgctcagcagggcactctcctgttagctctcctgtcgctatacagtgcagatcaacaagactaggcaatttattaaacaggaacgaagtactagatcgttacattgatagagggcatggagatgcaatcgtagatgagaaacagaagcagtgcgtacctacggtttctaatttgggaaggccacctcgaccccactctacagtaccatccataccgagaccattcaaagagacaacggaaagctacccagatgtggacttaaacgacgccttcctttggcgacttgctcaagagggtataggagatacccacaagattacaactatgtgcagtgcatctagacgccacataaacatgtcagatgcttctgaaagagaaagtgcaacaactgttgaagatatttatgaagatttgcaagatgtgagacttccaaatgttatctgcccctccacttgtcctaactcagcggtagaagaaactgatgacatgttgcttcaaagagttaaggaagttgagtcaaggtttactattccttgtggagatgaatatgaatttagcatgctcaggtataaatcatcaacctcaaatgacatgtttcagttgatccagcaattgactgaagataggaaacagttagcatatgaattgtcttcagagatcaaagcacgtgttacagaaagatttgctgccaaagagcaatacaaacaattaaagaaagaattggacaacagaactagaaggctggagaaggagaagagtgaagtacaaactacactggaaggagagatggatagaaggtcagatgattggtctatcaggctatcaagatttcaatctgaagaagagagactacatgaacgggtgagagaacttgcagagcagaatgtgtcatttcagagagaagttacttctcttggagcaactaaggctgaagctttaatgaaagctgcgagtttggaaacgcaaaatagcaaactaaatgacgatctagagaaactaaaaaatgagcatgagaaactgcattattcctcaacagatttgcaggctcgctttgctgagattgtagaggaaagggaccacatccgagaatatttgaaggccaaggagggagagaacaaagcattgcacaaagtaattgcaagactacaaacaacatgtaatgagcaggaaagaacaatcacaggcatgagacaaggatgcatagacgaattaggtaggaaatttgttgagtacagcaccaatgataaaacgagaaaattacaaatggaacttattagactgactggggtggagcaaaagttgagaggtgaaattcgatcttgtaatcttgaagtaaaatctctcagacaagagaacattgcactcttaaatcgtttacaaggtgctggaaatggagcaagcttctcctcgattcgacttgatcaggagcttcaagctagggtggacaacctgcaaatgcaaggcttgtcactacttgataagattagccaactttgtaccaaattgctggatctgatgaaacataagagacatgaaaatgaatatttgtgtggcaatgatgtgtcaacattcagtgattacatatttgagtaccagagcatcaaaggaggaattgaaggtctgaagctaagtttgaaagcaataaattctatactagctgaaaagcaaaatgctaaagaaaaatctggtgaaattgtagctgaaggtagtccttccaaagatcaaacggatgattttggactcaagctgaaagaagaggctatgctgaatagagtactgaaggaggcagtcttgtcaaaagaagttgccattgaacaattgcaatctgatctggcatcttcacttcgcatccaagacgttatgagaaacgagatccagagggttcaggatgagctttcttgcataacccacaaagctaagcagttggagcttcaggtatccaagaaggatgagtcaatcgatgagatccaacaggatttccaggaatctgcaaaggagctggctgctcttcgtggaacactgaaaacagtgacggaggagagggacctgtcgtggcaggaggcgaagcagctgagacgaaacatcagcatcatgcaggacgaggttgtatcgctgaagaagaagatcgaagccctggacgaagacatacttgtgaaggaggggcagatcacaatattgcaggacagcatcgacaagccgttcgacatcatctgcagcccaagatcgatgagggagttcgatatggcgtgaagacggctgctgttttgtaggtgagtcggtggatgaaaaatcaagttattgtagaagaccacacatttcttggcttattacagcctgctctgctgttttgaactatgactgatgccactttttgtggctttggggattggaagcgtatgcatgaaggattttttgcatc

SEQ ID NO: 105340 - DNA, 549 bp, Zea Mays
atggcgagcctgcaagcagccctgctccttctcccggcgttctccgtcgtggctgtggcggcacggtgggtgtgccgcgcgctggcgcgctcccatttggcgtgcctcccgtccggcagcccgtcgttccggtacctggtctcctcctcgccgtcgtcgtcgtccgtggtggacaagggcggcggcgagctgccggtggcgctttattcccggaggacgaagcgccgccgctgcgttggcgaggaggaggaggaggaacggtgcgtgttctgcctgagcagcatcgaggaggggtcggaggtgagggagctccggtgccggcacctcttccaccgcgcgtgcctggaccgctgggtccgggcgcggccggcggcgacgtgcccgctctgccgcgggcggctcctgacgtcgcttccgtgggaggtggcggggtactaccacgacgaagaggaagaggaggaggtggagatggaggaggagtcggacatgatgctgttcatggcgtgcgtgcacagccgcagcagctggctgtggccgtcgtgatcatgc

SEQ ID NO: 105341 - DNA, 546 bp, Zea Mays
actacatgcatgtttgcatagcgtgtcatctacatagcgcggcgcggcggcggtggaacagaacaagaattgcccacgccggagagaatacggcgtttcatcttgttgttgaggtgcccatattcatcgtgatcattgtctccgtctaaatccttggcaggtcgaattcactggaggccataagtgatagtaaaaaagatgaacattgctactatgcattctagaattagggccatacaaaataccgtggctcgttaactcgctcgtttcgattttatcacgagctagataacatcttagctgggttattaacgagtcagctaacgaggtctctatttatgttggatgatctaataagtaatgaactatattaatttagtgttgaataaattgtgagtattattaccctttttctagtgttaaatgagtctagaattaattagcaattgattatattgtcgtatacatatatattgttttttcatggtttgcgagctaaacgagttaacttaagctcataaatgagacgagccgagctaattctcc

SEQ ID NO: 105342 - DNA, 97 bp, Zea Mays
cctttttcgctgcatgataaaattagtattagaccctgttaattttataacatcacagtctgtatgtgccaatttgtgcgtctgcactctagattat

SEQ ID NO: 105343 - DNA, 109 bp, Zea Mays
gaccccagttcatccatccgtcacaatctggacataccccaaacaccaacgatacacagggttctgagatcggataaggaaacccacagatggacatgcagtggtcgat

SEQ ID NO: 105344 - DNA, 333 bp, Zea Mays
atgctgcgtgcggcggcggctgccgccgccatattcccggcgcgggtcgccgctgcgccggctgctgcggcggcggaggaacttaggtatccgctgctcagggttattgggacgctgaggggcagccgcggctcggtgctgctggggaggagggtgcgtttctgctccaactcctccgcgagcgactccgaagtggcggcggcagatgcggaggcgaatgccgaggatgcgaccgttgcggaggaggaggcgggcagcaaggcgtcttccgccatcgtgccgaccagcaccaatatcgacgactgcctctctgtatgttcgtctggatcatag

SEQ ID NO: 105345 - DNA, 1916 bp, Zea Mays
atggtcgtcccacttggtgtagtccagagagtggctgaagctattttagtgccatcattatatgagaaaaacgggtttagtagggtcattcttaaagcattgaagggccttgctctcttccaccaaagggttatagcgttacctcttccacatcggccactctttcctggattttacatgccgatctatgtaaaggaccaaaagctgttgcaagccctaatagaaaatcgcaaaagatcagctccgtatgctggtgcctttctcgtgaaagatgaagaaggtactgaccctaacattgtgactggttcagattcagagaaaagcattggtgatctcaaagggaaagacttgctgaagcgtcttcatgaagttgggacgcttgctcagattacaagcattcaaggggatcaggtagttctacttggtcacagacgtttacagataactgagatggtcgaagaggatccactcacagttaaagttgatcatctaaaggaaaagccctacaacaaggatgatgatgttataaaagctacctcattcgaagttatatcaactttaagggaagttctaaggacaagttccctttggaaggatcatgtgcaaacctacacacagcacattggtgacttcaactaccaacggctagcagattttggtgctgctatctctggtgccaacaagttgctttgccaggaggtgcttgaggaattagatgtatacaagcgtctgaagttcactcttgagttagtaaaaaaggagatggagattagtaagctacagcaatccatagcaaaagcaattgaagaaaagattagtggagatcagcgacgttatttgttgaatgaacaacttaaggcaatcaagaaggagctcggtttggagactgatgataaaacagcattatctgcaaaatttagggaacgtatagaatcaaagaaggacagatgtccttctcatgttttacaagtcattgaagaagagcttaccaagcttcagcttttagaagccagctctagtgagttcagtgtaactcgtaattatttggactggctgacagtattgccatggggaaattatagtgatgaaaactttgatgtccaccgtgctcagaaaattctcgatgaagaccattatggtttgagtgacgtgaaagagaggatactggaattcatagcagttgggaagttaagagggacttcacaaggcaagatcatatgtctttctgggccaccaggagttgggaaaactagtattggtcgttcaattgcacgtgcactgaaccgccagttctacaggttttctgttggaggtttggctgatgtggctgaaatcaagggccatcggcgcacgtatgttggtgcgatgccagggaagatggtgcagtgtcttaaatcagttggaacagcaaatcctctagtattgatagatgagattgacaagcttgggaagggtcattctggggatccagctagtgcattgttggaactccttgatcctgagcagaatgttaatttcttagatcactaccttgatgttcctattgacctatccaaggttctattcgtttgcacagcaaatgtaatagagacgataccaaatccgttattggataggatggagatcattgctatagctgggtatataactgatgagaagatgcatattgctcgggactatttagagaagaatacaagacaagcctgtggcattaagcctgaacaggtatcttggacacttttcttataatcttcctttcattcaatattactagaacataaggcgccctatcgacctgtgcagccaaatattcatcaacatgtatacacactggaaaagaaaaatggagtaaaaattaatgaactccaaactttggaaagcaacagaaaaagagtaatttgaagctatgtgctatt

SEQ ID NO: 105346 - DNA, 99 bp, Zea Mays
actggatatcgatgttccctgtttgtgtccattgtgttggactgaaaaccactgatgtgattgctagcttacccaacaaatgtgtaatgtagactcagg

SEQ ID NO: 105347 - DNA, 1995 bp, Zea Mays
ccctgtcgtcttccgcttcaaaaaaaaaaaaaaaactggctcatccacagcaaagccagccacgggcatctcttccagctaggaacttggaggatcgatgctttctttgtcacaaagcaaaaccagtcagcagcactctgtctcaactctcatccctccctccctccgttttatttcagtctaggctccaagctggcatttcggatccatcaatcaatttggcaggcaccgtgcaacaagaaaacttagagacgctgtagaggatctcatctccaccccgttgttgccattgccggtgctactatagaggaggagtatatctttttggttgatgcgcgggacgcaatggcgccgccgccgccgcccccttcctccgctccgaccaagaatcgcatcaggtggctgcgaggcaacaagaaggtggtcgacaggtacctcggcgaggcgcgggcggctctcgctgcggcggcgcaggacaccgaggatgcggacgacgcggcggcggcggcgctcggcctggtgaccgtcgccctggagatgtcgccgcgggccgaggcggcgctggagctccgggcgcgggcgctcctcgcgctcaggcgctaccgcgacgtcgccgacatgctctgcgactacatccccagctgctgcgccaagtcgtgctcggccgacgacgccaccaccgcctcgtcctcctcatcctgctcgtctggctccggggcagatctcctgtcaccggaccacgaccgccccgacgctggccgcttcctgtgctgcctcgacgtgtccggcctcaagcgccgcctggtcgccaccttctccagcatccacgcccaccagtggaggtacttggtcctgggccaggcttgcttccacctcggcctgatggaggacgcgttggtgcttctccaaaccggtcgccgcctcgcctccgcggcgttccggcgcgagagcgtgtgctggtcggaggacaggttcccgcccccgtcgaacctgctggcgcccgccaatacaagggcggagtccgtgtcgcagctgctggcgcacgtgaagctgctcctccgccgccgcgccgccgcggtggcggcgctggacgccggcttccccggcgaggccgtgcgccatttcaacaaggtgctcgacacgcgccgcagcgtgctgccgcaccccttcgccacggcctgcctcgtgggccgcgccgcggcgttccgctcggcggggcgccccgcggacgccatcgcggactgcaaccgcgcgctggcgctggacccggcctatatcccagcgctgcgcgcgcgtgccgacgtgctggagtcggtcggggcgcttccagactgcctccgggacctcgaccacctgaagctcctgtacgacgccgcgctccgggacggcaagctgccaggcccgtgctggcgcccgcagggcggcatccggttcgcggagatcgcgggcgcgcaccgcacgctcaccgcgcgcatccagcagctccgcggccgcgtcgccgccggcgtcgactactacgcactcctcggggtgcggcgcgggtgcacgcggtcggagctggagcgcgcgcacctggtgctgacgctgaagctgaagcccgagcggtcggtgtcgttcgcggagaggatggagctcgtggacgagcaccgggacctggaggcggtgcgcgaccaggcgcgcatgtcggcgctgtttctgtaccggatgctgcagaagggctactcgttcatcatgtcggcggtgctggaggagagaggcaaggacgccgctgccacggcagggccggaggaagaagaaaaagaggtggtggcaacagtgcaagggagtgccactgcaaacggtggcaacatgcctatggcgactgcagccacaccaccattgatcccgccgttccatggcgtgttctgccgcgacatggcggtggtgggcaccctgctgtcccgaggcgggttcgaccgtccgattccggtgaattgcgaggcaatgagctgctga

SEQ ID NO: 105348 - DNA, 531 bp, Zea Mays
cttcttctgaggacctaacccaagacggtaggtaagtgccagcttaaagtctatctaaaggcggaccaccactgtccacctgggcggcgatggcgaccgccgcgagggagaggcgcctgccgccggcgctgcccctggcgactctcatcggccgggagctccgcgcggggggctccgagcgcccggccctgcgctacggccacgccggctttgccaagcgtggcgaggactacttcctcgtcaagcccgactgcctccgcgtccccggggaccccgcatccgcgttctccgtctttgccgtgttcgacggccacaacggcgtgtcggcggcggtctacagcaaggagcatctgctcgagcacgtcatgagcgcgctgtcgccggacatcggccgcgaagactggctgcaggcgctgccgcgcgcgctcgtcgccggcttcgtcaaggccgacatcgatttccagcgcaagggtgagtgccatgctactgcccagtaccgtttgcagtcgagattggaggtcaacgtagtta

SEQ ID NO: 105349 - DNA, 4096 bp, Zea Mays
cttcttctgaggacctaacccaagacggtaggtaagtgccagcttaaagtctatctaaaggcggaccaccactgtccacctgggcggcgatggcgaccgccgcgagggagaggcgcctgccgccggcgctgcccctggcgactctcatcggccgggagctccgcgcggggggctccgagcgcccggccctgcgctacggccacgccggctttgccaagcgtggcgaggactacttcctcgtcaagcccgactgcctccgcgtccccggggaccccgcatccgcgttctccgtctttgccgtgttcgacggccacaacggcgtgtcggcggcggtctacagcaaggagcatctgctcgagcacgtcatgagcgcgctgtcgccggacatcggccgcgaagactggctgcaggcgctgccgcgcgcgctcgtcgccggcttcgtcaaggccgacatcgatttccagcgcaagggggaggtgtccggaaccacggcgacactggtggtcatcgatgggttcacggtcacggtggcgtcggtgggtgactcgcgctgcatcctggacacgcagggcggcgagttgcagctgctaaccgtggaccaccgcctggaggagaatgcagaggagcgggagcgcgtcacggccagcggtggggaagtaggccggctcaatctctttggcggccaggaggtcggccctctccggtgctggcctggtggcttgtgcctctcaagatccatcggggacatggatgttggagagttcattgtgcccattccacatgtcaagcaagtcaagctatcaaacaccggaggaagactgataatagcatctgatggcatatgggacgcgttgtccaatgaagcagctgcaaaagcatgcagaggattgcctgcagaactggcagcgaagcttgtcgttaagcaagctctgaaaacaagcgggctaaaggatgacaccacctgtgtcgtagttgacattatcccgtccgatcatctgacatcgccacaattgtctccaaagaaaaatcagaacaagttgaagtcactttttcgtagaaggtcgcatagttcagttagaaagcttggaggcaagtctgcctccattggttccgtggaggagttatttgaagaagggtctgcaatgctagaagaaaggttgggtaggaatctgtccttgaaagcagcttcaccacctttccgctgtgcaatctgccaagtggaccaagagcccttccaagatttgatggcagataatggaggtggttactgctcttcccagtacgctccatggggtggcccatgtctctgtttggactgtcggaaaaagaaagatgcaatggaaggaaaaagatgtagccgctctacagcatgcaggtgaaacaatcaaaatgctgagaaaaaggagcaacgagagacactaaggacgtgtttggtttgcgaattcagttgatccggcatgagctgctcctgcatgaggtcgtccgatgtttttctgggagtgaaccggtgctgcataattgcacttctaacgagcactacatggagtatctgatgtcggacgacacagatctatgatgtaaaccaaacaaatatattaggttcggatataggatcggatgattccggagaccgttgtccggcaaaccaaacacgttgtaaattaaatcgctggatccaagagtatgctgaaactaactgtattgacgaccaaggtttgatgttgttgagctcaaataacttgagcttgtagttttgatgtgccctgtagtgtgccttgtgatggtttttgtgggaataggaaacatgtaaaatactccttgtgttattgctgaattagagctgttgatttttttaataaaaaaaattacatagatgaatagctatgatgagcaaaaatcgcaaatgttattattacagcagcaataacatgaaagcggaaacaagcaaacacagctgcatagggacgacgacactggtcccctggctcggaatcctcaatggcatggcgcactcgtcgccgttgaagaagaccttggacgggaagccgtccccggcgatgatgtcgatgccgggggtcttcttcttggtgaaggagaagacggactgctgcttcccgggcaccgggtaatctacgccgctcatgttcctctccccgagcaggaagttgaggccctgggcgcccctgacgaagatggtgctgttcccgacgcccgtggcgttgaaggagtaggcctgttcgaagccgtcgtacgccttgtccatgacgatggccgtgaaccagtccggcatgtccgtgccgtcccagttgaagagcgtgaggcgcgcgctccatcctccggtgaagtcggtggcgacgtgccagttgacgctgacgccgcagaagtcgccgcagggcatgggtttgggcacgccgaggtgcttctggtccgcccactcgagcgcctcgctggcccgccggtcgaacggcatgagcagcgcctgcggcggcagcagcatcgccggcgccgtggtgctgcaggtcggcgcggacgaggggcagccgcacgcgcacgtccggcaggggaccaccgactcgttgtagaaggaggagaaggagacgcagcacctgggcggcttcttgggcgacgtggtgatgttgcacaccacctgccacgtcgccacggccaccgtgatcgacgtgagcccgctggggtccgggtactccgacgggctcaccgagatgggtgggtcgcacgcgtactccgggttcagcgcggacgcggcgccggtgacgttgaaccctgtgggcgggtagagcttggtccggttgaggtcgggcggcatcttgtacaccaccatctggaacgccgacttggagcgcgcgacatccatggacttgggcaggatggtgccgttccggcagcagtggtcgatccggccgatctccgtgtcgttggcccgcgacggcggcaggtcgtggacgacgggcctgcggtcgcagttgagcaccgccttggagaagtcgaggtccttgtagtactggccctggggaccgtagaggcattcggccgtgtccacctcccgcgggtaggcgcctcgcatggagctgatgaactccccgtgctcccacctccacgacagctgccaggcgtcgaggcggccgagcagcgcgtcgttctccagcgtgacgagcgctaggtaggtggtgtcgtacgactggagcacgtcgtaggtgatgaccaggtcgccggtgcggcgcgggaggaagccactctccaccaggccgccggtggggtccccacccgccgtgaacacgcagcaggtggtgaggttcgtcggcgacgacgtggcgttggtggccggcgggcaggtgtaggaagggtcggcgagcgagagaaacgaggggagcgggacgtagggctccggcccggcgaagagcgtgcctacgaggctgaccgtggcctgtgtcttggcggggtccccggccgtggcgatcggggtgaggaggtccgtctgcgggtacccggtgaaggacgtgggcgtgggcctgccggcggcgtcccccgccgtggtgttgtagggcagggcggcgcccgaggtgagcacggccccgtcgacggagacgaggatctcgccgtgcacgaaggtgagcagcagcgcccaggagcgtagcgggcgggtgccggcgttgacgacggtggcgctggcgctgaaggagtagggctgggagttgggcgccgccacgtgaggcctgatcttgtcccggcgctgcagcgtgtaggtgaggaggatcccgttgcagccggcgtcgggctgtgccgaggcggtgtgcgcgaggagcacaaggaagatgaagggcatggcggccatgcggacgacgacgggcagcatggccatggctgaagcaggcacagaagctgaatctgtttccgtataaacgaataagccggtggtggtgagtggatcgagtctgggtcgtcggaggatgagaggccgtttccgtccaagcgcacacacgcacgatgacacgaagacgaagacgaggacgaagctgaagctgaagcgcgtgcgtgggtgacgacgagtatgtagggacagggagtctccgttgatctt

SEQ ID NO: 105350 - DNA, 2040 bp, Zea Mays
atgctgctctcgcgtccccaaaccctgcccctgccccgggcccggctctcttccccgacccttcgccacctccgcgccctcgccgcgccgctccgcgcgctcgtctcgtccccgccactagggttcacgtccgcggcgcgaggccccgctccgctccgcgcggcggtgtccgagtccgatcgcgagcagcgggaggctggggtggaggcgggggagcaggggaggccgctccgcgtcggcctcgtctgcggcgggccctccggcgagaggggcgtctccctcaactccgcgcgctcggtgctggatcacatccagggagaggatttggtcgtctgctgctactacattgactgtgctatgaaggccttcgcgatatctcctgcgcagctatattccaacacaccttcggattttgacttcaaacttgaaagtttagcccaagaatttgattccctatctgacttcgcggagcatctcgccacaaatgttgacattgtcttcccagtgatccatgggaaatttggtgaagatggaggcattcaggagcttttggagaaagcaaatgttccatttgttgggacaccctctaaggaatgccagcgtgcttttgacaagcataatgcgtcgctcgagctcaacgcacaaggtttcttaacagtgcccaactttcttgtggagaaggacaagttggctaagccggagttagaggcatggttccaaaccgtcaatctgaacaaagaaaatggcaaaacgattgtcaaacctacaagggctgggtcaagcattggcgtagttgttgcttatggtgtgaatgatgctgcccagaaagctgaggaaattatttcagagggaattgatgataaagttatcatagaggttttcattgaagggggcactgagtttacagccatcgtggttgatgttgggattgctaacaacagtgagcctgttgttctgcttccaacagaagttgagcttcagtactccaacaatagtgataccaaggaggacacaatatttaactaccgcaagaagtaccttccaagtcgacaggttgcttatcattctcctccacgttttccggcagaggtgatcgattgtataagacaaggaatttctcttttattttgtcgccttggcctgcatgactatgcaaggatagatggttggtttttaccttctcctgttgcttctttacccccagctgaaaatagtgacaaatttggaaataccaagtatggaagtgttcttttcacggatatcaatttgataagtgggatggagcaaaccagctttttgttccaacaagcttcagcggttgggttctcacactctcgaatccttcgtacagttgttcagcatgcttgctcgcgattcccttctcttcttccatgcaataatgcttggaccgctttgtccagaaaactacaaccatcaaaacaagtagaagcaatccacaaaggaacatcaagacagaaggtttttgtgatcttcggaggggacacttcagaacggcaagtatcacttatgagtggtaccaatgtatggcttaatcttcaaggttttgatgatcttgacgtgacaccgtgtttgcttgcacctgcacatggatatttctcctcacatgatcaagatttcagtgacagttcaagagaagtttggacgttgccatattcattagtgttacgacataccactgaagaagttcatgctgcatgtgttgaggcaactgagccagaacgagttgaaataacaaaacgtttgcgtgatcaagtaatgaatgaacttgggtcagcattgagcaaacatgattggtttgcgggctttgacatagcttatgaacaacctatcaaatactctctgcaacagtggatcgaccatgtaaaagaaactgaagctgtagtctttatagcagtgcatggtggcattggcgaggatggtaccattcagacattgttggaatctgcaggagttccttacacaggttcatttttagcttatatattgagagcatttgtatgtggccaaactaaagaattt

SEQ ID NO: 105351 - DNA, 3740 bp, Zea Mays
atgctgctctcgcgtccccaaaccctgcccctgccccgggcccggctctcttccccgacccttcgccacctccgcgccctcgccgcgccgctccgcgcgctcgtctcgtccccgccactagggttcacgtccgcggcgcgaggccccgctccgctccgcgcggcggtgtccgagtccgatcgcgagcagcgggaggctggggtggaggcgggggagcaggggaggccgctccgcgtcggcctcgtctgcggcgggccctccggcgagaggggcgtctccctcaactccgcgcgctcggtgctggatcacatccagggagaggatttggtcgtctgctgctactacattgactgtgctatgaaggccttcgcgatatctcctgcgcagctatattccaacacaccttcggattttgacttcaaacttgaaagtttagcccaagaatttgattccctatctgacttcgcggagcatctcgccacaaatgttgacattgtcttcccagtgatccatgggaaatttggtgaagatggaggcattcaggagcttttggagaaagcaaatgttccatttgttgggacaccctctaaggaatgccagcgtgcttttgacaagcataatgcgtcgctcgagctcaacgcacaaggtttcttaacagtgcccaactttcttgtggagaaggacaagttggctaagccggagttagaggcatggttccaaaccgtcaatctgaacaaagaaaatggcaaaacgattgtcaaacctacaagggctgggtcaagcattggcgtagttgttgcttatggtgtgaatgatgctgcccagaaagctgaggaaattatttcagagggaattgatgataaagttatcatagaggttttcattgaagggggcactgagtttacagccatcgtggttgatgttgggattgctaacaacagtgagcctgttgttctgcttccaacagaagttgagcttcagtactccaacaatagtgataccaaggaggacacaatatttaactaccgcaagaagtaccttccaagtcgacaggttgcttatcattctcctccacgttttccggcagaggtgatcgattgtataagacaaggaatttctcttttattttgtcgccttggcctgcatgactatgcaaggatagatggttggtttttaccttctcctgttgcttctttacccccagctgaaaatagtgacaaatttggaaataccaagtatggaagtgttcttttcacggatatcaatttgataagtgggatggagcaaaccagctttttgttccaacaagcttcagcggttgggttctcacactctcgaatccttcgtacagttgttcagcatgcttgctcgcgattcccttctcttcttccatgcaataatgcttggaccgctttgtccagaaaactacaaccatcaaaacaagtagaagcaatccacaaaggaacatcaagacagaaggtttttgtgatcttcggaggggacacttcagaacggcaagtatcacttatgagtggtaccaatgtatggcttaatcttcaaggttttgatgatcttgacgtgacaccgtgtttgcttgcacctgcacatggatatttctcctcacatgatcaagatttcagtgacagttcaagagaagtttggacgttgccatattcattagtgttacgacataccactgaagaagttcatgctgcatgtgttgaggcaactgagccagaacgagttgaaataacaaaacgtttgcgtgatcaagtaatgaatgaacttgggtcagcattgagcaaacatgattggtttgcgggctttgacatagcttatgaacaacctatcaaatactctctgcaacagtggatcgaccatgtaaaagaaactgaagctgtagtctttatagcagtgcatggtggcattggcgaggatggtaccattcagacattgttggaatctgcaggagttccttacacaggaccaggaccaatagcgtctagaacatgcattgacaaagttgcaagttcacttgctgttgaccatcttgctagttatggaatccgtatcattccaaaggatgtaagagcaacagaagaagtactgaactcatctcttgttgatatctggaatgaacttaaagcaaaactagaaacagaaacagtatgtgtgaaaccagctcgtgacgggtgctcgactggtgtagcaagattgtgctgtccaaaggacctagaagtctatacaaatgcattgaggaggaagtttcagcatctgcctgctaattgcctgtccagggcacatggtgtaattgagatgccagtcccttctccagagtcactaatatttgagccttttattgaaaccgatgaaattatcattgcaaataaattagaggatggtagtgcccgccatcttgtatggaaaggtgaaaatgactggcttgaaataaccgttggtgtagttggcaaacgtggagaaatgcactcattaaatccaagtatcacagtgaaagaaagtggtgatattttatctcttgaggagaaatttcaaggtaagtaacattcaaaattttctagtttgtactattttccttatatgatctcaggaatgaagttgtaccaggagttgctagtgtgagtccgtcttttgatatattttgtttaaatagttggtgggatggcatggaaatgcaatatgccattgaggtgaacattgacttgggattttttttgggtagaacattatgtgtcccttgtaacctttagatttggtgtttcatccccttggctcactggcagccctttatctatgtttatgattgaggtgtttttgttttcaggtggcactggaatcaacttgacaccacctcctgcaacaattatggggtgcttatttatgactattcccagtttccccttgttttttcttgttttcttttgaataacattagaatttccaactggacatatcggttctgtttttgctggcgtaccctcatccaaattaagccgataatctcttgtcttgaacaccccttgtgttaattatgtttgccttttgtagcgaggatgctctgcagaggtgcaagaagagtatcgagaccatggcaaacgctctaggtttggaaggcttctcacgcattgatgcatttgtcaacgtgcgaagcggggaggtgctgctgattgaagtcaacactgtacctgggatgactccatccaccgtgctgatccaccaagcactcgcagaggaaccgcccgtgtacccccacaggtttttccgcactcttctggatttggtgtttgcaagggcaaaatagctatctcacatttatttttctttttacggtgcgtcggtttgattctgtatcagtcgagtagtatttttatttatatttgtgggaaaaaaatcgtcttctccgtgttgatgcgatgaaaaataaacatgtatagcgttgcgcggtcgtcgtgcacatcagagcagagcagaagcaaccctccacggacgtcaagtcaaaccaacacgtccgggccacaatatggaaagctagctatacaagtatcgtggaatataaactctcaaacttaccaagttttcatcacatcattaatatagaggtttagttctcgacattgaaatcagcagtaaaaggattgggtggactgaatgatgcagcagcttatcatcagtgtgtaccacatcaaatctgtcattgagttcttgactcttagggcatctat

SEQ ID NO: 105352 - DNA, 3657 bp, Zea Mays
atgctgctctcgcgtccccaaaccctgcccctgccccgggcccggctctcttccccgacccttcgccacctccgcgccctcgccgcgccgctccgcgcgctcgtctcgtccccgccactagggttcacgtccgcggcgcgaggccccgctccgctccgcgcggcggtgtccgagtccgatcgcgagcagcgggaggctggggtggaggcgggggagcaggggaggccgctccgcgtcggcctcgtctgcggcgggccctccggcgagaggggcgtctccctcaactccgcgcgctcggtgctggatcacatccagggagaggatttggtcgtctgctgctactacattgactgtgctatgaaggccttcgcgatatctcctgcgcagctatattccaacacaccttcggattttgacttcaaacttgaaagtttagcccaagaatttgattccctatctgacttcgcggagcatctcgccacaaatgttgacattgtcttcccagtgatccatgggaaatttggtgaagatggaggcattcaggagcttttggagaaagcaaatgttccatttgttgggacaccctctaaggaatgccagcgtgcttttgacaagcataatgcgtcgctcgagctcaacgcacaaggtttcttaacagtgcccaactttcttgtggagaaggacaagttggctaagccggagttagaggcatggttccaaaccgtcaatctgaacaaagaaaatggcaaaacgattgtcaaacctacaagggctgggtcaagcattggcgtagttgttgcttatggtgtgaatgatgctgcccagaaagctgaggaaattatttcagagggaattgatgataaagttatcatagaggttttcattgaagggggcactgagtttacagccatcgtggttgatgttgggattgctaacaacagtgagcctgttgttctgcttccaacagaagttgagcttcagtactccaacaatagtgataccaaggaggacacaatatttaactaccgcaagaagtaccttccaagtcgacaggttgcttatcattctcctccacgttttccggcagaggtgatcgattgtataagacaaggaatttctcttttattttgtcgccttggcctgcatgactatgcaaggatagatggttggtttttaccttctcctgttgcttctttacccccagctgaaaatagtgacaaatttggaaataccaagtatggaagtgttcttttcacggatatcaatttgataagtgggatggagcaaaccagctttttgttccaacaagcttcagcggttgggttctcacactctcgaatccttcgtacagttgttcagcatgcttgctcgcgattcccttctcttcttccatgcaataatgcttggaccgctttgtccagaaaactacaaccatcaaaacaagtagaagcaatccacaaaggaacatcaagacagaaggtttttgtgatcttcggaggggacacttcagaacggcaagtatcacttatgagtggtaccaatgtatggcttaatcttcaaggttttgatgatcttgacgtgacaccgtgtttgcttgcacctgcacatggatatttctcctcacatgatcaagatttcagtgacagttcaagagaagtttggacgttgccatattcattagtgttacgacataccactgaagaagttcatgctgcatgtgttgaggcaactgagccagaacgagttgaaataacaaaacgtttgcgtgatcaagtaatgaatgaacttgggtcagcattgagcaaacatgattggtttgcgggctttgacatagcttatgaacaacctatcaaatactctctgcaacagtggatcgaccatgtaaaagaaactgaagctgtagtctttatagcagtgcatggtggcattggcgaggatggtaccattcagacattgttggaatctgcaggagttccttacacaggaccaggaccaatagcgtctagaacatgcattgacaaagttgcaagttcacttgctgttgaccatcttgctagttatggaatccgtatcattccaaaggatgtaagagcaacagaagaagtactgaactcatctcttgttgatatctggaatgaacttaaagcaaaactagaaacagaaacagtatgtgtgaaaccagctcgtgacgggtgctcgactggtgtagcaagattgtgctgtccaaaggacctagaagtctatacaaatgcattgaggaggaagtttcagcatctgcctgctaattgcctgtccagggcacatggtgtaattgagatgccagtcccttctccagagtcactaatatttgagccttttattgaaaccgatgaaattatcattgcaaataaattagaggatggtagtgcccgccatcttgtatggaaaggtgaaaatgactggcttgaaataaccgttggtgtagttggcaaacgtggagaaatgcactcattaaatccaagtatcacagtgaaagaaagtggtgatattttatctcttgaggagaaatttcaaggtggcactggaatcaacttgacaccacctcctgcaacaattatgggcgaggatgctctgcagaggtgcaagaagagtatcgagaccatggcaaacgctctaggtttggaaggcttctcacgcattgatgcatttgtcaacgtgcgaagcggggaggtgctgctgattgaagtcaacactgtacctgggatgactccatccaccgtgctgatccaccaagcactcgcagaggaaccgcccgtgtacccccacaggtttttccgcactcttctggatttggtgtttgcaagggcaaaatagctatctcacatttatttttctttttacggtgcgtcggtttgattctgtatcagtcgagtagtatttttatttatatttgtgggaaaaaaatcgtcttctccgtgttgatgcgatgaaaaataaacatgtatagcgttgcgcggtcgtcgtgcacatcagagcagagcagaagcaaccctccacggacgtcaagtcaaaccaacacgtccgggccacaatatggaaagctagctatacaagtatcgtggaatataaactctcaaacttaccaagttttcatcacatcattaatatagaggtttagttctcgacattgaaatcagcagtaaaaggattgggtggactgaatgatgcagcagcttatcatcagtgtgtaccacatcaaatctgtcattgagttcttgactcttagggcatctatagcctacataaataaccagtagcatgttcggttgcaaagtgtttgaaaattgaatagaaagatatttaatcttcttcaatcccctatgatccatgcgtaacctgacaaggcctatgtagtatctaaggagataaatgtaaaaaaacacaagatatatgttgatgatggaacgcatgtagcacagtttactagtctaagatgcggtttcactcaaacaacctatataaatgaaccgtgtcacgagggattctagtgaataagatacaaacctctgatacatttggttttataaacgagtttgaataagatacaaacctctgatacatttggttttataaacgagtttcttagatgtacctagtgcttggagaactataacatat

SEQ ID NO: 105353 - DNA, 154 bp, Zea Mays
gaagatgcgtcgtctagttttaatatctggtagaggaaattcaatcttccggtctatacggcctggccgaagcaaggctggatcaagactttcaatgcggtttgttgctagaatgactttaacatctccacgtgagtcaaaaccatctagctga

SEQ ID NO: 105354 - DNA, 2069 bp, Zea Mays
ggctacaccttccccttcctcgcctccctcgtcggcgccaaccacaccttcgcccgtttctgctcccgttagcactatcactagcaccggaccccttccctcccctttacctttctcacgagggcccgggaaaaccaccaccatggacccctcctccgcgccgcggcggtgctcctttctcctgcgcctgctcctcctcgccgtcgccgccctcgcgctccgcctcctctacggcgccttcctcgccgtctccgccggtcccgccggttggccgctctaccggcccgccgccaccgtcgcaaccaccacgaggacccacgtcgtccaggctgacgtcccgtcgccggaggtctggcgcacccgccgctggcgcagggccgtcgactaccacgccgccgtcctcgcgccgcacatcgcagccggcgctctcgcgccgggatcccgcgccgtctgcctcggcggcgcgcaggaggcgctcgcgatgcgggaactcggcgtcgccagagccgtcgccgtcgccaggaagcgcgcgcccccgctcgtcgtcgcggggcacgaccgccgactgccgttcgacgcgtcgtccgtcgacttcgtcttcgcggggcgcgccctcgacgccgccaagcgcccggccgacctcgccgccgaggccgcgcggatcctcaaacccgagggccatctcgtcatgctcacgtccagcgccgccgacgcctacagcttccgctcgatacaggcgctcctcccgttgctccgccttgtccgatctcgcgagatcgacggccaggacgacagctactccacactccgggaacttgtcttcgtccacaagaatcttcggtccacgggcacgggcacttcttcatcagtgaacaactgctcggttggggatcacaggctccagctcctcgctcatgccgagccactgatccaggaagagccactcaaaccctggctcacgctcaagagaaacatgaacaacatcaagtacctcccggccctggccgatatcagcttcaaacgccggtacgtgtatgtcgacgttggcgcgcacagctacggctccagcatcggtagctggttccgcaagcactaccctaagcagaaccacaccttccaggtgttcgccattgaagctgacccggcgttccactctgagtacgcgacaaagaagggtgtcacattgcttccctatgcagcctgggtcaagaatgagacactggtattcgagatcaatggtgatcctggaaaagaggacgaagccaaggccaatggtcgtggcatggggcgcatccgccccaccaccgggaagaagatgtccggcgaggtcaggagtgtccctgcgtttgacctcgccgagtggttgaagcagactgtgacagagcaggactacttggtgatgaagatggacgtggaggggaccgagttcgatttgatcccaaggctgttcgacacgggtgcaatctgcttggtcgacgagcttttcctggagtgccattacaatcggtggcagaagtgctgccctggtgagcggtcgcccaagtatgacaacacttacgaggagtgcttggaccttttcagctcgctgcgggagaacggcgtccttgtgcatcagtggtggtaaaaggcttgattggtaatctctctggtacagatgtttggaaatatcacagcacagatagagttcaaatacaggcaacaaaaggttttgacttgagtagtttatgtccacactgtattcattttttttcattgtaaacttagcagttgagtaattgaattgttttatgctgtttaggatatatccttaattaaaaaggattaaagaagtgaggcaaagtgaaggggaagaaatgtagttagggctagttgcattcccattaaaaatcattgtgccttgcgattgccattgttgagaaaacaagtggaatgatcaatgaatttattaacacatgagtcaaatgaacagtaaactgttgatattcttgcagttggacatgacatttactgtatgtgttggtgttcaccagtttgctagcaaatacattttttttctcgaaaagcaagct

SEQ ID NO: 105355 - DNA, 2653 bp, Zea Mays
atggacccctcctccgcgccgcggcggtgctcctttctcctgcgcctgctcctcctcgccgtcgccgccctcgcgctccgcctcctctacggcgccttcctcgccgtctccgccggtcccgccggttggccgctctaccggcccgccgccaccgtcgcaaccaccacgaggacccacgtcgtccaggctgacgtcccgtcgccggaggtctggcgcacccgccgctggcgcagggccgtcgactaccacgccgccgtcctcgcgccgcacatcgcagccggcgctctcgcgccgggatcccgcgccgtctgcctcggcggcgcgcaggaggcgctcgcgatgcgggaactcggcgtcgccagagccgtcgccgtcgccaggaagcgcgcgcccccgctcgtcgtcgcggggcacgaccgccgactgccgttcgacgcgtcgtccgtcgacttcgtcttcgcggggcgcgccctcgacgccgccaagcgcccggccgacctcgccgccgaggccgcgcggatcctcaaacccgagggccatctcgtcatgctcacgtccagcgccgccgacgcctacagcttccgctcgatacaggcgctcctcccgttgctccgccttgtccgatctcgcgagatcgacggccaggacgacagctactccacactccgggaacttgtcttcgtccacaagaatcttcggtccacgggcacgggcacttcttcatcagtgaacaactgctcggttggggatcacaggctccagctcctcgctcatgccgagccactgatccaggaagagccactcaaaccctggctcacgctcaagagaaacatgaacaacatcaagtacctcccggccctggccgatatcagcttcaaacgccggtacgtgtatgtcgacgttggcgcgcacagctacggctccagcatcggtagctggttccgcaagcactaccctaagcagaaccacaccttccaggtgttcgccattgaagctgacccggcgttccactctgagtacgcgacaaagaagggtgtcacattgcttccctatgcagcctgggtcaagaatgagacactggtattcgagatcaatggtgatcctggaaaagaggacgaagccaaggccaatggtcgtggcatggggcgcatccgccccaccaccgggaagaagatgtccggcgaggtcaggagtgtccctgcgtttgacctcgccgagtggttgaagcagactgtgacagagcaggactacttggtgatgaagatggacgtggaggggaccgagttcgatttgatcccaaggctgttcgacacgggtgcaatctgcttggtcgacgagcttttcctggagtgccattacaatcggtggcagaagtgctgccctggtgagcggtcgcccaagtatgacaacacttacgaggagtgcttggaccttttcagctcgctgcgggagaacggcgtccttgtgcatcagtggtgcttgccagcttctgttatgtactgtcgagtcaagaaggtgggcaccgtcaggcggccatgggccacagggttaagcggccagctgcagcgagcattcgtaacaggaagatcaaccttttaccagagcaatggttttcgaatacgcgctatgagaagccgatcaccgattggactgggcggcccggctgaggatatccatgggggtcgcttactgtctggagcacatgcaccagctgaaccacctgttgtgccaaggaaccttgactccagcactatatacctcactgatggcttcgctgcaaaggtctcggacactgccaccaccaagggatcggattccagctcaaccgctgatgacgagctctcctcggtttcaggcatagatgccatggttcatcagtatggcatgctattgctggagagactaaccggaaaagttgcctactccgaagaagacgacgacgacggggtttcactggagcacttggcgtctcgctacttggatgatggcagcatgccccttgcggagctgattgacccgagcctcggttggttccctcaagaagccgcgcacgcactgtgcgaggtcgcaaggtcttgggttgggtggacccagaccccaacaagagaccactgatggtacaggtggctgctaggatgaaggagatcgcaattcgcaaggtcttgcgtggacccagacctcaacaagagatcgaccacggatggtacaggtggctgctaggatgaaggagatcaccgcgctggggccgggcctgagggagcgactcccaaggtgtcgccgctctggtgggcagagctggagatcatgtcatctgactgaaactagcttatgcatgcacttatccattctcaatctcctcccgctgtcactggcaattctttggtttgttgtgttgtggttgcggagcctgaagcaaagttccatcattccttggtatttgaggtgtcattttctttctttcttgatagcattgcgtacgtgtgtatatattataatcatcagcagcagcgttgtttcagcagactgactgtaaaagtgagaaggcagcaaaaagggaatacttatgatcgtgctcaatgccggcgttggaacggcttgatttggtcacagtagtttttttaatgataacatatttggtgttaatgagagtttg

SEQ ID NO: 105356 - DNA, 180 bp, Zea Mays
gatccttttgctgtctttgagatgctttttggaagtgactgttttaaagattatgctggccagcttgctctagcatatatagcttcagtgcaggttgaggaaaactcaaggagacaagaagcaagagcaaaagttcaagaaaagataaaagagttacaaaatgaaagagaacaaaagctt

SEQ ID NO: 105357 - DNA, 218 bp, Zea Mays
ggacatcacgtggagttttgcatggaatgccatggctgggagcttataaagaaaaaggcacaaccctcaaaatgcaatatatccaatgcagatggttctaatgatgaagtttctgcatgtacaatcagagaggaaagcctttattatccaatatgttgggaatccttccaccttgtggagaatgttcctatgtcttgtgcagtgaccatacaatatgc

SEQ ID NO: 105358 - DNA, 225 bp, Zea Mays
atcccttgttagtcaggttgttgtgtgccactagcattaagtagagaatagctcaaggacaagtacttgtattaaaatgctcggaccttttagttgcaggattcatatgggggttcgtgacaaagtgatgcttatgttgctgtttgttttgctaatacagttgggatccactgcaattgggttgaagacgaaggatggtgttgttctcgccattgagaaacgtgt

SEQ ID NO: 105359 - DNA, 3376 bp, Zea Mays
tccggaagtccagtaccggacatcttcttcgatcatcccgtaccgccgtcgccgccaccaccacttccttctgtcgccgccaccacccactgtctctctcccgcgccaccgttttgggcgttgcgaaatggcgctctccgccagcgatgtgcccaccatgtacaccgtcctcgtcaattcgctcagcgccgacgaggcggcgcggcgcccggcggaggcagctctcgcgcagtgcgagacccgcccgggcttctgctcctgcctcctggagatcatctcggccaggggattggcttgtcgggaggatgtccgcctgctcgccacggtgtattttaagaacagtatcaaccgctactggcggcatcgtcgcgattcgtatggaattagcaacgaggagaaggaccaccttcggaaaaatcttttgctaaacatgcgtgaggaaaatagccagattgcactgcagctagctgtattaatctccaagattgcacgattggattacccaaaagagtggccagagcttctgtctgtattggcacaacagctgcagtccgctgacgttcttgcttcacatcgcgtgtttatggtcctgtttcgaacattaaaggagctgtcaactaaacggcttgctgtggatcagaagaactatgcagagatcactggccatttgtttgagtatacctggaacctttggaagagtgatgtgcagactatattgcagaatctttctatgctctcacagcggaatgacatagattccgtttttgagcaatccaatgaccttgctttgatttgcgaccggtggttgctctgcctaatgattgtccggctactaattttttcaggttatgctagtgattcaagaactgcacaggaggtctggcaggtcagggaagtttgtccaacagttttgactgccattaaatcccttcttccatattacgacaccttcaaagacaagcatgctaaactatgtgactttgcaaaaagggcatgcactaagttgatgaaagtcctcgttactctacaaggcagacatccatattcttttgttcacgaaactgtgctttcagctacagtagacttctgtttgaatatgattacaaatcctgaacagactggcacaacttttgaggagttccttatacaaagcatggttttggttaaatcagtactggagtgcaaagaatacagaccaagtcccatgggacgtgtgatcaatgaaaatgagcctttaagtctggagcaaaggaagaaaaacttcgcagcagtggctagtgacatgctgaaggtcattttgtctggtgatcgagttgtgctgctttgcaacattttagtaaggaggtacttcattttcacagcaaaggatttggaagagtggtcagagaatcctgagtccttccaccatgagcagaatttggttcagtggaccgagaaaaaacggccatgtgctgaagccctcttcattgttatcttcgagaagtaccgagagcttctagctccagttgttgtttctgttcttcgtgaagctatggctatttctccaccacaagaaacagaggttactgcaggaatgcttttaaaggatgcttcctatacagctgccgggcatgtttattatgaactttcgaactatctcagttttaatgaatggttccatggatctctatctattgaaatttcaaatcatcaccccaatatgcgtatcattcgtagaaaaatcgcattgctacttgggcattggatttctgagatcaagggcgacactcggaaattggtataccgcgctttggttgggttgctgcaggataatgatatagctgttaggctagcagcatgctcttctctctgttatcttttccaagaatcttgcttttctgaattagatttgtttgagtgtcttcctacatgttggacaatgagtttcaagttgatagaagatgtacaagaatttgattcaaaggtgcaagtgttgaacttcatttcagttcttcttgaacatgcgggggacaaggttattccatttgcatgtcagctatcacaattttttcagatgatatggaatgaatctgcgggtgaaagcttgctacagatacaattactaacagcacttagaacttttgtttcttcgcttggattccagtcacctctttcttaccacatgcttattcctatactgcaaagtggtatcaatattgacagccctgatgctcttaatcttcttgaggacagtgttttgttgtgggaagcaaccctttcaaatgccccttccattgtacctcaacttctggatttattcccttaccttgtgggcatcatgaatagaagctttgaccatctggaggtcacaatgaaaataattgaggattacattatttttggcggttcagaatttttgaaaagccatggtgcaagcctagctaacatcattgatactattgttggaaatgtcaatgataaaggacttctcactgcacttcctattgttgatcttcttattcagatatttcctctggaagctccaccattgatatccagtgctcttcagaaacttaccttcatttcgttgagtcaagatgatggccaaaacccgtctaggacaactgtccgagcatcctctggggcgattcttgctaggcttctggtgatgaatacaaacttttcggcacaactattatcagagcctgctcttttggcaagcatccaacaagcagggatttctgtgaacaataatctgcttttttctttggttgatatgtggatcgacaaggtagatgacgcaaatgctatacagcagaaggaatacgcaatggcactttctgtaatcctgacattacaggtacctcaggtcattgacaaacttgatgacatactgagtgtctgcactactgtcattataggaagccgtgaagtaaagactgatgacgatactagcggcgatatcacaagctcttcatggataggcaacgatggttcaggttattccaacacttcaagcaaagagctgagaaagcgccaggtaaaggattcagatcctatcaaacaaacatcgctagagatggtgttaagagagaacttaaaagcatgtgctgttttccatggggatgcagcattcaacgctgccatcggcaggatccatccatcttcgtttgctcagctgcaacaggccctgaatactgcataagagtgcatagctgcttactggattgtatggagcattacgtggagcaggcattgctttgtgaggtcatatagattggtgggtgataatagaaacccacaaaagactgcatgcttaacctggtgcttgcttcttttcaggtgctgacagacagttgaatcgcggtatgacacagcagtgcagtgcagagagagc

SEQ ID NO: 105360 - DNA, 3647 bp, Zea Mays
tccggaagtccagtaccggacatcttcttcgatcatcccgtaccgccgtcgccgccaccaccacttccttctgtcgccgccaccacccactgtctctctcccgcgccaccgttttgggcgttgcgaaatggcgctctccgccagcgatgtgcccaccatgtacaccgtcctcgtcaattcgctcagcgccgacgaggcggcgcggcgcccggcggaggcagctctcgcgcagtgcgagacccgcccgggcttctgctcctgcctcctggagatcatctcggccaggggattggcttgtcgggaggatgtccgcctgctcgccacggtgtattttaagaacagtatcaaccgctactggcggcatcgtcgcgattcgtatggaattagcaacgaggagaaggaccaccttcggaaaaatcttttgctaaacatgcgtgaggaaaatagccagattgcactgcagctagctgtattaatctccaagattgcacgattggattacccaaaagagtggccagagcttctgtctgtattggcacaacagctgcagtccgctgacgttcttgcttcacatcgcgtgtttatggtcctgtttcgaacattaaaggagctgtcaactaaacggcttgctgtggatcagaagaactatgcagagatcactggccatttgtttgagtatacctggaacctttggaagagtgatgtgcagactatattgcagaatctttctatgctctcacagcggaatgacatagattccgtttttgagcaatccaatgaccttgctttgatttgcgaccggtggttgctctgcctaatgattgtccggctactaattttttcaggttatgctagtgattcaagaactgcacaggaggtctggcaggtcagggaagtttgtccaacagttttgactgccattaaatcccttcttccatattacgacaccttcaaagacaagcatgctaaactatgtgactttgcaaaaagggcatgcactaagttgatgaaagtcctcgttactctacaaggcagacatccatattcttttgttcacgaaactgtgctttcagctacagtagacttctgtttgaatatgattacaaatcctgaacagactggcacaacttttgaggagttccttatacaaagcatggttttggttaaatcagtactggagtgcaaagaatacagaccaagtcccatgggacgtgtgatcaatgaaaatgagcctttaagtctggagcaaaggaagaaaaacttcgcagcagtggctagtgacatgctgaaggtcattttgtctggtgatcgagttgtgctgctttgcaacattttagtaaggaggtacttcattttcacagcaaaggatttggaagagtggtcagagaatcctgagtccttccaccatgagcagaatttggttcagtggaccgagaaaaaacggccatgtgctgaagccctcttcattgttatcttcgagaagtaccgagaggtgtgaacatttaagttttcattgtggctgtgagtatattcaatgctctaatgctcacatgatcacgtgtcgcttcagcttctagctccagttgttgtttctgttcttcgtgaagctatggctatttctccaccacaagaaacagaggttactgcaggaatgcttttaaaggatgcttcctatacagctgccgggcatgtttattatgaactttcgaactatctcagttttaatgaatggttccatggatctctatctattgaaatttcaaatcatcaccccaatatgcgtatcattcgtagaaaaatcgcattgctacttgggcattggatttctgagatcaagggcgacactcggaaattggtataccgcgctttggttgggttgctgcaggataatgatatagctgttaggctagcagcatgctcttctctctgttatcttttccaagaatcttgcttttctgaattagatttgtttgagtgtcttcctacatgttggacaatgagtttcaagttgatagaagatgtacaagaatttgattcaaaggtgcaagtgttgaacttcatttcagttcttcttgaacatgcgggggacaaggttattccatttgcatgtcagctatcacaattttttcagatgatatggaatgaatctgcgggtgaaagcttgctacagatacaattactaacagcacttagaacttttgtttcttcgcttggattccagtcacctctttcttaccacatgcttattcctatactgcaaagtggtatcaatattgacagccctgatgctcttaatcttcttgaggacagtgttttgttgtgggaagcaaccctttcaaatgccccttccattgtacctcaacttctggatttattcccttaccttgtgggcatcatgaatagaagctttgaccatctggaggtcacaatgaaaataattgaggattacattatttttggcggttcagaatttttgaaaagccatggtgcaagcctagctaacatcattgatactattgttggaaatgtcaatgataaaggacttctcactgcacttcctattgttgatcttcttattcagatatttcctctggaagctccaccattgatatccagtgctcttcagaaacttaccttcatttcgttgagtcaagatgatggccaaaacccgtctaggacaactgtccgagcatcctctggggcgattcttgctaggcttctggtgatgaatacaaacttttcggcacaactattatcagagcctgctcttttggcaagcatccaacaagcagggatttctgtgaacaataatctgcttttttctttggttgatatgtggatcgacaaggtagatgacgcaaatgctatacagcagaaggaatacgcaatggcactttctgtaatcctgacattacaggtacctcaggtcattgacaaacttgatgacatactgagtgtctgcactactgtcattataggaagccgtgaagtaaagactgatgacgatactagcggcgatatcacaagctcttcatggataggcaacgatggttcaggttattccaacacttcaagcaaagagctgagaaagcgccaggtaaaggattcagatcctatcaaacaaacatcgctagagatggtgttaagagagaacttaaaagcatgtgctgttttccatggggatgcagcattcaacgctgccatcggcaggatccatccatcttcgtttgctcagctgcaacaggccctgaatactgcataagagtgcatagctgcttactggattgtatggagcattacgtggagcaggcattgctttgtgaggtgctgacagacagttgaatcgcggtatgacacagcagtgcagtgcagagagagcatgtcctgatcttccgaaatataattggattggattggattaccgcggtcaatgtggatggccagagtttttatagctgtccttccaacatgactgactcgatcttctcccctcccccttctcaaatcatggccaggcatccatcctagttgatttttatcccttgtttagcgaggtgacgccgagattgttgtttgagaaggaaatctggaatgcaattttgttgtacgttttatgttcccattaggaataaaaatgttctttacat

SEQ ID NO: 105361 - DNA, 3578 bp, Zea Mays
tccggaagtccagtaccggacatcttcttcgatcatcccgtaccgccgtcgccgccaccaccacttccttctgtcgccgccaccacccactgtctctctcccgcgccaccgttttgggcgttgcgaaatggcgctctccgccagcgatgtgcccaccatgtacaccgtcctcgtcaattcgctcagcgccgacgaggcggcgcggcgcccggcggaggcagctctcgcgcagtgcgagacccgcccgggcttctgctcctgcctcctggagatcatctcggccaggggattggcttgtcgggaggatgtccgcctgctcgccacggtgtattttaagaacagtatcaaccgctactggcggcatcgtcgcgattcgtatggaattagcaacgaggagaaggaccaccttcggaaaaatcttttgctaaacatgcgtgaggaaaatagccagattgcactgcagctagctgtattaatctccaagattgcacgattggattacccaaaagagtggccagagcttctgtctgtattggcacaacagctgcagtccgctgacgttcttgcttcacatcgcgtgtttatggtcctgtttcgaacattaaaggagctgtcaactaaacggcttgctgtggatcagaagaactatgcagagatcactggccatttgtttgagtatacctggaacctttggaagagtgatgtgcagactatattgcagaatctttctatgctctcacagcggaatgacatagattccgtttttgagcaatccaatgaccttgctttgatttgcgaccggtggttgctctgcctaatgattgtccggctactaattttttcaggttatgctagtgattcaagaactgcacaggaggtctggcaggtcagggaagtttgtccaacagttttgactgccattaaatcccttcttccatattacgacaccttcaaagacaagcatgctaaactatgtgactttgcaaaaagggcatgcactaagttgatgaaagtcctcgttactctacaaggcagacatccatattcttttgttcacgaaactgtgctttcagctacagtagacttctgtttgaatatgattacaaatcctgaacagactggcacaacttttgaggagttccttatacaaagcatggttttggttaaatcagtactggagtgcaaagaatacagaccaagtcccatgggacgtgtgatcaatgaaaatgagcctttaagtctggagcaaaggaagaaaaacttcgcagcagtggctagtgacatgctgaaggtcattttgtctggtgatcgagttgtgctgctttgcaacattttagtaaggaggtacttcattttcacagcaaaggatttggaagagtggtcagagaatcctgagtccttccaccatgagcagaatttggttcagtggaccgagaaaaaacggccatgtgctgaagccctcttcattgttatcttcgagaagtaccgagagcttctagctccagttgttgtttctgttcttcgtgaagctatggctatttctccaccacaagaaacagaggttactgcaggaatgcttttaaaggatgcttcctatacagctgccgggcatgtttattatgaactttcgaactatctcagttttaatgaatggttccatggatctctatctattgaaatttcaaatcatcaccccaatatgcgtatcattcgtagaaaaatcgcattgctacttgggcattggatttctgagatcaagggcgacactcggaaattggtataccgcgctttggttgggttgctgcaggataatgatatagctgttaggctagcagcatgctcttctctctgttatcttttccaagaatcttgcttttctgaattagatttgtttgagtgtcttcctacatgttggacaatgagtttcaagttgatagaagatgtacaagaatttgattcaaaggtgcaagtgttgaacttcatttcagttcttcttgaacatgcgggggacaaggttattccatttgcatgtcagctatcacaattttttcagatgatatggaatgaatctgcgggtgaaagcttgctacagatacaattactaacagcacttagaacttttgtttcttcgcttggattccagtcacctctttcttaccacatgcttattcctatactgcaaagtggtatcaatattgacagccctgatgctcttaatcttcttgaggacagtgttttgttgtgggaagcaaccctttcaaatgccccttccattgtacctcaacttctggatttattcccttaccttgtgggcatcatgaatagaagctttgaccatctggaggtcacaatgaaaataattgaggattacattatttttggcggttcagaatttttgaaaagccatggtgcaagcctagctaacatcattgatactattgttggaaatgtcaatgataaaggacttctcactgcacttcctattgttgatcttcttattcagatatttcctctggaagctccaccattgatatccagtgctcttcagaaacttaccttcatttcgttgagtcaagatgatggccaaaacccgtctaggacaactgtccgagcatcctctggggcgattcttgctaggcttctggtgatgaatacaaacttttcggcacaactattatcagagcctgctcttttggcaagcatccaacaagcagggatttctgtgaacaataatctgcttttttctttggttgatatgtggatcgacaaggtagatgacgcaaatgctatacagcagaaggaatacgcaatggcactttctgtaatcctgacattacaggtacctcaggtcattgacaaacttgatgacatactgagtgtctgcactactgtcattataggaagccgtgaagtaaagactgatgacgatactagcggcgatatcacaagctcttcatggataggcaacgatggttcaggttattccaacacttcaagcaaagagctgagaaagcgccaggtaaaggattcagatcctatcaaacaaacatcgctagagatggtgttaagagagaacttaaaagcatgtgctgttttccatggggatgcagcattcaacgctgccatcggcaggatccatccatcttcgtttgctcagctgcaacaggccctgaatactgcataagagtgcatagctgcttactggattgtatggagcattacgtggagcaggcattgctttgtgaggtgctgacagacagttgaatcgcggtatgacacagcagtgcagtgcagagagagcatgtcctgatcttccgaaatataattggattggattggattaccgcggtcaatgtggatggccagagtttttatagctgtccttccaacatgactgactcgatcttctcccctcccccttctcaaatcatggccaggcatccatcctagttgatttttatcccttgtttagcgaggtgacgccgagattgttgtttgagaaggaaatctggaatgcaattttgttgtacgttttatgttcccattaggaataaaaatgttctttacattcacgtata

SEQ ID NO: 105362 - DNA, 3750 bp, Zea Mays
tccggaagtccagtaccggacatcttcttcgatcatcccgtaccgccgtcgccgccaccaccacttccttctgtcgccgccaccacccactgtctctctcccgcgccaccgttttgggcgttgcgaaatggcgctctccgccagcgatgtgcccaccatgtacaccgtcctcgtcaattcgctcagcgccgacgaggcggcgcggcgcccggcggaggcagctctcgcgcagtgcgagacccgcccgggcttctgctcctgcctcctggagatcatctcggccaggggattggcttgtcgggaggatgtccgcctgctcgccacggtgtattttaagaacagtatcaaccgctactggcggcatcgtcgcgattcgtatggaattagcaacgaggagaaggaccaccttcggaaaaatcttttgctaaacatgcgtgaggaaaatagccagattgcactgcagctagctgtattaatctccaagattgcacgattggattacccaaaagagtggccagagcttctgtctgtattggcacaacagctgcagtccgctgacgttcttgcttcacatcgcgtgtttatggtcctgtttcgaacattaaaggagctgtcaactaaacggcttgctgtggatcagaagaactatgcagagatcactggccatttgtttgagtatacctggaacctttggaagagtgatgtgcagactatattgcagaatctttctatgctctcacagcggaatgacatagattccgtttttgagcaatccaatgaccttgctttgatttgcgaccggtggttgctctgcctaatgattgtccggctactaattttttcaggttatgctagtgattcaagaactgcacaggaggtctggcaggtcagggaagtttgtccaacagttttgactgccattaaatcccttcttccatattacgacaccttcaaagacaagcatgctaaactatgtgactttgcaaaaagggcatgcactaagttgatgaaagtcctcgttactctacaaggcagacatccatattcttttgttcacgaaactgtgctttcagctacagtagacttctgtttgaatatgattacaaatcctgaacagactggcacaacttttgaggagttccttatacaaagcatggttttggttaaatcagtactggagtgcaaagaatacagaccaagtcccatgggacgtgtgatcaatgaaaatgagcctttaagtctggagcaaaggaagaaaaacttcgcagcagtggctagtgacatgctgaaggtcattttgtctggtgatcgagttgtgctgctttgcaacattttagtaaggaggtacttcattttcacagcaaaggatttggaagagtggtcagagaatcctgagtccttccaccatgagcagaatttggttcagtggaccgagaaaaaacggccatgtgctgaagccctcttcattgttatcttcgagaagtaccgagagcttctagctccagttgttgtttctgttcttcgtgaagctatggctatttctccaccacaagaaacagaggttactgcaggaatgcttttaaaggatgcttcctatacagctgccgggcatgtttattatgaactttcgaactatctcagttttaatgaatggttccatggatctctatctattgaaatttcaaatcatcaccccaatatgcgtatcattcgtagaaaaatcgcattgctacttgggcattggatttctgagatcaagggcgacactcggaaattggtataccgcgctttggttgggttgctgcaggataatgatatagctgttaggctagcagcatgctcttctctctgttatcttttccaagaatcttgcttttctgaattagatttgtttgagtgtcttcctacatgttggacaatgagtttcaagttgatagaagatgtacaagaatttgattcaaaggtgcaagtgttgaacttcatttcagttcttcttgaacatgcgggggacaaggttattccatttgcatgtcagctatcacaattttttcagatgatatggaatgaatctgcgggtgaaagcttgctacagatacaattactaacagcacttagaacttttgtttcttcgcttggattccagtcacctctttcttaccacatgcttattcctatactgcaaagtggtatcaatattgacagccctgatgctcttaatcttcttgaggacagtgttttgttgtgggaagcaaccctttcaaatgccccttccattgtacctcaacttctggatttattcccttaccttgtgggcatcatgaatagaagctttgaccatctggaggtcacaatgaaaataattgaggattacattatttttggcggttcagaatttttgaaaagccatggtgcaagcctagctaacatcattgatactattgttggaaatgtcaatgataaaggacttctcactgcacttcctattgttgatcttcttattcagatatttcctctggaagctccaccattgatatccagtgctcttcagaaacttaccttcatttcgttgagtcaagatgatggccaaaacccgtctaggacaactgtccgagcatcctctggggcgattcttgctaggcttctggtgatgaatacaaacttttcggcacaactattatcagagcctgctcttttggcaagcatccaacaagcagggatttctgtgaacaataatctgcttttttctttggttgatatgtggatcgacaaggtagatgacgcaaatgctatacagcagaaggaatacgcaatggcactttctgtaatcctgacattacaggtacctcaggtcattgacaaacttgatgacatactgaggtaagatgtttcttgggcatttaactgaaactgaaagtttgccttgttggtggttgggttacgtaccgatgagttatatgatttaatgcagtgtctgcactactgtcattataggaagccgtgaagtaaagactgatgacgatactagcggcgatatcacaagctcttcatggataggcaacgatggttcaggttattccaacacttcaagcaaagagctgagaaagcgccaggtaaaggattcagatcctatcaaacaaacatcgctagagatggtgttaagagagaacttaaaagcatgtgctgttttccatggggatgcagcattcaacgctgccatcggcaggatccatccatcttcgtttgctcagctgcaacaggccctgaatactgcataagagtgcatagctgcttactggattgtatggagcattacgtggagcaggcattgctttgtgaggtcatatagattggtgggtgataatagaaacccacaaaagactgcatgcttaacctggtgcttgcttcttttcaggtgctgacagacagttgaatcgcggtatgacacagcagtgcagtgcagagagagcatgtcctgatcttccgaaatataattggattggattggattaccgcggtcaatgtggatggccagagtttttatagctgtccttccaacatgactgactcgatcttctcccctcccccttctcaaatcatggccaggcatccatcctagttgatttttatcccttgtttagcgaggtgacgccgagattgttgtttgagaaggaaatctggaatgcaattttgttgtacgttttatgttcccattaggaataaaaatgttctttacattcacgtatatctaga

SEQ ID NO: 105363 - DNA, 2041 bp, Zea Mays
ctccgtcatctcacaacccaaagagaaacagccaaatcacagctcccaccacggcgccgccaccacctccagccccaccgccacggcggccggtgcaaccctttccgtcgcacccattgcgtgcgcagccgccctcctccccaccgctcggctcctgcgcgggcgaatgggttactcatccgccgccgccgccgccttcgccgtccttcccgccccctccccatcgtcctccgacgactccgacgacgccaataccctccctaccaaccccatcgtggagccggaagtagcctccccgcaccaaactccgcctccaaagctgcagcagctggagcgcggctgcaacttggcaatgacgccgctggggcgcgccggggacgtcgaccaggtcgtccacctcttctccgacctcatgctctccacctcaagcgccggcgtcccgcccagcgtgctctgctacaacacgctcctcaacgcgctcgtggaggccggccgcgcggtggaggcccgcagcgtgttcgacggaatgctcgcggcgggcgtggcgcccaacgcgtcgtccttcaacatcctcgtcaagctgtacgcgtggcggaccgccgacttccatcttgcctacgaccagatccacgccatgcggcgccacgggttgctgcccgacgtcggcaccttctccacgctcgtcacggggctgtgccgggcggggaagcttgacgaggcctggggcgtgctcgattggatgctgcaggaagggtgccgccccatggtgcacacgtacacgcccatcgtgcagggctattgtcgtcagggccagatcgaggaggctaccaacctgattggcttcatggaggatgccggttgtcctcccaatgctgtcacttacaatgttctgataagggcgctgtgtgacgatgccaggttcgctgaggtcgagcaggtgttagcagagattgaaactaagggccacgagctcagtacggttacctataatatatacatggatgctcttggcaagaaaggcatggctaaggaagcactcaagcagtttgaggccttgcaatgtaaagggctgcatcccacagcttttactttgagcatcattctaaattgcctttgctgtacctcgaggttttcacaagccatttccatcttggagaggagcacagacttaaatttctgcgctgctgttgttgcttacaacactgtgatgagcagactgtgtgacatgggcagatggccagctgttctggagctcttggcagacatgatcaagaaatgtatcatacccaacacacgcacgctcaacattttcattcatagtctttgcatcgctgataagctttctgtagctatgaaactggtctgtaatcaagggtttcctgcaaatgctgtgacatacaatacactcatccattcgttttacttaagaggagaggcctatgaggcggacaacatgtttgcgtacatgacagaagtagcaaatattgctccagatgaagtcacctataccataatggttgatggattatgcagacaaggaaaatttgataaggctactgatttttttaaggagtctctgaggaataggcttaggctgtcaaaggatcttcttactgcccttctaaacgggcttgctcgcagtgatagaaacacaaacatccttgttgtattccaagaaatcgaaagacagggctttgtccgttgttacttgatatttggtgatacagttagatcaatctgtcaggttggttttcgtcagcacacaaagatgtatggtctgccttttttgctggaaggaatgttgggacctggcaaggaagtttacccagcccataagggccaaggaaagggaaaatgatcgcaagaaagatggcaactggtacacgtctctttcaaatttgtcgtcaaatacatctgactagtgctaagtgcttccagatggattaacagcattacacatttctatcaccaactcttagattggaatagtgatcagtgggtggtcatgattttgccttcaaagtgcctcaatttttttccc

SEQ ID NO: 105364 - DNA, 861 bp, Zea Mays
ggattacccaaaagagcggtatgtgtttatgatacaggtatgtatttatgatacaggtactattagctattttgcacatcattcaattggtgatttaaggctacaatgtttccacgcatcccgtctctcagacaagaccttctctctgtatttgttcaactgcagtctgccaatgttctaatttcccatcatgtgtttatggccttgtttcaaaccccgaagtaggtggcgattaaacattttgccatggctctgaagaattatggagagaaaactcagacgagtccttcaaagacaggcaaatcgctaagttgatttaagcaaggcagaaatccatccatattgtttcgttcaccaaagtgtgcttccagctacagttgactatggcagaagattattatagatcctgaacggactgactgctcgaggagtttcagtactggactgcaggtcccacagagggtcaatttttaatataccctgatgaaagctactgaacccaggtccaatccacacgccggatcgggcaccaaatccttccagctgcctggatcagcgcctcaggggagagaggaagaagctgcaatggaaggaaaggtttagcagaattggtatttaggggctgcacacagccaggtatgtgcgttgcagtcgggcaaggctgttatcgtctatgttgttgttctagttgccggcatagaattatactgccacgtgatgatggctcatttggattatatatgcaaaagcaaagtcattatcttccgcctaattaagttgtttctctcccaaatcagaccttccatccaaatatagcaaactcggcttaattgagcagtcaaatattctttgtcctctcca

SEQ ID NO: 105365 - DNA, 1963 bp, Zea Mays
ttaaaaaaatatctctaatatagatatttgcttatagaggacatgatttataggacgttgttggagaaaaaggagatatagaggatagaatattttagaaaagactatagatgacagatatagaaacggatatagagtacattgctggtctaacgatgtggctaggccgataacagaaaacctgacctgaacggctgtaggcaaaccagttgggtgacactgacagcaggggcgggcggggccgatggattttttgaatcggattaggcagccacccatttcaagccgaagagaggaggagagccaagcggcgactggacctggagagccggcatggcacgcctgctcctctccgtctcagtccccatgtccgctagcagcagccgccgcattgtggttcctggtaccgcgcggcaccgaggccgcagcggcgtctgtgtcgctgtgcccgccacctccaccgccaccgccacccaacaagaatttgaccccgcggcggcgccaccgttcgggctgggcgacatccgcgccgccatccccaagcactgctgggtgaaggacccctggcgctccatgggctacgtggtgcgcgacgtggtcctggtgctgggtctcgccgccgccgcggcgcgcctcgacagctggctcgtctggccgctctactgggcggcacagggcaccatgttctgggcgctcttcgtgctgggacacgactgcggccacggcagcttctccaacaaccccagactcaacagcgtggtcggtcacattctgcactcctccatcctggtgccatacaacggctggcggattagccacaggacgcaccaccagaaccacggccacgtggacaaggacgagtcatggcatcccctccccgagcgtctgttcaagagcctggacagcgtcgtcctgatgctgcgcttcaggctgcccttccctatgctcgtctacccattctacctggccaacaggagccccggcaagtccggctcccatttccacccggccagcgacctcttccagcccagcgagagcaaacaagtgctcacctccacggcgtgctggctcgccatggtcgcactcctagctggcctcgccttcctcatgggccctctgcagatgctcaagctctacctggtcccctactgggtttttgtcatgtggctcgacttcgtcacctacctgcatcatcacggacacaatgacaagcttccatggtaccgaggaaaggaatggacctatcttcggggtggcctgacaacgctcgaccgggactacgggtggatcaacaacatccaccatgacattgggactcatgtcatccaccatctcttcccgcagatcccacactaccatctcatagaggcaacagaggcagccaagccggtgctgggaaattactacagagagccgcaaaagtctggccctctccccttgcatctacttggtgatctggttcagagcttgaggcgtgaccactatgtcagcgacacaggggatgtcgtctactaccaaactgaccccaccattagctgttctggtccattcacttgactaattgagggaggctggaagttatgcgaaacacaaggatcagaggctaccggagagatctgatctatgagccacacacttgcatataacaataagtcaatcattctttgggcaaaacaagctacagtacaatttccagtgctttactatcaggactcattagcacatgcttagctggtactgttgcaagaaagcaatgtgcagtacctccgcttattgctgtcctcacatatgcagtacattatttgcaaaatgtaagtggactacctgcgccttagatctctctgcaaaagttggagacatggggcttttcctgacaaatcatgtattgctgcttgatgacaaaatgagaatattctgacaaaataaataatgcatggaaatagaaaacgaggtaccaagtctt

SEQ ID NO: 105366 - DNA, 2224 bp, Zea Mays
ccttcccttcccttccatcctcacccacattccattcggatcgattccatccccagccccaaaccctaaccctaccaccgccaccatgtccgagcgcatcgacctcaacaacacgtcccaaaccctggcgccacccaagcgcggccgcggccgcccccgcaagaaccccccgcctcccgctcacccgcgccctccggatcccgacacccccatggtcagcggcttcgctccgggcgacatggtctggggaaagaagctcaaccacgccgcctggccgggcctcatctactccgccggagggaacagcaccggccacgaggcccagctcctcgtctcctacttcggcgacaaggccttcgcctggtgcgacgcagccgagctcaggccctacgagccctacttccccgtcgccgagctctacgacgacggcggcgaggactttgacgccgccgtcgaggcctctctcgacgagttctcccgccgcgtcgaggccgccctcgcctccgccgcccgccccttcgcctccgccgatttcctcgcctcgctccacgatctcgccgcggatcgcatgggcttcaccaacagggtgcaagccgccgtcgccaaggcgcatctcagagccttcgacgccttcagggctctgccggacccacctcagtacaccttggagctcggtctactcccacacgtcccgctcccgctgcccgatcctaaagctgacacggatgccgccgccgccttcaccacccccgcatccagttccaggaggggcaggaagaggaaggaggaactcgtcaaggacgacgactccgatgaggactgggaccccagcaagaggggtgccaccgacttggattccgatgtggacttcgaccacaggagggggtccaggggcaggggcagggggagggggggcagcagcggtggcagcggcaggcctcgaggaaggcccaggaaaacagatgcctgcagggacgcaccacagctcaaggacgaagatggcattcaagagtatccatcggctgatgagatgttgctgcagcttctgtccatcgccactgatcctgtaaatggcaattatgactctgctcctgtgatcgttagcttcttctcaaagcacaaggactccaaggcgcctagtgtatatgaagataaagagctgcttgagaattttggttgcaagaagggtaggaaaaagcccgtcagaagcttgggcctagctccaaagccagaagccagtgatgataaggatcagttcatgactgtggatggccagaggggccgtaggaagtctgctgggagcttgtactcagctagaaaggccgaagattcatattggtgtgatattatcatcagcgatttcgacgacggtgatagtgactatgaaggttgcaagaggaagcggccctctcagaacactaacaggagcgctaataagaagatgaagcaagaggaaccacctcaaggagccccatcagatatggaaaatggggctcctgcagatccttcgtcgaatgaaaaacctgcagatggcccagccgctcttattctacattttagcagtccagaagctattccttctgttgatgacatcaatagcatattccgtattcatggaccgatcgtggagcgtgagactgtgatcactaagaagtcaaagattgcaaaagtagttttctctaagagcgctgatgcagagagcgcatatcacagttcggggaagcataacgcatttggtccatcgcttctcacatctgaaattaaatacttgccatcggagcctcaggcttcttaaatggtgcagtctgatggactggatacactgcgattcacagaggtatacattctttgattgttcccaactaaaattccgtattcattttcttatcaaattttcatacggtgaattcaggaaatgcaccatgaagcttggagcaacgaagcataagctggtgtcactgactttagagttaggatggctcactgaccaggtcacatcaagtcactgtgttgagtgagcaaattttaggctgtctacttggtaccggagttaatttatgttgaattattagttggtagattagattatgtagcgtgatgcgcttccttttatgttagaaacttatcttttttttttgtattgcctattaattgcacagctgtggtctgtggatgtctctattatgttggtttttttctcttctatcagcagcaactgcttatt

SEQ ID NO: 105367 - DNA, 2140 bp, Zea Mays
atgtccgagcgcatcgacctcaacaacacgtcccaaaccctggcgccacccaagcgcggccgcggccgcccccgcaagaaccccccgcctcccgctcacccgcgccctccggatcccgacacccccatggtcagcggcttcgctccgggcgacatggtctggggaaagaagctcaaccacgccgcctggccgggcctcatctactccgccggagggaacagcaccggccacgaggcccagctcctcgtctcctacttcggcgacaaggccttcgcctggtgcgacgcagccgagctcaggccctacgagccctacttccccgtcgccgagctctacgacgacggcggcgaggactttgacgccgccgtcgaggcctctctcgacgagttctcccgccgcgtcgaggccgccctcgcctccgccgcccgccccttcgcctccgccgatttcctcgcctcgctccacgatctcgccgcggatcgcatgggcttcaccaacagggtgcaagccgccgtcgccaaggcgcatctcagagccttcgacgccttcagggctctgccggacccacctcagtacaccttggagctcggtctactcccacacgtcccgctcccgctgcccgatcctaaagctgacacggatgccgccgccgccttcaccacccccgcatccagttccaggaggggcaggaagaggaaggaggaactcgtcaaggacgacgactccgatgaggactgggaccccagcaagaggggtgccaccgacttggattccgatgtggacttcgaccacaggagggggtccaggggcaggggcagggggagggggggcagcagcggtggcagcggcaggcctcgaggaaggcccaggaaaacagatgcctgcagggacgcaccacagctcaaggacgaagatggcattcaagagtatccatcggctgatgagatgttgctgcagcttctgtccatcgccactgatcctgtaaatggcaattatgactctgctcctgtgatcgttagcttcttctcaaagcacaaggactccaaggcgcctagtgtatatgaagataaagagctgcttgagaattttggttgcaagaagggtaggaaaaagcccgtcagaagcttgggcctagctccaaagccagaagccagtgatgataaggatcagttcatgactgtggatggccagaggggccgtaggaagtctgctgggagcttgtactcagctagaaaggccgaagattcatattggtgtgatattatcatcagcgatttcgacgacggtgatagtgactatgaaggttgcaagaggaagcggccctctcagaacactaacaggagcgctaataagaagatgaagcaagaggaaccacctcaaggagccccatcagatatggaaaatggggctcctgcagatccttcgtcgaatgaaaaacctgcagatggcccagccgctcttattctacattttagcagtccagaagctattccttctgttgatgacatcaatagcatattccgtattcatggaccgatcgtggagcgtgagactgtgatcactaagaagtcaaagattgcaaaagtagttttctctaagagcgctgatgcagagagcgcatatcacagttcggggaagcataacgcatttggtccatcgcttctcacatctgaaattaaatacttgccatcggagcctcaggcttcttaaatggtgcagtctgatggactggatacactgcgattcacagaggaaatgcaccatgaagcttggagcaacgaagcataagctggtgtcactgactttagagttaggatggctcactgaccaggtcacatcaagtcactgtgttgagtgagcaaattttaggctgtctacttggtaccggagttaatttatgttgaattattagttggtagattagattatgtagcgtgatgcgcttccttttatgttagaaacttatcttttttttttgtattgcctattaattgcacagctgtggtctgtggatgtctctattatgttggtttttttctcttctatcagcagcaactgcttatttgattgtggcgaggctagtgaagcagttttttctctctccatattattagtttattactatgatgagtgagctgaa

SEQ ID NO: 105368 - DNA, 1468 bp, Zea Mays
ttcccgcgcgaagctcacccaccaaaacctaaagcgcgcctaacatttccattccattccattccattccatggatgcggagatggaggacgcaggaagacagaccgagatcgagtggggcggcggcggcggcgccgacgcggtcctgggtcttgccggcggcgcctcctctgtgtcgctgtgctaccaccaggcgttcggtccccacgacgacctcgtgctcctcgaggccgctgacgacctcctccctgacctcctgcaaggccgggtgactgtaagagggcgtcctgatgaagatgctgtcctctgcacaccttgtgcaacttactccatgaagtttgttggcacatcaaattctatgtttttgataccacctggggaaccatctgctaaatgcttaagaccagacaacaccagtggcaatgctaatgcgttggctgctaccattaaactggcaccggggagcattgaattggtccgagtcgctccaagactagataaacttaagagccttctccgggagcggccctacatacttgatgaggatattggggatgatgacctccaacataagaataagaaggggctgtacacatggcaagacctctgcaaacttatccaggccagtgatggcgagctgttagatgcgttgaatgccctctcggctgttgacattgatggattctggaggacagttgatgccagttctgtgaacacgattcttgacatgatcctgcacaactctgtgttgcgtgattggccattaaaggcaatgccagaaagtgatgtgctctctgtcatgggatctgatggttttacgcataatatcgtaacccactgcctcaacagatttggcacaaaggtagagcaggaagccagaagcttttggagccttgatgagaagcgtgtatgcttacaatttgctcggagagcacttggcgctggaaagatgaagctcagcaactttatggagaaatggaagagaagcattccttcaggaatgtgttgtccggatcttcagatgcttgaaggggaagtgttgtgtgaaaagcttggggctgagacctgggtgcatgctttcagtgttactgatctgccactggcgcctgctgagaggttcgcagcacttttccgtgagcgggcaaaatgggaatggaaagacctgcagccctacatcagggacttgcatgttccaggtgcatcgtcggaaggattgcttatcaagtataccagaagaagccaaccaaatgctgaagctgaacctatttttactgcaagataataatcaatgtacggtcatgtcttggcgacgtgatgcattgcatttgcatgctagatattgtcaatggaacccaggttttgaggaaaaaaaacatttgtgccttttgctgtaacttttgtttttggtgaagaaagctgaaatgcaagtattgagatcccaacaggttttgtttttggatttttttta

SEQ ID NO: 105369 - DNA, 438 bp, Zea Mays
atgacacttgacaccaccattttgtacccttgccaaggcgccttgctcctatggtggtgtaggcgcacgtccatgcggatgagcttgtcgggacaagagacgaggaaggtcgggagggtgaagagtgtgtgcgaggagatggcgagcatgagagcatgcataatgggggagagaaaggagacaaggactgtggtggtatcaatgttgggtgtagagtgcagttactgctgggcaagggtcgatattggtggcatcgcaaggtgtaggagcgagtcgagcaagagcatagagggccatgacgacaagggtttggctagacttgtctttgagaaagctaggttcgctcgaagtagtggtgcaagtgaacatggcaatgggtgtggcatcaacacatgtaggcatggggtggtagagcgatcatggtgcagtgcgacttag

SEQ ID NO: 105370 - DNA, 210 bp, Zea Mays
atggagacagacatgacgctgaccgtcgctgccgagagcaaagcaaaggttggcatagagggctctattggcggcagttgcccatcaacagaggtgaaggcagaggctgtgaagtacgacaatgggtggctagcgccagggccaacacctgatgcaggggcacaccacagttgtggcagcgtaggggaggagagggctgccaacggctga

SEQ ID NO: 105371 - DNA, 2437 bp, Zea Mays
atgtggcttgggcaaagccacgtgggggcatggtcgggcacgcgacgcgcgcgccagggtggttcgggtgatggaccgttgggtgtatactcatacatgggtgacgcggttatctctgccaaaaatggccagcaagcatgggcttatcttgaagataagggaaacaacatagatcttgttttgactgaggtttttatgcccggtgtatctgggatttctctgctgagtaggatcatgagacacaatattttcaagaatattccagtgattatgatgtcttcgagtgatgatatgagtacagtctttaaatgtctgtcaaaaggtgctgttgactttttggtcaagcctatacgtaagaatgaacttaagaacctttggcagcatgtatggagacaacggtgtcacagctccagtggtagtggaagtgaaagtggcattcagacccagaagtgtgccaaatcaaaaggtgtcaatgaatccggtaacaacagtggtagcaacgatgacgaagcaggcatgggacttaatgcaagggatgacagtgataatggcagtggcactcaagcacagaactcgtggactaagcttgctgtggagatcgacagtccacaagctacgtctctggatcagttagccgatccacccaatagtacctgtgcgcaagtaatccactcaaagtcagagatatgtagcaacagatggctaccagataagagcaacagaaactgcaagaagccaaaaaacactaatgatgactttaagggaaaggacctggagataggtggccctgaaaatttatatatgggtcaccaatcttccccaaatgggagatccatcaaagcagcagatcatgaaaacaattcaaaggaatcaatgatggaaaatttagaggagccaactgttcgagctgctgacctaattggttcaatggccaaaaacatggataccccacaggcagcaagagctgcagaagatacccctaatttctcttccaaagtgccagaagggaaaggtaagaataaccagaatgataagtatgttttgccatcacttgagctgagtttgaagaggtcgagatcatgtggagatggtgccaacaacaaaaatacagtcaaagacgacgaacaacggaattgtgtattaagacgatcaaatctgtcggcttttacaaggtaccacacatctgcggcttccaatcaaggtgggacaggattggtaggtagctgttcgccgcatgataacagctcggaggctgtgaaaacggattctacctacaacatgaagtcaaattcagatgctgccccgataaaacaaggctccaacggcagtagcaatgacaatgacatgggttccactacaaaggatgttgtgacaaaacccatgttgccctctgctattaaggctaatggatacacatcagcgttccatcctgtgcagcagtggatggttccagctaatgcaacagcagggaaaacgaaggctgatgaaaatacagccagaaatcactgcgtccattttgagaatggtgggtcaggagccctgcaatgtggttcctccaacgtatttgatcccccacttgaaggccaagctacaaataactatggtggtgtgaaagccgggagcaactcaggcagcaacaaggggcagaacaatgggagtacggctgctgcaaatgctggactggcagaaacggagatacaggccatggacaaaagtggagttggaggtggcaatggcaatggcaatgggagtggcagtggcagtggcaatgacacatatgtcagacggcttgctgcgaacatgacaccgcgacaagcacagctaaagaaatatagagagaaaaagaaagaccggaactttgggaagaaggtgcggtaccagagcagaaagaggctagccgaccagcggccacgggttcgtggacagttcgtcaagcaagctgtgcaaaatcaggacggagctagagagagatgaccgacacccccccccccctcccctgtggctgtgctgctctctggcttcagctccctactgactccgactccacctctgctggcatgcatggttgccgctttggactcaaaacacttgacagttagacgtgcggttgatgattcttccttctctcgtggtgtggactgatatggtcaacaacacagcctccttccttttcatcattggtttcttcacatctagaatctactgcctgaccgggaaagaataaacaaggaacttcttcttctatacatgtgtatgtatgtatgcattcctaagcatgtaatgtagaagaataagtgcgtggcttgactctagatggactttaattttagacagagtcttgctcgctctcctacatcatctagtgtaactaaagtgttgtcatgtatggtcttggatcactgtctatcaatatattatatcgtggcgttccttgata

SEQ ID NO: 105372 - DNA, 774 bp, Zea Mays
atggtggcggcatccaaggcaaacactgatgaagatgttcaggacggtgatgttgagtaccgacctaggggtactcatggttttattaagcgtgtgtatggtgctgccaataagctcagcacagagattgagattggagtgctcaaatctcattttgaaagaaagatctgtccccagcttgttgttcacttgatgctccactatagcttagatcatgacttagcagccttcttccatggacctattcaaggaataactaagcttaaggtactgtacctaagctccttggatattgagctgagattgacaagtatgaatgaatcagatagggagtcattcatcaagtacatctgccaacgtagagttgtagttgtggatgactggaggaacacttatggatttgttcgaggcgtgtacgacgctttgtttgatgagcagaagcaggctgttaggctcattaagaagggtatagcgaagctggcctgtatcatttggaaagagaagcaagtggccagcgtagagatatacgaagatgtgccttgtaatgataaccagttcactgaagttctgtctatgttagctcttttgatgaggtgtgaggatgaaaacttttccttggtagaggtgttgaatgatagctctagagcctgtggtgttttaagtggttcacaaaccatcaagatggctgatccagatcgtggtgtttgccttcttctgacatcaatgaatacaaagtttactaagctcgcgatagttcagaaatcaaggaattga

SEQ ID NO: 105373 - DNA, 384 bp, Zea Mays
atggccgcgaatctctggcttggggcaaggatggtgggaagggcgggatggaagggcaaaatctctggctatccaccatctgtagagcttgggaccacgcggaagggcgagatctctgacgacagaagggaacttggagaaaaggcactttccaatgcagttagacagagaaggcatggctgtgatgttataatgctgaaggaccccaagaagagattatgccctatagtctaccacctctcgttatttgtgggcttcaccgagggcgggaaacatttggtgacatcaaacgaccttcaggctggggacgtctgcgagcttgtcaaggggccagacgatggtgagccggtgtactctgtccggatgtgtggtcacaaaatttaa

SEQ ID NO: 105374 - DNA, 300 bp, Zea Mays
atggagagccgggtttgccgaggcgaggccacgaggcccgacgagattgctgcgggtgagggcgagcttgccgcgacgtcctcggtggtccaagaacgggtgggtaggaggagggagagccgagagcgcacttgccttggtgatgacgatgtcggagtcaccgagggagacggcgcaggcgccgtcgtggtagatgccggtgatcctgaagtcgcaggcctgctcggtgtcgttgctggcgatgaagacgctgaccttggtgcccccgcagctggatcacggacggcttcacgacgctga

SEQ ID NO: 105375 - DNA, 951 bp, Zea Mays
atgtgttggtatgctaaagggtggacaatgccaaatgaggtataggctaaaaaagtacttcactggagttcctgcaaatcaagtgaggactacatcacctgtttcatgtatgactgatgatcaatggagagagttggtacaaatgtggtctagcccaaaccacaagaacaattgtgtgaagaacaaacttaatcgtgagaaggtgcaatttccacagtgcacatgatctcaatcatacgttgcaaaagcttatgtagtgagacaagaaaatataaagatgtcgaacctagtgcaattgatcttttcaaggagatgcattgtagcaagaaaaaaagggtttagtgaagttgttcagaaagctataggtgatatggaagcaatggtggcaacaccagtagaagatggacagcttgcaaagtctgcaacaaaagttgtttccaatgttctgcctggttcaagtaaatttcttcacaatgctggccttttgccctcctccaagagaagcaacacagggactgttttagcaagaatgcaagaacttcagtctcaattggacaatgagaggagagaaaaagatggacttcgagaagatatggataccttaaaggccaagtcagaatcatctgaggcaaccattgctaatcaatcaactaagattgcagatttaaagaagtccttagcagaaaatagcatcctacttcgacagatattaagtattagtcgtgatcaggtcaatccttaagcatgcttcctaagatgctagtgtcaaccatcctgaagacacatctcacaaaattgtggacctccttttatccttatgtttgctatatggaactgcaacttacaatctattatatgtgttctcttactatagagttttagtacatgtctggttaaagaattatgaacaatgttcttttgtgtgtttttgcttgaaatatatggatgttg

SEQ ID NO: 105376 - DNA, 2031 bp, Zea Mays
ataaactgcgggtcgagtgatggagtccccgcagactagctcgtaagacaagcaagcacacgcgtctcgtagtactgggggagaacgacgaagcaaacaccaccaagataatgacgtccaagggaacgaggccgtggagcaggctctccgaggccgagaccgccgtgaaccgcgccgtcgccgggagccgcgtggggagatacttcaagctggacgcgcgcaagagctccttcaccaaggagctccgcgccggcgccgccacgttcctcaccatggcctacatcatctccgtcaacgccgccgtcctgaccgactccggcgggccgtgcacggtgcgggactgcacccccgtgcccaccaactcgaccgtggcggccacgccgcctgggccggagtgcacggtcgccggggctaataacccggggtaccagcagtgcctggcgcgcaccaagagcgacctggtcgtggccacggccgtggccgccatggccggctccttcgccatgggcctcttcgccaacctcccgctcgcgctggcccccggcatgggcgccaacgcctacttcgcctacaacatggtcgggttccacgggtccggccccatcggctacagcacggcgctggccgtcgtgatgctggagggcctcgttttcttcgccctgtccgtcgtcggcctccggtccaggctggcgcggatgatcccgcggaacatccgcctcgcctcggcggtcggcatcggcctcttcctcgccttcacgggcctccaggcgcaccagggggtcgggctcgtcggcgccagcccgtccacgctggtcacgctcaccgcctgctccgacgtggacacggtcaccggcgcctgcctcggcggcaccatgcgcagcccgacgttctggctcggcgccgtcggcttcctcatcacggccacgtgcctggccagggacgtcaaggggagcatgatcttcggcatgctgttcgttacggtggtctcctggatcaggggcaccagcgtcaccatgttcccggacacgccggtgggcaatgccggcttcgcctacttcaagaaggtggtggacttccacatgatccgcagcaccgcggggcagctgagcttcggcggcttccggcacggcaacgtctggctcgccctgctcacgctcctctacgtggacgtccttgacacgacggggacaatgtactcgatggccgagtacggagggttcacggacggcgccggcggcgggttcgagggcgagtaccgcgcgttcctcgtggacgccgggtccacggtgctcagcgcggggctcgggagctccacggtcactacctacatcgagtccaccgcggggatccgggagggcgggcggacggggctgacggccatcaccgtggccgcctgcttcctggcgtccctcttcttcggtccgctgctgatgagcgtgccgccgtgggccgtaggcccgtcgctggtcctcgtgggcgccatgatgatgcgcgtcgccaaggacatcgagtggggcgacatgaaggagggagtcccggcgttcgtgaccatggcgctgatgccgttgtccttctccatcgccaacggcatcatcgccgggctgggcgtctacgtcgcgctgcactggtacgactgggcgcgccacgggtacggcaaggtgaggaacgcgctggacgagcggcggaaccaggtggccgccgccgcgggcgaagtcggaccggcggcgcaggacgtcgtctgatcggtctccgatgtgtttgaccgtagcaggtcatgttgtttacttgtttagtaggctaattagctttgtcatgcatcatcgcttttgggggagctttcagatggcgtcgctggattagaagttcggtcggcacgggttggtgctgggccctacatgcccctgtgtatggactatggagtatgtatggtaatggagtgggaacaactgaatggggcctgctcggagattcttgatgtgcaaggaggtgttcgtactttgaccatcattgcagcgttctcattgattgcct

SEQ ID NO: 105377 - DNA, 4008 bp, Zea Mays
caacgaacgaacatattcctcccgtcgatcgctccagacactatcaccttccacctctcagcttcactctcaagcctctactccatcttcttgtgaagcttctcaagattctcgcgatcgcatgcctttacccttcctctctctctttctctctctggtcatcttactaaactacctccaatgccggtgccaatggcggcagctcagttcctctagctagtctcccaccgtaattagcaaacccggagaaaaaaagggaacattcgacgccaccccgtgatgaggccttcgccacctttgctcctgttcgtgctcctgcacttcgcgctcctgtccaccattgccgccgccgatgggaatgggaatgggaatgggaacggcgacctgcgcggcgacgcgatggcgctgctcgccctcaaggccgcgctcggctgccggccgggcgcgctgcggtcgtggtcggagggcaatgccgggtccgtgtgcgcgtggacgggcgtccggtgcgcggccggacgcgttgtcgccgtcgacatcgccaacatgaacgtgtccagcggcgcgcccgtctcggcacgggtgacggggctcagcgcgctcgagaccatctcgctcgccgggaacggcatcgtgggcgccgtcgccgcgtcgtcgctcccggcgctgcgccacgtcaacgtgtcggggaaccagctcggcggcggcctcgacggctgggacttcgcgtcgctgcccggcctcgaggtgctggacgcctacgacaacaacttctcggctccgctcccgctcggcgtcgccgcgctcccgaggctccgctacctggacctcggcggcaactacttcacgggcgagatcccggcggcgtacggcgcgatgcccgcggtggagtacctgtcccttaacggcaacaacctgcaaggccgcatcccaccggagctcggcaacctcaccaccctccgggagctctacctcggttactacaacgtgttcgacggcggcatccccccggcgcttggccggttgcgcagcctcaccgtgctggacgtctccaactgcggcctcacggggcgcgtccccgcggagcttggcgcgctcgcctccatcgagacgctcttcctccacaccaaccaactctccgcgcccatcccgccggagctcggcaacctcacgtcgctcaccgcgctggacctctccaacaatgcgctcaccggcgaggtccctcgctcgctggcgtccctcacctcgctcaagttgctcaacctgttcctgaaccggctccacggaccggtgcccgacttcatcgccgcgctgccgcgtctggagacggtgcagctgttcatgaacaacctcaccggccgcgtccccgcagggctcggcgccaacgccgcgctccggctcgtcgacctgtcctcgaaccgcctcaccggcgtcatcccggaggcgctgtgcgcgtccggcgatctccacacggtcatcctcatgaacaatttcctcttcgggcccatccccggctcgttcggctcgtgcacgagcctcacccgcgtccggctcggccagaactacctcaacggcagcatccccgccggcctgctgtacctgccgcggctgagcctgctggagctccacaacaacctgctctcaggcgccgtgccgtcgaacccgagcccgagcgcgtccagttcgcagctggcgcagctcaacctgtccaacaacctgctggcggggccgctgccgagcacgctggccaacctcaccgcgctgcagacgctgcttgcgagcaacaaccggatcggcggcgccgtgccgccggaggtcggggagctccggcggctcgtgaagctcgacctcagcggcaacgagctgtcggggccgattcccggggcggtcgggcagtgcggcgagctgacgtatctcgatctcagcaggaacaacctgtccggggcgatcccagaggcgatcgcgggcgtccgggtgctgaattacctcaacctgtcgcggaacgcgctggaggacgcgatcccgacggcgatcggggccatgagcagcctgacggcggcggacttctcgtacaacgacctgtcagggcagctcccggacacggggcagctggggtacatgaacgcgacggcgttcgcgggcaacccgaggctgtgcggctctgtggtgagccggccgtgcaactacacgggaggaggcggagtcgcgggcgcggcgacgacgcggctcggcgggctgaagctggtgcttgcgctgggactgctcgcctgctcggttgtgttcgccgtggcggccgtgctccgggcgcggtcgttccgcgtggacgtcggcgcgggcaggtggcggttgacggcgttccacaaggtggactttggcgtggcggaggtgatcgagtgcatgaaggacggcaacgtggtgggccgcggcggcgccggggtggtgtacgcggggcgcacccggtcgggcggcgcgatcgcggtgaagcggctgcaggcccagggcggcgccggcgcgcagcagggcgacgaccgcgggttccgcgcggaggtccggacgctcggcagcatccggcaccggaacatcgtgcgcctgctggccttctgcacgaaccgggaggcgaacgtgctggtgtacgagtacatgggcggcggcagcctcggggtggtgctgcacggcaagggcggcgcgttcctggcgtgggagcggcggtaccggatcgcgctggaggcggcgcgcgggctgtgctacctccaccacgactgcacgcccatgatcgtgcaccgggacgtcaagtccaacaacatcctcctcggcgacaacctggaggcccgcgtcgcggacttcggcctcgccaagttcctccggtgcggcgccacctccgagtccatgtccgccgtcgctggatcctacggctacatcgcccctgagtacgcgtacacgctgcgggtggacgagaagagcgacgtgtacagctacggcgtggtcctgctggagctcatcacgggccgccgccccgtgggggacttcggggaaggtgtggacatcgtgcagtgggcgaagcgggccacggccggccgccgggaggccgtgccggggatcgtggaccgccggctcgtcggcggcgcgccggccgacgaggtggcgcacctattcttcgtctccatgctctgcgtgcaggacaatagcgtggagcgccccaccatgcgcgaggtggtgcagatgctcgccgagctcccgcgccacgagtcgtcgccgtccacctcctcctcctcctcgtcgtcgtcggcggtggaaccgccaccaccgcaggccggcgaggagagcagccccgacgacgggaaggagccgccggccaactgctacaagctgttcccggacctgctggcctgataaactgaagcgcagacgacggaacctattttgctgccattgttacaagacacaaggctactactcaatcgtcgtgcagggctaaagttacagcatgtagtgcagaatggagctagacgttcaacaggttggtcggccgacattggaaatggtgacaagatagagctgggaatcaataacatgtaacttttttttgtctttcttcttcttcttctatctcctctccgaattattttctttttgttcatctatcaattcaaagctgtatagggtctgatcatatgctaccgcctatctaggggattatgctgtccgagatgcagtagcatcccttccatcatcatagctttcgcacttttgtaatctcctggtaatctttagccaccatccattgtccccgagtactaatccttggttatgtgtactgatgagtactcccggtacttgttcatatatagctttttgtatcatttgagccatttttttgtcagcaacagccaacaggccgggtgtggcgatcatctgttggaagattcttgactggagctttggtttcagggaaagcatggaagataaatgagaaaaaaaagagagcgcgcgatactggacagtctttgaaaa

SEQ ID NO: 105378 - DNA, 1196 bp, Zea Mays
aagacatcgcaaactcaaaagatggagcacaacacaacaccctagaacagtagtgtgatatgtagctcaataggttggttggttgtgtatcacaagagcaggggtagagacacagagagctaaaagaacattattggacgcgagggagcagagtagaactgtagaagggagtggtgtacgtgcgctagactgccagtggcagctgctgcaagctagctaaggtgaaggatggatatcgagtcgaggcaagtttccaaaggggacgccatagctgctgctgtctctgttgactggaagggaaggccctgcgaccccctcaagcacggcggcatgaaagccgcggtcttcgtcctagggatccaggcgttcgaaatgatggcggttgcggcggtggggaacaacctgatcacgtacgtgttcggggagatgcatttcccgctgtcgcaggcggcgaacatcgtgaccaacttcatcggcaccgtcttcctcatctccctccttggtggcttcctctccgactcctacctgggcagcttctggaccatgctcatctttggattcgtcgagctctcgggtttcatcctactggcggttcaggcgcacctgccgcagcttcgaccgccgccatgcgacatgatggcgccggggcaggcgtgcgaggaggcgagaggcttgaaggccagcatcttcttcgcggcgctctaccttgtggcgctaggcagcggctgcctcaagcctaacatcatcgcgcacggggccgaccagttccggcggggcagcggcagcgacgccgcccgccggctgtcgagctacttcaatgcagcctacttgagcttctgcgtgggcgagctggtggcgctcaccgtgctcgtctgggtgcagacccgctccgggatggacgtcggatttggggtctcggccgccgccatggccgtcggcctgctcagcctcgtcgctggcgttgccttctaccgcaacaagccgccacagggcagcatcttcactcccatagctaaggtacgtgtagattgtattactggtgctctacgtaccactgtctcgtactgtacgtacatacatacgtacggatacgggataccctatactatatttttttgtacaaagattgactgtacgtcctaaattaaaattcgttttaacattttaataaattcatataatacttgatgtatata

SEQ ID NO: 105379 - DNA, 2100 bp, Zea Mays
aagacatcgcaaactcaaaagatggagcacaacacaacaccctagaacagtagtgtgatatgtagctcaataggttggttggttgtgtatcacaagagcaggggtagagacacagagagctaaaagaacattattggacgcgagggagcagagtagaactgtagaagggagtggtgtacgtgcgctagactgccagtggcagctgctgcaagctagctaaggtgaaggatggatatcgagtcgaggcaagtttccaaaggggacgccatagctgctgctgtctctgttgactggaagggaaggccctgcgaccccctcaagcacggcggcatgaaagccgcggtcttcgtcctagggatccaggcgttcgaaatgatggcggttgcggcggtggggaacaacctgatcacgtacgtgttcggggagatgcatttcccgctgtcgcaggcggcgaacatcgtgaccaacttcatcggcaccgtcttcctcatctccctccttggtggcttcctctccgactcctacctgggcagcttctggaccatgctcatctttggattcgtcgagctctcgggtttcatcctactggcggttcaggcgcacctgccgcagcttcgaccgccgccatgcgacatgatggcgccggggcaggcgtgcgaggaggcgagaggcttgaaggccagcatcttcttcgcggcgctctaccttgtggcgctaggcagcggctgcctcaagcctaacatcatcgcgcacggggccgaccagttccggcggggcagcggcagcgacgccgcccgccggctgtcgagctacttcaatgcagcctacttgagcttctgcgtgggcgagctggtggcgctcaccgtgctcgtctgggtgcagacccgctccgggatggacgtcggatttggggtctcggccgccgccatggccgtcggcctgctcagcctcgtcgctggcgttgccttctaccgcaacaagccgccacagggcagcatcttcactcccatagctaaggtatttgtcgccgcagtgagcaagaggaagcaagtgtgcccgtcgacggcctccacgcaggcggtcgcaggttctaccgtccatgagatgtccgttaacaccacagacatttgccacatcaacaagttcaggtttttggacaaggcatgcatgaaggcgcaggacggccccggcggatcgtcggcggggaagaagagcccgtggattatgtgcacgccagcagaagtggagcaggtgaagctgctgctgtgcgtggtgcccatcttcgcgtgcaccatcatcttcaacaccatcctagcgcagctgcagaccttctccgtgcagcagggaagcgccatggacacccgcctggccgcctccttccacgtcccgccggcctcgctgcaggcgatcccctacatcatgctcgtcgcgctcgtcccggcctacgaggccgccttcgtgccggccatgcgccgcctcacgggcgtccccacggggatcacgccgctccagcgcatcggcgtcggcctcttcgccgtcaccttctccatggtcgccgccgcgctcgtcgaggcccggcgccgccacgccgctgccacggacggcggccgcctcctctccatcttgtggatcgcgccgcagttcctggtgttcgggctctcggagatgttcaccgccgtggggctcatcgagttcttctacaggcagtcgctcgccggcatgcaggccttcctgacctccatgacctactgctcctactcgttcggcttctacctcagctccgtgctcgtgtcgctcgtcaacaggctcaccagtagctccagctccacggcaggcaatggcaatggcggctggcttgccaacaacgacctcaacaaggacaggctcgacctcttctactgcctcctcgcggcactcagcatgcttaacttcttcaactacctcttctgggcacggtggtactccaagagcgtagagacgctgcaagtgcaagtcgtcggagtcggaagcggcggcggtgagcagcagggtgacgaaatgacacccctgagtgctgagattaatatgactgggtccttgaaaacaagttcagccaattaa

SEQ ID NO: 105380 - DNA, 1923 bp, Zea Mays
ccattggagtattcgacgtctcgtaacccctgcctcccacgcaccccaatgtctgacaagaaggacgacgaggccggcacctcaacgccgagtgttgcggcggcggcggccccggccccggccccgaggccatccacctacgcgcccatgggcgcgctgcgggacgaggagtgcgctaatctcctggccctggtatccaccgtctcgcgcccgctcgaggacgccgtcgcggatttcctcgcacgcgtgccccccgatcgccgcctccggttcggcacctccatcagcttcgtcctcgaggacaagatgatgcttcaacctgctgagcgtttagttgcatttgcaattctacatcaaggttattcctcacagttggcaaatccatttcttcctcttttaataaatgctgcatgtgatgaaacttctgaggaagcagaacaagcatttctccaacttctgttaagttcgactaatggggacaacattgaggttctaaagcagtctgctgtcgcttacttgaacggatctgattatgcatctcaggtctttttgccaagagaacagcttgagaaacaatgttcctatgatgctgcacgacctctgcccttctctagtaatttcagagatgccactgtcagaagtactattcctgacccagatgttctccaaagctttggtagttcatcagagctgtcctcaataataccaaatagagatgacatggttgctactttacttcaacaaacatcacttaaaggattgcctcctcaatggatacgaccctctccaccaagacttgaaatttttgaaggggaattacagtggctgaacatagacaataaccatgagctactatgggacagtaccatgtgtgcagacactagccgaggtgctgtgattcgagatctggtcgaacaagcttgtaaagctccacttgcattggcccagcatgaggaaattaccaaatatctgcggaaggactggaagctagtttatcattgtggaatgacaccacagaagctccctgatcttgttgaacataatccacatatagctgttgaagttctttcaaagctaatcaactctccggacatggatgcgtactttgatgctattgttcatatggatatgagcttgcattcaatggaagtagtaaatcggctcactactgcagtagttttaccaccaggatttgttcatgactatatctcaaactgtattcgatcatgtgaagacattaaggacaagtatatgcaaaatagactagtgagactagtatgtgtttttctacagagcctcattcggaacaggataatagatgtgcaagatctcttcgtggaggtgcaagcattttgcatcgccttctcgcgaataagggaggcagtggggttgttcaggctcctgaaatctctagaatgaagagcgctgcaccatcagttgggcgctggattctcagaacagaaattcccaaggtgtacatccatggctctgccttttgcttccaagctgctgaccctgcataggtctggactctgtagggcgtggattttgctggtatattggttatcatcaagctgcgtcccctgcatcatccccgaaagacattgaggagaaacaaatccataggtctgacaggttgggttcgaggtagagttagttctgttggaagtgtccacggggcttgtcgttcttgtgcagtaggcaacaatggcaagccccgtagttggtttgctcgaaatgagcgaatggtacggtgaactcagaaataaccgggatagagtatccgactgtcagtcatacttgctctacggcatggtatatttattcattagcctcataaacggttgcttgctatttaggctgtcatacctgtatttcgaagttcattgttacatcatgcagatgtgagacagctattgcctg

SEQ ID NO: 105381 - DNA, 1941 bp, Zea Mays
ccattggagtattcgacgtctcgtaacccctgcctcccacgcaccccaatgtctgacaagaaggacgacgaggccggcacctcaacgccgagtgttgcggcggcggcggccccggccccggccccgaggccatccacctacgcgcccatgggcgcgctgcgggacgaggagtgcgctaatctcctggccctggtatccaccgtctcgcgcccgctcgaggacgccgtcgcggatttcctcgcacgcgtgccccccgatcgccgcctccggttcggcacctccatcagcttcgtcctcgaggacaagatgatgcttcaacctgctgagcgtttagttgcatttgcaattctacatcaaggttattcctcacagttggcaaatccatttcttcctcttttaataaatgctgcatgtgatgaaacttctgaggaagcagaacaagcatttctccaacttctgttaagttcgactaatggggacaacattgaggttctaaagcagtctgctgtcgcttacttgaacggatctgattatgcatctcaggtctttttgccaagagaacagcttgagaaacaatgttcctatgatgctgcacgacctctgcccttctctagtaatttcagagatgccactgtcagaagtactattcctgacccagatgttctccaaagctttggtagttcatcagagctgtcctcaataataccaaatagagatgacatggttgctactttacttcaacaaacatcacttaaaggattgcctcctcaatggatacgaccctctccaccaagacttgaaatttttgaaggggaattacagtggctgaacatagacaataaccatgagctactatgggacagtaccatgtgtgcagacactagccgaggtgctgtgattcgagatctggtcgaacaagcttgtaaagctccacttgcattggcccagcatgaggaaattaccaaatatctgcggaaggactggaagctagtttatcattgtggaatgacaccacagaagctccctgatcttgttgaacataatccacatatagctgttgaagttctttcaaagctaatcaactctccggacatggatgcgtactttgatgctattgttcatatggatatgagcttgcattcaatggaagtagtaaatcggctcactactgcagtagttttaccaccaggatttgttcatgactatatctcaaactgtattcgatcatgtgaagacattaaggacaagtatatgcaaaatagactagtgagactagtatgtgtttttctacagagcctcattcggaacaggataatagatgatgcttggttgtgtgcagtgcaagatctcttcgtggaggtgcaagcattttgcatcgccttctcgcgaataagggaggcagtggggttgttcaggctcctgaaatctctagaatgaagagcgctgcaccatcagttgggcgctggattctcagaacagaaattcccaaggtgtacatccatggctctgccttttgcttccaagctgctgaccctgcataggtctggactctgtagggcgtggattttgctggtatattggttatcatcaagctgcgtcccctgcatcatccccgaaagacattgaggagaaacaaatccataggtctgacaggttgggttcgaggtagagttagttctgttggaagtgtccacggggcttgtcgttcttgtgcagtaggcaacaatggcaagccccgtagttggtttgctcgaaatgagcgaatggtacggtgaactcagaaataaccgggatagagtatccgactgtcagtcatacttgctctacggcatggtatatttattcattagcctcataaacggttgcttgctatttaggctgtcatacctgtatttcgaagttcattgttacatcatgcagatgtgagacagctattgcctg

SEQ ID NO: 105382 - DNA, 339 bp, Zea Mays
gtttttttattttttttttgacaatatgcactgacgatagtttgccttgcaaacaattatcgtttcgagatgattgacaattctgacatagcaacatattgggtgcagggggcatttgcaacggcactaaaatacagcctcaactcgtgggctgtatctaggaaaggcccatcataccctgcaatgttcagcccattgtctgtggtgttcactgttgtgctgggctctatcttcatcggtgacaacatcacaatcggaagcctcgtcgggacggttatggtgattgttgggacctacaccttcctatgggccaaagcaaatgagctacatcaagagtga

SEQ ID NO: 105383 - DNA, 1290 bp, Zea Mays
atgctgctgcgcaccgtccggttcctctgctccgtcgtcgccgccttcgcgcgactcgtccgggagctccgcaaggcgggcgtcatgctttccgcatgctctccgtctcctgtagcgatactctcggcacccaccgtgccggcggcgtctccgatcaacctgatagcctccacgcccctcccgaagcgaaagaaaacgcttgcccgggttgccatcctcgagaaccttctcgccgcgccgccgacgacgctgctgccaccatcgttggtggttggtcttcctgcaaaggtgtccgacgttgtcagtgaggccgcgatggtagagcaacaacaagcagctcagagcttgatgaagaaggcctcgttggcggccaggaggaggccggcgcggctcgtcataccggtgggggacgacgctggcgaggtggccgccggctggggcgcggctgccgctccggcgaaggaggccgacgtggaggtggagggggaggggttttcgctggcgagtagggcaggaccgaggcatgcgatggaggatgcatatgctgtggtgactgacgcagattctcagctggcattctacggtgtgttcgacggccacggaggccgcgcggccgtggacttcgtctccgagcggctcagcaagaacgtcgtgtccgccgtgctcgccgccgcaggaaaggatacgcgctgcgaagcatcgtcgtcgggggacgacgacgccgtctcagcggcgatcagagcggcctatctggccaccgacagcgagctcctcacgcagcatcaacagggtgcaagcggaggtgcatgcgcagcgacggcggtggtgaagggcggcgacctctacgtggcgcacctgggcgattgccgcgtcgtgctgagccgcgagggcgcggcggtcgcgctgacggcggaccacacctgcgcggcggaggacgagagggcgcgcatcgagcgggagggtggctacgtgagccgcagcggcagcggcgtgtggcgggtgcaggggagcctcgccgtgtcacgcgcgttcggagacggcgcgctgaagcagtgggtcatctcggagccggcggtcacgagggtgcccctcgccgccggctgcgagttcttggtcattgcgtccgacgggctctgggacaaggtcagcaaccaggaggccatagacgccgtctctggcggccggagccgcgccgcatcctgcagggacctggtggacatggcacgccgcaggggaagccgggacgacgtcaccgtcatggtagtcgacctccagaggttcgtaagatag

SEQ ID NO: 105384 - DNA, 801 bp, Zea Mays
atgagaaggtttcttccccctctcgataatgtacacgcatgggcatggcacgttcttcacttcagaccctcacacacagctctttccccggtaaaatcaaggacggcagcagcgcatgacttggcatcgctgccggcttgtggcgcgtcctcacaggctgggcgtcctctcggcggcgccggagatgacggtgagcaggttgttgccgaaggggtcgctgaggtgcttggcgaggttctcgacggggccttcgccggtgacgtaggcctggatgaagaaggcgaacatggagaacatggcgagccggccgttcttgatctccttcaccttgaggatggcggcctggtcggggtcgctggccaagcccagggggtcgaaggggccaccggggtgcagcttgtcctcgaggtccagtccgttgatgatccggtagtactcggcgccgccgacgaggacgacctccgcgatcacggcgaccaccaggttgatggggatgctgttgccgaaatagctgagggtgtttccgtcgaggagcagggctccggtctgcaaccagacggcctcggggccgcagttagcgccgaacttgttgcacgcctctgggatgacagcgccagcggcaccgagcatggcccatctggcatggatcagctcgtaggcctggtacttggcgaagtcctctggcttcttgcccaggccaaaagggtcgtagccatagctgccagttgtaggagcaagatagttcagttcagataccttaacttcgattctctgcagtttttcatatatgaacaaaactag

SEQ ID NO: 105385 - DNA, 1237 bp, Zea Mays
aggcacttgaaaggccaaaaaggctaaagaaaacacaacaaaactcgtcagtagctgagtagccactgtgctcttgagaaggatgacgagccccatgcacgcgcggaaggctaagctcaagacccacttcatctccgccaaagcgaagctcaagcacaacgtcaccccgcgtcgcgtcgtcctgctggctgccgccgctacctccgccttcctcctcctattcaccctccgcaccctccactctgccgcgtcacgcagcgccagagcaagcgccgctgccaccgttgccgctgccattgcctccacgtctccagcgtccgtcgccgccgaccacgccgaccagctggagcagcaccaccatcaagagtgcgccaaggtgccgtcgtccgtcgcagaggcgctggtccactacgcgacgtccaacgagacgccgcaccagacggtggcggaggccggggccgccgcgcgcgtgctggcgcggcgtgcgccgtgtagcctcctggtgctggggctgggacccgacagcgcgctctgggcggcactcaaccacggcggccgcacgctcttcctcgaggcggacgccggccggatcgcctcggcccgcgccgcgcactcggccgggatcgacctccaggcccaccccgtcgctttccaacaagaggccatgacgccgtccgacgatctcctggctctccgcaactcctccgactgcgctgcctccccgccgaaacctctcaccgtggaccacctagagcaatctccgtgcacgctggcgccgcgcgggctaccggaaacgttctacgaggcggagtgggacgtgatcatggtgaacgccccggtgcctggagcgatctacacggccgcggtggcggctagggcgcggcgcccggggactggggaaaccgacgtgctggtccacggcgtggatgacactaccgaggagagcttcgccagggcattcttgtgtgagccgtacctgaaagaggaagctagcaggctccggcacttctccattcctagccacatggacaaggacgccatgccattttgcccattaatacgctaatgatataattgctatactgaataatcactcgtagatttaatctgaagttcatactttttttttctgttctggtgaaacagcatttgacactgtgatttctgtattttgtgatttggtgtttagattttgctcattttatcggtgtttgtgtataataattcactactggaa

SEQ ID NO: 105386 - DNA, 582 bp, Zea Mays
atggactgggagatgggctcggcatcagggagctccgagcagggatgccgcagtccgagcagaggaagtcgggcgccgagaaacgcgcgcagaaaacaggacgccatggaaacaggcagagagcaagcaggacgcgcggaggagaaactcgcgagcacagctgggcaccggacttggggagccgcacagagagagcagggagcacggtgcgcagggcaaataaccgctcggcgagcaggaacagcgcgcacacaggagctccgtggcaagggagagaggagtagagctgggcgcggctgctcgcggcaacagagcagaggggcgcggtccgatggaatctgagcagagggcagagcgacggacgcacagggaacagcgccagcagctcgccatgggagaggatcctgcgcagagagaagaaccgagcttgaaggagtgccatggctagaaccaggggcgtggctggagcttggagacggactggggcagggagaggcgaccagcgcgcaagggagctcgacggcagccgccatagatgagcggagcgacagccacgagcgagcgcaggcaagcgtgaaaaaa

SEQ ID NO: 105387 - DNA, 515 bp, Zea Mays
acaatcgagcagtaacaaagtttgagctgttgtaccttcacccaatccacatatagcactacaaaatggtcactgggaaagtagcagtcgtcctcctagcctgctggacgctagttctctaccaaccagtgcttggccgtttaccgtgtaacaatgatcagaagagagagatcctgcgcgagtgtgatccactgaactcaacacctgactatactccatcccggcacggtgcgtgctgcgtggcggtgagaaaggtgccaggaaccaacatgctttgcattgcctccatactctcacttgctgacaaggccaaatacagtgtaaggaagattctaggatttagagatgcatgcgccccttcacatccacaccatcaggtagtcatggcctaaaagagtgtagctgccagcctgccatcgcttatggaatcatcgtccaaacatgatgttgaaatgagatgtatctccggctggttaataaaaaccaagttatattaatcctcttgtgccttcttg

SEQ ID NO: 105388 - DNA, 517 bp, Zea Mays
acaatcgagcagtaacaaagtttgagctgttgtaccttcacccaatccacatatagcactacaaaatggtcactgggaaagtagcagtcgtcctcctagcctgctggacgctagttctctaccaaccagtgcttggccgtttaccgtgtaacaatgatcagaagagagagatcctgcgcgagtgtgatccactgaactcaacacctgactatactccatcccggcacggtgcgtgctgcgtggcggtgagaaaggtgccaggaaccaacatgctttgcattgcctccatactctcacttgctgacaaggccaaatacagtgtaaggaagattctaggatttagagatgcatgcgccccttcacatccacaccatcaggtcatggcctaaaagagtgtagctgccagcctgccatcgcttatggaatcatcgtccaaacatgatgttgaaatgagatgtatctccggctggttaataaaaaccaagttatattaatcctcttgtgccttcttgtgata

SEQ ID NO: 105389 - DNA, 1986 bp, Zea Mays
ccgcggtaaataaatacccgacttcgccggcgtccgcgagcttcgagaatacatccttccccgcgttttaccctaacaacctaactagctgcggttctccactatcactcgctgctactgcacctacttcctttccgctctggtactgttgctggcttgctgctgctcttggtggtggtggtggtggcaccgaaaccctagcccttgccctcatgtcgcagcaggaggctgtggacccgccttcggcgacggacgagcggctgggaggtctaccgcggagcggctccaccagccgcctcaacgcgcaggcgccggagttcgtgccgcgcgctgccgcggttccccctccccctccgcagcagaaggtggtgcgtttgttcgcgccgcctccccacgcggcgttcttcgtcgcggcaccccggcccccaccgcccccgttcgagtactatgcggcggttgccaccggtgggggtggcaggttcggtccccccgccgccgctgcagagcaggaggccgaggctgagcagccgccgagggacgggagctttgatgaccccgtgcccaagatcagaaagcaggtggagtattatttcagtgatataaacctggccaccactgaacatttgatgaggtttatttcaaaggatcctgaaggatatgtgccaatatcagttgttgctggctttaagaaaattaaggctttggttcaaagtaactccatgcttgcttctgctcttcggacttcatcaaagcttgtggtcagtgacgatggtgcaagagtaaaacgtgagcaaccatttacagaatcggatttagaagaactccaggcccgaattgttgttgcagaaaatctcccagatgatcattgttaccagaacctgatgaggctcttttcagttgttggcagtgtcaggacaattagaacttgctatcctcagaccccaaatggcactggtccagctactaacagatctgcaaagctagatatgctttttgccaacaaacttcatgcttttgttgagtatgatactattgaagatgctgctagagcgattgtggaacttaatgatgagaggaactggagaagtgggcttagagttcgattgttgagcacttgcatgacaaagggaggtaaagggaaaaagggtgggcatgaatctgatgggtatggtgacgaggagaatgtctctacttctgatcaaccatatgataaatatttagaagaaacacctcagatgtcagatgtgcctggagaacacatgactgaggatagcgctggagatatgggacgaggacgtgtccgggggcgtggtcgtggtggcaggggccgggggcgtggttaccatcaacagaacaacaatcaacaccaccagcactaccaaaacagtagccaccacagtaacagtagtagtacccgtccagtgggaaccccaccgccatctggccacccagtcatgattgagcagcagcaacagcagcaggcagctcaaccacagcccctcacagcggctaacaaacagcctccaggtcctcgcatgccggatggctcacggggattcagcatgggcagagggaagccgcaaacattgacgcccaaagtatccgagtctgaacctgaacaatgaattcgaacctcgcagagagactaatgggttccggtttgccatgttgatacatatgctgagagacttgccttttagaagtctgtcctcgaggtcgctttctaatttatgggaccatatacatttctgcatgtgctgtgtgtgtacttccaaagccagcagacactggttcgcgaatagtacggttgcggccattctgtaattccatttttgccccccttatgcagttttgggtgcaatactgaaaatcaaaaactcatgctaaaaaggttgaaaagaatcgagtcgttgtaaaataagattgtttcttcgctgtttgcgggggactgatcatttcgatgcttttaccattttgttgtttatt

SEQ ID NO: 105390 - DNA, 462 bp, Zea Mays
atactttttggtccatttggaagacaaacaccccggtccagtcctcccccgatgctgagggatacccgtggaagccctcatggccacctgaggccgggcaaccttccccagtttggaagggacacaagcggatccgagcaaccacgccctccgccgccactatcgtccacaccgctgccatccgctctgctgccgctccatcgtcgtccttccccgacgcagtcgcgagcgggacgtgaggcgacagtgccctccaccaccgccaccgtctcggatttgtcgccctccgccgccatctctgccctcggttcactgtcctccaccgtcgtcttccgcgacacgatgtacaatacaatgttgtctccaagacacagtacatggtcttctccaagatccagtacaaggtcgtctcctccaagatccaaaccccaacgctagtgaggtatgcacctaccgagtaca

SEQ ID NO: 105391 - DNA, 651 bp, Zea Mays
ctcgtgcgagagcactataaaatgccctcgcggcctcacctccattattgccatccatcacatcctctcccaccttactcaagctagtgcgagcatagcaatggggttcgcccggaagagtggagttgcagtaggggtttggtggctcctcctgctcgccggcgtgctgttgccagccaccgcatttggccggcacgccgatgccggcaaagacatgtgcgacatcaagtgccagcatcacagcgacccggccaggaggcagcagtgcgtggatgagtgccatagccgggagcaccatcaccctagcagagagttttgcgagatgaagtgtcagcaccaccaggaccctgcaaggaaagagatctgcgtacagcagtgcatgagctatggtctcagcctccgccgtgcgagtgccggtgttgatgagggtgaaaagcgcttccatggctgggaaacgacggtggccggaggaatcctcgaggtggtgtgacgacgtacgacgttatataacagtacgtcttaattaataaaataagctacacccgcgtttcccttatatatatgtcttgctatgcatggagatatcatggcaaaggcatacactaccggaatcaacatcttcgccgagtgccggaagcactcggcgaagcc

SEQ ID NO: 105392 - DNA, 1681 bp, Zea Mays
atgttggtccttgatgcaatgtatccggccctcttcttcctccgtcctccgacctccgagatttgaaaccgtgctgcgaatcccccactcataaaattgaccactcgtcctcccccctgcccgtcatcatgcttaatctctctccagtttcccccagttcccgtttccatctccatcctcccccccgggagcaggagctgcagccaggagtcgagtcggcgtcgtcacgggagatatcagcttcgctatcaccggatccccctctgctccctccgcacctcccatctgcgctctctgttttcttccgcgcaccccggctgttggtgtcccgtccggcagcgttgctggtggctgaatccgagcctttgaggggtctgctgccgccgccgccgccgctgtcaccgctcttgagatctctttattgatctggagagattaaagagggattcttgccttcctactggagcaagagaaaggggagaacgtgtttcttcaggcgtggttgaacagtgaggaccggagaacaatgcgaggttcgggatttaaggtaactttttcctgctgcgcgatttcgatatgttttaggcgattcttcatctttcttttgattgagttcttcggattcttcaaagttggtgttgtccacactagcttctttgctgaaaatctctgggggaaaggttcgataatcttgccactgtgatctacccatcatcatctaacactttggttctatctccttacagatgttctggctttaggggcagttcttctgaagcaggggacgggcgattcgaccaccggagctcagatctgattacaaaacgttcagaaaacacaaggcgttctcacaccgcctttcacttcttgcttactttggcaaccactcactgcgactggtctccacctccacctacaccaaagaacacatggcaagccgatctagcgcgatggaaggaggggcggcaatacaaaggaggaatgccgtgaagcggcatctgcagcagcgtcagcaggaggcggatttcctcgacaagaaggtcatcgcgtccacctacttcagcatcggggcgttcctcgtgctcgcctgcctcaccgtctcgctgctgatactgccgctggtgctgcctcccctgccgccgccgccgtcgctgctgttgtggctgccggtctgcctgctcgtcttgctggttgtactggccttcatgccgacagatgtgcgcagcatggcctcctcttacctgtaaatagataaataggtcttggccagattttctgtgttttgcagctgcaggattcgtcctaagacgagtcatgagtgtaatgtgaagcaacttctccagggatagatctcaaccaagtttggtagccatacgaagttattgactggaatttagaacatatagttgtgcacaatttcgaacatatcttgtagtggagagcgggccgagcacgtgcgagtaactccagcagtagcaagtagcaaccaaatcagatttgtgtgctcacctctatttttattgatctaaatttacgctttcagtctaacagtagaattcaaataaaggctctccaatttcttcttatagtctgtgaccatgagacctgtaaggctatgatcgtgcataatactcgtttgcaccgtagacaaagtaaaatttaaaacaggagataagaatga

SEQ ID NO: 105393 - DNA, 2150 bp, Zea Mays
atgttggtccttgatgcaatgtatccggccctcttcttcctccgtcctccgacctccgagatttgaaaccgtgctgcgaatcccccactcataaaattgaccactcgtcctcccccctgcccgtcatcatgcttaatctctctccagtttcccccagttcccgtttccatctccatcctcccccccgggagcaggagctgcagccaggagtcgagtcggcgtcgtcacgggagatatcagcttcgctatcaccggatccccctctgctccctccgcacctcccatctgcgctctctgttttcttccgcgcaccccggctgttggtgtcccgtccggcagcgttgctggtggctgaatccgagcctttgaggggtctgctgccgccgccgccgccgctgtcaccgctcttgagatctctttattgatctggagagattaaagagggattcttgccttcctactggagcaagagaaaggggagaacgtgtttcttcaggcgtggttgaacagtgaggaccggagaacaatgcgaggttcgggatttaagatgttctggctttaggggcagttcttctgaagcaggggacgggcgattcgaccaccggagctcagatctgattacaaaacgttcagaaaacacaaggcgttctcacaccgcctttcacttcttgcttactttggcaaccactcactgcgactggtctccacctccacctacaccaaagaacacatggcaagccgatctagcgcgatggaaggaggggcggcaatacaaaggaggaatgccgtgaagcggcatctgcagcagcgtcagcaggaggcggatttcctcgacaagaaggtcatcgcgtccacctacttcagcatcggggcgttcctcgtgctcgcctgcctcaccgtctcgctgctgatactgccgctggtgctgcctcccctgccgccgccgccgtcgctgctgttgtggctgccggtctgcctgctcgtcttgctggttgtactggccttcatgccgacagatgtgcgcagcatggcctcctcttacctgtaaatagataaataggtcttggccagattttctgtgttttgcagctgcaggattcgtcctaagacgagtcatgagtgtaatgtgaagcaacttctccagggatagatctcaaccaagtttggtagccatacgaagttattgactggaatttagaacatatagttgtgcacaatttcgaacatatcttgtagtggagagcgggccgagcacgtgcgagtaactccagcagtagcaagtagcaaccaaatcagatttgtgtgctcacctctatttttattgatctaaatttacgctttcagtctaacagtagaattcaaataaaggctctccaatttcttcttatagtctgtgaccatgagacctgtaaggctatgatcgtgcataatactcgtttgcaccgtagacaaagtaaaatttaaaacaggagataagaatgactaaactgctgtaggtagtctaagccgcttctagaatgctccccacattctcagtgtactagttatatgcccgtacgttgtcacggaagttaaaaattggtataaaacatatatacaaaatgagaaacatcactataatatgtaaaatctgcgtgataatttatgtatcattatgttagtaatagaaggcaggtctccacagacgatggcggttccgtatttattggcgaagatacttacaacgggagtcagcaagggacagaaagcgaagactatactaaattcactgtgctgaagctgaagcaggagctcaccaagcacgggtttggtgctcaactactccagttgaaaaatcccaacaagaaggatatcgttgccttatatgaaaagcatgtcgtcggcaagtagttcctcggcaatacttgtatttatgctttatagacttccctctgtagcgttgaaactttaattgacacgatcggattgaagcgaaacaatgcatgtaacttagtttaaatctctggtctgtgtattgcaacaatggtgcagttcattttagcatgcatcgtcggcaagtttgtagttaggatcgtgattgaaatgcttgtctttccaaccccagcacaggttttcttgtaatgctatgacgacaatctattcggattcca

SEQ ID NO: 105394 - DNA, 1298 bp, Zea Mays
catgctgcatcggcatgcagtagcataccagacgatctgcaagctaagcgtagttccagtacagaagccagccatctctgttcattggttgaggaaatggccggacgtaaggcggcgatggtggtggagaagaacaagaaggtggtgctaaggaggcacgtcaccgggttccccacggaagaagacatggagatcacggtggacactatcgagctgggtgtgccagcggggctgacggccgtgctgatcaagaacctctacctgtcctgcgacccctggatgcgcggtcgcatgagcaagcatgaagacggcgccaccgtgccagcctcggactttgtcatcggagaggccatggtgaatttcggtgtgggcaaggtggtcggctcgacgcaccctgagttcaccgccggtgatcttgtctgggggctgagtgggtgggaggagtacaccctcgtcacccagccggaatcgctgcacaagatcaaacacaccgagctgccgctctcctactacacgggagttcttggcatgccagggctcactgcgtacggtgggttcacccatgtcgccaggcccaagaaaggcgacttcgtgtacgtctcggcggcgtcgggcgccgtcggccagatcgtcgggcagctagcaaagatcgccggttgctacgtggtcggcagcgccggctccgacgagaaggtcagcctcctcaagaccaagttcggcttcgacgatgccttcaactacaagtcggagagcgacctcggcgccgcgctgaagcgctgcctccccgatggaatcgatatctacttcgacaacgtgggtggcgcgacgctcgacgccgcgctactgcacatgcgccatggcggcagggtcgccgcctgcgggatgatctcccagtataacctggaggaacgggacggccatggcctacgcaatctgttctacatcatctcaaacgccatcagggtggaggggttcaccgcccttgactggttccacctgtacgcaaggtttgaggaggagatggccaggtacatcaaggaggggaaggtggtggtcgtggaggatgtggctgaggggatcgagagcgcgccggcggctctaatcgggttgttctcggggaaaaatgtaggcaagcagctggttgccattgcgagggcatgaggtgaagcaggaactatcaatgcaaagcgaaatagcagcactaatagtaacagactagtgcattgcgcgcgtgttagaccatttttttacgagcatgttttatttcaaataaagtttacatgaatacgtataacact

SEQ ID NO: 105395 - DNA, 319 bp, Zea Mays
atcgcgccctcctcccctcgatctcttcggctacttcaagtaggtttggtccgatctaaattgtgtgtctgctcaggtttcgggaggatcagcgggctcgtggctagggtccccctgtagagcgaggatgtcaagctcgtcaccgtcgacgaccctttcatcaccacggactacatggtatgcccctcgacctgctgcgttcgagctcaccccgcactgaccctagccaccgtcggcgaggccactccctcctcaagttggtttggtccgatctaaactgcgcgtctgctcaggtttcgggaggatcagcgggctcgtg

SEQ ID NO: 105396 - DNA, 477 bp, Zea Mays
tcaggttgtgcgatgctttgaggatgacgatatagttcatgtcgatggcaaggtcgatcccagatcagacattgatgtcattaacctagagctgatattttcagatcttgaacagatagagaagaggttagataagcttagcaagagcaaaactaaagatacacaagtaaaagtgaaggaacaagcagagaaatcacgattggaaaaaattcagcaagcacttatggaaggaaaacctgcaagatcggtcgatttggctgagcatgagaaacaagctataaaacatctttatctgctaactatgaaacctgtcatttatgttgctaatgtaacagaatcttatcttgctgaacctgatatcaatcctcatgacaaagaggtggctaaacgagcatcagacttgcagtctggtatggttacaataccagctcgggttgaaactgaactcactgaggtaccattggaagagagagtaga

SEQ ID NO: 105397 - DNA, 303 bp, Zea Mays
caaaattaagttatgtgtaagttatggaaaacctaatttacatgtccgatcatacctatattttgaaatgtttagaatggaaattttagttttatacctaacaacatatatctttgctacaaattttgaagcaatgagtgggatttgggtctttggttggcttggttgcccactcggtaatcaccatgaagcagaggatggaccgtgtcatttggagcagcagcaacaacagagtgtgggctatccatgttgtagatgaattatgtgatttacatgcacaattctttgcataaatattgaagg

SEQ ID NO: 105398 - DNA, 116 bp, Zea Mays
tttttttttgcatcatattggcccttcaaacatttttttggaattacatgatttcagcatacatagaataattttttgtttgcgtgaacgaaaccatgagaaattcctccacaaaa

SEQ ID NO: 105399 - DNA, 1009 bp, Zea Mays
actcctcttcccccacctccctcgtcagggctgatttggtggttagggatccctagaggatccatgggggagaaatccccttgcaattcaattttgaatagcaagaggatttcttcccccagggatccccggtcaccaaatcagccctcagtgtcaactcctcctctccgccgccaacagctgcggggagctcgccagtcgccacttcgccagaatggttgcccacacggtggcttctcctcgctttgttcctcctaccggcgtggctgctgatctcggccgcttttgtgtaatttgtttggatcccgcagttgcatcagtgccaggcagtgggtcgcgcgctgccagtccccgctgatgagcaccccaagatctaccgcatggagcttgcgctaccaacgagatctgctccaaatccaagctctggtactatctgaggaagctcaagtctcaagaaggtttaagagcaacggtcagattctcgccatagacgagtgcaggacaggttaccacgacctgcacaaggagtaccgtaataccatcctgaatggtgccatggagcagatgtacaatgagacggcttcctgtttgtcaccctacgtacagatcatcaagacggcaacaatcaactttaagctttgcaagagggacaacaccaagcagttccacaattcaaagttcaagtttcctttggtttactgcaacaagtcaggccacaaaataggtagctgaagaccaccttcaaggctttaaggcccaacttgttcgtgttatccaacttaccctgacaccatcccaaatctgtcaggctgtcagtctggtggtttgctagttcagcgtaatgcaatctacatgcaacctattgtttctaagttctagttggaggtccacgaaagggttcttagtgtgatggcaaaggcttctgagtagcaccctagtgaccggggtctggtgggttgctagttcagggtaactcaatctacatgcaacctattgtttctaagttcta

SEQ ID NO: 105400 - DNA, 1990 bp, Zea Mays
actcctcttcccccacctccctcgtcagggctgatttggtggttagggatccctagaggatccatgggggagaaatccccttgcaattcaattttgaatagcaagaggatttcttcccccagggatccccggtcaccaaatcagccctcagtgtcaactcctcctctccgccgccaacagctgcggggagctcgccagtcgccacttcgccagaatggttgcccacacgttgcatcagtgccaggcagtgggtcgcgcgctgccagtccccgctgatgagcaccccaagatctaccgcatggagcttgcgctaccaacgagatctgctccaaatccaagctctggtactatctgaggaagctcaagtctcaagaaggtttaagagcaacggtcagattctcgccatagacgagatctgagtgtaaccctacaaaaatcaagaactgtggcatctggctgtgttaccagtgcaggacaggttaccacgacctgcacaaggagtaccgtaataccatcctgaatggtgccatggagcagatgtacaatgagacggcttcctgtttgtcaccctacgtacagatcatcaagacggcaacaatcaactttaagctttgcaagagggacaacaccaagcagttccacaattcaaagttcaagtttcctttggtttactgcaacaagtcaggccacaaaataggtagctgaagaccaccttcaaggctttaaggcccaacttgttcgtgttatccaacttaccctgacaccatcccaaatctgtcaggctgtcagtctggtggtttgctagttcagcgtaatgcaatctacatgcaacctattgtttctaagttctagttggaggtccacgaaagggttcttagtgtgatggcaaaggcttctgagtagcaccctagtgaccggggtctggtgggttgctagttcagggtaactcaatctacatgcaacctattgtttctaagttctagttggaggtccacgaaagggctcttagtgtgattgccaaggcttccgagtagcaccctatcgacctgggttatgactcccagtggaagtggatttatgtggactgggtaaaaaaatccctttgtctgaccatacgtcaaagcacgatttaatgcctgtcccatactcacataggcaatgtggttgtcgtgtaaggcgtgggaaagtaggtttaagggttctcttaggcaatgcctgggggcctatcccatcctcatttctttttgttctttaccgtctggtgccttataaattatataatagcatgtacaaatctcatgtgctttaaacttatccaaaaaagagcagacctgttactggagggatctggacgggggataaatggaggcaatggcgacttagtgagacagctctcaccactgcattatgcctgctttaaacttcactcaaatgtcaaaactggtgtttgcttatggctatgtgctgcggtcttccttgtgccaagtcagatgcaacatgatctggtcaaagttgctttttattctgtacccctaattgctttttaatttgcaatgctctttaagattttctagtttggtgtgtttaaattgtgatgttttacatttatcaaactgtttcattactttgtagggcaactttgccaaggttaccaactataaatttggtttcctttttttccctgttgccaataccactgttgctactggatgtttgaactttccagtccatgagctattttatttggtttcatggataatcatccttgccaacattctttactaaaaaacattctacttccaaagctgtataaaacttctagtggtttgaattctcatgtaatcttccatgctgcagcataatctgtttcattttgcgttacattgtgtaatctatttgttttttttttcattagtgacatggttgtaagttttgccttgtattttgaatccatgtgtgtatttagtctctttgagcatgtagtgtgaat

SEQ ID NO: 105401 - DNA, 1978 bp, Zea Mays
actcctcttcccccacctccctcgtcagggctgatttggtggttagggatccctagaggatccatgggggagaaatccccttgcaattcaattttgaatagcaagaggatttcttcccccagggatccccggtcaccaaatcagccctcagtgtcaactcctcctctccgccgccaacagctgcggggagctcgccagtcgccacttcgccagaatgttgcatcagtgccaggcagtgggtcgcgcgctgccagtccccgctgatgagcaccccaagatctaccgcatggagcttgcgctaccaacgagatctgctccaaatccaagctctggtactatctgaggaagctcaagtctcaagaaggtttaagagcaacggtcagattctcgccatagacgagatctgagtgtaaccctacaaaaatcaagaactgtggcatctggctgtgttaccagtgcaggacaggttaccacgacctgcacaaggagtaccgtaataccatcctgaatggtgccatggagcagatgtacaatgagacggcttcctgtttgtcaccctacgtacagatcatcaagacggcaacaatcaactttaagctttgcaagagggacaacaccaagcagttccacaattcaaagttcaagtttcctttggtttactgcaacaagtcaggccacaaaataggtagctgaagaccaccttcaaggctttaaggcccaacttgttcgtgttatccaacttaccctgacaccatcccaaatctgtcaggctgtcagtctggtggtttgctagttcagcgtaatgcaatctacatgcaacctattgtttctaagttctagttggaggtccacgaaagggttcttagtgtgatggcaaaggcttctgagtagcaccctagtgaccggggtctggtgggttgctagttcagggtaactcaatctacatgcaacctattgtttctaagttctagttggaggtccacgaaagggctcttagtgtgattgccaaggcttccgagtagcaccctatcgacctgggttatgactcccagtggaagtggatttatgtggactgggtaaaaaaatccctttgtctgaccatacgtcaaagcacgatttaatgcctgtcccatactcacataggcaatgtggttgtcgtgtaaggcgtgggaaagtaggtttaagggttctcttaggcaatgcctgggggcctatcccatcctcatttctttttgttctttaccgtctggtgccttataaattatataatagcatgtacaaatctcatgtgctttaaacttatccaaaaaagagcagacctgttactggagggatctggacgggggataaatggaggcaatggcgacttagtgagacagctctcaccactgcattatgcctgctttaaacttcactcaaatgtcaaaactggtgtttgcttatggctatgtgctgcggtcttccttgtgccaagtcagatgcaacatgatctggtcaaagttgctttttattctgtacccctaattgctttttaatttgcaatgctctttaagattttctagtttggtgtgtttaaattgtgatgttttacatttatcaaactgtttcattactttgtagggcaactttgccaaggttaccaactataaatttggtttcctttttttccctgttgccaataccactgttgctactggatgtttgaactttccagtccatgagctattttatttggtttcatggataatcatccttgccaacattctttactaaaaaacattctacttccaaagctgtataaaacttctagtggtttgaattctcatgtaatcttccatgctgcagcataatctgtttcattttgcgttacattgtgtaatctatttgttttttttttcattagtgacatggttgtaagttttgccttgtattttgaatccatgtgtgtatttagtctctttgagcatgtagtgtgaat

SEQ ID NO: 105402 - DNA, 184 bp, Zea Mays
aaaattcacaaggtcacgatcgactcgttattgccgctttctcaggattgttgcgtttgccattgtcagtaatgtatttttccttctaggaagtttactgatcgttgttatggtgctctgtttttagattccatggccaaaaataataaatgtggtaaaattaattgtcattgctggatttgaa

SEQ ID NO: 105403 - DNA, 200 bp, Zea Mays
tatattaatggcagagccagatcatgtctttgtgaagcctttgccaaacttatctcttggtgataagccagcggcatttctatttttctacatcaaaccgactgagaatgataagaagttgaggaagttttttccagaagaaaaagggcctatttcaaatattgatcctattggtaattctccggttataattaagaagg

SEQ ID NO: 105404 - DNA, 2004 bp, Zea Mays
ctggccgaccaggaacggagttgcatagccggccgcgcgtccgtccgccccaagacccaagattgcgaggttattgcccccacaaatttctttcccctccgggccttccgtgcaaaccaaatctcaacgaaacattgccgcctccccctgaccgcgccccactccccagacgccgtcgcctagatccatgagacttcccgatcttcctgcggcccgaggatgtcccagagcgacgtcgactacagttgcggatcttgtggataccctctaaacctttcatcttctaaccgaagcacatctgaagtaggctcatataagaagtctctgaagaaaggactgatttcattcatttctgttgatctcagccgatttactcaggtggacgaggtatcttgctttcccctcacctggcgtggttacaggccaaaaactaagcttctgtgccgaatatgtggggcatctattggctacggatacggtgagccggctgttttgtgtagttttgatccagcaagttcatcttcctccagtacatcccagaagtatttaataaagatccaagcactccaaccttcagacaggactcagtaagtgaaatatggaaagagaggaaataggtgtcagcctagagaactccatcagttacctatctgatgattgcttgctttctatatttaacaagctagaaagcgggtcagagaggagtgctttcggtttaacttgcaagaattggttcaaggttcggaaccttggccggaaatcactaacattccattgttcttttaatcctgccatagacaaggagcatgccaagtgcatccccaagatactggctcactcaccttgtctgaaccggatatcccttgctgggctcacagagctacctgactcggctttgagcacgctgagagtgtctggatcatctctaaaatccttttcattgtactgctgttctggcataacagatgatggtctagcacaggtggcgattgggtgccctaatttggtggtggttgaacttcaaagctgcttcaacattacagatgctgccttggaaagtctttcaaaaggctgccgtggtttgaagagtctaaaccttggttcttgcatgggcattacagaccaaggggtttctgcaatcttcagcaattgtccaaacatctgcacgctaatcgttacaggttgcaggcgtctgtccggtgctggattcagaggttgttcaagttcatttcgttaccttgaagccgagtcttgcatgctttctccagacggtttgttggatatagctagtggcagtggactcaagtatctgaacttgcagaagttaagaagctccactggtctggatggcctgggtaaccttgcgctcgctaaaagcctctgcattctgaatctcaggatgtgtcgctacctcacagacgattccgtggcagcaatagccagtgggtgcccgttgctcgaggagtggaaccttgctgtttgccatggggtccatctacctggctggtctgcgatcgggctgtactgcagtaagctaagagtgctgcatgtgaaccgctgccggcacatctgcgaccagagcttgctggccctcggcaatggctgtccgcgccttgaagctgtgcatatcaatggctgtgccaaggtcaccaacaatggcctggccttgtttaccctttccaggccccacgtgaacctaagggtgtatgaagttatgtccattggcccttccattgagaatttgttccggttgcattgaggtgaaattgttagttaggttttcgaagtttgggattaaaagtataataccctgtccattacaggtgattggtttcttcagtcaattatgcacagtgtgtttgctctggtgcttactgtaagataacaatagcgaatatgttgttagttaagctgctgttttgtcaaggccatatttgtcaatccttcgttcacaaagttaggtagcattaatagagtttgacaaacattttatcagttgccaag

SEQ ID NO: 105405 - DNA, 1477 bp, Zea Mays
ctcatgctgatccaggctaaacggtccagtcaggtgagctcagcggctcagcccatgtaggcagtcagcctctcaggttgggagttgggactcaggagtttcaccagattaagcatatgctgctgattcgccggtgatcccctccctccttcgccgtcgccgtcgccgtcgcaccagcttggccgccatctctggatcgccgctggactcgcttccctgacccagaagctacgatgaattacatcatcggcgcattcaagccgccctgcgacatcttcgtcacattcgccgatgagagaacccggaagcaggtccagatcaagaaggacaacgggaagactgtcatggtgccggccttccagacccttgagaccatagccggagaggtgtcgatcgctccagtcccaggtaaaaggcttgaacacacgggtgtgaagattgagctgctgggtcagatagagctgtattttgacagaggcaacttctacgacttcacttcaatagtgcgtgaattagatgtccctggtgaaatatatgaaagaaagacttatccatttgagttttctactgttgaaatgccatatgagtcatataatgggacaaatgtcagattgaggtacatactgaaagtaacaattggcagaaattatgttggcagcattgtggaatcgcgggacttctgtgtaagaaactactctctagttcccacaatcaacaacagcatcaagatggaagttggcattgaagattgcttgcatattgaatttgagtacagcaaaagcaagtatcatctcaaagatgtcatcataggaaagatatattttcttctggtcagaataaagataaagaacatggagcttgagattcgtcggcgtgaatctacagggtctggtcctaacacatacgttgagactgagacactagcgaaatttgagcttatggatggcgccccagttagaggagaatcgattccggtgagactattcttgacgccatatgagcttaccccaactcatcgcaacataaacaacaagtttagtgtcaagtactacctaaacctagtcattgttgatgaggaagaccggaggtatttcaagcaacatgagatcacaatgtatcgccttctagaaaccccacaatcttcataggctcctttccttgctttctatgagttggaaccagagctagaggcattttggtttaaccttgcacgaggacgccaaagttggtggccttacttttggtcccgccttgtacataactctcccgatggagcaatgcagttcttatgtaagagacataaaaatgcagttctaccatatggtgttgctttgttactgcctttgtttgaaactactctggataaagtcatggaaatgtttgtatcaacgtgccttcaccttgtttctttcttgtccttgctggacttgtaaagctttggatgattctccatgtgtatgatgatgatatttgcgtc

SEQ ID NO: 105406 - DNA, 1687 bp, Zea Mays
ctcatgctgatccaggctaaacggtccagtcaggtgagctcagcggctcagcccatgtaggcagtcagcctctcaggttgggagttgggactcaggagtttcaccagattaagcatatgctgctgattcgccggtgatcccctccctccttcgccgtcgccgtcgccgtcgcaccagcttggccgccatctctggatcgccgctggactcgcttccctgacccagaagctacgatgaattacatcatcggcgcattcaagccgccctgcgacatcttcgtcacattcgccgatgagagaacccggaagcaggtccagatcaagaaggacaacgggaagactgtcatggtgccggccttccagacccttgagaccatagccggagaggtgtcgatcgctccagtcccaggtaaaaggcttgaacacacgggtgtgaagattgagctgctgggtcagatagagctgtattttgacagaggcaacttctacgacttcacttcaatagtgcgtgaattagatgtccctggtgaaatatatgaaagaaagacttatccatttgagttttctactgttgaaatgccatatgagtcatataatgggacaaatgtcagattgaggtacatactgaaagtaacaattggcagaaattatgttggcagcattgtggaatcgcgggacttctgtgtaagaaactactctctagttcccacaatcaacaacagcatcaagatggaagttggcattgaagattgcttgcatattgaatttgagtacagcaaaagcaagtatcatctcaaagatgtcatcataggaaagatatattttcttctggtcagaataaagataaagaacatggagcttgagattcgtcggcgtgaatctacagggtctggtcctaacacatacgttgagactgagacactagcgaaatttgagcttatggatggcgccccagttagaggagaatcgattccggtgagactattcttgacgccatatgagcttaccccaactcatcgcaacataaacaacaagtttagtgtcaagtactacctaaacctagtcattgttgatgaggaagaccggaggtatttcaagcaacatgagatcacaatgtatcgccttctagaaaccccacaatcttcataggctcctttccttgctttctatgagttggaaccagagctagaggcattttggtttaaccttgcacgaggacgccaaagttggtggccttacttttggtcccgccttgtacataactctcccgatggagcaatgcagttcttatgtaagagacataaaaatgcagttctaccatatggtgttgctttgttactgcctttgtttgaaactactctggataaagtcatggaaatgtttgtatcaaccatgaacacaacaaaaatgtcggatgccttttacaatgccatattttccatcgcttcccctatttttgaaatcgctttccaagcgcttgcaaccactggtcagaataggttcatcgcgtattttctagggtttcgtatttggtcgatacgagtgaaaatccggtggaggcgtggttacagagtcttgaagatcatcagccgcgacgaagtggggtttgcgattcgctatcaggtagggttttgcttatcggtaccaaaatcgttgtatgtaaatcgatctggacctcgatccctttg

SEQ ID NO: 105407 - DNA, 1604 bp, Zea Mays
caggttgggagttgggactcaggagtttcaccagattaagcatatgctgctgattcgccggtgatcccctccctccttcgccgtcgccgtcgccgtcgcaccagcttggccgccatctctggatcgccgctggactcgcttccctgacccagaagctacgatgaattacatcatcggcgcattcaagccgccctgcgacatcttcgtcacattcgccgatgagagaacccggaagcaggtccagatcaagaaggacaacgggaagactgtcatggtgccggccttccagacccttgagaccatagccggagaggtgtcgatcgctccagtcccaggtaaaaggcttgaacacacgggtgtgaagattgagctgctgggtcagatagagctgtattttgacagaggcaacttctacgacttcacttcaatagtgcgtgaattagatgtccctggtgaaatatatgaaagaaagacttatccatttgagttttctactgttgaaatgccatatgagtcatataatgggacaaatgtcagattgaggtacatactgaaagtaacaattggcagaaattatgttggcagcattgtggaatcgcgggacttctgtgtaagaaactactctctagttcccacaatcaacaacagcatcaagatggaagttggcattgaagattgcttgcatattgaatttgagtacagcaaaagcaagtatcatctcaaagatgtcatcataggaaagatatattttcttctggtcagaataaagataaagaacatggagcttgagattcgtcggcgtgaatctacagggtctggtcctaacacatacgttgagactgagacactagcgaaatttgagcttatggatggcgccccagttagaggtattgctcatatgccccctccccttcttgtatttttaaagacatgcataggtttcaagcaaacttgctgtcacttgatccttgttaaatggtaacaggtaagcgttattttttggcatttgagaacactacgttgaattttctatgtaaatttctcttccactcagtaattgctaagtttatcaacaatgattgcgcaggagaatcgattccggtgagactattcttgacgccatatgagcttaccccaactcatcgcaacataaacaacaagtttagtgtcaagtactacctaaacctagtcattgttgatgaggaagaccggaggtatttcaagcaacatgagatcacaatgtatcgccttctagaaaccccacaatcttcataggctcctttccttgctttctatgagttggaaccagagctagaggcattttggtttaaccttgcacgaggacgccaaagttggtggccttacttttggtcccgccttgtacataactctcccgatggagcaatgcagttcttatgtaagagacataaaaatgcagttctaccatatggtgttgctttgttactgcctttgtttgaaactactctggataaagtcatggaaatgtttgtatcaacgtgccttcaccttgtttctttcttgtccttgctggacttgtaaagctttggatgattctccatgtgtatgatgatgatatttgcgtc

SEQ ID NO: 105408 - DNA, 623 bp, Zea Mays
ccagattaagcatatgctgctgattcgccggtgatcccctccctccttcgccgtcgccgtcgccgtcgcaccagcttggccgccatctctggatcgccgctggactcgcttccctgacccagaagctacgatgaattacatcatcggcgcattcaagccgccctgcgacatcttcgtcacattcgccgatgagagaacccggaagcaggtccagatcaagaaggacaacgggaagactgtcatggtgccggccttccagacccttgagaccatagccggagaggtgtcgatcgctccagtcccaggtaaaaggcttgaacacacgggtgtgaagattgagctgctgggtcagatagagctgtattttgacagaggcaacttctacgacttcacttcaatagtgcgtgaattagatgtccctggtgaaatatatgaaagaaagacttatccatttgagttttctactgttgaaatgccatatgagtcatataatgggacaaatgtcagattgaggtacatactgaaagtaacaattggcagaaattatgttggcagcattgtggaatcgcgggacttctgtgtaagtgactaagtggggacttcatctcattgatctattattt

SEQ ID NO: 105409 - DNA, 1315 bp, Zea Mays
atctttggcacctttacggcgcgtggagccttagaggttagatcccctctgatttgcactctttcctgtcccagaattacatcatcggcgcattcaagccgccctgcgacatcttcgtcacattcgccgatgagagaacccggaagcaggtccagatcaagaaggacaacgggaagactgtcatggtgccggccttccagacccttgagaccatagccggagaggtgtcgatcgctccagtcccaggtaaaaggcttgaacacacgggtgtgaagattgagctgctgggtcagatagagctgtattttgacagaggcaacttctacgacttcacttcaatagtgcgtgaattagatgtccctggtgaaatatatgaaagaaagacttatccatttgagttttctactgttgaaatgccatatgagtcatataatgggacaaatgtcagattgaggtacatactgaaagtaacaattggcagaaattatgttggcagcattgtggaatcgcgggacttctgtgtaagaaactactctctagttcccacaatcaacaacagcatcaagatggaagttggcattgaagattgcttgcatattgaatttgagtacagcaaaagcaagtatcatctcaaagatgtcatcataggaaagatatattttcttctggtcagaataaagataaagaacatggagcttgagattcgtcggcgtgaatctacagggtctggtcctaacacatacgttgagactgagacactagcgaaatttgagcttatggatggcgccccagttagaggagaatcgattccggtgagactattcttgacgccatatgagcttaccccaactcatcgcaacataaacaacaagtttagtgtcaagtactacctaaacctagtcattgttgatgaggaagaccggaggtatttcaagcaacatgagatcacaatgtatcgccttctagaaaccccacaatcttcataggctcctttccttgctttctatgagttggaaccagagctagaggcattttggtttaaccttgcacgaggacgccaaagttggtggccttacttttggtcccgccttgtacataactctcccgatggagcaatgcagttcttatgtaagagacataaaaatgcagttctaccatatggtgttgctttgttactgcctttgtttgaaactactctggataaagtcatggaaatgtttgtatcaacgtgccttcaccttgtttctttcttgtccttgctggacttgtaaagctttggatgattctccatgtgtatgatgatgatatttgcgtc

SEQ ID NO: 105410 - DNA, 351 bp, Zea Mays
tattcttctagtgtttcacgagaggttgtgttagatccaaaagcttcataagagttgcctgccagggacaacatcagcatcagttctattaagttgcatgcaccaactagttcaactcaaaaggaggtggacaattcacttatattatattctaacacccccctcacatcgagcctctttcgggtcactggcatggaatataggagcgagcaacaattattttatttaattgtactaactaggattcgaactcatgacctctggctccgataccatattaagttgcatgcaccaactagttcaactcaaaagcttaagctgatgggaggaggtggacaatttacttatatt

SEQ ID NO: 105411 - DNA, 2328 bp, Zea Mays
cagtcgtgggtgtttacccatcttgtagccgcagctgcctttctggctttcttggcccctcaaaatcattcaaccaatcccactaccaccctcaccgtgtacccagttcgtgcgcgatcagctgctacccagcgctctgggatcgggaaaaggaggctcttttgtggttcctgcgggcatatctcgcggagattcggtcagatttggatttagggtttaggaggtggtggtggtgatcggtttgtaccgccaggtgaaatgtcggcggctgtggcgtgcgcggagaaggcgaccaacgacatgctgattggcccggactgggcgatcaacatcgaactctgcgacatcatcaacatagatcccggagaagcaaaggatacactcaagctcctcaagaaacgtcttggaagcgagaattcaaaagtgcaaattctaacactatatgtgctagagactctaagcaaaaattgtggggatattgttcatcaacagatagttgagcgtgacatattgagtgaaatgattaagatagtgaagaaaaagccagacttaaacgtccgagagaagatattgagtttgattgacacatggcaagtggtttttggaggtccgtccggaaaatatcgacaatatcatgcagcttacgaagaactcagggctgctggtgttgattttccacctcgtgaggaaaattcactcccgttgtttacaccacctcaaactcaaccattaagacattcacatctatatccacctcctggtcaaagctatgaagatgctgccatacaagcttctcttcaatctgcccctcctgcacctgccctcagtctgagcgagatccaaagtgctcgagggattgtggatgtcttagatgaaatgttaaatgctctagaccaccggcatcctgagggtgtaagggaggaggtcatcgttgaccttgttggccaatgccgatcttatcaatctcgtgtcatggatcttgttaacagtactggcgatgagagccttttatttcaggcactaggactaaatgatgagttacagcgtgttgttcagcgtcatgatgacatagcgaaggggatcctccctcctggtaccggagcacctgtacctgcttctgcaaatgtcaaccaagggactaccccacctaggcccacggcggtttcattttctccactcctgaatgtacacgaggacgatgaaccggaagacgagttcgtcgtgcttttccgtaggcctgcaagggatggcacagtagcacggaacaatctgccttatgcacgaagaaatgaaaggccgtaccgaagcccacttcttcctccaccaccagcatctaagaggcctgtttacaccgaggcaagcagtatcgactatcttagtggcggctcctacaagtcgtcagaaaaggttccagatgatttcatcaacccaactgctccagctaatgtaactacatcaccccattcgaagccagaagcatatccgccaccgagttacagtagcaggccagacagtgtgtccgacgacttcataaacccaaccgcgcctagcttttctgcgccttctcgccctacagacgaggagccaacccgttcgcctgtgaagcggcaggagagtatacccgacgatgacttcataaacccaactgctcttcctggtttttcgtcgtcttcagctactaaggagttcagcgaagatcttccaagggctccatgggaagcacaggctgccgcagcaggttccctgccaccgcctccggcgaggcatggtcagagacagcagtacttggagcaaaacgtgtattctggtgggagcaacggaggtggatatgatgaactgttgacacggactgaaaacctctccctgaaccctgagaagaatgcttcacggccgacagcatcctgccaggctaaacccgaggactcactcttcaaggacctggtcgacttcgcgaagaccaagccttcgtctccgtcgaaatcggccaacagccgcaggacccgctaaacggttatccgtttcgcaggttagcagctttagattgcataccccatgaaataagggcgttggaaaattatttggttccgtttagaagcagatgtcagaaacaatacttggtcattgtcctgggcgtgtgtgtggtgtcagttagctgctcctaaatatgtgtcattggcttccatttgtttgtttgtttttttcaatagctgagtatgtatatattacccgattcggcagcaacattcatagttgagtttgcaacttgagtgttgcctattttcagtgtggataaattaggaggctatggtcaaaccttcattttttttt

SEQ ID NO: 105412 - DNA, 1046 bp, Zea Mays
atgcagatgagcatcctccaaatcatcctgcatatcgatgccatcatcatactcatcgtctggatcaacctccttcacccctgttcctgtggctcccatggctgcagcctcatactgcgccagctccttcctgccaccctcattgtacaaggtccctgctttcccaccttcagacgcctctggaacatccttagcgccactgccagtctctagagtcaatcctttatcctcgccacctgcctcagaggtggtacctttatcgccactgccaccagcatctgtggaggccccagttccacctgagttcttctccttctcgtcctcagtgtagtcctcgtcgcggcgcctatcgtcccggtcccagtacctggagtctcgcgcgctccggccacctccgccttgcccgaacttgagcttcttccagcttttgctctggttccactctggcaacgcctccccggcgctcgaatcttggctgacctctacgaaatcacacaagcgacaagaaccaagcggagaaattttcaaatcaagcgggcaatgggagcttcaaccaaacatgaaactggatcgagaactctcggacggtaccgaatcgcgccacaaaagagcccagacgcgccaaaatgcgatctttttataggagagaaaagcgagaggaggaaggccaacgggcgcgaggaacccaacctgcagaactgcgtgaaatgcggcgcgagaggaggaagacggcggcaaggaggaggagcgcggcggcaacggcagcggcaggcgatcggcggcgcggcgcgggcttcccggggcggcggatccgggaggatggcttggcagaggcgtggtgaggccggtgccagtccgggagcgcctggtgctgatggccgcgggagtcggagaagccaccgccgtactgctgcctgtactgcgccattagaggcccccgcagcggaggtggcggtcgacggccaccagcaccatgaacgcagaggagggggaacgggaagcaaggtcttccttgtaattatgacggggattggtcggagagggtt

SEQ ID NO: 105413 - DNA, 2023 bp, Zea Mays
cgcagcagcagcggcacctccggacgaaatctgacccgggccaccgtcggcactgctctgacatggcgatccgctccaaggcctggatctcgctgctgctagcgctcgccgcggtgctctccgcccgggcggaggagcccgccgcggcggaggctgaggccgtgctcaccctcgacgtcgacagcttcgacgaggccgtcgccaagcaccccttcatggtcgtcgagttctacgccccatggtgtggacattgtaagaaccttgctccagagtacgagaatgcggccaaggaacttagcaagcatgacccaccgattgttctcgctaaggttgatgctaacgaggagaagaacaggccgcttgctaccaagtacgagatacaagggttcccaaccctcaagatcttcaggaaccaggggaagaacattcaggaatacaagggccctagggaggctgatggcattgtggattacttgaagaagcaggttggccctgcgtccaaggagatcaagtcagcagaaggtgtggccgcccattttgatgacaagaagatctatatcgttggaatcttcaaagaattcagtggcactgaatttacaaacttcatggagcttgctgagaagctgagttctgattatgactttggacacactttgcacgcaaaccacctcccacgtggtgatgcatctgtggaggggccattgatcaggctgctgaagccttttgatgaccttgttgttgacagcaaggattttgatgttgctgctctggagaagtttattgatgctagcagcacccctagagttgtcacttttgacaataatcctgacaaccacccatacctcatgaagttcttccaaagctcagctcccaaggctatgctgtttttgaacttctccacgggaccattggattctttcaagtctgtttactatgctgccgctgaggagttcaaggacaaggaaatcaagttccttattggtgacattgaagccagccagggtgccttccagtactttggtctgaaagaggaccagacaccccttatcctcattcaggatggtgattccaagaagttcttgaaggatcacattgaggctgaccagattgtctcttggttgaaggagtactttgatggcaaattgacgccgttcaagaagtctgagcctattcctgaggtcaacaatgagcctgttaaggttgttgtggctgacaacatccacgatgtggtcttcaagtctggaaaaaatgttcttattgaattctatgccccctggtgtgggcactgcaagaagctggcgcccatcttggaagaggcagccaccactcttctaagtgacgaggaagttgtgattgctaagatggacgcgaccgccaatgacgtgcccagtgagttcgaggtccaaggctacccaaccatgtacttcgtgactcccagcgggaaggtcacctcctacgacagtggcaggacggcggatgacatcgtcgacttcatcaacaagagcaaggagaccgccagcgccgtccaggcgacggcgacggcatctgggaaggcagctgacgcagccgagaagaccgagcccgtcaaggacgagctgtaaacagccttggcgtggacgctatgggtaatgggacagaggaggggggacaaaagctggcgccaacgtactcgccaagcctccggctttagtttttgcgagggaagagggcaaagtaagagaatgggagggaggggtctgtggcgtgttttgctctggtgcggcatgcctgtgtatcccattgagattctgtacaattgcaaacagagagcggtacctttttagttaattatcagagatgactgtagaaagaaactgattgtggtgaggttgagtggacgaataaatggcgagtctgcctcattggatgcatcatgaaacgggcacttttgaggagggatggtaatggggaaatttccgtggagaatagcttttagcgtgtgtttggttagcgggttgatgcgggtttgaatgggttcaatcca

SEQ ID NO: 105414 - DNA, 1871 bp, Zea Mays
aagtctctacgcggtatatagaagtccgggccattaaagttcccacttattcaccttccctctttttcctcccgcttccgaccgctcctcttcttctactccttccattcacactccacatgccgacgctggcggcggcggcgccggtggcggcggtggagtcgtagccgcctgaatcagcggtcttgtagtgacgccggaaccaggggcgcgagggggaaggagatggcggcgccggcttccgcggcggccgggcgcggcggggccatgtcgtcggacaacgccaagggcctggtcctcgcggtgtcgtcgagcgccttcattggcgccagcttcatcgtcaagaagatggggctcaggagggccgccgactccggcgtccgcgcgggatatggcgggttttcttatttagtggagcctctttggtggataggcatgatttctatgattgtaggtgaaattgctaattttgctgcttatgcattcgctcctgctattcttgtcactcctcttggtgcactcagtataatcatcagcgctgcacttgcacatgccattctacaggagaaactgcacacatttggtatacttggttgtgttctctgtgttgttggatctatcacaattgtgctccatgccccacaagagcgtgacattgattctgtaaaggaagtttgggatcttgcaactgaaccagctttcctttgctatgcggctatagtagttgcagcagccttagtgcttatatattttgttgtccctcatcatggacaaacaaacataatggtgtacattggagtatgttctcttctgggatcactcacggttatgagtgtaagagctcttggaattgccttgaagctaacattgtcaggaacaaaccaattattctatcctcagacttgggcctttgcactgattgtagctacctgtgtgagcacccagattaactatctaaataaggcattggatacatttaatacagcagtagtctcaccaatatattatgtgatgtttacttcactaacaattatagccagtgtgataatgttcaaggattgggaccatcaaaatccaacacaaattgttacagagatgtgtggcttcatgactatcctatctgggacgtttcttcttcacaagacaaaagatatgactgatagtcctggacaatctttgttgacacgacggccaaagcatgctagtcagaatgcgtttgcaattgaagtgatgccactaaaatgtcaagattatatagatgacgagaccttgacgttatcacttcccaaggttgaaaatggttacctaaaggaagagtatcttcttagatacaaggactcgagtattgtctgatagataattcttcgccaacatttgacgggaagctcttgagaatcattctgcttccagacatgattgattgatgtagaactggagttggcagttttacctcaacctggccttggatagattgatattacagattgtaagttgtcaactgtggtttgtctacatctggatgatgttttgagggaaggagcatgccagaaggatgccacattgaggccaattaagtgctagtcatctaggaattgtggttccggaaaagaatttgaagtgtacttagatacaatggtgtcaccaactatactcttttcccccctcttttctctctcattttagaacgccatgtgatagctgcaatgtgatcttatctgattcataggacgacgccatatagaaatgtcaagcatcgttttttcctgtaattacatcaaattggccagttgtcattgtgtatacttagtctatgtaaagtatatcaattcatactttatgacaagggacccttaggataaactcttgatcat

SEQ ID NO: 105415 - DNA, 320 bp, Zea Mays
atgccgggcaagcaggaggagggcggccaaggcccgccgggcagcagcgtgtgcttgtggctggtgacggtgctgctcctcctctccctgctcgccggcggcgcgtgcctcgcggcctacgtcctgctgccgccgcaggagacgccggcctggctccccgccgtcggcctggcgctcgtcgcgctcccgtgggcgttctggatcctcacttgcgcgtaccggtgcgccgccgcgcgggccgccgagcgcaggacgatggccgtggcgccgtctcctggtagcatgtgctcgcgctccggctcgtgagcagtaaccgtaag

SEQ ID NO: 105416 - DNA, 598 bp, Zea Mays
gatgcactgttctgttgcagtgctcagggatacgaggaggggaaggaacaagatgagttccaagaaagcaacaaaccggggtttggtacttgtccttctgctcgttgttttgcctgcgctttcggtcggcacgcacgcaggagaaagagagttgccagatgaaaaggatcacaagggccattccactgttgcttctggaaaggggggaacggcttcaggagatatggtgaagacgaatgactatgggcgctacgatccaactccggcgttctccaagcctcgctccaagcttatacccaactaattacactcacacttgctgcatctacatgcttactatatggatggcatgcatagaaatatagtcctgtacagaatataatgctcacttcgtttttttttgtcgcgttctagttcaaaaataaactaatcggcgataaatatttaagaacggaggtagtatctagtatctagccttgacgcctctactgaatgtacctctactgaatgtactcggcttcagttcttaagtttggtgtgttggatctctgtttcgtcttccttttattttctaacaacaccaggttaagaatcctta

SEQ ID NO: 105417 - DNA, 1389 bp, Zea Mays
atggctcacgttgccggtgacatcgccgttctggtgctctttctctcgttgtcgtgccaaagcacggtgtcggccggtgccgccgtgcttggccgtaaggcaggagggtcatctccggcgacgacgcacgagggtacgaatccagccgggacgggcactggcacggcacagtacgcggtcattttcgacggcggcagcacggggagccgcgtgcacgtcttcaagttcgacaagcagttggacctcgtcaagatcggcgacgatatccagttcttcgcgcaggtaaagccggggctcagcgagtacgctggcgaaccccaagaggctgccaggtccatcgcccccctcctggagaaagctcaaggcgccgtccctgcgtcgctgcagagcacaactccccttaaactcggcgccactgccgggctacggctgattggagatgagaaatcggaagagattcttgaagcgatccgtgatcttgtgaagagcaagagcgaattcgaatacaacccaaactggatcactgtgcttgaggggtctcaggagggatcttacctatgggtcgccctgaactacctgctgggcaagctaggtggggactactcagacacggtaggcgtggtggacctcggaggtgggtcggtgcagatggcctatgccatctctgacgacgcgtccgcgaacgctcctgcggtgccggagggacaggacccttacgttaccaaggaacacctcaaagggaaacactacaatctctacgtgcacagctacttgcactacgggcttctagccgctcgcgcagagattctgaaggcgaacaacgggccattcagtccctgcattctgcgtgggttcagtggtacgtacacctacaacggcgaggaatacgaggcggcggcggcaccagaaggcgcgtcctacgaaaagtgcagggacggcgcggtggcggcgctgaacctgggcgcgcgctgcgaggcgaaaaactgcaccttcaacggcgtgtggaacggcggcggcggcgccggccaggccgacctctacgtggcgtcctacttctacgacagggcctcgcaggtcgggatcatcggcggcgacgcgcccaacgggaggagcaccccggccgcgttcgccgacgccgcgctcaaggtctgctcgctgagcgttgccgatgccgaggccgcgttccccgatgcctgggacgccgagtacctctgcatggaccttgtgtacgagtacacgctgctcgtcgacggcttcggtttggagccgaccaaggagttcacgctggtgacaaaggtgaagtacggagaatactacgtcgacgcagcatggccgctaggcgatgcgatagaaaccttgtcgtcccagaagctgaaccaaatcgcgtga

SEQ ID NO: 105418 - DNA, 3394 bp, Zea Mays
acgaaacgagatctatccaggagagagacaactaggacacacacaaactgcaataggagagagaagctgtagagagagaaacaacaaggagagagggggaacataaccacggccggagatgccaaaaatagatcttcccggcctaggcaagaaatcaaaatcctcagccaacaatccgtcgcatttgcgccccctgtacggcgaatccgccatgaggagggcgaggattctcctcctccccctcctgctcctcctcgccgtcgccggccccgccgccgcggcgacggccatgaccgcggacgcgggcatcatcttggacctcgccaagtcgctgactaacccgccgccgtcctggaccggcaccgacgtctgcggcggcgtctccttcagcggcatcacctgcgacggcgccggccgcgtcaccggcatcaacctcgtcaagctgcatttatccggcaccctttcctcgtccctcgccaacctcacctccctccagtcgctgcagctccaaggtaatgtgctggagggcgacgtgccctcactggcccgaatgggttccctcgagaccctcgttctcgacggcaacgccttctccgccctgccgccggacttcctcgagggtctcccctcgctgctcaaactcagcatggacaacctccctctcaatccatggagtatccccgacgccatcgcggggtgcgccatgctgcagaccttctcggcttccaacgcctctgtctctggttccttaccggcggttcttgccaacctgacatcgctacagacgctgcggctgtcgtacaataacctcaccggggtcctgccggtggggttagaggcgttgggtgcgctggagacactgcagctaaacaaccagaagtcggatggcaagctgtcagggccaattgacgtcgtggcgaagttgccgagcttgaagacactgtggcttcagtccaacttgttcaccggcccgatcccagagtttgacccaaactcacagctggagatcttcaatgtcagggacaacaagctcaccggaccggtgccaccctctctttcagggatcgcaagccttcaggatgtgtcgctgtccaataattttcttcaagggcccaaaccaaactttacagctaagactgtggatttgaaatcagggaacgggttctgtcgagaagactctgggccatgcgatccgctggtgaccactctgcttgaggtggctttaggttttggatacccattgcagcttgcgaagtgggcaggaaacaacccgtgcgatccatggcctggtatttcctgcatcaaaatggatgtgactcaaatcaaattgcctcgccagaacttgtcgggaattatttcaccggcttttgcaagcctgaataggcttcaacggttggatctgtctaacaatcaactcaccggggtgataccagatgctttgacgacactggaaaccctcaaatatcttgatgtctcaaataatcgccttactggacaagtgcctgagtttaagcagccgaatataaagttgatgactgcaggcaaccggtttggggaatcaggtggtgatagtggagggggtggctccaatgatgggtcctcatcttcaaatcctacaggttcacataactcaaagtcaaatgtgggaatgatcattggaattcttctatctgtcattcttcttgtcatttgcattgggcttttcctacatcatcgaaggaaaaagaatgtggacaagttcagtcctgtcccaacaaagagcccttctggtgaatcggagatgatgaagattcagatagttgggacaaatgggcatagcagcataagtggttctgtcccaaccgagctttacagtcattcaagtgttgacagcacaaacattgctgacctcttcgagtcccatgggatgcagttaccgatgagtgtgctactaaaggccacaaacaactttgatgaggactacatcttaggtagagggggctttggggtggtttataaggggacactcaatggcaagctcgttgctgtgaagaggtgcgacagtggcactatgggaactaaagggctgcaagaattcatggctgagattgacgttcttaggaaggtgagacatcgacacttggttgcattgcttgggtactgcacccatggcaatgagaggctcttggtctatgaatatatgtcgggaggaacactgcgcgagcacttgtgtgatcttcagcagagtggttatactcctcttacatggacacaaaggatgacaatagctttggatgttgcccgggggatagaatatttgcatggtttggcgcaggagactttcatccatagggatctgaagccttccaacatattgttggatcaagacttaagagccaaggtttcggactttggattggtcaagcttgcgaaagatacagataagtccatgatgacaagagtagcaggaacatttgggtaccttgcacctgaatatgccactacaggaaaggtcactacaaaagtagatgtgtatgcatacggtgtgatactaatggagatgattacgggaaggaaagtactcgatgactcattacccgaggatgaaacacatcttgtaacgatcttccggaaaaatatgcttgacagagagaagttcaggaagtttttggaccccgccctggagctcagtgctgaatcttggaacagcttgctggaggtggctgatcttgctcgccattgcacggcgcgggaaccacaccagcggccagacatgtgccactgtgtgaacaggctttctagcctagtggatcagtggaagccaacgaatgttattgatgacgacgaggagggtgggacaagcgagatgggtcttcaccaacagctagagagatggagatgcggtgatttcactatatcagattcggagtcattcagcacatacaacacatcaaggaagtaccattgacaattagtgagtcctttcctttgtcatatataaatgaggaaccatgatctggggcatcaagaggctctctacagctatgtagatcacgaacagctttgaagggcaacgtgccagcctgtcaggtattgtagttaccccactgaaaacaaggttggttacttgataatcagcatatacattaatggctgctaacctggtttaaacttgagggaagtcgtgatacttgaaacttgtgctgtatctagcttatccagtttgtatcactgcctcactgggggcattgagaaacagtttgttaagagggaaaagacacgaaagaaaccatacttccgaaagtgcattctggtggttagttttttaggccgcagagggttgctttttgtgtacaaccaaccttgatttattattacttactccctccgtaacaaaataaaattcgttttagct

SEQ ID NO: 105419 - DNA, 474 bp, Zea Mays
atggatcttttattttatgagctaaaatggcttcgagccgagccaaggttaccatggagactctacttgttctgcagcaaggacaccgctgccttatcagtgaaccaggtgaattctccatcttgtagcacagccatctcaacaggcagcaggtctgacgaggtttgcttgtctgagagcgccttctgcaccgctgccgcctttccagctccagtcaccaccatcgcaacgtatgcggatgagttgattactggaaacgtgaatgtaattctctctggaggtggctttggagaatccttaatgtatgtgacccacctctctttctcgttaacaagagggtggccagggaagagagacgcaatgtggccatcaggtcccattcccagaagctggagatcaaacctgggaaatccagtcgccgctgacatagaaatcacaccgttcttgacaagctgcttcaggcacgcttcgtag

SEQ ID NO: 105420 - DNA, 399 bp, Zea Mays
atgacgcgagtgaacggcgcggggaccttgggggaggtggagagctgctcaggatcctcgggggtagtagtggagggtgcggcgggaggggggcgccaggggaagcggaagcggtggaggcagcggagcgagacgtggaataacgcctcggtgaaggagggcaaaagggcgacgaggaggagcggggactggcaggcgagggccccgcgggaggcgcggcaggagctcgagggaggtcaggcgggaggtgatgggatggggtccatctgggccgagctaaataggccgacaaacggtacgatccgtagtggtttgatactgcacggtagggcgattcatattgagcctatttggaatgtttctaactctggtcgaagctggtccactctaagagactaa

SEQ ID NO: 105421 - DNA, 1867 bp, Zea Mays
ctcgccgttcggcttggcagtcgcagacggcagatcccaaaatcgaacaaccaccacctccccctccgccgaccggccggccggcttcgctcgccatggccgccaccgcttccttcctctcccacctcctcctcgcccccaagcgcagacccaaaactcagccaaacccctcgcatcttccctcccagcgcatcacggaccggcttccctgccgtgggcggcgctcctccgtcgcggtctccgccgcggcatccgacctcctctctcccgcgccctccctcaagtcccgcctcgccgccggagacaccctgtacggtctgttcctcctctccttctcccctaccctcgccgagctcgccgccctcgccggctacgactacgtcgtcgtcgacatggagcacgggccgggcgggatccccgaggcgctcgcctgccttcgcgcgctggacgccgcgcgcacccccgccgtgctccgcctcccggaggccagcgccgtctgggccaagaaggcgctggacctcggccccgcgggcctcatgctccccgccatcgagtcccccgaggccgccgcggaggcggtctcccactgccgctacccgccgcgcggggtccgcggcgccgcacaccccatcgtccgcgcctccgcctacggcttcgacgactcctacctctcccgctgcgaggacgataccctcgtcatctgccaggtcgagaccgccaccgcgatcgcggagatcgacgccatcgccgccgtcgacggcgtggacgtcgtgcagatgggcccgctcgacctgtcggctagcatgggatacctgtgggaccccgggaacaggaaggtccgggctacgctgagggaggccgagaggaaggtgctggaggccaagaagaagaagaaggcggcggcagcagcctcgggtggcaatgctgcttacctgggcgggtttgcaatgcagaatgacccgccggagcagctcaaattgaggggttaccatatggtagctggcgcagtagacattgctatgttccggaaggcggcattggatgatgtcaggcggttccgagaggcagtgatggagatcggcgaggaggatgatgaggatgaggttgagaaatgtgagaaggaaaatgacgggtactggagtgagtgagtgaacagtgtagaacagagctgagctgaagcatggagagaagtggctatgggttttgttctggtgatatgttttttgttctgaattcagaggatttattcgagatcttaaggagcccaagaatttctagctttagctgtactcttgtttaggtcatcatttgattttcaggtgaacaatccggttgggcatcttaaacatccctatttgtaggatgaaactcagaactggtggctaccaataaagtgctgttttttttcgcccccatttatttctaacatctggagaagtctggatcgttttggccaaacgtttgatagtatatcatgggatgggaaacacgtaggtccaggttgtttgtgtggttgggtcagggtaatctacacgcccagaatttcagcacttgcgcaacctcaagtcctccatcatgagtatattataatcccaaacaaacaggccctacttctctctacttctcttgattccataattttctgtagtgaacagcaatctcgcttgctcatcaaggatatcatagtgttcagacttgacatctggccattcctggcgtcccatagaagctttgacactccatcggatgcgtgctgtgagctcgatacatataagctgtgctgccattaaacctgcaaaaactcctgctgaagaaggttggaaactttaagcggcaactgctagtggaaaagcgggtagcttgcatc

SEQ ID NO: 105422 - DNA, 192 bp, Zea Mays
atgttcctaagcaaaagtcatcatcaggtacaggataactgtaaactatgctataatccaattctcatgaatccatttacatcaaaatggccctggcaaccatgcaaaccaatatgttcgaaacaggctggaaccaccgagacacctgcaaattgcggttcacgtccatcaacagataatctgccccactaa

SEQ ID NO: 105423 - DNA, 940 bp, Zea Mays
ctcgtctcggctttgtatatagcccggaagcctgcttgcgcacaacaacaactctgcatgactccactagtccaccatccgccgcctccccttgcgggctgcaatggacggggtatttgtgctagagctttagaggcgcgcggcgggggtgcgagtgcgagtgcggccgccgacgcgcgggcgaaggaggcagcgggatggggctgctgtcgaaccgggtggagcggtcggagatcaggcccggcgaccacatctacacctggcgggccgtttacgcctactcccaccacggtacgctcctcaatcccctcctccgacggcgacaagctttcctgtcctcacgagctctagtagccaagtgccgccttcggccacccgatcggccgctccggttcgccgaagcgagtcgctatgtgcacaagtgaaagtgagttgttcaccggaattctggctcgcccgccctgcctcagtttggcttcatcgtgcgcgaatgccgcttcattgttcgcctcaattagctaagctaaatctgcgaggttttcgtcgtcctcctgtctgcagaaatttccctgcaaaaaccatgccgattcctatgcggttatgtatgccctccactattttactctttttgagatttttgatggcaccagtttggtggcagtggattactgcaactctgtaaccgacaaataagttgggggacacacacacacatgatgccatgtttcaactccatctaatctcaccacgcctggttaggcatggagatggggcttccagtgaggataccattctctgtacacaaacctttccagatggataggatgccacatgctttgtcactgtgtcctactattctgctttccatgcagaaccagaacaaacggtacatgttgctgctcacctactgtttaccaacgtttctgtctgtttctgtgat

SEQ ID NO: 105424 - DNA, 1278 bp, Zea Mays
ctcgtctcggctttgtatatagcccggaagcctgcttgcgcacaacaacaactctgcatgactccactagtccaccatccgccgcctccccttgcgggctgcaatggacggggtatttgtgctagagctttagaggcgcgcggcgggggtgcgagtgcgagtgcggccgccgacgcgcgggcgaaggaggcagcgggatggggctgctgtcgaaccgggtggagcggtcggagatcaggcccggcgaccacatctacacctggcgggccgtttacgcctactcccaccacggcatctatgttggaggaagcaaggtggtccattttacgcgaaagaaagaaaccgaaagttcagattcatcagacttcacctccagcttaatctcaggggttccgtcagagtgcccaacattccctgactgtggatttcagctgcccagcagtggcgtcgtcctcacttgcttggactgtttcgtccgcagtggctccctctactgcttcgagtatggggtgccatctgcggttttccttgcaaagcttcgtggggggacctgcaccactgccgaatcagacccaccagaggttgtcgtccatcgagccatgtgcttgctccagaagggctttggaaattacgatatcttcgagaagaactgtgaagactttgcactctactgcaagactgggcttctaccggtcgaggatcctggcattgggactagtgggcaagcttcttctgccatcggtgtgccgttggcagctcttctgtccaccccgttcaagcttctggctgctggcccgcttggaatggccaccgtcacagctgggatgtactgtgctggcagatacattaccgacataggagtaaggaaggacgtagcaaaagttgaggtggagaaattgtcatcacaccccggtttccaccttgtcgaagacgaaggatcagttaacaagcggtcagaaaagccgaagtccttgctccctatgaagaggaaacgaggaaggtgagtgtgaaacacagctttggggtgggtggttgggtggggcgaactacactgcccttcaattggtgccgaattgtggataatttgggatatagtatatgctccactgtaataagactggatggtatagatatctgtcttcagaatgtgctctaattgggttaggcgcacgcgcacccctcacatggtcaattgtaactcataaatttaatcatcaaatcactatataatgtagattttgttctatgttgtttccagtcttgtgctgcaattaataa

SEQ ID NO: 105425 - DNA, 1367 bp, Zea Mays
ctcgtctcggctttgtatatagcccggaagcctgcttgcgcacaacaacaactctgcatgactccactagtccaccatccgccgcctccccttgcgggctgcaatggacggggtatttgtgctagagctttagaggcgcgcggcgggggtgcgagtgcgagtgcggccgccgacgcgcgggcgaaggaggcagcgggatggggctgctgtcgaaccgggtggagcggtcggagatcaggcccggcgaccacatctacacctggcgggccgtttacgcctactcccaccacgataacagaggtttttgaccctcatttaggaagcttagacgacccttctacagtgtcacaactgtgctatagggacagtgtgtctccacagcatctatgttggaggaagcaaggtggtccattttacgcgaaagaaagaaaccgaaagttcagattcatcagacttcacctccagcttaatctcaggggttccgtcagagtgcccaacattccctgactgtggatttcagctgcccagcagtggcgtcgtcctcacttgcttggactgtttcgtccgcagtggctccctctactgcttcgagtatggggtgccatctgcggttttccttgcaaagcttcgtggggggacctgcaccactgccgaatcagacccaccagaggttgtcgtccatcgagccatgtgcttgctccagaagggctttggaaattacgatatcttcgagaagaactgtgaagactttgcactctactgcaagactgggcttctaccggtcgaggatcctggcattgggactagtgggcaagcttcttctgccatcggtgtgccgttggcagctcttctgtccaccccgttcaagcttctggctgctggcccgcttggaatggccaccgtcacagctgggatgtactgtgctggcagatacattaccgacataggagtaaggaaggacgtagcaaaagttgaggtggagaaattgtcatcacaccccggtttccaccttgtcgaagacgaaggatcagttaacaagcggtcagaaaagccgaagtccttgctccctatgaagaggaaacgaggaaggtgagtgtgaaacacagctttggggtgggtggttgggtggggcgaactacactgcccttcaattggtgccgaattgtggataatttgggatatagtatatgctccactgtaataagactggatggtatagatatctgtcttcagaatgtgctctaattgggttaggcgcacgcgcacccctcacatggtcaattgtaactcataaatttaatcatcaaatcactatataatgtagattttgttctatgttgtttccagtcttgtgctgcaattaataa

SEQ ID NO: 105426 - DNA, 2059 bp, Zea Mays
aggacctgcagctctcagctcacctctgtccgggctccttcctcctcactcagacgcagagcattactccgcgtcttcgccccaccccacagggcactaggactagctcctcccaagtgaacccaaccgctccatccgcggacagcaacgtctgaccgcccagtggtcccgacactcccaggggcccagcgcgccagcctgactgcggcccacccaccgcaggccttgacgggcaccatttctcctctcgccagctttgcccctctctttcctcacttccaagcgacacccgaaggccacagcggcacagcgccagcggcaacagtcaccagaccaccactaccagtctaccacccacctgacctgagcgaccccttcgcttccactccactgaagcgggccaaaagaaggaaagaaggcgggcaagcgacaggaaggaggaggaggaggaggaggagaagccatggcgagcgacggcgacgggaagggccgggtcgcgacggcgccgggggcaggagggtacggctacggctacggctacgccggcttcgagggggaggaggaccggaagtggtggccgtggctggtgcccaccgtgatcgtcgcatgcatcgccgtcttcgtcgtcgagatgtacgagaacaactgccccaagaaccggagccagctcggcggcgactgcgtcgccggcttcctccgccggttctccttccagccgctccgcgagaacccgctgctcgggccgtcctcctccactttggagaaaatgggagctcttgactggaataaaattgttcatcaaaaccaagggtggcgccttattagctgcatctggctccatgctggcctaattcatttggttgtgaacatgctaagtttgctgtttattggaatccgtcttgagcagcaatttggatttggtaagcttttaaaaaaatattttcatcttacaccaacatctatccaaccattcattttcagttaaatgttccaatctttcttccttcatggtcatttcactgacactttttcctgcctgcaagttcgcattggtgccatatacctactgtctggttttggtggcagcgttctgtctgcactcttcctacggaataactacatctctgttggtgcttctggagctttatttggcctgcttggatccatgctttctgagctactcatgaactggactatatactccaacaaggccagtacaattaacagataaatatatactttattttatccagctgcttgatagtcatttagctcgtatacttaatttgctcttgcaggcagcagctataataacactcctgtttataattgcactcaacttggctattgggatactacctcatgctgacaactttgctcacattggtggattcgcaacgggtttcctcttgggttttgttctgttggcaaggcctcaatttggctggatggaacaccacgagctgccgcagactaaccaacctcccaagtacaaagcgtaccagtatattttgtgggttgtggcactagtcttgctgttagttgggtaagtaaatccagttcggtatatttcctgtagacattttttatgtgtttaaacatatattgcagaaaatgttgctgcaaagattcgtgattctggactaatgctacattttatacgagcaactagtctaagatgttacatgttttttttttgaaaacgtggaatggtactgatgtcaaagtccttgcgccgcaggtttgtgatttcacttgtgatgcttttcaaagggaagaacgggaacgacggctgccactggtgccactatctaaactgcgtgccaacatcaaagtggaagtgcaacacctagacacctcaggtttctgttactctggcgaaacatgtagtattcagattcagaagaccattttttttatgcgtgtttgtctgtagatataaacaagttctttgttctttactgggttgaagttatgtaaactgctttgttgagctttgtatgtttataactcgaggttgatgcctattcaaaatcgttgtttagaatgctcgtatctt

SEQ ID NO: 105427 - DNA, 1725 bp, Zea Mays
aggacctgcagctctcagctcacctctgtccgggctccttcctcctcactcagacgcagagcattactccgcgtcttcgccccaccccacagggcactaggactagctcctcccaagtgaacccaaccgctccatccgcggacagcaacgtctgaccgcccagtggtcccgacactcccaggggcccagcgcgccagcctgactgcggcccacccaccgcaggccttgacgggcaccatttctcctctcgccagctttgcccctctctttcctcacttccaagcgacacccgaaggccacagcggcacagcgccagcggcaacagtcaccagaccaccactaccagtctaccacccacctgacctgagcgaccccttcgcttccactccactgaagcgggccaaaagaaggaaagaaggcgggcaagcgacaggaaggaggaggaggaggaggaggagaagccatggcgagcgacggcgacgggaagggccgggtcgcgacggcgccgggggcaggagggtacggctacggctacggctacgccggcttcgagggggaggaggaccggaagtggtggccgtggctggtgcccaccgtgatcgtcgcatgcatcgccgtcttcgtcgtcgagatgtacgagaacaactgccccaagaaccggagccagctcggcggcgactgcgtcgccggcttcctccgccggttctccttccagccgctccgcgagaacccgctgctcgggccgtcctcctccactttggagaaaatgggagctcttgactggaataaaattgttcatcaaaaccaagggtggcgccttattagctgcatctggctccatgctggcctaattcatttggttgtgaacatgctaagtttgctgtttattggaatccgtcttgagcagcaatttggatttgttcgcattggtgccatatacctactgtctggttttggtggcagcgttctgtctgcactcttcctacggaataactacatctctgttggtgcttctggagctttatttggcctgcttggatccatgctttctgagctactcatgaactggactatatactccaacaaggcagcagctataataacactcctgtttataattgcactcaacttggctattgggatactacctcatgctgacaactttgctcacattggtggattcgcaacgggtttcctcttgggttttgttctgttggcaaggcctcaatttggctggatggaacaccacgagctgccgcagactaaccaacctcccaagtacaaagcgtaccagtatattttgtgggttgtggcactagtcttgctgttagttgggtttgtgatttcacttgtgatgcttttcaaagggaagaacgggaacgacggctgccactggtgccactatctaaactgcgtgccaacatcaaagtggaagtgcaacacctagacacctcaggtttctgttactctggcgaaacatgtagtattcagattcagaagaccattttttttatgcgtgtttgtctgtagatataaacaagttctttgttctttactgggttgaagttatgtaaactgctttgttgagctttgtatgtttataactcgaggttgatgcctattcaaaatcgttgtttagaatgctcgtatcttatttttgtttatcaaggtatgctgcagctttgaattgttggaatcagctaatataacaaaacaattataact

SEQ ID NO: 105428 - DNA, 2203 bp, Zea Mays
atggctcctcctcgcccccctctcccaaccgtactctccgtcctcctccttctcctcctcgcggccggcagcgcaggcggcgtggagatcctcgccaagtcccttttggagagctgcgttgccgactcgggcgcgggggggcgcctctcctgcgacagaaaggtagtggtcgacatggccgtccccagcggatccaacggcggtgaggcgtggctggtcgcgcaggtcgcgcacgttaacgacacaaagcaatcgaagaccataagaaatccccctgtcatcaccgtcaacaagggcgccgtgtttgcgctctacgccctcaactacatcagggatgttgcttacaaaccagaggaacagtatgttgagacacgcaaatgtgaaccagatgctggttctgatgttgttagagcttgtgaaagcctgtttgctgtccctgtggtcctaaccgccgtgtaccttcatcttgtggaaacgtttttgagaaaattttcaaaggaaaagctaatacggctcactgtctaagatttccaggtgactggttccatgtttttggaattggaacaaggtcacttgggttcaacatcagggtacaagttaagaaaggaggttgttgttggtccagagaatagaactgttgtttctaaagacaactttctgagagtgaatctcattggtgattttggtggttataccagcatcccagcatttgaggacttctatcttgtgacccctaggaagagtgctggtagtggtgagccacaaaaccttggtgctgaatatagaaagtggatgctgttggagagagttcgttttacagacggtgtcgaatgtaacaagattggtgttggttatgaggctttccaaaaccaacctaacttttgtgcatcgccatttgagagctgtttgaacaatcagctatggacctttttggagtctgacaaaaaccggataagcatgagccgacagccccaatatgttgtgcagggaaggtttcagaggatcaatcaacatccagatgcaagtgttcattctttttctattggagtgacagaagttattaatagcaatttacggatagagctgagtgctgatgacatagaatacatgtatcagaggagtccagggaatataacagacattagtgttccagcatttgaagtcttaagtcaatatggtactgcaaaggtcacaactaagaatattggtacactggaggcttcgtataccttgacatttcactgctcaagtggcatcagttttatggaggagcagtactatatcctcaaaccgaatgaagagagtacccgtttattttacttgcacgcatctacagatcaagcagcaaagtatcaatgtacagctattctgaaggcgtcggattctagtgaactcgacagacaagaatgtgttttttctactacggctacagttcttgataatggaacacagattatcggttcaaatggctacaaattgggtttctttgacaccatcaaaggctatttggttagcttctgggattttctgattgatttaatcagtggcaaatcctgcaggctgaacaaatgtcggagcttttttgacttcagctgccatgcgcagtacagatgcataacctggctcgtcatgttggtgctgctactttttatgttacccgcaggcgcaattgtcctgtatcttcttcatcagaaaggcttcttcgacccagtatacgactggtgggatgacctgctgggggcggactaccgcgcgcaccggaggcacaagaaaggccgccgccaccaccatcaccaccacgaccaccatcaccaccggcaccaccaccaccacgggcactcgcacggccatgaccaccacccccacagtcaccaccacgcgcaccagaggagaaagatcgagcccagccaccaccacgtcctacacaggcagcagcccgggacagcggcagaaggccaccggcacaagcacgacccggcgctcggcgtgcagcacagggaggccgggcacttggggcacaagcgtcggcatggcaaagcggtggtcgcggaggacgccctggacctggagttcagggaacgaaggccatacgaggtcaggcatgccgggcacctgcaccgcgaccaccaccaccaccaccactcctgggaagtgtaggaatagttctgaccgtctgaactttaagacatctagcgtaagatga

SEQ ID NO: 105429 - DNA, 1751 bp, Zea Mays
gcagaaagtggaggcccccgcgtcgcccccgcttgggcggcgctaaccgtcgtctcctcctcttcctcccctctctacctcgccgccgtcggagctagccggcgggttgttcgcccggctcgtgaggaaggcggcggtggggcgtttcggcgtgtcgtggctcgcggcggcggtggcctgtgctcgcgcgcacgccaacggcggtggcattgctgtgctccaacgcgtggccgaccggtttggtaagcatggcggtggtggtgacgaacaacagggcgagagcggagctggcgtggctgcagtggcgggagcaggtgccccggagttagctgatggcttgctcgcggcggcggtgtggctcacgcgcctgctcttccgtcgagtagtggcatccccggcaatcgctcttgaggctggctcgcggcgccgctcgcgtgttcgctgcgtgcgcggcaacacacgcggggaggagtgggctatgtgggctttggtcggcggcggatctggcattgtcggcggatctaggccccatcggcctagatatggcccaccctcaactgatctacgccttggcgatggttgtcattgcggggtgcatgttggtgcgcaacggaggcggtgcgcccggcgacagctggtttcgatgtcgcgggtgccagggccagtggcggtagctcaagctggtttcagctctggcgagtgggcagtgtggcgcacaaggcaaggtgttccctggttccatgtgcccaaccggaagggatggcagccggcgcagctttgcggctgctgcggcagccggcacggtgcccctctggaggggtgtgtgcggaggcaagggcggtggcgacgacagaggctgcatgctttgacctagggtcctggactagcgatgagatggagggcatcttggacgaaagcttcggcgacagtgacgcctgtgtgcgccacttcactctgttgagggcgacgcattgctatgtcttccatgggcgaaagcccgatccatctggaatgtgacggtggcgtcctggatgtcactcccttcctaaaggcgtcacgtttgagtccgtcttggcctcgacgttgccttcggttgatgctttcgcttctcgacgtctggattgcgggtcgaggtgggattttttgaaacatgaagtcgaagctgccacattaggagatgtggctcgttaacgatgacatgaggcgaacctccttcttcgtggtttggattgttttggaggtcgagcaaaaaactggaggtgggtgttggatcaagatagttggtgaagaatcggagctgcctcgagtgtgggtgtgttgaggcttagcaacgatggcgtgtcacggtcttcctccttctgtgccaggttttaggtgtaggtgccttcgtgtttcttttgaccgtgtgcggcccgtctggtgaagttggagctgcccgtaccttgtgttgagctcggcaacggtgactctgtatgggctttgtgtgtggggttgccgctgcttatgttgtttgggcactctgtgtaagtttttggcccggtttttcttaaaactaggtcaattctaatcttcttcttaatggaaaggcagagctcctgtcattacattcaaaaaaaattaggcatgatcttatttattttttaaagtaggggaatacttgtttcaaactaatatactcttctacatctttggggtatcctcgattaattgttcaggtctgatttgaataaacataatgtaatatgtgtgtg

SEQ ID NO: 105430 - DNA, 1371 bp, Zea Mays
gtggaggcccccgcgtcgcccccgcttgggcggcgctaaccgtcgtctcctcctcttcctcccctctctacctcgccgccgtcggagctagccggcgggttgttcgcccggctcgtgaggaaggcggcggtggggcgtttcggcgtgtcgtggctcgcggcggcggtggcctgtgctcgcgcgcacgccaacggcggtggcattgctgtgctccaacgcgtggccgaccggtttggttccatgtttttggaattggaacaaggtcacttgggttcaacatcagggtacaagttaagaaaggttcatctgtatcggaggttgttgttggtccagagaatagaactgttgtttctaaagacaactttctgagagtgaatctcattggtgattttggtggttataccagcatcccagcatttgaggacttctatcttgtgacccctaggaagagtgctggtagtggtgagccacaaaaccttggtgctgaatatagaaagtggatgctgttggagagagttcgttttacagacggtgtcgaatgtaacaagattggtgttggttatgaggctttccaaaaccaacctaacttttgtgcatcgccatttgagagctgtttgaacaatcagctatggacctttttggagtctgacaaaaaccggataagcatgagccgacagccccaatatgttgtgcagggaaggtttcagaggatcaatcaacatccagatgcaagtgttcattctttttctattggagtgacagaagttattaatagcaatttacggatagagctgagtgctgatgacatagaatacatgtatcagaggtatatttgttggccacggccctactaatttgaaattagcaagtacagacagatttatgtttatcaggtgttcatactcattggtgttcatactcatttcaatttagctattacaaccatatttatatttgttgaccacggccctactcttaaaattagatgctatccaaataacaagtgtccctttaaatctatgccatgtttgacaaacagtagggaaacaaacattggtactacaggtttcttctcaagtcctactctttacatttttatgttctttattaatatataggagaatgtctaatatgttgtgcttccacatcaggagtccagggaatataacagacattagtgttccagcatttgaagtcttaagtcaatatggtactgcaaaggtcacaactaagaatattggtacactggaggcttcgtataccttgacagtatgcatctgtcagaaactttacaccttgcttcacttgccaagtagaatgtgaacttctgtgtcttctatgtagtccgagatcaaagtaacatatgtgctg

SEQ ID NO: 105431 - DNA, 1093 bp, Zea Mays
gtggaggcccccgcgtcgcccccgcttgggcggcgctaaccgtcgtctcctcctcttcctcccctctctacctcgccgccgtcggagctagccggcgggttgttcgcccggctcgtgaggaaggcggcggtggggcgtttcggcgtgtcgtggctcgcggcggcggtggcctgtgctcgcgcgcacgccaacggcggtggcattgctgtgctccaacgcgtggccgaccggtttggaggttgttgttggtccagagaatagaactgttgtttctaaagacaactttctgagagtgaatctcattggtgattttggtggttataccagcatcccagcatttgaggacttctatcttgtgacccctaggaagagtgctggtagtggtgagccacaaaaccttggtgctgaatatagaaagtggatgctgttggagagagttcgttttacagacggtgtcgaatgtaacaagattggtgttggttatgaggctttccaaaaccaacctaacttttgtgcatcgccatttgagagctgtttgaacaatcagctatggacctttttggagtctgacaaaaaccggataagcatgagccgacagccccaatatgttgtgcagggaaggtttcagaggatcaatcaacatccagatgcaagtgttcattctttttctattggagtgacagaagttattaatagcaatttacggatagagctgagtgctgatgacatagaatacatgtatcagaggagtccagggaatataacagacattagtgttccagcatttgaagtcttaagtcaatatggtactgcaaaggtcacaactaagaatattggtacactggaggcttcgtataccttgacatttcactgctcaagtggcatcagttttatggaggagcagtactatatcctcaaaccgaatgaagagagtacccgtttattttacttgcacgcatctacagatcaagcagcaaagtatcaatgtacagctattctgaaggcgtcggattctagtgaactcgacagacaagaatgtgttttttctactacggctacagttcttgataatggaacacaggtttgcaaaagt

SEQ ID NO: 105432 - DNA, 2025 bp, Zea Mays
cccctctctacctcgccgccgtcggagctagccggcgggttgttcgcccggctcgtgaggaaggcggcggtggggcgtttcggcgtgtcgtggctcgcggcggcggtggcctgtgctcgcgcgcacgccaacggcggtggcattgctgtgctccaacgcgtggccgaccggtttggttccatgtttttggaattggaacaaggtcacttgggttcaacatcagggtacaagttaagaaaggttcatctgtatcggaggttgttgttggtccagagaatagaactgttgtttctaaagacaactttctgagagtgaatctcattggtgattttggtggttataccagcatcccagcatttgaggacttctatcttgtgacccctaggaagagtgctggtagtggtgagccacaaaaccttggtgctgaatatagaaagtggatgctgttggagagagttcgttttacagacggtgtcgaatgtaacaagattggtgttggttatgaggctttccaaaaccaacctaacttttgtgcatcgccatttgagagctgtttgaacaatcagctatggacctttttggagtctgacaaaaaccggataagcatgagccgacagccccaatatgttgtgcagggaaggtttcagaggatcaatcaacatccagatgcaagtgttcattctttttctattggagtgacagaagttattaatagcaatttacggatagagctgagtgctgatgacatagaatacatgtatcagaggagtccagggaatataacagacattagtgttccagcatttgaagtcttaagtcaatatggtactgcaaaggtcacaactaagaatattggtacactggaggcttcgtataccttgacatttcactgctcaagtggcatcagttttatggaggagcagtactatatcctcaaaccgaatgaagagagtacccgtttattttacttgcacgcatctacagatcaagcagcaaagtatcaatgtacagctattctgaaggcgtcggattctagtgaactcgacagacaagaatgtgttttttctactacggctacagttcttgataatggaacacagattatcggttcaaatggctacaaattgggtttctttgacaccatcaaaggctatttggttagcttctgggattttctgattgatttaatcagtggcaaatcctgcaggctgaacaaatgtcggagcttttttgacttcagctgccatgcgcagtacagatgcataacctggctcgtcatgttggtgctgctactttttatgttacccgcaggcgcaattgtcctgtatcttcttcatcagaaaggcttcttcgacccagtatacgactggtgggatgacctgctgggggcggactaccgcgcgcaccggaggcacaagaaaggccgccgccaccaccatcaccaccacgaccaccatcaccaccggcaccaccaccaccacgggcactcgcacggccatgaccaccacccccacagtcaccaccacgcgcaccagaggagaaagatcgagcccagccaccaccacgtcctacacaggcagcagcccgggacagcggcagaaggccaccggcacaagcacgacccggcgctcggcgtgcagcacagggaggccgggcacttggggcacaagcgtcggcatggcaaagcggtggtcgcggaggacgccctggacctggagttcagggaacgaaggccatacgaggtcaggcatgccgggcacctgcaccgcgaccaccaccaccaccaccactcctgggaagtgtaggaatagttctgaccgtctgaactttaagacatctagcgtaagatgaagttggtgtaccgtgggcacgggacatgcccttttgcatgcatgcagtgagttagtgggtgtttaatttctagtaaactaatttgtatcgcttcattttatttcattttagtctttaatttgcttaatattgaaactaaaatttcatattcgacaaattagaaaataaaataaa

SEQ ID NO: 105433 - DNA, 2071 bp, Zea Mays
ctcaaagacttcagccaacaggtcaccgcttcagagatcggaatcagaacacctgccgctcttcagtttgttgacgcaactcctctcctatcttctatctccctcgctccctcctcggcgtcgcgttggcaccgagccctcccgccatggcaaggccgctgcaggaagcgatcgataccttcatcagcatcacgggggcggacgaggccgtcgccgtacgcaagctcgaggaacatggtggtgaccttaatcgagcaataaattcgcatttcaatgatggagacagcatattgaatgggatcagtcaaaacaccatgcccactagtcatgatgatatgatggacctggatggaccccttgataatacatttcaaagatctttgttcccagagaattttcgtgacccttttgctctaatggatccaaattttcagcaccaattttttgacagggttggctccactgatggtgtcactcgtggaccgctagtttcacaccctagagaggtgagggagattcctatagaagttaaggatagtgatcctcaaacaagtccatctggccaggcccctgttattgaggatgttactggacatgagtcttcaaatggccttgaagttcatgaaactatcataattgatgatgaggacagcggattgttatctgcgccatctgctccacatgctagtgttcctagcaatacatcttctgagcccactgctcctccactggttcatgttaatgactatgatgatgacatagaagaggaaatgattagggcagcaattgaagcttcaaagaaggattctgaaggactggcaaatatagcagagcaaggagaccagcatcaagagggagtgaatttgggggaacattcttctgataaagcagtcatgagaaccacagatggaatagttgagaggcaagtactagcttcaggaaaggctggaacatctaggcaaccaatagatgaagagagcttccaagaggagactgaagatgtagaagaacaaccgctagttagacgtcgttctcggcgtgccccctctgagaacaccgagctagcacaaatgccgcacccaggagctagccctgttctgaacaatcaccagtctagtggaggtgatttcccatctgagtggggtggcatttcttctgaggaacatgatgaagctgttatgcttgaggctgcaatgttcggcggagtttttggaagaccaatgcatcctttctccatgccttctcacagaagctctacttattatccccaaataactcattcttcatcaccagcattagctgaacagcggttattaagagagcagcaggacgatgagtaccttgcgtcactacaagctgatcaagaaaaagagttgaaggccttacaggatgctgagctccatcgcctagaagaaacaactacaagagaagttgctcttaagaaacagaagcaagagcaggaggaaaggcgtaaaaagcaacttgaggaagaggagctagagtccagtctcgcttccaagcaagcatcattaccatcagaaccgcctccagacgcagagggtgccgtgacagttgtagtccgcatgcctgatggcagtcgacaggggcgttgctttctcaaaactgataaacttaagttcctatttgatttcttagacattgggaggatttgcaagccagggacctacagattggtgaggacatacccgaggcgcacgtttacgagcagtgagggggacgtatcgttcagtgatcttggcttaacaagcaagcaggaagccctatttctagaacagatcacagagtagaggataagtgtttaggcagcatggttatagacaccacagctggagccggagaattttttttacattttatacttgcagcttttgctagtaaaaactcggtctgtgaaaatggttgggttggtcgaagaaaggcgtcacgttacctatacaatgtggacagctacgcatggccgttcattcgcacgagtctcagagtggctctgtacatactgtcggttctgtgaatcaaagcaatgttgcgtatatataagcaaactgcgcag

SEQ ID NO: 105434 - DNA, 294 bp, Zea Mays
atgatctttggaggcattcttcttccgtcgcttttccatgaatgcatcaagctttcctgcctccttgagctcgttgtacttgttcatcagcttcctttcgcgaagttcagatttcttcagatagtatggtcgttttccagcctttgctgcctccctctctttcttgatatgctcacgcaagatttccgattcaacgttctttggaggatgagacttcacaatccacgtgacacgactcttcatttctccaatggcatctgggtccttagatttcttaatcattttttgcagtct

SEQ ID NO: 105435 - DNA, 881 bp, Zea Mays
gaaggcacacagccgccgctgtttcttcatcttactcgtgctcggcacgcaggcgacggcgacggcggcggcgttcaggctcgggctctcagcgacggtatcagtggtctcccgcctctcgccagtcgcgtcgcgccctcgcctccgatcctctgcacaccgtccggtgaccttgtgttgtaagtttttccagcactgcttgctcacccatttctcaattagaaaacctcaaattctgtccctgagcaccaaatcaagaccataccaatttagtgagtccggacagatggcaatggccgcagttctggccaatggtgattcacagggtcgtcctcagaggaactatcaagttgttgttgctggcactcgtgacatgggcattgggaaggatggggtcttgccatggaagcttcctggtgatcttaaattctttaaagagcttacactaattacatctgatcctgtcaaaaagaatgcagttataatgggaaggaaaacatgggagagcattccagttaagtcaaggccattgcctggtcgtttgaatgtcatacttactcgatctggtagttttgattttgcaacagtagagaatgttgttatctgtggaagtatggagtctgccttagaactgctagcatcaactccatattgcttatcaattgagaaagtgtttgttataggaggcgggcaggtactgaggtgagttattaccttttggaacaacatattgtacatgtattctgttgctgcatgtcatgtgttgcaatgctattcacccttctggaatatttttgtgtagagaatatcttaaaggacctgcatgtgaggctatccatctaactgacattcagtcgagcattgagtgtgacactttcatc

SEQ ID NO: 105436 - DNA, 2574 bp, Zea Mays
gaaggcacacagccgccgctgtttcttcatcttactcgtgctcggcacgcaggcgacggcgacggcggcggcgttcaggctcgggctctcagcgacggtatcagtggtctcccgcctctcgccagtcgcgtcgcgccctcgcctccgatcctctgcacaccgtccggtgaccttgtgttgtaagtttttccagcactgcttgctcacccatttctcaattagaaaacctcaaattctgtccctgagcaccaaatcaagaccataccaatttagtgagtccggacagatggcaatggccgcagttctggccaatggtgattcacagggtcgtcctcagaggaactatcaagttgttgttgctggcactcgtgacatgggcattgggaaggatggggtcttgccatggaagcttcctggtgatcttaaattctttaaagagcttacactaattacatctgatcctgtcaaaaagaatgcagttataatgggaaggaaaacatgggagagcattccagttaagtcaaggccattgcctggtcgtttgaatgtcatacttactcgatctggtagttttgattttgcaacagtagagaatgttgttatctgtggaagtatggagtctgccttagaactgctagcatcaactccatattgcttatcaattgagaaagtgtttgttataggaggcgggcaggtactgagagaatatcttaaaggacctgcatgtgaggctatccatctaactgacattcagtcgagcattgagtgtgacactttcatccctccggttgacttctcagtgttccagccatggtattcatctttcccggtgatagagagcaacattaggcattcgtttgtgtcttttgttcgtgttagaaagtcagtggcagaaactcatgagtcaaatggcaaggaatcaaccgaggttgataccaagaatgacaaatttgaaacagagaatttctcttttctccccaagatggtatatgaccgccatgaggagtaccaatatctcaatcttgttgaagatattataaggtctggtgctcagaaaaacgacaggacaggaactggaacattgtcaaaatttgggtgtcagatgcggttcaacttaaggaaaaattttcctctgctgacaacaaagagggtattttggcgtggtgttgtcgaagaactcctttggttcatcagtggctcaacaaatgcaaaggttttgcaagagaagggtattcatatctgggatggcaatgcttcaagagagtatctcaacagtgttggcttggcacacagggaggaaggtgatttaggtccaatttatggatttcagtggcgtcactttggtgctgaatacactgacatgcatgctgactatacgggaaaaggttttgatcagctaatggatgtgattgacaagatcaagaatgatcctgacgaccgtcgaataattttgtcggcgtggaatccttcagatctcaagaagatggctcttcctccttgccacatgtttgcacaattctatgtggaaaatggggagctatcttgccagatgtatcaacgctctgcagacatggggcttggtgttccattcaacatcgcatcatattctctcctgacatacatgattgctcaagtttgtgatctttctcctggagattttgtccatgttataggggatgcccatgtctatagaaaccatgttcgagcactggaggagcaaattcagaagatgcctaaaccatttccaattttgaagataaatccttcaaaaaaggatatagattcttttatggcatcagacttcaagctggttggctatgacccccaccagaagatagagatgaaaatggcagtgtaatggtggcttggctggagccccccatcctatggactcggtggatgtaatcagtaggactggtactacataaaaattaaccggacaccgcactagcttgtttttggtgatggtgctgaatgttcagtgggagacgttttctctgatttatcagttgcgatttgcgtactatggtcgcttaagtcaactctacaaaatcggctcccttttatctggagccagttgattactcgattgcgagtgtgagggatgatctaggcataccctgttgcaagggcctactgggtgtgtgccggcccccatgaggctgtgacgattgcgccagtccagtacctcgtgagaattatgtaaccgaagttgccgtgtacctgggagaactcccgtactgtttggtgtttgattgcctatttcactttgcagtttggtcacaagataacgacttgctggtagggttttgagaacacattctgttgcgtttttcttgtgctttctggggggcagaaagcctagcgccgtgcttgccgaagtcgggctagcgcttgcacttgcagcggcggtgtacgatttggttggagcgtgaagtctcaagtgatcctgcaactgtcctgtcagttaaactcaaagatgttggaaattgtagtacgatgcgacccctgcgagttttgtagagttgaccctctttcatttcattgtttttttaattcaaatcaagtttcgtt

SEQ ID NO: 105437 - DNA, 220 bp, Zea Mays
caggagaactgtttcagattttacaataagatataagagatcattattcatgtactcaactatgataatgtcgtgtttacattttagctgttggtacaatacacacaaaaactcggtttcaccataacaccactgttagcaaaaaactgagttcaaaaggctcttccagctttcctaatgtggagaaaaccactgaggtccatatctgcaaacataacat

SEQ ID NO: 105438 - DNA, 150 bp, Zea Mays
atgctggacttaaaccaactggtggtttatagatatgattgtgatgtatgtatgtatgtatgtatgtatgtatgtatgtatgtatgtatgtatgtatgtatgtatgtatgtatgtatgtatgtatgtatgtatgtatgtatgtatgtatg

SEQ ID NO: 105439 - DNA, 2501 bp, Zea Mays
gcactctcgtgcacaagactagcagagagaacataatccaaagatgggctggagaccacacgttgtctctgcgtcatcatccgcactagtgcttcagttcctcgtgctgctgctgcccctgcccctgcccctgctgtccgccgatgcatcgtcaagccaagtaattagctgttgtccttccctgttccggcctcttcccctgaagcttcttccttcatgtgtctgcctgcctctcccgggtcccagcccgataaggacggcggagccttcatgcgtctgatgctgttgcttgaaaaactcagacgacgacgacgatctacgtcgtgtacatgggcgagaagaagcacgacgatccttccgtcgtcatggcgtcgcaccatgccgcgctgacctccgttcttgggagcaaggatgaagccctccgttcgatagtctacagctacaagcacggattctctggtttcgcggcgaagctcacccagccccaagcggaggagcttacaaaataccctggagtcgtgagcgtgaagccaaacgcgtaccaccacgtgcacacgacccggagctgggattttcttggcatgagctacggcgaatcgccgtcgttgtcgtcgtcgtcgcggctcctcaggaaggccaagtatggcgaagatgtcatcgtcggcgtcatagactcaggcatctggccggaatccccgagcttcgacgacagcgggtacggccccgtgccgaaacggtggaaaggcgtgtgccagaccggccaggcgttcaacgcgagcaactgcaaccggaaggtcatcggcgcgcggtggtacggcgccgacgtcagcgaggaggacctcaaggccgagtacaggtcggcgcgggacgccaacggccacggcacgcacacggcctctacgatcgccggctcgccggtgcggggcgcgagccacgctggcggcggcctagccgctggcatagcgcgcggaggggcaccgcgcgcgcggctggcgatatacaaggtctgccacgacgtcggcggcggcacgagctgcggcgacgcgtcgatcctcgcggccctcgacgccgccattggggatggcgtcgacgtgctatccttgtcgctgggaggaggcagtgacgaggtctacaggacgttgcacgtcgtggcggccgggatcaccgtggtgttctccgcagggaacgatggcccagtgccgcagtccgtcaccaacgccctgccgtggctcgtcacggtggcggccaccaccgtggatcgcaccttcccgacagtcgtcacgctcggcgacggagagacgaagctggtggggcaatcattgtattaccgcaaccgatcggcggcggcatcgacgagcaacgacgacttcgcttggcgccatttgatggctttcactggctgcgacgacgcggagaagctgcggtcggaaaacatcaccgggaaaatcatggtatgccgagcgccggagttcaagtccaactatcctcccacggcgcagtttagctgggccagccgagccgccatcgccggcggggccaagggcgtcatcttcgagcagtacagtaccgacgtcctcgacggccaggcctcctgccaaggccacctgccctgcgtcgtcgtggacaaagaaaccatatacacgatcctaaatagcgacagcaatgtggccaggatttcgccggcggcgaccatggtcgggccccaggtcgcctcaccgaggatcgcgacgttctcgtcgaggggccccagcgcagagttcccctccgtgctcaagcccgacatagctgcccctggagtgagcatcttggcagccaagcgtgactcgtacgtgctcctgtctgggacatccatggcatgccctcatgtctccgcagtcgtcgccttgctcaagtcggttcacccggactggtcacctgccatgatcaagtctgccattgttaccacagcgtcggtgaccgatcgattcggcctgccaatccaagccaactcggtgcaaaggaaaccggccgacgccttcgacatgggcggcggcctcatagcgccggacagggccatggaccccggcctagtgtacgacatccagccggaggagtacaaaagcttggacgaccgcgtcgaccgcctcaacctcccgtccatcgccgtgcccaacctcatgtacgactccgtcacggtctcgcgcaccgtcaccaacgtcgggccggtggaggcgacgtaccgggccgtggtcgaggcgccggccggcgtggcgatggacgtggcgccgccggtgatcgccttcgagagaggcggcgtcaggaacgccacgttcaaggtgacgttcgtggcgaagcagagagtgcagggcggctacgcgtttgggagcctgacgtggctggacgacgccaagcggcactcggtaaggatccccgtcgccgttcggaccgtcgtccgggacttcgtcgccgatgtgtctcgatgatgaacactgaacgatgtgtctgtcaaagaagaacaccgt

SEQ ID NO: 105440 - DNA, 2086 bp, Zea Mays
gcactctcgtgcacaagactagcagagagaacataatccaaagatgggctggagaccacacgttgtctctgcgtcatcatccgcactagtgcttcagttcctcgtgctgctgctgcccctgcccctgcccctgctgtccgccgatgcatcgtcaagccaagtaattagctgttgtccttccctgttccggcctcttcccctgaagcttcttccttcatgtgtctgcctgcctctcccgggtcccagcccgataaggacggcggagccttcatgcgtctgatgctgttgcttgaaaaactcagacgacgacgacgatctacgtcgtgtacatgggcgagaagaagcacgacgatccttccgtcgtcatggcgtcgcaccatgccgcgctgacctccgttcttgggaggtagcaaggatgaagccctccgttcgatagtctacagctacaagcacggattctctggtttcgcggcgaagctcacccagccccaagcggaggagcttacaaaataccctggagtcgtgagcgtgaagccaaacgcgtaccaccacgtgcacacgacccggagctgggattttcttggcatgagctacggcgaatcgccgtcgttgtcgtcgtcgtcgcggctcctcaggaaggccaagtatggcgaagatgtcatcgtcggcgtcatagactcaggcatctggccggaatccccgagcttcgacgacagcgggtacggccccgtgccgaaacggtggaaaggcgtgtgccagaccggccaggcgttcaacgcgagcaactgcaaccgatcggcggcggcatcgacgagcaacgacgacttcgcttggcgccatttgatggctttcactggctgcgacgacgcggagaagctgcggtcggaaaacatcaccgggaaaatcatggtatgccgagcgccggagttcaagtccaactatcctcccacggcgcagtttagctgggccagccgagccgccatcgccggcggggccaagggcgtcatcttcgagcagtacagtaccgacgtcctcgacggccaggcctcctgccaaggccacctgccctgcgtcgtcgtggacaaagaaaccatatacacgatcctaaatagcgacagcaatgtggccaggatttcgccggcggcgaccatggtcgggccccaggtcgcctcaccgaggatcgcgacgttctcgtcgaggggccccagcgcagagttcccctccgtgctcaagcccgacatagctgcccctggagtgagcatcttggcagccaagcgtgactcgtacgtgctcctgtctgggacatccatggcatgccctcatgtctccgcagtcgtcgccttgctcaagtcggttcacccggactggtcacctgccatgatcaagtctgccattgttaccacagcgtcggtgaccgatcgattcggcctgccaatccaagccaactcggtgcaaaggaaaccggccgacgccttcgacatgggcggcggcctcatagcgccggacagggccatggaccccggcctagtgtacgacatccagccggaggagtacaaaagcttggacgaccgcgtcgaccgcctcaacctcccgtccatcgccgtgcccaacctcatgtacgactccgtcacggtctcgcgcaccgtcaccaacgtcgggccggtggaggcgacgtaccgggccgtggtcgaggcgccggccggcgtggcgatggacgtggcgccgccggtgatcgccttcgagagaggcggcgtcaggaacgccacgttcaaggtgacgttcgtggcgaagcagagagtgcagggcggctacgcgtttgggagcctgacgtggctggacgacgccaagcggcactcggtaaggatccccgtcgccgttcggaccgtcgtccgggacttcgtcgccgatgtgtctcgatgatgaacactgaacgatgtgtctgtcaaagaagaacaccgtctcgatgatcgtccatatatgcgacactgtgtcactgtgtgtgaacactgaacaacgtgtcaaaactgaacttatgttgccaatttatttgcaagcaacaaggcgctcccagctgatcttgtgcctt

SEQ ID NO: 105441 - DNA, 2545 bp, Zea Mays
actctcgtgcacaagactagcagagagaacataatccaaagatgggctggagaccacacgttgtctctgcgtcatcatccgcactagtgcttcagttcctcgtgctgctgctgcccctgcccctgcccctgctgtccgccgatgcatcgtcaagccaaacgacgacgacgatctacgtcgtgtacatgggcgagaagaagcacgacgatccttccgtcgtcatggcgtcgcaccatgccgcgctgacctccgttcttgggagcaaggatgaagccctccgttcgatagtctacagctacaagcacggattctctggtttcgcggcgaagctcacccagccccaagcggaggagcttacaaaataccctggagtcgtgagcgtgaagccaaacgcgtaccaccacgtgcacacgacccggagctgggattttcttggcatgagctacggcgaatcgccgtcgttgtcgtcgtcgtcgcggctcctcaggaaggccaagtatggcgaagatgtcatcgtcggcgtcatagactcaggcatctggccggaatccccgagcttcgacgacagcgggtacggccccgtgccgaaacggtggaaaggcgtgtgccagaccggccaggcgttcaacgcgagcaactgcaaccggaaggtcatcggcgcgcggtggtacggcgccgacgtcagcgaggaggacctcaaggccgagtacaggtcggcgcgggacgccaacggccacggcacgcacacggcctctacgatcgccggctcgccggtgcggggcgcgagccacgctggcggcggcctagccgctggcatagcgcgcggaggggcaccgcgcgcgcggctggcgatatacaaggtctgccacgacgtcggcggcggcacgagctgcggcgacgcgtcgatcctcgcggccctcgacgccgccattggggatggcgtcgacgtgctatccttgtcgctgggaggaggcagtgacgaggtctacaggacgttgcacgtcgtggcggccgggatcaccgtggtgttctccgcagggaacgatggcccagtgccgcagtccgtcaccaacgccctgccgtggctcgtcacggtggcggccaccaccgtggatcgcaccttcccgacagtcgtcacgctcggcgacggagagacgaagctggtggggcaatcattgtattaccgcaaccgatcggcggcggcatcgacgagcaacgacgacttcgcttggcgccatttgatggctttcactggctgcgacgacgcggagaagctgcggtcggaaaacatcaccgggaaaatcatggtatgccgagcgccggagttcaagtccaactatcctcccacggcgcagtttagctgggccagccgagccgccatcgccggcggggccaagggcgtcatcttcgagcagtacagtaccgacgtcctcgacggccaggcctcctgccaaggccacctgccctgcgtcgtcgtggacaaagaaaccatatacacgatcctaaatagcgacagcaatgtggccaggatttcgccggcggcgaccatggtcgggccccaggtcgcctcaccgaggatcgcgacgttctcgtcgaggggccccagcgcagagttcccctccgtgctcaagcccgacatagctgcccctggagtgagcatcttggcagccaagcgtgactcgtacgtgctcctgtctgggacatccatggcatgccctcatgtctccgcagtcgtcgccttgctcaagtcggttcacccggactggtcacctgccatgatcaagtctgccattgttaccacagcgtcggtgaccgatcgattcggcctgccaatccaagccaactcggtgcaaaggaaaccggccgacgccttcgacatgggcggcggcctcatagcgccggacagggccatggaccccggcctagtgtacgacatccagccggaggagtacaaaagcttggacgaccgcgtcgaccgcctcaacctcccgtccatcgccgtgcccaacctcatgtacgactccgtcacggtctcgcgcaccgtcaccaacgtcgggccggtggaggcgacgtaccgggccgtggtcgaggcgccggccggcgtggcgatggacgtggcgccgccggtgatcgccttcgagagaggcggcgtcaggaacgccacgttcaaggtgacgttcgtggcgaagcagagagtgcagggcggctacgcgtttgggagcctgacgtggctggacgacgccaagcggcactcggtaaggatccccgtcgccgttcggaccgtcgtccgggacttcgtcgccgatgtgtctcgatgatgaacactgaacgatgtgtctgtcaaagaagaacaccgtctcgatgatcgtccatatatgcgacactgtgtcactgtgtgtgaacactgaacaacgtgtcaaaactgaacttatgttgccaatttatttgcaagcaacaaggcgctcccagctgatcttgtgcctttatgcagtttatacagttcaaataaactatgaggctcagcctagaattcattacaaagcat

SEQ ID NO: 105442 - DNA, 2004 bp, Zea Mays
cagagagaacataatccaaagatgggctggagaccacacgttgtctctgcgtcatcatccgcactagtgcttcagttcctcgtgctgctgctgcccctgcccctgcccctgctgtccgccgatgcatcgtcaagccaaacgacgacgacgatctacgtcgtgtacatgggcgagaagaagcacgacgatccttccgtcgtcatggcgtcgcaccatgccgcgctgacctccgttcttgggagcaaggatgaagccctccgttcgatagtctacagctacaagcacggattctctggtttcgcggcgaagctcacccagccccaagcggaggagcttacaaaataccctggagtcgtgagcgtgaagccaaacgcgtaccaccacgtgcacacgacccggagctgggattttcttggcatgagctacggcgaatcgccgtcgttgtcgtcgtcgtcgcggctcctcaggaaggccaagtatggcgaagatgtcatcgtcggcgtcatagactcaggcatctggccggaatccccgagcttcgacgacagcgggtacggccccgtgccgaaacggtggaaaggcgtgtgccagaccggccaggcgttcaacgcgagcaactgcaaccgatcggcggcggcatcgacgagcaacgacgacttcgcttggcgccatttgatggctttcactggctgcgacgacgcggagaagctgcggtcggaaaacatcaccgggaaaatcatggtatgccgagcgccggagttcaagtccaactatcctcccacggcgcagtttagctgggccagccgagccgccatcgccggcggggccaagggcgtcatcttcgagcagtacagtaccgacgtcctcgacggccaggcctcctgccaaggccacctgccctgcgtcgtcgtggacaaagaaaccatatacacgatcctaaatagcgacagcaatgtggccaggatttcgccggcggcgaccatggtcgggccccaggtcgcctcaccgaggatcgcgacgttctcgtcgaggggccccagcgcagagttcccctccgtgctcaagcccgacatagctgcccctggagtgagcatcttggcagccaagcgtgactcgtacgtgctcctgtctgggacatccatggcatgccctcatgtctccgcagtcgtcgccttgctcaagtcggttcacccggactggtcacctgccatgatcaagtctgccattgttaccacagcgtcggtgaccgatcgattcggcctgccaatccaagccaactcggtgcaaaggaaaccggccgacgccttcgacatgggcggcggcctcatagcgccggacagggccatggaccccggcctagtgtacgacatccagccggaggagtacaaaagcttggacgaccgcgtcgaccgcctcaacctcccgtccatcgccgtgcccaacctcatgtacgactccgtcacggtctcgcgcaccgtcaccaacgtcgggccggtggaggcgacgtaccgggccgtggtcgaggcgccggccggcgtggcgatggacgtggcgccgccggtgatcgccttcgagagaggcggcgtcaggaacgccacgttcaaggtgacgttcgtggcgaagcagagagtgcagggcggctacgcgtttgggagcctgacgtggctggacgacgccaagcggcactcggtaaggatccccgtcgccgttcggaccgtcgtccgggacttcgtcgccgatgtgtctcgatgatgaacactgaacgatgtgtctgtcaaagaagaacaccgtctcgatgatcgtccatatatgcgacactgtgtcactgtgtgtgaacactgaacaacgtgtcaaaactgaacttatgttgccaatttatttgcaagcaacaaggcgctcccagctgatcttgtgcctttatgcagtttatacagttcaaataaactatgaggctcagcctagaattcattacaaagcataattattgagcgagagacccgatcg

SEQ ID NO: 105443 - DNA, 785 bp, Zea Mays
aaagatacgaatagagacacacgcaccactcgaaccagaaccaccaggctgctggtgctggaagggggcgcggcagctgggcagctggcaacggacatggcggcggccggcggcgagaccatgatgacgagggagcagctgctccacctcttctcccgcttctccttcgtcacctccctccccgaggtcaagcagcggattgccgacgccgtcagggacaagcaggaggctgtggccgtgaccactgaaatacaagaggagattcttcgcgagatgggagtagagaagaaatggctattgatgaagctgagcttgaacccagagaattggctgaaaaactacatgctcaacaaataatgcaagaaaagcaactgaacatgctagttgaaatgaggaaatatagccgagagagccaatctgtcatacttgggactttgcacaaagaattggaagaagctaattttgacatcaatgcatcgatcttgagcccagagcaaatgcaagagattgttcaaaagtgatatatttccaacaaatgagatcagtacctgccttgtctacctttgtggtgcttgtgtctacctttgtataaattgctaaaaatagcaagcactcctgtctatatgagaagtgtagctgttacaagtaaccctgtagaacatattgatcgtgcaaagatagttcacagggatgtaaaacattctgaattttacaaacataatactttttgtggatgctactttcttagcttgaatatggtcatgtaaaccactacagacaatact

SEQ ID NO: 105444 - DNA, 968 bp, Zea Mays
aaagatacgaatagagacacacgcaccactcgaaccagaaccaccaggctgctggtgctggaagggggcgcggcagctgggcagctggcaacggacatggcggcggccggcggcgagaccatgatgacgagggagcagctgctccacctcttctcccgcttctccttcgtcacctccctccccgaggtcaagcagcggattgccgacgccgtcagggacaagcaggaggctgtggccgtgaccactgaaatacaagaggagattcttcgcgagatgggagtagatccaagttttggtattggttgcctaggaaaggtgaatgttgtttacaaaaatgacaaggacttgatgattaaattctatcaatttgttgccaaagaagaaatggctattgatgaagctgagcttgaacccagagaattggctgaaaaactacatgctcaacaaataatgcaagaaaagcaactgaacatgctagttgaaatgaggaaatatagccgagagagccaatctgtcatacttgggactttgcacaaagaattggaagaagctaattttgacatcaatgcatcgatcttgagcccagagcaaatgcaagagattgttcaaaagtgatatatttccaacaaatgagatcagtacctgccttgtctacctttgtggtgcttgtgtctacctttgtataaattgctaaaaatagcaagcactcctgtctatatgagaagtgtagctgttacaagtaaccctgtagaacatattgatcgtgcaaagatagttcacagggatgtaaaacattctgaattttacaaacataatactttttgtggatgctactttcttagcttgaatatggtcatgtaaaccactacagacaatactgtttacagagtgaagtttaaaatataacatgtgataggagagctgttggagacaaccttatccttttgggagttcaaatattgatgcac

SEQ ID NO: 105445 - DNA, 948 bp, Zea Mays
ctaggagtgctactagagccatctaaccaactcagctagaggcccatttgctagtcctgtacttctcaaaagaatattgtttatttccttcacatttcagatttgttttttaaaaacgattgtactcatctttgccttagtggaaatcaacagtttctgacatgatgcatcttgacatgttatttctgcttgccagatccaagttttggtattggttgcctaggaaaggtgaatgttgtttacaaaaatgacaaggacttgatgattaaattctatcaatttgttgccaaagaagaaatggctattgatgaagctgagcttgaacccagagaattggctgaaaaactacatgctcaacaaataatgcaagaaaagcaactgaacatgctagttgaaatgaggaaatatagccgagagagccaatctgtcatacttgggactttgcacaaagaattggaagaagctaattttgacatcaatgcatcgatcttgagcccagagcaaatgcaagagattgttcaaaagtgatatatttccaacaaatgagatcagtacctgccttgtctacctttgtggtgcttgtgtctacctttgtataaattgctaaaaatagcaagcactcctgtctatatgagaagtgtagctgttacaagtaaccctgtagaacatattgatcgtgcaaagatagttcacagggatgtaaaacattctgaattttacaaacataatactttttgtggatgctactttcttagcttgaatatggtcatgtaaaccactacagacaatactgtttacagagtgaagtttaaaatataacatgtgataggagagctgttggagacaaccttatccttttgggagttcaaatattgatgcacactagaagcaatcttgaaacaggaagaagacatgtaataaaatattcttcataaattttcttagatt

SEQ ID NO: 105446 - DNA, 129 bp, Zea Mays
cctttgcctttgtttcccttttcttttctttgggggttgagctctgaggttttcatacggggtttcatctctagcctaccacaacgtgcttgggacaaaaaggctttattgttgttgttgttgttggtg

SEQ ID NO: 105447 - DNA, 721 bp, Zea Mays
agtttggaagggacacgagcggatcagaacgaccgcgccctccgtcgccaccaccatccgctctgtcgccgctctgctgccgctccatcgtcgtccacactaatgccatccgctctaccgccgctccatcgtcgtccttcctcgatgcaatcgcgagcgatacgtgaggcgacagtgccctccaccaccgccatcgtctcagatttgtcgtcctccaccgccatctctgccctcagtttgctgtcctccaccgtcgtcttccgtggcacgattacaatgttgtctccaagacctagtacatggtcttctccaagatccagtacaaggtcgtctcctccaagatccgaaccccaatgctagtgaggaaggcagactcctctattgttggtgactttttagctactgtgcatgcaaataggaaaacattcagatttttttagcgagtggaggcagcacatgaaaccaacatggagaagaaaaatgaaatggcattccacatgaagcttgtgaaaaaagagttaaactcgtaatttattctagtgccgaagttcctaaccaagagacttgtattccatttttatattatattgtctatctatatgtgtgaatagaggcaaccttatatgatgtgatgatggatgaattagcttcgatggatattatatggtattcaaattaaactttacatgaatcatatgtggtgcattatttttggatttta

SEQ ID NO: 105448 - DNA, 643 bp, Zea Mays
agtttggaagggacacgagcggatcagaacgaccgcgccctccgtcgccaccaccatccgctctgtcgccgctctgctgccgctccatcgtcgtccacactaatgccatccgctctaccgccgctccatcgtcgtccttcctcgatgcaatcgcgagcgatacgtgaggcgacagtgccctccaccaccgccatcgtctcagatttgtcgtcctccaccgccatctctgccctcagtttgctgtcctccaccgtcgtcttccgtggcacgattacaatgttgtctccaagacctagtacatggtcttctccaagatccagtacaaggtcgtctcctccaagatccgaaccccaatgctagtgagagtggaggcagcacatgaaaccaacatggagaagaaaaatgaaatggcattccacatgaagcttgtgaaaaaagagttaaactcgtaatttattctagtgccgaagttcctaaccaagagacttgtattccatttttatattatattgtctatctatatgtgtgaatagaggcaaccttatatgatgtgatgatggatgaattagcttcgatggatattatatggtattcaaattaaactttacatgaatcatatgtggtgcattatttttggatttta

SEQ ID NO: 105449 - DNA, 646 bp, Zea Mays
atagtaatagctgttctcctagctgatctgtaatagtaatagcagttttatgatatatgttaagttttatcatgcttgtgtatttttaatttctgcgagggacaagtatttggctgtctagtatctaatatgaaaggattcatatttttgttaagttagctaaagtattttatggtgcctcttggacctctgtcaaataggaaggcagactcctctattgttggtgactttttagctactgtgcatgcaaataggaaaacattcagatttttttagcggttggtgacttttctctattgctttggttatgtgcatgcaaccatgtatactaagttactaacaacgtgccaattggtgttacttgcagagtggaggcagcacatgaaaccaacatggagaagaaaaatgaaatggcattccacatgaagcttgtgaaaaaagagttaaactcgtaatttattctagtgccgaagttcctaaccaagagacttgtattccatttttatattatattgtctatctatatgtgtgaatagaggcaaccttatatgatgtgatgatggatgaattagcttcgatggatattatatggtattcaaattaaactttacatgaatcatatgtggtgcattatttttggatttta

SEQ ID NO: 105450 - DNA, 1463 bp, Zea Mays
accgcacacgctctacttcccgaacaaagcaaagcaaagcacggacggacggacgggctctgcacgagggcgtcgcgtcgcctccgcccgccggacacatccccggcaataatgaggccccccggccggcgccgcgtcctcgccgccggcgcctgcgcgctgctgctggccgcgaccttcctggcggccggcctgttgacgacgtcctccctggcgccgtacctgctgccgccgctggccctgtcgctgccgtgcctgccggcggtgaccgcgccggcggggtccgggtacggcgcggcgccgggcgtggcggcgctggcggaggcggccgtggcgtacgcgacctcggagaccgtgccgcagcagtcggtcgacgagatctcgctgtcgctggccgtgctgcggcggcgcgcgccgctgcggctgctggtgttcgggctgggccacgactcgaggctgtggcacgcgctgaacccgggcggcgccacggtgttcctggaggaggacccggcgtggtaccgcgtggtgcgggcgcagtcgccgttcctgcgcgcgcacctggtggcctaccgcacgcgcctcgaccaggcggaccggctcctggccacgtacaggcggcacccggcctgcctccccggcggcggcggcggcaacgacaccctgcagctgccgcgcgtgcgcggcaactgggcgtgtccgctggcgctgtacaacctgccgcccgaggtgtacgagaccgagtgggacatggtcatgatcgacgcgcccaaggggtacttcgcggcggcgcccgggaggatggccgcgatatggaccgcggccgccatggcccgcgcgcgccagggcgagggcgacaccgacgtcttcctgcacgacgtcgaccggagggtggagaaggcgttcgccgaggagttcctctgcgagagattccgggtcggcggcaccggccggctctggcatttcaggatcccgccagtttcacggcgtggggaggacggcacggcgaccgccggtgaccggaacccgttttgttaaggcgccggtgagagtcttggacggtctatttggccctatttgggacggtctatagttagtactccgtaaacaggatttacgtcgtcgtcggccctgcagttcgaatgcattcgagtttttttgttttgttttgtttaaaaagcagatgcgaacacatgtatttcctttcgttcggtgtttcaaagtgatagttcatcaggaatcagggaatgcacaatagatccaataatgtaatataatgtaatgctcactccagccagcaattattttctatatatgggtcacgcagtaattataataagggcatgtacagtggagagacaccaaaacggttctccaagcacaggagacaactaagagactctattgtacaatggagtgtctataaacgtagtctattaataaatacagaattaaatgtatttgta

SEQ ID NO: 105451 - DNA, 1886 bp, Zea Mays
ctctctcacacacacttgcctaatccagccacccgactcctatcggttaccggcgacctcaccggcggctaaaaggatttgacttgcggccgccgccgcgcgtcttcgaccgtgctctcccaccccaatctccgggttgattactaccagagactaactcgaatcgtcgatgagcgctcgatcgatcccgtgacggagcggctcggttgctccaaagctccgttctacgccatgctcgccgccgccgccgccatggcggtgaccgtccctcgggcggcttctcattgttttccagcaaatacggccaggaaatgtaggacttgctggagctgtcgtgcggcaagagtcgaggctgggcactcccgattggaggtgagaaaagtcacctatcgacctcctggaactgaacagaacttgttgaatgaaattaacctctctcttcaggaaaaaagttttggtttgatatttggacggagtgggagtggaaagacaacccttttgcagctgttggctggtctatcagaacctacctctgggtctatttgcattcagaagtatgatgatactgggaatcctattggcttgcctgaactgctaacttctcaacgagttggaattgtatttcagtttcctgagaggtatttcttagcggatactgtacttgaagaagttacttttggatggcctaggcaaaaggcagacctcctattaaaagaacagctcgctttaaatcttcaaaatgcttttaactcggttggtctgacaaccatctcattagatgaaaatccgcaagctctaagtggtggatttaagaggcgacttgctttggcaattcaactggttcaaactcctgatctgttgctgcttgatgagccacttgctggtctagattggaaggctcgagctgatgttgtgaatctcctaaaggacctgaagaaacatcatactatactggttgtaagtcacgatctaagggaactatatccactagtggatcgctcatggcgaatggaaatggggggaagtttgaaggaggaagctttgcctgtctaaacatgtgcttgtcagtatagctgtcagacagcatgtacatattggtcatccaaatctagtcacatcaactacttttacaaacttagattatgtcggctgggaaatttcttcaagatacaatggagtcagagatggttgtgaacagtcatttggtaatgcgtggtaacttccgagcacgaaaaaatgctagaaaaaatcagcagagatcgtgaatgttagcacggagctttgactactgctggaacggggaacagtctgacgcagacattgttgagctaccatgaacgttgaacattccattgaagtttaggttcaggaatcaggatccagcgatagctccttgttgcaaacatgaggattgcagaaggcctgtacactttgaaaggtggggggtcaagtttcaaaatggtgcggatgatggtttggaaatggtttcctttgttgaagtttcccactggagagattcagagaacatcatttacttgcactatcgatagtctgcatcattcacaatttgctgttccttacgaactcatttgtctggattctggaagaatatgttgtgcacatgagtagattcttgtttcctccaaagatctttgacctgctgttatcaccacttctggcatgcgaggagcaatctcagtcatgcagttatgtatatgaatgtgcacctctgtttgaaacggtgagcaaattctctcccccttttgtgtccagtcattcattttgtgattagcacgatactctgcttcagcttcagcttgacgccagtcttcttatcttatgtactcactccgctcttttttatttgtcgcggtttagttcaaaaa

SEQ ID NO: 105452 - DNA, 2400 bp, Zea Mays
gatttgacttgcggccgccgccgcgcgtcttcgaccgtgctctcccaccccaatctccgggttgattactaccagagactaactcgaatcgtcgatgagcgctcgatcgatcccgtgacggagcggctcggttgctccaaagctccgttctacgccatgctcgccgccgccgccgccatggcggtgaccgtccctcgggcggcttctcattgttttccagcaaatacggccaggaaatgtaggacttgctggagctgtcgtgcggcaagagtcgaggctgggcactcccgattggaggtgagaaaagtcacctatcgacctcctggaactgaacagaacttgttgaatgaaattaacctctctcttcaggaaaaaagttttggtttgatatttggacggagtgggagtggaaagacaacccttttgcagctgttggctggtctatcagaacctacctctgggtctatttgcattcagaagtatgatgatactgggaatcctattggcttgcctgaactgctaacttctcaacgagttggaattgtatttcagtttcctgagaggtatttcttagcggatactgtacttgaagaagttacttttggatggcctaggcaaaaggcagacctcctattaaaagaacagctcgctttaaatcttcaaaatgcttttaactcggttggtctgacaaccatctcattagatgaaaatccgcaagctctaagtggtggatttaagaggcgacttgctttggcaattcaactggttcaaactcctgatctgttgctgcttgatgagccacttgctggtctagattggaaggctcgagctgatgttgtgaatctcctaaaggacctgaagaaacatcatactatactggttgtaagtcacgatctaagggaactatatccactagtggatcgctcatggcgaatggaaatggggggaagtttgaaggaggaagctttgcctgtctaaacatgtgcttgtcagtatagctgtcagacagcatgtacatattggtcatccaaatctagtcacatcaactacttttacaaacttagattatgtcggctgggaaatttcttcaagatacaatggagtcagagatggttgtgaacagtcatttggtaatgcgtggtaacttccgagcacgaaaaaatgctagaaaaaatcagcagagatcgtgaatgttagcacggagctttgactactgctggaacggggaacagtctgacgcagacattgttgagctaccatgaacgttgaacattccattgaagtttaggttcaggaatcaggatccagcgatagctccttgttgcaaacatgaggattgcagaaggcctgtacactttgaaaggtggggggtcaagtttcaaaatggtgcggatgatggtttggaaatggtttcctttgttgaagtttcccactggagagattcagagaacatcatttacttgcactatcgatagtctgcatcattcacaatttgctgttccttacgaactcatttgtctggattctggaagaatatgttgtgcacatgagtagattcttgtttcctccaaagatctttgacctgctgttatcaccacttctggcatgcgaggagcaatctcagtcatgcagttatgtatatgaatgtgcacctctgtttgaaacgttttatcaagcagatcatgtaccctgtcttaacgattaaggaaatgaaaaacaaatctttggataccttgaatattggtgaagtggatagatgtttcagagacgggattacctcatgtagagacgaatatctgaacacccgagaatggtatgaacaaatacgttgcgccaaggaactgcaactaagattactgcttaccattgactttgttcagttgataaattgtcaaggctttatggtaaaatctgtgttagaagaaacttgaaacaaatctcaaggagaaaggactgaactcagtcgggtagcatgtatgaatctatctaccagaataattgttttttttgccacatgtgggtctgatagcaattttgtttgttgtaatagcaaatatctaattcgctctgatctactctcattctccaataacacttaacacttcaaacttaaaaaaaaaaccggataaaaataaaaacgtggcctattcattgcattcacctggtaatccatctttaatacaatgtaagtaatattatttgcagaaaatcagcgatgtatgaaactaaggccccgtttgagattagtccctccattttagtcccatttaggccatgtttggtttcaattagtcttaggactaaactttagttctaagactaaattttagtccctacttgtttggttatagggactaaatagattctaaagttattaaatacattgtccaaagactcaaa

SEQ ID NO: 105453 - DNA, 811 bp, Zea Mays
atggagaattatcacatgctctttgggacgacggcgacgcatgcgcagccctcttcagctgccggcacccccagctcctacaacttcattgccaccagcagcgctagcggcttgcggcgcgaacacgaccgaggccagcacagcgggcacgtgcacgccgccggcggatcctcgtcgccgtcctccttcttcgtcgcggagcggctgtcccacaacgacgactccagcaaggacggtggtggcggtccaggtccagccgcagctggcagtggagagaaggaggccgaggcggacgacaggccggcggcggccaggaggaaaggggaaaagaaggagcgccgcccgcggttcgccttccagacgcgcagccaggtcgacatcctcgacgacggctaccgctggaggaagtacggccagaaggccgtcaagaacaacaacttcccacgaagctactacagatgcacacaccaagggtgcaacgtgaagaagcaggtgcagcggctgtcaagggacgagggcgtggtggtgaccacatacgagggcacccatacacaccccatcgagaagtctaatgacaacttcgagcacattctcacccagatgcagatctactccggcatgggatcaaccttcagcaggagtagccacgacatgtttcactgaatgaaccttccaaaaccacttcaattaagcgtccgatcgagcaccatgcaaaccaagctagaaaattgatccatagattttattaatttgtacattgagtcttagatgtttaagagataaataaagcgtgatttggtacatatataga

SEQ ID NO: 105454 - DNA, 379 bp, Zea Mays
atgccatgccaaagaagctactacagatgcacacaccaagggtgcaacgtgaagaagcaggtgcagcggctgtcaagggacgagggcgtggtggtgaccacatacgagggcacccatacacaccccatcgagaagtctaatgacaacttcgagcacattctcacccagatgcagatctactccggcatgggatcaaccttcagcaggagtagccacgacatgtttcactgaatgaaccttccaaaaccacttcaattaagcgtccgatcgagcaccatgcaaaccaagctagaaaattgatccatagattttattaatttgtacattgagtcttagatgtttaagagataaataaagcgtgatttggtacatatataga

SEQ ID NO: 105455 - DNA, 1360 bp, Zea Mays
aatacaaagccgcgcgctgccacctcccctcttccctctcctcacctcccttccattccagtcttccaccttgcttctcgcaggcagctgaagcaatcggagcaagcagagagaggccggctcctcccacccccaggcagccatggacgcccccgaggcgaggagtagcgcgtcctcctccccggagttcgagttctggccgctctaccccaaccccgccgcctcgccctcctgcgccgacgagctcttcgccggcggggtgctcctcccgcttcccatcctcccaccgaagccggagtccaggaacaaaggcagcggcatcagccaatgcgtgcccgtcgcagagccggagccggagtcgcagctaggggaagcgtcccttcttgcgaccgccgcggcgcctacggcctcgatgacttcccaggcgccgtccaccggtagcggaggaggagggtcgaagcgctggaccgacatcttttccaagaagccggcgccgggaggcgaggagaaggaccgggagaaggacaaggagaagcgcaaggatggggcctgtagccggaaacagggcagcgggcacaccggcggcgcgggctcggagctgaacatcaacatctggcccttctcgcggagccgctcggccggcggcgggtccggctcatccaagccgcggccgcccacgaggaaggtgagcagcgcgccgtgctcgcgcagcaactcccgcggcgaggccggcgcccctccgctccggcggtgggcggcgagcccgggccgctccggcggcggcgtgccggtgggccggtccagcccggtctggcagatccggcgaccggcaggcaagcccgcgcccgcccccgctccaggccctgccccttcggcctcagagctgttctccgacaggcgggcaccgccgcggcagcacaaggacaaacccgccggcgttgccaacggccggaagcccggcctgagtggcggcgtccggggcctgaacctgagcgtgaactcgtgcattgggtaccggcaccaggtcagctgccggcgggtggaagtcggcgccgcccgcggccctggccccggcgggctgttcggtatcaaggggctcttctccaagaaggtgcattgagtgagcctgttttgtgttcaccctcgggctctctgatcactcgtgtagtaactccttttttaccctttcttttactagtacttttttaaccttgtgggttatatatataaatggtacgatgagatgtgtgttcgtgagcgaggttgttaattacatgtaaaaaattgcatggttagccagtaaccggtttttgtaaggctaatgcttgcttggtgacatctactgtaaaaagttcgccaa

SEQ ID NO: 105456 - DNA, 228 bp, Zea Mays
gataatggaaacaaaaaatgttccagccttttgtagtttcctacatacggcattacagattgaaaattaataaaacatgcatcattaaaaaaataacatccttgacaagaacttgttctcgaatcaagcgtcctttaatctggcattagaactccaaccatgttttgcaaggatctccattgccaccatctctaaggattgacataccacaagaatctcttggtgagc

SEQ ID NO: 105457 - DNA, 1390 bp, Zea Mays
actcggatctcttttcccagcgcacgggcggcccacgaacggatcggcgactcctctccatccgtctcctctctcgccggcgttctgccgcactgcaaattcgaattcgaacccgaatcctccctcccccctcctctcggcgagaggaggctttgtgagggccgccaggatcgacaggatgcagaagaagcctgatgacgccatggaggaggaggcggcggcggctcctgggccggagatagggttctggttggcagcacggcggcgactcgccccagaagaccccttcttcgctgccggggacctcgagcgcgagctcctggccaagcaccttgccctggatctttctgaagatgaccgcaaccagcttgagaagatggaagtagccagcacgtgcacagtgttttgtccaattgctggttgtggtgctcatctagattgcctggaggagtttgaggaccactatgtcactcgacatactgcttcatgctctgtatgctcgcgagtttatccaacttcaaggttgctgagcatccatgtttctgagacgcacgactcgtatttccaagcaaaagttgcccgtggttttccaatgtacgagtgtttggtggagggttgtggtatgaaattgaagagttacaagagccggcagcagcatctcatcgataagcatcagtttcccaaatcatttgagttcttcaaaaaggcacgggactcccagcgtcagcggcagaagtcccagaggaggcagactgctcacaagggtgaagagacaagggataattcgatggacgtcgacggaaaaggtgcaaggcaaacaaaccggaggtaccggctgaagcaacatgatcatagcgaaccgaaagagaacaagcagcagcataaggaggcccaggaggacgaaatggaggtcgagcagaagattgatgagctcacctctgctgtatcgaggttgagcacagcagattctacgccctcaagcgtcacctttggccaccgtcgctctcgtggccttacgtttgttcccaggtcaatcaggcagaataagcaggcggccctcccagctggaagcaacaaatgactaaccactgtcatttggccttttggtagttccagaatctggcttggagctattaactttgtatgaaaaaatgatcttggatgttaaatgtaccacgggaagctcatgtttccactgatatccttggatgactcagtgggcaaacgttttcttggctatatataatggtgttatactgctttgcagaaacgcaacgcagtgggcccacaaaactctgtatgctgtattgaaaatgtttgcataggtttcgtagactgttctccgcggttactcataaaattcttcaactatatattacttttacacccc

SEQ ID NO: 105458 - DNA, 822 bp, Zea Mays
accacccaaacccaagcagagaagcagagacacatttggctcactcactcacactcactcgctcatagattgtcctgtccgtccatcatctctagctagcagcttccagtgagagcggcaagcgacaccacaaccagacaacacaccaccaccgagctgtgagaataagttcgcagacaggatgggcaagctgtggacgatcctcactcacctccactccctagcagggccaacggtgatgctgctgtaccctctgtacgcgtccgtgcgggcgatggagagcccgtccaagctggacgacgagcagtggctcgcctactggatcctctactccttcgtcacgctcatggagatgctcctcgagtccctcatatactggatccccatctggtacgagctcaagctgctgttcatcgcgtggctcgtgctccccaacttcaggggcgccgccttcatctacgacaagttcgtgcgcgagcagctccggaagcacggcctcaccgccgccggctccgtcaagtcgtcgtcgccgtcgtccaaggacaaggacaagcccaagaacaagttcctcgccttcgtcacgcccaagaaggatcatgaagcttactgaagtgggttgcagtgatcccattcctggaccatgtcccggcaacctgtagtgcactccactagatttctgttgtgtttgttctcgacttgaaatagagcccgttcgatgtgtgtgtggccattctgtatgtgtgagcatcaactctaacatggaatggagacaagtgccaactttcggtgctgatgatgatgtgaatgtgtgaaatttatgtc

SEQ ID NO: 105459 - DNA, 1786 bp, Zea Mays
acaccgtacctccggcgcctccgactccggtcctccggcctgcgcaggctagctagctctatttaggtccaccgtgcccccgccgcgcaggcaggggagatccaagggtccgagcagaaggccgccggcggcgagccagccagccagctaaagcgatccatatatacatatatactatcgagcaacacgtaaggaaggaaggaagaaagaagccaagcccaccagggccagggaagagagcatagctaaggaaggaaggaaggaagatgatgagcaaggaggcagtggtgaacgcgttcctgggctgcttcatgcacgtggggctggcgctggtgctcgccgtctacctccccgtggcctttgtgtgccgcctcctccaccgcctcctcgtccgccccttcgccaggggcgaggacctccgcggcaaggtcatcctcgtcaccggcgcgtcctccggcatcggcgagcacctggtgtacgagtacgcgaggcacggcgcgtgcgtggcgctggtggcgcgcacggaggtggcgctgcgcgccgtggccaaggcggcgcgcgacctgggcgcccccgacgtgctggtcgtgccggccgacgtcaccaaggtcgacgacgccaagcgcgccgtcgaggagaccgtcgcgcacttcggcaaactgaatcacttggtggccaacgccgggatctggtccagctgcttctttgaagagatcaccaacataaccgccttccataatgttattgatctcaacttctggggtgccgtgtacccgacctacttcgcgctgccgtacctcaaggccagccggggcaacatcgtggtgaccgcctccgtcgccggcagggtgccgacagccaggatgagcttctacaacgcaagcaaaggcgccgtgatacgtttctacgagacgctgagggctgagctggggtcccacgtgcacgtcaccatcctcacgcccggctacgtcgtctccaacctcaccaagggcaagggcctccagaaggacggccatgtcggcatcgacgaggaggcccgcgacgtacgtgagctcgatccgccgccctccctttatttatacaatttcctcctacgtgcacgcgaacagtacagctacagcgaagaaatggcatgcgcgcgcgcgcttgcagatcaacgtggggccgatgccggtgggcaagacggagtcgctggccgaggtggtggtggcgagcgtgcgccgtcgggactactacgtcacgtggcccggctggtactggcccttccacatggtcatgtgcgccgcgcccgagctggtggactggttctcccgcaccttctacgtctccaagtccggcgaccaggacggcggcggcggcgcgctcagcaagaagatcctggaggccgtcggcgggaagaagttcctctacccccagaccatacgctcacagaccgccatggcacccaataactgacaacctacatatatatatatatatatatatatatatatgtcatttatgagaatgcacggtcgatctgttgttggattagaacagtacgtgatgatcgaacgtacgggccggcacgggtgaaattgtttattcgtttcgtttcggggttttttcttcttcatttcctctgccttttctccacttccgattttacaaatggtcaatgtgtatgaagtaattaatacgaatgttcattcgtggttggcttgcattgtacgccccgtgatattggggcatgcatgggtgcaaattgcaaagttgatgtacctatataggttttgtttgaatttaa

SEQ ID NO: 105460 - DNA, 1683 bp, Zea Mays
acaccgtacctccggcgcctccgactccggtcctccggcctgcgcaggctagctagctctatttaggtccaccgtgcccccgccgcgcaggcaggggagatccaagggtccgagcagaaggccgccggcggcgagccagccagccagctaaagcgatccatatatacatatatactatcgagcaacacgtaaggaaggaaggaagaaagaagccaagcccaccagggccagggaagagagcatagctaaggaaggaaggaaggaagatgatgagcaaggaggcagtggtgaacgcgttcctgggctgcttcatgcacgtggggctggcgctggtgctcgccgtctacctccccgtggcctttgtgtgccgcctcctccaccgcctcctcgtccgccccttcgccaggggcgaggacctccgcggcaaggtcatcctcgtcaccggcgcgtcctccggcatcggcgagcacctggtgtacgagtacgcgaggcacggcgcgtgcgtggcgctggtggcgcgcacggaggtggcgctgcgcgccgtggccaaggcggcgcgcgacctgggcgcccccgacgtgctggtcgtgccggccgacgtcaccaaggtcgacgacgccaagcgcgccgtcgaggagaccgtcgcgcacttcggcaaactgaatcacttggtggccaacgccgggatctggtccagctgcttctttgaagagatcaccaacataaccgccttccataatgttattgatctcaacttctggggtgccgtgtacccgacctacttcgcgctgccgtacctcaaggccagccggggcaacatcgtggtgaccgcctccgtcgccggcagggtgccgacagccaggatgagcttctacaacgcaagcaaaggcgccgtgatacgtttctacgagacgctgagggctgagctggggtcccacgtgcacgtcaccatcctcacgcccggctacgtcgtctccaacctcaccaagggcaagggcctccagaaggacggccatgtcggcatcgacgaggaggcccgcgacatcaacgtggggccgatgccggtgggcaagacggagtcgctggccgaggtggtggtggcgagcgtgcgccgtcgggactactacgtcacgtggcccggctggtactggcccttccacatggtcatgtgcgccgcgcccgagctggtggactggttctcccgcaccttctacgtctccaagtccggcgaccaggacggcggcggcggcgcgctcagcaagaagatcctggaggccgtcggcgggaagaagttcctctacccccagaccatacgctcacagaccgccatggcacccaataactgacaacctacatatatatatatatatatatatatatatatgtcatttatgagaatgcacggtcgatctgttgttggattagaacagtacgtgatgatcgaacgtacgggccggcacgggtgaaattgtttattcgtttcgtttcggggttttttcttcttcatttcctctgccttttctccacttccgattttacaaatggtcaatgtgtatgaagtaattaatacgaatgttcattcgtggttggcttgcattgtacgccccgtgatattggggcatgcatgggtgcaaattgcaaagttgatgtacctatataggttttgtttgaatttaacatctc

SEQ ID NO: 105461 - DNA, 1638 bp, Zea Mays
gctggaatggtacatattaaacaaatgtattagtattacagatgttgttttcaaatctatgaatgaaaaataagcatcaatcatggttacattgaatcattgccgtggctctttctagagcgatgttggcgtggcacactagagccttcggaagccctgtcctgaggctcgtcctcctcctggtggtcggtctcatcatcctggtactccttgtccccctcactggtgctccttgtcctcctagtacatcaagttcaatatttatatcgatgttaacaaattcattagaagcgttgaggaggtcaaagaacttctaaacctcaactgtagtcggatcctgacgatctggttccaactttgtccgtagatcctcatgcatctgatacatcctatcatctccaatgccatcaactttcatttgtgtgtctctttcaaagcgtgactctccatggagataccatatctcatagcctggcacgaaaccatgtgtacacaagtgtagtgtgacctgtctcttatcataggccgtcatatttccgcatttgttgcatggacacctaatattatctatttgtgataaagcagcagcatgatctagaaactctgagtcttgacaaaccactcctctgagtgagccttagtctttttgttgaaaccagtatacatccacccgcgactgcccattcttacagctgtatacaagaattatccataaggtttgcacgtttctacatgttatggacctacatctatatgtttgtacatatcatggaccaaccatttttagacaagtcttaccatcgtaattaacaaccacgcattcgttcgctccatacgacgactccgcagcagctctttctttccgctttgcattgccctgcgttgcagacctgctacctcgttccatcacaatcaaatctgcaaacggagagaacggaagtggcaccattgtaaacaaattctctcaaggttacataatgagcaacgatttcacaacgaaatcgatgagtaacctgctgaattgctcgattactgtactgagtgccgaatgcggacataaatcgcaaaggcgatgctctgcttctgggcaacagtgcaacactaaaaagagaaagaagcacgcttattcatgaataggaaacaagcatataagccaaacatgtgccatagcatcccgtactaccgcaaatcacaagtaagcacactggacaaaaagtactttttatcctgcttacactaaccgatcaggttactatacctagtgcaaaacccagatgcagtagaagtccaggatgaagatcttgtgcaccggggcgtcgaggttgatgaagacctgttgctgttctgcaatggggcgtggagttcagtgtccagaactccagaccaccaaaccgctagtttgcgctccgccgtccaatgccgctccgctcggtctgcaggagctcgcgaggccgagaatcaacagtgagacaccggcgcgtggcagttaagcaaccctacgagatggcatagctgagtggagtcgtggacgtgcaggaggacaggaggaacgacgaccaggacgcacaggagcagcgtaccgagccgccgccgccgccgcggctcgcaatgcacaggaacgttgaattttggggaagg

SEQ ID NO: 105462 - DNA, 534 bp, Zea Mays
gaaccagtggtagaggatcatgcaagagatgatgttgaagatgatggtggagataatgtgggagatgatgttggagacaatgctggtggggattctggggctggtggagattccgcagctgggtctggaacttctcgagttaggagaacgaggaagctgcattttgttggaccacctccagagcttccacccgaatctcgggttttgataaagcctagtggaaagacttggatcgacgactcgttcacaggcacaggacactacaggcaggtgaacatggtccttggtaatcttgttcgtctgcactggcctggtgttgtgactttgcctactggcgagtctgtccccgccaccacttgggagcattatcgctatggtgtctgtagaacgtttggcaacacacaggcactagtttgggatgcattctggaaacggtacaagttgccggacgatggatcatatgatatgaacgctcgttacgtgtttgagtataacgcgaacgatgtcgttgcagatgcaatgtactatcactag

SEQ ID NO: 105463 - DNA, 109 bp, Zea Mays
cctactgctccatccaacataaagaggttaaagaagtcgcaggcatgtactagtcacgagacaaattcaagccttggtcaacaatgttctaggctgctacaaaaagaca

SEQ ID NO: 105464 - DNA, 1434 bp, Zea Mays
aaccaaatgaatggccctgtgaatatataactgcgcccagaaaaccgtcgcaacgaccgcgtctcttgcgttctagtaggaagctagaatagcaggtagcgcctggtggccatggccacggcgtctgcagcttgtcatggcggggggatcgtgtactacaaggtccttccgatgagcatgttcctgctgctgctccgagggctcgtgcagccggtggcggccgcggcgtgctccgtggacgccatctacagcttcggcgactccatcgctgacacgggcaacctcctgcgcgagggccccgttggcttcttcgcctccatcggcagctacccgtacggccagaccctccgcaaacccacaggccggtgctccgacggcctcctcatcatcgactacttcgcgatggcgctgaacctatcgctggtgagcccgtacctggacaagggagccgacttcgccagcggcgccaacttcgcggtggccggggccacggcgctggaccgggccgtgttgctgcagagcggcatcatggctccaccggcgagcgtgccgctcagctcccagctcgactggttcaaggcgcacctcaacgccaccgcctgcccctcgctacaagattgcgccaagaagctcgccggagcgctgttcttggtcggcgagatcggagggaacgactacaactacggcttcttacagggattcaggtcgatcgaggccatgaaggcctacgtgccacaggtcataaacgccataatggacgtcgccaaggaagtgatcgagctaggcgcgacccagatcgtgatcccggggaacttcccgatcgggtgctccccgagctacctctccctcttcgccgcgtccggcgacctcgacgaccggggctgcctcaggagctacaacgccttcgcccagcaccacaacgagcagctccaggcggccatcgacgggctgaggaaggccaacaccgacgtcaccgtcgtgtacgcggactactacggcgccttcatgcacctgctggaccatgcttcgctcctcgggttcgagcagggcgcgctcctgcaggcgtgctgcggggcgggcggcgcgtacaacttcaacatgaactcgatgtgcggcgcgccgggcacgacgacgtgcgcggacccggcgcgcaacgtcagctgggacggcatccacctcacgcagcaggcgtacagggccatcgcgctgtcccttctcatggaggggttcgcgcagccggatgacgccgtgcaagagatctggagctgctgacgtgcacccgttttggtttcattgggcctgtacctgctatcgatacgtatatatttttcctctagactagaattttgtacctgctattgatccatgtataggtgtttgcattgttcatatatataataataacgtgggaaattagaaatggtttaatacgaa

SEQ ID NO: 105465 - DNA, 2330 bp, Zea Mays
attgcgtggcggtctgcctcgtccccttcctcccgtttcttcccttgcctccccctccccgtcgcgctgttcaacgttcaaacccttgcagctccctctcccttggtcgcgcagtcgccattcacgaccccgaccccgacccccgtccccctcccttaaatcccacctctccccgtctacgcctcattcgctccagctcgcatcccacagccaagccagttagcccgggagatctccaagaaaccatcttggaatccgagaacgcccagcattcttggtcggccaaggattcgaattccgacgaacggcttctacggccgaaaaaagtccgataatttccgcggggagctcaggaggtgtctcggtctcgggaaccggaggaggaggccgtgggggattgacgagggggcaagatggtgaggctgccgtacacaacggcgctgaccacgctgttcagctacggcctgctcttcgccttcggccagctcagggatttcttccgcaagttcgtcgactggttcaaggccaagaacgtcaaggggtacgcgccgatctgcctgggcctggaggatttctatgtgcgacgcctgtacttgcggatccaggattgctttggtaggccgatcgcaagtgcgccagattcatggtttgatgttgttgagcggacctcaaaggacaataacaagacactacagcgtacctcgaataccaccagatgcctcaacttgggctcctacaactaccttggctttgctgcagcagatgagtattgcacaccacgtgttattgagtctctcaagaaatactcagcaagtacctgcagtgttcgtgtcgatggcggtacgaccaagcttcacaatgagctggaggagttggctgcgcgttttgttggaaagcctgctgctatcctatttggcatgggttatgttacaaactctgccatcattccatgcctaattggaaagggtggactgataattagtgactctctgaatcataactcaattgttaatggcgcaagaggatccggtgcaactgttagggttttccagcataattcccctgctcatttggaagaggtcctgagagagcagatagctggtggtcaaccacggacacacaggccatggaagaagatcattgtcattgttgagggtatctatagcatggaaggggagctgtgtaaactccctgagattatagctgtcgccaagaaatacaaggcctacacatatctggatgaggcccatagcattggtgctgttgggcagtctggccgcggtgtttgtgagctccttggggttgacccagctgatgtagatataatgatgggtacttttaccaagtcttttggatcatgtggtggatatattgccgcatcaaaggagataattcagcaccttaagcatagttgtccggcccatctgtatgctacttccatgtcgccaccagcagtccaacaagttatttctgctattaaagttatccttggggaggatggctccaacagaggtgcccaaaaacttgctcgcatccgcgagaatagtaatttctttaggtcagagctcaagaagatgggttttgaggttcttggtgacaatgactctcctgtcatgcccataatgctctacaatccggctaagattcctgcattctctagggagtgccttagacaaaaggttgctgttgttactgttgcgtttcctgcgacacctcttcttcttgctagggcacgcatatgcatttctgcttcacatactagggaggacctgatgaaagcccttgatgttatcagcagagttggcgaccttgtgggcatcaaatacttccctgcagaaccaccaaagattgctggagctgatcatgataagctggagtaggaatcaacccttagttgccccatgagtgattgaagttgttagaatcccttggagttgtcaacaaatcattatggaaagaagcacatattgagccatttcatttggatcttgtcaatacacaagagtccaggatccgtcatattaagctgactactgtttgttgattgtacaactattcttccaattgtgtatagctggttgaaattcagttgttctgttgttaatccattcccaatatgtaatacaattagaggcaatataaacttcgagtagaacattactgagtttcccttgcagatcactgacgactattggtctcttgctttcatgtatttttttaccttttgatatgggattagtagatgtctctacactttatatgaagatacgaattattttttattcagtgaatgttatatgtgaccactgacaatgtttttggggagaagt

SEQ ID NO: 105466 - DNA, 374 bp, Zea Mays
gaatgtttcttcaccaggtagttcttacatttttgcaaaactatatgcagatatgcaactgatcttgggaaagagttgtgttgatgttatttgtctttgttttattcggggttgcacttattgttttaaacatacaagtcatcaaatgaaaccaagtgctggtctaaaacaaactctttcttctttctatagttttgcaaaaaattatatgaggcatgttatatctttcctttaaaaggtctcagcaggatgcaattaagaatcacacattggaatggtttgggaagtattatcgaggcttatttgatcagatccattttgggaatcatttcgctttagaaggtcaatcaaggccaaaattagagatttgcaag

SEQ ID NO: 105467 - DNA, 1256 bp, Zea Mays
aacgtaacaacctcggcttctacgactaggagtcgaagtcgactgacgactcacgactggcgtagcgtaggaggcggcggttccaagcgaccatccaataatcgccaccctcacgcgagaaatccccggcaacttttggggaactacacgtgtatggagttttattagtattccaggggcgtcacaatggcatactttcctgatgaagtagtagggtatatccttggttatgtaacgtcgcatcaggaccgcaacgcggtgtccttggtctgccgggcatggtacgacattgagcgtcatggccgccattcagtgcttgtaagaaactgttatgcggtgtgcccagagcgtgtacacatgcggtttcccaacatgcgtgcactgagcttgaagggcaaaccgcactttgctgaattcaaccttgtcccggcgggttggggtgccactgcaaatccatgggtggatgcgtgcgcccgtgcatgcccaggtcttgaggagctccggctgaagtttatggttgtgactgatgaatgcctcaagttgctttctctatcctttaccaactttaaatcacttgtccttgtttgttgtgaggggttcagtactaccgggcttgctaatattgccaccaattgcaggtttcttaaggaactagacttacaaaagagttgtgtgaaacatcaagaccatcagtggattaattgttttcccaagtcttcaacatcactagaatgcttgaatttttcctgcttgactggggaggtgaatgctgttgcactggaggaacttgttgcaaggagtccaaatcttaaaagtttaaggctgaatcttgcagttccatttgatgttttgtccagaatcctttctcgcacacctaagctagaggatttaggcacaggatcctttttacaaggcaatgaccctgctgcatatgccagtttatgtagagctcttgagaactgcacttcactgaagagtatatctggtttttgggatgctccaggcttttatgttcaaggaattttgtcaaattgcaagatcagaaatcttacatgcttgaatctcagctatgctacattgattcagagtacccagcttatcggtattattcgtcattgtaagaagctccatgtcttatgggggtaaggcttgccttggttattgtttccccagatcccactcatgtggaaccgccaaaattgggtttgttttgtgtttgtcttcacaagaaaaggttgctccctcaactgtatgtt

SEQ ID NO: 105468 - DNA, 2186 bp, Zea Mays
aacgtaacaacctcggcttctacgactaggagtcgaagtcgactgacgactcacgactggcgtagcgtaggaggcggcggttccaagcgaccatccaataatcgccaccctcacgcgagaaatccccggcaacttttggggaactacacgtgtatggagttttattagtattccaggggcgtcacaatggcatactttcctgatgaagtagtagggtatatccttggttatgtaacgtcgcatcaggaccgcaacgcggtgtccttggtctgccgggcatggtacgacattgagcgtcatggccgccattcagtgcttgtaagaaactgttatgcggtgtgcccagagcgtgtacacatgcggtttcccaacatgcgtgcactgagcttgaagggcaaaccgcactttgctgaattcaaccttgtcccggcgggttggggtgccactgcaaatccatgggtggatgcgtgcgcccgtgcatgcccaggtcttgaggagctccggctgaagtttatggttgtgactgatgaatgcctcaagttgctttctctatcctttaccaactttaaatcacttgtccttgtttgttgtgaggggttcagtactaccgggcttgctaatattgccaccaattgcaggtttcttaaggaactagacttacaaaagagttgtgtgaaacatcaagaccatcagtggattaattgttttcccaagtcttcaacatcactagaatgcttgaatttttcctgcttgactggggaggtgaatgctgttgcactggaggaacttgttgcaaggagtccaaatcttaaaagtttaaggctgaatcttgcagttccatttgatgttttgtccagaatcctttctcgcacacctaagctagaggatttaggcacaggatcctttttacaaggcaatgaccctgctgcatatgccagtttatgtagagctcttgagaactgcacttcactgaagagtatatctggtttttgggatgctccaggcttttatgttcaaggaattttgtcaaattgcaagatcagaaatcttacatgcttgaatctcagctatgctacattgattcagagtacccagcttatcggtattattcgtcattgtaagaagctccatgtcttatgggtgttagatcacattggtgatgagggcttgaaggctgtgtccttttcttgtcctgatcttcaggagttgagggtatatccaagtgttgttgcaccaagaggtactgtgacggaggaagggttggtagccctatcttcgtgtcggaagttacagcatgtgctcttctcttgtgttcgaatgacaaacacggcgctgatgacaatagcaaggtactgcccacggctaacgtccttcagactatgcattcgcaagcccaggtcagcagacgccgtcacaggacagccactggacgaaggctttggggcgatagtgcggtcctgcagaggcctgaggcgtcttgccatgtccggcctcctcacggacagcgtgttcctgtacatcggcatgtacgcggagaagctggagatgctctcggtaacgttcgcgggggacaccgacgacggcatggtctatgtgctcaatggctgcaggaacctcaagaagctggtaatcaaggagagccccttcggtgacgccgctctcctcgcgggcgcgcacaggtacgagtcaatgcgcagtctctggatgtcgtcctgccagatcaccctgggtggctgcaaggcccttgcggccaccatgccaaacatcaatgtcgaggtcatcggtggggcgagctttggtgcgatggatggtggtgtcagcggtgcgaggaaggtggacatgctctacctctaccgtactctggctggacctagatgcgatacgccagggttcgtctcgatattgtgagctgtatctatggctactgttggtggcgttcagggaaacccgatgttcttaaccgtgcctgctgcgggctgtggctgtgctactgtctggtagtgtttcggaaacatgatgtttatttgcgtaaggtagtgtttggttctggaaccattttaagccttgttcagatattcatatacctcatggattggaagtgattagaaaaaaatatgaataattttgacttactatgtattgaaactcacttaatcccctctaatccatatgaaattgagatgaaa

SEQ ID NO: 105469 - DNA, 770 bp, Zea Mays
ccggtcctctcccaagcgccacgaccaccaccatgccgtcgccgccggaggacgagtcgggagacccgggcctcgcggagtgcctgcgcctgctggaggccgtgccggccgccgcggcctcctgcccggccttccgccgccactggccgtccatctccgcctcgctcgccgcgctgtcggactctctgaccagccacgccgtcccgcccgcgtcgccgctgctcgcgccgctcgccgcggcgctgcgcgcgctgctgtccgtgtccgccgcgggggacgcgcccaggctcggccacctccacaccatctcgctgctttcctccaccgccgccacgctctcccagctggccgccgacgcgcgcctcctcgccgcgcccgccacctccggcgccgaccacggttccgccgcggacgcgctcgtctcccggctccgcctggggtccgcggcgtcccgcgccgccgcgctggacgagctggcgagcgccgcgccgtccctgccggagccctccgcggccgcggccgtgtccgcggtggcggagctgctcgactcgggcggcggcggcggcggaggggacctgcgcgagcgggccgtggcggcgctggccgcgctggcgtgctccgacgccgcgcgcccggccctggcgcaggaggccggtgccgtggtgccgcacctgtgccgcgcgctggagtccggctccagatccggcgcggagcacacgtgcgcggcgctgctcccgctgactgcggcgtcgcgagactctgacgcggcg

SEQ ID NO: 105470 - DNA, 1194 bp, Zea Mays
ggcggcgctcctcgccgcgtgcgccggcggcacgccggcggcgcaggccgcggcggccggcgtgctccggaacctggccgcgttcccggacctccgcccggcgctgcgcgacgagggcgcgctgccgatgctcctgcagctggtctcgctgggcacgccgcgcgcgcgggagctggcgctgggatgcctccagagcctgaccgcgggagacgacgacggcgacgaggagggccagcggctcaaggtcgaggccttccaggcgggcgcgctggggtgcgtgagggacttcctcgacggcagccgcggcgacgaggcgggccttgcgcccgcgctcggcctcctccgcaacatggcctcgttccggtacatcgcggagatcgccgcggcgtcgggcggcttcgcggcgcacgtggccgccgcgctgggcagcgaccggtccgccacccgcacggaggcggccctggcgctcgcggagctgttcggcaacgccggcggcgtaaaggccgggcggcaccagcacgaggccgtcgccgccgactgcgtcccaaggctggtgtggatgatggaggcgaaggccgcggccgagcgcgacgccgcggcgcgcgcgctggcggcgctcctggccgcgtcgggcgggtgccggagggcgttccggaaggacgagcgcggcgtggtgaacgcggtgcagctgctggacccgggcgcgcgcgccgtggacagacggttccccgtgtcggtgctgctggccgtggcgccgtcccggcggtgccgcaagcagatggtggccgccggcgcgtgcgggttcctgcagggcctggtcgccgccgaggtggaaggagccaagcggctcgccgagtggctcggcaaggggaagatgctgggcgtgttcccgcggacgtgacgccgccgtggtccgttcctcttcctctagagtgctgcctctactcagctgtatgtatcaacgtgtgctgctgctgctgctactcctgacactattgtgctataaaccaatatccgattcccttctcctgccctggttcgtctgctgcttctagtgtgatgaactgacgacgactgcgatgatcttgtacatgtcggtgtgcggctgttggatagcttaggtagctctgctttatgtactagcagcagcagtagtgatctctggtacatgtccgactcaaatggttcatgttc

SEQ ID NO: 105471 - DNA, 1130 bp, Zea Mays
atgcatctgtgtggctgtggcaaacagttctgaggtctgagcaatggcggccgtccagtttgcagcagcaggagtcctcaccggccttctcgctctcgcaacacttgcaagctgcaacactgatggcgacatactgtacaagcagaggctggcatgggaggatccaaacaacgtgctgcagagctgggatccaaccctcgccaatccctgcacgtggtttcatgttacctgcaacctgaacaactccgtcatccgcgtggatttgggaaaggcaggcatctccggccccctgcttccagatcttggagcacttgagagcctccagtacatggagctgttcggcaacagcctgaacggttcgattccgtcaacgctgggcaacctgactgatctcatcagcttggatctctgggacaacctgcttaccggcccaatcccaactacgcttggttccatcagcacgctgcgatatctgaggttgtacgagaacaacctgacagggcctataccaccatcgtttggcaatctgactagccttctggaactgaagctccacaggaattcgttgagcggttcgattccggcctcccttggcaacatcaaatcgctgcagttcttgaaattgaacgagaatatgctgaccggcacggttccattggaagtcctctcccttgtcgttgttggcaacctgaccgagctaaatattgcaagaaacaacctcgatggcactgtgagatcatccggacttagagtgactgcggttatccaggacatgaggattgcatgatggcttgaagagtcctggatcaaggctttgttttaatttgcttcatgttttaatttgcttcatgtagacactgcaaataaatgaataattgcaatgggatacattggcctagattattcaattatgtgtccggtgttgtccacatctgcgtccagtgttgtcatatgttatatcatatgaccacttcaggcctacacgcgccatatgcctgaacccctagtccacacacgtctgtaaaaccttgagagtcagctctaataccatttgtataacaccctagccatcctggaccgatgttacttactcctagcagccctctaagatcatagaccattcccacaga

SEQ ID NO: 105472 - DNA, 1487 bp, Zea Mays
ctcggagagtagtaagctgtcacggtcaccggccggcctcgctccgatcctctctctctcgttctctcactgagaagaagagagaaccaagtggtcagaactcagaagcttggcatagaaatccctgcttggccacgatcgccttcttctaatctacagattatattcctcataaacgctcgtacgtacgtaccaaattatcaagcaaaggtctccaaatggctggcctgtctctacagcatcccatggccttcgccttcggcctcctcggcaacatcatctccttcatgacgtacttggccccgctgccgacgttctgccggatctacaggaacaagtcgacggaggggttccagtcggtgccgtacgtggtggcgctcttcagcgccatgctgtggatctactacgcgctgctcaagtccaacgagttcctgctcatcaccatcaactccgccggctgcgtcatcgagaccctctacatcgccacctacctcctctacgcgcccaacaaggcaaagctgttcacggccaagatcctcctcctcctcaacgtgggcgtgttcggcctcatcctcctcctcacgctgctgctctccgcggggccgcaccgcgtcgtcgtcctcggctgggtctgcgtcgccttctccgtcagcgtcttcgtcgcgccgctcagcatcatccgccaggtggtgcgcacgcggagcgtggagttcatgcccttctccctctccttctcgctcaccgccagcgccgtcgtctggttcctctacggcctgctcatcaaggacaaatacgtcgccctgccaaacgtgctcggcttcaccttcggcgtcgtccagatgggcatgtacgcgctctaccgtaacgcgacgcccagggtgcctgctgccaaggaggcggcggcggcggcggacgacggcaacaccttcaacttcaaggcgcccggcgagcatgtggtgaccatcgccaagctgaccgcagcggcgcctgcgacggcggcggagcttatcatcaaggcccgcgacgacgcgcagcaccccccggaggaagaagcagcagcagccaaggcggcgccggcgaagtctaaattattaatccccctcccagaacatgcgtacgcatgtatgtgtatcatccggtccgggtcacatcataaactaggccgtgcgtgcctgctcggtactagcacacgcccgcccgcctgcctgcccgcccgcatgatccaatcgagctgctatatacgaaagggatgaagacgatgagatctactctgagagaaccagaagggggctagctagggccatgtctctcgcctcaggtcgtgggtctgctgctgctgtttcatttcgttctcgcgcatggctgcgcgcgtgtattcattttagttagctacttgttgtcccgtcaccaccttcgttccatgtaataacaacaaaatatatataaacatggtcatcgtaaagcaaaggttccttttttatcaaatc

SEQ ID NO: 105473 - DNA, 824 bp, Zea Mays
cacctcagggcgtggacatggaacccgttcacccagaccagaatgaacaccaggtgcgtcgcctctcacggtggcagcagccgcgccgctgccgctacagggcggtgcaaggaacgcgagcacggggcgcacaggcactccttctccagcgtcatcgtccgctactctccgtcgaacaagacgtcccccgtcccctcgctgtcgccgtcctcgtgctccttctcatcggcctcctcgtcggtccggacctcaagcaggtcgtccgacggcggtgtggggccgacgctgaggaggagcagcagcgcgagctcggaggtggagaaccccgtccaagggctcatcgcctactgcaagaggtcctagcagctggcctccgtccggaagagcgccagcgacgccggcttccacttcctgtcgtcgtccgcgtccaggatcgccgtcgagtccgagtccgacggcctcgacgagctcaccgagatctgcagaggatgacgatacgatagtgctccacgaacgatgaatcccgatcattgtacaatgatgcaaatgcgttctggagattttgtgaaggaaaaaaactgaaacttgtggcgttgaccgcgcgccctgtgtcaagtgtcatgatgatatcgttcaaatgaatgacatctgaatttgagccttgactggttctgaacagttgtaggtttttccatggatgaggaaaaccaatagcatagccttatttacatcactttagaattggttcaagtacattacaagctcgttatggaacagctgagtttccatggatgagtagaatcaatagcagagccttacttcca

SEQ ID NO: 105474 - DNA, 377 bp, Zea Mays
tagtctgcctgtacctattggctgaagtagagctgacccccactttatcaagagttgctcaacaatggacgctggttgcctgtcatctatgaatattactggagctagccaggcaagatcttttgcggggcaacttcctcctcagagatgttttgcgagtagtcactatacaagctttgccgtgaaaaaaacttgtctcaaggaataaaggaaggagatcacaccgtagacatcctgccttgcaggttgtctgcaaggattttccaagacctccactagaaagcacaataaactatttggaagctggacaactctcttcattttttagaaacagagaacgccccagtaagccgttgcaggttgtggttgctggtgca

SEQ ID NO: 105475 - DNA, 270 bp, Zea Mays
atgccgtcttcgagggcgtcggcggtgcccagcgcgtcggacgaggaccccagccgcgcccactgcattgccttgtacgcctggttcttccccatctctccctcgtcgccaggctcggcgagaccagattggaatcggaaggggacgagccagggctcggggaccagagatccctttcgttctgctgctggaggcagggcgggtgcagcgacgggggcacacggcgaggggcggcggggtgggcgcggggtggaggcgtggcgccggtga

SEQ ID NO: 105476 - DNA, 3229 bp, Zea Mays
cggcccaaatagcatgccaaggggcaagcgcccaagctcacccgcgacgtcaagcctgccctaacctcgtgtttcccttgctcggcttcaccccatcgccgccgtcgcaacgtgcccgcctgtttcccttgctcgacttcaccccatcgccgccgccgccgtcgcaagcgacgatgctcgacatcaacttgttccgcaccgacaagggcggcaacccggagcttattcgtgagtcccagcgcagccggttcgcctccgtcgagctcgtcgacgaggtcatcgccctcgacaaggcatggcgcgaaaggcagttcgagctggacaagatccggcaggagctcaacgctaccagcaagaagattggcaagctcaaagccagcaagcaagaagaggaagcgaagaagctcatggagagcacagacgaaattaagaaaaggttggcagccaaagaagttgaggtgcaggaggccaagagcaccctcgacgccaagctcacgacgattgggaacatcgtgcatgagtccgtgccagtcagcgaagacgaggcaaacaataaaattgtacggacatttggagagaagagagtagaggaaaatttgaagaatcacgtggacctttgcaggatgcttgacattgtcgcattggagaagggtgctgatgtggctggtggtaggggtttctatttaaaggatgaaggtgtcctccttaacctggcattgataaattttgggctagcctttctgagaaaacggggatttaaaccaatgcaaactccctttttcatgagaaaggaaactatggcaaaatgtgcccagttggcccagtttgatgaggagctttacaaagttacaggtgatggtgaagacaaatatctcatagctacatcagagcagcctttatgtgcttatcacttaggtgatagaatataccctgctgaacttccaatcaaatatgctgggtactccacatgcttccggaaggaagctggttcgcatggaagggacacagctggtatcttcagagtccaccagtttgaaaaaatcgaacaattctgcattacaagcccaaatgacaacgattcttgggagatgcatgaagagatgctaaaaaactcagaagattactataaggagattgggctaccataccaagttgtttccattgtctctggcgctcttaatgatgctgctgctaagaaatatgatttggaagcatggttccctgcatcaaagaccttccgagagttagtatcctgttcaaactgcactgactttcagtcaaggagacttggaattgggtatggccagaaaaagaatgatgagcagtccaagcagtttgttcatatgctgaactctaccttgactgccactgagaggaccctctgttgtattctggagaatttccaaaaggaggacggcgtcgaggtgccaaaggcactgcaaccttatatgggtggaatagagtttcttcctttcaagcaacctttggatgtcaaacaagcttctgactccaaatcaaacaagtccaaatcaaagggaaatgctgcttgagctggatgaggaacactatgttaatttttgggcctaccagtacacaatacccatagcatgactatggcgttgcaggttttcgttttacccattttggtttcttggttgccacattatctaatgacctacctggcatacttatattgcaatagcatttcttgaaatctggaatatttgaccaccatcagctctaccggctgtgtttatcgcgttgccacagaacgctgcttgtttgtctccgaaaccaccagtgttctctgtagcacattagtaacaatttgctggtggatttgatatcatcttttttgaatgatggtgtattggtgtacttgtgatcgataatgaaaaagacatcttgtgttagtggcatctagtgctgttgtggctggaacctggaattgttcttggattctcccttcgcatctcttattttgaaacccggtgcggattgttcgcacgagagcgttttctgacggggtgggagtgcctccacctgtaagtcccagacgtgaaatcttcattcaattgcgctctgagcggggttccgacgcagcttcctcacgtgcctagccttccacacttctctgtctgcccacccgtcgccgcctcatcctcctagggttagggctcgcgtcgcggggggccgtggcgcctggtgcaatgcggaaaccgttggggccggcgctctgtgcatccgtctccgcgcgatctaggtgctggtggcgttctccctgatcgacgcgctcgccatgttattcttattcctcgaatcgccccttgtgtttacgtcgctgctcggggcaggggtggctgccgcagcgtcgcggaagctcgacctctatgacgcgaggcaagcaatgccggcgcgtctcgtgaagagcatccgcacagggaggccctctcgacggacgcatggtggcgatgggcgcaccggttagcgtggatcgtctctggcctcgacctcccgccacctcaactctacatgccctggcttgctccgcaaggcatgatatgctgttcggggagcctgggaagagtggtctcgtggctctcaacttggatttcgatcaagtcaagaagtttatcaaggagcggctggggattgaggttgagatgggtggttgcaaggcttaattacgaccttcatcgtcgagccatttgtgccacatgatcaagactactagctttcgattatttcagagaggttgggcagcaccatcagcttctcagagtgtggagggattgagatcgaggagaactgggacaaagttaagactatttttcttcctactgagaagccaacgaggcaacgacgtctgattcatgtgctcctttgattgcgacccatccattggaggcacacagaaaaattggcgacttcattaaaggagtatttgctgtcttccaagatgaatccgttcactatggtcaacggggagacatatcctctggacatcagaggagaactagatgacacaacagccttcaaaaacttcaagaagtgaatctgataaacagggataccatttcttgttgtcattgttggatttactcttatcaattgtgcaggtggggaggtatagaattccctctaccttttggaagagtactcagccctacagaaagtttcatccatgaactagatgagaaggtattgatctctgggctatatttttatc

SEQ ID NO: 105477 - DNA, 4279 bp, Zea Mays
cggcccaaatagcatgccaaggggcaagcgcccaagctcacccgcgacgtcaagcctgccctaacctcgtgtttcccttgctcggcttcaccccatcgccgccgtcgcaacgtgcccgcctgtttcccttgctcgacttcaccccatcgccgccgccgccgtcgcaagcgacgatgctcgacatcaacttgttccgcaccgacaagggcggcaacccggagcttattcgtgagtcccagcgcagccggttcgcctccgtcgagctcgtcgacgaggtcatcgccctcgacaaggcatggcgcgaaaggcagttcgagctggacaagatccggcaggagctcaacgctaccagcaagaagattggcaagctcaaagccagcaagcaagaagaggaagcgaagaagctcatggagagcacagacgaaattaagaaaaggttggcagccaaagaagttgaggtgcaggaggccaagagcaccctcgacgccaagctcacgacgattgggaacatcgtgcatgagtccgtgccagtcagcgaagacgaggcaaacaataaaattgtacggacatttggagagaagagagtagaggaaaatttgaagaatcacgtggacctttgcaggatgcttgacattgtcgcattggagaagggtgctgatgtggctggtggtaggggtttctatttaaaggatgaaggtgtcctccttaacctggcattgataaattttgggctagcctttctgagaaaacggggatttaaaccaatgcaaactccctttttcatgagaaaggaaactatggcaaaatgtgcccagttggcccagtttgatgaggagctttacaaagttacaggtgatggtgaagacaaatatctcatagctacatcagagcagcctttatgtgcttatcacttaggtgatagaatataccctgctgaacttccaatcaaatatgctgggtactccacatgcttccggaaggaagctggttcgcatggaagggacacagctggtatcttcagagtccaccagtttgaaaaaatcgaacaattctgcattacaagcccaaatgacaacgattcttgggagatgcatgaagagatgctaaaaaactcagaagattactataaggagattgggctaccataccaagttgtttccattgtctctggcgctcttaatgatgctgctgctaagaaatatgatttggaagcatggttccctgcatcaaagaccttccgagagttagtatcctgttcaaactgcactgactttcagtcaaggagacttggaattgggtatggccagaaaaagaatgatgagcagtccaagcagtttgttcatatgctgaactctaccttgactgccactgagaggaccctctgttgtattctggagaatttccaaaaggaggacggcgtcgaggtgccaaaggcactgcaaccttatatgggtggaatagagtttcttcctttcaagcaacctttggatgtcaaacaagcttctgactccaaatcaaacaagtccaaatcaaagggaaatgctgcttgagctggatgaggaacactatgttaatttttgggcctaccagtacacaatacccatagcatgactatggcgttgcaggttttcgttttacccattttggtttcttggttgccacattatctaatgacctacctggcatacttatattgcaatagcatttcttgaaatctggaatatttgaccaccatcagctctaccggctgtgtttatcgcgttgccacagaacgctgcttgtttgtctccgaaaccaccagtgttctctgtagcacattagtaacaatttgctggtggatttgatatcatcttttttgaatgatggtgtattggtgtacttgtgatcgataatgaaaaagacatcttgtgttagtggcatctagtgctgttgtggctggaacctggaattgttcttggattctcccttcgcatctcttattttgaaacccggtgcggattgttcgcacgagagcgttttctgacggggtgggagtgcctccacctgtaagtcccagacgtgaaatcttcattcaattgcgctctgagcggggttccgacgcagcttcctcacgtgcctagccttccacacttctctgtctgcccacccgtcgccgcctcatcctcctagggttagggctcgcgtcgcggggggccgtggcgcctggtgcaatgcggaaaccgttggggccggcgctctgtgcatccgtctccgcgcgatctaggtgctggtggcgttctccctgatcgacgcgctcgccatgttattcttattcctcgaatcgccccttgtgtttacgtcgctgctcggggcaggggtggctgccgcagcgtcgcggaagctcgacctctatgacgcgaggcaagcaatgccggcgcgtctcgtgaagagcatccgcacagggaggccctctcgacggacgcatggtggcgatgggcgcaccggttagcgtggatcgtctctggcctcgacctcccgccacctcaactctacatgccctggcttgctccgcaaggcatgatatgctgttcggggagcctgggaagagtggtctcgtggctctcaacttggatttcgatcaagtcaagaagtttatcaaggagcggctggggattgaggttgagatgggtggttgcaaggcttaattacgaccttcatcgtcgagccatttgtgccacatgatcaagactactagctttcgattatttcagagaggttgggcagcaccatcagcttctcagagtgtggagggattgagatcgaggagaactgggacaaagttaagactatttttcttcctactgagaagccaacgaggcaacgacgtctgattcatgtgctcctttgattgcgacccatccattggaggcacacagaaaaattggcgacttcattaaaggagtatttgctgtcttccaaggtggggaggtatagaattccctctaccttttggaagagtactcagccctacagaaagtttcatccatgaactagatgagaaggtattgatctctgggctatatttttatctgtatttctttccctggggtctatcacatataaaataatcagtttccatgagaaatacgggatctgcagtgtattctgttgatgtgtgttaattcgccaaccttgttatttcagacaagtgcttgttcttttgtgctactttgcatgtcctgttgatgttataccctgatttaaggctgttcttcattttccttgcgactggatttgaacctgaggacgatgtttgtaggaccatgcatctattgtatttaaagtttaaattaaacataaccacctttttctaatgaaaatatgatgctgcgcttacctgtgttaaatttagtagttcccctttcactgagctaataaaaagttgctttgttgtgatgccatggctagcaagttctttcatctttgtttgccattctattgttgatagtgagagtgagcatgaggtgcacgctgatgtactcaagcggttcaaactgccagcgaagatcatgtagagctcctctcttcactttcactaccacacacacaaagagttctcagtgtttccttttgtatgcagggagttttccgtaccgccgacatgtgaacgatttatatagggacttccctactactgctttaacacttctggactatctacttgcggtgtttgtcagtttggtcattctatcttaaactgcatgcaattcttttcctgagggttgagctaacgtgaacctcaaattccacagattgagataatcttgggaaagagtgacaaattcgatgagttgatggttgctgccgccgccgagaggcgagaagttgaagatgaagagcaggcttgaaaaaacagtgccgaccatccctgccacgcgtgacgcctccgccggcccccgtaggatcctttcgtctcctgctgtggcctcttcattcgcagccgccccatcagcccatcctccacggctggcctgaatcgccttgcagccccttgtcttccccgtccgcctcttttactgatttgtttgaaaggtaacagtgtgttgctcttttgttgttttgatgattctaactgaatgtataaagaagtcccctctccgatgcatcctatacatgttccttcccctcattgcatgtctccctactctttgcagtcataaccattttattgtcttttgttgctaggtcgaaaccttatatagtgctagatgtcttagcagtaacatcggtactactggct

SEQ ID NO: 105478 - DNA, 321 bp, Zea Mays
atgctgaagaaacagcgaacacaccggaacaccttcttacagtttactagagtgcaaaacccaccccctcgcacgcgcagaagagctgctgcgtccaggaaaccagtgacttgccttcagatcaagagccgcaccagagccagccagccagccattgctcatcacgagaaggtttcgggcagaggctggccctgcaggaacgctcggaagagcacgagcgaccggccgggctgcgagaagggcgcctcgtgggaggcgcctctgacggtggcgaaggacagcgcgccgcctccgtacacctgtgtccatcctccaacctgc

SEQ ID NO: 105479 - DNA, 109 bp, Zea Mays
tttttttattttttaattattttaagaaaagtatgtgttcaatatctcttaatataggcagagatggattggactcacccaagcttagtcactggtggatgcctgatgc

SEQ ID NO: 105480 - DNA, 108 bp, Zea Mays
gtttccatgtatttgcttctccatgttcattctttgtttttcatgtatttgaattttcacaatgttagattaattcgccttcttgaaaaatgaataagtcaccgaaag

SEQ ID NO: 105481 - DNA, 181 bp, Zea Mays
ttaacagaactcgcatgagaattgcttattatactacagtagtacaagtcataaaaaatatacatgatttagaaaaaagggagaggttgagcatgctcatacaatcactcttgaacccaattttcttcttagcggcaagtgtgctttcagtggaagacatatcttcgctcatcatggcttg

SEQ ID NO: 105482 - DNA, 234 bp, Zea Mays
atgggggtcgatggggacggcgctctagcggcggctgacgacgaacagaaggccgacgtcgagcatcgcggagcaagggagttaggggcgcgggacgagcatggggtggctgagaacagaatccatgggctcggtgtcaggttttatagagaagagaagaagggaggggtgccgggaggagagaaatggccagtggtgccattaatgccatcaatggcatcggtggttacttag

SEQ ID NO: 105483 - DNA, 1831 bp, Zea Mays
tcctctgcagctctgccacccccaagaaagcgaggacgacggctcgccctcgcgcggcgccttcatcatgctcccgccgttcggcaacccgctctgggtaccggaggacatggacgaccagcagcagcacgcgcctccgccgacgcccatggagttgctgacggtgccggcgcaggggcacgaggagcagaacctcctagccctggcctcggccgccgccgttgccggggccggatgtgttttcagctcaccggcgatgctcgatgacgactggtacttcgaccccgtggctgcggccgccgccaccggcgcgcaggggcacctgctcctggcgccgccggggccggtgcccggccccggcgccggctcgcagatgttctccctcttcaacgttggcggcgccgcgacgttcgacgtccatgggttcgacattggcctcggcacgctcggcggcgggtccggtggcgacctggtcccgttggcgggtgcagggaacacatcgaattccgcgtccttttccatgtccctgaacgccggcctcctcgcctcctcgttcggcggctttggcacagcgccggcgcaaatgccggacttcggcggcctgggcgggttcgacatgttcaacaacggcgccggctcctcctccgcggcgccccctcctgcctcggcgtcccttacggtgccgttctccgggcgcgggaagcccgccgtgctccgcccgctggagaccttcccgcccgtgggcgcgcagccgacgctgttccagaagcgcgcgctgcgccgcaacggcggcggggaggactacgacaagaagcgcaaggcggaggccaccgccgcggctgcgggagcttcgtcggcctgtggcggtgacgacgctgaggacgatgacggcgggagcatcgacgcgtccgggctcaactacgactcggaggacgcctgcaggggcgtcgaggatagtggaaagaaggacggcaagggttccaacgccaacagcgcgggcgacgggaaaggtaagaggaagaggttgccggccaagaacctcatggcggagcgccgtcgccggaagaagcttaatgaccggctctacatgctccgatccgtcgtgcccaagatcagcaagatggacagggcctccattctcggcgacgcgatcgagtacctgaaggagctgctgcggaagatcgaggagctccagaacgaggtggagtcatcagcatccccagcttccacggcctcgctgcctccgacgcccacgagcttccgccctctgactcccacgctgcccgccctaccatctcgcgtgaaggaagagctgtgcccgagcgcgttgcctagccctacttccaagcaaccaagggttgaggtgaggacgacgagggaagggcgggaggtgaacatccacatgctctgcgctcgcaggcctgggcttctgctcgctaccatgagggcaatcgaagggctcgggctcgacgtccagcaagctgttgccagttgcttcaacgggttttccttggacatcttcaaggctgagctgtgcaaggacggcccagcgctcctcctcctgccagaagaagagatcaagtccgtcctcctgcagtctgccgggctccatggcgtggcgccgtgacgccggacggcaggactgcgtgctcacccagccgccaaagaagaaaataaaaagggaacgatgtagcttctgtcagatctgtcccttctccctgtcctgtatacattggatggctctttctgtttgccgtggtggctggctctgcccggccaaaacagtcgcgtggttgtggttcgctgcagccgagagaactgttccctttct

SEQ ID NO: 105484 - DNA, 2197 bp, Zea Mays
gccaggccgccagctactcgccgggcatcgtcgcccaccgccaggtggggccccgtcccaagcttcttcttagctgcttgcctgcttgacctgaggcctccgccggtcgcaacaacagtctacagtcaatcacagtccccgcttcccggcggccaccgctgcatcctccctttccacgctccactctcctagcgcgcccgccttcatgggccccgttcgactcgccctcctcctttccgtcgccgccgtcctcgccgccgcgggcgcggtgtacatcccctacaacacgtcggcgggggtggtgccggggaagctcaacgtgcacgtcgtgccgcacacccacgacgacgtcggatggctcaagaccgtagaccagtactacgtcggatccaacaactccatccagggggcatgcgtgcagaacgtgctggattcgctcatcccggcgcttctcaaggacgagaaccgaaagttcatctatgttgagcaggcattcttccaaagatggtggaggaaccagaatgacatgatcaaggatacagtgaaggggctcatcagctctggacggctggaattaataaatggtggcatgtgcatgcacgatgaggcggctgtacactatattgacatgatcgatcagactacacttggacacaagtacatcaaggaggagtttggccagatcccacggattggctggcagattgatccgtttgggcactctgcggttcaggcttaccttcttggcgcagaagtaggattcgatgctttctatttcttccggattgattaccaagaccgtgatacacggaaaggaacaaaagaactcgaggttgtatggaggggctccaagaccttgggctcatcggctgatgtaagtggcttgtttctttttcaaaagtacacaatgcacctcgttatatgttccatttacatctttgctggcatctttccaaaaaactatgaaccacctcctggtgatttttattttgaagttgatgataattcccctgttgtccaggatgatccccttcttttcgattataatgttgaagaacgagttaatgattttgttgctgcagctgtagcacaggcaaatatcacgaggacaaatcatatcatgtttacaatgggaacagacttcaaataccaatacgcagagagttggttcagaaatatggacaagctaattcactatgtgaacaaggatggccgtatcaacgctctttattccacaccttcgatttataccgatgcaaaatatgctgcaaatgagcagtggcctctcaagaccaatgatttcttcccatatgcagacaacccaaatgcctattggacgggttactttacaagcagacctgccttaaaacgatatgtccgcatgatgagtgggtattacctggcagctagacagctggagttctttaaagggagatatagctcaggtctctcaacggatagtctaggtgatgctctagctcttgcacagcaccatgatgctgttacaggaacagagaaacaacatgttgcaaatgattatgcaaagagattgtcaattggatatacacaagcccaggagctcgtttcaacttctcttgcttgcttgacagagtctggctcaaaatcacgttgtgcatccccagtgacaaaattttcacaatgtcttctgctaaatgttacatattgccctccttctgagatggacttaacgaaaggaaaaagcttggttgttcttgtatacaactcgcttgggtggaaacgagaagacgtcattcgtataccagttttcagtgattcgattgtcgttcatgattctgaaggacgagaaattgaatcacaacttctgcctatagctacagcctcgttgaacataagagaaaaacatgtcaaggcttacctgggcacaacgccaggtgcaaagcccaagttttggcttgcttttcctgtgtctgttccacctcttggtttcaatacttattttgtctcaaacttgaagaaatcagcacatatttcttcgaagtccactcagtactcacctcaaggaagtgaaagtagtaatctacaagttggtcaaggcaacttgaaacttcaatataatgaagctggaaaattatccctgtactccgatagtaagactatggtaatgtgccagtggataaatctgatgtgtgcactactttttatttggtgctttcat

SEQ ID NO: 105485 - DNA, 3453 bp, Zea Mays
gccaggccgccagctactcgccgggcatcgtcgcccaccgccaggtggggccccgtcccaagcttcttcttagctgcttgcctgcttgacctgaggcctccgccggtcgcaacaacagtctacagtcaatcacagtccccgcttcccggcggccaccgctgcatcctccctttccacgctccactctcctagcgcgcccgccttcatgggccccgttcgactcgccctcctcctttccgtcgccgccgtcctcgccgccgcgggcgcggtgtacatcccctacaacacgtcggcgggggtggtgccggggaagctcaacgtgcacgtcgtgccgcacacccacgacgacgtcggatggctcaagaccgtagaccagtactacgtcggatccaacaactccatccagggggcatgcgtgcagaacgtgctggattcgctcatcccggcgcttctcaaggacgagaaccgaaagttcatctatgttgagcaggcattcttccaaagatggtggaggaaccagaatgacatgatcaaggatacagtgaaggggctcatcagctctggacggctggaattaataaatggtggcatgtgcatgcacgatgaggcggctgtacactatattgacatgatcgatcagactacacttggacacaagtacatcaaggaggagtttggccagatcccacggattggctggcagattgatccgtttgggcactctgcggttcaggcttaccttcttggcgcagaagtaggattcgatgctttctatttcttccggattgattaccaagaccgtgatacacggaaaggaacaaaagaactcgaggttgtatggaggggctccaagaccttgggctcatcggctgatgtaagtggcttgtttctttttcaaaagtacacaatgcacctcgttatatgttccatttacatctttgctggcatctttccaaaaaactatgaaccacctcctggtgatttttattttgaagttgatgataattcccctgttgtccaggatgatccccttcttttcgattataatgttgaagaacgagttaatgattttgttgctgcagctgtagcacaggcaaatatcacgaggacaaatcatatcatgtttacaatgggaacagacttcaaataccaatacgcagagagttggttcagaaatatggacaagctaattcactatgtgaacaaggatggccgtatcaacgctctttattccacaccttcgatttataccgatgcaaaatatgctgcaaatgagcagtggcctctcaagaccaatgatttcttcccatatgcagacaacccaaatgcctattggacgggttactttacaagcagacctgccttaaaacgatatgtccgcatgatgagtgggtattacctggcagctagacagctggagttctttaaagggagatatagctcaggtctctcaacggatagtctaggtgatgctctagctcttgcacagcaccatgatgctgttacaggaacagagaaacaacatgttgcaaatgattatgcaaagagattgtcaattggatatacacaagcccaggagctcgtttcaacttctcttgcttgcttgacagagtctggctcaaaatcacgttgtgcatccccagtgacaaaattttcacaatgtcttctgctaaatgttacatattgccctccttctgagatggacttaacgaaaggaaaaagcttggttgttcttgtatacaactcgcttgggtggaaacgagaagacgtcattcgtataccagttttcagtgattcgattgtcgttcatgattctgaaggacgagaaattgaatcacaacttctgcctatagctacagcctcgttgaacataagagaaaaacatgtcaaggcttacctgggcacaacgccaggtgcaaagcccaagttttggcttgcttttcctgtgtctgttccacctcttggtttcaatacttattttgtctcaaacttgaagaaatcagcacatatttcttcgaagtccactcagtactcacctcaaggaagtgaaagtagtaatctacaagttggtcaaggcaacttgaaacttcaatataatgaagctggaaaattatccctgtactccgatagtaagactatggttcaagcaaactttgagcagaaatacaagtattatattggacaggatggaaatggaagtgatcctcaggcttctggagcatacatattccgccctaatggcacagttccaatcagtactgatgggcaggtttctctcacagttctgcgtgggcccatattggatgaagtgcaccagcagataaattcatggatttttcagattaccaggctttacaaggagaaggactttttggaaactgaatttatagttgggcccataccagtagatgatggaaatggaaaagaagtagcaactgaaattgttacaaacatggttacaaacaaaacattctacactgattccagtggacgtgatttcatcaaaaggataagagattatcgatcggagtggaagattgaagtgcaccagcctattgctggaaactattatcctgttaatcttggcatctatgtggaggatggcagcaaagagctgtctgtactggtagacaggtcaattggaggttccagtataaaggatggacaaatagagctaatgctacacaggaggctactccatgatgatgggaaaggcgtcgccgaggcgctaaatgaaacagtctgtctcgataagcaatgtgaaggactcattatacaaggaaaatactatgtcaaaatagacccacaaggagaaggagctcggtggcgtcggacatttggccaggaaatatactcccctctccttcttgctttcacagagcaggatggaggcaactgggcgaattcacatgttgcaaaattctctgcgatggattcaacttacagcttgcctgataatgttgcaatgcttacccttcaggagcttgaagatggaagtgttctccttcggtttgctcatctatatgaggccggggaggacaaggatctttcgtctttagcgagtatcgacctcaagagagtgttcccggagaagaagattggcaaggtcatcgagacaagcttatcggcaaaccaagaacgcgcagccatggagaagaagcgtttgaaatggaaggcgcaaggttctgcggctgacgagaaggtggttcggggtggccctgtggatccttcgaagctcgtcgttgagctggggccaatggagatccgcacattcatcgtcagctttgatcacatcagtgacaagcaacagctataatcgtctccgactagacgactatgtctggatgaagttgtcttgcggcttccaaataaaaaaaataatgtggcctgctgtgtacctgtggttcaacccatgatatggcctgctgtgggtcagcacggttctaaagctaa

SEQ ID NO: 105486 - DNA, 3401 bp, Zea Mays
caacaacagtctacagtcaatcacagtccccgcttcccggcggccaccgctgcatcctccctttccacgctccactctcctagcgcgcccgccttcatgggccccgttcgactcgccctcctcctttccgtcgccgccgtcctcgccgccgcgggcgcggtgtacatcccctacaacacgtcggcgggggtggtgccggggaagctcaacgtgcacgtcgtgccgcacacccacgacgacgtcggatggctcaagaccgtagaccagtactacgtcggatccaacaactccatccagggggcatgcgtgcagaacgtgctggattcgctcatcccggcgcttctcaaggacgagaaccgaaagttcatctatgttgagcaggcattcttccaaagatggtggaggaaccagaatgacatgatcaaggatacagtgaaggggctcatcagctctggacggctggaattaataaatggtggcatgtgcatgcacgatgaggcggctgtacactatattgacatgatcgatcagactacacttggacacaagtacatcaaggaggagtttggccagatcccacggattggctggcagattgatccgtttgggcactctgcggttcaggcttaccttcttggcgcagaagtaggattcgatgctttctatttcttccggattgattaccaagaccgtgatacacggaaaggaacaaaagaactcgaggttgtatggaggggctccaagaccttgggctcatcggctgatatctttgctggcatctttccaaaaaactatgaaccacctcctggtgatttttattttgaagttgatgataattcccctgttgtccaggatgatccccttcttttcgattataatgttgaagaacgagttaatgattttgttgctgcagctgtagcacaggcaaatatcacgaggacaaatcatatcatgtttacaatgggaacagacttcaaataccaatacgcagagagttggttcagaaatatggacaagctaattcactatgtgaacaaggatggccgtatcaacgctctttattccacaccttcgatttataccgatgcaaaatatgctgcaaatgagcagtggcctctcaagaccaatgatttcttcccatatgcagacaacccaaatgcctattggacgggttactttacaagcagacctgccttaaaacgatatgtccgcatgatgagtgggtattacctggcagctagacagctggagttctttaaagggagatatagctcaggtctctcaacggatagtctaggtgatgctctagctcttgcacagcaccatgatgctgttacaggaacagagaaacaacatgttgcaaatgattatgcaaagagattgtcaattggatatacacaagcccaggagctcgtttcaacttctcttgcttgcttgacagagtctggctcaaaatcacgttgtgcatccccagtgacaaaattttcacaatgtcttctgctaaatgttacatattgccctccttctgagatggacttaacgaaaggaaaaagcttggttgttcttgtatacaactcgcttgggtggaaacgagaagacgtcattcgtataccagttttcagtgattcgattgtcgttcatgattctgaaggacgagaaattgaatcacaacttctgcctatagctacagcctcgttgaacataagagaaaaacatgtcaaggcttacctgggcacaacgccaggtgcaaagcccaagttttggcttgcttttcctgtgtctgttccacctcttggtttcaatacttattttgtctcaaacttgaagaaatcagcacatatttcttcgaagtccactcagtactcacctcaaggaagtgaaagtagtaatctacaagttggtcaaggcaacttgaaacttcaatataatgaagctggaaaattatccctgtactccgatagtaagactatggttcaagcaaactttgagcagaaatacaagtattatattggacaggatggaaatggaagtgatcctcaggcttctggagcatacatattccgccctaatggcacagttccaatcagtactgatgggcaggtttctctcacagttctgcgtgggcccatattggatgaagtgcaccagcagataaattcatggatttttcagattaccaggctttacaaggagaaggactttttggaaactgaatttatagttgggcccataccagtagatgatggaaatggaaaagaagtagcaactgaaattgttacaaacatggttacaaacaaaacattctacactgattccagtggacgtgatttcatcaaaaggataagagattatcgatcggagtggaagattgaagtgcaccagcctattgctggaaactattatcctgttaatcttggcatctatgtggaggatggcagcaaagagctgtctgtactggtagacaggtcaattggaggttccagtataaaggatggacaaatagagctaatgctacacaggaggctactccatgatgatgggaaaggcgtcgccgaggcgctaaatgaaacagtctgtctcgataagcaatgtgaaggactcattatacaaggaaaatactatgtcaaaatagacccacaaggagaaggagctcggtggcgtcggacatttggccaggaaatatactcccctctccttcttgctttcacagagcaggatggaggcaactgggcgaattcacatgttgcaaaattctctgcgatggattcaacttacagcttgcctgataatgttgcaatgcttacccttcaggagcttgaagatggaagtgttctccttcggtttgctcatctatatgaggccggggaggacaaggatctttcgtctttagcgagtatcgacctcaagagagtgttcccggagaagaagattggcaaggtcatcgagacaagcttatcggcaaaccaagaacgcgcagccatggagaagaagcgtttgaaatggaaggcgcaaggttctgcggctgacgagaaggtggttcggggtggccctgtggatccttcgaagctcgtcgttgagctggggccaatggagatccgcacattcatcgtcagctttgatcacatcagtgacaagcaacagctataatcgtctccgactagacgactatgtctggatgaagttgtcttgcggcttccaaataaaaaaaataatgtggcctgctgtgtacctgtggttcaacccatgatatggcctgctgtgggtcagcacggttctaaagctaaggacgttttataaggcaaattttgctttagggtgtcactcctctcctcacgttgcaaaaatacagaaaaaaccagcgaaaacatgattgcaaacagatatacaacaaaataaatgaa

SEQ ID NO: 105487 - DNA, 1985 bp, Zea Mays
gttctgtgtgtgcacttcattatgattgtatttcttgttccagatatgcagacaacccaaatgcctattggacgggttactttacaagcagacctgccttaaaacgatatgtccgcatgatgagtgggtattacctggcagctagacagctggagttctttaaagggagatatagctcaggtctctcaacggatagtctaggtgatgctctagctcttgcacagcaccatgatgctgttacaggaacagagaaacaacatgttgcaaatgattatgcaaagagattgtcaattggatatacacaagcccaggagctcgtttcaacttctcttgcttgcttgacagagtctggctcaaaatcacgttgtgcatccccagtgacaaaattttcacaatgtcttctgctaaatgttacatattgccctccttctgagatggacttaacgaaaggaaaaagcttggttgttcttgtatacaactcgcttgggtggaaacgagaagacgtcattcgtataccagttttcagtgattcgattgtcgttcatgattctgaaggacgagaaattgaatcacaacttctgcctatagctacagcctcgttgaacataagagaaaaacatgtcaaggcttacctgggcacaacgccaggtgcaaagcccaagttttggcttgcttttcctgtgtctgttccacctcttggtttcaatacttattttgtctcaaacttgaagaaatcagcacatatttcttcgaagtccactcagtactcacctcaaggaagtgaaagtagtaatctacaagttggtcaaggcaacttgaaacttcaatataatgaagctggaaaattatccctgtactccgatagtaagactatggttcaagcaaactttgagcagaaatacaagtattatattggacaggatggaaatggaagtgatcctcaggcttctggagcatacatattccgccctaatggcacagttccaatcagtactgatgggcaggtttctctcacagttctgcgtgggcccatattggatgaagtgcaccagcagataaattcatggatttttcagattaccaggctttacaaggagaaggactttttggaaactgaatttatagttgggcccataccagtagatgatggaaatggaaaagaagtagcaactgaaattgttacaaacatggttacaaacaaaacattctacactgattccagtggacgtgatttcatcaaaagggttaatcttggcatctatgtggaggatggcagcaaagagctgtctgtactggtagacaggtcaattggaggttccagtataaaggatggacaaatagagctaatgctacacaggaggctactccatgatgatgggaaaggcgtcgccgaggcgctaaatgaaacagtctgtctcgataagcaatgtgaaggactcattatacaaggaaaatactatgtcaaaatagacccacaaggagaaggagctcggtggcgtcggacatttggccaggaaatatactcccctctccttcttgctttcacagagcaggatggaggcaactgggcgaattcacatgttgcaaaattctctgcgatggattcaacttacagcttgcctgataatgttgcaatgcttacccttcaggagcttgaagatggaagtgttctccttcggtttgctcatctatatgaggccggggaggacaaggatctttcgtctttagcgagtatcgacctcaagagagtgttcccggagaagaagattggcaaggtcatcgagacaagcttatcggcaaaccaagaacgcgcagccatggagaagaagcgtttgaaatggaaggcgcaaggttctgcggctgacgagaaggtggttcggggtggccctgtggatccttcgaagctcgtcgttgagctggggccaatggagatccgcacattcatcgtcagctttgatcacatcagtgacaagcaacagctataa

SEQ ID NO: 105488 - DNA, 1144 bp, Zea Mays
gttttagaacctgtttatttcatgttctcttattactctgtattttttctattgagaattgagatcactttgtgtttgtgagaaaagaggtagagatctttaagaaattagaatgctggtacaactcttacatgtaagttctgttgggaaaattagtaaaaagatgagggattatgtgtatcttttcaggttaatcttggcatctatgtggaggatggcagcaaagagctgtctgtactggtagacaggtcaattggaggttccagtataaaggatggacaaatagagctaatgctacacaggaggctactccatgatgatgggaaaggcgtcgccgaggcgctaaatgaaacagtctgtctcgataagcaatgtgaaggactcattatacaaggaaaatactatgtcaaaatagacccacaaggagaaggagctcggtggcgtcggacatttggccaggaaatatactcccctctccttcttgctttcacagagcaggatggaggcaactgggcgaattcacatgttgcaaaattctctgcgatggattcaacttacagcttgcctgataatgttgcaatgcttacccttcaggagcttgaagatggaagtgttctccttcggtttgctcatctatatgaggccggggaggacaaggatctttcgtctttagcgagtatcgacctcaagagagtgttcccggagaagaagattggcaaggtcatcgagacaagcttatcggcaaaccaagaacgcgcagccatggagaagaagcgtttgaaatggaaggcgcaaggttctgcggctgacgagaaggtggttcggggtggccctgtggatccttcgaagctcgtcgttgagctggggccaatggagatccgcacattcatcgtcagctttgatcacatcagtgacaagcaacagctataatcgtctccgactagacgactatgtctggatgaagttgtcttgcggcttccaaataaaaaaaataatgtggcctgctgtgtacctgtggttcaacccatgatatggcctgctgtgggtcagcacggttctaaagctaaggacgttttataaggcaaattttgctttagggtgtcactcctctcctcacgttgcaaaaatacagaaaaaaccagcg

SEQ ID NO: 105489 - DNA, 1258 bp, Zea Mays
gaaggcaagagagggagtatgagatgacactcaagagaacgttgcagagtatttgcttgctcacagttcatgctaacaccaccacctctgtcgtgcttcaggctcagggttctttggatcgtcgaggtgttttttcattggacacacattcaccatcagtctgccttttgattcaattggaaaaggctgctactgaagaagggggagtaacaccttctgtttattctcataaagagcctgtgcacttagctaagaaagagaagcaaaagctgcaagtatggtctcgaattatgccttgtaaagagtcatttgcatgggccatgattcctctgtttgaagctccgattctaacaagaaccttcctattgcagttgaaacggaaacataacgacagaacagaaaatgaagctaccgaatcaaatgactggatgagccctggatatgctaatgctggcagcagcccagttcctacacccccttcagggaaaggtttaaaagcatccaccaagcctaaggctacgaagggccagaaatctggtcctcggacccctttgggttttggttctccgggcaatccttctactcctgttggtggctgccgctatgatagctccctcgggctcttgacaaagttcctgaacttgctaaaaggtgcacctggtggcattgttgatctgaataatgctgcagaaactctagaggtacagaaaaggcgtatatatgacatcactaatgttcttgaagggataggactgatagaaaagaagcttaagaacaacatccgttggaaaggagttgacgactctcgacccggagcatagggaggatatgtccattttacaggcagatatcaatgctctcacactgcaagagcgcaatttggatgaacgaataaggttagacaccagttgttaaaaggctcatttgttcttgcgatggggacaacgagatacggttctggagcatcaagcatggaaatgttgtccgaattttcaagggaggttcgacctagctgagattccaaccacgttatggaggactcgttgcaacggcttcagacaatgtagtctctatcctggatgtggagaggcaagctttcgtgaggagatttgagagccacactaagggcgtcgattccgtgtgctgggatcccaccggcgagtacgtggtgtctgtcagcgaagacacggtgaaggtgtggtctttgaacgacgagagcttcgtgaacgagcttagctgcggcgggagaaagttatcg

SEQ ID NO: 105490 - DNA, 507 bp, Zea Mays
atggcgccggcgcgagctctccggggatgggctagggcacggcgcggacgcgagaatggcgatagtgggcaggggcatggtgtagcctgtggaggcgagcagggagggtgggtcgtgggagtggcagcggtgtggggaggagagtcgggggagatgaggtcctcggctagggtgaggacagcaaaggtggcggcctttagttgcaataggcttcttatcaagagccatcaagtacctggtacaattcacaagcgcgatttgaacgaagtgaagtactcttggattctcaaattcacacgaaaagtactgggagcgcggttgaataaccatgccaagaagacccgccagcctttggcgacgtcactgcctcctgccgctgtagtggagccgttgcagcaggcggcagcacggagcagttgtaggctaccgcgtttgcgcgggcggatggcggctaggccaaacaaccatgaagttgaagaaccacaagtacctcccatcgtgcattga

SEQ ID NO: 105491 - DNA, 738 bp, Zea Mays
atgtcgtcggccgccgcctcctcctctcccgccgccggtagcgaaggaagcggtggtgcggtggaagggcgggagatcgcgtacgtgagctacggaggggagcatcacctgccgctggtaatgtcgctggtcgacgaggagctcagcgagccctactccatcttcacataccgctacttcgtgtacctctggccgcagctcaccttcctggcgttcgatgccagggatggcaagtgcgtggggacggtcgtgtgcaagatgggggagcaccggggtgcattcaggggctacatcgccatgctcgtcgtcctgaagccctaccgaggaaggggaatagcaactgagctagttactagatcaattcgggtgatgatggagtctggctgtgaggaggtgacacttgaagcagaagttactaacaagggtgcccttgctctctatggtcgcctggggtttatccgagcaaaaagactgtacaggtactatttgaatggtgtagacgcttttcggctgaaacttctgtttccacgccctgatcctggcctgcctccaatgatggttggcaatgacagggatgaccagaagatggattctccctacttgtgacagtaccctaatcagtatgtagaattgagttggagaccctgatcattcttttttgctctgtttcatgcttttatagctagcatgtaactgcatattgttgtactaacatataaattttcgaggtgttttatt

SEQ ID NO: 105492 - DNA, 1635 bp, Zea Mays
gacgtcttcccttccccaccgcgcccctgcccccactctcccacttcagatctcctcgtccactccgtcgccgtcgtcttcctctctcccctcccgccggccgatgcatcccaaaccctagccctccggcgcaaaaccctagatcccgcccccgcctgcatggatccctcatccggatccacgtcccgccacgggcgtctcctcatctcgccgtcgctatccaccccgaccttctccacccactccccgtccccctcatcggccgcgtcccccgcgccgcaccgcaactccacatcctctccgaagcccctcgtatctttcccctcaccctcttccgccaacaggccccgatcctcctacgtcggcgctggaccgcgcgctgccaccgcagcggcctcggcctcgggtccggcgttcgcccacaacgcgcgccttgcggcggccctggtccctgccgcggccttccttctcgaccttggcgggctccccgtcttcgccgtcctcgccatcggcctagcggcggcataccttctcgacgcgctccagctgcgccagggctccttcttcaccgtctgggcggcgctgctcgcggccgatgtcgcttttttcttctccgcctccctatcgtccgcggccgctgcctcgctgccgctgaccgtcctcgcgctgcttctctgcgctgagacctccttcctcattggcgtctgggcgtcgctgcagttccgatggatccagctcgagaacccgactattgttgctgccctggagcggctgctctttgcctgtgtgcccattgccgcccccgccctcttcacgtgggctctcgtgtctgcggtcggcatggccaatgcatcctactattttgccacgttctgcatggtgttctactggctgttctctataccccgtcggtccagcttcaatagccggaagcaggatgctccaatgctggacagtgatggcattcttggtcccttggagagctgtgtgcattctctgtatgtgctgttcgtgccggtgttgttccatgccgtgtcccatcgtgcaacactcttcacatcgttggccagtgtgtgtgaattgttgttgctgttcttcataccgttcttgttccagctgtatgcatccactcgtggtgcactgtggtggatcaccagggatgcacgcaccatggaccagataagaattgtgaatgggttcgtcgcactggtcgtggtggtgctttgccttgaggtgagagttgtgttccactcgtttggaaggtacattcatgctccaccaccgctgaattacctgcttgtaactgtcacaatgcttggtggcgctttgggtcttgcagcacatgctgcgggcaaggttggggatgctgctagttctgtggcttttacaggattggcagtgctagtcagtggagcaggagctgtagtcattggattccccatggtggtatgttgtggcctcctttgtgcaattgatatcttctttgatttgtttaaagtaattcatgttgcatgctacgttgaaccaacaaatgtaattctatgaagtacatcttgtattgtaaagtcgatataaagctttggacttactaatgataatcactgcttctggtcgtgtatggaacatttgagtttc

SEQ ID NO: 105493 - DNA, 3697 bp, Zea Mays
atggatccctcatccggatccacgtcccgccacgggcgtctcctcatctcgccgtcgctatccaccccgaccttctccacccactccccgtccccctcatcggccgcgtcccccgcgccgcaccgcaactccacatcctctccgaagcccctcgtatctttcccctcaccctcttccgccaacaggccccgatcctcctacgtcggcgctggaccgcgcgctgccaccgcagcggcctcggcctcgggtccggcgttcgcccacaacgcgcgccttgcggcggccctggtccctgccgcggccttccttctcgaccttggcgggctccccgtcttcgccgtcctcgccatcggcctagcggcggcataccttctcgacgcgctccagctgcgccagggctccttcttcaccgtctgggcggcgctgctcgcggccgatgtcgcttttttcttctccgcctccctatcgtccgcggccgctgcctcgctgccgctgaccgtcctcgcgctgcttctctgcgctgagacctccttcctcattggcgtctgggcgtcgctgcagttccgatggatccagctcgagaacccgactattgttgctgccctggagcggctgctctttgcctgtgtgcccattgccgcccccgccctcttcacgtgggctctcgtgtctgcggtcggcatggccaatgcatcctactattttgccacgttctgcatggtgttctactggctgttctctataccccgtcggtccagcttcaatagccggaagcaggatgctccaatgctggacagtgatggcattcttggtcccttggagagctgtgtgcattctctgtatgtgctgttcgtgccggtgttgttccatgccgtgtcccatcgtgcaacactcttcacatcgttggccagtgtgtgtgaattgttgttgctgttcttcataccgttcttgttccagctgtatgcatccactcgtggtgcactgtggtggatcaccagggatgcacgcaccatggaccagataagaattgtgaatgggttcgtcgcactggtcgtggtggtgctttgccttgaggtgagagttgtgttccactcgtttggaaggtacattcatgctccaccaccgctgaattacctgcttgtaactgtcacaatgcttggtggcgctttgggtcttgcagcacatgctgcgggcaaggttggggatgctgctagttctgtggcttttacaggattggcagtgctagtcagtggagcaggagctgtagtcattggattccccatggtgttcctgccactgccgatgatttctggctattatgttgcaaggttctttactaagaaaagcttgtcatcatactttacctttgtggcacttgcaagcttgatggtcctttggtttgtggtgcacaattattgggatctgaatatttggattgctggcatgccattgaagtccttcacaaagtatgttgttgcagctgtcatcatggcaatggctgttcctggtttggcacttcttccaacaaaacttcggtttcttctggaacttggtcttattggtcatacattgttgctatgctacattgagaaccgattgtttaactatgcctccatgtattattatggatttgaagaggatatcatctatcctaattatatggtttttattacaacctttttgggcttggctcttgtaaggagattatatgttgatcagagactagggcccaaagctgcttggatcttaacttgtctatattcatcaaagttagcaatgctgtttatgacatcaagatcagttatatggttctcagctgttttgctacttgctgttaccccacctttacttctttacagagacaagtccaaaggagcttctaagatgaaggtctggcaagcttattttcatgcatctgtcatagcattttctgcctggctctgccgggaaacaatttttgaagctttacagtggtggaatggaagacctccttcagatggtctgttactgggttcatatattcttttgacaggagttgcatgcattccaatagtcgctctccatttccctcatgctcagtcagcgaagagattcctggtccttattgtggcaacaggccttctcttcgttgttatgcagcctcctattaagctatcatgggtataccggtcggattttatcacagcggcacatttatctgatgatgacatttcaatatatgggtttgtagcatctaagccctcatggccgtcatggctgctcattgcaactgtggtacttacactagcagcagttacatccatcatcccagtgaagtatgtcgttgagttaaggacttcatatgcagtggctgtggggattacactaggcatctacatctctgttcagtacttcttccaggcagttgttctgtatcctcttcttgttgcaacaattgtctctgcagcagtctttgtcgtattcacacatcttccttctgaatcaagcacaagggttttgccatgggtgttctctttcttggtagctttgttcccagtcacctatctgctcgaaggacacttaagagccaaaagttttgcagatgaggatgaagcagagaagttcaccaacatgttggctatagaaggggctagaatgtcacttttgggtctctatgctgccatcttcatgattattgcattagaaatcaagtttgagctgactttgctattgcgtgaaaaggctgcagacagaggtatgcatggtccatctagtcggagtgctgccttcccacccaaagcaaggctgctccagcaacgaagagctcatgctgcaccaacattcaccatcaagcggttggcagcagaggcagcatggatgcctgctataggcaatgtttctactgtgctgtgttttggcatctgcctggttctaaatctaacactcactggtggctcgaaccgtgctattttcttcctggcgccaatccttctgcttctgaaccaggattcagatatcttcgcagggtttggtgataggcagcgctatttcccagtaacagtttctatttctggctatttattgttgacagcgttgtataggatatgggaggagacttggcctggcaatggaggatgggctcttgatatcgggggcccgggctggctgtttgctgtgaagaactttgctcttcttgtgctcactttgccgaatcacatactcttcaaccgcttcatgtgggattatgtcagacagacagatgccaagctactgctgacgctacctctcaacttgccttcgattataatgacagacatacttactattcgggtgttaggattgctaggagctatgtactctcttgcccagtacatgatatcaaggcgcataagaattgctgggatgagatacatttgaaataggtcatgtaactttctgaggctgtcactatacatcaagttctttcaaaactcaggaacagatacttcattgcctgatcctctcgcagcaaaattgtgctatgtagcagagagaaacaagtgtcgaacgactttgctttttttgtactgaatgattgcatactgagtgtaggctaaaggtgttgtcgcatatatagatgtattttaacagcacagatgatgccatcaccttgggtcgtttatgttgaacttttgacggcgcaaagttttgcattcacctgagcagaagactttgatgt

SEQ ID NO: 105494 - DNA, 658 bp, Zea Mays
tccatgacgttctcccgtttcgcccgccgtcggtcagcctgtgtccgtggctctcgcctgccacccaagcagccatggcggccgcgctgctccgccgtgcgctccacctccgccgcgtgctcccctcgcttccgcacagcgcctctcccccgccttctcggccactccgaccccgaagacctcccagcagaacgccgccaccaccacgatcgacctctcctccgacgagagtcgccgccgcctcctcaacaggttggtgtaccggagcaagcagcggggtttcctggagctcgacctggtgctgggcacctgggtcgaacagcacgtgcacgccatggacgagcccaacatccgcgcccttctacaagtgctcgacctcgtaagctctcctgcctgtggtgtgggtgtgggtgtggccgaccaatcgctcttcctctgtggcgttccaggttatctgtctgtggtagaaactgattcaggggttgaagaattagataatttacataggaacgaccaagtaattagggaaggttagcaagaggagcagggtaacgtgtgttaaaaaatcagatgtggcttgaaagtggtgtaatttgtattggaccaacatctaatatttatacgaaggatttaaccctttatatcatgaagtatataa

SEQ ID NO: 105495 - DNA, 530 bp, Zea Mays
ctgtttgattccccaggaaaacccagatttgtggaaatggttgactagtcaggagcagccaccagaggatctgatttctaatccggtgttttctgccatcaaatcaaaggtcacagataacctgatcaagcatgcttctcccgagacccgatcaacacctggccaaccttgggttagaggatgggatgacataaagaaaggcaaagatggacctaactatggaaatcagtgacatgttccttgaaatggggatgacagctttacatcctaaataatccccccccccccccccatgttttgtgttcgtgtagattaaggtgaactgtgaccggcatgtgagaagtttgttaaatcgatattggagaatcagcttgtaactacagatggcactcctgatgtgtccctggcagtttgtctgcaactggaaagatggtatacatagcattgtgttacttatggcaatccttgaagcatttggactgaaacttaaatattgaaaatgtggacgacaaacatcatcagaaagaagt

SEQ ID NO: 105496 - DNA, 654 bp, Zea Mays
atgaagaatttggcttctgggccatcgtgttttgtgacatcatggcaagcatatgacatcaatgggtacacattctacactagatcaaaagacatgaaaagtgttgcacaaaaatagcggtgttcgtatcgatgcttttgacctacatggacagaagaccacatattttggattcatagaggaaatatgggaacttgattatggcccaagcatgaaaatacccttatttaagtgccaatgggtacaacatcccgtgggggtgatagtggataactacggactcacactggtagacttaaagaaagtagaatataaagatgacccgtgggttctcgccgaatgtgttgcacaagtgttctatgtactcgatccagcagatgagaagatgcatgtagttatttctggaaagcaaaaaattgttggagttgagaatgtgggagacgaagatgaggaatacaataagtatgaagagatgttcgtctttaacggtccagagagaatcaagcgtgtggaaaagaaaattgataagaacttaaagccatacatgcagaaaaatggtagttcatgaaaaattgtatgaatcaaattgtatttgttatcatgtatgatcgactatgcattgtggttgccaattaatttaaaatctctctagtt

SEQ ID NO: 105497 - DNA, 572 bp, Zea Mays
ggcgcggatggagaggttgacctgcgtttatttattttggagcgcacacgacaccccaagctagtctagctcccaaccaaaacaacaacaacaacaactactcgcaggtcgcaacgccgccgcagcagcctatggaggaggaagccggcagaagctggacgacggatgagagaggagacgacgacggcgaccagctgcgcgggacgacgacggcgacgggcagccggagggtggccgccgccgccgccggcgctagcggcgagatcgagatgctacagacggaggccgccgccacggtcgtcgtcgtcggtggcggggcgtcggcgtcggcgtcggtccagcagggaggaggcgacgcggatgacgaatgcggtatccagcaggttagttcgtcgcccgcttctccacttttttccctgctgtgcggtcataaactcatacctcgaaaagaagactgttaatacctttgttcctatggtctttagcttccatgcatccatccatcactagtaactgcagatcaccggtaataattgcataaaaaaggatagtgtgagagaccggtatacacg

SEQ ID NO: 105498 - DNA, 90 bp, Zea Mays
gtggattgcccacctcttcctatcagcttatgcttttgggttgtactggttggtgcatgcaacttaataatgagatctgactgttgtatt

SEQ ID NO: 105499 - DNA, 1410 bp, Zea Mays
atggtggccctagacgcttggcctaagcccttggattactgccccgtgagctacctctctccagacaagcttggagaaaagacattccatgaacagttactatgggttctattctttggattctttttcgtattggttatacaatctttggcagcaaaactgggcatcatcacaggaaggaatcttgctcagatgtgtatgtatgaatatccaaagttagtgaaatatggcctttggttgctcattgaggttggcgtgattgctgccactataccaggagttttaggaacagctttggcatacaacatattgctcaacatcccttttttggttggtgttctgatatgtggagcaagcacgttcctgcttctagctttacagatctatggggttaggaaaatagagctcataggagttatttttatgctccttatcgccatttccttctttgttgaactgagtactgtcaatcctcctatgggtgaggtaattcaaggtctatttatcccgagattgcgaggggtttatgctgtgtcagatgcaattgcactatttagcgtcctcgttgtgccgcataatctcttcctgcattcatcactggtggtatcaagaaaaatatcaccttctccaaaaggatttaaggacacttcaacgttcttcttgattgagaacgcatttgctatgcttcttgtgctacttgtaaatgtagcaattgtgtcaactacagggactatatgtgccaataatactcagctggttgacaacaacaatgcatgtagtggtcttacactgaactcagcgtcagtattattgaagaatatgtttggcagatcaacttcaaaaatatacggcttagcattattagcttctggtcagagtaacacaatgactactagctattcaggacaatacattatgcagggtttctccgggatgaggaaatgcatcgtttttatcattgctccctgtttcaccgtcatacctagtttgataatttgcagtgttgctggtgcccctcacgttcgacaactcatcaacgtgtctgcgatcatcttagcttttgtattgccattttccctagttcccctcctaaaattcagcagcagttgcgcggtgaagattgtccaagtcgcgtggattctctccattgtaattatggggatcaatatttatttcttctgcaatagcttcataagttggcttgtgcacagtgaactcccaaggatagtcaatgttataattagcacccttgtcttccctttcatggcggcatatattgcagctttaatctacttggctttcagaaaagttaatgctgctggcatattcccttccgtgtcagcttccactgggactgaagtagaagcatggaggcaagatggcaacattgatgatattggtgtacattga

SEQ ID NO: 105500 - DNA, 546 bp, Zea Mays
atggcgcctggcctcctcaccgccgccgtgctagccgcggtggcggcgtcgctcgcggcccacgtcacgctcaactgccccgtgcagccggtgccgtcgcatcgcccgccgcccactccgccgcccaacaacctactccagcggatgatgcaccccaacaacggctcctgggagcggtggcgcttcgtcggcggcacgggcctgctcggggtcgcgccgtccgccgacggcaccatgctcgtctgcgacgccgacaagggtcttttgagggtcggtgacgagggagtgacccttcttgcttcggaggtcgagagctccccgatcaggttcgcggacgcggcgatcgaggcctccgacggcacggtctacttcagcgacgccagcaccaggtacgtgctcgacgactcccaggggaaggtgatcaacttcgtcacgtcggtgactgagttcaacggggacatcttcctcggcagcctcgcgaccaacttcgtcgccaaactatctttggcgcgggtggcacaggagcagggtgcagtatcttcgtag

SEQ ID NO: 105501 - DNA, 1317 bp, Zea Mays
atggacgactcaggcggcggtgggcgctccggtggtgatggggacgctgtggagcacgacggtctcgacggtgaggcccgggccgaagccgaagaggacgccccagtcgagcccctcgccggtggtggcctggccgtcctcggcggagcgcttgcgcatctcgtccaggatgaagagcacgcaggcgctggacatgttgccgtactcggagaggacgtggcgggtggcgcgcatcctggccttgtccagcccgaccctggcctccacctggtccaggatggcgggcccgccggggtgcgccacccagaagatggagttccagtcggagatgccgagcggctcgaacgcgtcctccagcgcgcgctcgatgttcttggagatgagcccgggcacgtccttgagcaggtggaacgtcagccccacctcgcggaggtggccgtcgatggcgccctccgagtcgggcaggatggtctgcgccgccgacacgagctggaacagcgggcgctcgacccgcccgtccgggtcggcgcccaccacgacggccgccgcgccgtcgccgaacagcgcctgccccacgagcgagtccaggtgcgactcggacggcccgcggaacgtcacggccgtgatctccgagcacaccaccaggaccctcgccccgcggttgttctccgccaggtccttggccacgcgcagcaccgtgccgcccgcgaagcacccctgctggtacatcatcaggcggttcacggacgggcgcagccccagcgccttggtcagctggtagtcggcgcccggcatgtccacccccgacgtggtgcagaacaccaggtgcgtgatccgcgacttgggctgcccccactccttgatcgccttctgcgccgccgccttccccagcttcggcacctccgtcaccaccacgtcctgccgcgcgtccagcgacggcgccatgtacgcgcacatgctcgggttctccgacaggaactcctccgtcaggtgcatgtaccgcttccggatcatcgacttgtcgcacatcctcttgaacttctccttgaggtcggtgaggtggtcgctcttggtgatccggaagtagtagtccgggtagtcggcctggtacacgcagttggcgggcgtcgccgtcccgatggccagcacggtggcggggccggtcgcgcgctggcccttcctcacctcgtccacggtcacggtggcgccggccatcgatcgtctctcttcctctcgtacgttgtaccagaggcggccggcaggggtcgtcggagcaagcgagagctagtagtcgtcggaggagctctttcacgctag

SEQ ID NO: 105502 - DNA, 822 bp, Zea Mays
ctgaccaccctgagccatcacagagaagcgtccgctgcgcacacccaggtccttttcatctatctgtgagccgtcacaactcgtactgtcgtacagtatacttgcgcgccgaaccagtcgcccatgtcgtccatggtgtcccgagccgcggccgcggccgcgctgcggtgccacgtccgccgccccggtcccgccttctcccgccccgcctccacgtcggcggccaccgccgagcaccacgcgggccacagtagggccagcggcaggctcccccgcggcgactacgtgccggtgtacgtggcgctgggcctgatcgcgctgtcggtgacgctgggcctgcacacggcgcggcagcagcttgcgtacgcgcccaacgtgtgggtggacaagaagaagcgggagacggtgccggaggtggcggcgccggagctggcgctggacgaggccgagcagttcgtggacaggtcgctcttccgcaaggtcgcaaccgtgcaggacgaccgcagcctcgccgccggcgtcgctgaccccgtcgccgagtacccgacgaagaaagcggtgacgctcaaggacgtgggcgtggagacgccgggcatcgagcagggcagggagggccttctccacaagatcttcaagaagaaccacgcttagtttaagtgcaacggatgcatgtatggattgtatatatacttagggtctgtttgggaggcatctatatgttctcggatgaaatgtttcaggtttagatgctcccaataaaaggaaacgttaacgtttgtatcagaaataagatcacttctgagaaacattagagaaatagaa

SEQ ID NO: 105503 - DNA, 1204 bp, Zea Mays
ccagatgccccgggcatccccgtagcctcgcggcctcggcgtccccgtccctccatggccgccccaccgccttacaccccgccggcggcggttccccagcccctcgtcctcctccaccacccgccagctttggtcctccacgtccgcctccgaccccgcagcctccgcctcgcgagagcgcccgccgccacggccaccgcagccgcggcctccgtcgcccccgacgacatctcgcagctcaactaccgcctccgcgccatagttcgccgccgcgaaggcgccgctgcccaaggcgccacctcgtcctcccccgtcgacccggcccaggccgaggcgtacctccgcatgatccgcgaccagcagcggctcggcctgcgccagctccgccgggaggaacaggaaggagagggcgacggagacgaggaaggccccgacggggagcgagccaggaagggagtggcggcggggagctcgctggggcatcgggtggacccgcgggagctggagcccggcgagtatgtcgtgcacaagaaggtcggcgtcgggaaattcgcctgcatcagcgccgaggacggcgccgactacgtcttcattcagtacgctgacggcatggccaagcttgctgttgaccaggccgcgcgcatgctctacagatacaacctgcctcacgagaagaggaggccacggaatttgagcaaactgaacgatccttccacctgggagaagcggaggctgaaagggaagcttgctgttcagaagatggttgtcaacctgatggaactgtatttgcaaaggatgaggctgggaagatctccgtacccaaagcctgcatccatggatgactttgctgctgaatttccttatgagcctactccggaccaatgccaggtcaacttgaatcaactaccattgccctttcttctaaaaaatgctactcacattcctcgtgtttttgaagatgtataaaatagaaatattgcagttaccctctcactgacatggatgatagacagatttacaccatgataactgctgcgatgtgttcacacactaccttagatcctgttcaacatcatataatattttctgagcaaaaaccatctcctgcctgctggatgcatagaccaagggtgaaatgtatggcaattgtacatgaagtctcttcatgccccatgaatatgcagttcgattgtttccttacata

SEQ ID NO: 105504 - DNA, 3155 bp, Zea Mays
ccagatgccccgggcatccccgtagcctcgcggcctcggcgtccccgtccctccatggccgccccaccgccttacaccccgccggcggcggttccccagcccctcgtcctcctccaccacccgccagctttggtcctccacgtccgcctccgaccccgcagcctccgcctcgcgagagcgcccgccgccacggccaccgcagccgcggcctccgtcgcccccgacgacatctcgcagctcaactaccgcctccgcgccatagttcgccgccgcgaaggcgccgctgcccaaggcgccacctcgtcctcccccgtcgacccggcccaggccgaggcgtacctccgcatgatccgcgaccagcagcggctcggcctgcgccagctccgccgggaggaacaggaaggagagggcgacggagacgaggaaggccccgacggggagcgagccaggaagggagtggcggcggggagctcgctggggcatcgggtggacccgcgggagctggagcccggcgagtatgtcgtgcacaagaaggtcggcgtcgggaaattcgcctgcatcagcgccgaggacggcgccgactacgtcttcattcagtacgctgacggcatggccaagcttgctgttgaccaggccgcgcgcatgctctacagatacaacctgcctcacgagaagaggaggccacggaatttgagcaaactgaacgatccttccacctgggagaagcggaggctgaaagggaagcttgctgttcagaagatggttgtcaacctgatggaactgtatttgcaaaggatgaggctgggaagatctccgtacccaaagcctgcatccatggatgactttgctgctgaatttccttatgagcctactccggaccaatgccaggcctttatagatgttgagaaagatctgacagaaagggaaacaccaatggatagattaatttgtggagatgtgggctttggcaaaacagaagtcgcaatgcgtgctatattcattgttgtgtctgcaggatttcaagctatggttcttgctccaacaataatacttgctaagcaacattatgatgtaatgactgagcgctttgccaactatccagagatgaaggtcgcaatatttagtggtgctcagagcaaagaggagaaagatgagctaataacaatgattaagaatggagatttacacattattgttggcactcatgcccttcttacggaaaggatggtctatagcaatcttggtctcctagtggtggatgaagaacaaaagtttggtgtccaacaaaaggagaagattgcctcatacaagtcttctattgatgttcttacactttctgcaacacccattccacgtaccctgtatctggctttgacgggtttccgtgatgcaagtttgatgtctacaccacctcctgaaagagttgctgtaaagacatatgtgtcagcatttagtaaagaaagggccctatcagctatcaagtttgagctgcaacgtggtggtcaagtcttttatgttgtgcctcgaataaaagcaatagacgatgtgttgcagtttctcaaggactctctgcctgatgtaccaattgctgttgctcatggaaagaaattgtcaaagaacatacaacttgctatggaagattttactagcgggaaagtcaaaattcttgtctgcacacatatcattgaaagtggaatagatattgcacatgccaatacaatgattatccagtttgctgaactatatggacttgcccagctgtatcagttacgaggaagagtaggaagatcaggtacagaaggcttcgcataccttttctacactgataagtctttgctctcaagagttgcaacggatagactcggagctattgaggagcattcagagcttggccaaggtttccatgttgcagagaaggatatgggtatcaggggatttggaagcttgtttggtgagcaacagtctggagatgttgcaaatgttggcatcgatttattctttgatatgctttttgatagcttgtcaaaggttgaccagttttgcctagtcccagtaccatacaaagatgttcagctggatataaacatttctccacgtctctcttctgaatacataagttatctggaaaatcctgttgagttgctcaatgaagcggcaaaagctgcagagaaagatctatggaccttgatacagtttacagaagacctccgtcgacgatacggaaaggagccccgtgatatggagttactactgaaaaagctctatgtaaggcggatggctgcagatcttggtatcagtcggatatatccatctggcaagatgatattcatgaaaacaaacatgaacaagaaggtatttaggctcatgacagaagcaatgacttctgagacacatcggaattccctatcatttgctgaaaaggaaattaaggctgaactcctcgtgaatttgccagataccctacttctgaactggcttttccattgcttatcggactgctatactgtaataccagcccttgtgaagtactagattattgttactatttcataagaactgaaggcttctgctgcccaccatgaaaggggacaatatgtccatgcttgaagagaatgatctatcagagaaatcagtcttggctctttgattcatctgtgatggatgactcttcgttatgttggtattggcagtcaggctctggcaggccaaagcaagcccatacacactactgctttaggaaaaggtccgccaaaattgtcaacattacaagcatacttcaatgctatacacgaactggagaatgctccacagacacattgcagttttctacattcgctaacatcaataggatgagtgtctgatgcataattgctaaattcaggtgcaatgcaagtatgaaacatgaaatcaggaagctcagaggacctagttcagatgtacctgacaatagattacatttcaaaattcttctaggtttttttgacatgaactatcaaaatattgctcgagtagatagggaactagggatggcgttaacaatagaccatttgtttgacaataaaacattaggaatttttgaccaattggtcagagttaatatttgttgtaaatctattcaaacagattgtgacattgacaataactataatagttga

SEQ ID NO: 105505 - DNA, 1637 bp, Zea Mays
ctcctttcaagccagtctattctttgtttgattcatcacgggtgcgcattattgtaattagaatcttcagagtactcgaaggatagttaaagctgtttggctagtccttcagattactgaaaatatagttaagaacatttgtattttgctatttcgatttccaacagtacaactattggggatgattgctttcctttataaaagcaatcaagtaatttcttagctaagttctagctataagttctgcatgacatgctattgcccatgataattctgacaggattgcttcaactctttcaggttgaccagttttgcctagtcccagtaccatacaaagatgttcagctggatataaacatttctccacgtctctcttctgaatacataagttatctggaaaatcctgttgagttgctcaatgaagcggcaaaagctgcagagaaagatctatggaccttgatacagtttacagaagacctccgtcgacgatacggaaaggagccccgtgatatggaggtgcttgtttatgctataatcaggactcatgaatcatgattagtggtttactctgttgtgttatttctttctcttgcagttactactgaaaaagctctatgtaaggcggatggctgcagatcttggtatcagtcggatatatccatctggcaagatgatattcatgaaaacaaacatgaacaagaaggtatttaggctcatgacagaagcaatgacttctgagacacatcggaattccctatcatttgctgaaaaggaaattaaggctgaactcctcgtgaatttgccagataccctacttctgaactggcttttccattgcttatcggactgctatactgtaataccagcccttgtgaagtactagattattgttactatttcataagaactgaaggcttctgctgcccaccatgaaaggggacaatatgtccatgcttgaagagaatgatctatcagagaaatcagtcttggctctttgattcatctgtgatggatgactcttcgttatgttggtattggcagtcaggctctggcaggccaaagcaagcccatacacactactgctttaggaaaaggtccgccaaaattgtcaacattacaagcatacttcaatgctatacacgaactggagaatgctccacagacacattgcagttttctacattcgctaacatcaataggatgagtgtctgatgcataattgctaaattcaggtgcaatgcaagtatgaaacatgaaatcaggaagctcagaggacctagttcagatgtacctgacaatagattacatttcaaaattcttctaggtttttttgacatgaactatcaaaatattgctcgagtagatagggaactagggatggcgttaacaatagaccatttgtttgacaataaaacattaggaatttttgaccaattggtcagagttaatatttgttgtaaatctattcaaacagattgtgacattgacaataactataatagttgaaaaaaatcacggaactacaagtatttttatatagggagaatgtatccaatgcactggacccatccgtacacgtatccaaagggcatgtacaatttaattaattaaatgaagggtctctcgaaatgtatata

SEQ ID NO: 105506 - DNA, 1385 bp, Zea Mays
cgaccgaataccggcggcaaccggtgtccctctccgtcctcctcgcgtgcacggctgaccgcgctctccctcctccgctctgccgcacttctcgccgccctaccctgctaaaaaattcaggcatcgatcgctcgtcctcctcgggacctcggcctgctccaactgaccctaatggcggaggcgctgcttctcgcgtgccacctcgccctctctttctccctcctcgccgcctccctctcccacctcatcgtggccgccgtctcccaccgctcgccctcctccctccaccaccacctcatccgcctgctccgccacccgctcatccgcctcctcccgccgctcctcgcgctccccttcgccttcctcccgctcgcctccacgcccctactgccgcttctcctcctccctccactgctcccgctcctcccgctccccttcctccctccccacctcccgctcctccgcccgctcctcctcaccctgccgctcctcctgctcgcccgcgcggcagacctcctcgccgcctcgttccctgactcggacctccaggcgcacgcgctcgccgtcgcgcgcctcctcctcctcgccgcggcggcggcctctctcgtctcgtcgctctgcgcctccgcgccgaggggcacgacggcggccggcgcccacttcgtcgccgaggcggggctcgcctgcgcgggcgccgtgggcgggctctgggcggcgcagagcgggctcaatctttacgtcgacgcgtgcgtgcccacggggtgccaccgcctcctcgacaccggcagcaccgcagcgcccgccacgcggtgcgacgtcgacgaggctaggctcagggccgtcgctgtcatggatctcgccctgtccgtgcactgcgtcatcgtgactgccatcgtggcgggggtgctcctcggggtggcgaggtggtttggggttgacagcagcgctggtacggggaggaggcataatggatcctcctatgatgcattgcccacagtggcatctgctgggacaatggtggagatggagcatttgcaggggaagggtgttgttggcaagatggtggcgcaggagtgaaatatgtgcaatgtattggattaactaggtacatttcaaatgactcgagtatatgccagagatgtgaacccctgaaatgggtggggggatttggccggtccaaatggtggcagaatttgttctgtggaatgctgatcattagttgcaatgagagtatactagtcactgctgctgcagatgaattgcattgttcattggctgttggtgcccaatctatgtctggaccattgttgttggtggccggctgcactgatctgaatgctttatttatgtccatgatttgatatttggtagttttgtctacttca

SEQ ID NO: 105507 - DNA, 868 bp, Zea Mays
atcatgcgaatataatagcttctgaacactatataaatgttcaccaaggtctttcaatcccttgcgcctacatctccaatgttgtctgcactagaaacctagagctaagagtgacaatggcatggctctcttggtccctctctcccttgaaggctctctctggtaaatatggttgcctttcacaatgaacttccatcagatctttgtgagagagccttcaggaggggggggggatccaggtgagccatagtgcctgactgcctgtgcccagcagccaagatgtgtactgtttagccattttgtgtatttgattaattgtttgtttctatgagaacttggttaatcatgtgttgtattgattgttcacaaatgaaattagcttttctcaatcagcatcggtcaccggatgtatgagaaatggatagcgggtgggttatgtattcttatgtttacaagtaagtgggcggtactgatcatctattcacttgtatccaggtaaggaaaagagcgctctaaggaaaatagggggtaagttgccaagtttttcttggagctctcagggtctcaccacaactgagaggtgcacgtgcacaagaaaaggagctggatgagttttctgggtcttggattacagaaatggatgagatgttctccttgtcttgggcttcaaaccattcctaagtaaaaatatttgagtgtaattctttttaacgctattttccctgggaattgtcttttgttatctgagttgtacagagctgacattttcctgctctttctggaatagatccgtatggtttctttcacttggtggccctcatgttagattttatctcagcttgttcggggctcaaagccgatgttggtg

SEQ ID NO: 105508 - DNA, 2569 bp, Zea Mays
gaagaaaaaggcaaagaaaatcaatcctcgccgccgataaatccacagttcaaagatcaggccgacggctttccattgtgcgtcccgaggggagatatttattttccgttccgttttccccgtcagaaaggagtacttccaacaaactgctccgctttcagcacctgcccagcggaggaagagtgcggattgcggcggcgccggcggacgaaacaatggcgtcggcgagggacgagcatcttgatgggattcgcgcgctgatggcggcccactcgccgccgctccacgggctggtcgtcccctccgaggatgcccaccagagcgagtacgtgtcggagcaggataaacggcgggagttcatctccgggttcacagggagcgctggcttggctcttatcaccatgaaagaggcattgttgtggacggatggccgctacttcttgcaggcaacacagcaactgagcgatcgttggaaacttatgcgcatgggagaagatccaccagttgaagcatggattgctgataatctggctgatgaagctgtcattggaatcaatccatggtgcatctctgttgattctgctcaaagatatgagaactcattttcaaagaggcaccagactttgtttcagctttcttctgatttggtggatgaagtatggaaggatcgcccgctagttgaacctaggcctgtaattgtacacccagtagaatttgcagggcgcagtgtaccagaaaagatgaaggagctaagagaaaagcttgtgcatgaaaaagccactgccattataataactgctcttgatgaggttgcttggttgtacaacattcgaggaagtgatgtggattatagcccagtggttcactcttatgctattgtaacattgcacagtgctttcttttatgttgataagagaaaagtaactgtcgaggttcagaaatacatgtctggaaatggtatcgaaataagagagtatgaaactgttcaatcagatgcaagtttgcttgcatctggcaagctacaaagttctgtacatgtggaaaagtatatggatgaggtggagagttcaaaaatttggattgattctggctcatgttgccttgcactctactcaaaattgagtccacatcaagttttgacgcttcaatcaccaattgcccttccaaaggctgttaagaaccccacagaactggatggattgaggaaggcgcatattcgagatggtgccgctgttgtacagtaccttgcttggctggataatcagatgcaggagaactatggagcttctggttatttcagtgagataaaagggtcgcataaaaatgaacatttagcaaccaaacttactgaggtgtctgtgagtgacaaacttgaaggcttccgtgcaacaaaagagaactttaaaggtttgagttttcctacaatttcatctgtgggaccaaatgcagcagttattcactataaacctgaagcaagcacatgttcggaaatggatgctgataaaatatatctttgtgactctggggcacagtacctggatggtacaacagacattacaagaactgtacattttggtaaaccctcagcacatgagaagtcatgctacacagcagttttgaaaggccacattgcactagacattgctgtgtttcctaatgggacgacaggacatgctcttgatattctttcacgagcaccactctggagagagggtcttgactatcggcatggtacaggccatggaattggatcttatttgaatgtccatgaaggtcctcatctaattagcttcagaccttctgctcgaaatgtaccgctgcaagcatcaatgactgtgacagatgagcctggttattatgaagatggggcctttggtataagattggagaatgtacttatttgcaaagacgccaatgctaagtttaattttggagataaaggttatttggcatttgaacatataacatgggctccataccagaccaagctgatagacaccgggcttctgacccctgttgagatcgactgggtgaacacgtaccactcagactgccggaagatcttggagcctcatctgaacgagcaggagaagcaatggctgatgaaagctactgagcccgtagctgcaagaggctgagccttttcgtcaacgttgcatgccaccgagcgccaggctcatcttctgcgtggcatacatataagattggctgcccccgctggttaaataataatagcggcgaaggaacaggatagcttgttctcaacgctgatcttcgccgctaaagtggagtgtttggcaggatgctattttctttcccattagggtacgttcgggttttacggaacggtaggtttttatacggaacggtgggtacaacaattcctagagccggattgtttctctaattatttatataaggtttgatcaattgaaataattttggatccattcttgacaacctaaggcccataagctgatttgtacagttattctgggaagtcgcttccaactgaatacgctgctaattgtttcgcccaaaccggatagccttctttgacgctaaataa

SEQ ID NO: 105509 - DNA, 1088 bp, Zea Mays
gtcttcacagtgaacttcatcatgatgcatgaatttattgaagttcatgttagatttatttgtactttagtttttatttactttgttccgtgtgattgatgctaatactgaattgcttaatgttggaaataggttttgaaaggccacattgcactagacattgctgtgtttcctaatgggacgacaggacatgctcttgatattctttcacgagcaccactctggagagagggtcttgactatcggcatggtacaggccatggaattggatcttatttgaatgtccatgaaggtcctcatctaattagcttcagaccttctgctcgaaatgtaccgctgcaagcatcaatgactgtgacagatgagcctggttattatgaagatggggcctttggtataagattggagaatgtacttatttgcaaagacgccaatgctaagtttaattttggagataaaggttatttggcatttgaacatataacatgggctccataccagaccaagctgatagacaccgggcttctgacccctgttgagatcgactgggtgaacacgtaccactcagactgccggaagatcttggagcctcatctgaacgagcaggagaagcaatggctgatgaaagctactgagcccgtagctgcaagaggctgagccttttcgtcaacgttgcatgccaccgagcgccaggctcatcttctgcgtggcatacatataagattggctgcccccgctggttaaataataatagcggcgaaggaacaggatagcttgttctcaacgctgatcttcgccgctaaagtggagtgtttggcaggatgctattttctttcccattagggtacgttcgggttttacggaacggtaggtttttatacggaacggtgggtacaacaattcctagagccggattgtttctctaattatttatataaggtttgatcaattgaaataattttggatccattcttgacaacctaaggcccataagctgatttgtacagttattctgggaagtcgcttccaactgaatacgctgctaattgtttcgcccaaaccggatagccttctttgacgctaaataa

SEQ ID NO: 105510 - DNA, 336 bp, Zea Mays
atgctgatgcagatgtatagtgctcagatgggatctccaatgggaccccagttcacccgtccgtcacaatctggacaaaccccaaacaccaacgaaacacagggttctgaaaccggacaaggaaacccacagaatggacatttcagtggtcgatgcctcctagaggacagattcttcctcctcctcaaccaggtatgggatattggccgccaccaccatggggatatcctacacatccaatgggccttggggacgccccccatggccaacacagccacttccatcaccagcggtacgttcctgaatttaatgctagttgatttcaatgctagttga

SEQ ID NO: 105511 - DNA, 104 bp, Zea Mays
gagattgtttttctccagtcaagcctatcatcttttgtccatcatttaaaggtaaagttgccctttaactcaaggcccaactttgatacatagttcccatggcc

SEQ ID NO: 105512 - DNA, 519 bp, Zea Mays
atggcgacaggagctcgactccgagcgggcctccccggagatggtagccagatctggccattgagcccccctaaccgagcggatccaagatgctcctccgcagcaggaaatggtagcagtaaacggaacgggccaaccgcagctcaaggtcatgagaatgttgccgctgagtactacaaacagcaggtggagatgttagagggttttagtgagatggacgcatttacagatcgtgctttcctacctgtaatgtccaaggaagaacacgaaaaagttgtcaggagtgaatcattagccatatggctgtctaatattgcaaatatggttctctttgctgcaaaagtgtatgcttcagtaaggagtggttcacttgctattatcgcatcaactttggattctcttctagacttgttgtcatgatatatcttgtggtttactgccttttcaatgcaaacgccaaatccctatagaaactcaattggaaaagcgtatgcagccgctggtgagttcttttttgcc

SEQ ID NO: 105513 - DNA, 3011 bp, Zea Mays
caccgtccatccctcgcctcccgttcctcctcccctccctcgctgctgagtgctgacggaaagagggggtcgatcgccatgcataaccccaggccgggcggcggggacatcgtggagatgtcgtcgtcagccagcgcggcgggcgaggcgacgcaaaacgagcgcgtgatcccacatagcggctcgctgagcaagtccagcgcgcggaagagtgcggggttagaggagcccgtgacgacgccgctgtccgcgccaccgccgcgcgcctcgccgtcctccgccgccatgcacgcgctcaatgggctcatgttcatcagcagggccgagggcaccgtcggatgggaggctgtggagaggcgcttccacgagctcgccgagaacgggctcctccaccgctccaagttcggcgagtgcatcgggatgaaggaggtggtgttcgccggcgagctgttcgacgcgctgttgcggcgcagcaacatctcgggcgacaacatcgacaaggcggagctgctcaagttctgggaccaaatcaccgacaccagcttcaacggccgactgcagactttcttccacatggtggacgcggacgcggacggcaggatgtctgaggagaaggtcagacagaccatcacgcagagggcgtccgagaacaagctgtcgaagatcacagagcaggcggaggagtacgcccggctgatcatggaggagctggacccggacaaactcggctacatcgaggtgcgcaacctggagaggctgctggaggaccccagccagttggtgagcatcggcaccgccaaggacatgaggcagatgctgaggagccagagcctccgtccgacgcccgagccgaaccctctccggcgcacgcagtacttcctggaggacaactggcggcgcgtgtgggtggtgctcctgtggctgtccatctgcgtgggtctcttcgcctggaagtttgcccagtaccggcgccggtacgtgttccaggtgatggggtactgcgtgtgcgtggccaagggcggcgccgagacgctcaagttcaacatggcgctgatcctgctccctgtgtgccggaacaccatcacctggatccgcaaccacaccggcgtgggccgcgtggtgcccttcgacgacaacatcagcttccacatggtggtggccgcgggcatcgccgtcggcgccgggctccacgtggtgtcccacctgacgtgcgacttcccgcggctgctccgcgccacggacgccgcgtacgcgcccctggcgcagtacttcggggtgccccgcccgcgcaactactggtggttcgtgaagggcacggaggggtggacggggctcgccatgctcgtgctcatggccgtcgccttcaccctggcgatgccgtggttccgccgcggggagctcgcgctgacggacctgctgaagcggctggtaggcccgctgaagcggctgacggacacgctcaagctgacggacccgctgaagcggctgacgggccagctcaagcggctgactgcaggcccgcggaagcggccgacggacccgctcaagccgacggacccgctgaagcggctgacgggtttcaacgcgttctggtacacgcaccactgcttcgtggcggtgtacgcgctgctgctggtgcacgggcactacctgtacctgacgcacaagtggtacaagaagtcgacgtggatgtacctggccgtgcccatggtgctgtacgcgtgcgagcgcctcacgcgggcgctccgctccagggtccgcgccgtcaggatccgcaaggtgggcgtgtacccgggcgacgtgctctcgctccacttctccaagccgccgggcttcagctacaagagcggccagtacatgttcgtcaactgcgccgacgtctcaccgttcgagtggcacccgttctgcatcacgtcagccccacaggatgagtacctgagcgtccacatcaagaaacagggcgactggaccggcgagctccggaacgtcttctcgagggtgtgccggccgccgacggagggcaacagtcggctgctccgcgacggcagcgccaattctctatctctacggtacatcttccccaaggtgaggatcgacggcccgtacggcgcgccggcgcaggactacaagcagtacgatgtcgtgcttctggtcgggcagggcattggcgctacgccgatgatctccatcatcaaggacatcatcaacaacatgaagcagctagatggcgacctggaggccgacgctggctcgggcttgggctccggcggtgtcgacgcgtcgtcgtcgtcgtcgctgccatccttccgcacgcagcgggcctacttctactgggtgacccgggagcagggctccttcgagtggttccatggcatcatggacgaggtggccgagaccgacaagaagggcatcatcgagctccacaaccactgcaccagcgtgtacaaggacggggacctccgctccagggtcatcgcccagcttcaaatgctcaaccaggccaagcacaacatcgacgttatttccggcacccgcgtcaagacccacttcgccaggcccgattggccaaacgtctacaagcacattgcggagaaccaccaaaaccaacgtgttggagtgttctactgtggcggtggcccggagccgctaaagacgctgcgcgaactcgccaaggatttctcgcggaaaaccaacaccaagttcgagttccacaaggagaacttctagcgtatatgcagcctcgatctaaaggttttcgcatgacaaacaattcggtacatactacagtcgtcggtgcatatgctgtcagtgacgaggagccattatggtttagtgtagcctaagccatccttagattttaaagagattatatcttccattataatcgtaaaagaagatgtggcgtgttgattaggctgttgtgttttaagctttttaggttgtgagctcagttcacattgttgtattttttctctttttctcaaccataccttatttttcttttgtcgtgt

SEQ ID NO: 105514 - DNA, 96 bp, Zea Mays
cacaattggcccatagcacttctatatcaaattatcaagtcaatggctggttgcatggcattcttgttggaataagtcagttctattggtaccagg

SEQ ID NO: 105515 - DNA, 1374 bp, Zea Mays
atggcggccggcgagagcggcagcagcatgagaagaagggcctgggtggtggaggtggagaagacgctggacgaggcggacgcgtcggtggaggtgtcacggtggcagctccactccatctaccgcgtgccggcgtgtatcaaggacctcaaccgcaaggcgtacaagccgcaggtggtgtcgctgggccccttccaccaccgccgcgacggcgaactcctgcccatggaggagcacaagaagcgcgcgctgcggcacctgctccgccgatccaagcgcccgctggaggagttcgcggccgccgtggcggacgtcgcggggcagctggagagcgcgtacctggacctgggcgccgagtggcgcggcgcagacgggcgggagcggttcctggagatgatgatcgtcgacggctgcttcctgctggaggtcatcaaggccaccgagatggacgggaggaacgtcgtcagcgactacgcccccaacgaccccatcttcagccaccacggggtgctctacatggtgccctacatccgccgcgacatgctcatgctcgagaatcagctgcccttgctcctgcttgagaagctcgtcgccgtccagactggcaagcctccgagcgccgacgcgatcaaccggatggtgctcaagttcatgtcggggtccccatcggcgcggctgccgccgggcagcacgctcgggctccacccgctcgacctgcggcgccggagcatgctcttcggcccgcagcaggcgccccagccggtgtcacgggacatggcgccggagacgacggacatcatccggtcggcggtggagctgtacgaggccgggatccggttcaggaagaccagctcggacagcctccacaacgtgcggttccgcggcggcgtgctgagcatgccggcggtgtccgtggacgactccaccgagtacatgttcctcaacatgatggcgttcgagcggctgcacgtcggcgcaggcaacgacgtcacggcctacgtcttcttcatggacagcatcatcgactcggccaaggacgtggcgctgctcagcaccagcggcatcatccagaacgccgtcggcagcgacaaggcggtggcccagctgttcaacagcatctccaaggacgtcgtgctcgagccgcagagctcgctggacgctgtgcaacgggaggtcaacgcctactgcgggaagccgtggaacctgtggcgcgccaatctcatccacacctacttccggagcccctgggcgttcatgtccctcgccgccgccgtcttcctactcgtcatgaccgtcatgcagaccgtctacaccgtgctgccattctaccagcaggaccaaggcagctcgccggcggcaccggctccattgtga

SEQ ID NO: 105516 - DNA, 1712 bp, Zea Mays
ttaggatcatcacaacaatagacaaggaattaccattatctcttgaagccctaaaacatgggcaaaagcagttaccttagacactgttacaggggtagagcattccacagcaatacagcacagagtaaaatctttgtagattccatgcgttttacgaaaacaactcttgttagtctgtataggcaggtaatgcaaaacatggcataactatatctaagcttcatctgctgatatattccatgctgcatcgaagcatttttattttaattctgtaatgcaaaagcatccaaatcattttccccttggaaatcagaaatcatggtgttatgaaatttgacgttcataatcatatttaattcaagtatgatatggcacaatatactaccacactatccacctctaacagtcacaaaccaagctatagtacaaaattcgaatgaaggcgatcagcatcgcctcaaattttttacagtacaaaccccaaaaaaataaaacgaagactcgccagatttctgtggcgtgtgtcgggagatgtggtcacctatacgaggggcgatagggggacctgctacggctagggcttcggtccctacggcccctccggccgcggtaccgctcgggtgatggcgaccgccgacgccggcgcggcggagacagcgaccgcgacaggtcgcgttgcatcgtgcgcgacgcgatctagagcctcagcggagccggatctggacgaaaccagacgatcggagccttcggagaggggcggagtctggcttgctggctggaaagcgggaggacgcaggccaggtcaggtagagtcgcccgccgccgcacgcgggggccgatgaggtgggggatgctcgcagcccgcggaatctatctgtgggaagttgtaattaacctccaaggctacgcccaggtatacaaggtgggcgctggggagaagcaaaagcaatcgggccaccaatcccacagcgtgatatgaccgcccggtccagctcagcccaggcccatgtgagtcgtccgacccggatgagtccagatccagacccaacgtgaccgcgagtccctcaagatcacacagtaccggcaggcggcagcaattggagtgtttacgccgagacttgaaaacggcatcagtagcaaacggaggcgaccacgagcgacggggccagccgcggtccccaacgtcagaggatctcgttccagctgcggcagggcggccaacaccggcacctcatgggcgccgacgacgaagccgccgccgccatggaggcgcaagagagggaggcggagatcgagaaggccatgcgcgcccgcgtcgcagacttcaagaagcaggccgagtcgcttctcgtggtcacgtttggtctgccgttgcttgctgcggagaaacgtgcactgcgggagggttttgggctagtggggcggtctcgggggtagggtttctacttctgctgtcctggtaggagatgaaggcgagcggcgatgatgaatcctgaatcatggtcttcagaacgggtggtgcacgtctcagttgcagttggcagctcctagggttttagaggttaggaggaaatggaaattcgggatatcaactgtcaatgctagaggcaactgtatctgtaagaaacacttaaacggtggagatctcttcttattgtttcatgctctgatggcagccagatggcaggtctgttttctgtggtgcgaaacca

SEQ ID NO: 105517 - DNA, 2134 bp, Zea Mays
aagatcacacagtaccggcaggcggcagcaattggagtgtttacgccgagacttgaaaacggcatcagtagcaaacggaggcgaccacgagcgacggggccagccgcggtccccaacgtcagaggatctcgttccagctgcggcagggcggccaacaccggcacctcatgggcgccgacgacgaagccgccgccgccatggaggcgcaagagagggaggcggagatcgagaaggccatgcgcgcccgcgtcgcagacttcaagaagcaggccgactccttgactcttgaaggcgttaggagagcactggaaaaggacctggatttgaagatatattcacttgatgcacataaaaagtttataaagcaatgtgtagacaaagtttttgctgaatctgctgatgaaaatgcaaatgatgatgcattagaggattctgatgctaaagatgatcatttatcaaaagaagggacagatgttgctaaaccaatgcctgtttcaaataaaatgtcctccaatgctgatgtcgtaacatccagcaagacaggaaaggatcctgaagaagaaaagaatcaaacttccagcagtgatattagtgaagacatgataaaagaagccattgaaaaaagggcatcttattttagaaagaactctgatactcttactttacaaggagttcggcgtactttggaagaagatctcaagcttcagaagaaagctttagatgcctataagaattttattactacaggattagacaagattttgcaagaacctgcaaatgggacaaagaaaaaaagtaaaaatggatcttccaaggatactgacaaaacaagtaaaggctctaaaagagtccatgaagaatcagatagctctgaattaaatgatagaaagagtgatatggataatagcgacgtggattcaaggccaagaaagaaaagggcagaaaaggctaaagtcaccaaaaaacagaaaatagttacaaatgagaggaaactgtcaactccaaaggctaaaaaggttgcaaaacaagatttgggtagcagtactgaagaacagggtggcaattcagcagaagaggataattctcattcatccgctgaggaagataataagagaaaacggcaacagactccagcttatgggaaacaagcagagcatctgaaatcgataatcaagtcttgtggaatgactattccacctactgtgtatcggagagtcaagcaagctgctgagaacaagcgtgaggcctgtttgataaaggagttacaggatatacttgaaaaggaaggattgtcaaaaaatccttctgaaaaagaaattaaagcagtgaagaagagaaaagaaagagcaaaggaacttgagggcatagacatgagtaatattattactagttcgcgtcggagaagtacatcaagtttcatacccctgccaccaccgccgcaaatagaagtggatagtgatgatgatgaagacgatgacgatgatgcagaaggcaatgatgcagaaggcgatgatgatgatgcagaaggcgatgatgaagacgatgcagaaggcgatgatgatgatgcggaaggcgatgatgcagaagacgatgatgaagttgatgaggagaatgtcaaaggtcgagatgaaggtgataatgatactgccgaagctgccaacggttctgctgatgatgctgaaaaggagaacaattgattccggccccagaataggttcagcttcatgttggcttcggcaagttggcctcgttcgtggatgtctggatgtagccagttgctcaggagttctcttctgacgtttatttatgtgtgcgtgatgggaacatttgttggcttcagctttgggtgaaacatgaggaacatattgtccttgtagtgatgtgcaatgtcacattcgtcctcttagcatcttgttcgcgattgtgtagattacaacaacagtcgcaaaacatataagttagcagtaatcaagtactgattggtttattagtttctgatatagtataaacctcgtaggtgaaagattggaattactatgcgcttcatgcttttgccttgttttttcttaggtagtgtttattttccgtggcatggtggcatctggggttttttgcagttctgattggcgttgtg

SEQ ID NO: 105518 - DNA, 1620 bp, Zea Mays
gcgggcggatgacgtcgcggtggggcgctgctgcgcgcttgctctcctgccttgtgcgtgcgttggaacgtggaagaataacgacaacgcctaataacgagaaaagaaaacccaagacttcgtcgtcaccaaaaaaataaagcagaaaaaaacagagagtagtagactacgacagcgtccgtcgaaccggagggtcggaggcggaggcgaagatgaggaagaagctcggcacccggttccccgcgatcctcgctcttccgggcgggatccggtggacgcagcccgccgttaacgcgcggcttctctttttggttccgtgggcggggatttggctgggttcttggtggggggcgccgtgggtggaggcgggctcgggctcagatcggctcctgtgctcgcgcgtgcgcggggaagtaatttcgtttcgttttgttttgttttcattctttccttccacttttttgagggtctacgtctatcgagagttcggattctcgttgctcaacagaggacatcgacaattaattatccggcttctgcactcgtgttgtgttgagcgggtggacggtggagagatttgtggccgctcgcggctgactagatcactgctgatgaaatttggctcgaatcaaaaagataatgcaagcagatgaggatgttggaaagattgcattagcagtgcctgttttagtctcgagggctcttgaattgtttttacaagatttaattgaccggacttatgaaattactcttcaaagtggagcaaagacactgaattccttccacctgaagcaatgtgtgaagaggtacagttcttttgatttcctaactgaagttgtcagcaaggtaccagatcttggtggtgctgattcatgtggagatgaaagagtgttacctagaagaagaaagtcaaatggcagtgacccagagaatgatgaatcaagatctagtaaaatggctataagaaatgcaaataccagccccagaggacgtgggaggggtcgaggcagagggcgaggtcggccaccaaccaagagaaaggaagttggttacgtacaatttgaagatgagagcagcatgtttgctgaacaaggtgaaaccttaccaggagagggaacagttccagagatcaacagcggcaacgagattacgcctcaaagcacgcaacctccgctaacagcccctgcgcaagctacaaattctaaggtggaagaagcaagcaccgatcatcagtcagattggcctatgccagatgccactggaaacatcggtgttgggccatctggttttggacatctgacagtgcaggttgatgaagatgaggactacgacaatgaggactagtcagggccatcctctcactgtatgcgctaacaggactgttctggtgttgtaaaatgtaaatatagcttgaagtagctgccgcagcttagctatgattgtctgttatgaggttatgtagttgccctgtgtaacttctgtaattgctttttagttgccttttctctacatgattgactgtcaaagcgttttgtcatatttaacccagtatgtttgagcaggggtcgactatttctaagtattttgactttattcgactagtatttgagcagtcatctg

SEQ ID NO: 105519 - DNA, 1340 bp, Zea Mays
gcgggcggatgacgtcgcggtggggcgctgctgcgcgcttgctctcctgccttgtgcgtgcgttggaacgtggaagaataacgacaacgcctaataacgagaaaagaaaacccaagacttcgtcgtcaccaaaaaaataaagcagaaaaaaacagagagtagtagactacgacagcgtccgtcgaaccggagggtcggaggcggaggcgaagatgaggaagaagctcggcacccggttccccgcggctggttttgaatcttcaaaacctcttgttctgttgtcatggaaacaacgtggttgaagttccaagctacacacatctgtatggtttgcactgcaggctcgaatcaaaaagataatgcaagcagatgaggatgttggaaagattgcattagcagtgcctgttttagtctcgagggctcttgaattgtttttacaagatttaattgaccggacttatgaaattactcttcaaagtggagcaaagacactgaattccttccacctgaagcaatgtgtgaagaggtacagttcttttgatttcctaactgaagttgtcagcaaggtaccagatcttggtggtgctgattcatgtggagatgaaagagtgttacctagaagaagaaagtcaaatggcagtgacccagagaatgatgaatcaagatctagtaaaatggctataagaaatgcaaataccagccccagaggacgtgggaggggtcgaggcagagggcgaggtcggccaccaaccaagagaaaggaagttggttacgtacaatttgaagatgagagcagcatgtttgctgaacaaggtgaaaccttaccaggagagggaacagttccagagatcaacagcggcaacgagattacgcctcaaagcacgcaacctccgctaacagcccctgcgcaagctacaaattctaaggtggaagaagcaagcaccgatcatcagtcagattggcctatgccagatgccactggaaacatcggtgttgggccatctggttttggacatctgacagtgcaggttgatgaagatgaggactacgacaatgaggactagtcagggccatcctctcactgtatgcgctaacaggactgttctggtgttgtaaaatgtaaatatagcttgaagtagctgccgcagcttagctatgattgtctgttatgaggttatgtagttgccctgtgtaacttctgtaattgctttttagttgccttttctctacatgattgactgtcaaagcgttttgtcatatttaacccagtatgtttgagcaggggtcgactatttctaagtattttgactttattcgactagtatttgagcagtcatctg

SEQ ID NO: 105520 - DNA, 1244 bp, Zea Mays
gcgggcggatgacgtcgcggtggggcgctgctgcgcgcttgctctcctgccttgtgcgtgcgttggaacgtggaagaataacgacaacgcctaataacgagaaaagaaaacccaagacttcgtcgtcaccaaaaaaataaagcagaaaaaaacagagagtagtagactacgacagcgtccgtcgaaccggagggtcggaggcggaggcgaagatgaggaagaagctcggcacccggttccccgcggctcgaatcaaaaagataatgcaagcagatgaggatgttggaaagattgcattagcagtgcctgttttagtctcgagggctcttgaattgtttttacaagatttaattgaccggacttatgaaattactcttcaaagtggagcaaagacactgaattccttccacctgaagcaatgtgtgaagaggtacagttcttttgatttcctaactgaagttgtcagcaaggtaccagatcttggtggtgctgattcatgtggagatgaaagagtgttacctagaagaagaaagtcaaatggcagtgacccagagaatgatgaatcaagatctagtaaaatggctataagaaatgcaaataccagccccagaggacgtgggaggggtcgaggcagagggcgaggtcggccaccaaccaagagaaaggaagttggttacgtacaatttgaagatgagagcagcatgtttgctgaacaaggtgaaaccttaccaggagagggaacagttccagagatcaacagcggcaacgagattacgcctcaaagcacgcaacctccgctaacagcccctgcgcaagctacaaattctaaggtggaagaagcaagcaccgatcatcagtcagattggcctatgccagatgccactggaaacatcggtgttgggccatctggttttggacatctgacagtgcaggttgatgaagatgaggactacgacaatgaggactagtcagggccatcctctcactgtatgcgctaacaggactgttctggtgttgtaaaatgtaaatatagcttgaagtagctgccgcagcttagctatgattgtctgttatgaggttatgtagttgccctgtgtaacttctgtaattgctttttagttgccttttctctacatgattgactgtcaaagcgttttgtcatatttaacccagtatgtttgagcaggggtcgactatttctaagtattttgactttattcgactagtatttgagcagtcatctg

SEQ ID NO: 105521 - DNA, 1171 bp, Zea Mays
gcgggcggatgacgtcgcggtggggcgctgctgcgcgcttgctctcctgccttgtgcgtgcgttggaacgtggaagaataacgacaacgcctaataacgagaaaagaaaacccaagacttcgtcgtcaccaaaaaaataaagcagaaaaaaacagagagtagtagactacgacagcgtccgtcgaaccggagggtcggaggcggaggcgaagatgaggaagaagctcggcacccggttccccgcgcgagggctcttgaattgtttttacaagatttaattgaccggacttatgaaattactcttcaaagtggagcaaagacactgaattccttccacctgaagcaatgtgtgaagaggtacagttcttttgatttcctaactgaagttgtcagcaaggtaccagatcttggtggtgctgattcatgtggagatgaaagagtgttacctagaagaagaaagtcaaatggcagtgacccagagaatgatgaatcaagatctagtaaaatggctataagaaatgcaaataccagccccagaggacgtgggaggggtcgaggcagagggcgaggtcggccaccaaccaagagaaaggaagttggttacgtacaatttgaagatgagagcagcatgtttgctgaacaaggtgaaaccttaccaggagagggaacagttccagagatcaacagcggcaacgagattacgcctcaaagcacgcaacctccgctaacagcccctgcgcaagctacaaattctaaggtggaagaagcaagcaccgatcatcagtcagattggcctatgccagatgccactggaaacatcggtgttgggccatctggttttggacatctgacagtgcaggttgatgaagatgaggactacgacaatgaggactagtcagggccatcctctcactgtatgcgctaacaggactgttctggtgttgtaaaatgtaaatatagcttgaagtagctgccgcagcttagctatgattgtctgttatgaggttatgtagttgccctgtgtaacttctgtaattgctttttagttgccttttctctacatgattgactgtcaaagcgttttgtcatatttaacccagtatgtttgagcaggggtcgactatttctaagtattttgactttattcgactagtatttgagcagtcatctg

SEQ ID NO: 105522 - DNA, 1928 bp, Zea Mays
gaccagcaggccccacgggctcggcccccctcctcccccgaggccccgagttcgctgcgcttccgccttccggtgacaagcgagtgaccgatctaccccgacccaccacccaccgcaccacgcgagccgcgagcgagatctctcggctccagggtaggctccctcctatggatctccgccgcctcgcggtgtttgcggccgccctcgccgccgggtggtggtcccgcggcgcggaggcgtcgatccacacctacgaccgggagcccttccgcgaggtgggcaacgccttcctcctctccggcggcagcgagggcatcgtcgccgacggggcagaccccgccgcccccgcatcctccttcatcaagtttgtgaatgttacattttggagaaccccagaagctgcggaatcacacgcaaaaatggcacatagtacaggcttggtacaggctatcctatttgaagttgtggacagggataacatcgggggatctgcctatggcggacagaggtccatatgttgtaccccagatcttgctaaactagagggctgcaagcaaggggaagtaatcaggaggccatcctctgatgatccagattggcccttcgtgctagacacacacttcagtgctaatcacctttcagtgaagttagaagatgagccagtgcgcattacaaagacaggcatgtacaacttgttcttcatatcctgtgatccaaaactgagaggccttactatgagtggcaagactatctggaagaatcctggtgggtatctaccgggacgaatggcgcctttgatgaaattttatgttctcatgtcgctggcgtatctgttggtaatgattgtttggtttagccagtacgtaaggttctggagggatatattgccaatacagaattggatcactctaatcattgcacttggtctgtttgagatgacactatggtactttgagtacttgaacttcaacagcagtggtgtgaggccagttggaatcacaacttgggtggtcactgttggagctatcagaaaaacagtttcacgtctactcatcctttctatctcaatgggttatggtgttgttcgtccaactttgggaggtctcacttccaaggtgttgctactcggacttacatatttcctggcgtctgagttgctggacattgcagaaaatgttggaacaattaatgatatatcaggcaaagcaaggcttttcctggtccttcctgatgcatttttggatgcttttctcatactctggattttcacttctctttcccgcacactagagaagctacaggcaaggaggagttctgtgaaattggatatatacagaaagttcacaaatgcattggctgtttctgtgatagcttcagttgcctggattggttatgaggtctatttcaaagcgacagaccccttcagtgagaggtggcagagcgcatggatcataactgccttctgggatgtccttgcgtttgtgttgcttcttgtgatttgttatctgtgggcaccttcccaaagctcgcaaagatatgcatattctggtgaagctgctgacgatgacgatgaggaatctcaatctctgacgaaaggagatggtgaagtagggatggtaaaaattgacaaggacagaaatgctggtgtcagcagtgctttcggcttagaagatgaggctgaggaggacaagcgggaatagccatttcttgttcctgatgtcccctaggtcccagaaacaatcgatattttggagcagcaatattgcaagaatacttctttttcaagttacatgtggttgctgtagaagtgcttggtattgtaaacatgcgaactctatttaaaagaaaaggattaggaattctaatccaaaggcaaaaactaacgtgcaattaagctttacatacaaccgtgctgcaattaaactatc

SEQ ID NO: 105523 - DNA, 303 bp, Zea Mays
ctagagaagcaatttgatatcttaagtcaagtggctgctattgttcacaatgacttttaccatttgtcccaagaaattctgggccttgcatttcagtaccgtgcagattttcctagtgatctacagaaacaggttgtttttgtggatttagccccaatcttctcccagatggcggatgctatattgagaagacaaatacaactcactgttgatactataagtgaggctatagatggtgctgaaggttttcagaacacacaccaacctcagcattatgaatccgcaaaatttagtattgagcag

SEQ ID NO: 105524 - DNA, 846 bp, Zea Mays
cacacctcgttcacgcagcaaacaccatttccacccaaccagaactcctcacgatcctctgcgccacccacaaccgtgcgaccgtccgtgctgccggcgaccccgatccgccgacccgtcccgtcccaccacaccctaccgccgctcgcagctatgtcgccgtcggagccgacgcgggaggagagcgtgtacatggccaagctggcagagcaggcggagcggtacgaggagatggtcgagttcatggagcgcgtcgcgcgctccgccggcggcgccggcggaggggaggagctatccgtggaggagcgcaacctgctgtccgtcgcctacaagaacgtcatcggcgcccgcagggcctcgtggcggatcatctcctccatcgagcagaaggaggagggccgcgggaacgaggcgcacgccgcctccatccgcgcctaccgctccaagatcgagaccgagctcgcccgcatctgcgatggcatcctcgccctgctcgactcccacctcgtcccatccgccggcggcgccgagtccaaggtcttctacctcaagatgaagggtgactaccacaggtaccttgctgagttcaagtctggtgcagagaggaaggatgctgcggagagcaccatgaatgcctacaaagctgctcaggacattgctcttgcagatctggctccaacccaccccatcaggcttggcctcgctctcaacttctcagtgttctactacgagatcctgaactcccctgatcgcgcctgcaaccttgcaaaacaggtttgcttcttctccttctatcccccctttgtgacttgctttcattttgagaccctttgtgatttgttttaa

SEQ ID NO: 105525 - DNA, 1413 bp, Zea Mays
cacacctcgttcacgcagcaaacaccatttccacccaaccagaactcctcacgatcctctgcgccacccacaaccgtgcgaccgtccgtgctgccggcgaccccgatccgccgacccgtcccgtcccaccacaccctaccgccgctcgcagctatgtcgccgtcggagccgacgcgggaggagagcgtgtacatggccaagctggcagagcaggcggagcggtacgaggagatggtcgagttcatggagcgcgtcgcgcgctccgccggcggcgccggcggaggggaggagctatccgtggaggagcgcaacctgctgtccgtcgcctacaagaacgtcatcggcgcccgcagggcctcgtggcggatcatctcctccatcgagcagaaggaggagggccgcgggaacgaggcgcacgccgcctccatccgcgcctaccgctccaagatcgagaccgagctcgcccgcatctgcgatggcatcctcgccctgctcgactcccacctcgtcccatccgccggcggcgccgagtccaaggtcttctacctcaagatgaagggtgactaccacaggtaccttgctgagttcaagtctggtgcagagaggaaggatgctgcggagagcaccatgaatgcctacaaagctgctcaggacattgctcttgcagatctggctccaacccaccccatcaggcttggcctcgctctcaacttctcagtgttctactacgagatcctgaactcccctgatcgcgcctgcaaccttgcaaaacaggccttcgatgaggcgatctctgagctagacagcctgggagaggagtcctacaaggacagcactctgatcatgcagctcctgcgcgacaacttgaccctatggacttccgacaccaacgaggatggcggcgacgagatcaaggatgctgctgccccgaaagaatccgcggagggtcagtaagatggattcagtctcacgacctgctgctgctgatgttgaggagtgaccagaaccagaaccgccgtcctcgattctgatagattatcttctagtataccttgtgttgttgctgttgttgtcgtcgtcgcgccggtgtatgcgatgaagctgccattgctgctgttttaattaagcattctagatgttataccgcatgctttgtttcggtttctatgtcgataaatggtggccggatgctggttttcgtgctccgagccggccaccaggaagaagacctgcctgcccttgtgggtgcagcgttgttagaatgacctacggtgtatttgactttgacaggcctgctgcctagtggactgatattctgttatgcgcaaagctatttggcttgatgtctcagaatattcttaatttgcgtcgtcttttaagtctatcacgatgacgcagaccacatttattttt

SEQ ID NO: 105526 - DNA, 918 bp, Zea Mays
cccccacctccgcacaaactcgtcgcttccgctccacaggatcctctgcgccacccacaaccgtgcgaccgtccgtgctgccggcgaccccgatccgccgacccgtcccgtcccaccacaccctaccgccgctcgcagctatgtcgccgtcggagccgacgcgggaggagagcgtgtacatggccaagctggcagagcaggcggagcggtacgaggagatggtcgagttcatggagcgcgtcgcgcgctccgccggcggcgccggcggaggggaggagctatccgtggaggagcgcaacctgctgtccgtcgcctacaagaacgtcatcggcgcccgcagggcctcgtggcggatcatctcctccatcgagcagaaggaggagggccgcgggaacgaggcgcacgccgcctccatccgcgcctaccgctccaagatcgagaccgagctcgcccgcatctgcgatggcatcctcgccctgctcgactcccacctcgtcccatccgccggcggcgccgagtccaaggtcttctacctcaagatgaagggtgactaccacaggtaccttgctgagttcaagtctggtgcagagaggaaggatgctgcggagagcaccatgaatgcctacaaagctgctcaggacattgctcttgcagatctggctccaacccaccccatcaggcttggcctcgctctcaacttctcagtgttctactacgagatcctgaactcccctgatcgcgcctgcaaccttgcaaaacagattgtgtgtagcttctgggcaacggattgagtgtgcataaacagctcctgtctccatcagcttatgtaggggtttggttgattcaattaaaaaaagatggtgcaaaggaaatagttcacttgcctccgtctgcatgcctattcactgaaacaatttt

SEQ ID NO: 105527 - DNA, 646 bp, Zea Mays
gaataagggggacattcttaactagatctatcctcgatctttttgccatcacgtacatggcggtggccaagcagaccacgatcgccgccgctgtgctggtcatcgctgcgatcctgttgtgttcctctccatgctaccaagctggaaacttcttcggctgcgagcagtgctttcgccccgagggttcctgtaccacggagagatgccacacgcagtgccaatccaaaggatacaaaaccagcaatccccactgtaaactgtgtaggactgctgaactgtggtgctgctgcacttgatgtttgttctctctcacccaccccagcatgtgaagtgaaaagtatttaataccaaccagaatcattaataaataaccaaggtatcatttggttcgcgaagtgtaacgtaagtggtaatagtaataatatatgattcacacttgaataccaacgataacaagtatggataggttagtatccatttttcgtgcgatattctattactgttggacttaaacaaattaaaggtatgattcatgcttgaatcgtgccgcggagagttagctatatacttatgcatgccatgcatcaacgactatatatgagcacaaaactagctagcgtgaacgagcaaatcgaaagcagctatc

SEQ ID NO: 105528 - DNA, 489 bp, Zea Mays
cgatcgtcgtcgcagaaaggaaatagaagtagcaagaatactcgtttcctcatggcactactcttcaagaaaagtccgaccaacatcaccgacttgataatcgcttctctcctggttcttcttttcatcatggcttcaatgtccccatccttccaagtgcatgtgaagggcgacgatggccatcagcacgagggatccctagaactcgcgcagcaactgaggacgacgacgtgcatcgcggttaagggaggcatttgtttccaaaagaagtgccagggtatctgcgaatccaatggcttcaatgctgcaactgccttctgctataaaccgcctggtcttcatctcccgcagtgctgctgcccatgatcgttaattagcctaatgcagcgtacgcatgcatcgatccgtatgctttatacgcacataaactgaataagatgtgtggctttactaataataatatattacaatgcatgtggagtatttcat

SEQ ID NO: 105529 - DNA, 222 bp, Zea Mays
aatcccgcgtgcgcttacacagagattggtaatagtggtgacccagtcgcagccgcggaccttcgcctcctcatcgcttgctcgttgtcgccctttgcttacgtctgcacccgacgctgctaccctttgctcacctgttcataatcctttcagatctgctgtcgtgacctcatccagccgtgctgtggcagtggatcggagttcgctccagctctgattggt

SEQ ID NO: 105530 - DNA, 1305 bp, Zea Mays
ctgtcggagaacaaggtggtggaagaaatgtccaaccaaattgggccatggctgttttttctatcatcaattgtttttttctcccccagcatggaattaaccactttaagcatctttcaggctgatgctatcatgtccagattgaacattgatgattatcagaaagaaggcagtcaaccaacactcctgatcacatctgacatagtggtcgtccatgaagggattattagagaaaaaccaaccaccaaggaagaagcacggcaattcctgaaaggctattccggaggtcacgtgtcaactgttgggtctgttgttgtaactaatcttacaactgggaagagacttggaagtttggacaaagctgaggcaattttcactttttagccaaaagactctttcatcaaggctacttttgttatattgccattcaaatcagatttattagtgcagaaggatatatggtccaatttagatgcgtaatctctaatatcggtaatacttatttaatagaaatgaattcaccaatgtagggtgatgaatattggtagatgaggttcttcaaatttattgtgtgaaaaggaagtttttgtcttgaatgtgatatttatggatgataattgaccaaggaagttttgcattatcattctacactgtgcaggtttatttccacgatataccagatgaggtcatcaagagcttggtatgttctcattttattctacttgcacgccttctataaatagctgcaatcaaaaaaattgcaggattagcatcacgagcttcaatattttcatatttgccatgttgttatgtcactgagtttttctctgcactctttgttagatcgatgagggagtagtatttagggtcgcaggtggtttgctgcttgaacatccattgacgctgccgtttgtcgaagcagtggttggttctagtgacagtgtcatggggctgtcaaaggaggttgcaaacaagttaattcacgacgcactgtctacttagcgtagcaatttcagcactactgtttctgatcaaattcttactgcactcacctggagatgtgatcaagcagagagcatatctggggatacccatagtgattcatgtatttttaaacgttaaaccaagacaggcgcacctggcattgcaaattgtgatcaggttgtacttgccttctgtttcacttgaaggatacgttgatgcttcttttagtgggtcagttggtatgatttgtaatatactgatatacataatctcgtctctgatatgtgactgttcgttgcaattgttaaagaacacaacaaa

SEQ ID NO: 105531 - DNA, 1162 bp, Zea Mays
ctgtcggagaacaaggtggtggaagaaatgtccaaccaaattgggccatggctgttttttctatcatcaattgtttttttctcccccagcatggaattaaccactttaagcatctttcaggctgatgctatcatgtccagattgaacattgatgattatcagaaagaaggcagtcaaccaacactcctgatcacatctgacatagtggtcgtccatgaagggattattagagaaaaaccaaccaccaaggaagaagcacggcaattcctgaaaggctattccggaggtcacgtgtcaactgttgggtctgttgttgtaactaatcttacaactgggaagagacttggaagtttggacaaagctgaggcaattttcactttttagccaaaagactctttcatcaaggctacttttgttatattgccattcaaatcagatttattagtgcagaaggatatatggtccaatttagatgcgtaatctctaatatcggtaatacttatttaatagaaatgaattcaccaatgtagggtgatgaatattggtagatgaggttcttcaaatttattgtgtgaaaaggaagtttttgtcttgaatgtgatatttatggatgataattgaccaaggaagttttgcattatcattctacactgtgcaggtttatttccacgatataccagatgaggtcatcaagagcttgatcgatgagggagtagtatttagggtcgcaggtggtttgctgcttgaacatccattgacgctgccgtttgtcgaagcagtggttggttctagtgacagtgtcatggggctgtcaaaggaggttgcaaacaagttaattcacgacgcactgtctacttagcgtagcaatttcagcactactgtttctgatcaaattcttactgcactcacctggagatgtgatcaagcagagagcatatctggggatacccatagtgattcatgtatttttaaacgttaaaccaagacaggcgcacctggcattgcaaattgtgatcaggttgtacttgccttctgtttcacttgaaggatacgttgatgcttcttttagtgggtcagttggtatgatttgtaatatactgatatacataatctcgtctctgatatgtgactgttcgttgcaattgttaaagaacacaacaaa

SEQ ID NO: 105532 - DNA, 877 bp, Zea Mays
ctgtcggagaacaaggtggtggaagaaatgtccaaccaaattgggccatggctgttttttctatcatcaattgtttttttctcccccagcatggaattaaccactttaagcatctttcaggctgatgctatcatgtccagattgaacattgatgattatcagaaagaaggcagtcaaccaacactcctgatcacatctgacatagtggtcgtccatgaagggattattagagaaaaaccaaccaccaaggaagaagcacggcaattcctgaaaggctattccggaggtcacgtgtcaactgttgggtctgttgttgtaactaatcttacaactgggaagagacttggaagtttggacaaagctgaggtttatttccacgatataccagatgaggtcatcaagagcttgatcgatgagggagtagtatttagggtcgcaggtggtttgctgcttgaacatccattgacgctgccgtttgtcgaagcagtggttggttctagtgacagtgtcatggggctgtcaaaggaggttgcaaacaagttaattcacgacgcactgtctacttagcgtagcaatttcagcactactgtttctgatcaaattcttactgcactcacctggagatgtgatcaagcagagagcatatctggggatacccatagtgattcatgtatttttaaacgttaaaccaagacaggcgcacctggcattgcaaattgtgatcaggttgtacttgccttctgtttcacttgaaggatacgttgatgcttcttttagtgggtcagttggtatgatttgtaatatactgatatacataatctcgtctctgatatgtgactgttcgttgcaattgttaaagaacacaacaaatgcatgg

SEQ ID NO: 105533 - DNA, 445 bp, Zea Mays
tctcacgcgttctccactgctattccgcctccacccaagtgcctgctctgcttccctccgctcctctccagatcaagcaattcatgagtgggagatggaagagatctagccagcagaagaaaaatcaagcaggccaccagcagaatcgatgaggagacagcggaatctagggggcataggcatgcgaataaggcgacgaggcatcacctaacccctgaggtgaccttcgaccgctctggcgcttaagcaccgcttaagtgatgccttaataacaatggctgaaaaggtgctccaaagatgagctatccaacctaaaagcaaaattccgaatgatgtgctgtaaaactgtattctgtaatagcatatatttattatttttctattcagtccattttcttccctttcagcacaaacagaaaaattaatctgcaattggttctgttgc

SEQ ID NO: 105534 - DNA, 1991 bp, Zea Mays
agaggggcgtggggaggagggatggatctggggagccggtgctcgcgtgaggcgtgggcatctttcggcgttggttgttgtaggttgcatccgacggacgatgaaaacagagtcatggatggacggttgagattattggaaggcagaacgagaaaaggcatgctaccttagagttttaataagtagtatagatattgtagactgctcgtagagtggagtttgaaaaataaaagatgaggtgggagatagaatgggtaaagctactgcagatagtttaacaagttaatatgacctgatgaggatgaagccggatactcctgtttgttttacattttggtagatttttcccggccggcgctcagtcatacatcttccttccaatcataggcatatcagcatatgcacgccttatcctgttagaaaccggcaaccattttccttgcattaaattcattcctgaacttatccctatagcagagaaagttcttctcttccttcccgccatctcctaccgccgcccatcatcctcaaacggccgcgtaatagatcgagcctccctcactacactggtcgcctgtttatatatacagcacacacatgctcatggctagatagattgcatgcacgcacatgatccatgtcgcagttggcctgaactgactagctagctactcacacaccgcacaatgtcgaggtgcctggtgctggctgcggtgttgctcgccgcgctcgcactggctccggcggcgcggggcatcccgttcagcgagcgggacctggcgtcggaggagagcctgcgagcgctgtacgagcggtggcgcagccactaccacagggtgtcgccgcgggacggggacgacaagcagcagcaggcgcgccggttcaacgtgttcaaggagaacgcgcggtacgtccacgaggcgaacaggaaggacggccggccgttccggctggcgctgaacaagttcgcggacatgaccacggacgagttccggcgcacgtacgctggctcccggacgcgccaccaccgcgcccagctgggcgaggcgaggagcttcgcgcacgcgcagcatggccggggcgggagcgggacgacgaacctgccgcccgcggtcgactggcggctccgcggcgcggtcaccggcgtcaaggaccaaggccagtgcgggagctgctgggcgttctcggccatcgcggccgtggagggcgtcaacaagatcatgaccgggaagctggtgtccctgtcggagcaggagctcgtggactgcgacgacgtggacaaccaaggctgcgacggcggcctcatggactacgcgttccagtacatccagaggaacggaggcgtcaccaccgagtccaactacccgtaccttgccgagcagaggagctgtaacaaggccaaagtacacgcggctagaaccaaaatcacgtacacgtctaagattaatctaaactactatgtaacatatcgctgtgcaggaacggtcccatgacgtgaccatagatggatacgaggacgtccctgctaacaacgaagacgctctccagaaagccgtcgcgagccagccagtggccgttgcaatcgaggctagcggccaagatttccagttctactcagaggtatatgttacgtacgtaatttgatggaataatctgcttttacttaacaaaataaaaattttgtatgctcggtgtgcctgctctgctctgctctcagggcgtcttcaccggaagctgcggcacggacctagaccacggggtcgccgccgttgggtacggcaccactggagacggcaccaagtactggacagtgaagaactcgtggggcgaggactggggcgagaggggctacatcagaatgcagcgaggcgtgccggactcccgagggctgtgcggcatcgcgatggagccgtcttacccgaccaaaaaaccggcagggcatggcggcggcatcgtacaagatctcggccaggagcttcatcaggctgacg

SEQ ID NO: 105535 - DNA, 1894 bp, Zea Mays
agaggggcgtggggaggagggatggatctggggagccggtgctcgcgtgaggcgtgggcatctttcggcgttggttgttgtaggttgcatccgacggacgatgaaaacagagtcatggatggacggttgagattattggaaggcagaacgagaaaaggcatgctaccttagagttttaataagtagtatagatattgtagactgctcgtagagtggagtttgaaaaataaaagatgaggtgggagatagaatgggtaaagctactgcagatagtttaacaagttaatatgacctgatgaggatgaagccggatactcctgtttgttttacattttggtagatttttcccggccggcgctcagtcatacatcttccttccaatcataggcatatcagcatatgcacgccttatcctgttagaaaccggcaaccattttccttgcattaaattcattcctgaacttatccctatagcagagaaagttcttctcttccttcccgccatctcctaccgccgcccatcatcctcaaacggccgcgtaatagatcgagcctccctcactacactggtcgcctgtttatatatacagcacacacatgctcatggctagatagattgcatgcacgcacatgatccatgtcgcagttggcctgaactgactagctagctactcacacaccgcacaatgtcgaggtgcctggtgctggctgcggtgttgctcgccgcgctcgcactggctccggcggcgcggggcatcccgttcagcgagcgggacctggcgtcggaggagagcctgcgagcgctgtacgagcggtggcgcagccactaccacagggtgtcgccgcgggacggggacgacaagcagcagcaggcgcgccggttcaacgtgttcaaggagaacgcgcggtacgtccacgaggcgaacaggaaggacggccggccgttccggctggcgctgaacaagttcgcggacatgaccacggacgagttccggcgcacgtacgctggctcccggacgcgccaccaccgcgcccagctgggcgaggcgaggagcttcgcgcacgcgcagcatggccggggcgggagcgggacgacgaacctgccgcccgcggtcgactggcggctccgcggcgcggtcaccggcgtcaaggaccaaggccagtgcgggagctgctgggcgttctcggccatcgcggccgtggagggcgtcaacaagatcatgaccgggaagctggtgtccctgtcggagcaggagctcgtggactgcgacgacgtggacaaccaaggctgcgacggcggcctcatggactacgcgttccagtacatccagaggaacggaggcgtcaccaccgagtccaactacccgtaccttgccgagcagaggagctgtaacaaggccaaagtacacgcggctagaaccaaaatcacgtacacgtctaagattaatctaaactactatgtaacatatcgctgtgcaggaacggtcccatgacgtgaccatagatggatacgaggacgtccctgctaacaacgaagacgctctccagaaagccgtcgcgagccagccagtggccgttgcaatcgaggctagcggccaagatttccagttctactcagagggcgtcttcaccggaagctgcggcacggacctagaccacggggtcgccgccgttgggtacggcaccactggagacggcaccaagtactggacagtgaagaactcgtggggcgaggactggggcgagaggggctacatcagaatgcagcgaggcgtgccggactcccgagggctgtgcggcatcgcgatggagccgtcttacccgaccaaaaaaccggcagggcatggcggcggcatcgtacaagatctcggccaggagcttcatcaggctgacg

SEQ ID NO: 105536 - DNA, 1841 bp, Zea Mays
agaggggcgtggggaggagggatggatctggggagccggtgctcgcgtgaggcgtgggcatctttcggcgttggttgttgtaggttgcatccgacggacgatgaaaacagagtcatggatggacggttgagattattggaaggcagaacgagaaaaggcatgctaccttagagttttaataagtagtatagatattgtagactgctcgtagagtggagtttgaaaaataaaagatgaggtgggagatagaatgggtaaagctactgcagatagtttaacaagttaatatgacctgatgaggatgaagccggatactcctgtttgttttacattttggtagatttttcccggccggcgctcagtcatacatcttccttccaatcataggcatatcagcatatgcacgccttatcctgttagaaaccggcaaccattttccttgcattaaattcattcctgaacttatccctatagcagagaaagttcttctcttccttcccgccatctcctaccgccgcccatcatcctcaaacggccgcgtaatagatcgagcctccctcactacactggtcgcctgtttatatatacagcacacacatgctcatggctagatagattgcatgcacgcacatgatccatgtcgcagttggcctgaactgactagctagctactcacacaccgcacaatgtcgaggtgcctggtgctggctgcggtgttgctcgccgcgctcgcactggctccggcggcgcggggcatcccgttcagcgagcgggacctggcgtcggaggagagcctgcgagcgctgtacgagcggtggcgcagccactaccacagggtgtcgccgcgggacggggacgacaagcagcagcaggcgcgccggttcaacgtgttcaaggagaacgcgcggtacgtccacgaggcgaacaggaaggacggccggccgttccggctggcgctgaacaagttcgcggacatgaccacggacgagttccggcgcacgtacgctggctcccggacgcgccaccaccgcgcccagctgggcgaggcgaggagcttcgcgcacgcgcagcatggccggggcgggagcgggacgacgaacctgccgcccgcggtcgactggcggctccgcggcgcggtcaccggcgtcaaggaccaaggccagtgcgggagctgctgggcgttctcggccatcgcggccgtggagggcgtcaacaagatcatgaccgggaagctggtgtccctgtcggagcaggagctcgtggactgcgacgacgtggacaaccaaggctgcgacggcggcctcatggactacgcgttccagtacatccagaggaacggaggcgtcaccaccgagtccaactacccgtaccttgccgagcagaggagctgtaacaaggccaaagaacggtcccatgacgtgaccatagatggatacgaggacgtccctgctaacaacgaagacgctctccagaaagccgtcgcgagccagccagtggccgttgcaatcgaggctagcggccaagatttccagttctactcagagggcgtcttcaccggaagctgcggcacggacctagaccacggggtcgccgccgttgggtacggcaccactggagacggcaccaagtactggacagtgaagaactcgtggggcgaggactggggcgagaggggctacatcagaatgcagcgaggcgtgccggactcccgagggctgtgcggcatcgcgatggagccgtcttacccgaccaaaaaaccggcagggcatggcggcggcatcgtacaagatctcggccaggagcttcatcaggctgacggcggccgcgcatcctactactga

SEQ ID NO: 105537 - DNA, 1580 bp, Zea Mays
ctctcctcaagcccgcagtacgtggccaagcagacagcaaagccaaaccttccgcgcaacgccaagagcaaccaccacttagcgatggagagcagcagcgccagcaacgaggaggtgacggctgtcccggcctcgtggaacttcgagccgaacgagaccctgctgggcctgatggcgctctcggtgcgcggcgtgctggccaggatcaaggccgagatggttgccggcggcggcggcgggaggccggtgatcccgatgggccacggcgacccgtcggcgttcccgtgcttccggacggcgccggaagccgtggacgccgtcgccggcgctctccagtccggcgagtacaactcctactccacttgcgtcggccttgagcccgcacggaggtccgtcgcgcggtacttatcccgtgacttgccatacgagctgtcgcccgacgacgtctacctgacgaacggcggcgctcaggcgatcgagatagtgtgctccgcgctggctcgtccgggcgccaacatcttgctccctaggcccggctacaagctctacgaggcgcgcgccgtgttcagcgggatggaggcccggtacttcgaccttgtacccggcgaaggctgggaggtcgacaccgacagtgtccgagctctcgccgacaagaacacggttgccgtcgtcatcatcaaccccgggaacccgtgcggtaacgtctactcctacgagcacctggccaaggttgctgagactgcgcggaagctcggcgtgtttgtcgtagcggacgaggcttacgcgcacttgacgtttggagagaggaggttcgtgccgatgggcgtgtttggggccgtggctccggtcatcacgctggggtccatttcgaagaggtggctggtgcccggctggcggctcgggtggatcgctaccagtgaccctagtggcgtgtttcagagaaccaaggtagccagcagcatcaagacctaccattacatctgctctgaccctacgacgtttgttcagggagcggttccaaacctcctggagaacacaagcgaggagttcttccgaagaaacatcagaactctaaaagaaagcgcggacatgtgctgggagaagctgaagggcgtcaacgggatcgcatgcccaagcagaccgatggggtccatgttcgtaatggtgaaactggacctgtcctgcctgcaggggatcgaagacgacatggacttctgctgccggctggccaaggaagaatcagtggttgttctgccagggcgtgttgtgggatgcgaggactggctccggatcaccttcgccatcgatccgtcctctctcgaagacggcctggacaggctcaggtccttctgctcgcgacacagcaagccggcggcacagggttctgctgcctctgtagtctagtagtgtctgttagaggatctgaagcgtgtccaggactccacgtcttggaaacaatgaagtttgggtcaatatgagaacgtaataataaagttgattcagacaaatgtaagggcccttgtttcgtgcagatcgcgttcaaacatagaattggatcttgattctgtctggatctatca

SEQ ID NO: 105538 - DNA, 1037 bp, Zea Mays
ttttttttgaacaaaatagacaatgtaagagtagaataactgatatatataggcaatgtaagagtagcataactgatatttggatataatccatatccatctagaaaattcaaatattagtatttccaaacctatcagttgattatgttgaataaaatgacgccattgcacaaagacacaccatagacaatgtaagagtagcctctaatatttggatatccatatccatctagaaaactcaaatactaatattcccaaatgtatctaggatacagaactgtctaatgcaggccaccacccttcaataagtaccgaacacagacacacacattcttcgatcatcatcacttcatcagccatcagatacttagctagcactcctgttcatacgaccatggcgtcgtccagcaagcagaacgccgcggtggccgccatctccgtcgccctgctcctcacttcgcatctcgcagtcgcagtcgcagtcgcagctggagcagaagcgggaggagtagcgccgttgaacacatgcgaaacgccgatcgcctgggctccctgcttcggcaagacctgggtctgcgttcccctctgccttggactgcactacaccggcggtttctgccagcaggagcagatgagcgagggagacgccggcgccgagcctgctataatcggaggcgccatctgcgtgtgcaccaagcagtgtcttttggatgtggaggcggtgcaaggtgcaccggcaccgtcgcagccgcccgtcgccgagcctccgcgggggatgcgtggggttgggatgctcaactgatgatggtctatattgcttgccagcggaaagctgctggctcgagagaatgtcaaataagcttctttttctaaaaaaaaaatatagagaactcgctttatcaaaataatgtcgttctcgatcgttttctaatatgatatcatgatatagtgggtgatgactatctcgaaacagtctcaaatttttatcataagtctacatatgatatcatgagtcatgacatatgaacaagttttat

SEQ ID NO: 105539 - DNA, 466 bp, Zea Mays
atcagatacgcagcactcctgttcatacgaccatggcgtcgtccagcaagcagaacgctgtggtggccgccgtctccatcgccctgctcctcacttcgcatctcgcagctggagcagaagaagcagaagcggaaggaatagcgccgttgaacacatgcgaaacgccgatcgcctgggctccctgcttcggcaagacctgggtctgcgttcccctctgcattggactgcgctacaccggcggtttctgccagcagcagcaggtgatcgagggagacgccggcgccgagcctgctataatcggaggcgccatctgcgtgtgcaccaagcagtgcctgcttgtggatgtggaggcggagcaaggtgcaccggcaccgtcgcagccgcccgtcgccgagcctccgcgggggatgcgtggggttgggatgctcaactgatttttagataatggaaataatcatccagcctt

SEQ ID NO: 105540 - DNA, 2865 bp, Zea Mays
atgcgcattgcgcagtggcagactggcagtgtggcacaggcactagctcaggcacaaggcgcacaacggcacaagtgcacaatggcacaagcacaacagtcaatagagaacagacaacaggtggtcaggtctaagcaccgcacaacagaacagacaacatcaattcaatccatagtacctatctccatgtctaagcaccgcacaacaccaattcagacaacactaagcactaagcactctcagggtctggccgtggagcgtggacgactggccgactgggaattgggatgggagtctgcgtctagctctgggcctctggccgtctggggctgggccgctgggactgggagcttgggcgctctggcgcgcagcgcgctgctgcttgggccttgggccactatccgcgagaccactgcagagtgccagaggtacaggccgcaggttgaggagggaggaggcaaggcgaagctgctcgccgtcggcgccacgtcccgggcggcggcgaagtttcgtggtggaatcagcggggcgcccatcggccggcgaggccccggctgcccggccggccagccagtcggagtcgggccgggtggtctccgtcgcaggagtggtgtgatacgtaatggtagaggagagttgttgagacgtcctagggatgttgtgggtaatttcttgagatttagaactaggaggaaactgaaagtcgccaacttgcctatgaagtttgagttcccagaagatgagatcgcaagtatcactagcaattacagcactcttatcggaaaaggtggtttcggagaagtctacagaggggtccttgacgccgacgatgatctggtggcagtgaaaagatacatccgacaggacttgcgcgacgagttcatggatgaagtgaacatccacagcgtgatgaaccacaacaacgtggtgaaactcataggctactgcattggcgaaagcactctgatgctggtgacggagtacatctccaacggaaacctcgacgacatactccacagaagcgacgcctctatccctttggacgtgaggctgggcatcgcgatagggtgtgcagaggcgctgagctacatgcattcgatggactcgcagagcgacaaccatatttaccatggcgacattaaacccgccaacatacttctagacaacaatctgacgacaaaggtatcagattttggactgtcaaggttccttttcagtggcactacccagttcactacgaccttgaaaggaagcatgggctacatggatcctgtatactttcacgaggggtgtctgtcgccgagaagcgatgtgtatagcttcggtatagtcctcttggagctactgactcggaagagggcaaagtatggggacgtcaacctgatccctacgttcaacaaagcctgtgccaaggggaaagggctgagggagctgtttgatgcagcaatagctgagaaggacaacgtgaagatcctcaaagagtcgtggaagctagcatcccagtgcctgtcactgaacatccacacacgtcctcagatgaatgaagtggccaaacgccttcggatgctcaagaaagaactgaagaccagtccgcagtccatactggcgacacactccatgtgggccaaacagtacaggcaggcaggctcaagctcgcccagcttcaagaagaagctgagcttcttcaagggaaacgctagcagctactctaaggtcatatctgaacttggggacaatgtaagggtttttacaaaggaggagataaatgaagtcacacataattactccaatcttctcagtggaggtacatcagcaaccgaggtttataaaggaacgcttgaggacaacacgatggtggcggtgcatagattggtctacgagggctctgaggaggcgttcatcaacggagggatggtcgtgtccaagatcgcccacaggaacatcgtcagagttctgggctgctgtctggaaccccagaccaccgctttcctctacgagtacgtcgctaaaggaagcatcctcgacatcctgtgtagccaggaggatttcccgctggatctacgcatgaggatcgcgatcaagaccgcggaagcgttgcagtacctgcattcgtcggaaactggcgtcaccggacacggcagcgtctcggcgtccaccatactcctcgacaacaacctcgtaccgaagctcaccgagttctcgaggtcatgtacgctgttcaaggagagcgagactacttctgttgttggtgctggagtgatgatcactggcagccttctagagaaagctctgaacgacgacccgtcccgctacggctccgtgctgatgaacctggagagcgacgtgtacaggttcggcggcgtcctgatggcgctggtcagcagggacggggacggggacggcggccacgacggcctcctcgccaggttcaccagagcgtacgagacggaagagaccgggagggcgttgttcgacagggacgtcataacggcggaggaagacgtcgccctgctcgacgagctggggaggctggcgctcaagtgtagcgttctggacgcggacaggatcgctgtgaggccgacgatgaaggaggtggcggatgagcttcggacgatgaggaggtcttggaaggagcgtagccgtagcaccgaggcgcctgctgcgtacgtagacgtagctgctgcaggtgcggcggtggtgccggcggaggcagcaaggctgccgaacctgatgcgccacatgttcgggtaccgtcggatctccgttggtgatcctatacgcgtgtgctaagtaggatgtacgggaaagatcaccgaggtgtgtagtactgtgtagcgatgtttgtctgtcttcctgtttgttctt

SEQ ID NO: 105541 - DNA, 1238 bp, Zea Mays
atggcgtgtctgtcaccgtcgtcgtccggccggcgcctgtcggagctgctggaggagaagcaggagcccttcgtcctggacttgcacctgctcgaaaagggctgctgctcctcgcgcctcctcgacggctacgactccgcgctgtgctggccggccgccggcaacgacgccgcggccgcgctcaggcgcctggccagcaagaagaacaaggcggccaagctgaagcccgcccggcagcatgctgccggcggcctcctccagctcttgctctccaagatcctccgcggcagcagcgcggcggcccagcgccagcggaagcccgccgcggccgcgctgcacttctccggctccttgaagctgccggctgccgtggcgccggcgtcgtgctacgtggagctggacgccgtaaagaccgccgcctccgacgtcgtcgtcgtcgtcgtcaaggcgcaggacgccgccaccgcggggcgctacaacgactccgactgcgacgacgatgagaagcagcagctgagccccgtctctgtcctggaccacccgttcgagagctcccccgtccacgccaccctgctgtccccgtcgtccaaggacgccgccgccatggacgacttccggaacctcctggacgcggcggcgtacagccccgcgctgctcgccaagtccgagcacctccacctcagggacgccgacgccgacgccgacgaggactgctactacggcggctactgcgtcagccccaagagctgccgcgacgacaggtccgccgccaccgcctactgggactgggacgcgcacacgggggagctggcacgggcgtctcagctggtggcgtccgagctcccgacctccaggctagtcgccgccgacgtggggcccgagcgccgcgacgtccgcgccgaggtagaggcggccgtgttcgaggcgctgatgcgggagctcgtcgtggatctccggagctgctgaccgccatggcggtgcacgtctgcttctccttgcggccaagagaaaacggagcaatgctctgctttgctctgtttcggctccacacatgcccaagcccgatgatgtgatcgaaaacgttttgttttcttcctttctctctctctcttttgttttcggtagggtacctgctggtaggtgggccctacggctccgcgtttccttggcattctgtcaagtctcgagtgccaggtggaggcagtagaactaattacgtaattagccgaaatactatt

SEQ ID NO: 105542 - DNA, 761 bp, Zea Mays
aacagagtcgaaagcgtcgaccggagaacgtagagagaggagagagagagagagagagagagagagagagagaaacgagtgccgccatgggaggaacaccgatacgccagcgttgatgcctcgggggcaggccagggtgcatcaacgaggtgcgctgacggtgctcgatcgggtctcgccgggcagagctgtgggtcgggcgtacgggaattgctcgctgtcgcctgtcgaccaacgtcggctcggttccgcgccgtgccgctgttagcaccgcccaacgccccgcatgccggatgaaggcggttcgtccggcggcgctcgtgcgagtagattggtggcggcgcgtgtgcgagcataacagccgtgttatcaaaggtgatgaatagaatagctgaggtgatcgagctggtggccgcagcaaatcccagccccggaactcattgcttagcatcggaagcaaagcaatccaggacactgggtctagctcctgatgctttgacagcagtagtggaacactgacctacacttgctcctatctttgtttgcttggtcggcccgagatatatgctctctttttagagacgactgcaaaagttaggtcgtcgacactacgactgtagatgaccaaacggattgcacggtatgacattaacactgatgtcataaagcacaacactaatagacacgattagtaatcgtatcgtgtcgtgccagcactaatgtctagccatcggcccagacacgcgacactatgtgcctaa

SEQ ID NO: 105543 - DNA, 5409 bp, Zea Mays
atgtcgtcgtcggcggcggagacgccgcgggagcacgtggagagtatccggcggaagcgctactacatcggccgcggcgagcaaaacccgctggcggaggacttgcaccaggccacgaactacctctcgcaggagctctactccaaggacgtgcacttcctcatggagctcgtgcagaatgctgaagataacgaatacccttctgaagtagcaccttctttggagtttctgattacatcaaaggatattactggatgtggtgcatcctcaactttgctcattttcaataatgagaggggattctctgcaaccaatatcgagtcaatttgtagagtcggaaaatcaacaaagaagggaaacaggcatcggggttacatcggagagaaaggtattgggttcaaaagtgtgttcttgatatcaagccagccccacatattcagcaatggctatcagatcaagttcaatgagaaaccctgtgcagaatgcaatattgggtacattgtacctgaatgggtggaatccacacctagcctttctgacatcgaaacattgtacgggtgctcgaaagtcctgcctacaaccaccatcatcttaccattgaagagcgagaagattgatgcggtgaagacgcagctgtcaagcatgcatcctgaaatgctattgttcctgacaaagatcacgaaactttctgtccgggagaactctgatctcaaccatacaactgttagtgagatctcgataactagtgagaagaactaccaagccaggaagaacatgcatgcggagtcgtacacactccacttatctgctgaagagaccgggaaagaagaagcagaatgcggttactatatgtggaggcagaaattcccagtcaagccagagaacagagtcgataagcgtgctgaaattgacgaatgggtgataactctggccttcccacatggccagcgtctgactcgtgggaagcagctattacctagcatctatgctttcctcccaactgagatggtaacaagcttcccgttcatcattcaggctgacttcctccttgcttcgtcaagggaggctatactgtttgacagtccgtggaacaaggggattctagagtgtgtcccaaaggctttcatggatgcttttgtgacacttgtaaagtctgatgcaccatcaatgtctcggccatctatgttcaactttctacctgtcgactcctcacagatcccactgcttgaaccagttaggtctggcatcaaagacaaggtccttgcagaggatatagttccgtgtgaatcttacgcttcacagaagatattctgcaagcccagtgaagttgcacggctcaagccaacattttggactatccttgccaaagcatgggggctaggagtggatctgaagaatctgtcaacccatggaacttatattcttagctcacattttgacaaaagtatctatgacagtgtgctaaactttctggatgtgaaaaatgtgaaccatgaatggtatgcaaaatgcattgaaggctcaaatcttgtcaaggaggtagatgaacaactttacctggaaattttatattttgttgcagtcaattggcaaaacttttctggtacaaacatgatgtccattcccctgctgaagtatgttgataggggtggtgttctctcgttctggagcatatccagagctagtcagtgtaatgataggttgtgcattgcgtctgaaaacaagtacatatcatggctaatcagctggaatagggagttcctatcttctaaccggttctttctgcctcctagcacacaaacagctctagaaggttgctcggagaagatgaagagctggcttcagaaacatgcaagagttgaggttgtctctatttatagttatggatcagttgttgttaattccttgggttctgatcaaagagctgtcattgccttcgcacactttctttatcactctttcaagaaggatcacatcggggactactacttgtcagaactctgcagcagcatgccagtaattgatagctatggctatgttgtcaaggaaagaaatagcattatagttcctgccaagggaagcaaatgggttggtttgatgggaacaaacccatggagggatcacggctacattgagttgtcagcagaatacaagtcagcaggacattttgctggaaactatacttctgaagaccagctattggaattcctcaagacaaatttgcaggcttcggatgtgccattcatactcccaccagatgccagattctctactgtgtcatcatctctaactgtggacaatgtattcttgctgctggaatggataaagaatttgaggtcacgtggtgtaagattaccagacctgttcttgacttgtgtcaaggaagggaattggctcaagacgtcggctgggtacaagtcgcctaatatatcatttctgtccagctccaattgggggagtcttctgcaaacagcaccttcctgtgttgatataccaatggttgatcaagagtactaccaaaacaggctacatatgtacaaagaggaactcaaggcaattggtgtgagatttgaattccaggaagcttcagcttatatcggaactcgtctcatgtctattgctgctggcaattcgctgacaagagagaatgtgtacacactgcttcggcttattcggtttctacgagagaagtttctatctccgagtgatctgatcgaaagtgtaaaagagggacgatggatgaagagtactcttggctacaggcgtcctgctgattgtatcatctacgattcagattgggaagtggcatcatgtatcagtaaccaaccattccttgatgtatcattctacggtgcagccatcctcgaatataaagtcgagctggaattacttggtgtcattgtggggttcaaagacaattaccaacttgttattgacaacttcaagtttagttcttgtgatattacctctcaagctactgttttaatcctcaagtgcatccgttatgtggcttcatgtgatgattttataaggaagctcaaagatttgaaatggttgaagacaattgtgggatttcatgctcctaacatgtcttttcttgtggatcctgaatgggagtgccttcttaaggtctttaatggagttcctattattgactatggattttatggtagtgtgatcagttcatacaaagaagaattgaggaagactgggttgatcacaaggttcgaagaggcatcaaaagctataacagaaattttcaagcagagggtgttgaattcatcgcttaaaaaagctgatgtcctggctctactaggatcgtatcgtcaactggcaatgcacagtccacttccagttgagctgttcaattctatgcgtactgaaaagtggctgtacacttcactgggattccgatctccatcagatgcaattctatttgatgatgcatgggtatctttgtctccaatagcaaatttaccattcatagatgatggtgactcttgccatggtttaggaatggagatacatggctacaaagatgaactgaagaagttgggtgttactgttgatttaaaagaaggtgctagattcgtcatcacaggcatcagcattcccaatgacccttccaagttgtccaaagctacaatcttgtcactgcttggttgcatcaagagctacttcacctttgcagctggacctcttaagggcttcaaggaaaatatgtgcaagaagaagttgttgaagacatccatgggatatcagtgtcctaatgattgtatcctctttgatccaaagcagtcttctgtctgcatggaagatggccctttcatagatgaatcattctatggttcagagatagcctcattcaaagatgctcttacaagaatcggagtaaccgtggatatcaaacttggaaaagatcttgttgctcggcatctgaggagccacaataaaacagttaccatttcccggatctacttatacctgatgacgagcaaatgggtgcctgcaagtaaaaatagcaattggatttggataccaaacgaaatggatggtggagaatgggtggcctcaggaagctgtgttcttcatgaccggaacaatctttttggcctgcagtttcatgtcctggacaaatattatgacaaaaagctgcatgacttctttttgtacactcttgacgtgagggacggacctggttctgaagattactgcaagctatgggccagatgggagaaatccgtcaaggagatagctgtgtctgattgctctgctttttggaaattcatcgcgacaaactggagccaaaacacccagaaacttctttctggctgtgccaaagttcctgtatgtactgacggaaagatcattttgacaaagaaggaggacgtgttcattcctgacgatctactactcacggacctgttcagcaagctaacccagcattcatttttcatctggtatcctgcttctatcctcccttccatgtctcgagctagacttaaccacatctatgacaccatcggtgtccaaagaatctccaaagcagccaccaggaacgattccttcaccatcgacggacgtcatttcagaacgattgatccaagtaaggtggtcaaggctggtctgctccaaatagtgctctcattcctcgctgaccccgctctcgacattgctgccgaagagaggcaccggatggtttcctgccttctgaatgtgactgtccaagagagtgacgagccaatcacactggggtatagtgtaaggctgtcatccggagaggttgtggatgtgaagtccagccgaatggtcaggtgggagagggaggattctaagctgtacgtgcagagtggcgacggcgagcccagctacaaagagaagatcgagttcgcgacatacttcgcagaggagatctctcagggcctgctctttgagatggaggaccagatcccttccctcgctgagcttatcaagttcggcagcttgctggatttccaggacgccgctgttgggttcttgctcaagtcaaagaacctgcagatgtttcctgaagatgagcatttcctgaagtcttcaatgctagatggcaacaacaaccgttagttttctgtcgattatgcgctttgggtaacgttcatggtcagcaaatgtttctgctttcttatgttgctggttggctacataaaaatatggtgctgcgcttggaagtggaagcttctgaatgtgactgttctctagcgttcatcttgtgttcgtctatcgctcgttttaagtttggatttctgtgtgctagaatgcaacttgtcagtgcttccagtgcatgtattaagcgcaaaaactcaactgtgataaataatgccgtttgcaatgcattgtgtctgatctattttgtttttttttatggtccta

SEQ ID NO: 105544 - DNA, 5383 bp, Zea Mays
atgtcgtcgtcggcggcggagacgccgcgggagcacgtggagagtatccggcggaagcgctactacatcggccgcggcgagcaaaacccgctggcggaggacttgcaccaggccacgaactacctctcgcaggagctctactccaaggacgtgcacttcctcatggagctcgtgcagaatgctgaagataacgaatacccttctgaagtagcaccttctttggagtttctgattacatcaaaggatattactggatgtggtgcatcctcaactttgctcattttcaataatgagaggggattctctgcaaccaatatcgagtcaatttgtagagtcggaaaatcaacaaagaagggaaacaggcatcggggttacatcggagagaaaggtattgggttcaaaagtgtgttcttgatatcaagccagccccacatattcagcaatggctatcagatcaagttcaatgagaaaccctgtgcagaatgcaatattgggtacattgtacctgaatgggtggaatccacacctagcctttctgacatcgaaacattgtacgggtgctcgaaagtcctgcctacaaccaccatcatcttaccattgaagagcgagaagattgatgcggtgaagacgcagctgtcaagcatgcatcctgaaatgctattgttcctgacaaagatcacgaaactttctgtccgggagaactctgatctcaaccatacaactgttagtgagatctcgataactagtgagaagaactaccaagccaggaagaacatgcatgcggagtcgtacacactccacttatctgctgaagagaccgggaaagaagaagcagaatgcggttactatatgtggaggcagaaattcccagtcaagccagagaacagagtcgataagcgtgctgaaattgacgaatgggtgataactctggccttcccacatggccagcgtctgactcgtgggaagcagctattacctagcatctatgctttcctcccaactgagatggtaacaagcttcccgttcatcattcaggctgacttcctccttgcttcgtcaagggaggctatactgtttgacagtccgtggaacaaggggattctagagtgtgtcccaaaggctttcatggatgcttttgtgacacttgtaaagtctgatgcaccatcaatgtctcggccatctatgttcaactttctacctgtcgactcctcacagatcccactgcttgaaccagttaggtctggcatcaaagacaaggtccttgcagaggatatagttccgtgtgaatcttacgcttcacagaagatattctgcaagcccagtgaagttgcacggctcaagccaacattttggactatccttgccaaagcatgggggctaggagtggatctgaagaatctgtcaacccatggaacttatattcttagctcacattttgacaaaagtatctatgacagtgtgctaaactttctggatgtgaaaaatgtgaaccatgaatggtatgcaaaatgcattgaaggctcaaatcttgtcaaggaggtagatgaacaactttacctggaaattttatattttgttgcagtcaattggcaaaacttttctggtacaaacatgatgtccattcccctgctgaagtatgttgataggggtggtgttctctcgttctggagcatatccagagctagtcagtgtaatgataggttgtgcattgcgtctgaaaacaagtacatatcatggctaatcagctggaatagggagttcctatcttctaaccggttctttctgcctcctagcacacaaacagctctagaaggttgctcggagaagatgaagagctggcttcagaaacatgcaagagttgaggttgtctctatttatagttatggatcagttgttgttaattccttgggttctgatcaaagagctgtcattgccttcgcacactttctttatcactctttcaagaaggatcacatcggggactactacttgtcagaactctgcagcagcatgccagtaattgatagctatggctatgttgtcaaggaaagaaatagcattatagttcctgccaagggaagcaaatgggttggtttgatgggaacaaacccatggagggatcacggctacattgagttgtcagcagaatacaagtcagcaggacattttgctggaaactatacttctgaagaccagctattggaattcctcaagacaaatttgcaggcttcggatgtgccattcatactcccaccagatgccagattctctactgtgtcatcatctctaactgtggacaatgtattcttgctgctggaatggataaagaatttgaggtcacgtggtgtaagattaccagacctgttcttgacttgtgtcaaggaagggaattggctcaagacgtcggctgggtacaagtcgcctaatatatcatttctgtccagctccaattgggggagtcttctgcaaacagcaccttcctgtgttgatataccaatggttgatcaagagtactaccaaaacaggctacatatgtacaaagaggaactcaaggcaattggtgtgagatttgaattccaggaagcttcagcttatatcggaactcgtctcatgtctattgctgctggcaattcgctgacaagagagaatgtgtacacactgcttcggcttattcggtttctacgagagaagtttctatctccgagtgatctgatcgaaagtgtaaaagagggacgatggatgaagagtactcttggctacaggcgtcctgctgattgtatcatctacgattcagattgggaagtggcatcatgtatcagtaaccaaccattccttgatgtatcattctacggtgcagccatcctcgaatataaagtcgagctggaattacttggtgtcattgtggggttcaaagacaattaccaacttgttattgacaacttcaagtttagttcttgtgatattacctctcaagctactgttttaatcctcaagtgcatccgttatgtggcttcatgtgatgattttataaggaagctcaaagatttgaaatggttgaagacaattgtgggatttcatgctcctaacatgtcttttcttgtggatcctgaatgggagtgccttcttaaggtctttaatggagttcctattattgactatggattttatggtagtgtgatcagttcatacaaagaagaattgaggaagactgggttgatcacaaggttcgaagaggcatcaaaagctataacagaaattttcaagcagagggtgttgaattcatcgcttaaaaaagctgatgtcctggctctactaggatcgtatcgtcaactggcaatgcacagtccacttccagttgagctgttcaattctatgcgtactgaaaagtggctgtacacttcactgggattccgatctccatcagatgcaattctatttgatgatgcatgggtatctttgtctccaatagcaaatttaccattcatagatgatggtgactcttgccatggtttaggaatggagatacatggctacaaagatgaactgaagaagttgggtgttactgttgatttaaaagaaggtgctagattcgtcatcacaggcatcagcattcccaatgacccttccaagttgtccaaagctacaatcttgtcactgcttggttgcatcaagagctacttcacctttgcagctggacctcttaagggcttcaaggaaaatatgtgcaagaagaagttgttgaagacatccatgggatatcagtgtcctaatgattgtatcctctttgatccaaagcagtcttctgtctgcatggaagatggccctttcatagatgaatcattctatggttcagagatagcctcattcaaagatgctcttacaagaatcggagtaaccgtggatatcaaacttggaaaagatcttgttgctcggcatctgaggagccacaataaaacagttaccatttcccggatctacttatacctgatgacgagcaaatgggtgcctgcaagtaaaaatagcaattggatttggataccaaacgaaatggatggtggagaatgggtggcctcaggaagctgtgttcttcatgaccggaacaatctttttggcctgcagtttcatgtcctggacaaatattatgacaaaaagctgcatgacttctttttgtacactcttgacgtgagggacggacctggttctgaagattactgcaagctatgggccagatgggagaaatccgtcaaggagatagctgtgtctgattgctctgctttttggaaattcatcgcgacaaactggagccaaaacacccagaaacttctttctggctgtgccaaagttcctgtatgtactgacggaaagatcattttgacaaagaaggaggacgtgttcattcctgacgatctactactcacggacctgttcagcaagctaacccagcattcatttttcatctggtatcctgcttctatcctcccttccatgtctcgagctagacttaaccacatctatgacaccatcggtgtccaaagaatctccaaagcagccaccaggaacgattccttcaccatcgacggacgtcatttcagaacgattgatccaagtaaggtggtcaaggctggtctgctccaaatagtgctctcattcctcgctgaccccgctctcgacattgctgccgaagagaggcaccggatggtttcctgccttctgaatgtgactgtccaagagagtgacgagccaatcacactggggtatagtgtaaggctgtcatccggagaggttgtggatgtgaagtccagccgaatggtcaggtgggagagggaggattctaagctgtacgtgcagagtggcgacggcgagcccagctacaaagagaagatcgagttcgcgacatacttcgcagaggagatctctcagggcctgctctttgagatggaggaccagatcccttccctcgctgagcttatcaagttcggcagcttgctggatttccaggacgccgctgttgggttcttgctcaagtcaaagaacctgcagatgtttcctgaagatgagcatttcctgaagtcttcaatgctagatggcaacaacaaccgttagttttctgtcgattatgcgctttgggtaacgttcatggttgctggttggctacataaaaatatggtgctgcgcttggaagtggaagcttctgaatgtgactgttctctagcgttcatcttgtgttcgtctatcgctcgttttaagtttggatttctgtgtgctagaatgcaacttgtcagtgcttccagtgcatgtattaagcgcaaaaactcaactgtgataaataatgccgtttgcaatgcattgtgtctgatctattttgtttttttttatggtccta

SEQ ID NO: 105545 - DNA, 357 bp, Zea Mays
atggcggcgccaccaacatcggcaccacggcggaccgccctgccgctgctgctggtgctggtgtctgctgtcctcctcctcctcctcctcctctccgtcgtcgccggccacgcgacgagagctgtggcggcggcgagctcgacgagaagccaagaggagcagcaaagagatgtgagtaaggtaggcgccgaggagaggtcgtcgatgagcatgagcttcgcggcgggcgacgacgagcggtgcggcagcgaaggggtaggaggaggaggagaggacgaggagtgcctcatgaggaggacgctggcggcgcacaccgactacatctacacccagggccagggaggaggccacagctag

SEQ ID NO: 105546 - DNA, 789 bp, Zea Mays
acagttacagatttctcggcggtctgtttcaccttccacggctccacgaccccgtctgccgcgcgcggtgcgccgggaaaccgccttccgccctcagccggcgcctcccggccccgggcaccggccacgcccacgcgtgagtgcgtgacgcgcccacggcccatgcctccgcggccgagcggcaccgcccaggccccaggcgcccacccgcacagcccaccgcgcctgcggcaccgcccagtcgaggtaccccgtgcccacggccttcgctccgcctctgcgcccaccagcaccggcagaccagcctctgcctccccgcgctcggtgaggtgaggactggcagttcgtgcgtgcctttgtttacaggcggctgtcaagtgtcaacatccagggcactctcagcgacagcattggacagctcacccagctcatgtacctgtttacaggcacaatatcctcttcacttggtttactctcaaatctcttctggctggacctggttgataatcggctcactggacctatcctggtctcaacagcaatgataccagggcttgaccaacttacccacaagaagcacttattgtaggcgtagagggaagaagaacaaggccggagagagttggagcgggaggacgtcgtgctgctgcatggtgatgagcacggtgatcaacacaggtgtgggagcaacttttccattctttattgatagatatcgcctgccatctaatgtagactccagcttctatatgtagccatctaacaaaccggcacccaggctgttttgcc

SEQ ID NO: 105547 - DNA, 636 bp, Zea Mays
aaatcttttttatttctttactaaggcgtgcacacatcgcgttctgccatcgctccccgccccgcagccagccgccccgcagccagccgtcccgccccgcaatccccgccccgccccgcaatccccgcccgcaatccgctggtaggtgctcgccgatggaaggttatcaggtccgctgccgctggaaggtgcccgccccgcagcagagaatggaaggtcctcacgcccgcacgctcgctggaaggtccttgattgagctgataatggaaggtcaccatacacggatggaggacgcggatggaaggtccgtggccaaatccgatttgccccctcgcccgcgagatgccgccgcccaccgtgcccgcgattccgccccaatcacctctggttctcaagtatggggaggaagggaaggtggtggagcgagtgaacctcgccactcggcagctgcgcctactgccgaagcccgttgtccggatctgcggtctcctcgcgctcgacgtctcccgcgaccagctaaaggttagatactcgtctcccccgacctagggcaggggctgtaggcgatagtcgagcgcgccggagcaggcagcaggccaacaacccagcagatgggggaagcatcaaggagggtcg

SEQ ID NO: 105548 - DNA, 523 bp, Zea Mays
tcgctttcacagcggcgagacagggaagatggacattaattttaccttaatgtttttaatacacgatttagacttttcatgaatataatcttcattttccttgcagacagcaagtgtggagtaatctatagtttattttctggtatactggttccattgaagaaagatccccgtgctccatttcaccatatccagatgccatcttccaaacatggtccaataaactccctggatcagaatacaatgttgtatggtccttgatgaacaaacaatacctggggtcatagattgtctgcatgcatgctagatgagaaaaaaatagccagccgggggtgtttggattcacagcagatggttgagaagcgcaatgcgcaaaaactgacataaagcaagcagatgtttggattcacaccctgatcaggcctgatggaaagaagaaggcttacgtgaagcttctcctgtaagcatgcttcagatctcccctccctcccttctatgtctctttcaccagctggatccaacc

SEQ ID NO: 105549 - DNA, 291 bp, Zea Mays
atgggcgtcgcctatgagacggccaagagtggcgtcggtgttgcctccatgggcgtcatgtgcctcaagcttgtcatgaagtccatcatcctcgttgtcatggccagagtccttggcatctatgatctcatcatcgccgccatcatctctgccgggatcaaccccaaggccaagccctacttcttagacggctacacacacctctccttcgaactcacatgcagccttgctggccttgctgccggcatggccatcagcatcgtcagagacaccagagttagattatctagg

SEQ ID NO: 105550 - DNA, 1270 bp, Zea Mays
cacaaaacagtttctttaaaactagattctaccaaacagacctttactcaaggataaataaaaacatatcagcgtatgagcattttactagtagaattttattttttggttcatctaaaaacctattaatttaacacaaatctaagtttcacgagacaaagaccactcgagcaacttattcattcttatatctatatttaaactcacacggtacaatgtacactataaacaattagctggtggacggttttaccctaaccttttcactgctccatgctccagggaaggcacacagccgccgctggtcatcttcccgcagttccatcttccgctcactcccttcatcgcgctcggcacacaggcgacggcggcggagctcatgctagggctctcagcgaaggcatcagctgcttcccctcccgcctctcgccaatcgcctcccgtcctccgcacaccggccggtgatcctgcgtcttttcattcgtaaatcatactccaggtatctgcatcgcaggggaaatggcaagcaaagcaggtggtgatggcaaagaagccataaacgagcaagtagttgccaacacttatgccaacatgcgtaccgaaatgaaccagctctataccaagatcacagagctggagatggaggtcagtgagcactccctcgtgattggtgcgatcgagccgctggacccctcaaggcgctgttacaggatgattggtggggtcctggttgaaaggaccatcaaggaagtcctgcctgctgtgaagcgcaacaaggagggccttgaagaagtgattgctcgcatgcatgaggcactggagaggaagaagaaagagatcaccgagtttgagcttaagtacaagatcaggatccggaaggctgacaatgacgcagaggacgaaggcggcaagaaggaaggcactgcacagggagtccttgttgggcctgctggacagtaaaacttaattagatggattttgtgtaaaagatgaggaccgatgtgaactgaagtagtttctttgttacctcttcgggtgctgcagcaatccaagtttctgtttgttattgatgacacatcgcaaatctcccaggactagaatctctgttcgtgattccttttactatattctcaaaataattgtggattagtcatctgcatgacttcatttcaactgatgctgaaatattgtggtgcttggtggctggtaaattcctgtaattgagctgtttcaatggcataccagcttgttgttccttaagttttgaggg

SEQ ID NO: 105551 - DNA, 1039 bp, Zea Mays
aacacatgttttgttctctttgttcattatctgaaattggacatgattacaaaagaaagaagctttttcagggcagtagctaatatggatattaagctagattttgttccaccatggttgatcaacttcatatcaaggcaactaataggcagcgggcataagctgtatcaaaaggcagtcagtactgtggccagtcatgatggtgactacaggaaagctttgagaggatcactctacgccaggatccgtgaataccaggattctgataacaaggcgaaggtggcccctgataatgccactacacaaaatcgtttgtcgctaacaaatacaatattgaatagtgagattgttgaggagactgaacagaacacatccatcgctgtggataatcttccaactagccaaccctatgtaccagttgagcaagcacaacgcgtcgaaagcaaacctttatatcagtcctgaggtagagcatgcattgtgcatattggagactgttattgcagttctcaaaggcaataaggctggaaatgttaccacacgttatgatgcaactttggaagagagtactgctggttccagaacttcacaaacagacatttgttaacgcagacgaccttctgaatggccatcctgttaccacagcgccacaaggctccagagatacccgacaagcacatccattggctagtgagaaaattagcgatagagcagaagacgccatcaacaaaagttctctgaaaatttcgacaacttagtgaagagagcctaggcactaatggctcccatcagaatggtttcggcaacaacaaagagtcaacacgaacaaggaaggccaagagatggccctaccaccattggatgatggaacccatcataagacttcattcaagttttaaattgctgatttttgaaggtacagtaggaaatagtaaattatagaaatttagcccttcatcggttacacgatgtgggttcagatgacaaatcaggatgccgcttcttgtcgtcacagctcgtagatagtatcttgataaat

SEQ ID NO: 105552 - DNA, 594 bp, Zea Mays
ataggcaacacataattatgtgttggtatagaccatagcaacgcatatatgaactttttgcaacacatatatgcattgttaaaggggtggttgttttgtagtgtctcatttaaaacttttgatgcatcttttgtgcttactaacaaatcaggcaaggtagttaccaatatgttggggcaaacacaagagtcccaagacttgtgtttgggtacccaaggtgcttgtttctattgtgaaaggacccaaaaccgtttgggtacctaagaacaaggcctaaatttgttttgtagatttatgcatcaaatgggacaagttggataatcgatagcgggtgcacaaaccacatgacaggggagaaaagattgttctcctcatatgagaaaaacaatgatccccaaagagcaatcacattcggggatggaaatcaaagtttggtcaaaggtttgggtaaaattgctatatctcctgaccattccatttttaatgtttttcttgtagattctttagattacaacttgctttctgtttctcaattatgtaaaatgggttacgactgcctttttactgatattggtgttaccgtctttagaagaa

SEQ ID NO: 105553 - DNA, 408 bp, Zea Mays
atggccctcgcctcaattgtcgccatctcgttcgccatcctgcttcttttctctctcctcatgcctccgcctccgcgcctcccattctcggcagagggcatgggagcaggcacctccttcccgtattcgtccgataccagccccgataccgaccatcgtagtggctattgcacgtctacgaggatgtttcacagcatgcacgtatcatcgttttcgccatcgtcagacgtctcgttcgtctttctggcattcgccctattcttcctccccaacctgctgcccctgcccacggtcgcagcaacgagccgaccgacgctcgtcgtcgcgggtacgggcaagtcagtcttgctcctggcttttctttgtgcgtgccgccgaggaggacacgatgacgcctgccacgcttaa

SEQ ID NO: 105554 - DNA, 97 bp, Zea Mays
gataggttcaacataaactctcagcttgagaatcttcaagccaaaaatgttggtacagggcgtgctgatttgtccatgtttgaatgggcagtaaaca

SEQ ID NO: 105555 - DNA, 788 bp, Zea Mays
cagatacgttccctccaaggaaatgggcacaacacaatttatctgtttttttatctacatttattactctcaatgtttatttctagctgatttgtacatactgcatctctaattctcgatcctattctatcagccatcaattttgcaccataattattttccatttcttgtatgctgcagtagctcgccatcatcccaaccctctgaactcgctaacagcctctccagctcgcctactgcgtgattaaagccatcccatgttcctaagataacaagcaactgctatgtacggactgattagatatacactgtgcttctcctaattgcatctatagttagttttattatctactgctattagtactaatgttttcgacgaattattatcttctacgtacgattctctattctgatttatacttatccaaaggactctgataatattgaagtttctatttcttgcccatgagcatgttctatcatatacttctgctcctattgtgtatgtttatctatgtattcaattttgcaagcaataggtaaccatcaagccatctacacaatcaagcgccagccatattcttgtcgtcatccatccaggagatccattggatgggaaaatttaattttatggagataagttcattttggcacatatttcgtagtttcgtcagaatgtggatcttcttaatcttgtccttacatgttagttgctcttttgtgtgtgctttctatctattaaacattatcatcccttaattcaacatatcagtgaaggtttaagattt

SEQ ID NO: 105556 - DNA, 1932 bp, Zea Mays
acaccaactcctccatccaactcggcaactccacgcagccagcccggcgcctcccatcagtgggtgggtgggtggttcgcctcctcatcctctcctccccgcacgtccacggcgatggcgcccgcgcccccgcactgctgacccacccccgccgcgcactctcatgaccgtggtttggtaggtggggcggaggttggtaggccgggacgtgccggcaggcggttacgggaggcgcggccgcgatcccgggccggatctggacgccgcgatggaggacgccgttgccgctgagaatgggatcgagggggagggctacgtcgtcgtcaaggcggcggcggccgcggaggcggagggggactccggcgccagcgatcgtggggatctcgccgcccccgctgaggacgcggcgccggccggatctgaggacgccccggccccggcggtgacgccggacgagaccgcggcacctgccaaggcgccggccaagaagggtggatccggggacgccgccggggtccggaaggcgaggccgcagaacggcagggtgcccgccgccgccgccgccgcgccgagggtgaagaagcccggggtcctctcgcagagcgcctccttcccggcgcggggtgccgccgccaagaaggcctcggcggttgctactcccaagcaggccaagggcgtcgtgaccaatggatcagaggcggcagcaggccgggcagccgagaagaaggcgaattcagcgcggacacctgtcgctcgccggtcgatgcctgtcaagtctggatcagcggatgcggccgccccaaatgacgcaattcccgctgtccaagagccacatgaaaacaccgacaagccattgaaacaaatgcagccagggaaaacagaggatgatgtgcgctctaccacatcaagtaccaatactccgcgtgcagcagctcgcaagagtgctgctgttgctgctggttttagtttcagattggaggagcgtgctgagaagagaaaggagtttttccaaaagcttgaagagaaaatccacgcaaaggagctggaaaaaacaaatctgcaggagaaatctaaggagagccaagaggctgagatcaaactgctgaggaagagcctaacatttaaagccacacctatgccaagcttttacaaggagcagccacccaaagttgagttgaaaaagattcccccaacacgcgctaggtcgccaaagctcggccggcacaagccagccaattctgccactgctgcttctgcggatggttctgtatcatgtgagagcccacggagcactgcaaattcgagcaaggtaaatgaagcgatggaaaacaacaaacctcatgcccctgctagaaaacctgttcagaggccagtcgtgaaagctccatcacaggcgtctgcgaccacaaaggctgaagcaagacccgtggtcacaaggccaaagatctcaaactcgaaacctaaggcttcaagggcaaaggttgcgcgagcgcaagaaaccccagctgaagcccctccttcagaacctgctgctccagaagatttcacggttgaacatggcgttggagacgccacaggtcctgatctgaccgcgcaattggttgcttcgaacgaagtcccagtccatggttgatcagctgagcattttgcatatttattcccttcttgcagttctgtgaatagcgagggtgtgtgcttcattggaagttgaatcgctcgaagtgtcatggtttatcgtttccggagtagacatccattttgtttttcagcttgtcatcgggcatgccatgtatattgcttggtattgtgttcttgtttaaaatttccagtcttgtgtatattggatttgtttgtcgctggagatcctaggattgttgcaatacgctgaggcaaattgtggattgttttgtggctgttttacttttagccccg

SEQ ID NO: 105557 - DNA, 1229 bp, Zea Mays
ggcattgttttgtctatttttggctgcgttatgttaatactcggtctgtttcctttgacttagcctgtcaagtctggatcagcggatgcggccgccccaaatgacgcaattcccgctgtccaagagccacatgaaaacaccgacaagccattgaaacaaatgcagccagggaaaacagaggatgatgtgcgctctaccacatcaagtaccaatactccgcgtgcagcagctcgcaagagtgctgctgttgctgctggttttagtttcagattggaggagcgtgctgagaagagaaaggagtttttccaaaagcttgaagagaaaatccacgcaaaggagctggaaaaaacaaatctgcaggagaaatctaaggagagccaagaggctgagatcaaactgctgaggaagagcctaacatttaaagccacacctatgccaagcttttacaaggagcagccacccaaagttgagttgaaaaagattcccccaacacgcgctaggtcgccaaagctcggccggcacaagccagccaattctgccactgctgcttctgcggatggttctgtatcatgtgagagcccacggagcactgcaaattcgagcaaggtaaatgaagcgatggaaaacaacaaacctcatgcccctgctagaaaacctgttcagaggccagtcgtgaaagctccatcacaggcgtctgcgaccacaaaggctgaagcaagacccgtggtcacaaggccaaagatctcaaactcgaaacctaaggcttcaagggcaaaggttgcgcgagcgcaagaaaccccagctgaagcccctccttcagaacctgctgctccagaagatttcacggttgaacatggcgttggagacgccacaggtcctgatctgaccgcgcaattggttgcttcgaacgaagtcccagtccatggttgatcagctgagcattttgcatatttattcccttcttgcagttctgtgaatagcgagggtgtgtgcttcattggaagttgaatcgctcgaagtgtcatggtttatcgtttccggagtagacatccattttgtttttcagcttgtcatcgggcatgccatgtatattgcttggtattgtgttcttgtttaaaatttccagtcttgtgtatattggatttgtttgtcgctggagatcctaggattgttgcaatacgctgaggcaaattgtggattgttttgtggctgttttacttttagccccg

SEQ ID NO: 105558 - DNA, 1210 bp, Zea Mays
agcgagcatccgcacttgggagaagagagatgatcttcccgacgggaagggacgagatctggttcgacaccggggtccccgttcccgaggtctccactgggtacttcgtcggcagaccacatcttctgccccgacccctcatcccagcggtgctccacgcatgtacgccttctgttctgcaggtggtttatgccagttaatatagcgatcacgttcgtgatcggtggcactctgggctagatagcttgcaacatgttgaagccaccgtagcatttcaggggcttgatcatggccttctgctcagcatgaaacctcggaaacctgctcctgatcattgtcccggatgtatgcgatgaagacgggcctgtttggggatgattcaagcacttgccgctcacgcagtatctcctactcgtccttgtccatggctctaggtggcctcttcatatggacgcacacgtacagcctgatgcagaagtccggcaagctgtaccacaagatgcagtccaaaagcatctagtgcccagccaacagcgatgaggagcatgagcaagcgaaagaagatgggccagctggctacgctgacgaggaggcacctcttccgacgtcactcaagcctcgcgagcatgagcacgagcacggggaagaggaagaacaccaaatggaggcccctctcttgtcctgcgagagcgaggtcgctgacaaggggttctggacgaagccgaaagacgctatccaccagttcatcgaggagttgatggcaccacccaccatgtccgcaataattgggttcgttgttggcctgttcccatggctgaaatccttaatcgtcggtgacggagctcctttcaaagttatgcaggattccctccagctgatgagcgacgacatgatcccttgcatcacccttatcctaggcggaaacctgactcaagggcttcgaaagtcggggctgaagcgggcggtgatcgtcgcgatcctatgcgtccgcttcgtgctcctcccgctgatcggcatcgtcatcgtccgcgccgtgtacgggctcggcttcctgtcccgcgacccgctgtactgctatgtgctgatggtgtcaggatgacatgtcaggttgggatatcctggcgtactttattcaaacagccctcttgcttcaagcaagagaccaagtatcttaagagttaagacttatgttaaatatatttagaaacta

SEQ ID NO: 105559 - DNA, 3435 bp, Zea Mays
atgtcgtccgacatccgtaaatggttcatgaagccgcaggacaagagcgcggcggcatctggagccgccgggaagccctcggggtcggcggctgagaagaagcccgtgctcagcattccggagaagaagtcggcgccccccgcattggcgtcctgtgaccatgatacttccgctagaaggaagacaagcaaatattttgggtcaaaagcagaaaaggactcagatgtccaaatggcagacgcctctggggggaagagtgcggctaaaagaaaacttcagaaatgcaacgatgaagtcaaggaggacagcaagccttttccagcaaagaaaatgtttgatgatgaagaagatgacgattttgtggcacctgcaaagaagaaaactccagtgaagccaccaccttcaaaaaagcttaaagttgaatctaatgttgaagcccctgcaaagactactggtgttgatgatgctgaggatgaggacaggatggatgaagatgccaagaccccctctaaaggagctggaaggggaaggggaagaggaggaagaggaggagcaggagctgcccctgggggcagaggtagaggaggtgggagaggttttatgaattttggtgagaggaaagatcctcctcacaaaggagaaaaggaggtcccagagggtgcccctgactgtttatctggtctgacatttgtcataagtggtaccctcgacagtcttgaacgtgaggaagcaactgatctaattaagcgttatggtggccgtgtgactggctctattagtaaaaagacgagctacttattggccgacgaagacattggtggagtcaaatctaacaaagcaaaagatctgggtgttccattcttgactgaagatggtttatttgatttgatccgaaaatcaaagcctgcaaaggctcctgtagacaaacgtcaaaacaacaacagttctgaaaagcttcagaaatcacagacaaagagctctccagctaaagttgaaaaacgagccgaagcaagtgctgtaggcaaaagtattgcttcaaacagtaatgctgcaagtgcctccgctgacaaacaaaagcccaagattgttgaccgtggttctatgcaatggacagaaaaatatcggccaaaagttccaaatgacatagttggcaatcaatcaatggtcaaacaacttcatgattggttaaaaagttgggatgcactattccttcattctggccaaaagggtaagggaaagaaacaaactgacagtgcagccaaaaaggctgtgttgctgagtggacctcctggtatcggtaagactacaactgctaaagttgttagtcagatgcttggtttgcaggccattgaggtaaatgcgagtgatagccgtggtaaggcagactccaagatcgagaagggtgttggggggagtacatcaaattctatcaaagagcttatcaacaacgcgactctgaattatagtgacaatcggttaaaacatcccaaagctgtactagttatggatgaagttgatggtatgtctgctggagatagaggtggtgttgctgatcttattgctagcatcaagatatccaagatccctattatctgcatttgtaatgaccgttatagtcagaaattgaagaatcttgtgaattactgccttatgctcaacttcagaaagccaacaaaacaacagatgggtaaaagattgatggaaattgccaaaaaggaaggtattcaagctcaagagaatgcaatggaagagcttgctgaaagagtgcacggagatattcgcatggcactcaaccatttgcagtatatgagcctctcccagtctgtggtcaaatatgatgatataaaggagcgacttaatagcagttcaaaggatgaagatatttctccttttactgctgttgacaaactttttggtttcaatggcgggaggttaaggatggatgagagaatggattttggcatgagcgatcctgatttagttcccttgatcatccaggaaaattatatcaattatcggcctaacaccatcggcaaggatgaaagtggagttaaaagaatgaatgctttagcccgggctgctgaatctatagcggacggtgatcttgttaatgtacagataagaagatatcgacagtggcagctgtcacaagctgcttgttttgcttcatctatagtacctgccgctttgatgcatgggaacagagaaatccttgaagcaggtgagcgaaactttaataggtttggtggatggttgggtaagtactcgactactaacaaaaacagaaggctactggaagatgtccacagtcatattcttgcctcccagcaagcaaacttggacagggatgcattgaggttggattatcttactcttatcttgagagagctgactgacccactgaaaaaaatgtcaaaggatgaagctgttcaaaaggtggtagagtttatggatacatactctttaagccaggaagacttcgatacaattgttgaagtatccaaatttaagggtcatccaagtcctatggatgggattcaacctgctgttaaaagtgccttgacaaaggcatacaaacaaggaagtagttcccgtgttgttcgagcagcagatctaataaacattccaggcatgaaaaagcctttaaagaaacgagtggcggcgatcttggagccggtagaagagagcctacctgaagaaaatggactagcatcagctgaagatgatgaagatggttcttctgatgctgaaaataatgatgagcttgtgcctgctgactctacgccgaagctggacctgcaaagcgacaagaagaaaggaatccaagtgcagcttgacctgaagagcaatggggatggcccgcgcgggaagaaggcgcctgctgccaggtcaagagcaaccgggtcaggtgggaaggccgcggcgggaggaggttcggctgggaagaggaagaggtaaatgagacatttggcgcctgcccacagttggccggtggttagtttggacgcacagatcccttggtaaataaggagcaggggtggtaagcttcagagttttgctcatctaatggcacatgtaggcactaggctactgtgcctgctcccatattttctcccagggcacccatgtcttgctaccagaatttgtttgcacttaggctacttccaggttgtggcaatcgagagtttggtgttgtctgtttcatttagcgaatttgtcagtactctataccacgggtcgttgcctcgttggctttgtcttcgtattctcttgtgcattttcgcgttggtagacagggttttatgtgtaaagaaaatgcagtagcgaggcatttaggcaggtaaggagaaacaaaaagattgcttggttgtggtttactattactattaggccaaccccatcgctccatgctggcttgtaatcccagcttgcata

SEQ ID NO: 105560 - DNA, 953 bp, Zea Mays
atttttatggagatttgtagcatcattcaggcaaatgcaaatcgagatcatatagacatgaacttgtgaaatagctacacctaactatagacaggtttacataattacatgtacttcaagacacaccatactaatatatggtagagccagttctatcgcaagtttttagtcagttggatgctaatggaagctgcatccattagcacagttggtaaagcgtttttagtcagttgggatgctttgggagttgcatccagaaaggttcatatggcttgctgtctaatcacttttttcccttcagatgagcttgtgcctgctgactctacgccgaagctggacctgcaaagcgacaagaagaaaggttcccatacttgctgggcatatggtgcctatccatccctctgaattcactgcacctaacttcccggtaacctcatctgcttccaggaatccaagtgcagcttgacctgaagagcaatggggatggcccgcgcgggaagaaggcgcctgctgccaggtcaagagcaaccgggtcaggtgggaaggccgcggcgggaggaggttcggctgggaagaggaagaggtaaatgagacatttggcgcctgcccacagttggccggtggttagtttggacgcacagatcccttggtaaataaggagcaggggtggtaagcttcagagttttgctcatctaatggcacatgtaggcactaggctactgtgcctgctcccatattttctcccagggcacccatgtcttgctaccagaatttgtttgcacttaggctacttccaggttgtggcaatcgagagtttggtgttgtctgtttcatttagcgaatttgtcagtactctataccacgggtcgttgcctcgttggctttgtcttcgtattctcttgtgcattttcgcgttggtagacagggttttatgtgtaaagaaaatgcagtag

SEQ ID NO: 105561 - DNA, 2462 bp, Zea Mays
ctcattatccaccgtcctccgccctccactgcaactagcttcaccgccttcgttcccgccagcgacgagaatcctccggcctcccttaccaccagattcccccaacccgtggcaacgtcaggtcgccaccgcacgagccaatccgtcctcccgagtcccaatccaaacggcttcactccactcgattcgcttccaccgcccgcgtacagtccaaacgcaaccgtcccgtccaccccggtcctcggcaccgccatgccgccgctcgccgcgcgcctctatgccccgcttaacctcgcccccgccgtcccagccgcctcccttcgccccgccacgcggctctgcgctgcgagcgggccccgcaacgtcggcgggttcaggagaggcgcgctggcataggagaaggcggcggcggtggcggtcgcggagaaagcgggcggcgaaggtggaggaggagaggacgagggcccgtacgatgcgatcgtgatcgggtcagggatcgggggcctggtggcggcgacgcagctcgcggccaagggcgcgcgggtgctggtcctcgagaagtacctcatccccgggggaagctccgggtactaccgccgcgacgggttcaccttcgacgtcggctcctccgtcatgttcggcttctccgacaagggtaacttgaatttgatcacacaagcattggaagcagttgggcgtaagatgagagttctaccagacccttctacagttcatttccacctacccggtgatctctctgtccttgtgcataggaagtatgaagacttcatcaacgaactggtcagcaaattccctcacgagaaagaagggatccttaaattctacgatacatgctggacgatcttcaattcactaaattcgttggagctgaagtctctagaggaacccctttatctttttcggcaatttttccagaagcctcgggaatgcttaactctagcttattatttgccacagaatgctggggatatcgctcgcaagttcataaaagatcaggagctactctccttcatagatgccgagtgttttattgtgagcacagtcaatgccttgcaaacacccatgataaatgcaagcatggtcttgtgcgataggcactttggagggattaattatccagttggtggcgttggtggtattgcaatatccctggcagatggccttgttgaaaagggcagcgaaatccgttacaaggcgaatgtaaccaacgttattcttgaaaatggaaaggctgttggggtgaggttatcaaatgggaaggagttctttgctaaaacagtgatatcaaatgccaccagatgggacacgtttggaaaactcgtgaaagaggaacttccagaagaggagaaaaactttcaaaagaattacgttaaggcaccatcattcctttcaattcatatgggtgtcaaagcgtcagttctgcctgctggcactgactgccaccattttatacttgaggataattggaataatttggaaaagccttatggaagcatatttttaagtatccctacagttcttgatccatcattagctcccgaaggacatcatatacttcatatatttactacagcaggcatagaagattgggagggtctttctaggaaggaatatgaagagaaaaaagaggtggtggccaatgagattataagaaggcttgaaaagaagttgtttcctggtcttcaagattcaatagtcctcaaagaggtaggctcaccaaaaacacaccgaagatttcttgctcgaaatgacggtacatatggaccaatgccacggggtaaaccgaagggattactggctatgcctttcaatactacctcaatagatggcctttactgtgtcggtgacagctgtttccccgggcaaggtgtcatagctgtagcattctcagggatcatgtgtgctcaccgagttgctgcagatattggactagagcagaagtctccagttctagatgctggtcttcttgggctactcagatggctgagaacacttgcataggacggtatattagacaaagtgggaaaatggacctcatcttctttcaaaaggctgatgtttaactagagttcggattctgcactatcatctgagtggccgggttctgtcatgggtgtgccgtgtacaatcgaggctgggctagcagcatgtggtcgcccatcatgagcacctgcagataattgtgctgggtttatatagtagtaatcctaattggcaacccaagtgtctgaagctgcgcgtgcttgacacggtacggtgcgctcccgcgcatatagaaaacaaattgtcaattgcgatgttgcatcacttaggtacaagttacatggtatgccaaacagtgtaattgttctccaactagattcttcaaagacactttctcaattgtaccaggatacaggttgcacggcatagtgaattgtgtcaaaaattttggatcacaa

SEQ ID NO: 105562 - DNA, 2448 bp, Zea Mays
ctcattatccaccgtcctccgccctccactgcaactagcttcaccgccttcgttcccgccagcgacgagaatcctccggcctcccttaccaccagattcccccaacccgtggcaacgtcaggtcgccaccgcacgagccaatccgtcctcccgagtcccaatccaaacggcttcactccactcgattcgcttccaccgcccgcgtacagtccaaacgcaaccgtcccgtccaccccggtcctcggcaccgccatgccgccgctcgccgcgcgcctctatgccccgcttaacctcgcccccgccgtcccagccgcctcccttcgccccgccacgcggctctgcgctgcgagcgggccccgcaacgtcggcgggttcaggagaggcgcgctggcataggagaaggcggcggcggtggcggtcgcggagaaagcgggcggcgaaggtggaggaggagaggacgagggcccgtacgatgcgatcgtgatcgggtcagggatcgggggcctggtggcggcgacgcagctcgcggccaagggcgcgcgggtgctggtcctcgagaagtacctcatccccgggggaagctccgggtactaccgccgcgacgggttcaccttcgacgtcggctcctccgtcatgttcggcttctccgacaagggtaacttgaatttgatcacacaagcattggaagcagttgggcgtaagatgagagttctaccagacccttctacagttcatttccacctacccggtgatctctctgtccttgtgcataggaagtatgaagacttcatcaacgaactggtcagcaaattccctcacgagaaagaagggatccttaaattctacgatacatgctggacgatcttcaattcactaaattcgttggagctgaagtctctagaggaacccctttatctttttcggcaatttttccagaagcctcgggaatgcttaactctagcttattatttgccacagaatgctggggatatcgctcgcaagttcataaaagatcaggagctactctccttcatagatgccgagtgttttattgtgagcacagtcaatgccttgcaaacacccatgataaatgcaagcatggcactttggagggattaattatccagttggtggcgttggtggtattgcaatatccctggcagatggccttgttgaaaagggcagcgaaatccgttacaaggcgaatgtaaccaacgttattcttgaaaatggaaaggctgttggggtgaggttatcaaatgggaaggagttctttgctaaaacagtgatatcaaatgccaccagatgggacacgtttggaaaactcgtgaaagaggaacttccagaagaggagaaaaactttcaaaagaattacgttaaggcaccatcattcctttcaattcatatgggtgtcaaagcgtcagttctgcctgctggcactgactgccaccattttatacttgaggataattggaataatttggaaaagccttatggaagcatatttttaagtatccctacagttcttgatccatcattagctcccgaaggacatcatatacttcatatatttactacagcaggcatagaagattgggagggtctttctaggaaggaatatgaagagaaaaaagaggtggtggccaatgagattataagaaggcttgaaaagaagttgtttcctggtcttcaagattcaatagtcctcaaagaggtaggctcaccaaaaacacaccgaagatttcttgctcgaaatgacggtacatatggaccaatgccacggggtaaaccgaagggattactggctatgcctttcaatactacctcaatagatggcctttactgtgtcggtgacagctgtttccccgggcaaggtgtcatagctgtagcattctcagggatcatgtgtgctcaccgagttgctgcagatattggactagagcagaagtctccagttctagatgctggtcttcttgggctactcagatggctgagaacacttgcataggacggtatattagacaaagtgggaaaatggacctcatcttctttcaaaaggctgatgtttaactagagttcggattctgcactatcatctgagtggccgggttctgtcatgggtgtgccgtgtacaatcgaggctgggctagcagcatgtggtcgcccatcatgagcacctgcagataattgtgctgggtttatatagtagtaatcctaattggcaacccaagtgtctgaagctgcgcgtgcttgacacggtacggtgcgctcccgcgcatatagaaaacaaattgtcaattgcgatgttgcatcacttaggtacaagttacatggtatgccaaacagtgtaattgttctccaactagattcttcaaagacactttctcaattgtaccaggatacaggttgcacggcatagtgaattgtgtcaaaaattttggatcacaa

SEQ ID NO: 105563 - DNA, 1878 bp, Zea Mays
ccagtacttctctccccgttcccggcctggatgccacccacaacgttttgatccgccccgatcgcaactccgcaccgcgctcctgttctcagatacacacactgtcaactcatatcaaaatatacatacaaccaccgcagcatggggatggtagtaaacagcagtgcagtcccgttctccatcgcgctgcttgccgtcgtcatcgcggcagtagtaatcaccaaggctgcactgggacgacgacgacgacgacgaacagccgcagccaacaacccagcaccaccaccccgcaacgacgtcgacaccggccggcggcgtccccccgcggccatcaccggcgtcacctcagccgtccgactcgtgcacgcgctcgccaccaagggtttcgaagccacgctgtacgagcagtacgcgaagctggggagcgtgttcacggtgagtctcttcgggatgaagacgacgacgttcctggccgggccggacgtctcggcgcacttctaccaggggcccgactccgagatcagccacggcgacctcctcgagttcaccgtccccatgttcggcgagggcgtcgccttcgccgtcgacgccgccacccgcgccgagcagcatcgcttctacctcgacgcgctgaagccggccaggctaaggtgccatgtcgctcccatgctccaggaagtggaggagttcttcgcgagatgggggcagcagggcaccgtggacctgaagcaggagctggagcaggtgctgatgctgatcacggcgcggtgcctgctggggaaagaggtgcgggagaggatgctccacgaggtcttctccgcgtaccgcgacctcacggagaacagcctccatctcaccagcctgctgttcccgtacgcgcccacgccggcggcgcggcggcgcgacagggcgcgcgccacgctctccggcatcttctccgagatcgtccgctcgcgcaggcgctcgggccgccgagccggggacgacgacggcgacgtgctgcagagcctcgtggacgccaggtacagggacgggcgcggcacgacggaggccgaggtcacggggctcgtcatcgccatcctcttcgccgggaagcacacgagctcggccaccagcacgtggactggcgcgcggctgctgcgccacgcggagtgcctggacgccgccgtcgacgagcagcggagggtcgtggcggagcgcgggagcggcgtcgactacgacgccctggcggagatgggcttcttgcactgctgcatcaaggaggcgctgcggatgcacccgacggcgccgctgttcctccgtagggcgcaccggggcttcaccgtgcggacgagggagggggccgagtacgatgtcccgagcgggcagaccgtggccagccctctgctgatcaaccactacatcccctacgtctacagggacccgcacgtgtacgacccgcggaggttcggtccgggcagggaggaggacagggtcggcgggaggttctgctacaacgcgttcagcggcgggaggcatgcctgccctggagaagcgtatgcgtacatgcaggtgaaggtgatatggagccacctgctgaggaacttcgagctcaagctggtgtcgccgttccctcggaccgattggatgaagctttcgccggaggcgagagggaaggtggtggtgagctacaagaggcggatggtgccggttgggagcgtgttggagaactgatgtctctgatggttacttttgtatgagctgtgtgtttgtatgcaatgtgtgttgagcaccatttgtgacgctggcacggtcggacggcttggccctgaagactggacggtccggctcgcggacggtctgcgaatagatcgaataagacacaactaatttcttttt

SEQ ID NO: 105564 - DNA, 1807 bp, Zea Mays
acaagcaaattgattttcccgagccgctgccgaaaaattgccgctgcggcgctgccaccatcccacttctccgcgccgcctccagatcgagcgcgttattaggttttctctgtccctcacccgccgccgcagaacgctgatggcccagcgctggcgctccagggcgcggtgggactcagacctggacgaagatggttccccgccttttcggcagccgcgcaggggcgggagcgacgaggaggacgacgaggtggggaacgaggacctcagcctggagatcatcgcgcgcgcgcagcggaagcggcgttgggcgtcctgcggtggagtcaccgggttcgccaacctgctctcggtgtcctccggcgacgacgaggacgccgtggtggagctcgctgaggcggatgagccccggaggaaacagaagaagaggcagcactggaagcaaaggaaaaggcaacggaaggaggcgaccgctgctgctgcggctgcggctgccgtggacgaggaagagaaggaggttggtaccacccaggaggagcaaattgggacagcagaatcggtgctaactgaagatggggttgatgcccctacatctcacagtatgtttctgcggaagctccttcgcataccaagatactttgatcctggggaaacattgttggagacttgctttaattgtagcgaggaaggacatgtagctgcaaactgcccaatgggaaagcggaagaagccttgctttgtttgtgggttgtttgggcacaatgcaaagcagtgcaagcaggttggtcccccctatctccgagggattatcacttggtgacttggggtcaagactgtttcatctgcaaaaaaggagggcatatggcgaaggattgtcctgataagcacaagaggaatgatcatcaatccacattatgtataagatgtggagaaacaggtcatgatatgtttggatgtgccaatgattacccaccagatgatatcgagcaaataagatgctacgcgtgtaatcagaagggccatctatgttgttccgacttctttgacaattctctggaacagggatgtgctaagcaacgcagggaagctagtgctgtcacaaccccaaccttatgcttcaaatgtggcgaggaaggtcacttcgcacgcggctgcacgaagaatgccaagtccgatgggccaaaaggctggtcgtcaccacacagtcagaggaagggaagatggaaaaacgatggcaagtcaccatcacacatccggaggaaggaaaaatggaagaaagattccagtgctagatcagctcctcatgatgcctgtacaacaagcaaaagcaatagcccctctttcgaggaaagaatgggcgcatctaatcataaatcgaaatggaggggtggttggactggtgatgacgatctaccatcgaagaagtacaaacccaatggatggggttcaccagctactcccaagaggtcttacacgaatcaccagtacttgtctggtggtggtgactacttcactccccagtcctcacgaaggcacaaccatggtaccgcgtcacccggtgctaggaaacacaggttctcgtcgtcaatattcgccgccagcaacacccatgtccggttcaaaagaagctagccggatgcacgtgtctgtttttgttgcttgtttagccattgataacagttatctcctggggttgaactctagctgctggttcatgcccttagataggtgtcttgtctgagattacatatttacatatgtaagcgcggttgaaactgattatttctactgtgaacaaagctttcat

SEQ ID NO: 105565 - DNA, 1763 bp, Zea Mays
acaagcaaattgattttcccgagccgctgccgaaaaattgccgctgcggcgctgccaccatcccacttctccgcgccgcctccagatcgagcgcgttattaggttttctctgtccctcacccgccgccgcagaacgctgatggcccagcgctggcgctccagggcgcggtgggactcagacctggacgaagatggttccccgccttttcggcagccgcgcaggggcgggagcgacgaggaggacgacgaggtggggaacgaggacctcagcctggagatcatcgcgcgcgcgcagcggaagcggcgttgggcgtcctgcggtggagtcaccgggttcgccaacctgctctcggtgtcctccggcgacgacgaggacgccgtggtggagctcgctgaggcggatgagccccggaggaaacagaagaagaggcagcactggaagcaaaggaaaaggcaacggaaggaggcgaccgctgctgctgcggctgcggctgccgtggacgaggaagagaaggaggttggtaccacccaggaggagcaaattgggacagcagaatcggtgctaactgaagatggggttgatgcccctacatctcacagtatgtttctgcggaagctccttcgcataccaagatactttgatcctggggaaacattgttggagacttgctttaattgtagcgaggaaggacatgtagctgcaaactgcccaatgggaaagcggaagaagccttgctttgtttgtgggttgtttgggcacaatgcaaagcagtgcaagcagggtcaagactgtttcatctgcaaaaaaggagggcatatggcgaaggattgtcctgataagcacaagaggaatgatcatcaatccacattatgtataagatgtggagaaacaggtcatgatatgtttggatgtgccaatgattacccaccagatgatatcgagcaaataagatgctacgcgtgtaatcagaagggccatctatgttgttccgacttctttgacaattctctggaacagggatgtgctaagcaacgcagggaagctagtgctgtcacaaccccaaccttatgcttcaaatgtggcgaggaaggtcacttcgcacgcggctgcacgaagaatgccaagtccgatgggccaaaaggctggtcgtcaccacacagtcagaggaagggaagatggaaaaacgatggcaagtcaccatcacacatccggaggaaggaaaaatggaagaaagattccagtgctagatcagctcctcatgatgcctgtacaacaagcaaaagcaatagcccctctttcgaggaaagaatgggcgcatctaatcataaatcgaaatggaggggtggttggactggtgatgacgatctaccatcgaagaagtacaaacccaatggatggggttcaccagctactcccaagaggtcttacacgaatcaccagtacttgtctggtggtggtgactacttcactccccagtcctcacgaaggcacaaccatggtaccgcgtcacccggtgctaggaaacacaggttctcgtcgtcaatattcgccgccagcaacacccatgtccggttcaaaagaagctagccggatgcacgtgtctgtttttgttgcttgtttagccattgataacagttatctcctggggttgaactctagctgctggttcatgcccttagataggtgtcttgtctgagattacatatttacatatgtaagcgcggttgaaactgattatttctactgtgaacaaagctttcat

SEQ ID NO: 105566 - DNA, 2205 bp, Zea Mays
cggcccaataagcgcagcaggcttacctacccgggccgacggccacatagggcttcctagttccttcccttcgtctccccaccatcggcttccgcatctccccgcctccacccacggcactcgcaagcagcgctcattagtcactagggttttaaactttccccccgatccgcctcgccgccggcgtcgtcctccgccggaaatccaccaccctacacccagccggagacgactatggtgggtttcggctcgatggcgggctacgggatccagtcgatgctcaaggaaggccaccgccacctctccgggctcgaggaggccgttctcaagaacatcgacgcctgccgcgagctgtccgccattacgcgcacctctctcggcccgaacggaatgaacaaaatggttatcaatcacttggacaagctgtttgtcacaaacgatgctgccaccattgtgaatgagctcgaagttcagcaccctgccgctaagattctggtactggctggtagggctcaacaggaggagattggggatggggccaatctcaccatatcgtttgccggtgaactgcttgagaaggctgaggagctcatcaggatgggcttgcatccaagtgagatcatcattggctacactaaagccatcaacaagacaattgagatcttggaggatcttgttgagaaaggctcagagaacatggatgtgagaaacaaggaggacgttgtgttgaggatgagatccgctgtcgcgagcaagcagtttggtcaggaggatataatgtgccctcttgtggctgatgcctgcattcaagtttgccccaaaaatccagcaaacttcaatgtcgacaatgttagagtggctaagctgcttggaggtggtttgcacaattcttctgtggtccgtgggatggttctaaaaaatgatgctgttggtagcatcaaaagggtggagaaggcaaagattgcagtatttgctggtggtgtcgatacctcagcaaccgaaacaaagggaacagtgttgatccattccgctgagcagctagaaaattatgctaagactgaggaagctaaggtggaggagcttataaaagctgttgctgactcaggtgccaaggttattgtcagtggagctgcagttggtgacatggcgctacatttttgtgaacgttacaagctgatggttctgaaaatcagctcgaagtttgaactgagaagattctgccgtactactggggctgttgcaattttgaaacttagccaacccaatgcggatgaactagggtacgcagactctgtttccgtggaagaaattggtggtactcgggttattgtcatcaagaacgaagaaggtggaaattcagtggctactgttgtcttgagaggcagtactgacagtatactagatgatcttgaaagagctgttgatgatggcgtcaatacgtacaagtcaatgtgcagggacagtaggataattcctggtgctgctgcaacagaaatagagctggcaaagagattgaaggagttctctttgaaggaaacagggttggaccagtatgctgttgcgaaatttgctgaaagctttgaaatggttccaagaaccctggcagaaaatgccggacttagcgcaatggatgtaatatcctctctttatgctgagcatgctagtggcaatgtgaaagttggcattgacctggaggaaggtgcctgcaaggacatcacgaccttgaaaatatgggacctttatgtcacaaagttctttgccctaaaatattctgccgatgccgcatgcaccgtgctgcgggttgaccagatcattatggcgaagccggcaggaggtccaagaagagatgcccagcctggtggcgggatggacgaggactagtttgactgtgattgttctctttgtgtatcacgtacgcaatgtttcagagcagggaacatcatgtcttatttagggtttggttctgtagaaggttttggtgcctgtagttcacgtttggaagggttgcacggctgtgctggtatcgtatggggaatttgcttgttctttcctggtgtattattgcagtgccgatgtattattcattcgagggttctttccttcagttcatcataccgactgagctcatatgagtgttacttcagtttttttattatagaagcaaaaatgttccagccttttatagtcttctgcgtaaaaaatatt

SEQ ID NO: 105567 - DNA, 2175 bp, Zea Mays
cggcccaataagcgcagcaggcttacctacccgggccgacggccacatagggcttcctagttccttcccttcgtctccccaccatcggcttccgcatctccccgcctccacccacggcactcgcaagcagcgctcattagtcactagggttttaaactttccccccgatccgcctcgccgccggcgtcgtcctccgccggaaatccaccaccctacacccagccggagacgactatggtgggtttcggctcgatggcgggctacgggatccagtcgatgctcaaggaaggccaccgccacctctccgggctcgaggaggccgttctcaagaacatcgacgcctgccgcgagctgtccgccattacgcgcacctctctcggcccgaacggaatgaacaaaatggttatcaatcacttggacaagctgtttgtcacaaacgatgctgccaccattgtgaatgagctcgaagttcagcaccctgccgctaagattctggtactggctggtagggctcaacaggaggagattggggatggggccaatctcaccatatcgtttgccggtgaactgcttgagaaggctgaggagctcatcaggatgggcttgcatccaagtgagatcatcattggctacactaaagccatcaacaagaaaggctcagagaacatggatgtgagaaacaaggaggacgttgtgttgaggatgagatccgctgtcgcgagcaagcagtttggtcaggaggatataatgtgccctcttgtggctgatgcctgcattcaagtttgccccaaaaatccagcaaacttcaatgtcgacaatgttagagtggctaagctgcttggaggtggtttgcacaattcttctgtggtccgtgggatggttctaaaaaatgatgctgttggtagcatcaaaagggtggagaaggcaaagattgcagtatttgctggtggtgtcgatacctcagcaaccgaaacaaagggaacagtgttgatccattccgctgagcagctagaaaattatgctaagactgaggaagctaaggtggaggagcttataaaagctgttgctgactcaggtgccaaggttattgtcagtggagctgcagttggtgacatggcgctacatttttgtgaacgttacaagctgatggttctgaaaatcagctcgaagtttgaactgagaagattctgccgtactactggggctgttgcaattttgaaacttagccaacccaatgcggatgaactagggtacgcagactctgtttccgtggaagaaattggtggtactcgggttattgtcatcaagaacgaagaaggtggaaattcagtggctactgttgtcttgagaggcagtactgacagtatactagatgatcttgaaagagctgttgatgatggcgtcaatacgtacaagtcaatgtgcagggacagtaggataattcctggtgctgctgcaacagaaatagagctggcaaagagattgaaggagttctctttgaaggaaacagggttggaccagtatgctgttgcgaaatttgctgaaagctttgaaatggttccaagaaccctggcagaaaatgccggacttagcgcaatggatgtaatatcctctctttatgctgagcatgctagtggcaatgtgaaagttggcattgacctggaggaaggtgcctgcaaggacatcacgaccttgaaaatatgggacctttatgtcacaaagttctttgccctaaaatattctgccgatgccgcatgcaccgtgctgcgggttgaccagatcattatggcgaagccggcaggaggtccaagaagagatgcccagcctggtggcgggatggacgaggactagtttgactgtgattgttctctttgtgtatcacgtacgcaatgtttcagagcagggaacatcatgtcttatttagggtttggttctgtagaaggttttggtgcctgtagttcacgtttggaagggttgcacggctgtgctggtatcgtatggggaatttgcttgttctttcctggtgtattattgcagtgccgatgtattattcattcgagggttctttccttcagttcatcataccgactgagctcatatgagtgttacttcagtttttttattatagaagcaaaaatgttccagccttttatagtcttctgcgtaaaaaatatt

SEQ ID NO: 105568 - DNA, 2118 bp, Zea Mays
ccccaccatcggcttccgcatctccccgcctccacccacggcactcgcaagcagcgctcattagtcactagggttttaaactttccccccgatccgcctcgccgccggcgtcgtcctccgccggaaatccaccaccctacacccagccggagacgactatggtgggtttcggctcgatggcgggctacgggatccagtcgatgctcaaggaaggccaccgccacctctccgggctcgaggaggccgttctcaagaacatcgacgcctgccgcgagctgtccgccattacgcgcacctctctcggcccgaacggaatgaacaaaatggttatcaatcacttggacaagctgtttgtcacaaacgatgctgccaccattgtgaatgagctcgaagttcagcaccctgccgctaagattctggtactggctggtagggctcaacaggaggagattggggatggggccaatctcaccatatcgtttgccggtgaactgcttgagaaggctgaggagctcatcaggatgggcttgcatccaagtgagatcatcattggctacactaaagccatcaacaagacaattgagatcttggaggatcttgttgagaaaggctcagagaacatggatgtgagaaacaaggaggacgttgtgttgaggatgagatccgctgtcgcgagcaagcagtttggtcaggaggatataatgtgccctcttgtggctgatgcctgcattcaagtttgccccaaaaatccagcaaacttcaatgtcgacaatgttagagtggctaagctgcttggaggtggtttgcacaattcttctgtggtccgtgggatggttctaaaaaatgatgctgttggtagcatcaaaagggtggagaaggcaaagattgcagtatttgctggtggtgtcgatacctcagcaaccgaaacaaagggaacagtgttgatccattccgctgagcagctagaaaattatgctaagactgaggaagctaaggtggaggagcttataaaagctgttgctgactcaggtgccaaggttattgtcagtggagctgcagttggtgacatggcgctacatttttgtgaacgttacaagctgatggttctgaaaatcagctcgaagtttgaactgagaagattctgccgtactactggggctgttgcaattttgaaacttagccaacccaatgcggatgaactagggtacgcagactctgtttccgtggaagaaattggtggtactcgggttattgtcatcaagaacgaagaaggtggaaattcagtggctactgttgtcttgagaggcagtactgacagtatactagatgatcttgaaagagctgttgatgatggcgtcaatacgtacaagggacagtaggataattcctggtgctgctgcaacagaaatagagctggcaaagagattgaaggagttctctttgaaggaaacagggttggaccagtatgctgttgcgaaatttgctgaaagctttgaaatggttccaagaaccctggcagaaaatgccggacttagcgcaatggatgtaatatcctctctttatgctgagcatgctagtggcaatgtgaaagttggcattgacctggaggaaggtgcctgcaaggacatcacgaccttgaaaatatgggacctttatgtcacaaagttctttgccctaaaatattctgccgatgccgcatgcaccgtgctgcgggttgaccagatcattatggcgaagccggcaggaggtccaagaagagatgcccagcctggtggcgggatggacgaggactagtttgactgtgattgttctctttgtgtatcacgtacgcaatgtttcagagcagggaacatcatgtcttatttagggtttggttctgtagaaggttttggtgcctgtagttcacgtttggaagggttgcacggctgtgctggtatcgtatggggaatttgcttgttctttcctggtgtattattgcagtgccgatgtattattcattcgagggttctttccttcagttcatcataccgactgagctcatatgagtgttacttcagtttttttattatagaagcaaaaatgttccagccttttatagtcttctgcgtaaaaaatatt

SEQ ID NO: 105569 - DNA, 1533 bp, Zea Mays
ccaattcctacttaaagaggtcacatcacaacacttttcatttacttatgttatgcttggtgctgttgtaaagttttctgtatctaaaaaatcacactttttagaacactattttatttatttctgtctttttcgttcacgctgctgctgatggcaggtatatgctatagaatggtgcatagaacttcaatatgcaatggaatcctaacgcgttacagcatagtacccatcttctgtatgatgtctggcagtattccttgctgaattctaaaaccaatcaatattcagattgcagtatttgctggtggtgtcgatacctcagcaaccgaaacaaagggaacagtgttgatccattccgctgagcagctagaaaattatgctaagactgaggaagctaaggtggaggagcttataaaagctgttgctgactcaggtgccaaggttattgtcagtggagctgcagttggtgacatggcgctacatttttgtgaacgttacaagctgatggttctgaaaatcagctcgaagtttgaactgagaagattctgccgtactactggggctgttgcaattttgaaacttagccaacccaatgcggatgaactagggtacgcagactctgtttccgtggaagaaattggtggtactcgggttattgtcatcaagaacgaagaaggtggaaattcagtggctactgttgtcttgagaggcagtactgacagtatactagatgatcttgaaagagctgttgatgatggcgtcaatacgtacaagtcaatgtgcagggacagtaggataattcctggtgctgctgcaacagaaatagagctggcaaagagattgaaggagttctctttgaaggaaacagggttggaccagtatgctgttgcgaaatttgctgaaagctttgaaatggttccaagaaccctggcagaaaatgccggacttagcgcaatggatgtaatatcctctctttatgctgagcatgctagtggcaatgtgaaagttggcattgacctggaggaaggtgcctgcaaggacatcacgaccttgaaaatatgggacctttatgtcacaaagttctttgccctaaaatattctgccgatgccgcatgcaccgtgctgcgggttgaccagatcattatggcgaagccggcaggaggtccaagaagagatgcccagcctggtggcgggatggacgaggactagtttgactgtgattgttctctttgtgtatcacgtacgcaatgtttcagagcagggaacatcatgtcttatttagggtttggttctgtagaaggttttggtgcctgtagttcacgtttggaagggttgcacggctgtgctggtatcgtatggggaatttgcttgttctttcctggtgtattattgcagtgccgatgtattattcattcgagggttctttccttcagttcatcataccgactgagctcatatgagtgttacttcagtttttttattatagaagcaaaaatgttccagccttttatagtcttctgcgtaaaaaatatt

SEQ ID NO: 105570 - DNA, 1906 bp, Zea Mays
tcaactcgtgtaacagtactccgatgccctacgctcgtcggcgtggcgaccgatccacgcacccacccgctcgcacccctccatttaagcccgcggggctccgggcgtttcttggtcgcgcacacggaagagcgcgagaggttccattccatggcggcgccgcgcggccttctcgcattgttcgcggtggctgccgccgctacggcggcggcgacgggcgtggacgcgctcggggtgaactggggcaccatgtccgcgcgccggctcccgcccaaggtgatggcgcgcctgctcacggacaacgggttcacgaaggtgaagatcttcgacgccgacgagcggaccatgaagggcctcgccgggacgagcatcgagacgatgatcgccgtgcccaacgacatgctcgcggccgtcgccgactacgaccgggcccggcggtgggttagggacaatgtcaccaagtacaccttcgacggcggcgtcaacatcaagttcgtggccgtcggcaacgagccgttcctcagggcgtacaacggctcgttcgaccacgtgacggtgccggcgctcaggaacatccagcgcgcgctggacgaggccgggcacggcgcggcggtcaaggcaacggtccccgtcaacgcggacgtgtacgattcgccggcgagcaacccggtgccgtcggcagggaggttccgcagcgacgtggcgcgggtcatggcggacatggtccgcttcctcaaccgcagcggcgcgccgctcaccgtcaacatctacccgttcctcagcctgtacgggaacgacgacttcccgctggactacgccttcttcgacggcggcgccggtgcgccggtggtcgacggccgggccgtctacaccaacgtgttcgacgccaacttcgacacgctggtgtcggcgctcaagagggtcgggctcggccacctgccggtcatgatcggcgaggtcggctggccgacggacggcgacaggcacgccacggcggccctcgcggagcgcttctacgcggggctcctccagcggctcgcggccaggagaggcacgccgctccggcccggcgcgcgcatcgaggcctacctgttcgggctcgtggacgaggacgccaagagcgtggcgccgggcaacttcgagcgccactggggcatcttcaccttcgacgggcggcccaagttcccgctggacctgcgcggcgacgggcggccggcgatgcccgtcccggcccggggcgtggagtacctgccccggcggtggtgcgtcctgaaccccatcagcatcgccggggacggacggctcgcggacaacgtcgcgtacgcgtgctcccgcgccgactgcacggcgctaggctacgggtgcagctgcggcgcgctggacccgcgcgggaacgcgtcgtacgccttcaacgcctattaccaggcacaggggcaggtggagtcggcgtgcgacttccaggggctcgccgtcgtcgtcgacgaggacgcctctcagggcgcctgcaacttcagcgtgcagctcgttgggtcaggggctccggtggccaccgcggtcaccacgatggcggccgtactggtgcctctgtttcttgtgttgctttgagctgacgcaaggtgtggtgcttgcctgcctgactggaatcctgatgactgtactgtacagtgttggtccactacagtgacgtactaagtactaccatgttttgatggttcatcatgtgcgatgagcgtgtctcttccctgtatcttcaacctctacgacggttcctcctaaattattctcttacttggtgagtgtccgtgcgttgcaacgggaacatataataccatgataacttatatacaaaatgtgtcttatattgttataagaaaatgtttcataatccatttttgatcctggccat

SEQ ID NO: 105571 - DNA, 1998 bp, Zea Mays
cgctcgtcggcgtggcgaccgatccacgcacccacccgctcgcacccctccatttaagcccgcggggctccgggcgtttcttggtcgcgcacacggaagagcgcgagaggttccattccatggcggcgccgcgcggccttctcgcattgttcgcggtggctgccgccgctacggcggcggcgacgggcgtggacgcgctcggggtgaactggggcaccatgtccgcgcgccggctcccgcccaaggtgatggcgcgcctgctcacggacaacgggttcacgaaggtgaagatcttcgacgccgacgagcggaccatgaagggcctcgccgggacgagcatcgagacgatgatcgccgtgcccaacgacatgctcgcggccgtcgccgactacgaccgggcccggcggtgggttagggacaatgtcaccaagtacaccttcgacggcggcgtcaacatcaagtgcgtagccctaggccctagcgcgcgcgtatatatatatgcagtgcaccgccattggcatggacccgttcgtttctccgctggcgctgagacgttctcgatcgtacgtgtacgtccgtccaggttcgtggccgtcggcaacgagccgttcctcagggcgtacaacggctcgttcgaccacgtgacggtgccggcgctcaggaacatccagcgcgcgctggacgaggccgggcacggcgcggcggtcaaggcaacggtccccgtcaacgcggacgtgtacgattcgccggcgagcaacccggtgccgtcggcagggaggttccgcagcgacgtggcgcgggtcatggcggacatggtccgcttcctcaaccgcagcggcgcgccgctcaccgtcaacatctacccgttcctcagcctgtacgggaacgacgacttcccgctggactacgccttcttcgacggcggcgccggtgcgccggtggtcgacggccgggccgtctacaccaacgtgttcgacgccaacttcgacacgctggtgtcggcgctcaagagggtcgggctcggccacctgccggtcatgatcggcgaggtcggctggccgacggacggcgacaggcacgccacggcggccctcgcggagcgcttctacgcggggctcctccagcggctcgcggccaggagaggcacgccgctccggcccggcgcgcgcatcgaggcctacctgttcgggctcgtggacgaggacgccaagagcgtggcgccgggcaacttcgagcgccactggggcatcttcaccttcgacgggcggcccaagttcccgctggacctgcgcggcgacgggcggccggcgatgcccgtcccggcccggggcgtggagtacctgccccggcggtggtgcgtcctgaaccccatcagcatcgccggggacggacggctcgcggacaacgtcgcgtacgcgtgctcccgcgccgactgcacggcgctaggctacgggtgcagctgcggcgcgctggacccgcgcgggaacgcgtcgtacgccttcaacgcctattaccaggcacaggggcaggtggagtcggcgtgcgacttccaggggctcgccgtcgtcgtcgacgaggacgcctctcagggcgcctgcaacttcagcgtgcagctcgttgggtcaggggctccggtggccaccgcggtcaccacgatggcggccgtactggtgcctctgtttcttgtgttgctttgagctgacgcaaggtgtggtgcttgcctgcctgactggaatcctgatgactgtactgtacagtgttggtccactacagtgacgtactaagtactaccatgttttgatggttcatcatgtgcgatgagcgtgtctcttccctgtatcttcaacctctacgacggttcctcctaaattattctcttacttggtgagtgtccgtgcgttgcaacgggaacatataataccatgataacttatatacaaaatgtgtcttatattgttataagaaaatgtttcataatccatttttgatcctggccat

SEQ ID NO: 105572 - DNA, 501 bp, Zea Mays
atcctcgcagccgtcttcttcttcctcctgctctcagccatggccatggcgctgccagtggctgccgccgccgtcgacgtcgagcacacatttgtggtagccgtatatatatactaggtgcgtgcccgtgcgttgcaacgggagtacgctgggatgagcatgatacatatctgatcggatcttatatttccttgtgggtctggagaaagtttgctcggaagcctatctagttaggtgtccgtgcgttgcaatgcaatacaaaatattggacaaaatgtctggttatctatgtgttcaatagtatatccgaaagagaagcataaaaaagcagtgagagagtgaaatagagacagatacaagtgcaccgtacaaaaaagcatacatgtgtacaatggccatgatacaaataatagcttgcaagtttataaaaaaatagaatacaacagaattggacattagcatacaccgttttaatagttgcacatataaatacaatcttcc

SEQ ID NO: 105573 - DNA, 384 bp, Zea Mays
atgttcccctccatcaccaccgccctagcgcaggaatccctggcaaggaaatcctctagcgtcatctctgtggcaccgtcagcatcagagctagcagcgggtatggggagggaggatgggcgtggagagccctccagctgtggatatctccttccacacccccgacattcgctggaccgcaacctccaagtctacctgggaaggatccaccgggccggggctgacgctggcggcggcagcgttgacggtctcgtggtcgtagatgttacagatgatgtcgcccatgttcatggatatgatgccgctattcctaaattgagcgaggttcgaggacgagccgacctcggtgtgctgctgcggggacgacgacgccatcacctgtga

SEQ ID NO: 105574 - DNA, 599 bp, Zea Mays
taaaccgtgcccctccgtcccaaccgtccgccgcctccctctccgctccgccaagaccctcctcctcactcagctcccctcgagcccagaagcaccgcgcgcaccatgcggccaccgagagggcgcggcggcggcggccggttcggcggaggtggaggccgaggcggcggcggtggccggttcggcggcggaggccgtggtggccggttcggcggcgggttccgcgacgagggcccgcccgcagaggtcgtcgaggtgtcgacgttcgtgcacgcgtgcgagggagacgcggtgacgaaactcaccaacgagaaggtgccctacttcaacgcgcccatatacctgcagaacaagactcaggtcggcaaggtcgacgagatcttcggccccatcaacgaatccgtgagcatctcctcgcctccctaatctctgaacgtctcaagagtaaaaacaaaagaaatacatctttttttaccttctcatgggcacttgaggctgtggtgaattttctagtgtggcaagagcagtagtattgccacagcttgttgtaggtgtgtttcttagagagagcactgattatttacttagtgcagtgagga

SEQ ID NO: 105575 - DNA, 212 bp, Zea Mays
gacctcaaaaatcaacaaggactgtaaatgtatgcccaggatcagcacaagttgaattcagaacaaggaagcacatagtggccattaggaacggaacaggtacaaaccctttgtttcaattgagaatccaagttccacaaacaaagtgttctgctaccttaaacatatcaggttacaagaacatggaagttccaattgggtagctatgacga

SEQ ID NO: 105576 - DNA, 279 bp, Zea Mays
gtgccggtcaccaaggaggagcttactatggatgatatcgtgccggtcaagaccaacaaggtcgtgaagcccaggcctttgcaggctgcaagcattccaggactccttgggatttttcagaacgagtgggatgctctcatgctttctaattttgctttggagcagcagctacacacagcaagacaagaacttagtcatgcgctctaccaggtcttacattcacttatttatatctctgtatcctgtctaattatatattacaatttgcttggaacattt

SEQ ID NO: 105577 - DNA, 299 bp, Zea Mays
gatcccgctccatgggctgaaactgggattcgtgatggtcagctaagcataccttcgccttcaaatttgcgtagcttcttttttattctgcaagttgtttggtctgccgttcaaatgccttattattctgcgagctgttttaagactgggcctcaatattttttttccaggcagaaagtgctactgccgctctctcactgtagcggtgtggtactgagatccttgccaataaggtaaaactctgactgatcttacgcgttgcattgaggaaggagctcttctgggcggttggataacgg

SEQ ID NO: 105578 - DNA, 137 bp, Zea Mays
ttgtgagatacttggtgatgttagtgatgatgcagacttatatctgttttgtgatgatcctgactttagtgagactttgtgatctgttttgtgagactttagtgagactttgtgatatatatggtgttgatgataaa

SEQ ID NO: 105579 - DNA, 3854 bp, Zea Mays
ccagaaaagccgagcggagcgagaccagaccagtgtgagagagagagcggggtcacagcagcgcccagcggccgcagcacaaaagcgttcgtcgggggctttggattcccaggaattccgttccaaagcagccgaatcgcgggaccccgcctgctcgctcctcttcttccctccaaccgcccccccctcccctcctcctcccgccgccgcagcgagagccgagagcggagcgagcaaatcttggcgtttcgcgcccgctctcgcagtctccgggcgggggccgcctggcggagtggttacttccccgctggcttcttgctgcgccccgccattaaagccggcgcatttgggtttctctctccacctctctctatccgccccccaccgcgctctcgccctccctctccctctctagcggtagattggtgctgttcccccctaatcggtcggcggttgggggccgggttccgacgtctgcccgggagctcgaccgggcctccgatccgggctcccaagccgccgcctcccggggcgcccctccggaattcttgctttctcgggctccgaatctcgccgcctgtcgtcgccagcggctggcgcgggggcttggttcccggcgtttcattgcgaattcgggggcgatctggggcccctggtctggatggcgaggatttgagtggattcgagacgaacaagtggaggtggagccctgatctgggtggcgcccccgccgtggtatgtgccatgaggaagctcttcttctccgagtcggcctgcaaagagaccaagcttcactccgcgccccactcatggctgcccctcgagagggggaagctctccaagttctccggccatgccgccgccggctcctccatagagtccttgatgaagatgccagagccggctgtgcttccgcacttcaagcccgcggactatgtcgacgtactggctcagatacacgaggagctggagtcctgcccccctgacgacaagtcctccctgtacctcctccagtatcaggtcttccgtggcctcggcgaggccaagctgtctcggaggagcctccagtctgcgtgggagaaggggagcaccatacacgagaagctcatcttcggggcatggctcaagtacgagaagaaaggggaggaggccatctccgacctgctcagctcgtgcagcaagtgcttgcaggagttcaggctgctggatttcgtgttgcaggtctccactgggtcacatgtgataaactacgatggtgatgatgatgagtttcggggttctgcggtggttcatttccggataagagatgatatggttgcgtgcgatcgtcggaagctcgcggcgctgtcaactccactgtatgcaatgcttaacggtggatttagggaatcatatctagaggtcattgacatgtctagaaatggtatctcccctattggcatgagggcaatcagtaaattcagcctatcaggaagactaccgtatttgtcagctgatgctatcttggagattcttgattttgccaataagttttgctgcaagggcctcaaggatgcctgtgagcgaaagcttgcttctttcgtctcttcaaggcaagatgctatagacttcatggagtgcgctcttgagctgggctgttccatccttgctgcttcatgcttgcaagtgctcttgaatgagcttccagagtgcttgaatgatgaacaagtggttaggatattctcttctgcaaataaggcacagagattgacaatggttggcaatgcatctttctccctatattgtcttcttagtgaagtctccatgagtaccaacccaacatcggatgtcactgtaagtttcttggaaaagctggtagagtcggcatcagattctaggcaaaatcagctggccttacatcagctggcatgcaccaaatttctaaggaaagattaccctgaatctgagcgcctgttcaatgctgcattttctgccggccatctctattcgatagtgggtttagctagattggcctctctgaggggtaataagcattttgctctcaagttgctagactctgtcatgtcatctcggtggcctcttgggtggatgtatcaagagagagctctatatttggatggtgataacaagttagaaaatcttaacaaggctactgagttggaccctactcttacatatccctatatgttccgagctgcatctttgatgaaaaggcaaagtgttgaagctgcattgatggagatcaaccggatacttggattcaagctggtgctggagtgcttagaactaaggttctgttgctaccttgcccttgaggattatagggctgccttatgtgacgtgcaggcaatactcactcttgccccagattatcgtatgattggtggccgggttgctgccaagcagctgagaatgctagtgctagagaatgtagagcagtggacagctgctgactgttggatgcagctttatgatcgctggtcatctgtggatgatatagggtccctctctgttatatatcaaatgttggagtcagataccgccaaaggagttttgtactttaggcaatctttgcttcttctcagattaaactgtcctgaggcggcaatgaggagtttgcagcttgctcgtgagcatgctgcgagtgatcatgaaaggcttgtctatgaaggatggatattgtatgatactggccactgcgaggaaggattgcagaaggcagaagcatccattgcaatacaaaggtcatttgaggcattttttctgaaagcttatgctttggctgattcgagtcttgatccttctacctcagcaacagttgtatcacttctagaagatgcattgcggtgtccctcagatagacttcggaagggtcaggctctaaacaacctcggaagtgtttatgtggattgtgggaagctagacctggcagctgaatgctacattaatgcactaaagatcggtcacaccagagcgcatcaaggccttgcaagggttcatttcctacggaacaacagagctggtgcatacgacgaaatgaccaagctgatagagaaggccaggaacaacgcttcggcatatgagaagagatccgagtactgtgaccgggagctgacgaaaacggacctgcagatggtcaccaaactcgaccctctgcgagtttatccttacagataccgtgctgctgtgctgatggacaaccacaaggagaaagaggcgatcgcggagctgaccaaggccatcgccttcaaggcggacctgaacctgctccacctgcgcgcggccttccacgagcacgtgggcgacgtctcgagcgccctccaggactgccgcgcggccctctcggtggaccccaaccaccaggagatgctggagcttcaccaccgggtgaacagccaggaaccctgagcgcgctcccacggtgtacatacaggacaggaagcccctcatcatagccaaccggccataccggtgtatgttttgtaccatacacagcagatcagatcaatgtaaggacacagtagaaagccacattagatccctccccttgaaaaccaaacaccccattccttgtgtccctaattattagatatatatatgtgttgtttgctatagcctccccttagtaagttgttgctgccgattgtgattaagcctcctaattgtacccgccatgtgccccagcggcccgtgcttccagaatcaagaagttttgactgtaccatgtgtatgtaagtgaaatgggggaacaaaggatggtggaagcttttgtccgcgccaaactgtcaagcatgcaggcacctgttcttgccgagcacttgattgattgcatatacagatgtgtgtttctggct

SEQ ID NO: 105580 - DNA, 269 bp, Zea Mays
cctatttatgtctcttttaaactctaatcctagaacccatattcatatgtacgtgttataaaaagaagggaaaagaaaatataaaaatatcttctctcctatccgatgccgccctggtttctagttatttcccaccgcctatcttcttcgtcgtacatctcctcccacccagatttttcttcctccaatctttatctcccaagcgttcctatctcatcatttcttgcgctgagcattggccttgtatttgtactcacttcgtattccac

SEQ ID NO: 105581 - DNA, 2226 bp, Zea Mays
atggggtgccacgtggcggcggatcgcggccgccgccggtcccaggaggaccgtgccgtctgtgccctcggcatccgcatccccttcgtagagaacatgagaattaaggaggttgatgtgggagtggtggcaatatttgacggtcataatggagctgaggctagtgagatggcttctaagctttttctggattacttcttgctccatgtttattttcttctcgatggcatacactctctgcggttcagaaaatctactgggaaactgacatatagggaagttactatttttaacaatgtatttaatctgtacaagcatggccaatccgaccatgcagagaggtcatgttgggcatcaccagccattctagaccggtcatttcatacggaaattctgaaggaatcactaatgagggcagttcatgatattgatttaacattctccaaggaggggaaacgaaggagaaagagaaactcaattaatcacgaggaatttgctttggcaaattatgatggaccgttgtatcatgcaagggagttgacaaaggaccatcatcctaatagagaagacgagagaaaccgtgtggaggctgctggtggttatgttcttgagtgggctggtgtatatcgtgttaatggcgagctagcactatcaagagctattggtgatgttccttacaaaagatacggtgtaatatcaacacctgaattgacaggctggcagattctgtcagaaaatgacagttttcttattgcgtcatctgatgggatctttgagaaaatgactatgcaagatgtttgtgacctaatgctgcatgcaaaaattcgtgttaaacatgattttggatcctctgccataacacaacgtaatttggcagattacgtagttcatgttgctttacagaaaggcacaacagacaatgtggctgctgtggttgttccattgggatcacctggtagcactggtactacattaaaagattcgtcccagttcgaagaagatctcaagatatctatttctccaatgttgaatgttccatatggattgaagcctgatcatggacatagttcagctgtcattgacatggagtatttcaagcgctcatcaataaagttccagaggttcttggttgaagcaaaacctaagaaacttggttgtttctatttatccgagagtctggatgaagatatggactatatatttagggtgccggaagcataccagcgtgaagaagtccatgacttcaaccacataccagctgagactgccttatattctgatggtaatctggaaaaatacaaggacaaacacttttgcttgtaccttggtcccgaagatggcgaaatgggacagtgcaatggtcctgaagcttttgcaaacttttttggtctacttgactcccttccgcataatggaagcaaaccaaatggttcacactcctttggcaacacgatcgatttcaggtacaagctcaagagaaggtttgatcgtgggtcgtacggtgaagtctggttggcatttcattggaattgttctgaagatacagatgttcataaagagcctccacactttacaaatatatctcaatcagagatgtataattgcacaagttcaggcagaatgtcatctgatgaagatcatggttcaggcacagtaaatggtgatttattcatactgaagcgcataatggtggagaggggaaatgcagcttacttgagtggattgcgggagaaatactttggggaattattttcaaatgcttccaggactcttgaaggtttgtcgaggatagaatcatcgactatctcagtggacatgctatatgatcctgatatccatctagaaaagaacttgtcagctactgaagaaccacttaagcatgtggctaggtttatagaatcttttgaatcagaatcaagggaaatttggctggtgtatcacaatgaaggccactcattatcaaaattgatatatacagctgaagaaacgaagttagtcactggcaacaataatgagagggtcagacatatccaagttttgcacccatcgaagtggtggcattggctaaggacaacaaaagctgggctaaagcagatgcaaaacctcttatggcagctgttgatgggactgaaggcttgtcatgatcgtaatatcacccaccgggatatcaaacctggtagaaatgatgtcactgcctattttttccttgttttctatacttcttga

SEQ ID NO: 105582 - DNA, 602 bp, Zea Mays
tttttcctttggctggcggctaacaagagatgctagactactgacaggcttgcaaagagaggattggatcatccagctaggtgccttttttgtgaccaggaagctgaaactattgaccatatccttgtctcttgtgtgttcacaaaagtgttctggtttaatcaccttaaaccgtttgggtttcaaagactggctccccagccaggacattcatatttcatgacttggtgggagaaaatctcagggatggccactggtcttcctggaaaaggtctcaactcgcttgcggccttaggagcatggacaatgtggaagcttccaaatagttgtgtttttgatggttgtactcctactttagatttttcccttaagttagctaggaaggagaggcagtcttgggaaatggctgggggtaaaggtctttcataccttgctgccctaattcctgaagactatggagttgcagggtgagtttgatggattttttcagtttcctgtgtctttggcctccctaaggaggccttgtaatctgtccaggtctctttgacctaggcttatttcttcttcttaatatattgaggtgcagttctcctgcgttttcc

SEQ ID NO: 105583 - DNA, 531 bp, Zea Mays
gaaaaagcaccgagtttgctcgttcattccttggcagccttgtcgatgagctcctgtggatgtgggggatgacgccgccgccgctggcggcgatggtagccttgatcagggtttccagctcgtcgttcccgtggatcgccagctgaaggaacagaaggcaaaaacagagagggaaattgaacaaggaataaacaagagattgtataggaagcttgatacgaaatggaagcagagcattgtggtcagaccagcaccatctctaagggagaacaaagagaaggcaagcagagcctgtgcacgtattggttggttcagttgtgcggttgctctttttggctcttatcttcgtcgccattcttgtatttgtaggattgtggaaatgtaaaccgttcaagttgctgcattagtagcagctagtagtatctgtgattcagaaatctaaaagttgtgacttgttcatgtagaatgaaccttgtgtagatgagttgcaaggtgtgagtgttccatatattattgtaggatgagttagaa

SEQ ID NO: 105584 - DNA, 527 bp, Zea Mays
tttcccactcccgctcaacatttaaaactgtttttttcccactccgctcagcataagcagagaagcatatggtggccatggctatgctatttaggaacagaaggcaaaaacagagagggaaattgaacaaggaataaacaagagattgtataggaagcttgatacgaaatggaagcagagcattgtggtcagaccagcaccatctctaagggagaacaaagagaaggcaagcagagcctgtgcacgtattggttggttcagttgtgcggttgctctttttggctcttatcttcgtcgccattcttgtatttgtaggattgtggaaatgtaaaccgttcaagttgctgcattagtagcagctagtagtatctgtgattcagaaatctaaaagttgtgacttgttcatgtagaatgaaccttgtgtagatgagttgcaaggtgtgagtgttccatatattattgtaggatgagttagaatcctgaatgtcaagtgcttattacgtggatgcaaaatgcaaataaataaa

SEQ ID NO: 105585 - DNA, 923 bp, Zea Mays
ctcagactggactctagctgaataacctagtggtgatagacctacaacattctggacactctcggtttgctttgcaattgtcaaaatatcttaggctaacgctatgacttgcaataatcacaaaaaatgatgataagcattataaacacaagtaacctcctagtttagtgcattaaattttgttatcatcgtcttcatgttaatgtgtcatagttttaacatttgtcagatcagagagcactgggcatgtctatgcgtgttgaaagggcatcacttgaacaggtccagaaaaggtttgaggcacttaagaaaaggaaggatccaagtgcctttactgaagaagatttggatgagagaataatgaaacaacagcaagaggaggaggaacggaagcggcagcgcaaagaaaagaagaaagagaagaaaagagaacaggcaacccaacatgaacttgaggacgttgatcctgacatcgctgccatgatgggttttggtgggtttggttcctcgaagaagtgacagctctgtgttggccgcatccctttggtgaccttctgccctgaagatattgctcaaccccataaacacctgtgctatgaaaaatcgtttttgccagaatctagataagatttgaacgaagtgcactggatgcaagggtactacgttttgacactgggatattgaactgcgtgtatgggagttgattatcaaaaggaatatctaagggtgttttggataaacctgtttatttgctacttctggtattcctgcttagaaacagctgatggtcgtgattgtttgttgtgggaatgcagatgtgcgaagtggaacaaaccaaaagaattgccgtctcattttctagaggaataaacttgtgtattgcagttaacagctcccttgattctgaatcttaatttccagga

SEQ ID NO: 105586 - DNA, 146 bp, Zea Mays
cttagttgatgggactgaaggcttgtcatgatcgtaatatcacccaccgggatatcaaacctgagaacatgatcatttgctttgaggacatcgagactggaaagtgtctaagagaggttccatctgaagcaaagcaaaataagctg

SEQ ID NO: 105587 - DNA, 498 bp, Zea Mays
agttggcacaaccactctatagcatagctcaaagcacagaagcagacgctaagaaacacaacacccgctggtaccagcgcagcgtgttgccggtcggtgacacaatgacgcgcaagacattatggtgccggctaccacctccttggatatcttcaggaacgggtccatgttgtggtggtaccagccattttgcctcactcctatggatgttgctctgcagggcaggtgagttcttggttttgctcatagcttgctgctcatcgtcggaccagtcgccatcacatcgcgcatggctagaccctcataatcctcatctgacttggtcgagtgttcgtccatagagccgacatctatctgcaagtaccctgtgacgtggaagaacattagctttgcagtgttaggaggtgctgacaatataaggaaaacaaaaaaccaaattgttgaacactgacataaatcgcccatacatcgtgcatgtgcagcatctctctttcttca

SEQ ID NO: 105588 - DNA, 100 bp, Zea Mays
ctagattgctttagaataggaatcaagcactttgctctatccaacaaaagagcacacagttcttacttgtggaattgcatgttctagaattattttagtc

SEQ ID NO: 105589 - DNA, 675 bp, Zea Mays
cagaggcactccttaattcaaactggtttcaaggatcaagaagtgcaaggcttaaatatgacatctagagcattggagttgtcatgctagagttgatgatgggttctccccatgtttttcagataagtgaccgtacacgtattttaatggatcagcatctcggagggtggagtgaacaaacaaaggagcttgcatacaagttgaggtcatacatggagttgtgcattttagtcccagggatttcctcgcagcatcatggcactggtagcccagaacagggtcaatttgggttagcttcttggaaatgctctgaagaatcatttgcacatcaagtgaagatcggatttcctctcaagattggttttcctaatttatgggcgttgcgacttgcacgccagctacttgtgtggcatcctgaggatcggctaagtgtcgatgaagcactaaatcatccttacttccaggagccaatgtaatgtaaggagaggagattagtgataactaaccgacgaatcttcagctcggtcctttcaagttcaagccgcgtgcatttggtcagaggaattcatgaatcgtttgtaatttaccatcctagctgtgtcataaagatgttgtgaatataacataacatgaagtaaaagatagtagcatatgtgaaattacatgtgtaacgac

SEQ ID NO: 105590 - DNA, 418 bp, Zea Mays
tttgcccttacaaaccacagcattaggccagactgcctttggttgcaatcactaatgaggaagaacgttatctatttgttaatgtaaacagcacaatcctacaaatacaagaatggcgacgaagataagagccaaaaagagcaaccgcacaactgaaccaaccaatacgtgcacaggctctgcttgccttctctttgttctcccttggagatggtggtggtctgaccacaatgctctgcttccatttcgtctaatctcatctaatccacatgtattaagatgagaacgaacaggcccttaaatggaggcaggcaggcactcaccgcttcttgtcactcatgtccgctcgcttgcgcaggcatgatattttacccagagactactgattgttctttcatccatcagctgatcccagatc

SEQ ID NO: 105591 - DNA, 89 bp, Zea Mays
tttgcccttacaagccacagcattaggccaaactgcctttggttgcaatcactaatgaggaagaacgttatctatttgttaatgtaaac

SEQ ID NO: 105592 - DNA, 1148 bp, Zea Mays
atggagtccgcgccaaatccgccattcaatcttcggcgtctcccttccttacgccgcgaggtgaacgggatcccctaccatcgagaaaccccctacccatcctccatacacgcttataaacgcgaggtgaactggagttcctctccttgtgccaaatcctcctcgtgtttgttattctttcactgcgacggcaacgccaacagcgaacttggaggtgttgcggctctgcacaacccttgctgtaaaattaacttcaacagcaacaagttctctgtagccgtcccatggctagaaggttttgatggaaccggtcgtattgaaccgagaaagagacgcagcggaccgcataaaacggatgcctatggagccaagatcgaggccataacatatgtgtccgtgacagttaaacatttcaacaatttgctccatgaaaagcatgtttacaatatgcataacgtaaagtttggtcttcatccgggtgaattcaattttcgacatctaaatggtcccatggaattgtatttcaaccaacaaactatcgtggagccatacacagttccaattcaaatgccgccattcccaaaacatatattcttcaaccttgatgatattgctgagttgccaaacaagactttagtcgacattatggctattgtagtccacatggatacaattcatcgcacaatgtggggccctttcagaaagattgttataatggatgctagggggtctttacatatcattaaagtttggggtgacctactaaacaaaaatgcactccgttgggcgttggctaaggaggattatggcataataattgggactatgtttaggcggttcagaagacaagagttcctcgagtcttcggatcataccgcaatacacttcaatccgttccatcacaacacccactattttggaccaattcaaaaagctttggtggcgcggaacaaccgtcagtttgctgttacatttcttgaagagcaaaggcgtagatagattctacaatttcacaaagagcaataattggaactatgtttaggcctagatagattctacaatgatagaatacatgtcgtactgttattgatcaaccaagagcaacatgaggctgaattgtaatacctatgacatgggtttaataagag

SEQ ID NO: 105593 - DNA, 667 bp, Zea Mays
ctctcggtacatgttattctctcgatcgggtaatcgtttccatggacaagaccaagcggaggtgtggaaaaaacttactgggagacatgtagacagccgtgccaagtgaatcctggatgaacctctggcatgggattttgcagaggttcgtgcacattccgacacagttggtgctttccagaaatctgtcagagtaggataatgaagaaaaaagtgcaggctattctgggaagaaagaaatactctagttattttaattatacctcacatggtccgacgagccaagggaagaacaccgtggtgaaggcggcgaaatactcccgcgagaatcgagagggtggcatcatcaccttgatctgcatatgcatgcaacagtcagctttgctcgcaggcagcatgtgtatatgttaaaatcaagtgtgtgtatatatatatacttgccatggtgaggatgtagctggggaaggcccgttggagagcgctggccacagtgtcccactgctggtcaaccctgaacagcgcggagatggccagggccgcctctatcaggccctcgtagccgtcctttctgttcttcatccctgcaatgcatgcacacaatacaacagacaacatatgcatgaaccagatatgctactagctgctatgtcgacacagaattaatttt

SEQ ID NO: 105594 - DNA, 750 bp, Zea Mays
atgccgtcatgtgcccgcatctcatccgccgtctccaccgccgccgcatcctcctcctcgccgccgccgcatcctcctcgctgccgccgcctcgccgccgccacggcgcgcgtgcgggaggggacgctccgccctgaggaagcacacgacctgctcgacgagttgcagcgtcgaggcacgcccgttctcgagcgcgatctgaacggcttcctcgcggcgctcgcgcgtgcgccgtcctccgccgcctgcaggagtggccctgccctcgccgtcgcgctcttcaaccgcgcggcgtctcgggctcaaggaccgcgggtgctgtcccccacatcccacacctacgccatcctcatggactgctgcacccgcgcgcaccgcccagagctagcgctggcgttcttcggccagctcctcaggacaggcttgcgcgtcaatatcatcatcgctaaccaccttctcgagggcttttgtgaagcgaagcggacagacgaggctttggacatccttctccacagaacgcctgagttgggctgtgtgcccgatgttttctcgtacagcatacttctgaagagcctctgcgaccaaggaaagagtggccaggcagatgatttgctacggatgatggctgaagggggagctgtctgctcgcccaacgtggttgcctacaatacagtaatcgacggctcggccaggggccaaaacaggattcagcatgctacattattcttcatcacaattcagcagttataa

SEQ ID NO: 105595 - DNA, 1125 bp, Zea Mays
catcagcaccggaacgaatatgcttcaaaaaacataaaacgctctgcatatattggatcaaaagtaaatgaacatctgcatatcaagcaggtcaaatgagaagaaaatcttccgagaaaacatgaacatgaagtaaaccaatggttttagttaagatcatatactagcttaactgtgacaggtgcgtgcaaggacttattccaaaaaaaaaaatcaaaatatcaatcacggactggcctctgcaagaaaatgatactttgcagggagaaatcttatgtgttccctacaagttcctttgcttgagaagagatcgaccagcaacattgtggttaaatgttcaagtgagaaattcctctcgtcaatcttggacaggtaagctccagccctgactatttcatttttctttagtaattccctgactacatgattcagcaatcgagaattgggctcacagccagcattctgcatggatgaaaacatatcttctgcctcttccaccaatccttcttttataagatttgtgatcattatactgtaagtcacaacactaggcaccagccgacttctcgagatagaagcaaacagatccttagcttcttcaactctcctggtttgaaacattccatctatcatggtattgagagttatgatattgatctttacattcattgcacgtaattctttgaaaagaaagattgcttcatcaaagcatctatttttaaaaagtccacgaagaactatgttgtatgtacatatgtccatagcgataccactttctgtcatttcatggaatttcacctttgcaggaactgttctcccggcctgaaataacccatcaattatgatgctgtataaaatagttgaaggctttattcccctttgcagcatttctctgaaaagactcaatccttcatcaatccttccaattttacaatagccattaacaagtgtacaatacactacaacgtttggttcaatgccagctgacaccatagcatcaaatactcttaatgctttctccatcttgccaacaagacagtacccatccatcagcatactatacaccacagcatcaggatgcagaccaacatttacctttaagtcaaatatattttgtgcgtccat

SEQ ID NO: 105596 - DNA, 447 bp, Zea Mays
atggaggtcgccgccgccacttgtacgctccttgctgccgtcgccctaccagcatcgtcgtcctcagcagcagcacgctctgcgacgaaacagagctacgcgaggaggaagacgacgccgcatcaggtgccgccgcctgccaccgccaccgccaccacgtaccgcgacaactggttcgacaagctggccatcgggtacctgtcccggaaccttcaagaagcttctggtggtcatcccaggacaccaccacggcaggagtgcgagcaggttgttgaagtccttcttagaggaatttctgcttcagcaggctcggcaacgaaattctccatcgagcacctctctctagggcataccttagagacaaactggttccaaagacctcaagggcataccattgaggaatatcacgtcattcagtcatacacaatcttaagggcaaacccttaa

SEQ ID NO: 105597 - DNA, 544 bp, Zea Mays
atcgtcttccgagttggaaagctgatcttatgactagagctggtaggaaaattatggttcagcatgtgctcaccagtatgattgtctatttggccatgaccattgattttcctccttgggctttggaggcagttgataaaattagaaagggttttctatggaaaggtcgcacggaggtcaggggaggacattgtctggttgcttggggaagggtgtgcagacccctccatttgggaggtttgggtatttctagtttgaaggaattatgctgggcccttcgtatgagatggttgtggcttcataaaactgatccaagaaaaccttgggcaaacctcgctattcaagttccaaaaaggcaggatctttcttctccactggtttggtctcaaaagtgggaaatggagcacacactttgttttggacagataaatggttcttgggccagaatgtgtgtagtctggcgcctaagttattcgccatcattcctaaaaggattgcgaataaaagaactgttcttgaggctctttccaatagaaaatggata

SEQ ID NO: 105598 - DNA, 709 bp, Zea Mays
tccagatctggacagacatttgagtacactcctccagaggcactccttaattcaagctggtttcaaggatcaagaagtgcaaggcttaagtatgacatctggagcgttggagttgtcatgctagagttgatgatgggttctccccatgtttttcagataagtgaccgtacacgtattttattggatcggcatctcggagggtggagtgaacaaacaaaggagcttgcatacaagttgaggtcatacatggagttgtgcattttagtcccagggatttcctcgcaacatcatggcagtggtagcctagaacagggtgaatttgggttagcttcttggaaatgctctgaagaatcatttgcacatcaagtgaagatcagagatcctctcaagattggttttcctaatttatgggcgttgtgacttgcacgccagctacttgtgtggcatcctgaggatcgtctaagtgtcgatgaagcactaaatcatccttacttccaggagccaatgtaatgtaaggagaggagattagtgataactaaccaacgaatcttcagctcggtcctttcaagttcaagccgcatgcatttggttagaggaattcatgaatcgtttgtaatttaccatcctagctgtgtcataaagatgttgtgaatataacataatatgaagtaaaatatagtagcatatgtgaaattacatgtgtaacgac

SEQ ID NO: 105599 - DNA, 594 bp, Zea Mays
acaagtcacaacgccctagagtagaggctgagctgcatatatcaccgagcaccctctctctctctgttcccctccctcgctcgacatggaggtcgccgccgccacttgtacgctccttgctgccgtcgccctaccagtttcgtcctcagcagcagcagcacgctctgcgacgaaacagagctactcgaggaggaagacgacggccgtgcgagccgtcatggcgaggccgcatcaggtgccgccgcctgccactgccaccgccaccgccaccacgtaccgcgacaactggttcgacaagctggccatcgggtacctgtcccggaaccttcaagaagcttctgggatgaagaacggaaaggacggctacgagggcctgatagaggcggccctggccatctccgcgctgttcagggttgaccagcagtgggacactgtggccagcgctctccaacgggccttccccagctacatcctcaccatggcaaatatatatatacacacacacttgattttaacatatacacatgctgcctgcgagcaaagctattgcaaaacaagattataaaaataaataaaactctttcgtcacgaaag

SEQ ID NO: 105600 - DNA, 516 bp, Zea Mays
agagtatcgttagtttaagggttaattaatgcggagcatgcaccaagtgcatgcatgtagtagtagtagagtagtggagaatgcagtagtagtcatgcaatgcaatatggttttttttcctttttctttgcgttcttacatatacatagacatatgcgtccccataaaggttgtgcgagtaatcattgtgtcaccgaacatttgcaaggtcagggaatcccaagtggatggaagggaagagaggaacgtggtctacatacccaaatgcaggtactaaattctcgtcatccagaaattattctttggttgaatagaaccaaaaaaaaaagttaaacatgcacgaatatatgtaactgaaccacgataattaattctatcgtcagatgtcccatcacaaatactgaattagctgctgtgtgtgagatcgacaggttacggtcctgcaccatgaattagctcagcgtaaattaaacctttttgcaataaatacgtcaatctttactcaagtaaaaccac

SEQ ID NO: 105601 - DNA, 1597 bp, Zea Mays
accccaccgcaattccgagcaagccgtagaaacgcccgcctcacccccgcgacgtagcaaccaccatcccccgtctgtcgccgcaacgcacaacccccctccgttcggacggaccaccgggccagcagcgaggcggatcgtgacgtttgcagccatggtgaaggcctaccccacggtgaacgaggactacctcaaggcggtcgacaaggccaagcgcaagctccgcggcctcatcaccgagaagaattgcgccccgctcatgctctgcctcgcatggcactccgcgggcaccttcgatgtggccaccaaaaccgggggccccttcggcaccatgaagaaccccgccgagcaggcgcacggagccaacgccggactagaaattgcctcaggctgctatagcccatcaaggagcagttccccatcctatcctacattgacttctaccagcttgctggagtcgtggcagtcgaggtaaccggcggacctgatgtccccttccaccccgggagacaggacaagcctgagcctccaccggaaggtcgccttcctggtgccacccaagaaaagtaggaagaagaaaatccaaggtgaaaatgatccagcattggagaaggagcaagctaaatgtcgtaagtgtgttaatagtttagttaagaggcggaagatgagtgaagcacagaggttagttcaacaggagttggaattggaggaatggggcacagaagcccaagtgaagttgggaagtcgcctgattgaattattactagattcagcatttgtgcagccaccagctgatcaaacaccagatagttctccatatattcgacctgcatttaagcatgtgctacgtcatcctataatagaaaatgggaggctaaagaagaagcattgggtgatagagtgtgaccatcttgtgcatgaggggtttgaaagcactgcttggcatgttgatatacccaacctccctatgctggtacctcgtaagaaatggaaaggttatgataaaggtggtcacctttttctgccctcatacattatgaggacacatggtgtgaaggaccaaaaggatgcaattaatagtgttcctagaaaacagttgcgaaaagccaacatgttagaaggcggtggtaaaactcctatactgagccctgttgaactggaagaaataggttataaaatcatagcctatccattatctctaattggtgtatcgatgcgtgcaatggagccaaagaaaagtagtgcggccaatgtgacttcaatggatgtgggcatgactttctgggatgtggagacgaacattctactagataatgctgaggagaccttggcagagtttctgtcgaaagcaataggaactactatcgattgggtgcaaatggttgggatgaagcctggtctggattccattggaatcatcgttgtttcgcacaattgcagtggcgtagcagcccaagcagatcaaggtttggttccagaaccgcaggcacggctcggctcacgggtgtcagcccgtctctcttctgcatctcaagctaaacaggcaggattgattgttgatattacacaagcatctcaagctctaccagaactctga

SEQ ID NO: 105602 - DNA, 809 bp, Zea Mays
atggtgaaggcctaccccacggtgaacgaggactacctcaaggcggtcgacaaggccaagcgcaagctccgcggcctcatcaccgagaagaattgcgccccgctcatgctctgcctcgcatggcactccgcgggcaccttcgatgtggccaccaaaaccgggggccccttcggcaccatgaagaaccccgccgagcaggcgcacggagccaacgccggactagaaattgcccttgctggagtcgtggcagtcgaggtaaccggcggacctgatgtccccttccaccccgggagacagctacagatgttgatgaaagcattgtctttattgtgtaggacaagcctgagcctccaccggaaggtcgccttcctggtgccacccaagaaaagtaggaagaagaaaatccaaggtgaaaatgatccagcattggagaaggagcaagctaaatgtcgtaagtgtgttaatagtttagttaagaggcggaagatgagtgaagcacagaggttagttcaacaggagttggaattggaggaatggggcacagaagcccaagtgaagttgggaagtcgcctgattgaattattactagattcagcatttgtgcagccaccagctgatcaaacaccagatagttctccatatattcgacctgcatttaagcatgtgctacgtcatcctataatagaaaatgggaggctaaagaagaagcattgggtgatagagtgtgaccatcttgtgcatgaggggtttgaaagcactgtaagtttactttgccctgccaaccacatcggtttttttatataaaatag

SEQ ID NO: 105603 - DNA, 249 bp, Zea Mays
atcttgttcaaggaaggtggttgtggtacttttgatcctttgttcctcaacttgattgcatctatgcagcgctacaaccagattgacgcccaatctgctgctagcatgacatctatgtggaccctctgtaatatgtgtatgataggatgtgtcatgcgtgagttgatatatgttaactgaattggcaaaacacttgatatatgttaaaatatgttgacctcaatgatcctaccaagatcttactttggc

SEQ ID NO: 105604 - DNA, 399 bp, Zea Mays
atgtcccggttctcgctgtgccttgcggcggcgtgctgctgctgctgccttgcgctgctcctgccggcggcgcagggccgtcctgacaccggcggcgaccatcgtccactgttctccgagccacacccacactccgatgccgtagagaagaaggcgacgccgtcgtggtcaccgcgtccgccgacggcaggtggcgtcgtcgtcacgcctgagctgcggacggtgcctgaaggcgcgaacccgctgcaccaccgcggcagtaccaccaggcacaggcaggagcgcgccctaccggcggtggcggcggggagcgtgagcgtcgtcgtcaggccggagttgcggacggcaccttgtggggcgaacccgttgcacaaccacggaagcaccccgtccccgtga

SEQ ID NO: 105605 - DNA, 1580 bp, Zea Mays
ctctctcccaccacaaatattcttcccgccacgatccctctcatccggaagaaaggggggaaaaaactcgcctttttctctctgctggttcaagaacgccatggaaaatctcgagcgctcgctgtgattcctgcgaatacccaagcccaaccaaaccctagcccggcagccattctcttcgttccctctttgctctgcgcgccacaccgcacgacctccccgaagcagacgtgcccgctgcccgtccgtcccccgtggccatggccgcgacgtggtcttcgtcttgctgcgccgcgaccgcgtcgagcagcgctctgcttcgtcatgcccgcgtcaagagcgcgccttgggtagccggtgccagccggagtagctacaggcagcggcggcggcggcgggagctgtccatccgcgccacggccgcggcgccgccgccgcccgtggtctacgcggacgccggcgccgacaacgtggcctcgctgaagatcaagctcctgagcgcggtgtccgggctgaaccgtggcctggcagcgagccaggaggacctggaccgcgcggacgcggcggcgcgggagctggaggcggcggcggggtgccccgtcgacctcagcagggacctcgataagctgcagggccggtggcggctgctgtacagcagcgcgttctcttcgcggacgctcggcggcagccgccctggcccgcccaccggccgcctcctccccatcacgctcggccaggtgttccagcggatcgacgtggtgagccgcgacttcgacaacatcgtggagctggagctcggcgcgccgtggcctctgccgccgctcgaggccacggcgacgctggcgcacaagttcgagatcatcgggacctcgggcatcaagatcacgttcgagaagacgacggtgaagaccaagggcaacctgtcgcagcttcctccgctggaggtgccccgcatcccggacaacctccggccgccgtccaacaccgggagcggcgagttcgaggtgacctacctcgacgacgacacgcgcgtcacccgcggggacaggggggagctcagggtgtttgtcatcgcgtgacctgatcgcgcttgcggcgccgttctgctggtccgtgagattgccatccttcttcctccctgttgctccagtagatttgttggtttcttcgtctgaccaatgtataccgttctgttcttccgtgaactgaatctgcgattaacttagtaactatcttgtgtggtttacatgcttgctccgtccttatttactttgttaatttataatttgaactgattgccttgcaaattgcacctctaagaaacagggaaggtagcggagctgattggtattttttttgcttacccctttcatctcagttttgatgataatattttatttatcctctttcatcttacatttcggtcttccatgaattgattctaggatattaactgatattataatgtaaaatttgtagaaagttagatgcatagaactggaaaattgcaaaccaaaaccggtcttaactaagccaatcttattagttttgaacgttaaaaaaccaaaaatataataaaa

SEQ ID NO: 105606 - DNA, 531 bp, Zea Mays
atatttgcatccatcggccactgctagggttccaagaaattgggtgtgctgtggcgaccgggctttccctacgggctggtcatcattttcgggagcgtcgtggctacctccggtgctgcggctagcgcgactaggccagatcgacccagcgcgatgacggctgtgtgcggcgtcctcggacatcgctccgccagctcaaatctccaagcgctcgagctcgaaactcctccaaccggtcatccgctgccagcaatcgacctccatccgcagagcactcaccgaaaggtatatccttccccaaatcgattctacatgtgctattatgtgctcatacggcctgctcacctcagccagtataagaattattagattatacccggctccaactataaggagactctaactccgctactagtttcaaatcttagcacgccccctgccacacgctaggataatactttttcaaatacttaccgttgagtgctttgggtaatttctttccttgcaaatcctcaacgaaatatgcatttc

SEQ ID NO: 105607 - DNA, 1089 bp, Zea Mays
cttgggagttcagctccaagccgttcgacgagagagacgaccgaacccggccggaaggggaggagcgggaggaccgcctgcgccgtcggtgagctgcaagttaggctttcaaagaatgtggaggagtgtgtggactttgcgccagagggaggtaaggtggtggtgagtgctactccaaaaggccactccgatggaagtcatggtgttgagcttcctgttgctctgcaggcattggagattattgatgccctagactatgggatggcaaaaattgcagattcgatgatgaagcatattctggttccagcaatcagtaacatacatgtgtcagtgcttgtggaatgtggtccagaacacactgtatcagtcttgagtgtagtccattccgaggaaaacaaagacaatagagatggttcaaatctgtactcaagaatagttgatgtcatcaagtttgtgtgcaaattcatctgcatggaaaatagcaagtgggttcaattttttgcgaagttaacctggccaagaatttctgatctagttatcacacactttctctccaaggctgtaccaaatgaggcatccaagctaattgagttccaagatgtcgtgcaaagtacaactgaattcgagaacaaacttaggagcatgatgtttcttttgcctgatagaaaggatggcaagctgacccaatttgttgatgatgttgaagttcattttgctgtacggaagagaagtgaaatcttggtgaaagcaaggaacattcttgtacaatatgattatgatagtcctctggaatctggtgaccaaggtgattctgttgttgatctactttttcagccagagaagtgttttacatctaaatcagcacttctagtaatgaaattggttcatggagccctcaaggatgcatctttgtcatcagcaagagtagctaaggagttctgctttgctgctagggatgttttgctcctttatagggctattgtgccggttcagctagagaagcaatttgatagcttaagtcaagtggctgctattgttcacaatgacttttaccatttgtcccaagaaattctgggccttgcatttcag

SEQ ID NO: 105608 - DNA, 1887 bp, Zea Mays
attccaccaaccaaacgtccaataataggatgcaacttgaaaacaaattcaagcttgaaaattgaattcctagggcaaagatctagaagactcaaaatggttagggacaatatggtaaatctaatgaaatagagatctcaagttctcaacacgagctcaattccttcccgcagcgcagttgctcaagtcagcaaactgaacccgtccggattcgtgcgccgccgagcacccctcgacgccagcggcgatggcagccgacgacgtgcgcgagctcctcctctccaccacagccgacgcctctgacccgtccacgcccctctcagcgcccgacctccgcctcctcatcgaccgcctacgcttttgctccgaccgcctgaacgcctcggccctctccttcgctgcctctaaccgcggggtcctcgctaatgctctcctccgcgcagcctccgccgccgattcctccgcctccctcgagtcttccctcgactccgcgcttgccccgctcgcctcctggcccgacctctccgacctcagggcccttgccgaccgcctcctcgctgcccgccgcgagctcgctgagcgccaggagcacctagccgctgcctccatgattgcctcgctttcctcccgcctccgcgaggcccgtgccgcagcgagcccccttgacgcggccgctgccatcgctgaactcaagaccctcctgatcgatctcgagcgatctggatctggtcaagacgacccggtcgtatttaggctcctcaggagcgactgggagcaacttgtcgatgaggtgatgatgaaattccgctttagaatgattcagcttatgtcagggtttgcatttgtgctaatgctaattgttgttgggttgtggttatgatggtgatacagctgcaagttaggctttcaaagaatgtggaggagtgtgtggactttgcgccagagggaggtaaggtggtggtgagtgctactccaaaaggccactccgatggaagtcatggtgttgagcttcctgttgctctgcaggcattggagattattgatgccctagactatgggatggcaaaaattgcagattcgatgatgaagcatattctggttccagcaatcagtaacatacatgtgtcagtgcttgtggaatgtggtccagaacacactgtatcagtcttgagtgtagtccattccgaggaaaacaaagacaatagagatggttcaaatctgtactcaagaatagttgatgtcatcaagtttgtgtgcaaattcatctgcatggaaaatagcaagtgggttcaattttttgcgaagttaacctggccaagaatttctgatctagttatcacacactttctctccaaggctgtaccaaatgaggcatccaagctaattgagttccaagatgtcgtgcaaagtacaactgaattcgagaacaaacttaggagcatgatgtttcttttgcctgatagaaaggatggcaagctgacccaatttgttgatgatgttgaagttcattttgctgtacggaagagaagtgaaatcttggtgaaagcaaggaacattcttgtacaatatgattatgatagtcctctggaatctggtgaccaaggtgattctgttgttgatctactttttcagccagagaagtgttttacatctaaatcagcacttctagtaatgaaattggttcatggagccctcaaggatgcatctttgtcatcagcaagagtagctaaggagttctgctttgctgctagggatgttttgctcctttatagggctattgtgccggttcagctagagaagcaatttgatagcttaagtcaagtggctgctattgttcacaatgacttttaccatttgtcccaagaaattctgggccttgcatttcag

SEQ ID NO: 105609 - DNA, 1018 bp, Zea Mays
ctgggagcaacttgtcgatgagctgcaagttaggctttcaaagaatgtggaggagtgtgtggactttgcgccagagggaggtaaggtggtggtgagtgctactccaaaaggccactccgatggaagtcatggtgttgagcttcctgttgctctgcaggcattggagattattgatgccctagactatgggatggcaaaaattgcagattcgatgatgaagcatattctggttccagcaatcagtaacatacatgtgtcagtgcttgtggaatgtggtccagaacacactgtatcagtcttgagtgtagtccattccgaggaaaacaaagacaatagagatggttcaaatctgtactcaagaatagttgatgtcatcaagtttgtgtgcaaattcatctgcatggaaaatagcaagtgggttcaattttttgcgaagttaacctggccaagaatttctgatctagttatcacacactttctctccaaggctgtaccaaatgaggcatccaagctaattgagttccaagatgtcgtgcaaagtacaactgaattcgagaacaaacttaggagcatgatgtttcttttgcctgatagaaaggatggcaagctgacccaatttgttgatgatgttgaagttcattttgctgtacggaagagaagtgaaatcttggtgaaagcaaggaacattcttgtacaatatgattatgatagtcctctggaatctggtgaccaaggtgattctgttgttgatctactttttcagccagagaagtgttttacatctaaatcagcacttctagtaatgaaattggttcatggagccctcaaggatgcatctttgtcatcagcaagagtagctaaggagttctgctttgctgctagggatgttttgctcctttatagggctattgtgccggttcagctagagaagcaatttgatagcttaagtcaagtggctgctattgttcacaatgacttttaccatttgtcccaagaaattctgggccttgcatttcag

SEQ ID NO: 105610 - DNA, 898 bp, Zea Mays
gaaattcgtttcattttgggtttggtactagggaatgccttaggatttgcactggaggaagccctgtttgtttcagtcggataatagtgcttttagcttttataatccctagatgaaacaaacagccagcttccgaccgtagattccagaatacaggaattttactggattgtagcacacctgacctgattgtccgttccactccccttcctgtgctaccacctcactttctgcagccaacaccaataaaatttcttatcggccatgttgtctgagctcatgtactgccttcagcggtccagccccacccatcatgctggtgcacttgctgccacctaccaccactgcccacagggggactttgtgaaaacccaagacaaccttaactcaccaagttgtggctggctgttgtgttcaagttctactaatgcgttctgtggcgatgggacaacattattgtgataatttagagtgtttactttctcataaaaactagtatggacatgaaaaaaaatctatgcctctatgtcctggattgatcttgtttagtgtttacttccaacaaaacaaaaagaatcaacctcatgctgctgtaatttttcctctcgggcaaccaaatcaaatagcactttttaagagagatttttcttaagatattttatgtgttttcaaaatgcaatgttttctgctaacctttctggatgcttttttccagtaccgtgcagattttcctagtgatctacagaaacaggttgtttttgtggatttagccccaatcttctcccagatggcggatgctatattgagaagacaaatacaactcactgttgatactataagtgaggctatagatggtgctgaaggttttcagaacacacaccaacctcagcattatgaa

SEQ ID NO: 105611 - DNA, 505 bp, Zea Mays
caaagcaatattcgctgactcgcctcttaggaaggagtgcctaggatggatcgttaggactccagcttagaatacagaaacagcatatttctgtctgtgggtcaatgatttttttttcatattcttttgtccaccataccatatagtgaagtattaattggtatgagctcagtttgcactggagacagacttgcaatctgactccccagttcaatactcaccccactgcctagaccttgactgatcagataaggctagcaattgtgcatgttaatgtgttattattgtctttttggtattgtgacattcccaaatgaccttaaccaagtgcaaggaggtgaaaaaggagggtggtgtgtgttaagaaacctttctttggccaggaaggctcatgtggcccatatgcctgaaattttagtttttgtttataaatagagaggagatccccatatcatgtaaccttagacaacaacaccatacactaataaagaatcagtccctctct

SEQ ID NO: 105612 - DNA, 562 bp, Zea Mays
aaaaaggtacgtacattcaactttggagtcaattacaaatccatttatcatcctaacatatgtaatacaacatgttgggggccttcggcttccgaaggtcctcaaaaacatgatttgacaatgttttccaagtgaaatttgtgaataggtatcttcggatttggatcatgagcatacagagcatggttaagacgaagcttgagccagacgaaagatgattatgacgaaggacaaggtgatcacgaagctgtgcgcagggaagctttggcatgacagcagaaaaggggaaccgacttaaagatgaaaaggcaaattagacctcgaaagattactatagagttattagcaaatgtaaagggcatgaatgtaattttacatgggctgcgtcccttgcttataaatagatgaacaatacccccgtactgttcacgttgacttggcattcgctctcgcgtcacgcttgtacccttgtttcccttcaagccgaaggtacatttgtaatttgttattgcttatacaagtaacgtaaataaaaataaattgataataatgtttaaagtaa

SEQ ID NO: 105613 - DNA, 106 bp, Zea Mays
gcgacaggagagcgggctcggtgtctaatgaaagctagcgtccgtctggcttgggcgggagtgggccttgtaaatgttggcaggccgattggtcgtgtggaccgaa

SEQ ID NO: 105614 - DNA, 1493 bp, Zea Mays
cgcaaatggaggagtgcttgaccgatgtgctgactggccgtggtcgcgagcaggccacccacggacgtacttcctccttcaacgacgattcaggtgccgactgcatcctcatcaacgtcggcaccaactgtaccgcggaagacgaccccccctactctgtcaccgccgccgctgaggtcgattctctccccaaccccaacgacgactgcatcgaggagttcagcccaggcttcgatggagagccaattttcgacgaggagcccaacgactccatcgccgagttcgtcgacgtccccttccacggcggcaggatctcaaccggtggtatccaccacccggcctccaccatgccgaggctgcacgcgagcgtggtcgtcgacgactgcatcgaggggttcgacgtgttggacgaggacgccgcgagcgccaacgcggctgacttcgcctccacggtgggggacgccacaccccaggccaccgagacgcggctcaatgtcggatgggtgcgctggctggaagggcggactggcccctacgacgacatcgcagcagcacaaaccctcttctccgatttctccgacgacgacagcgccaggacttgcgatgtcaccgacgtccccgttgtgcactccgcactcaaggtgttcgtccaaatgctcaacggcgggagtgagcatccacaagaggggatgcaaacctccatcgcgcggtgcgccaggatctccgcctgtgacacccaccagccgaccacctccatgtcgtggctgcacacacgcgtccatcgctccgtgcagacgccgtccttgcggggcgtcgtcggaatcgcccagacgagcggcagacccgacgcacgcagcctgatggacagctcacggagctggatcttcaccgacgacattggcaggctcgtcccgtcccgcgacggctccgtccacaccacactcgacatcggatgcggggtgatgagctggggcgcgtacctgctgtcatgggacatactagccatggcgttcgcgctgcaggactctcacgaggcgcaggtgcagttcacgctggagcatggcgtaccggccatgatcagcgtgctcgttgggaaggaggtagttgagggcggcgttgtgctgtgcaaggacgaagagcgccccaaggtgccacacgatggcttcagcgacgagggtctcaacaccttgcccaccaggtgtttgacgaattgtgttaacctcatacagaattgtttctcgcactcatgcagttgcagatgggattcggtgctacataagcaaccatggccaccacccgtgcagcccgtgcagtttgtgataccgggagatggtgttcaagtctggcttccgccttggccaccacctgtgtgggaattctggctgtcactgaagattactggtccacagatgatgcattcggtaggatactttggattgccagttatgccagcgacatgtattacaatttcagagattgtgtctggttcaagc

SEQ ID NO: 105615 - DNA, 186 bp, Zea Mays
atggcattggagcagttagaaggtgttgatgtcttcaagcaaacaaatgtctttgcccaagaacttggccatctcacatatcttaggagaataagcttctttttgcgtcataaggatcccaaggaatttgatacagtgggaagcgaagatttgaggtttccatatgatcacaaagacagaacctaa

SEQ ID NO: 105616 - DNA, 440 bp, Zea Mays
cacaggccaatccagttgaaacaatgcttggctttggccatgtacttgttcggccatgacgtcgactagctacggggttgtcggcctgctgctcgccgccctcacgccaccgcaggcggctggtatgatatggggagtctgcggcaacagcagcggcgagaactactacacggctaacagcaccttcgccgggaacctccgcctggtggccgccgccctaccaagcaacgtctccacgtcccctaccctcttcgccatatcaacgcggccgggacgccacccaacattgtctatgccatcgggcaattaatgcatcggcgacctcagcgccgccgctgcctgccacgagtgcatggcgattggcgttggcgaccatcatatctttgagaaggcgcaggagatatgccccccatgcatacaacaagcgtatggccatcttc

SEQ ID NO: 105617 - DNA, 1148 bp, Zea Mays
tgagaactaagcctctggacaacccgccggccgcatgtatatatatatttgtgaactcgcggacacgctcgtgatctccaacgaacaaaaggcagccagctctgctctggacctgctgtctgtctccggccggttccgtttccgtcctcgtcaatggcgaagcgaacggaggcgaggccggccgccgcgcggccgcgggcgtcggtgtcggtgccggcgttcggcgggtgggaggcagcaggcggcgcggcggcggcggactactcgctggacttcaccaagatccgcgccgcacggatgcagcgcaggaaggcgctctcctggtccagcttcgtcggcaacagccccgccgtcgtcgtcgccaccgaggcacccgacagcggcgtcggcggcggcgaggaggaggaggaggaggagaagcggcagtggtcgtcggtggctgccagcgacgacgacgaccgcgaacgccgccgatacaggcacaggcacagtcaccggcaccgccgcctgcgcagcgacgacgacgaccgccagccgatccagcccgctcccaagggaaggagcaagttccggggctacctgtttggttgcgtgggtggtgggctatgatgactacaaataatcaagcccaaattcaaggaacaaaaataccatgcgtgtggatgtagagtttattcttgtaccacaaataatcagcccaaattcatctgtcagagatactcctgtacgcgtgcttatttatttatttattttcatttttggttgccgtgtaaatgtgttgtgaactcatattagcaacgcagatataatccgtagcatcatgtcatcttcgtagtctttgccaagggcttttttttcccaagagaacaaagacatgattcaaactaaaaatgccatcaggtgcagcgcagcctcaaactacaattggggaagccgaagacaaaactaaacgaattgaaggtttattgtaacaactcatctgctcatgtgttacaaacaagatccatgtggaaccttaggacccatctaacatctactcaagtattacagtgatagcataagaacacgcggcatacacatttccacaccgtcgtccatatccagcctcaggaaaccatccagcatcatgaaacggaatatgcagtcct

SEQ ID NO: 105618 - DNA, 106 bp, Zea Mays
taaaatgcactacatatctaaataaaggcacactaagtttctatgtaataaataaactcatagcaataggcatactccgttgatgcaaagaaaaaataacaaaaaa

SEQ ID NO: 105619 - DNA, 2133 bp, Zea Mays
acatacggaccccgatggaacggcctgcgtttgtccctgcgggctgcggccctgccttttctcccattcccctcgccgcgtgacacgcgctctccctctctcccgagtcccgacgaccgggcaacagccgccgccgccgctcagcctccgtcgggcccttcgccggcggcgaacaccatcaggtgtacatgcgtacgcccatgcccttggctgcgtccgcccctgcaagtggtttcctgctggtctgtgtggatttggctgccggaagattgattgatgcggccttcaggatcactgtagactcgctgtgagattccaaggctgatcaggtcatgttgggggaccagtgcatcatacaggcgttagactcggttagctcatcaagctctgcggcctctgcccctgattcgaccctctccggagagcttccttctgtgagcaggaactgtgtgattgggagcctgcaggtggcgcgggcgcagaaggggggacatgtggagggtctggtgaattgttgtcatagcaagaagaagaagaagaataggactggcagtggtttgtgggattctgcaaccaaatcctgggcttctggcatggggggtgatgatgagaacagtgaggccaacatgagtgagctcatcggcaggatcggccgggagttggccatctcgtgcctgctccgtcttccccggtcatactattacgatgtggcatgtgttgaccggtctttctactcccttgtgaggtctgggaacctatacaggctgaggcgggcggtggggattgccgagcagatgatctattgctcgtgcaacgttctcgagtgggaaggtttcgacccgtgccgccagcggtggttcggcatcccttccatgcctcccatagagtgcttcatgctcgctgacaaggaatccctggccgtgggcaccagtatcctcgtcttcgggaagagggtggaatcccatgttgtgctgaggtatagccttctaactaactcctggaccacaggagagatgatgaacacgccgaggtgcttgtttggctcggcaagcttcggtgagaaggctattgtggctggtggtatcggccagagtggtccgttgagctctgccgagctttatgattctgagatgcagacatggactaccctaccgagcatgagcagggcgcggcagatgtgctctggtttcttcatggacggcaagttctacgtcattggtgggaaagctgagaggcacaacgaggtccttagctgtgctgaggagtttgatttggagaatggctcctggcacttgatcccggacatggcgcagggccttaatgggggaagcggtgctccgcctcttgttgctgttgtgaataatgagctttatgctgctgactatgcaaccaaggaggttaggaagtatgacaaggaaaataatgcatggatcactcttggactgttacctgggaggtatacatcagttcatggctggggcattgcttttcgtagttgtggagatatgctcattgtaattggcgcgatgagtgctggtggtagcggggtgattgaaatttgttcctgggtacccaataatgaacagccagattggaagatcattggcacccgccgttctggaagctttgtgtacaattgtgccgtgatgagttgttgacataccagggctactacattatcaactgtacatcttgaccaaaaggaaggataaagaaggcaaattctgctgagtctgttttgcttcttaatgggtaacttctgcccactggcattttaggctaagctgaaggtccgatagaacttctcgtgtagcttcttacttgtttatgtctagtctcttcattttaattccatttggaaggcctgcaattgaattccagaacgtgggacatgcagtgcagtattttagattagtaatttggtgcaacctcaaacattttgatcttccctgcctccctgggtaacttgatcaaattttctttttaagctccagagaatagccttacattggcaaatcatttgcccatagattgtaagaaataaaagaggaaagaaatgtctttgtggacaattgttgcattttccctttgtcttttcttggttaattgtgactggaggcaatgtgttttttt

SEQ ID NO: 105620 - DNA, 1204 bp, Zea Mays
gaccagtaaaggagttgcgcgcgaaaaagttgacgcgggagtggatgcatgggatttgcatgccaaggagactgtcggggaattgggcgcctacaggtcctgcaaggagggttttgcattttcccattgtaccacctgcaaggctccatattatttgagggttcattcccacactgacaggaaatggcgaacactgaagtttcgtttctttgttactagagatatactattcatctttgctctagtccagactgtcatctctgcattggcatacttggtacattttcttgatgggtaccagcaatattggttgaggacagcctggggttttgataaccaagttagtttttattacatatgtggtgcattattattttttgctctattgggactatcaggttgcttcataacctgttatgaccgaagagtacgaaatgatttggctcagccttgtcgagaattatgtctttgttgctgtcaaccagggatgtgtgcagattgccatctacctggcacgttatgcatgtggactgactgcaccacctgcttcgaaggttgtgctaccacagctggcgagtgtggtggttgcttgggaggtgctggggaagctgggctacctctgcttctcatcatgggggttattgtgcttgggcttttcacggtcatcggcatattctacagtgtcctggtcgcgacaatggttggccagcggatctggcagcggcattatcacattcttgcaaaacgaatgctaaccaaggtgagtgtgagcgctaccgtgtattcattatcacattctgtctcacctagagatggcaatgggtacccgcgacccgatacccgatgggtatttactccattagggtatgtatgtgggctaaatattctacccgtgggtctgttattgggcaaaaatcttcacccaatgggtaaacgggtattagaacgttccgccttcacccatacccgttaacccgtgggtataaaatacccaatataaacttagcccaagcatgaactttgactttagtcatccatcttttttactatttaacaaccttttaggccatgatgtcatagaagacttaacgacaatttaatgaccatgtaatggaacatgtaatatgctatgtagtactatcctagtgttactactttatccaattatctttggtgtgttgaatggatggttaaatgatgctag

SEQ ID NO: 105621 - DNA, 1154 bp, Zea Mays
gaccagtaaaggagttgcgcgcgaaaaagttgacgcgggagtggatgcatgggatttgcatgccaaggagactgtcggggaattgggcgcctacaggtcctgcaaggagggttttgcattttcccattgtaccacctgcaaggctccatattatttgagggttcattcccacactgacaggaaatggcgaacactgaagtttcgtttctttgttactagagatatactattcatctttgctctagtccagactgtcatctctgcattggcatacttggtacattttcttgatgggtaccagcaatattggttgaggacagcctggggttttgataaccaagttagtttttattacatatgtggtgcattattattttttgctctattgggactatcaggttgcttcataacctgttatgaccgaagagtacgaaatgatttggctcagccttgtcgagaattatgtctttgttgctgtcaaccagggatgtgtgcagattgccatctacctggcacgttatgcatgtggactgactgcaccacctgcttcgaaggttgtgctaccacagctggcgagtgtggtggttgcttgggaggtgctggggaagctgggctacctctgcttctcatcatgggggttattgtgcttgggcttttcacggtcatcggcatattctacagtgtcctggtcgcgacaatggttggccagcggatctggcagcggcattatcacattcttgcaaaacgaatgctaaccaaggagtatgtcgtagaggatgtcgatggcgagcgcacagactggtgtccgccgccgctccctgcagagcacatcagccagctgaggtctctggggcttctataatagctagggtactcggcgtggcattaccctacccagctgtacaggaggcgatacaaaagcaggaagtcaggcatactgcgttgaaatgtggcaatattgatatcttctttttttgtacattgtaatggcaacagtttcttcctgacaaccaaaaagttttataccaagtgaaatcacgtactttacgaagtctgcgtggcttctcacctctccaagtgactttgtcatgtttaaattcgcgtatcagcctatcggcctatcctccctcattcagaataacaattgacaacgg

SEQ ID NO: 105622 - DNA, 1076 bp, Zea Mays
ctgtggcctctgccttctcccagacacgcttgttgcccaccccctctgccttgtccttgttatgctcgtcactgacgcccgtgccttctcctggctgcacccatcacccgccgccattctcctcctggacgccgcccgccactaacctccttttggtagcgcttgtggcctgtggcctgccctccttctgggccgtggccgtctgtactcgcttcctcggccgccagtccgccacctgccgtccctcaggcagcacggctctggatctgggggcatgctgcctatccactgctgctcccttgtggaacactgatgtttacttgtacacaactacaagtacacatgcatgtacaccgtgctcgtcatatattctcacaggtggttgtaccaacatttgttcaatttcaggatgtgtgcagattgccatctacctggcacgttatgcatgtggactgactgcaccacctgcttcgaaggttgtgctaccacagctggcgagtgtggtggttgcttgggaggtgctggggaagctgggctacctctgcttctcatcatgggggttattgtgcttgggcttttcacggtcatcggcatattctacagtgtcctggtcgcgacaatggttggccagcggatctggcagcggcattatcacattcttgcaaaacgaatgctaaccaaggagtatgtcgtagaggatgtcgatggcgagcgcacagactggtgtccgccgccgctccctgcagagcacatcagccagctgaggtctctggggcttctataatagctagggtactcggcgtggcattaccctacccagctgtacaggaggcgatacaaaagcaggaagtcaggcatactgcgttgaaatgtggcaatattgatatcttctttttttgtacattgtaatggcaacagtttcttcctgacaaccaaaaagttttataccaagtgaaatcacgtactttacgaagtctgcgtggcttctcacctctccaagtgactttgtcatgtttaaattcgcgtatcagcctatcggcctatcctccctcattcagaataacaattgacaacgg

SEQ ID NO: 105623 - DNA, 982 bp, Zea Mays
agctcacttcgcttcgcttttccttcacgaaaacagagcaaatccggcgagccggtgcggcggcggagggagacgcctgctcgagaaggagcattagcaggaggcagcggagatggatccggacgcagtgaagtcgacgctctctaaccttgccttcggcaacgtcatcgccgccgccgcccgcgacctccagaaggaaatggtggctaaagacaaggctcaagcagcacctgcaagccatgatgaagttgatcttgatgagttgatggatgaccctgaacttgagaagttgcacgcggagagaattgctgcccttaagaaagaggttgagaagcgtgaagtgctaaaaaggcaaggtcacggtgaatacagggaggtaattgaaggggacttccttggggaggttactggcagtgaaagagtcatatgtcatttctatcaccgtgaattttaccgttgcaagatcatggataagcatttgaaggcccttgctcctgtctatgtgggaacaaaattcatcaagcttgatgctgaaaatgctccattctttgtagccaaactggcaatcaaaaccttgccatgtgtaatattgttcaagaagggtattgctgttgaccggttagttgggtttcaagatctcggaagtaaagacgatttttcaacaagagcgttggaaaacattctcaagatgaaagggataatcgatgagaagaagaaagatgacgatgatgatgatgaagaaagcgagtctaagaataggaggattagatcttcaactgctcaagattctgactcggactgaacatgagatggggattgaggattcaccctttttgcactttatattttgtctgttctgtactgcaattgatttgtgcgactcatgtatctataccagataaccagaacaaaagcatgtacaagagattcttaacttatctaacttatgaacacattctctcggaaaaaagttaaaccaaac

SEQ ID NO: 105624 - DNA, 122 bp, Zea Mays
tttgcttatttctattttgttattaatttatttcgtctttggtttaaaattcaaatacagtctgattaccaatattaaatgcacaatcttaaaaaaactcaacatgaaatacatggtttatt

SEQ ID NO: 105625 - DNA, 342 bp, Zea Mays
atggaaactgtagtaatgtatggacactttgctagttctagtaataagttcctaagaacgatgatgtatgcacgtaaaataggtggaaaatcaggcttccaggagacggaacaacaagtaatccgaatactggaactgatgcaaatggcaagcgaaggatacagcaaggcggacaggatgagtcctgagccgccttcacttgcatctgcctcgggcggtggaattggtgcgtccggtgcccggaagcttttattatacccaccaatgatttccgctgcagagattattcgtagtgctgaagtttctttgatactaaccatagaaaccttcgacaccatgtag

SEQ ID NO: 105626 - DNA, 1984 bp, Zea Mays
ccattccatcggtgtccgcttctcgcaggtcatgtgtgacctgcttggtgtggttgctcgacactctcctcaattggtgatattttcttttggagcccaagttcttcgtctaaggcatgactggacatggcattttggcgacatcagaatagcacatgctgctagtgttgtttgatattagagacactttttgatttgcttgcatgttttattttcagtttgaggggcacgagtggtcggacttgtttcagtttcagaaaactagggacacttcttttagtttcagaattgagagaagtgtattttagtttcaggattcataatgatagggacacttcactcagcatatgttcggttgtgattaaaaccatggttgtggacgttctccatagcatctttctactttattttagtttcatgattcaaaatgctagtgacacttctttctatttttattttatagaaagcaacattgtacatggcaggtctatgtaagcccactaggcaacgttttacagtgttgccaggtctatgtacagccggtctctagtgggcttacagtgttgcttccttgttgaattatgttgcatatatggcggggattaaccgaacaaacattttgagacaggtatttaaaccataaagatattaaatcccaaagggattaagtgaaaaggagggatccactcaatccctccctggattagatccacttggggaattaatccattgcaaccgaacaagcccttaaggggaaccaaaatttcagaagataggtatgagagttataaactattcttggaagaaaaggtgaggctacctgcacttgtttggatctcacagcaggaaacgagttgatgttgctaatccttcactaaaataggaaaactaggcagttttctagttaaattccatcttagggataggccctttgtagttagtacttacgaatgagatggacatgcaccctttctcttgatgcacacaagatttaatggtacaatatgaatacaatatgataacttccatgacatttcaaaatatatagttccactttagtaaaatagttttggatgcatttgctacaatttactgcatattcaaattgaggctaaccttgtggcgtcgataaccttgaggctagtcttttgtatgcatttgctacaatttagtgcattttctacacaaaggacgaggaggggtgggtgctgattcacttagtggcaagcttcgactactctcaaatcatcgacatcctgcttgagcgaagcatatcttatggtgagcgtgctgaacacgaaggacgaggagtggtgggcgctgattcactcagtggcaagcttcgactactctcaaatcatcgacatcctgcttgagcgaagtatgagactgacgcggcatatcttatggtgagcgtgctgaacacgaaggacgcgtaggggtgggcgctgattcactcagtggcaagcttcgactactctcaaatcatcgacatcctgcttgagcgaagcatatcttatggtgagcgtgctgaacacgaaggacgcgtaggggtgggcgctgattcaaccagtggcaagcttcgactactctcaaatcatcgacatcctgcttgagcgaagtatgagaatgacgcggcatatcttatggtgagcgtgctgagcacgaaggacgtggaggggtgggcgccgattcactccatggcgtgctccgacaactctcaaatcatcgacatccaccttgagcgatctgtattcggttcaagcggctttgatgcagctccagctgaccatcctcttgtcagtgggaatggttacgagcatacctcatgcactatttgctgagttaattggataagaggtttgcttatgcttgtatccttgatgtatgttcatatacattcgatatgtcacaaactaaactttagtgaggaaaaccaaacaccctctaaaaatgttgcaccacaagagatggttcctgcact

SEQ ID NO: 105627 - DNA, 789 bp, Zea Mays
gattcccagtaaaaaaaaataaatataatagaaaaatatgggacaaaaaataaatccactcgggtttcagacttggtacaactcaaaatcaccattcctttttggttcgcacaaccaaaaaagtttattctgaaggtctacaggaaaaataaaaaaatacgaaattgtatcaagaactatatacaaaagaataggaaaaaaggctcgaatagaaaaatggaatcagactcaagttctgaagtaattacacatatagaaattcaaaaagaaatcgatacaatccacgtcataatccatattggattccccaacttattaaagaaaaagggagcaatcgaagaattagagaaagatctccaaaaggaagttaattctgtaaaccagagacttaatattgctatcgaaaaggttaaagaaccttatagacaacctaatattcttgcggaatatatagctttccaattaaaaaatagagtttcattctgaaaagcaatgaaaaaagctattgaattaactaaaaaagcggatataaagggaataaaaatccaaattgcgggtcgtctagcaggaaaagaaattgcacgtgccgaatgcatcaaaaagggtagactacccctccaaacaattcgcgctaaaatttattattgctgctatccaattcgaattaggtatgaaggcagaggacatatacattgcattcatatgcattcattgaagtgatatttgcagatgatgtggttttataccctcagaggtatgaagatagaggacctacacattgcattccta

SEQ ID NO: 105628 - DNA, 3141 bp, Zea Mays
atggacctcgtggtcggcgcctccaacgacgctgtgaattccctattgaacaagctcgggagcctcctggcccaggagtacactttgatcggaggcgtcagcgacgacatccagtacatcaacgatgagttggccagcatgcaggccttccttaacaggattaaacaggaggcgaagcacgacgagcagcgccaggactggatgaagcaagtccgggaggtggcctacgacatcgaagactgcgtcgacaacgcccgccatcgcctcagtggcgagccccgcggcagtgggaggcttgccagcctcaagagggcatggtacctgctcaccacgctgcacgcgcgccaccgcatcgccactgacctcggcaacctcaaggcccgagcgcagaacgtcagcgagcggcgcaccaggtacggggtcgagaatctgggaaacccgccgctggtcgctgcaggtggtgggtcgacttcagacctggccaacgcccccgttgaccgcccagcaccccctcccgcgctcatctgtgccatggcacccgtgggcatcgaggacgccaaggaggagctcaagccatggttcacgttcatggatgatgcgaagcagcaggtcgctaatgatcatcagccgaggatccatgccattgtagggtttggtggcctcggcaaaaccactcttgccagggccttgtaccgcgaatttgggaatgactttgattgcagggcatccgttttggcgtcacagaagttccatctccccacggttctcagaagccttatcaggcagtttcacgaccagcaagcaagtgattccaagaatggcgccaagatggaggaattgggacaagaggcgctcaaacagctcctcgcccgtcacatacaagacaagaggtaccatatcttgatcgatgacatatggtctgtatcagcatgggaaagcattagggattctttgccaaaatgcaagaggggcagctgcgtagtggtgacaactaggttcagatctgtagctgaagcctgccgccgtcaacaaggccgtgtccatgagctgaagccactcgatgagtacaactcctacaaactcttccgtcggatcatcttgagtgctcctgatgtaccctctaatggtgcaagagctcttctgaagaaatgcggaggtttgcccctggccataattctagtcgcagggctagtggctagtaagctgagatcagcgtcagatgttgcccctaaagagaagaaggaccattcgactcaagtggactgggatgtaagtgaaaagttggatgaattcatggtaaaagtggagaagcaggacgttgttagtacccatatagaacaggacaatgagattattagtgaacggttggacaaattcatggtccaagtgggcgaggatttaagtgaggatctagagaaaaatctctccacagaaggagtcacagagatagtgaaccactgctatacccaattgcctgcagaccttaagacctgcctactctacctgagcatgtttcccaagggttgtttcatcagtagaaagcgtctgatcagaagatggatcgccgaagggttcatcgctgagaagcacgggaagacagtggaggaagtagccgaggactgcttcaacgagctcatcagcaggaacctaatccgagcggtcaacaacagcagcaacggcagggtgaagagctgccaggtccacgacatggtcctcgagcacatcgtcgtcaaatcaaacgacgagaacttcatcacggtggttggcggccactggcacacaccgttcccaagctacaaggtgcgccggctgtccgtccagaagagcgatcagccagagaaggagacggtggagaggatgaagctgtcgcacgtccggtctctgacggctctgggcagtttcaaagctctccgttctaccctgtccaagtttcagatactgcaggtgctggaccttgagagctgcaaggatctatccctgaccaaccagctcgacaagatatgcgggatgcatcagctcaaataccttagtctgcgaaggacagacgtcgaggagatccccaaggagatcggtaggctggagtatcttcaggtacttgacataagggatacaaacatcttgcagctgcctccatctgtcgacaagctacagcatatcgtgcatcttcttgctggaagcaagagcaagcggatcgggctggcattgactgaagggataacaaagatgacggctctgcagacgctgtctgggattgaaatcgctggaagctctacggccggtagtgatgatgttgccaggggtggatcatataaccaaggaacagacaagaagaaggaggcacagccaggctgctgctcaacaaccgcgagcaccaatgcaacagatggctatagtggccgctgctggcgatgcaaggcggctagcaaagggtcgacgagaggactgcatgccctggagaatctgacgaacctgaagaagctcactgtctacaggcttcggaccttcaccgagatggacaacgttctactggtgtctgccattgagcacctcagcagctgctccctcaaggttcttgctattgatgatgacttcacgggcttccttgacagctcgctcgtcgcttcacaggccccaccggagcacctgcacaccctggggctctccggcatgctgtccaaggtgcctgactggatcgtccacctgcacaacctggagagcctgaccctttccttgacctcgctcacggcgagcactttggtggtccttagcaagctcccagacctcttctctctcgttttcaccatggattctacgatgaagaagacgaacgtgctccagattctgcacaagggaggggagatctttgtgcaggctggagggttcgagaagctcaagctgctgcgctttgccacgccggtgctgccacctctgagctttctgggaggagcaatgccgaagcttgagagccttgagcttacgttcgtgacgatggcgggcgtgtacggcctggaaaaccttgcgagccttcggcaggtgctcctcacagtcagcagccacgcaccccaggttgccaagatgaaggtgtctcaaataaaggcgttgacgagaaagaatcccgaacaagcccagcgtggtcgttga

SEQ ID NO: 105629 - DNA, 1964 bp, Zea Mays
gtcaaaatcattttcatcttttttacatggacagacttccatgacaaatctcacaggtcacccttccaccacatcaccaccgcattcacatcgaacaacaacaacacaaggcgaggccgagtcgagtagcgcgaccacacacacacaccgcgtcgagtctcacacggcacggcagggcacgcgtcaaggcgatccgttccatgccgccgccgctgccgctgccggaggaggaggaggaggagaagccgctgccgcggcgaaagccagagccgaagccgcctaagcccaagcccaccaagaggcccaggccgattgggccgctgcctcagcgggacggggaccccggcggcggcgtcgccacgtcccctccgctcctcttctgcggcgacggctgctccggcccgtgcgcctacttgccccagtgccagccgccgcctccgccgtcccctggggccaccgtgcgcctccgctcgagccggctcccgaccccgctcgtcgcgctctcggcgtcgctcctcaccgtgtccgcggtcctcctgctcgcgctgctcgtccactgcctggtcgcgcggcggcggcgggcgcaaggcgcgccgctggcccaccacgccgagacgggagggggccaggttctggctggcgcggtggcgcagcaggccggcgagggggaggacgaggaggccgccggcggcggcgtgcaccacgtgtggtacatacgcaccaagggcctcgacgagcgcgccatctcggcgatcgccgcggtcgtgtacgacgccaagaagcgcggcgccggcgccagctccgacggcggcggcagctgcgcggtgtgcctcgcggagttccgccacggcgagacgctgcgcctgctgccgcgctgcgcccacgccttccaccgcgcctgcatcgacacctggctccgcgcccacgtcaactgcccgctctgccgcgcgcccgtgcaggtcgccgccgccgccgctaaccccaaccccgcaccgggaacgtccgggcgccgggaagagggtaaccctgctgctggcgccgtcatcggtggcgttcaaacacaggaccccgcgcgcggcggcggctttcctgaccgggccgtcaggcgggccgcgtcgtccatggcggcgctgccgcggcgggcgtggccggacgtcccgctgcgtgcgccggcgtcgagcagcttccgcgacggcgaggacgacgtgacggggctcggcaagatcaggcggctcctcaagctctcggacgcgctggagatggccggggtcggggtacaccggtccgcctcgttcggcgccgctacctgccagcgcttgccgccaaggccggggccgtcggcgcccggcgtcagcgccgacgagacgtcatagcgaaccgactgaggccgacgacgaggccatcggtggtctggtgaaacttgcagctttgggagctgggagcttggaggagtgaaggttggtgttggtttgccaagtttttgtgtgtgccgggcacgagacatgagaaggtaaaaaatgatatcttttccatgtttcttgtataatcgcttcgtcagcagtaacaagtaaataactcgtgagcctgtgcatgcactgcggagcgtcaggaattgtaagtaagaaagaatccttgacggaagtagttttgtatgcgaaatttacagcacgaatacatgtgtaagatacgtgtaagggcatgttcgttttggagcggaacgaagggaattggaggggctattcaaaattgaataggaaggtatttaatcctctccaatcgacatagcctaagagatcactcatgttcgttatgggtacatgaatgatctgaagttatatgttgctcagatttgtttcactcctatctagtttctctgtatcaaacatggccttttaaggccctgtttactattacttgagcttcaaaatttggtgaggtcgatgaagagcttcagaagatcgtta

SEQ ID NO: 105630 - DNA, 1784 bp, Zea Mays
atcaccaccgcattcacatcgaacaacaacaacacaaggcgaggccgagtcgagtagcgcgaccacacacacacaccgcgtcgagtctcacacggcacggcagggcacgcgtcaaggcgatccgttccatgccgccgccgctgccgctgccggaggaggaggaggaggagaagccgctgccgcggcgaaagccagagccgaagccgcctaagcccaagcccaccaagaggcccaggccgattgggccgctgcctcagcgggacggggaccccggcggcggcgtcgccacgtcccctccgctcctcttctgcggcgacggctgctccggcccgtgcgcctacttgccccagtgccagccgccgcctccgccgtcccctggggccaccgtgcgcctccgctcgagccggctcccgaccccgctcgtcgcgctctcggcgtcgctcctcaccgtgtccgcggtcctcctgctcgcgctgctcgtccactgcctggtcgcgcggcggcggcgggcgcaaggcgcgccgctggcccaccacgccgagacgggagggggccaggttctggctggcgcggtggcgcagcaggccggcgagggggaggacgaggaggccgccggcggcggcgtgcaccacgtgtggtacatacgcaccaagggcctcgacgagcgcgccatctcggcgatcgccgcggtcgtgtacgacgccaagaagcgcggcgccggcgccagctccgacggcggcggcagctgcgcggtgtgcctcgcggagttccgccacggcgagacgctgcgcctgctgccgcgctgcgcccacgccttccaccgcgcctgcatcgacacctggctccgcgcccacgtcaactgcccgctctgccgcgcgcccgtgcaggtcgccgccgccgccgctaaccccaaccccgcaccgggaacgtccgggcgccgggaagagggtaaccctgctgctggcgccgtcatcggtggcgttcaaacacaggaccccgcgcgcggcggcggctttcctgaccgggccgtcaggcgggccgcgtcgtccatggcggcgctgccgcggcgggcgtggccggacgtcccgctgcgtgcgccggcgtcgagcagcttccgcgacggcgaggacgacgtgacggggctcggcaagatcaggcggctcctcaagctctcggacgcgctggagatggccggggtcggggtacaccggtccgcctcgttcggcgccgctacctgccagcgcttgccgccaaggccggggccgtcggcgcccggcgtcagcgccgacgagacgtcatagcgaaccgactgaggccgacgacgaggccatcggtggtctggtgaaacttgcagctttgggagctgggagcttggaggagtgaaggttggtgttggtttgccaagtttttgtgtgtgccgggcacgagacatgagaaggtaaaaaatgatatcttttccatgtttcttgtataatcgcttcgtcagcagtaacaagtaaataactcgtgagcctgtgcatgcactgcggagcgtcaggaattgtaagtaagaaagaatccttgacggaagtagttttgtatgcgaaatttacagcacgaatacatgtgtaagatacgtgtaagggcatgttcgttttggagcggaacgaagggaattggaggggctattcaaaattgaataggaaggtatttaatcctctccaatcgacatagcctaagagatcactcatgttcgttatgggtacatgaatgatctgaagttatatgttgctcagatttgtttc

SEQ ID NO: 105631 - DNA, 486 bp, Zea Mays
aaagtcatctcgtgccattctaaatagaagcactactgatggcccaaaacaagatgattgtggtggttctcctccttgccacctttcttgtggtggcaagatcgttgtgggttccagaagaaccctcaaatgcggatgacataagaggtgcttgcatcgaggagtgcaccaaagaaaataaggctcctggcgacaagaagacatgcgaagtgttgtgcaccaagctcacaaaaaagcctagcgaagaaggcaaacatgattgatgaagtagcactccgataatatataccctagtggatcagtggtcatctttgtagccatgtctgccacacgatggccttgactatattgtcttattgttttgtttttggtttccactagtatcctaattccttgttcatataacctaatttcactcaaagcattttatatgcttcacttaattaaataaatacaaaggcaatggcatgttctgttttgatctaa

SEQ ID NO: 105632 - DNA, 481 bp, Zea Mays
catcccgtgccattctaactagaagcaatactgatggcccaaaacaagatgattgtgatggttctcctcctttccacctttcttgtggtggcaagatcgttgtgggttccagaagaaccctcaaatgcggatgacataagaggtgcttgcatcgaggagtgcaccaaagaaaataaggctcctggcgacaagaagacatgcgaagtgttgtgcaccaagctcacaaaaaagcctagcgaagaaggcaaacatgattgatgaagtagaactccgataatatatacactagtggatcagtggtcatctttgtagccatgtctaccacacgatggccttgattatattgtcttattgttttgtttttggtttccaatagtatcctaattccttgttcatgtaacctaatgtcactcaaagcattttatatgcctcacttaattaaataaatacaaaggcaaaggcatgttatgttttgatctaa

SEQ ID NO: 105633 - DNA, 486 bp, Zea Mays
aaagtcatcccatgacattctaaatagaagcactactgatggcccaaaacaagatgattgtggtggttctcctccttgccacctttcttgtggtggcaagatcgttgtgggttccagaagaaccctcaaatgcggatgacataagaggtgcttgcatcgaggagtgcaccaaagaaaataaggctcctggcgacaagaagacatgcgaagtgttgtgcaccaagctcacaaaaaagcctagcgaagaaggcaaacatgattgatgaagtagcactccgataatatataccctagtggatgagtggtcatctttgtagccatgtctgccacacgatggccttgattatattgtcttattgttttgtttttggtttccactagtatcctaattccttgttcatgtaacctaatgtcactcaaagcattttatatgcttcacttaattaaataaatacaaaggcaaaggcatgttctgttttggtctaa

SEQ ID NO: 105634 - DNA, 255 bp, Zea Mays
caatggtctttatgtagccatgtctatcacgaaatggccttgattaaatcatcttattgtttgtgttttggttccacaagtatcctaacttcttattcatgtaccctaatgtcactcaatgcaatttctatgatttacttaactaaataaatacgaaggcaatggcctgatttttacgatctaattgaaatatcgtaggttggtatacatctcaaaatttatatttctgttttgcgaatagaaaacaataaaaaa

SEQ ID NO: 105635 - DNA, 527 bp, Zea Mays
tttcgaccagaatccgccaccagcagctcctgctcctccgggctctccccctccgcggctccgcccggaccggctcgcagctggccggcgccaggggctccctcgtggcctcgcccaggactccaggaggccccctggcctccggctgcgctccgtgtcggtgcccggtggctccgtttgctcgccgactgccattgcgtcagacgccagacagcggttggcgacaatgctgcagcaggaaatatttggaccgccgggacggtttgcaaattttaggagtatgtagtaactcagaggagtatttcattgtaaaatggcagcagaattgaaatgttgctgagaatatgcagatccagccgttgcgatttgactgagaatttgagatacagcagtctattagattttcataagcctgtctgactgtgtcaaataaggccaattcttttttatgactaattgacctacaaaaccctgtttatattgaacttagtatcatccccactcatgatgaacaccccacaaactta

SEQ ID NO: 105636 - DNA, 3682 bp, Zea Mays
cttctactagtgccgccaattcaacttaactaaggagcttgctgaaggactcaacacacattgctacatcatgcgtacggaggttatcctggcagacaccattgaagcagctgcagaacgaattctgattgagatcagtagcgatgacacacatactgagagaagcaatgtgttctacttcgatggttgggacgggctgggcgcatctgctgtccttagagctgttgcccagcgccttgccacagcttcagaagccccggcaggcctcaagtttgatcaggtcatcaacatcgactgctccaagtgggtgagcaggagagctatgcagagagtgatcgcagaggagctggagcttcccgctgagtttatggagatgatagagacgcgtgatgaggaggacgactaccgtggtgaagaccagagctcccgtgatgtgattccacaagtcatcaacagggagatctaccaaagattacagaaccgtaggttcctggtgatcttttacaacggaagcagtgaggagattgatctagccaatcttggcttccctctgcaggacttgggcttccatttgtactcaagcaacaaggtcctatggacatttcaggggagtttccggctcatgcccatgacaaaagtcaccagggctctagggaccaccggtgttttcctatcagcaacctcaagccaagtgggtcaagacccacatgtgttctggtcctaccttgtgctgcaagaggctgcacagattgttgccagcaaggataacactggtggcagcatcatcggtgatccagcgcaggttgccgagtgcttcttgtacttactggatctatgtctcatgggtcatcacttcatagtggactatgacctggaaactcatggctgcaactactggatatgtgacggcatcatacatgtacaacatgggcagagagaggttgaccgcgacattggattgtggaaagctgttgaagctctgcagcgtgagatgcgaatggatgtggattactaccaccaccatgaccaccaagatatgcctactcacattgtcaagtgtgccgacttcagtccacgctggacttctccaacgtaccgtgtcgttcagatccttgagagggccacgcctgtcagatgcagtcttgatcattatgacaaacttggtgtcctcaagctatcctactgcacatttagcttctcatcgcctccattcctgtgctgccaaagccttagattcctatggctcgaccactgccaggacatgctggagagcggcccagatggagcggcacagatgtgggaggcagatggcatccagcagtgcttccaaaggctgtgggtgctggatgtgcgctacacatgctgtgatcagatcttgtctggacggatgctagagttcatgactcagctgagggtgctaaatgtgatcggagccgaggattgggacatgcgccagttgcaggggcagcttcctaatatctgcaaacttggagtagcaaagtctacaattgaatgtggtacaactctctggaatggtgacttgttggcagggtcgaaacacttgcggtttcttgacctctctggtaacgaaataatcagtagtggaaagagttgcatatctgccacagaaaaaagctgcagcctggagaccatcgtcattcatcaaggatgtgctggactagagaagatctcattggccgggtgtgctcagctagagaatgtactcttgacaggatcattcaatgagctcgtgagccttgatatctcaggatcagctgtgaagaggctggatctcagtgcgatgataatgctgaaacttaatgagctaattctactagactgcaacatgctacgtgcaatcctatggcctccggaaggaagagagagagaatatcctggcaagctgcgcattcgaacaaaaaaggagactaccataggcagtgctactgctccatcaggattgacaatgatgtttggtagtctagtccccgccgaatatttgtggtggtatatttcagtatacgatgaaaggctgctctggtcacttttgcccttaaaacagtatttcagttaccactttgtacatttcgagatttcctctcctggtcgccgaccagatggcttggcatgtacaagtgatgaaatgatcctagaagtgacaaccccagaaggttataacacgtcaatatatgtagacgtcgccaagggccaactgctacatgtgaagggagatgaaggtgattctcctatatccttcacaagggtatggccctgcccacgtgctcctgatttagtcccatcaaactgctacctgcacatacaagactggccacagggaagaaaaccacaacgaactagtcaaaaaactgctaccattactattccagatactatatgcaacaggactggcagcatacatgtgcacgatagcttgtacatcactcggatgccagacccagcaccttctggtgcaatctgggctaatcttttttggtgccgagtggagcgttgccctaaaatggattgtgtattcacaagttcgtccatggtaggtgctgagaacagggacgacaggatcttttggagactggcaacgctatgggtgtcccagcttcccaaggcacggttcatatggagctcgaggaaacacgagatcagcggttattcgtttctggacctagacttcgtgcatgtggacttctgcccccggttgacacatgttcttcccttgtccatggcattgatcagaggaagtggcctggacagtctaacaaccctagagattgtgtggtgtggagatctgagggcagttttccctttggacactgatgcccagagctaccaagatcatcggcgaaaccaggcaatcaccgtggaatttccttcccttcagcgtattcacttgcacgagtcaccaaagctgcatggcttatgtggccgtggaaggatgtacgcaccaaagcttgagagcatggtgatcaggggctgctggaacctcacacgcataccatccgttggcgatggcggcgaccgcattaccaagaaggtgaagtgcgactgtgagaaggagtggtgggacaggctcgagtgggactggcttgaagaaagacaccatccatccctatatgagccaactcatccaaaatattacaagaaaaccttgctcaggacctccgtgctcagatgagcattgctcaagcctaataatggtgatcgatatgggccatgaccagtgtgatgtgctgctctatatatgggccatgatctgtggtcaccagagtgtttgttcttcgatttcacctgcatgtgtgttttggttttgcttgttgtttttcaaatctgtgacatcgcatccacagaatattgttcacttgtttccatggtgtgtggacttccgatcttggattgtggtctgctgatctgcgtcgcaacgcgaactatctgcaaaatgtatcagctcttctcagtagacacataaataaatatgggtgagccaaaatgcatttggttagtagctggatgtgtttgccccctcataatatttgtaactctgtactctccctgggttttctggtgtggcgtgtatttgtcagcattgtgtaaactgaatgactgctcctactgttgtgcttgctcaagctacaaacatatatataaatggatctggacttttgtgtctgca

SEQ ID NO: 105637 - DNA, 688 bp, Zea Mays
gctgagcctactgagaacacacaaattaaagccttctcctactcctacatacgttgatcaatggctctcctgcgtgtcgtcagcacggctgtactgcctgccgcctgctgcgtcgtcctcctcctcctgtccaccaccacggctccggtggccatggccggttcgttgcgggatgactgccgcgcgttctgccgcccaaggtgcgagggctacggtgcggatttgtgccatgccctcgtcaacggtttcccgctactgcagaacgtcctcgaggcgacgtgcgcagagcgcttctacgaagtgtgtcaacccatctgcatgaacatctgcacggccaacaccctcactccggcagcggggccgggaactgccccgccgccgccgccaccatgcggcaagcaatactagctggctagctagttgatgcctccgtacgtacgtgttgttttatttgctgttaactcttaagtgtgtatgtttccgtacgttattatttaagttttaatttgtgttctccggtacggttcgtttcgcaatgtatgtgtctgtccatgtatgcaatcaaagcagctatgccgtgtaatttcgttcccctttggttgttccggttgtgttttttctgttcatgtatgcaatcaaagcgctattaatttattaaatatttctgaatctatttatgttgtaaatc

SEQ ID NO: 105638 - DNA, 378 bp, Zea Mays
atgctctgcgacatcgagcacgacgacgagcagatccaggccggcgacgtcgcgtgccagaagatcgccgccggcggccgcgactggggcgcgctgttccagccatccccgttcttcagcacgcacaagagctatctgcaggtggacgcggcgggggatgggggcgcagaagagctccgggagtggaagggcttgctgctccagcccatccccttcctgcgcgctcgccctcgctccctctgctggctcgccccttccccagccgcgcagctcgccggcgttcatcccgtgcgtcgtgccctgccctctgctcgctgcgtccggccggagctctctccttggctcggtcctgctcgccgtggagcttccccgctgtga

SEQ ID NO: 105639 - DNA, 2392 bp, Zea Mays
cacgcacgcggcccaaccaacctgccccaaaacctagctagatttagaaaaacaaaaaacctgtccccaacccgaaccgtgagatggctgagtacggcgagcgctaccagggcaacggcgaccaggccacggccgagggtggctatgcgcagaccgagtacgccgccggcgccggtggctcgccgccctccgacagcaatccctccgtgttctccgaccacgccgacggccgctcctcccagccccagcatgagacccaatcacatgacagtggttcctccaaatctcaagaaagggaccgagaacgtgataagggcaaggacagggagcgaggcagagaccgtgtccgcgaaaaggagaggggccgagacagggacaaggatcgtgaaagaggtgacagagacagggatcgtgatcgccaccacagggatcgtcgcgagcgcagcgagataagggaacaccgtgatcgttctgatgatcgtgaccgtcgcaggagtcatgattctgagaggagaagagatcgtgacagagatggccatcgtaggcatcgctcccgttccccttctaagggtcgtgaccgtgaccgcagatctagttctcattcacgctctagatcgaagagcaagcgtgtgagtggttttgaccaagcacctacacaacaggcagttcctattgttgctgctggtgttatccctggtcagctgcctggtgtcaccgctcctattcctggggttggggtgcttccaaacttgtataatttggctgcaggacagttcaacccccatgttattcagccacaagccatgacacaacaggctacccggcatgctcggcctgtctatgtgggcggacttcctccaactgctaatgagcagaccgttgccatattcttcaatggagttatggctgctattggaggaaacacagctggtccaggtgatgctgttcccagtcaaccaccgctatggcctaggggcttcattcagcagcatcctttggattgcaacatgatgagaaacattaatttttctaatgcatcctatggtccaacaacaatgtgggctcccattcagacaggaaatataagttccgaatcaaccatgctaccagccacacaatctgcagtatattggaatcattatatgaactttgtcaggaatcctcttggttcagttcaaggaaatccttttccagattcgttttcaggtacaaatactagtacacctttgcagggttcgaatacaataccttcaatacctgtcaacttggagtccgctgctgaacatagtgttcaggacatcaatagtcctataaagacttctgcccctgttacaaaaccaaagaaaacaaaggaacaaaattatactgctgctgaagaccttctactttgcacaacctggttgcaaattagcagtgatcctattgtccacactggacaaaggaagaagggactttgggcacgaatagaaaaaaggtacaacgaacaaaggggcgagtacccttgtagaatgaatcgagcccttagcagcagatgggacaagattagagcagatgttggtaagttctcaggctgttacgcaagagtgctgcgagagaaacaaagtggtttgacagacgacgataagacttccaaggcggcaactttgtttgcacatgaggagaacaaaccatttcattttatgcattgctggcataagctgaagggggaacctaaatgggagagcatttgtcaaggacctttccgaggattacatggaaaagcaattggatcttctggtggtccttttattggtgtagaagaatcagatagtgggtctgctggtttgactggtaaacggcctctctgtcgtgattcttctaaatcagagagaaagaaggctgcgtcatcaacgacgacggaatacttaagccgtcttcaagaattaactgaaaaactaattcagcgcatcatagaaaagggtgagaagaaatataagtacaatgaacaggacatggagctagagaagaagaggttggacttggaagcaaaaaaattaagcattcgtaaaagggaattgagattaaaagaactaagtatggccgaacaacaactcgagatgctggagcgtactcgtgaagacgaggtcgatccagaagtatggagtatgatgaaggagcgcaaaaaacatttgcagcagttcatatttagtttttgctaaatttactgttgtttaacatgtcgtgcttctgtttccatatccggtttgcgaagaaatttataagtgcattgtcttatttgctttctaaaacattataaagttgttgtatgcttatgtcttgcaagacatgtcagtgttattaaagtttgtaacgttaattctgaaaggaaatgggcattaactattttctataa

SEQ ID NO: 105640 - DNA, 631 bp, Zea Mays
cctgttggcggctatcagatattcagatagtgtatgtgacacctgttttgcttccggtagaagctacggcagacccacttgataaacttgagaggaaaagggtcatagtttattcaacaaagttacctggtccgatttctctattccatagatgcagaatgatgggtgcatacgagactgatgatcctaaaaaaggggacagcctgtgtatgtattctgaaggcagggacgaaccacatggtgaggagatgttagagcagatcactgatagtagcctttaccaacacatgggatccacatgtcagaatggaggatgtgtgagagaaaaaaaagatgacagttgctgtggtcccctttatttgaggggagatgggaggttttttggtgacaaaaaagaaaaaagagcaatctgggaactgctggagcgtctccaccaatatataacagttttatgagcatgaaggatgatattgccgaggtatgcattgatcgtatctgttatggtgtctgttaggtgtattggctatgaggtatgcttatttatgttaaacccatattctaactccagaattatcaagggagtattgttgcatttcacaagattaaacgggttcctcttcagtgtttgtag

SEQ ID NO: 105641 - DNA, 1473 bp, Zea Mays
acttacattggagaacatttaaaaaaggcatcatatgacgctacaacaaaggttgaagttgaatatagcaaaccaacagaatgctgcaacttccaggcacaaatgtaattttgaattctgatactgaaggagaagatgttgcaacttgcaagtcaatctatctactagaaatgaaatggtgaaaacaaaatcgttttgctgctggtcgtatccacgcctaccttaacacctgcccaccagtccaccacccagacaagctgaagccacagcagctcggccaagaatctgttgatccgacggtagaagctcttcgaaaagggccttatcgtcacaaataggacggcctgcaattttcacacgcatatacaaacggatcaaagaaagcttagcagattaggaagttctaactgaactaattttagatagatacaaaaaaaagctgcaattataacgaaaatttaacaaatcgtctagaagctttccataaaaaagacacatccataagcaaaatacgcctggaaccatcggggcaaaagaaatcacagagggaaaccttaatgatttgagtgagtttaataagaaggtcaaatatttaacacacatcacatcagctggaattaccctacaccgcgcgaccaccgtcactaatgaaacgaacagactacaaatgtccccggcgacgccttcgaaggaaacaaaataggatcttttgctcagccgccgcatcagaatagatcacccggccgcccaaacaggaaaacaaatcgagctggggcacggcgaggagggagggcgggtacctggatggcgttgacgatgaggccggacaggaggaagagcaggccgagcgggagcacgacgagcacgagcgggatcgccatcgccggccggcgccggcgccgcttccgatctcggagggtcagacggcagtcggcagtgggaaaagctccccgcggcgctccttctccaggcgatagtaggcggctccgccggcgacgaggaggacggggcacgcgaggcgcattcggaggttttattataggatgggggtggatggatgagcgctggccgctgggactgggacgagagggaggaggtggagtgtagcggatgcgtccataggtggcattggcagagcaacagccaacacgagaggatggtgtgccacctcagacaactcattttcttttcttttgggtgaaaatgttattttaatgttgtctccagcagttttctatcgtatctcatattttaaactttaatctataaataatatttatatcagatcttatattttaaactttaatctgtaaataatatcagaccgtgttttatccctataactttaatttacaaacaatatcagacggtgtttgtatcctctactttacatgatctattaaagacattttttatcgaagaagaatgaaagtagatctggataaatgtttttttatccatacaaatttattg

SEQ ID NO: 105642 - DNA, 2506 bp, Zea Mays
acgcggccacaccgcctactctgttctcctccccaccactgccgcagcaccgagaaccatggccgccacgtcgcccttctcctcgtacccccctcgcctacactccaaaaccttgaagcctcgtcattctcgcccgctccaccacaaggccgcgcccgccgcctccgccccgcgtccgctactcctctccttccccgcgcctgcacgccactgcggtgctgggctccgcgcttcagcggcgcagaaaaactctgctgattacaagttcgatgaagacgacgacgacgacgaggaggaggagtacgaatacgacggcgaagaggaggagtgggaggaggaggatgatgaggatgcgatgaacgtggaggcgatggaggaggaagcccgtggcgccgctgccgacctcgccaaacgcctcgctcgggagctccacatcgatgatgatgtcagggagaaacgaagaaacatcagggataagacatctgtgtctaaacacattccagataatcttcttccaaaggtggcaattattggtaggccgaatgttggtaaatctgcactcttcaatcgtcttgtcggaggcaatagggctatagttgttgatgaacctggtgtgacaagggaccgcttatatggacgatcttattggggtgatcatgagtttatggttattgatactggtggggtaattactttgtcaaagtctcaagcaggtgtaatggaagaacttgccgtcaccactactgttggtatggatgggattcctctcgccactagagaagctgctattgcaaggatgccatcaatgattgaaaaacaagcagttgcagctgttgatgaagcatccgtcatactattcgttgtggatggtcaggctggtcttgtggcagctgatatagagatttctgattggttacgacgcaactactctgacaagtgtattctacttgctgtcaataagtgtgaatctccacggaaagggcaaatgcaagcattagacttttggtcactcgggttttctcctctgccaatttctgctatcactggcacaggaactggagatctccttgacctggtgtgttcagagttgagaaaatttgaggtattggatgccgttgaagaagagaaaaataaggttcctgctattgccattgtgggaagaccaaatgtgggtaaaagtagcattctaaatgctttggttggagaagatagaactattgtcagcccagttagtgggacaacacgtgatgccattgatactgagtttactacagcagatggggagaagtacaaactcattgatactgctgggatccggcgcaggacagcagttatttctgctggcagcacaaccgaatcactttcggtaaagcgtgcatttcgagcaattcggcgctctgatgtggttgcccttgttattgaagcaatggcctgtgtcacagagcaggattataaaattgcagagaggattgaaaaagaaggaaaggcttgtgtcattgttgtgaacaaatgggatacaatcccaaacaagaaccacgagagtacaacacattatgaacaagatgtaagagaaaagcttcgcatacttgattgggcacctattgtctactgttctgcgacaaatggcaccagtgttgaaaagataatttctgctgctgctttggttgagaaggaaaggtctagaagactcagcacctccattcttaatcaagttattagagaagctatagcattcaaatcaccaccaagaacaagaggtggcaaaagaggtcgtgtctattatacaacacaggctgccgtcggtccaccaacattcgttctatttgtaaatgatgcgaagctcttccctgacacgtaccgccgttacatggaaaagaaactccggtcagacgccggttttccaggcacccctattcggttactgtggcgtagcagaaggcggccagacaaacgaggtaaatctgctgacagtagagcgcagagcccaggaacccctagtgaagtggctctagccgcctaactaaaccgcggcctccagaaatgctcgccacagatcagctcgaccactgggaatggaattctatcgaggcggcggcagttgcttgctccaagaacctggatcggctgaggagctagctgttcatggagtagcgctctcatgttcgggccttggagattttgttgcgtctatatactactagtacggatcagacggagaaagcacattgggccaatgaatgaatagtcacacttcaccgacagagctccaagcacgctttttccacagcgctcttggaacatgtaagattgtaccgaaagaatggcgttagaatgaccatgtaaatgtaatcgtagactgagttctcggatgtgtgggtaaacagcatacttaggtgccgtttggttgttttgtttacgaaatgtaacttaattggtaacggtaatatgttaggagtattttattttgaacgagaaaaaggcgtgcggactgccaattacatattca

SEQ ID NO: 105643 - DNA, 399 bp, Zea Mays
atggggctggcagatttggatcgggagaatggcgatttggatcgggagaagatgaggctggccgatttggatcgggagacgcgccgagcagtatcgacgtggggaggaggcgcgccgagccccgagcagacgacggtggggaggaggcgagcttggcgggggcgtcgggagcgcgtccgggtggaagaagatggtggggaggggggcgccaagccaagtgccggcggcggtggggagatgaagggcgtctggagcgcgtcggtggggaagaagatggtggagagggggggcgccaagcccagtgccaccggcggtggggagatgaagtgcgtcgggtgccgccgacggtggggagcttggaggggcgtcggggcacacgagtacaggatttgggtttga

SEQ ID NO: 105644 - DNA, 717 bp, Zea Mays
gacaataataccgctcatctaaagcggttagagaatgcttccgaaaacctcaagcttttcaaggctgatgtccttgactacgacgttgtggcggctgcagtcgcaaggtgccaaggagtctttcatgtcaccactcctgttccttcagggaagatcaccgatccagtgcgagagatgttgggtcctgctgttaccggcaccataaacgcactcaaggctgcgtctgctgcaaatgctcgtcgagtggtcgtcgtttcatccatggttgctgttgagatcaacccgaaagactggcccaaagacaagatcaaagatgagaactgctggtcagataaagagttctgcaggaacgaagagaactggtattttgttgccaagatctcgtcagaagaggccgcacttgaatacgcgaagcagactaggctggatgttgtgacggtcaatccagctgtggtcttcggccctcttctgcagccgacgctcaacacgagctgccagttcctcgtctacttcctgaaaggaggatctgatcgaatgagggacaagctttggcacatcgtcgacgtcagggacactgccaatgctctcctgcttgtgtatgagacaccacaagcctccgacaggcacatctgcgctcctcatttcatcagcgcccgtgacctgctggagctgctgaagacaatgtaccctgatgattaccctttcattagcaagtaa

SEQ ID NO: 105645 - DNA, 402 bp, Zea Mays
gggagccacctattgattcttttgatgtctctacatgtggccttgatttgctggatgacatcttgttgggttataaagctgaatatccaatgaatattggcattacagtagacgcattgaaaatatatgctaaaatattatgaatgttctttaccgcagttgctgcggaggaagccggcagcgcggctatggtcgttgagaagaaggtcgtcgcgtttgtgtagcttgtcgctgttgttgcgcacaaggcgggctgcgccgtggatgctgtctgtttgtattacttttggttggttgcattaaattttgtattgtgtgtttgttaatgcagttacttttgtattcagtgaactgtttggtaatgcggttccttttgtatttagtgaattatgtggtaatgcg

SEQ ID NO: 105646 - DNA, 703 bp, Zea Mays
gatttacattttactccaatgtttcatttttgttgcaggggaaagggtaaaccaaaatcaaaatcaaaggatacaggttcatggtttgatggcggcagaaaagccatgatccaactagctggagaacttttctggaaaatgggtgaagacctagatagcatcgcaaaagattatacagcttctcttgatgcttttattacgcagctgcccatgcaacaacacgtcgatttgaagttccttctcttccgccttgacttcattgaatattacggccatgtttcctccaacaaatgaatgtgaggcgcttatgtgaaaaactaggagttagattcaccatttggttgagactttactgaatgtgagccgtgttttctccaacaattgatcttggtcgcttgactgacaatggtcacttccattttccttgcacctcctgtataagaggatctgaatacccttttactgaggattgccaatgctagaatccagtgattctgtcagttttttgcatgttgatgcttatgttccgattcaacgaggctaaagccacgcatttcatgcaactctgtacaaaattgtaagtttgttttgatcatgattttcatggatgttctggtgtaaatttaatatatatttttctatattaatttcttgagaattaaagctggaggtcttgaagatttgtccttaacagtttgtattg

SEQ ID NO: 105647 - DNA, 2749 bp, Zea Mays
ttattacataaaaacacctctcggccacctccaccgcaccccgccccgactcctacccagatgccggccacggccagcggcggcgcgcggccggaggaggtgtcgcccgcaccatcggcgtcggcgtctgcgtcgagctgcatggggacgagggcggaggagctgacggcgaggctggcggccgcggggccctccccgggcgccggtgccggcggagaggaggtggagcacgagcgcgtccgcgcgctgcgcgagatcaagaaccagatcatcggaaaccggaccaagaagctgctctacctccgcctgggcgccgtgcccgcagtcgtggcggcgttggcggatcccggagcctcgccggcggcgctcgtgcaggcggcggccgcggcggggagcttcgcgtgcggcgtcgaagactgcgcgcgcgccgtgctggccgccggcgctgtggggtacctcactcggctcctcgctcaccccgacgagaaggttgtggatgcaagtgcacgtgctcttagaatgatatatcaatcaagattagctccaaagtttgatgttaatagggggaaaaacatgaattttgttctttctcttttggacagtgagaatgagaatgtcacagagctggctgctgctattatatctcactcttgtaagagtagtgcagaacaattggcactatgcagtgctggagttccacaaaaacttgttagcctttttggaggttctgtgaatctacgggatgcttgtttaggttctgtcactgtagtcgttcagaataaccaagatgttgcttccagatttgtaacaacggttcatggaaaatgttttcgttcagtagttgggttaatacatgatcggaatccaagcacaagactacttgcttgccgatgcttgattgcacttgggcatgcttctcctggccattttcaggacaaacagattaagaccaagttgattatggttttacttgagctaatcgaagaacctggtcacatcggagatgaagctcccttggcattaaccaccatgattaaagatagcttcgaactgcagaaacaagctcttgcaacgaacgcagttgagaagctcagcaaccatctgctagcgaaaccattggagacaaggcaagcagtggccatattgcttgcgttatctgaactttgctcaaaacttgaagagtcaagatctcaaatgatgtcagatgaggtatcaaccttactccttgatgcattgaaacatgattgggctgatatccgcgttgcagcatgttcgtgtctgaagaatatctccaggtcaccaaaggtacttagtggaggtcgattatcctgcgatacagttattggtcctctagtccagcttttaaacgactcgtgtacttcggtccaggttgctgcccttggtgccatttgcaatattgccattaatttgacacccaggaaatcagttcttcttaactctggggtcgtctcacatcttgttcatttgtcaaagtccatggatccaattttgaggctaaaatctgtatgggctctcaggaatattatgtttcttcttagtcctaaggataaagacttcattgttaaggagttgaccttatctactctttcaagcctcatatgcgattctgaacattttgttcaagaacaaaccctggcacttgtgcgcaatcttgttgatggatatgtggactctgctaattttgtcattggtgaagatggaataattatgaatgctattgcaagacaactgaacaatgcgtctgccccgggagtattcgttcagggtatgtatgtgcttgcaaacattgcggctggaaacgaattgaacaaggaagctgtgatgaatgttcttctgcctcacagagcagatcgcatcaaaccattgtttgcggtgaactttctgcaaagcaaggataaacaattgcgagttgccacgctgtggtgccttctgaacttgatttacccaaaatgtgaagcctcatctggtagggctgtcagactgcaaaatgctggagtgatccaacaagtgaaaaacatgataaacgaccactgcttggattgcaagcttagagcacgtatggtgcttcaacactgcgtgaacaatgcggatgattgtttcatgtgagcaaccagtatttcatcttggcaaccaaagtttatggaaccatattcagatcaggaaagaggaaaccagtgtgcttcagatctaatatattccctgaacagtggaacatgagcacctgcaggaagctttggctggtctctacaggtcttcaagagcacattttcgcaccatgataacctgacaaccggtatctgttgtgcatgttgtccattaccttgttgcgaccgtgctgtctggagaacttgagctgcctgctcgcccactgaaaggctctgggcgctagatccagaaatcccatttttcacagtgcctgccgaacctggtgcatatttttgcgatgttgactacttgagtatataattgagggactgctgttgctgttgtcggtgttgtacaaaaaattatatttctgatccaataaggcccgtttttcatgcactatgggttatacgttgtccatgaattcccatgtttcgctgaaaataaagaagacgcacgtttctatgcatgttctgagttggagatcaaagtttacgcctattatttcgtactgtttgcggttaactgttcttgggtccattgtgacgtcaagccaactacataaaaatttgtcgcttaaacg

SEQ ID NO: 105648 - DNA, 212 bp, Zea Mays
ctacttttctaattcaaatttggtattcaaattcaaaaataaatacaaatgcagcactcaaaaatctcaggatgatatgcaagattcattttatttatttattattttcttcatttaaggaaatgcttcaagcaggtaaggcactcactcaaagttcttattagaaaaatactcttttaaatgcataacctaattaaaatcccattcaatta

SEQ ID NO: 105649 - DNA, 1955 bp, Zea Mays
gcacagcaaaccatgcatactacagatctgcattctgcagtggagagctgctggatcggaacctccccggcgccgccatggccgcagcggtcactgctgctgtcttcgttctcttcgccgccatgagtactacgcgagcgcctgcggcactcgtcgagcaaaccttcgttgtgagccagatgagcatgacacacctgtgcagggagaccatggtcaccgtggtgaacgggcagctgccggggccggtgatagaagccaccgaaggtgactccgtggcagttcacgtcgtgaaccagtcgccccacaacctgacaatacactggcacggggtgaagcagcagcggaactgctgggccgatggcgtgccaatggtcacccagtgccccatcctgccgggccacaacttcacctaccggttcgacgtggccgggcaggaagggacgctgtggtggcacgcgcacgtcttcagcctccgcggcaccgtgcacggagccttcatcatccggccgagacgacgcgccgacgacgactcgtattacccgtttcccaagcctcacgcggaggtccccatcgtcataggggagtggtgggagacggacctggagcagatggacagggacttcgcgcacggccacctcgacgaccagcccagcgcggccaccatcaacggcaagcttggagacctattccgcgcctgcgagggggccggcgtggaggacgggtacgtgctggacgtcgagcctggcaagacgtacctgctacgggtcgtcaacgccgccctcttctccgagtactacctcaggatcgccggccacgtgttcacggtggtcgccggcgacgccaactacgtcaggccgtaccgcaccgacgtcctcgccgtctcgcccggcgagacggtggacgccctggtggtcgcatcagcgcgccccgcctcgtcgtactacatggtcgctaagcccatcctgacgccgccgccggacccccagatcccggcgttcgccaccagagccacggtgcggtacacgacggcgtacagcagcggcgcgccgaggtcgtcacgtcgtcgtcgtccgagatcgtcatcagatgatgacgctcctgtggcgcccgagatgccggacgactacgacatgatgacgtccttctacttccgcggcaacctgaccagcctgcgccggcaaccggttccgtcggcgcaggcggacgagcgtatgttcgtggcgctggcgctcgggtccgtctgccggcggcgaggccagcggtggtgcgagcgaggggacagcgacgagaccatcaccgtggcgaccatgaacaacgtctccttcgagctgccgcccgcggcggcgacgaccccgatgctggacgcgtactaccgcaacagaagcggcaacggcgtggacgacgacgacgacgacgtggcggtggtggtccggctccctgacgtgccaccgagggcgttcaacttcacggaccgcgcgctgcagccgacggggcccgaggaggaggagctggagccgacgagcagggcgacggcggtgcggcggttccggcacggggccgtggtggacttggtgttccagagcacggcgctgtggcagggcgactccaaccccatgcacctgcacgggcacgacatgttcgtgctcgcccaggggctcgggaactacgacgcggcgagggacgtggcgaggtacaacctggtggacccgccggtgaggaacaccgtcctcgtccccagcctcggttgggccgccgtcagattcgtcgccgacaatccagggatgtggttcatgcactgccactatgatttccatttgtccatgggcatggctgcagtgttcattgtggaggatgggacgacggctgacacttctctgcctccaccgccggcggtagtctcatcgtgtagccatggcaatgttctgatgcctggagaaattcttcctcaaagctaa

SEQ ID NO: 105650 - DNA, 686 bp, Zea Mays
gttattatgggcttgggtaatgtgagtaagcaccattgcatagatagccaatgatgttatgacgattatcttgttgctagcaccgatggggtggggacaaagctgaagcttgctttcgaaactggtattcaagatacaatcggcattgacctggtggcaatgagcgtcaatgacattgtaactctaggtgcaaaaccattgttcttcctagattactatgcaacgagcaagcttgatgttgatcttgcagagaaggttatcaaggtgattagggatggctgcgaacaatcagattgtgctctcctaggaggggagacagcagaaatgcctggtttctatgtagagggtgaatatgatctaagtggttttgctgtgggtgttgtgaagaaggataaaatcattgatggaaaaaacattgttaagggagatgtgcttataggtcttccttccagtggtgttcattctaacgggttctctcttgttagaagagtactggagaaaagtggactttctttggatgatcagctcccaagaaatgatggcataacaactacggttggtgaagctctaatggcaccaaccttcatctatgttaagcaggttaggtttgtttatgtgtttctatgcctcatatttccttcataattttacagaaattttaatttattgttttgtgaaataaaaac

SEQ ID NO: 105651 - DNA, 520 bp, Zea Mays
ggttctatattcatggttcaatcaaatcttttattgttttgcaatgttctttacaatatattcagtgctccagggaaaaggtgcctcactatcataaaattaacatcgctgatccatttattcttatgcacacaaataattatgctcatccaagcacttgtttacaataatcaagtttgagtttttatgattcttggattacagcagtgcacacgtgtacatatcacagtttttatgattctaggattcatctttcttccaagtaatcgctgatacattgtttctgattcatgattttttctggttctttcttgcagctgtgaaggacggtgtctgaggtcatttcatgcaactaacaattctggtgaagactatccaatcttaggacacaacatgcagcaattagacgtaactatcacgatccttctatagtttaacgagtattatgtttttctgtaaagcatagaaatacttattttgttaacgcatagaaaatcaatgacaaaaatgtagagttttt

SEQ ID NO: 105652 - DNA, 522 bp, Zea Mays
atgatccggccagcgccgtgggtgggcgccgggcaccgcgggcggggcggcgaggcgggcgcctgcaccgagagcctcggctccgagagtggcgacgtcggctgcgacgccgccgagatcgaccagttcttcccgccggcgccggctgctggcggcccggacgacgccggcgcagagccctgcattccggacctggcggcggcggcggcggcagggaaaaggcggcgcgggggcttccccccgccgatgccgcgcgcgtcggggccgctgttcctgcgcgcggagcgccgcggcggccgcctcatcctcaccgaggtgcgcgccgacgagcgtgagcgccgcgttgtgttccgcgccgagcgcgacggcggacgcctccgcctgcgcttcgccaacgacggcgacggccccgaggcggcaggtggtggtggcggcgccggcggtggaggcggggagctttgtcaggtggccgccggccggaggggcgtgcaggtcggcgcggtcatgatgggggctatctga

SEQ ID NO: 105653 - DNA, 470 bp, Zea Mays
atgagcaccaaggcgcccctcagtgtcagcaggccatgctggggtagatggtggaagagtcgccgtgtggtgcaccatcaacgggctcgtcgtcggagatcgcgccaaccagagatcaggaacagtccctggggttggcctggttcacgctccattctcgctgcttccaccgtgtgttcagtcatcgttcttcaagcgcatgcgagctggctcctatcttcaatgagctcgtggatcttgtcagcttcgatggggagttattgcaagctgctttatctagaacaatgcaggttgatgaatttaccacaacgctgctagaaattcatgataagatgacgtcgacaaataagaatgaggatatacgcttaggattgaaccgatcggagtatatgctagattctgaaaccagttcagtacttcaaattgactacctcatcatcatttcctggccttggctcccttgtcagtga

SEQ ID NO: 105654 - DNA, 228 bp, Zea Mays
gcatattatgtccgctacagcacagcaaaatataagcccatagtcaacacatggcctatcaacaattacgaacaaacgcgtacttcaaacataaatttctcttcccgccaacaattacaaaccactctgtcacgcctcacctggagctactgcaggtgcttcagtacacatgtagactaaaagaaaaatagttctgaaacgccaatcctctttacatcagccttggac

SEQ ID NO: 105655 - DNA, 1032 bp, Zea Mays
tctccttcaccttttccttggccaccttgacgccgccgccaaccatcccctccgcgtcttcgtgtccgtcggctttggcgggcaccgccttcgctctgttttctggtttgggggacccttctgttggttccggtggctttggacaaccagggagccttatgtctggttttttgatggcgcaaatcccttcgacgaccctttcttcacaaacccctttggtagcatgatgcagactagtttctcagcccctttgagcggcatgatgcaacctagcttcatgaaccccttcggcagcatggtgcaacctagcttgcttggaccaagtatgtttgcgccccatggcaatctcaatggaggcatgtttggaagccagacacatctcagtcaaggtatcagcaatggcagtggttttattcagcaggcccctgaaccaagcaggcctaaagggccaattatcaaggagttatcttcagatgatgaggatgatgtagatgatgatgaagaaggcgagaagaagaatggtaactttaggaagcatcaaagggaaagcaaagagccatatgtggaggacccagttgatgtagaagataatagaagacctaagcatggacaatttgggagggagttcagcagagctaacacatcacgtccacagcctcagacatttatgtttcagagttctggtgggcatgtgaacacccttcaaactttacacaacttgaatgaaggtttagttttttttcattcctggtgccttattgttttccttccaccttctaaacagatctcttgcttttaattctagcggagcgctgggtgctgtgcgggccgacgtccgagacgagcggcagcagcggctcgacgctccggcgcaggcgctcggtggtggagcggcagaacagggtgccctgcaccgcgtgcagcagctcccgcagggcctcgccagtcagctggtcgagcagcatccggtccatggtcgctgcagctagtaggtgagaccgagctcctcgtcgatcaccttcctctacttct

SEQ ID NO: 105656 - DNA, 879 bp, Zea Mays
ccaactaagctcttcaacagcagacaccatggctatcatctgaacccaaaacaacatggaaactcttgtgatgtagcaaggccatgagaatactatggtgaaaatcctacttcctctgatcttccagaagttagaacaaatatttatattttgtacagtagtcaagaagtgagaaaacaacatcctgacatgcaaatgaattcacttggcacaccaagcaatatgtatctataatattcgaaaattatctattagaaccgagaaatttcctagtgttaccctacataaaatgagagttttaactacctagaaaataattactagcattaattcagggttatgttatattaggcaacagatattcccgaagaattactagcatgaattcggaattactaacatggattagaaggccctagaaactcccagtaatagcatataatttatactgtacattttaactccttccctactgtttttcatatctgtctatgtagcaaataagggcggcagtggattcgtaagagtgattccaatgcccaaatgatgcagggcacctgcgagcatcaagctattaaatgtagctgcgcatcaaatccggctcaaaaacctaacccagagaagcaagctgcagctagcgagtacgcgacggaccacgcggcggtgggtcatgggggacgggagacccgggccacggtatgtgaggagaggaaactgaccttcagccggcgtagcggagcccgaggcgggcggatctccgtccgtccgctccgctccccaccagcgcagccgcggcgacgaggggacgggacctatacggcagcggcggtggatgtagaggaggatatggcggtcggcggaggtgagcaggagtggcag

SEQ ID NO: 105657 - DNA, 78 bp, Zea Mays
gtgtggaggagggggactgcggagggagcggacgctggacgggaggggatggactgggatggtggtcgtgcggagggg

SEQ ID NO: 105658 - DNA, 3848 bp, Zea Mays
ggtcacataagcatggtatattaataacaagaacaaaagcagttcataataatcccttaacttcgttccatcatcttgtaccccatttttaaggaaattgtcgtttccttttctatatgtaaaaaagtgatacataaggcacacaaatcacactctcttacaacttgccgcctcatgtagtgtagttagttcacacatacacacgtccgtacatatgtatgaataagaatatactcacacgtgcacgtgcaaaagaaaaaacaatttcacacacgtttacagtgttttacatgtagcagtttgtctgcgcgtgtgaccttatagactgttcccttcatgcttcatcaaccatgtctctgtggcgcttaatacccttggaactgagggggaggcggagatgcgtacttgttggccatgataggtggaaggatgatgtcattgaatgatggtggaggttgggattctgctggtggtggtaatgactgctcttctttcttcggcggggcaggggtgacaaccggaggaggagattttattgggggtggtggggagctaactggtgctggtggcggaggagacttcactggaggtggtggtgagctcactggtgctggaggtggcggtgacttcactggaggtggtggtgagctgatcggtgctggaggtggcggtgacttcactggaggtggtggcgagctgaccggtgctggtggtggtggagacttcacagggggaggaggtgagctcacaggggcgggtggaggtggcgacttgactggaggtggaggcgagctaactggagctggtggtggaggagacttcacctctggaggtggtggcgagctcatgggagcaggtggaggtgatgacttaggcgctggcggtggcgagctaactggtgtaggtggtggagaagactttacttctggaggtggcaagttcacaggagcaggtggaggtgacgacttaggtgtcgctggtggtgagctgactggtgccggtggtggagaagacttcaccgttggtggtggtgagctcacaacaaccggtggaggtgacgacttaggcgtcatcggtggtgagctaaccattgccggtggtggagaggacttaactattggaggtggcaagctcacgggagtaggtggcggtgatgacttgggctctgatggaggtgagatgactgttgttggtgccggtggtgtggatggcttcaccacttcaggtggtgagctcacatgcgcaggtgggcttgccggcttaggcgtcaatggtggcgagctaaccggtgcaggtggtggagaggacttcaccactggaggtggtgagctcacaacaacatgtggaggtgatgacttgggcgccaatggtggtgagctgagtggtgctggtggtggagaagtcttctctacttgaggtggtgaactcactggagcaagtggaggtgatgacttaggcgccggcggtggtgaactcacttgtactggaggtggagaagacttcacttgaggtgcaggcggtggtgagcttagtggcgctggtggtggagaagacttcaccgacggtggtgagcttactggagctagtgccggtggtgagctaactggtgttggaggtggtgaacttacaggagctggtggaggtgaagactttggtgtttgaggtggtgagctaactggttctttcggtggagaaggcttctccggagatgaaggtggtttagacggagttgatggaggagtaggcttctcttgtggtggcggagatggaatcagtgtgggtggaggtagagacttttctggaggcggcgatgacttcaccgaagtgggtggtgttgggtattcctctggaggtggggttgatttcgcaggaggcggtggcggtggtgacttctctggaggaggaggtgagctcacaggagtcgggggtggtggagatttcatcggtggaggtgaagatgccactggtgctggcggaggaggtgatgccactggcgttggtgggggaggtgatttcacaggaggcggtggtgatgccactggtgccggtggaggaggtgatttcacgggaggtggaggtgatgccactagcgttggtgggggaggtgatttcacaggcggtggtggtgaggccaccggtgctggcggaggaggtgatttttcaggtggtggaggtgatgccactggcgcgggtgggggaggtgatttcacgggcggtggtggtgagaccactggcgctggtggtggtggagatggtgaagcaataggggccggtggagaagtagtcttcacaggtggcggtggtgatgccactggtgcctgcggaggagacaacttcaccagtgacggaggtggggtggaggcagctggaggctgaacctgaggcgatggtgaggtagctggcggtgactttccgggtacaggtggtgttggcggtacataatcgtccgctggcggtgaatgaggggtcggcatcggcatgggtgcaggtgcaggcaccggcgaaggttctggaagcggctctggcgatacatccggcggtgtgtgcggggatggcatgggcgcagacgcagcaggcttccctggcaccggcgacgacggcggccctcctccgggcgtggggtagccagcgcacacgtgcttgctacagtcgacggggcgcgcaagcacgggggcgcactgcagcgcggtcttctgcgccgggcgcagcgcgccgaggcagttgtccctgtcgtcgaggttgacgagcgccttgtcggacggcatgcacacggcggcctccgagttgaagaagttgaaggcgaagctgaagttgacgagcgccgggagctcgcagatggactcgtgcacgatgccggtgaaaacgttccgggacacgtcgagctgctccagcttggctatgttggagagctgctcggggatggtgccgacgagcatgttcccgctgacgtcgatgacggtggtgttgaccagcaggcccatctccaacggcaggcacccgtcgagcttgttgttgaggaagatgatctcgtccagcgtcttaaccatgcggccgatgctcttggggatgcatccgacgaaggcgttgttggcgaagacgatgacggacgccgtggaattgccgaggttctcggggatgggccctacgaagcggttggtgttgacgaagatggcgtcgaggtctttgtcgaagagcgccggcggcagctcgccctcgaagtcgttgaaccggaggtcgaggtacttgagcgacaccatctcgaggcagacgtaggggaagacgcccacgaagcggttgttgctgacgtcgaactcgtgcagcagcgacagccgcgacatgctcttggggatgatgccgcagaagcggttggtgttgatgtggaagaaggcgaggtcggtgagcaggccgagctccggggggaggtacccggcgatgtcggcgccgttgaggtcgatcccggccacgaccgtgatcttggggtcgtccagcgcctcggtgcagatgacgccattgtacttgcacacgtcttcgccgacccagttggcggtgtagcccttggggtcggagtagaaggcgcggtgccaggcctggagcgcgatgtacgcgcggcggaggcgcgggttggggaagttggcggcgccgacgcggtcgtcgaactcgaagtccgccggtaggtcgccggcctcgccgccgccggcctccttcatggccagcagctggcggtgggcgatgtaggaagcttccgcgctcgtaaccgcttgcacgctgcaggcggacaggcaagcggccaggagtagcagcgccgccatgaggcgcccatcgggcaggagccggagaggagggtccat

SEQ ID NO: 105659 - DNA, 536 bp, Zea Mays
taataatcccttaacttcgttccatcatcttgtaccccatttttaaggaaattgtcgtttccttttctatatgtaaaaaagtgatacataaggcacacaaatcacactctcttacaacttgccgcctcatgtagtgtagttagttcacacatacacacgtccgtacatatgtatgaataagaatatactcacacgtgcacgtgcaaaagaaaaaacaatttcacacacgtttacagtgttttacatgtagcagtttgtctgcgcgtgtgaccttatagactgttcccttcatgcttcatcaaccatgtctctgtggcgcttaatacccttggaactgagggggaggcggagatgcgtacttgttggccatgataggtggaaggatgatgtcattgaatgatggtggaggttgggattctgctggtggtggtaatgactgctcttctttcttcggcggggcaggggtgacaaccggaggaggagattttattgggggtggtggggagctaactggtgctggtggcggaggagacttc

SEQ ID NO: 105660 - DNA, 759 bp, Zea Mays
gtctacctcccacgcccgacacgaactcggcaaccatgctcgacgaactccgatcgagccgccccacacagacagactcacctcaccgtacctataaaatccgaccgagacccccccccccccccccctcgaatcatccaaacttagagccttctctgctgccgagaccgagcgtcgccgccgtgagaactcgagccgagagccggagccgtatctatctcgcgcctgcaccatcgatccgacctcggcaagtggtctagaaacttctctgagcaagtagcacctgtgtgcgatctattggagcgagatccaaacagagcagagaggaatcactcactggagttgggattcccgccgccgagccgcctcgcgtcgtggacagcaccaccgctgcctcgaacgacggtgagaatgcctcgggtagcttctctttgttcttggcattgtgcagcacctagtcatagtccaatctggaaaagccgaaacgagtggcatttttcaaacagagatccctccgtgctccgctgtactcaggaatttagtagagaattgcgactaatcattcacagagcacggagagaattcgacacctcaatcccgaactggctaaatttgtggcaaatatagaaatagctcttcctttttctttctttttctcttctttttattgattgtaaaaggaccagggcctaacctttaattttcgctttctaataaaatgcgcagtaggggtttccccctcctgatccttcaaaaaaa

SEQ ID NO: 105661 - DNA, 1027 bp, Zea Mays
cacatcctcaccacggctccacccgttccccccaccccgctaatctcgccgccaccacgccgcgcgagcgccgcgcacgcccccgtcttcgctctctccccagaatcgcctcaatccctgctctctcctcgccccatcctctcgatccggtaccgccagaggctccaaccccaggcccaacgccggcggcgaggaggagttcctcctcgtccccgcgacccgcctctccgccgagcgctccgacgacgcgcccggccagcctgtgctcctctcccgcatcttcaagtccgagcgcatcgagctctcggaggaccgcctcaccgcggccagcaccaagggcttccgcatggtgcgcgcgacccgcggcgttgcggcaggggcgtggtacttcgaggtcaaggtcgtgcacctcggccccaccggccacacccgccttggatgggccaccaacaaggctgacctccagacgcccgtcggcttcgacgcctatgggtttgggtaccgtgacgtcgatggcgccaaggtgactaaggcttggagggacaagtacgctgatgaagggtacggggaaggagatgtcctggggttctacatttctctgcctgatggggagcggtatgaaccgaagcagcctgacctgattcagtacaagggaatgccttttcacgtccaagtccccaaggaggagcagaagacgccggatcctgtccctggcattagcataaatcatatgaaggaagtagattcacatgcacccgtgaagcaaaagctacaattatttccaataaatgaagctactcttaagccatttgagaaggttgatttattagacagccctattgccagactacctgacatagataccacaacacttggagccacatatgtttctagcttagatgcaggagtttggaccaaggaacagttatttgcagacttgaatggtttgcatagactatcccatcaacatagacacttggagaagctcaatttccgatctgcagctttgctagagaattttgattag

SEQ ID NO: 105662 - DNA, 1905 bp, Zea Mays
aacctcccgtttgctagcgggggtcgttggggtcggtggtctaggtatataacccgatgtagggctcctctcgccgacctggaaggtaccatacaaattactgtcgagcaaacaacccagagcgtttagagagacagaagccagggagaaggagcggaagagccgccgcggtggaagccaggacacgggaaagctttggacgctaccaattcagcgaataacctacgggggtgcgtggaattgagcaaaccctccgccgccgaaccaccatccgctgtgagcagtgcacgctagcgtccgattcctgaacaccagggctcggctcaccgccaccggcatcaagcgccggcatcgctagggtttcacgcccccatccccccagggcgccgtcgatcccggtcggccatctcccggtgcgcacgtggtaactgatcgttaatttcatcgatcgatcggtgccatggaggaccgcagctccaagcaggcaggcgtggccgtggtggccgacctccacgacgacctccttgtggagatcctctcccgcgtccccgccaagtccatctgccggttcaagtgcgtgtccaaggcctggctcgacctcattgccggtcccgaccaccgtaagaagctccgccaacccatgcagggactcatcttcatgaatccagagaaggaccgccacagcttcagcttcctggacctgccactgacagtaggatccgtgcctctggacgttgccgaccctgcaggcttcatctccttcctgacggaacagcctgggatccatcgcctcgtcttactggattcctgcaatggcctgatcctattccagcaccttatggagctgccgcactacaacagtttgggctatgtcgtgtgcaacccgaccacgaagcaatggcgagccgtgcccgagcccgactgcagctcccatgtaccaataaactacacatatttggcttttgatccgactgtatcctcccacttccacttggtccggttcaaaaagaatcgcgagtacatggagcccatgtcggtgcatgcttactcgtctaaaactgggatatggacctatagccaaactgagaaagaagaagaagagtggcagaatcaggtctacttatctataagcaatcgatgcgcctttgttaatggcttcctgcatttgctagtttggggctcgaacaaaatgcagatactcattgtagatgtacaaggacgtccaagaaggatgatcagactgccagacgtggctgctggtaattgtgagggatgctactgtgtttactttggccaatcccaggggcatctgcactgcattactaaacaactattcgacttcaacgaagagaaatacgagctgtccatctgggctcttcaggactacgatgcacaagagtgggtgctcaaggacactgtgagctccctccagctctttggaggaaattgtcccacaagtgtcgcattggagttgtacagcgaggtggccagcatgcatctcgatcgcaatgtggtcttcttcttttcacactgtgaacggagattcatagcatatgacatggacagtaaggaagtgagtgttttcagcagttccaaagctatacacaggtggaaggttggttgctatgttccttgtttctcaccggcgcctctcaaataagcactacaaactattagtgcgtggtctaatacaagtatgagctgctagcaacttagttagactgtaataaggtcaagtgaagtatttcgtccatgagtgtttggtctaattagttccgcaagcctgttgaggcatttatatatatatgtagtctatatttatggatgctagttaaattaatggatacgttgtatgatttatgtttttggctatatataagttattatatgcatgatttatatgct

SEQ ID NO: 105663 - DNA, 1512 bp, Zea Mays
gctgcatgtgccagtcagagaaatataatactactagcaaacgatgtcgatatgacagtgatcggctagtagagaaagaaacaagaaaggggccagaccacaagtgatggggcagagtttgaacatcccagaagcaaacgattcggcaggagattagtcatgggcgccaaacgatcggcatggaatgatgccccagtcacgatcgatcacggcatgaacgcgcatccgatggccgttttgcgactaaacaatagggggcagtggttggacttggaggagaggaacacgtacaaatatgggcaggcactagctagctaggctgcaaagagccaaagactgccggcaccgctgctagcttgctagcatacttcccctacacgcgcgcgcaaccgcaagcagtcgatcgtcgcatggcgccaggaggcagcggcgagcggtggagcctggccggcgcgacagcgctggtcaccggtggcagcaaggggatcgggcaagccgtcgtggaggagctggccaggctcggcgcgcgcgtgcacacgtgcgcccgcagcgcggcggacctggaggagtgccgccggcggtgggccgagaaggggctccgcgtcaccgtctccgtgtgcgacgtcgccgtgcgcgccgaccgggagaggctcgtcctggacacggtcagcgcggccttcgacggcaagctcgatatcctggtcaacaacgctgcgctgctgctgctcaagccggcggcggagtgggcggcggaggactacgcgcggatcatggcgaccaacctggagtcgtgcttgcacatctcccagctcgcgcacccgctgctcctcaacgcctccgtcgccggaggggcgagcatcgtcaacgtctcctccatcgccagcgtccttggcttcccgcaggaagttatgtacagcgtcaccaaaggaggactgaatcagatgacgagaagtctagctgtggagtgggcctgcgataggatccgtgtgaactgcgtcgcgccgggcgtgatcatgacggacatgggtaaagagctaccggcggcgttggtggagcaggagcggtcacgcatcccgctgcggcggaccggcgagccggaggaggtggcgtccctggtgtcgttcctctgcatgccggcggcgtcctacgtcaccgggcaggtcatcttcgtcgacggcggccggaccattagtggcgcctgatcgacgacgacggccagctatatattctctattctactgtatttgaatttgttttcgttcttgatcggccatgtatcaccgtcagacgtcagcggcaataatccggccgccgtcagctagcgccatgcaagctgcccgatcatgcaaggtgcagacactgtcgttgcctgcagttctgttcctttttctactatggtttcttgtattcactgcccactggtgatgtttctgtgataacgacttcgacagaggggatacattttaaaatccttgtgctaatcagtttttgtgcacatcagagtttttttag

SEQ ID NO: 105664 - DNA, 1274 bp, Zea Mays
cgcaaataactaataataactagcacaaaactctatgctactactacatacatatatgaacaacagatcgtagacatccattggcagcaagaaagaaaccaaggtacctagttcaaagagagcttagctaggaatacaatggagggcgctcttgcgagcgcagcaaccggagccctgcagtccgttgtggcgaagctgcaagctctgctccgcgatgagtacaggcgcctcacgggaatgcgcggcaagatggagtggctcactggcgagctggttgccatgaaggccttcctcaccgacatgtccagggacgagactcctcctgatgaacaacgcaagctgtggatgaaggacgtgcgggagctctcctacgacatcgaagacagcctcgacgacttcttcgtgcagcatgccgccaagccagacggcatcatggagaagatggcgagcctgctggagaggaccaagagtcgccaccggataggcaaggagttcgacgccatcaagaggaaagtcatggaggcggacgcaaggcgtaagagttacagtaccgaccgtccggtggccaaagccagatcatcatccatcgatccaagagcgctagctatatttgaggatgcgaggaagcctgttggcatcgacggagcaaaggacgaggtcaccagactgctgctgggacgactggaacaagaaggccaccaggagcagcggcaacgccagattgtctatattgttggatctggagggctggggaaaacgaccctggcataccaggtatatcaacaacttaagaatcgattcgaacatcggtccttcttatccgtgtccaggaatccggacatcaatgtcgttttcaaaacaatcctccatgaagtggtgaccgaagaagataggccgtccgtgttcaagggagactatgtcagcactgtcgctgcctcgctgggacccagcaacttatcacaatgatcagggaataccttaaacaaaaaaacaaaaggtactctaccatgtacaactcctttcttaccgctcatatttgtgcttatgtagttaatttgcttttgtaatcgacaagctagttctaatcatgtcttaatcgagtaactctatatctcttgttgtgttagtgcttaggcttaggcataaccatgtagagtaatttgctttgctcggttatttgctttctagtccttgtgctaaagtgttttggtgtgttgtactcactatcatttcatacctacaggaatccgacgaatctaggtcggcctaaaacc

SEQ ID NO: 105665 - DNA, 1641 bp, Zea Mays
atgtgcagatattttattgtgctggatgatatatgggacacgaaaacatgggaaatcatcaagactgccttcccactgactcactgtggcagcataatcatcgtcaccactcgcataaacgaggttgctagggaatgctgtagatacagtgataatgggcatatatacaatatgaggcctcttaatatggagcactcagcacagctattctatggaagattattcagccctgaagagaaatgccctgggcacctccaagagatctctggccaaatcctggagaaatgtgccggcttaccattagcgatcatcgctatgtctggcctgctgtcgagcaaggggagaacaaggaaggagtgggatatagtgaaggactcgatgggccgtgcgctcgaaaggaattctgatgtccaacgaatgctagagataatttcactcagttatttggatcttcctcccgagcttagaacttgcctattgtacctcagcatatttccagaagattacacgattgacaaggacggtttgataaagaggagcttgctccagccaggagagatggacgagtttggtgtggtgaaaagctgtcgaattcatgacacagttcttgatttcattgtatccaaggccatcgaggagaactttgtcactttaataggagtacctggtgtaaatcctactgctgttggagacaaagacaaggtccgtcggttgtctatgcagaatgaaggcaagatcccaccggagctggtcttatctagcgtccggtcgcttaatgttttcggtgctagagtggaaatcccgtctctgtcgaggttcagacgcctgcgtgttttagcctttgaaggctgtgggcagctacaggatgaccatctcaaagatgtgggtgatctgttgcacctgaggtacttgaggctcaacgaagcaagtggtgtcacagagctcccagaaaaaacagctgggctaaagcacctgggggcactcgacgtacatgggcacaacacagtaatggaaatcccagcatccatttgtcaggccgggcgattggaatgcctggttactctagctgttgatcgtgaaactataatgcctgatgagattgcagacatgaaagcacttcaggttctggaaggcgttaatgtctacatccagtcggttgacttcattgaggggctcggcgagctaacgaacctgaggaagctggggataagatttatcaacagtgatgctgatgaagaatgggatgagaaatatgaagagatcgtctcctcggtccgtaagcttgccgactcaaaccttgattctcttcgtgttcatactttgaacgagccgccagaactactgaacaagctaaatgaccatggtacagttgaccttggagaacttgtcgtcacgggagatattgtctcggatcttgcagactggtggggtgtacttgtgaaccttcacaagctactcttttatacgtacggactcagtgagaaagatgtggagaccttaggaagcataactggtctggaatacctctgcatccatctcttcgatgcacccgacgaccctcatgagctgaaagctcccctagagagagcaatggatgcccacccaaaccgtcccagattggtatgggtcgatgaggattag

SEQ ID NO: 105666 - DNA, 867 bp, Zea Mays
ccacagttttcgacggcgtcgcggatgggctgcgcaaaacagcgagcacatggcggacgtcgacggcgcgctgtccatgggactccacaaaacagcgagccggcagcgcgcgaagttggggctgcgtagatcggcggtggagctcgctgctggaattttatgggcgccctggacagcgagctgggcggcattggcctctcgccatgggtagagctcggatgggggaaaatgttgccatgggaggggagtttggttgtcctccatggctgtccagatctcaggcgcagcagggattgttctaggcgctgaaacatggagaggagcaaagggaggaagggggaagattgcagggcgtcatgggaggaagaggtgggcgagctgctgctcgccgtggacgacggcggctcgctgctgctgctgttttatggggaagaggggaggagaggggccggggcggcatggctcctactgctgtccatggaaaaataaaaaggacgcaggaacagcaggggaagggaggtcgtcggctgcacttgtgctcgtccaggggaaacagggagggcgcaggaagggtcgagcccatggaggagcagggcgtcgcgccctggctggagagcgcctgctccaagggagctcggccatttgcagcagtggcagggggcatccatggcggctggccgagcagaggtgtcggccatgggaactgctggcagccatgaagcagaaagggggcgctgagaggtgaagctgcagggggtggcgccatgggaggtgcttcgatgcgctggggaagaaagggaggacgccatggctgctggccgatcctccctgctgctggcgtgagggagaaaggctgctggaaaatgg

SEQ ID NO: 105667 - DNA, 3297 bp, Zea Mays
cacatcaccgcccactcccaccgcgttccttgtctcttccctgtcccgactcccgacccgatctcccaccgcgtcgggatcctcctgcccgcctacccgcccgcgcgccgccgtcccgttcgccagaaccatggacggcatcgagggcctgctggcccgcgacttcggcgtccggccgcagggcaaggccgcccccatggccggcgcctcccgctccaccggatccagcgccggcgccgacgcatgggccagctacggcagatccaccccggccccctccgcggccccgtcctacgacgacctcttcggcgcctcgctcttcgactcgttcaagggccccaccaccaccacaaccaccaatcccgccgcgccttcgcctgcccccgcgtacgacgacgacatcttcgacgcggtcccggggctgcgcccctccagctccgcgtccaccaccgcctcctccgcgccgcggtacgacgacggcgtgttcggctcttcggcggccccggcgtacgacgacgtgttcgccaccagcgcccgctccgcgccgccgcctcccgcttacgacgacgacatcctcggcggattcgggagcgcgctgccgcaggcacaggccgaggagaggaggaggccggtggctgtcgacgacgacgacctgctcggggcgttcgggaggagcccgtcagagggaaagaggaagccggctcctgcgcaggcggaccgagtggggagcacggggttcgatgatctgatccctggattcgcggggagcagcccgccgaggagtaggaagtctaacgacgataacaaaatgaagccaccagttccgacttctaaacagagagctagcatggcagatggcccatttgttgttctagaaacagcctcggcatatacatccccaggaaggtccaccgatcccgtggaagatctggataagactgcaagctttgatggcaaagctgccaatagtactgctgatgacgatagtttattcgagcaatcaagcgcttttgaccaggctccaaaatcagatcctttgtttacctctgaattcaatggtcatgccaaggacacaaaaccgccaagcgcagtccgtgattcgagtcctctacaccattcaatggatagaaatccagcgcgtcaatcttctatggaagactttgataatgtaatgcccaagtcacagtctgcaaggtattctgacgttcgtggtaatgatacggaggatcagtcaccaagatctactgaatctgaagatgatatatggcttacagtttccgagattccccttttcacagcaccaactattgctccaccaccctccagatcaccacctcttctcaaacgaaagccactgagagcaaatgcaaaggagaatgggcatgctcgtcagtctaccccaaatcagaaccattacacagatttgccaaagcaaccggaggtttcttcaatagatgacctggaaggcttttccatgggcaaacctcaaatgcctgcttatggcaacactgtttttgatgaggactatgaaagaagctcatcagatactgaagagaaagacaggcaagaaagattggagaaagaaagagaaatgaagctgagggaggagatggagagggagcagagaaggcttgaaaaggagagggagttggaacaacagagagaaagagagagagaacgacaggcagtggagagggctacaaaggaggcacgtgagagagcatctgctgaagctcgtgcaaaagctgaaagagaggcccgccagcgttcacagcgtgctgctgtgcaaagggctcaacaggaagcccgtgagagggctgcagttgaggccaaagaaagagcagctagggtagctgcagaagcaagggagagagctgctgcagaagcaaaggagagggctgctgctgaagccaaggagaaggcagcagctgaagccaaggagagggagagggctgctgctagggagagggcagcagcagaaagagctgctgctgagagagctcagcaagaagcaaggaagagagctgaacgagctgcagtggaaagagctgctactgaggctcgagaaaggcaggcagctgcagctgcagccgctgccaccgcagcagcagctgctgctgcaagagaaaaacagagcacggcagatgatcttgagtcattcttcggtgtgggttctcgtgccaacagtgcgccgaaacagagggctccaacaccaacagtggattctatgtttggttttggagctcaaggcagaggaacaactaatggatcacagagagcagcatcaacttcggctcctgtgagaaaagtggcatcagccacaagttttggtgatgatctgtctgacttatttggagctcctgcatcttctgatgtttttcaagaagttgagggagaaagtgaagaaagaagacgtgctaggttagaacgtcatcagaggactcgtgaacgagcggcaaaagctctggctgagaagaatgaacgtgatatgcaagttcagagggagcaggcagagagagatagaattggagacactctagacttcgaaatcaagaggtggtctgctggtaaagagggcaacttgcgtgctttgttatcaactttacaatatatactttggccagaatgtggatggcaagctgtatcattgactgatttaattactggagctgctgttaagaagcagtacaggaaggcaacactgtgcattcatcctgataaggtgcaacagaaaggtgcaacacttcagcagaaatatattgccgaaaaagtctttgacattcttaaggaggcatggaacaaattcaactctgaagagctcttctgaagcaacctccgtgactgtgaatatgcatatatgatggacagcttaactgcataccaacatgagtcgccggagtagcaaggcacaagtgaacaaagtgaaagctccacctcagttaccatcgttcgacagattgtgttcagttgctcctcccgtccactgtgctctgctgctcccatctgtatctgttcactcatggtacttgcactccacatctacgaatatacgtacgccatctttttttgttttagtttttgcagcgtgggttggctcatacaaccaagatttacactgtatgtcttaaatactatctcgtgtacgatggaccacagatgttgaaaccacacttgctgtctaagcccttgttgatttctattgaaagtgttgtacgctgtacagattgtaccattgttgatttgagatgtgatttggtttactcaaatttgtaacatatatcttcagtattcagctta

SEQ ID NO: 105668 - DNA, 1041 bp, Zea Mays
atgaagtctctcttgtgcaaggatttgtttttcttcaatgcaacttcctccgtcttatgcaagcaggagaaggggcgcaagcttctgctgctccttgcaattcttgtagccagcctaacctaccaggcaggcttctgggacaaggaggataaggcagcagcagacagcttgtggcaagcgtatgaacatccgtacatgtcttcccggttatcagcgtcatcagtacagcaccgaggtcgccgcatggatttccagatctacaacggaactgcatttggctcatctctgctgttcatcatggatttccagtactacaacggaactgccttgggctcatctctggcgatcattttctgggaaaaggaggataaggcagcagcagacagcttgcggcaagcgcatgaacatccatacatgtcttcccagttatttgcgcttgaggaattcgctgccgtcggcccctggaacgtcttcatcttgctcttggcagctcaagtctgcatggcgctccaggttccggtcagcgtcagggtcggttcagtgtttcttgccaagacttgtttaactgcacacaaattaggagcgagaagcaagcgtctcctcgtgatgatctcgaggacgatcctggacagtcttgggaatgctagtactactggaagacgatgcaggcaagtgtgcaccaaattcataaccagcatattatactaccgacttgcaaacagatggatcagacgcggcagtgggcatgaggcgacctggcgcctcgctagcggcgccatgcatcatatgacgggcaaccagaggctgctgcgcagcgggtcggtgcgcacggagagcatcgccctcgacgacgtgtggtacgtccccgggctggactccaacctggtgtccaccggccagctcgccaggcagggctgcgccgtcaccctcggccccggcggctgccgcatcaccagggcaggcgtcctcgtcggctccgcgcgtctcaccgaggcgtgccacttccagctcgacttccttaaggtcgccgacgattcctag

SEQ ID NO: 105669 - DNA, 144 bp, Zea Mays
atgtacataaaaggatctatggccagagtcacgacaacaatggccgcaacaaagttaatacttaggaggggaggaagaaaggaagggcaatggcgccacttaaaatttaaatctcaactctctggaacctcaaacagtgggtaa

SEQ ID NO: 105670 - DNA, 117 bp, Zea Mays
gatttttttctttcacatgatgaatacttttttgtatgctatcttatggcccccgtaaggaggcctgctgatgtatggtctattttagacctctttattctatcttcttaatttata

SEQ ID NO: 105671 - DNA, 571 bp, Zea Mays
tcccggggccgagccctcgatccggcgtgcttcgccgccggtcgagccctcgattcgaaccctagccttgacccgccccaacctaccgcggtggctgtcgaagccacagatgacggtgcggccgcggctgcggccgaggcggccaggcggcccttcacggccctcagccaagaggaagctgacctcgccctcgcccgcgtcctgcaggagcaggagcgggcgtacatgttgcttcggatgaacgggggcggtggtctcagcagggagaggaggactacgaagacgaactggagctctcactggtctcagcgattggcgaacagtggaggtggagcacgaggaggatcatgcgaatgatccccaggaggcatggcaagaggttgatccagatgaatactcttatgaggagctagtcgcattgggtgaagtagttggcacagaaaacagaggtctctctgccgatacacttgcttctttaccttcagtaacatacaagctgcaacatgttcaggatggcaacacggagcaatgcgtaatttgccgtgtggaattggaggagggtgaatcttta

SEQ ID NO: 105672 - DNA, 786 bp, Zea Mays
atggcaaagctcttcggaaaggtggcgatcgtcacgggcgccgccagcaaactgggcgaggccatcgccaggaagttcgtcgacaacggcgccaaggtcatcctcgccgacatcaaccgccactcctgcgagaacatagtagcggctctcaacaagaccaaccacggccccgcggtggctcacgcgatgcgcatcgacgtcagcgaacccgacagtatcctcgccaccgtcgaggaggcaaagaaggtctacaagcaagacgtcgacatcttctacaacaacgcgggggtcagcaacgtctcctccccggcctcctccatcgacatgatgagcttcaggaacaccatggccgtcaacgtcgagtccgtcatagccagcatcaaccacgccggcgccgtgatgcgcagcaacaagatcggcggcgggtgcatcctgtgcacgggcagtcccgtgggctcgctcggcgacgtggtgccctcggcgtacagcatctccaaggccgcggtcgtgggcgtcgtgcgcgccgccgcggccgagctggggggacacggcgtcagggtcaatgccatctcgccgtacggcgtcgccgccaggtttgacaagggcgtgctgaggcacatcttccctcacgcgactgaccagcagctggatactatgatcagcagctacggcacctacacggtgaccgaggacgacgtggccaacgcggcggtgtacctggcgtccgacgctggcaagaacatcaatggccaaaacatcgtcctcaatggcaagttcggtctttag

SEQ ID NO: 105673 - DNA, 222 bp, Zea Mays
atgcttgggacaaagtggccagcaagaatggagtcatggaaaatcggcaggaggggtgcggcagcggcaaccgatgtatcccttggacaatctggttttgacatgatgcaaatcaatctgctgtacactgtattccgcacttgcacagattatttggctaattacaagattatctcggtgttttgttttggatttagagtacacttatgtatgaaatattga

SEQ ID NO: 105674 - DNA, 331 bp, Zea Mays
ggagcgcgtgatgaagatcgcgtcggagcgcgcggtggtggtgttcactctgagcagctgctgcatgtgccacacggtgacgaggctgatggcggacctgggcgtgaacgcgctggtgcacgagctggacagcgaccccaggggcaaggacatggagcgcgcgctgctcaagatgctgggagggaggggccccgccgtccccgccgtcttcatcggcggcaagcttgtcggcggaactaacagggtcatgtcgctccacctcgccggcgagctcgtgcccatgctcaagagcgccggtgcgctctggttgtagagagagacctgctagctg

SEQ ID NO: 105675 - DNA, 330 bp, Zea Mays
ctgctgtcaaggtcaggactcaggcgttgactcctcaagcagtcgccgcggagctcgctctcgtccgaaatcgagaaaagaggggattttttttctgtcagcagctgaacaatctggcatggcgttcctctatcctcaactctctcgccctgaaggttttgtgggcgggtccggcggtgttcaccccggccatccgtgtgcgtgcaggagagcacaaggtgttcgtggaaatgccacgcagccttggttcacaaaggacactttacggaggaagggtcaaaggctagaaccgtccaacatgtaagaggatcaaagacaaggtctctcagg

SEQ ID NO: 105676 - DNA, 111 bp, Zea Mays
gtttttccccttcgccttggagagatttttcacgttaaatatatgtcttctctatgtttgatctactttgtgtcgtattgattcataacatcgtcgtccttgctctctaac

SEQ ID NO: 105677 - DNA, 2403 bp, Zea Mays
gccatgtgttgggtcgtagggtgaagggtatttgagtctgtattctgtatgaactggtgatcaaagaaatagaataccagaaaagccttcgtgctcccaccgtcttcccaacttctctaactctttccccttcctcacgccattccctgccttctccttccacgtcgctaacatttggtatcagaactactcgcatcctggaatattgcacccatggaggcggcaatacagcagattctcgacgcgatggcgcacatggagctccgcttgaccgatgcgttggctggctgtggtggcgagcacaggatggaggactcggtctcagggctgccatcttccaactccgccacctcctccgtcgccgcgccgatgtacgacgacgatcacaacgccagcatcccaggacagcgccagcatctcggtcgcagcgcgcggctgcagcgccgaccgctacagcacctgaccgtcgaccccgtcagcgccgtccatggcagcaacgactctgagctgtcccacagcgaggtcgacagggtccctgcgaccgccgcgctctccaacccgcgcgagaaggtccacgacgggctcgtcggcgtgacggagttgtcccgcgaagtccgactcctccgcttctccttgccgtcactgaaccaggcgctcaacacatccatcggcaagcacgttctcgactgcgccatcatcgacggaaagtcgtgcttgcgggcacacacgttgaggagcgtcgcggacgaggttggacacacgacctcagggatggtccagacgaaacacatcaacaaccaggagaagttggacgggatggtcattgtcgagcacaacaccttcggtctcttctctagggagttcgcgcacgggctccacctcatcggcccccgcgaagtcagagccccatccctggttcgagccccagagcagagcagcctccccgatctccacccctctgtgatagcccgcatgaagcagatggcgcgcaagtcgatgggcggcaaggcgccgcggaagcagctggcaacgaagggggcgcgcaagtcggagacgaggacgtgcggcgtgaagaaggcgcaccagctccgcccgggcaccgccgcgctgtgcgagatccgtcagtacaagaagagcacggagctgctaatccgcaagctcttgttccagcacctcgtcggccacgacgccacatggttcctgctcgacatcgccttctacagccacaacaggttccaggaggactccaccagtatcagcgggatccccatgtccaacaccaggagcgcagaggaggaggaggttctcgccacctcgcccaacaggtgtttgacgaattgcttcaaactcatacaaagttgttttagctgggatgcagtgccatatcgacagccttggccaccacctcatatgcaggttgagtttgggtgtggaagtgctgatttatgtccaattccatggctgtttttcaccacaattggtaccaatgaggagataattgacatcacatctgatgatgacaaggttgataatgtggttgatcagctgattgatgaacagatcgcagcagtagtctttgtgccagcgtgtatggaagctacgcctaataatgggataaatacaagcaaaaccatggagacctttgctgctcatcagtctcctgagtatgatagtggattgaaagataaggatcagagaatatcatttgaagatgagatatctgagggtgggcaagctgaacaaagtactccacaacaggaattgtgtgctatgccaccagatactagtgaccgtgaaactgttgagaggacaaccagaagtattgaggtggagcatttctctcaggttgagtcaaagcataaaatgaactctatgtccgtggaagcttctgagcatgtcactatcactcagattgagaagaagcaggttcaacaagttgagataactcaggagttagattcactgccgatatgttctagggagcattctgatgaggcacttgaaggggagagaacagtgcaggctgggttggaacaagagtgtgagatgatgcaatacaaatctgaagagggctgtactcgggtagtgaaatgcctcccaccggctgacgcaagtttacttgtctgggctgttaatcagatgacagatccattgattgcattgatgtatgcggtccaagtgatgatttttctcaaggacaaagatgagtcacctcgagaggatgttttgctgctccagaaggacccatttgatggcaacaggcatcagaaacccaacgtgacacttgccatctccttgaggaaagatctaggagtcattgctgcgtgcactgccccaaccaacgaagtaccaacatatgtggaggactacactagtagctcaaaatctgcaactgctggctag

SEQ ID NO: 105678 - DNA, 921 bp, Zea Mays
tttggacgtagttgggatgcggtgacgtacaagcaaccatggccaccacccgtgcatgttgtgatactaggagatggcttgtccgtcaggcttacaccttggcaaccatttgatactgatatctacagctttcctgtgaacagaccagaatcatctgcaagtgtctttggtattgcaacagaatcaacgcagtgtgcctatgattcccaaggaaacagtgtctcgacaatcctcttgatgatgcaaagatgcctttatgaacagatgatgcaatacaaatctgaagagggctgtactcgggtagtgaaatgcctcccaccggctgacgcaagtttacttgtctgggctgttaatcagatgacagatccattgattgcattgatgtatgcggtccaagtgatgatttttctcaaggacaaagatgagtcacctcgagaggatgttttgctgctccagaaggacccatttgatggcaacaggcatcagaaacccaacgtgacacttgccatctccttgaggaaagatctaggagtcattgctgcgtgcactgccccaaccaacgaagtaccaacatatgtggaggactacactagtagctcaaaatctgcaactgctggctagtggctatcaccgatgctcccggcatgacaactaaaatttcttaccatcagtggcttgggggcaagccacatttcaagcggtggggaatgtcagcagcagtctaggggagacgctagacgaggcagccgtcgcggaagagcggcgatgtcccagcaaggagcagctcgcatatccgagccaaggggttatgtaaacgagtgggccatgtgttgggtcgtagggtgaagggtatttgagtctgtattctgtatgaactggtgatcaaagaaatagaataccagaaaagccttcgtgctccca

SEQ ID NO: 105679 - DNA, 3177 bp, Zea Mays
atggcgtcgacggagcaggaggcggcggtcgaagcggccgccgtcgtggaggaagtgacgcggcagcagggcaaagggtgcggcgtcgcaggaggaggggataccgttgggtcctggaggaacatcgacattgcctggcgcaaggcggatgaagctgcaataagaaggtatgaggcagccaactggttgcgaaggatagttggggtagtgtgtgcgaaggaccttgcagaagagccttccgaggaggaattccgtattggcctgagaaatggcattattctctgcaatgcactcaataagattcaacctggtgcggtacccaaggttgtggaggttccatcggattctactgctcctgtcgatggtacagctctctgtgcatatcagtactttgagaatgtgaggaattttctcactggcatgcaagatctaggtcttacaacatttgaggcatcagacctggaaaagggtggacaaggtgttcgagttgtagactgtgttcttgctatgaagtcgttttgtgatgctaagcacgtgggaaaacgatctccattcaaatatggtggcattgtaaagcctttgtctggaaagtatgtcattcgcaagaataatgaaccttatatgaaggtgatgatgaggagtcactcagctgaattactccgggatggcatatcactggagcaaataggtcttgatttttctctagaacccactgaaacaactgctactccagactccatcaggatgcttgttcaaacagttctcgcagataagaaaccagaagaaattccatcagttgtggaatcactcttgagcaaagtaattaatgaatatgattgtcgtattgctagccagagtgaagtggtgaaagacactatggaacaggtgaaagacactatggaacaggtgaaagacactatggataccaatgactgtaactcagttttgagaatggattctccgtttgacaccaatgatactaagtcattatccagagtggactctccacaagtggagtctactacccccagcgatctggacaaggccactgaaaatattaagatggacgaagatgagcagaatgcatcgagtctgacagaagatgtaagcacattagtacctctaccagtaccagtaccactaagcaatgatattgtaattaatatcccaaagatagtgagaaattttgatcaagaagagaaacagatccaggatttgaaaagtaacatgtccactgttaagtctttcatggagcagttaaaactgctgtactctgaagaccttaaaaagcttggtgatcatttgcgtattatttctcatgcggcttctgggtaccgcaaggttgttgaggaaaaccgcaagctttacaaccaaatacaagaccttagaggaaatatcagagtttattgtcgagtaagacctttccatcctggaaaaagtggtcccaaaattttgacagaagaagggctcggtgtcaactacagagcactaaatgatctatttggtatccaggagcagaggaaagatacaatttgttatgaaattgctgtacagatgatggagatatacaacgagcaattccagatgcaaatgtggtgccagtcagatcgaccgctgatgtaattgacttgatgaatctgggccaaaagaatcgaacagtttgctcaactgccatgaatgaccgaagtagtcgctcccatagctgtctgactgttcatgttcaaggacgagatttaacatctggaacagtcctaagaggttgcatgcatcttgtggatctagctggcagtgaaagagtcgataaatctgaagtggtaggaataggattaaaggaggcacagcacataaacaagtcactggctgcactgggagatgtgattgcagctctagcccagaaaagcacacatgttccttacagaaacagcaaacttactcaactattgcaagactctcttggtaacccccaaagttcgaaatccttggtttgcaacttgccagcaccaaagatatgcgctgtgagtattttgtttccccttttttcaggaggacaagcgaaaacattgatgtttattcacatagccccagaaccagatgctattagtgagtccataagtactttgaagttcgccgagcgtgtttccactattgagcttggagcagccaagtcaagcaaggaaggaggaggaggaggaggaggagaagccagagagctcaaagaacagattgcttgcctcagggcagcattagctaggaaagatggagatcatgagagcatacgaagcactcaatcgagcccagacatatatagaatgggaacgggtaatgcatcacctgcgtccaggcacccaatagaagatgggatcatagagaacgactcagcattgggagatttggctgaacactcacagttcgggagcagcaattccctaccagagttgggacctgatgccacacaagatctagccttctaccaaagaagcaactccgaacagcaatggagctggtctgggtctgttgcaacggaggattccgatgatttcgaggttgcaactaattgctcgttagagctggactgcgtgaggccatctagtgccccaaaagcttcaggtttatcaaatggagggggcacagctgtaaaaaagatccaagtcaagggttcaaaaggttcagacgttaggggagtgaatcctggaaaaaggtcatcgccattacagaagaagccgagtggaccctcaccgacgctaatcaagaagggcggaggtgaaggaaggaagactccaaatggtaaaacaggaaccaagaagtaagcaacccagatgaaacttggttttgctgtgaccaacttcaccttggttagggacagataaacatgttgatactatcgggtgatacattgatatttgccacacgaatacgtcagtcctcttaagggaggaggtcgctagatcttcgggcatctgctgtaaatcactcgttgatttgttgtagtacgaacagaaaacggaccacaaaaaactcgaggatgggaggaagatcatcatcacaaggacgtttttgttagatgtatatgttgcttagcttatttttctcgctgtgtgtaagggcttctatgccctgcccatgtacatgtttggcttcttgccccatggaatatacaaagctcatttcgctctaaca

SEQ ID NO: 105680 - DNA, 2030 bp, Zea Mays
ctcaccaacttgtgactacacaataataacttctaccagctgtgcctctccacgccgctacatctacgcacccgccaccgccatggccaagaagaggctcctcctactagcgcacaagatcttctccgccatgctctccctcctcctccacggccgccggagcaggccatccaccaccacgacggactcttcctcccccgcggtgcaccgcggcgctcctcctcctccgacgaccgccgccgccgccggggccctcgtggtcgacgtcgacaccgcgctgctgcggtccggcgacctgttcccgtacttcatgctcgtggcgctcgaggccggcggcttcctgcgcgggctgctcctgctcctgctgtgcccgctcgtccgcctcatgccgcgcgccgccgccgtcagggctatggcggcggtgtccttctgcggcctgcgcgccgcccggttccgcgccggccgcgccgtgctgcccaagtggctcatggaggacgtggcggcggaagggttccaggcggtgcgcgcggcggggagcagggccgtctgcgtcactgccatgcccagggtcatggtggacggcttcctccgggagtacctcggcgtgcacgccgtggttgccagggagatgaaggtggtctgggggttctacaccgggatcatggaggacgcgcggccggccgagggtgcagagatggtgaagaaggcggcggaggaacagacggtcgtcgtcgggtactctgcgtcaatggagtttcttaaccatcctctctcacgttgctgcaaggagatcttcgtggtgagctccgacgagaagagccggtggcggccgctggcaagggacaagtacccaaagccgatggtgttccacgacgggcgcctggcgttccggccgacgggcgccggcacggccgccatgttcgcgtggctgcccctgggcgtgaccctgggcgcggcgcggctggccgtggcgctggtcctgccgtacaggtactcgacgccgatcctggcggcgacgggcatgtcgtggcggctcaaggggtcgcgcccggcgctggcgccgccgtgctccggcgggcgcgggcagctgttcgtgtgcaaccaccggacgctgatcgacccggtgtacgtgtccgtggcgctggaccggcaggtgcgcgccgtgtcctacagcctgagccggctgtcggagctcatctcccccatcggccgcaccgtgcgcctgacgcgggaccgggacagcgacggcgccgtcatggcgcgcctcctggaccggggcaacctcgtcgtcgtctgccccgagggcaccacctgccgggagccctacctgctgcgcttcagcccgctcttcgccgagctcagcgacgacgtcgtccccgtcggcatcgccgtcgagacgtccatgttctacgccaccaccgccggcgggctcaagtgcttcgacccgctctactacatggccaaccccaggatgtgctacaccgtgcagttcctcgataaggtggacaccagcgccgtccggagcagggccgcgcccagcacccagatggccaacctcgtgcagaggaagatgggggacgcgctcggctacggctgcaccatgctcacccggaaggacaagtacctcatgctagccggcaacgacggcatcgtccgataaactgtcggcggcggcccctgcatacgcgcgcgcgcagcagggaggaagaacaaagagtacataaaaaaagaacaactaataagtcaaactagcttattgttgattgattagaaacaaaaaaaaacaacaacaacaacaaccaattgtacgttatggaaaaaaaaggtagggattttttgtccttgacttttggttttagagaagaaagtttggtacatcacgttgttgattggttgatcatttatttttctaatgtttgtttccttctcttaaatagtttctatttatttatttattcatgtttaaacaggttaggtatttttcttgagatttttatttaggtatgtgtatgtgtatgtaaagaagcaac

SEQ ID NO: 105681 - DNA, 544 bp, Zea Mays
gtctcgagtctagccatggttccctgcttagggtggtgattctaaagtctacaggtctctgtagccctctccagttcatcgcatgccattcccctgtgctggtgaccacgcctgcagttctcccacctcgccatggctcggacgtcctaaggagttgctggcctggatgaagcttgttctgtaatcatctcagagctcccaaaataaagagtgaagattcaagatgaagtggttgctaaagaggagtctactccagtgcctgctcatcaagtggatggagctatctaactaaaggttgggtagaaggatctagtacctcttcactgcaataaggtgatgaggagtacactacctgttcctaaggctggaggacgtttccagttctggaggaagattagttaggcttatgtataagctttggagggttcctacctttctgctattgtaataagttatgcactttgagtatatcaggacttgtaataaatgtaaccttcccatgtaataaccttcagttttagaaataaaaagaatgttttgtaaa

SEQ ID NO: 105682 - DNA, 1858 bp, Zea Mays
accaccgttgggagccggcagccccgcacgcttcttcttcccgccgcgccgccaccccaccaatccccagtcccccacgaaagaccaaacccctcgccctcctccgctatttcccagccgaatcccacccatcccgaccaattctgtggtccgccgcgccctccatacccccgcccctgtggcgcactcatctctctcgccgcggcaaaatcgtttagccgtcccaatccgaccacttttctccgatcgagcatgagcatggcgttctcctgcgcgggcgcgcgcctccacggtcgcaccggcgtcggcggcgccaaatgccgtcccggcgcggctctgctcgggcggcggggcacctgcttccgtccgaccgcctggaggtggagcaccgccaggggaatccgcgctgacctcccgccaccgccgcgggcgagcgcggatggcgccgccacctccggcccggacgtcgtcgtccccgaagcgggggacgctactgaggaggtggccgcggttgttcaacctgttgtgctcccggagaagcttgatgtcgatgatggtggaaatggcaagctccctcccgccgccggcggcggtggggacggcgagaatggcggcggtagcggcggcgggggtgacggtgacgaggaggaggatgagttcggacccatactcagcttcgaccaggtggtccaggaggcggagaagagaggggttagtctgcccagtttgcccacggacatagttgaggcggccaagagcgttgggattcagaaactgctgctgctgagatatctggacatgcaggcgtcggcttggcccttggggcctgcaattaggtcctgctcgcttctccggaataggatgctggttgatcctgcattcctcttcaaaattggcactgagatagtcatcgatacatgttgtgcgacatttgctgaggttcagaagagaggggaggagttttggtcagaatttgagttgtatgctgcagatatgttggtaggagtagttgttaatgtagctttagtcggcatgttagcgccatatgctcgatttggtagcagatctgcatcagaaggtctccttgggcgcgttaggcatgcttatgatgccctcccaagcagcgtttttgaagctgaaaggccaggatacaaattttctgtgcagcaacggataggaacatactttttcaagggaatattgtatggttctgttggattcttttgtggtcttgtgggacaagggattgctaatttgataatgacagccaaacggagtgttaagaagtcagatgatgatgtacctgttccacctcttctcaagacttctgctttgtggggtgcattccttgctgtttcttccaacacacggtaccagattattaatggattagagcgcctggttgaggcttcacctgttgggaagcgtgtcccggctgcttctttggcattcactgttggtgtgaggtttgccaataacgtgtacggagggatgcagtttgttgactgggcaagaatgagtggctgccaatgagttgcgagctttcatttctgtggtgaggtcttccttcttctatacatgccccctctcccccccacaataaatgcagttctcttctcttgatgtagccaatggatagataacattatgccaataatgcagatgctttttattgcagtcactattcaccgcgatgctgtattgttgttgcttgctgtctgctacctgttattccacccaaattcgtcgaattttcatcatggcaaagtcaaagatgtggtataaatatcttggggggcaaaagatataaaaaataaatgtggaggtttctcggagaatgatgagtttagcattagga

SEQ ID NO: 105683 - DNA, 1948 bp, Zea Mays
ccgttgggagccggcagccccgcacgcttcttcttcccgccgcgccgccaccccaccaatccccagtcccccacgaaagaccaaacccctcgccctcctccgctatttcccagccgaatcccacccatcccgaccaattctgtggtccgccgcgccctccatacccccgcccctgtggcgcactcatctctctcgccgcggcaaaatcgtttagccgtcccaatccgaccacttttctccgatcgagcatgagcatggcgttctcctgcgcgggcgcgcgcctccacggtcgcaccggcgtcggcggcgccaaatgccgtcccggcgcggctctgctcgggcggcggggcacctgcttccgtccgaccgcctggaggtggagcaccgccaggggaatccgcgctgacctcccgccaccgccgcgggcgagcgcggatggcgccgccacctccggcccggacgtcgtcgtccccgaagcgggggacgctactgaggaggtggccgcggttgttcaacctgttgtgctcccggagaagcttgatgtcgatgatggtggaaatggcaagctccctcccgccgccggcggcggtggggacggcgagaatggcggcggtagcggcggcgggggtgacggtgacgaggaggaggatgagttcggacccatactcagcttcgaccaggtggtccaggaggcggagaagagaggggttagtctgcccagtttgcccacggacatagttgaggcggccaagagcgttgggattcagaaactgctgctgctgagatatctggacatgcaggcgtcggcttggcccttggggcctgcaattaggtcctgctcgcttctccggaataggatgctggttgatcctgcattcctcttcaaaattggcactgagatagtcatcgatacatgttgtgcgacatttgctgaggttcagaagagaggggaggagttttggtcagaatttgagttgtatgctgcagatatgttggtaggagtagttgttaatgtagctttagtcggcatgttagcgccatatgctcgatttggtagcagatctgcatcagaaggtctccttgggcgcgttaggcatgcttatgatgccctcccaagcagcgtttttgaagctgaaaggccaggatacaaattttctgtgcagcaacggataggaacatactttttcaagggaatattgtatggttctgttggattcttttgtggtcttgtgggacaagggattgctaatttgataatgacagccaaacggagtgttaagaagtcagatgatgatgtacctgttccacctcttctcaagacttctgctttgtggggtgcattccttgctgtttcttccaacacacggtaccagattattaatggattagagcgcctggttgaggcttcacctgttgggaagcgtgtcccggctgcttctttggcattcactgttggtgtgaggtttgccaataacgtgtacggagggatgcagtttgttgactgggcaagaatgagtggctgccaatgagttgcgagctttcatttctgtgatgctttttattgcagtcactattcaccgcgatgctgtattgttgttgcttgctgtctgctacctgttattccacccaaattcgtcgaattttcatcatggcaaagtcaaagatgtggtataaatatcttggggggcaaaagatataaaaaataaatgtggaggtttctcggagaatgatgagtttagcattaggagtgcttagcgcagcatagaaccaggagaggttgaattgcttgttttgttgttgaagatgtcaccgtcttgatttggatagttgagtgtactagtacttgcttatactctattgaatttgctgttctcatattttcatatgttctgtggactactttggaagtccaacatcttgtcacttatttattattagtttttatggt

SEQ ID NO: 105684 - DNA, 1949 bp, Zea Mays
ccgttgggagccggcagccccgcacgcttcttcttcccgccgcgccgccaccccaccaatccccagtcccccacgaaagaccaaacccctcgccctcctccgctatttcccagccgaatcccacccatcccgaccaattctgtggtccgccgcgccctccatacccccgcccctgtggcgcactcatctctctcgccgcggcaaaatcgtttagccgtcccaatccgaccacttttctccgatcgagcatgagcatggcgttctcctgcgcgggcgcgcgcctccacggtcgcaccggcgtcggcggcgccaaatgccgtcccggcgcggctctgctcgggcggcggggcacctgcttccgtccgaccgcctggaggtggagcaccgccaggggaatccgcgctgacctcccgccaccgccgcgggcgagcgcggatggcgccgccacctccggcccggacgtcgtcgtccccgaagcgggggacgctactgaggaggtggccgcggttgttcaacctgttgtgctcccggagaagcttgatgtcgatgatggtggaaatggcaagctccctcccgccgccggcggcggtggggacggcgagaatggcggcggtagcggcggcgggggtgacggtgacgaggaggaggatgagttcggacccatactcagcttcgaccaggtggtccaggaggcggagaagagaggggttagtctgcccagtttgcccacggacatagttgaggcggccaagagcgttgggattcagaaactgctgctgctgagatatctggacatgcaggcgtcggcttggcccttggggcctgcaattaggtcctgctcgcttctccggaataggatgctggttgatcctgcattcctcttcaaaattggcactgagatagtcatcgatacatgttgtgcgacatttgctgaggttcagaagagaggggaggagttttggtcagaatttgagttgtatgctgcagatatgttggtaggagtagttgttaatgtagctttagtcggcatgttagcgccatatgctcgatttggtagcagatctgcatcagaaggtctccttgggcgcgttaggcatgcttatgatgccctcccaagcagcgtttttgaagctgaaaggccaggatacaaattttctgtgcagcaacggataggaacatactttttcaagggaatattgtatggttctgttggattcttttgtggtcttgtgggacaagggattgctaatttgataatgacagccaaacggagtgttaagaagtcagatgatgatgtacctgttccacctcttctcaagacttctgctttgtggggtgcattccttgctgtttcttccaacacacggtaccagattattaatggattagagcgcctggttgaggcttcacctgttgggaagcgtgtcccggctgcttctttggcattcactgttggtgtgaggtttgccaataacgtgtacggagggatgcagtttgttgactgggcaagaatgagtggctgccaatgagttgcgagctttcatttctgtgtcactattcaccgcgatgctgtattgttgttgcttgctgtctgctacctgttattccacccaaattcgtcgaattttcatcatggcaaagtcaaagatgtggtataaatatcttggggggcaaaagatataaaaaataaatgtggaggtttctcggagaatgatgagtttagcattaggagtgcttagcgcagcatagaaccaggagaggttgaattgcttgttttgttgttgaagatgtcaccgtcttgatttggatagttgagtgtactagtacttgcttatactctattgaatttgctgttctcatattttcatatgttctgtggactactttggaagtccaacatcttgtcacttatttattattagtttttatggtactagcgtgtgtttcat

SEQ ID NO: 105685 - DNA, 1538 bp, Zea Mays
aattatacttggggattgaaaccataccagccgaacacagcctcaatgggttctataggaggacacacaaccacagctaccgccgaccggcgccgccgcgtgctgttcttcccgctcccgtaccagggccacatcaaccccatgttccaactcgccggcctcctccacttgcgcggtttctccgtcaccgtcttccacaccgacttcaacgctcccgacaagtcccgccaccctgcctacgacttcgtccccgttcccgtccgcggctgcttgccgaagggcagctcggatgccttgcaggtgaccgtggagcgcatcctcgccgtgaatcgcgcctgcgaggctccgttccgggagcgcctggcctctctgctggcgcgggaggacgtcgcgtgcctggtcgctgacgcccacctgctgacgctgctggacgtggcgcgggggctcggcgtgccgacgctggtgctgcgcaccggcagcgcggcgtgcctccgcatgttcgcggcgttccccgcgctctgcgacaaggggtatcagccggcgcaagagtcgcagctggagacgccggtgactgagctgccgccgtaccgcgtccgggacctgccgtccaccaccagcgcctgccacggcgtaataagcgaggtgatttcccgtttagtgacggccgtgacgacctcctcgggtctcatcctcaacaccatggacgcgctcgagtgcggcgagctggcgtcgctccggcgagacttcggcgtccccgtgttcgacatcggcccgctccacatgctctctccggctgcctcgagcagcttgctactgcaagaccgcggctgcctcgagtggctcgacgcgcaagccccggcgtccgtgctctacgtcagcttcggcagcctcgccagcatgtccgccgccgagctggtggaaacagcctggggcatagccaacagcggctataccttcctgtgggttctccggccgggcctcgtccgcggctcgcagacgtcggaggcggcgccacccctgcccgacggcttcgacgccgcgacgcgcgggcggggcatggtcgtgagctgggcgccgcaggaggaggtcctggcgcaccctgccgtgggcgcgttctggacgcactgcggctggaactcgacgctagagagcttgtgcgcgggcgtgccggtcattgcccgcccgtgcttcggcgaccagatggggaacgcgaggtacgtggaccacgtgtggcggaccggcctcacgctcgacggcgtgctcgagaggggcgaggtggaggcggccgtcgcggcgctgatggcgccaggagagcccggcgacgggctgcgtcggagggcgcgggagctcgagagcagcgcggcggattgcatgaccaaggatgggtcgtcctgcacgaatgtcgacaagctggtagaccacattctgacactgtaggcgtttggtacaggagcagccacgtggtgctgttcttgggtactgtttttctttgcggttgaaaaataaataaaaaactggctggagcttatgatcctcaa

SEQ ID NO: 105686 - DNA, 330 bp, Zea Mays
atggcgggtagtactggcacacgatgtggagctgctgcatgcactccatcttgtgcaggtggtcgctgggcatgccgagggactccgacagcagctcgaacatggaccgcgccagcttcgtcagttcctcgccgtattccatcatcacgttccggagaggctccggcacgagctcccgcggcgccggatccggcgcaatcttgcagtagagcgtgtcgcgccagtcggccgccgcggactcgaagaggtcgaagttggaagcgaagcgcacgttgcgagcggggtcccgtgagtagagcgcctgcttggcctccagagagccctcgttga

SEQ ID NO: 105687 - DNA, 4124 bp, Zea Mays
cccacgcgtgcgctctctcctcactctccctctccctctcgtcgacgattgggaaagcgccgccgccgccgcgccacaccacgccaggtggcgagttcttcgtagcgccgttcgccaggtctccgtagcgcccttagccgtccgcgagaaccctcaaaggcatttgcattatggttgcagcgtaggtggggagccattagaaggaggggcaacaagagttgctgggcatggcggctcaggaggccgcggcagctgattctttgggccctcggtttgctccggatgacccgacgctccctgcgccttggaaagggctgattgatggcgcgacgctgtactattggaatcctgagacgaatgtcacccagtatgagaagccggctgcaactgcaggtgtgccccctttgtcagcaggtcttccgccggcaacccctgcgcaggttccggaatctgcaccagtggcttttccgcagcttaacgtgcagtttggacaagctggccaggcagggcaccaggagcgtcctgaccaggcagcttatcctcaggctggccagcttggccagcagcacactcaacagccagctcagcagcaaccgtttcagcagcagcaaccgtttcagcagcatgtccaggcgcaacaccaagcttcgtttcagcatgtgccatatcagcaacagcaaacacacatgccaaatcagccacatcaataccacagcacgcatcctcaacacatgccgtaccagcatggtctttacatgcaacctcagcagcaacagcaggctccaccatattcatatcaggcagaccagcagccacagatgcgacaaactgcttataatcaagctcagcagccatcagtgcctcaagctgcctacaatcaaagtcagagtcagcagccaccaatgcctcaatcttcctacgatcaaggtcagagtcagcagccaccaatgccgcaaccttcctacaatcaaggtcaagttcagcagccaccgatgccacaaccttcttacaatcaaggtcagcaatccatgataccacagtctgcctacaatcaagctcagcagcctcaaattccacatggtgcttataatcaaagccagcaaccgctgggagataggattccccagggtcaagggcaacatcctcaacaatctttgagctctcatcatcctgcccaagcttcgcagtcgccgcaagtttcccaacctcaaggacctaaaatgccgactcaacaaggtcaactgcaacatggattgccgttcactcagcatggaaaaacgccattgtcacatgggcaacaaagtcctttgttgaaggatgatgatggaggagttcatgaaggcaagcggactggctttccgttaccacttagtcagcagcgtggccaagctcctcttccaaatcagcagctaccttctactcatcaacatcctggagcccttagtagccagccaaatatacctggagtcggtgggccattttatcctgccaggaatcttcctgatggaccatcctctgctgagactaataacatgggttttatgaactcacctgctcaaatgcatcaaggtggagcagatacaaactaccagaaaaaaccagttagtggccatacagttccaaatcatgttggtccatcaccaattcgacctccaatggggttcgatatgggtaatagtgttggacactttgaaagagatgaccctcactcttatggaaggtttgatggagcaaaggctctccagcagcagccaaagcttgctgctctcccaacttcacaaaattccatggtcatgcataatggaccgctttatcctcggccagacaattttggtggtcataacatggcacctccgcattcagtaccaaatccatataatcttggtccattgcctattggaacttcagtgaggccaccgtcaagtatgtttgctcctccagattttccaagcgtatcttcagctgatgcataccgtcaacaccatgaagtcactgccatgggtgagaacgttcctgctccgtttatgacatttgaggccactggattccctccagagattctgagagagatccatgcagctggtttttcaaatcccactccaattcaagctcaaacatggcctgttgcgctgcaaaaccgggacatagtagctattgctaagacagggtctggaaagacgctggggtacctaatccctgcttttatacatctgaggagatgccacaataatccgatgctgggccctacagtattggttttggcccctactcgcgaacttgcttcacaaatacaagccgaagtagttaagtttggtcaatcatctagagtttcttgcacatgcctatatggtggaacttcaaaggtccctcagctaagagaacttgagcgtggagcagatattgtggtagcaacaccagggcgtcttaatgatatcctggagatgaagaggattaacctccatcaggtttcattacttgtgcttgatgaagcagaccgcatgcttgacatggggtttgaaccgcaaatacggaagattgtggatgagcttcctaatgctaggcagactctaatgtacactgccacttggccaaaggaggttacaaaaatagctggggatttactgagagatcctgtccaggtgaacattggcagtatcgatgaacttgttgctaacaaatccatcactcagtatgtagaggtggttccacctatggacaagcagcggcgtctagagcagattcttggagatcaagaaaggggctcaaaaatcatcatattttgctcaactaagaaaatgtgcgatcagcttgctcgtggcattggtcgcaactttaatgctgtaagcattcatggtgataaatcacaggccgaaagagataatgttctcaatcagtttcgaactggcagggcttcagtattagtagccacagatgttgctgctcgtggacttgatatcaaagatattagagtggtaatcaattatgactttccaactgggatagaggactatgtgcatcgcatagggcgtacaggaagagctggcgctactggagtctcgtacacatttttctcagaacaagattggaaatatgcttgtgatttggtgaaactcttgcaaggtgccaaccagcttgtccctccgcagctgcaagacatggctgcacgcagtgcttctggaggtccaagaaaccaggcttctgggatgagtcgctgggatgggcctggtggtcgtggttttgaacctggtgttggtggccctgttggttatggtggtgttagggagggtcctggaggttttggtggtcgtgagggcccaggtggacttggtgttcgagaaagcccagccatgtttggtggccccggtggcttcggtgatcgggaaggccccggtggcttcagtggccatgagggccatggtggctttggtggccgggaacgggagggtcctggtggctttgttggcagaaagggcccaggtggttttggtggacgggatggccctgggtcaagtggtttcggtggtagaggacagcgtggatctggtggttttggcagtagaggggcgattctcctggttttggtggacgcggcaggggtgatttttccggttttggtggacgaggtaggggagatttttctggtgggcgcggtggcaggggccgtggatttggtggcaggggacgttctgaccggtttgtctcagatggacggggacgatatgataaccgtcgaggatttggagacaagggtagggatcggagctacagccgcagcccggatagagtccgggcacggggttatgacagaagaagtgacagcaggagcattagtaggagcaggagtcgcagcaggagctggtcacgcagcagaagccgcagcaggagctggagccgaagcagcagccggagtcacagcaggagcaggagtcgtgaccatggggcagcaccggagcgcaggccccgagcaagatccggcttcgatgtgctgcctcctgcaactggagctgctggacctgcacctgttcccgtacctggaccagcagcaccgcctgttcctgctccggcacctgaacaatcactggctaatacatcttcaatgtcaccgatgtctcctggtggcctag

SEQ ID NO: 105688 - DNA, 4478 bp, Zea Mays
cccacgcgtgcgctctctcctcactctccctctccctctcgtcgacgattgggaaagcgccgccgccgccgcgccacaccacgccaggtggcgagttcttcgtagcgccgttcgccaggtctccgtagcgcccttagccgtccgcgagaaccctcaaaggcatttgcattatggttgcagcgtaggtggggagccattagaaggaggggcaacaagagttgctgggcatggcggctcaggaggccgcggcagctgattctttgggccctcggtttgctccggatgacccgacgctccctgcgccttggaaagggctgattgatggcgcgacgctgtactattggaatcctgagacgaatgtcacccagtatgagaagccggctgcaactgcaggtgtgccccctttgtcagcaggtcttccgccggcaacccctgcgcaggttccggaatctgcaccagtggcttttccgcagcttaacgtgcagtttggacaagctggccaggcagggcaccaggagcgtcctgaccaggcagcttatcctcaggctggccagcttggccagcagcacactcaacagccagctcagcagcaaccgtttcagcagcagcaaccgtttcagcagcatgtccaggcgcaacaccaagcttcgtttcagcatgtgccatatcagcaacagcaaacacacatgccaaatcagccacatcaataccacagcacgcatcctcaacacatgccgtaccagcatggtctttacatgcaacctcagcagcaacagcaggctccaccatattcatatcaggcagaccagcagccacagatgcgacaaactgcttataatcaagctcagcagccatcagtgcctcaagctgcctacaatcaaagtcagagtcagcagccaccaatgcctcaatcttcctacgatcaaggtcagagtcagcagccaccaatgccgcaaccttcctacaatcaaggtcaagttcagcagccaccgatgccacaaccttcttacaatcaaggtcagcaatccatgataccacagtctgcctacaatcaagctcagcagcctcaaattccacatggtgcttataatcaaagccagcaaccgctgggagataggattccccagggtcaagggcaacatcctcaacaatctttgagctctcatcatcctgcccaagcttcgcagtcgccgcaagtttcccaacctcaaggacctaaaatgccgactcaacaaggtcaactgcaacatggattgccgttcactcagcatggaaaaacgccattgtcacatgggcaacaaagtcctttgttgaaggatgatgatggaggagttcatgaaggcaagcggactggctttccgttaccacttagtcagcagcgtggccaagctcctcttccaaatcagcagctaccttctactcatcaacatcctggagcccttagtagccagccaaatatacctggagtcggtgggccattttatcctgccaggaatcttcctgatggaccatcctctgctgagactaataacatgggttttatgaactcacctgctcaaatgcatcaaggtggagcagatacaaactaccagaaaaaaccagttagtggccatacagttccaaatcatgttggtccatcaccaattcgacctccaatggggttcgatatgggtaatagtgttggacactttgaaagagatgaccctcactcttatggaaggtttgatggagcaaaggctctccagcagcagccaaagcttgctgctctcccaacttcacaaaattccatggtcatgcataatggaccgctttatcctcggccagacaattttggtggtcataacatggcacctccgcattcagtaccaaatccatataatcttggtccattgcctattggaacttcagtgaggccaccgtcaagtatgtttgctcctccagattttccaagcgtatcttcagctgatgcataccgtcaacaccatgaagtcactgccatgggtgagaacgttcctgctccgtttatgacatttgaggccactggattccctccagagattctgagagagatccatgcagctggtttttcaaatcccactccaattcaagctcaaacatggcctgttgcgctgcaaaaccgggacatagtagctattgctaagacagggtctggaaagacgctggggtacctaatccctgcttttatacatctgaggagatgccacaataatccgatgctgggccctacagtattggttttggcccctactcgcgaacttgcttcacaaatacaagccgaagtagttaagtttggtcaatcatctagagtttcttgcacatgcctatatggtggaacttcaaaggtccctcagctaagagaacttgagcgtggagcagatattgtggtagcaacaccagggcgtcttaatgatatcctggagatgaagaggattaacctccatcaggtttcattacttgtgcttgatgaagcagaccgcatgcttgacatggggtttgaaccgcaaatacggaagattgtggatgagcttcctaatgctaggcagactctaatgtacactgccacttggccaaaggaggttacaaaaatagctggggatttactgagagatcctgtccaggtgaacattggcagtatcgatgaacttgttgctaacaaatccatcactcagtatgtagaggtggttccacctatggacaagcagcggcgtctagagcagattcttggagatcaagaaaggggctcaaaaatcatcatattttgctcaactaagaaaatgtgcgatcagcttgctcgtggcattggtcgcaactttaatgctgtaagcattcatggtgataaatcacaggccgaaagagataatgttctcaatcagtttcgaactggcagggcttcagtattagtagccacagatgttgctgctcgtggacttgatatcaaagatattagagtggtaatcaattatgactttccaactgggatagaggactatgtgcatcgcatagggcgtacaggaagagctggcgctactggagtctcgtacacatttttctcagaacaagattggaaatatgcttgtgatttggtgaaactcttgcaaggtgccaaccagcttgtccctccgcagctgcaagacatggctgcacgcagtgcttctggaggtccaagaaaccaggcttctgggatgagtcgctgggatgggcctggtggtcgtggttttgaacctggtgttggtggccctgttggttatggtggtgttagggagggtcctggaggttttggtggtcgtgagggcccaggtggacttggtgttcgagaaagcccagccatgtttggtggccccggtggcttcggtgatcgggaaggccccggtggcttcagtggccatgagggccatggtggctttggtggccgggaacgggagggtcctggtggctttgttggcagaaagggcccaggtggttttggtggacgggatggccctgggtcaagtggtttcggtggtagaggacagcgtggatctggtggttttggcagtagaggtggagcaagccctgggggctttggtggacgtggtggcaggggcgattctcctggttttggtggacgcggcaggggtgatttttccggttttggtggacgaggtaggggagatttttctggtgggcgcggtggcaggggccgtggatttggtggcaggggacgttctgaccggtttgtctcagatggacggggacgatatgataaccgtcgaggatttggagacaagggtagggatcggagctacagccgcagcccggatagagtccgggcacggggttatgacagaagaagtgacagcaggagcattagtaggagcaggagtcgcagcaggagctggtcacgcagcagaagccgcagcaggagctggagccgaagcagcagccggagtcacagcaggagcaggagtcgtgaccatggggcagcaccggagcgcaggccccgagcaagatccggcttcgatgtgctgcctcctgcaactggagctgctggacctgcacctgttcccgtacctggaccagcagcaccgcctgttcctgctccggcacctgaacaatcactggctaatacatcttcaatgtcaccgatgtctcctggtggcctagtccagccagctgctgcacctgctggtggccaaccttcccaagggactggcgctgcattccccagttctcctgcaggcgaaacgtttccaggcgcagcagctcagcatcccgcgcctgatgtataatgagtcggacgacatccagtgccctaaatatgtaatccggtgtacaataggagaaatgagtttccgggtagtagtttatatggcaaaaaaatcggcttttccgcaattttctgatctcgtggtgaattgacgtatggatgttgtgtgtttttgtgctgaattcaagaaaaagttatgttgtgcaactat

SEQ ID NO: 105689 - DNA, 153 bp, Zea Mays
gttgcatgttgttgaatagtcttatttttcttccttggttgctcttcattctgtataaattactaattacggatggatgagtattgactacatggtctctattttctcgatgactaaatctattgcctttgcttttctaaaaaaattaagaac

SEQ ID NO: 105690 - DNA, 361 bp, Zea Mays
gtttctttgccgagtgtcaaatacttggcactcggcaaagaactctttaccgagtgtcttgtgtggacactcggcaaagcatatttttattttttaaattttttccaccaaacttttttggtatgttcctacactatgtaaacctacatgtatcagttgtggacaattataacagagttttcaatcggtagtagatttagttcgtttatttgaatttcttcggaaaattcagatttgaactgcaggtcactcgaaacttgaaaaaccgtgcatgcaaaaatgatatccatgctacttaacacacgttacgaccgatttcaggagcggaccgaaaacttcgagcaacatgctcactaaacat

SEQ ID NO: 105691 - DNA, 315 bp, Zea Mays
gactttgtttgtgttttatacaatttttaaacaactggatggcaagttcacggtcatgtttagtgagcatggtgctcgaaggttccggtctgttcgtgaaatcggtcgtaacttgtgttacctaacataaatatcatttttgcatgcacggttttccaagcttcgagtgcaatgcagttcaaatctgaattttccgaagaaatttaaataaacaaactaaatctactagctattaaaaacactgttataattatcccaaaatggtacatgtaggtctacatagtgtaggaacataccacaaaaagtttggttggg

SEQ ID NO: 105692 - DNA, 405 bp, Zea Mays
atgacgaggacgtcttcttcgtcatcaaggcgttctccacggggtcatccccgccaccagcatgatgcacagggccggtgggttcccctacgcgggcatcgtcgtcatgtgctctgcaatgtccaccatgatggtcgactgcgtcaccgcgggctattaccagtgtgtgcacttctgcaaggcgcgccccgtcgaagcaggccagggccgtgcggcgcccgcggacgagatgcatcgtctcaggatgcctccgtcgtcgtcgtgtccatcaagcacagggtgatctctcagaaccctgaggaaatcctgtgggatgaggctggtgctgagtatgtcgtggagtccaccggtgtattcactgacaaggataagactgttgcacatctgaagagctctaaagtttag

SEQ ID NO: 105693 - DNA, 1315 bp, Zea Mays
atgacgaggacgtcttcttcgtcatcaaggcgttctccacggggtcatccccgccaccagcatgatgcacagggccggtgggttcccctacgcgggcatcgtcgtcatgtgctctgcaatgtccaccatgatggtcgactgcgtcaccgcgggctattaccagtgtgtgcacttctgcaaggcgcgccccgtcgaagcaggccagggccgtgcggcgcccgcggacgagatgcatcgtctcaggatgcctccgtcgtcgtcgtgtccatcaagcacagggtgatctctcagaaccctgaggaaatcctgtgggatgaggctggtgctgagtatgtcgtggagtccaccggtgtattcactgacaaggataagactgttgcacatctgaagagctctaaagtttagagaaataaatttaagcatgccctgaggcctgtgcaatggaaacttggacactcgcctcatggagaggagtcaaattacattcagacccaggatgctaattagctcacttttgagtcgaatgttgcatgagccattgtcattgccagcagggtatggtactgtgctgctcaaatgtttttctatgagctcaaaaaacatgccactgccattgctctgaataatgttaccatggaactgaatctgctaacagtaatattgattatcaccatctgaactgatcttgtataatttgcatactagaagtactcgagcctttccaaaacttgcgtcgttttagttttgtctgaagtcaaactttcttaactttggttgctggttagcagagaggatgtaaccttttgtaaatcttttatactactaggggagaaaattagcttagttcaatcgcatctcatatgtctaattactaggggagaaaattagcttagttcttttgttgctgccatagttgtgaaaaaataacgagacatctaaatcagtaaattggaaatacagcatcttaaacctgcaggtagtttcttaaacctgattctagctacaacttagtacaactactggtagtttcttaaacctgattctggctacaggtttcatattgtggcacaggaacttttaagaacatgtgttgatgcccaccgtatttagttactacttcaagaccaactgtattttagttataattgtgttttcaagattatagaaattagtagctgaaattatccacaccatatttgtgaactggcatcatttctaagaatattactgattagaatctttcacttctataatgctttgcaggagtggccactctggagttgtctatgcagttataaccaatttttaccccttt

SEQ ID NO: 105694 - DNA, 99 bp, Zea Mays
gtccgggtcgttccctgggcagttcaattagttgtattttgttcagtggaattaatctacagatggatcacggcatatggtcatctcagcctagcatac

SEQ ID NO: 105695 - DNA, 1036 bp, Zea Mays
cgttgataatctcccatggtgccgtctctctgggattttcttgaagtcgctcggatccctatcctccaccgtctagactcctcttcttatcccttcgtacacaactgctgctagatttctccaggccatcagcttgtctctgctcgcccaagcacaggtgttggcttcctcccatcgtatcaaccatatgtggagtccttgcttatcccctgcgcataggaagccagctccctcacgttgcctcatccctagacgcgctcgcccagatcgagcgtcgtcgctcagctcgcccagccctccccatccttctctagccatggtgctgctcccagtcttctgctcgcccctgccctcagccttggcgtctggccgccactgccccagctttccatggcggcattttctgcttcctggtggccgacgccctccctaaactgagcaccgccgtcaactgcgccttggcgctaatcctccccaacctcttctttgccggtggtcgtctccagccccttccatggcacctagttttattcccatggcgagctcgcccaagcaatcacctccatcacaggtgatgttttccccttccctttcctcaagtttggttctcggtgccaagtttttgtgtccctgcagctcgccgtgcctgcgcagccccgacaacgactccctcttctgcgtcgcgccattgacccgctcgatggaatgccgcagcgagctctacccgatctgcaacgcctgcgcgccgtcgtcgaaatccccgcaaccgtgttggtccgcaacaacacgtcctcgatctgcaatccctagccttgtggtcgaccttgccctccgtcgatgtcctgccttgcgcatcgcttgctcaacgaaagcctcactcgtgaacgacatgcgcgactcatccgatcccgccaggttgtttgatgtgtgtgattgtagttgttctaaatatgttttaatcgatgtcatgcatatatgtgtcgttgacgttatagtggaagtgtatgcattgttcaataaaatgcctccttgtatg

SEQ ID NO: 105696 - DNA, 240 bp, Zea Mays
gctttgaactttgcgtttaaggactacttcaagaggttgttcaacttcaagaaagctggcaacctggcctctggtggtgctgctggctccctcgtagtccagtcatatcacgccttccgtgaacctcagggaaaagccttgtgtgatgccttttctgaacaaccacaaacgtcactgggggtagatatccctcctccaaagaagcacaagccttcaaatggaaagggacaaaaccattga

SEQ ID NO: 105697 - DNA, 273 bp, Zea Mays
caggacatatcacttctccatggtctggggattaaatttgttcttgttccatgaacacatattcaaattgataagctgttgtcagaaagatggaataaggccaagtatgttggtcagtacagaattactgatgaagatgcaagaaaggctgcaatggatgtaggtggtagaatacgattgacaatagaagctaaactttctcctggtcctccaatgttaaatcttcgtaggcatggtgttattggacgctggcatggtcttgtggatagcatt

SEQ ID NO: 105698 - DNA, 393 bp, Zea Mays
cttttggttgaagcagatggcaagacaaggacactcattttaaataggccaaagcagctgaacgtactctcctcagcaatgattaagggactcctgaggtgtttcactgattatgtgaaagatgatggagttaaactgttgattatgaaggggaatggaagcgcattttgtgctggaggtgatattgttgcgggtgtccagtcaatatataatgaaagctggaaacggggcgctgatatgttccgagatatatattcgttaatctacataattgcaatatatatcaaacctcaggtttctcttcttaccggaattgtcatgggtggaggtgctggtgtttctttacatggaagatttcgagttgtcactgaaaacacggtatatgctagttaa

SEQ ID NO: 105699 - DNA, 3486 bp, Zea Mays
cttttggttgaagcagatggcaagacaaggacactcattttaaataggccaaagcagctgaacgtactctcctcagcaatgattaagggactcctgaggtgtttcactgattatgtgaaagatgatggagttaaactgttgattatgaaggggaatggaagcgcattttgtgctggaggtgatattgttgcgggtgtccagtcaatatataatgaaagctggaaacggggcgctgatatgttccgagatatatattcgttaatctacataattgcaatatatatcaaacctcaggtttctcttcttaccggaattgtcatgggtggaggtgctggtgtttctttacatggaagatttcgagttgtcactgaaaacacggtatatgctagttaaaaagttctcatgtcctgatgtagctagagatcatcctataatgttctgctgaatataaacatccagaggcataatattcataataaaaaactaccagtactgcctttatttcactatattttctgatgaatgttatggtttggtgtttcttggattagatttaagttatggtacagatctttttgcgagcttggtcagtgctagtagttcttttgctcattcgaaatatggagaatcttgcattctttttattaggaaataattatattttgacatgccaaaatcagtgttatcctatatatgctaaaccctaaacgctaaatggccatttaaacaaatgttttccgtttacatgtatctatttagccaccgtttaatgaaattatttaaaccgtttttaaccattgtcacactgcagggcacggaccgggcggtgaaactgggtggagacccaggcaaagaagtgtgtgcgggtggtgagcgtgtcagacttcaatcgaagaggaaaagtccaaagaaaatgggagaagtcatccaaaatcaccaaatagtatttataaccagaaagactgagtacaggagaggtccagagatcacaatgaaccaggtcaaaagcctgctcatcctgagaagaagaagtggtgaatgggagacgagtatgccggcctaactgacaagcatgacagaggccctcaaaatgtcccctactacatgaaagatctaggctactggtaatcttggtcatgatgtcaggtccgggatgtccgagacgatgatgccaagtggtggaggaggtggtggataccagggcaggaggcggagacgtgccggaggtggatggccggagcgtgtagaggggccccaagctgtcatagcgggcgaggggagtcctggtggccagatccttcacagaaaaaccagaggggtcaaactcaatggaacaggagttgtcagtggtgaaacgacgaacatagaggagattatgagtgatgtggggggctacgagaacgtcgttgaggtagaacggtccagggagaaccgaggcacctactgaggtgaccggcagagtggaactgtttctgaagacgatcgatgaaggatgagaggaatggggggatgggagcaagagagcgtgcctgtagtgggagtggtgtggtaggaggcaccagagtcgatcacccagtcggaggaaggaggggtcatcgccatggtgctgaaagcggcagcgagggaggcgttgtcccaacctccagacaacggggaccaagttatcgtgggggtccccgggggcaacagttggggcggagccggatgcgacgtgggcacgccgtagggcggcgcagtcaggagagctggcgccgggggacgggaggcacgtggggcctgtctcggccacatggtgatggtcccggtccagaggttatagaatgacggccacgcctggccgccaccccggccggggggaccaccacgagaggagccaccacccccacggccacccttgcggggacgacgacctccgtcggtggcggacgcctaacgaggggccacagggatggcaggtgtggggcgggtaggggccccgatcgaacgaagagcgaggggccggcccccctgaaggtgcctgaccgccgggaggagcgctgtagagcgccggagccggagtaggggcctcagacgccatggtgagctcctcgaggagaagctcgttcctgacggcatggaatgtgggaaagggaacggtcctcttgatgagagccttcatgtggccatagcgggggctgaggccacgcagaaggttcaacaccaaggtccggtcacgcgacaggctcgccgaggtcacggagagagtctgccatgcccttcatctggcggcagtactcgtccacggagaggtcccctgagagaacaggtggaactgggcgtcgaggtgcaaggcgcgagcgtcccgattcccgaggaactattcttcgagagcgagccacgcctgacggcccatgtcctcctggtcgcggatgatgtcttggagctcaacggtgatggttccgtggagccagtagaggaccacggagtccatcagggaccaagctcgggacggcagggtggcgacgtcgtcgaggacgtggtcgtcgagggcgtagcgccacaaggtgagaaggacctgccccctccagcgaggatagtgggaggacgccaggtccaaaacgacggacacgagggaccgaatgtcctgtagtccggccgtctgggcgtggagagcgacgatgtggtcaacatcgagtctagaggcgtggggagcctctgggtgggcggggttgtcgcctggtcgaccggaggaggcccgatgacgagatgctgcgcagtggccatttgggcggtcagtgtggcagccagggcgcgctcctgttctagagcgccggacgcggcgcgctcacgctcctgcgaggtggccagggtagcttggatggtggcgatggtagaggccagcgtggggtcggtggagggcggcggggaagcccaggtggcgtcggcgacgagcggccgagtggtggagaacccagggggcgggtgtctggggagacgtgtcggcgagggtagaccggtgagagcgtcgacgcacgtcgggtagcccgggaggccaaacccggaggggacgaggccggtagcacgcgcgctggccgtggtgggagtatcggcggcgctggacgaggggaggtgcgtcatggggcacggggagcagggctcacggcagtggcacggctggtggtgtccgatggaggtggctgcggctgccctgtgcgcagcagcaagctggtggtgtccgacggaggtggctgcggctgccctgtgcgcagcagcgaggtcggcggcagccagggttgtggcgaggtcgtcgagggcgctcgtgcgcaggccggcggagacggctgcggccagcgaagcagcagtggccgcgcccagcctggcggctgcggccatgcccagcccggctgcgcccgcgccctgcacggcaagagtagcgcccagacccgcggcggcggccgtgcccagggccgcggcggcgggttgctcggacgggggcggagggtccat

SEQ ID NO: 105700 - DNA, 99 bp, Zea Mays
catgtaattattgtggtgttagatggttgtcagttgtcacgccctggaattcccaaatttcaggatgccaatacaaaacgaataattagatgcaagcat

SEQ ID NO: 105701 - DNA, 164 bp, Zea Mays
cggccatatcgaacgcgccgcagccgtccagcacagcctccgccatatgctgcctttgcattgttgacgtcattttatgtcgtcgttttcacttttagacaaagcgtttcatcagatttatacaatacaataataatatttccgtgactgtcgtttattaagag

SEQ ID NO: 105702 - DNA, 2650 bp, Zea Mays
ataggtgttggcccgttgttacgagaagctatagaagagaagaagaaaaaaaaatggtaccatgtcacgtggtgatgggctgacagtctgtctgcatatgattcgtgggccgttctgggcatatatgctggatgaatactttccacaagatagataagcgaggcctcttcgttcacctctgtctcgctttcctttcccgttcaccccaagcccccaacctgcgagctgcgacaagttcgtctctctcgtggccacgactggccgccgcccccgcctccgtcccctcgcagattcccaggtcttcgccgctcccttcgccgccaaagagcacccactaggttaaatccgccagggggaaatctccatcaagtggctcgtgctaattatgcgatcttcatgggctgactcagttgcgaacgccgaggaatcggcgcccgcgactgctgctgctaatggctctgttgcaactcatagcacctcgcgccctacgcgcagctcctacgtgcctccacatcttcgtggccgctcagctggtgctgctgttgaagctcaagcaggcttagtagcaccagcacaaggtggaccactgccattggctgctgcacaaccttctggtcagggtgctgctgttggtggccctcgctgggctggcattgtgaatggtggtggtggtggtggcagcattggtgctcctcgccagggccatggtggcggaggcgggggccgtggtgcttggaactcccgtcctggtggttgggaccgcagagaccgggagccagatccgtttgcgaaagccgaggctgaagaaattgatttcgacggccaggagaatactggcatcaattttgatgcctatgaagacatccctgttgagaccagtggccatgatgtgcctgcaccagtcaacacatttgcagagattgatttgggtgatgcattgaatgacaatatccggaggtgcaagtatgtgaaaccaacaccagtgcagcgttacgccatcccaatctccattgctgggcgggatctcatggcctgcgcacagactggatccggaaaaaccgccgcattctgttttccaatcatcagtgggatcttgaagtcaccaaagccacaccagaggtcacggagtacaaggaccgcttgccctctagctctgatcttatcacccactcgtgagctttcagtccaaatccatgaagaagcaaggaagtttgcataccagactggtgtcagagttgtggttgcatatggtggcgcaccaataactaaccagctgagggagttagagagaggtgtggaaatcctggtggcaactcctggtcgcttgatggatctgttggagagggctagagtctcacttcaaatgataaagtatttagctcttgatgaagctgatcggatgcttgatatgggttttgagccacagatacgtaaaattgttgagggcatggacatgcctcaacgtggtgagaggcagacaatgttgttcagtgcaacattcccaaaagagatacagaggatggccgcagatttccttgctgattacatctttcttgctgttgggagagttggttcaagcaccgatttgattgttcagagggtggagtttgtcctcgattcagacaaacgaagctacctcatggatcttctgcatgcacaaaaggctaatggcacacatggaaagcacgctcttacattggtctttgtggagacaaagaggggggctgatgccctggaggactggctttttagaaatggatttcctgcaactagcattcatggagacaggacacaacaggaaagggagcatgcccttaggtccttcaagagcggagcaactcccatccttgtggcgactgatgttgctgctcgtggtcttgacataccacatgttgcccatgtgattaattttgacctccctaatgatatagatgactatgttcatcggattggaaggactggacgtgctgggaaatctggtcttgcgactgcattcttcaacgagagcaacactacgcttgcaaggccgttgagtgatctcatgaaagaggccaaccaggaggttcctaagtggcttgagggatacgctgcccgatcagcctacggaggtggaggtggtagaaaccgcagacaaggtagcagtgccagatttggtggccgtgatttccggcgagataggggcagtggtggaggatatggtggtggttcctacggaggaggtggtggtggtggatatgggggatcatcaggatacggtggtgcctatggtggcggtggcagcggcggcggcggctatggtggtggtcagagtacgagttcttgggactgaactgaactctgattagaagtgaaaaatgggccaaccttttgggcgtgaaaaatgggtcaaccgttatcgattagtccctgttggatggagcgaatgcttgaaatttgttgcttgacatacgattaatcttgcgttgtgttgtgctaagggattggcttatgttattatctggattggtggtttttctacgcctcatgcttgtgctgtctcgtttcacaaaatatcttttttgcttatgtcatagatataatttcatctaggtctgtcatttatatcaacttctgacttcgaccattatcgtgtcaaatcttcttgcacata

SEQ ID NO: 105703 - DNA, 2610 bp, Zea Mays
ataggtgttggcccgttgttacgagaagctatagaagagaagaagaaaaaaaaatggtaccatgtcacgtggtgatgggctgacagtctgtctgcatatgattcgtgggccgttctgggcatatatgctggatgaatactttccacaagatagataagcgaggcctcttcgttcacctctgtctcgctttcctttcccgttcaccccaagcccccaacctgcgagctgcgacaagttcgtctctctcgtggccacgactggccgccgcccccgcctccgtcccctcgcagattcccaggttaaatccgccagggggaaatctccatcaagtggctcgtgctaattatgcgatcttcatgggctgactcagttgcgaacgccgaggaatcggcgcccgcgactgctgctgctaatggctctgttgcaactcatagcacctcgcgccctacgcgcagctcctacgtgcctccacatcttcgtggccgctcagctggtgctgctgttgaagctcaagcaggcttagtagcaccagcacaaggtggaccactgccattggctgctgcacaaccttctggtcagggtgctgctgttggtggccctcgctgggctggcattgtgaatggtggtggtggtggtggcagcattggtgctcctcgccagggccatggtggcggaggcgggggccgtggtgcttggaactcccgtcctggtggttgggaccgcagagaccgggagccagatccgtttgcgaaagccgaggctgaagaaattgatttcgacggccaggagaatactggcatcaattttgatgcctatgaagacatccctgttgagaccagtggccatgatgtgcctgcaccagtcaacacatttgcagagattgatttgggtgatgcattgaatgacaatatccggaggtgcaagtatgtgaaaccaacaccagtgcagcgttacgccatcccaatctccattgctgggcgggatctcatggcctgcgcacagactggatccggaaaaaccgccgcattctgttttccaatcatcagtgggatcttgaagtcaccaaagccacaccagaggtcacggagtacaaggaccgcttgccctctagctctgatcttatcacccactcgtgagctttcagtccaaatccatgaagaagcaaggaagtttgcataccagactggtgtcagagttgtggttgcatatggtggcgcaccaataactaaccagctgagggagttagagagaggtgtggaaatcctggtggcaactcctggtcgcttgatggatctgttggagagggctagagtctcacttcaaatgataaagtatttagctcttgatgaagctgatcggatgcttgatatgggttttgagccacagatacgtaaaattgttgagggcatggacatgcctcaacgtggtgagaggcagacaatgttgttcagtgcaacattcccaaaagagatacagaggatggccgcagatttccttgctgattacatctttcttgctgttgggagagttggttcaagcaccgatttgattgttcagagggtggagtttgtcctcgattcagacaaacgaagctacctcatggatcttctgcatgcacaaaaggctaatggcacacatggaaagcacgctcttacattggtctttgtggagacaaagaggggggctgatgccctggaggactggctttttagaaatggatttcctgcaactagcattcatggagacaggacacaacaggaaagggagcatgcccttaggtccttcaagagcggagcaactcccatccttgtggcgactgatgttgctgctcgtggtcttgacataccacatgttgcccatgtgattaattttgacctccctaatgatatagatgactatgttcatcggattggaaggactggacgtgctgggaaatctggtcttgcgactgcattcttcaacgagagcaacactacgcttgcaaggccgttgagtgatctcatgaaagaggccaaccaggaggttcctaagtggcttgagggatacgctgcccgatcagcctacggaggtggaggtggtagaaaccgcagacaaggtagcagtgccagatttggtggccgtgatttccggcgagataggggcagtggtggaggatatggtggtggttcctacggaggaggtggtggtggtggatatgggggatcatcaggatacggtggtgcctatggtggcggtggcagcggcggcggcggctatggtggtggtcagagtacgagttcttgggactgaactgaactctgattagaagtgaaaaatgggccaaccttttgggcgtgaaaaatgggtcaaccgttatcgattagtccctgttggatggagcgaatgcttgaaatttgttgcttgacatacgattaatcttgcgttgtgttgtgctaagggattggcttatgttattatctggattggtggtttttctacgcctcatgcttgtgctgtctcgtttcacaaaatatcttttttgcttatgtcatagatataatttcatctaggtctgtcatttatatcaacttctgacttcgaccattatcgtgtcaaatcttcttgcacata

SEQ ID NO: 105704 - DNA, 2296 bp, Zea Mays
tcacctctgtctcgctttcctttcccgttcaccccaagcccccaacctgcgagctgcgacaagttcgtctctctcgtggccacgactggccgccgcccccgcctccgtcccctcgcagattcccaggtcttcgccgctcccttcgccgccaaagagcacccactaggcatgcttaccccttctcttctcttcctgctgtgcgaaacgagaacccaaaccctaatatcagctatttggatatttgtattcggatctgatctactactagtgtatacatgtcttgcgcctacaagtttcgattttttttgcagaagttattgggtgtacactgtttttagacatgtcctttactggttccgcccctttcttggcttaagcgcaaaaatcatactggattttagatttctgtactgttttttattggctaaattctactgtatgcttatttgttttctgcggttcacttgcccctttagctacaatttgcctcaaaattatgtttcaggttaaatccgccagggggaaatctccatcaagtggctcgtgctaattatgcgatcttcatgggctgactcagttgcgaacgccgaggaatcggcgcccgcgactgctgctgctaatggctctgttgcaactcatagcacctcgcgccctacgcgcagctcctacgtgcctccacatcttcgtggccgctcagctggtgctgctgttgaagctcaagcaggcttagtagcaccagcacaaggtggaccactgccattggctgctgcacaaccttctggtcagggtgctgctgttggtggccctcgctgggctggcattgtgaatggtggtggtggtggtggcagcattggtgctcctcgccagggccatggtggcggaggcgggggccgtggtgcttggaactcccgtcctggtggttgggaccgcagagaccgggagccagatccgtttgcgaaagccgaggctgaagaaattgatttcgacggccaggagaatactggcatcaattttgatgcctatgaagacatccctgttgagaccagtggccatgatgtgcctgcaccagtcaacacatttgcagagattgatttgggtgatgcattgaatgacaatatccggaggtgcaagtatgtgaaaccaacaccagtgcagcgttacgccatcccaatctccattgctgggcgggatctcatggcctgcgcacagactggatccggaaaaaccgccgcattctgttttccaatcatcagtgggatcttgaagtcaccaaagccacaccagaggtcacggagtacaaggaccgcttgccctctagctctgatcttatcacccactcgtgagctttcagtccaaatccatgaagaagcaaggaagtttgcataccagactggtgtcagagttgtggttgcatatggtggcgcaccaataactaaccagctgagggagttagagagaggtgtggaaatcctggtggcaactcctggtcgcttgatggatctgttggagagggctagagtctcacttcaaatgataaagtatttagctcttgatgaagctgatcggatgcttgatatgggttttgagccacagatacgtaaaattgttgagggcatggacatgcctcaacgtggtgagaggcagacaatgttgttcagtgcaacattcccaaaagagatacagaggatggccgcagatttccttgctgattacatctttcttgctgttgggagagttggttcaagcaccgatttgattgttcagagggtggagtttgtcctcgattcagacaaacgaagctacctcatggatcttctgcatgcacaaaaggctaatggcacacatggaaaggtcctatatttttcaggatttgttatgttcctaagtcgaacctgattgggttgaaagtttctactattttgtatcttgtcatttcctaacttgttcacagttttcatgacactttatctttttttttgttggatgcagcacgctcttacattggtctttgtggagacaaagaggggggctgatgccctggaggactggctttttagaaatggatttcctgcaactagcattcatggagacaggacacaacaggtagattggaggtttcatggttactaatagcacaagtgcatgcttaagatagaatagtgtatagtgcaaattggatttgttttaatcatatttttgtaagataataatatgagtaatcgattgtgcaatttgatttgttattaatgtaatatcattagaaaagagtacatatatcagaagcaattttgttacc

SEQ ID NO: 105705 - DNA, 2456 bp, Zea Mays
gttcacctcggctctttctcgctttctttctcccgttcacgccggctctacctgcgataggttcgtctctctcgtggcaacgactggccgccgccctcgccctcgcccccgcccccgcgcaggttcccaggtcttcgccggtcccttcgccgccaaagagcacccactaggttaaatctgccagcaggacatctccatcaagtgactggtgctaattatgcgatcttcatgggctgactcagttgcgaacgccgaggaatcggcgcccgcgactgctgctgctaacggctctgttgcaaatcatagcaactcgcgccctacgcgcagctcctacgtgcctcctcatctccgtggccgctcagctggtgctgctgttggagctcaagcaggctcagtagcaccagcacaaggtggaccactgccattggctgctgcacaaccttctggccagggcgctgttgttggtggccctcgctgggctggcattgtgaatggtggtggtggtggcagcgttggtgctcctcgccagggttatggtggtggtggtgggggcggaggccgtggtgcttggaactcccgtcctggtggttgggaccgcagagaccgggagccagatccgtttgccaaagccgaggctgaagaagttgacttcgacggccaggagaatactggcatcaattttgatgcctatgaagacatccctgttgagaccagtggccatgatgtgcctgcaccagtcaatacatttgcagagattgatttgggtgatgcattgaatgaaaatatccggaggtgcaagtatgtgaaaccaacaccagtgcagcgttacgctatcccaatctccatcgctgggcgggatctcatggcctgcgcacagactggatccggaaaaaccgccgcattctgttttccaatcataagtgggatcttgaagtcaccaaagccacaccagaggtcacggagtacaaggaccgcttgtcctctagctctgatcttatcacccactcgagagctctcagtccaaatccatgaggaagcaaggaagtttgcataccagactggtgtcagagtcgtggttgcatatggtggtgcaccaataactaaccagctgagggagttagagagaggtgtggaaatcctggtggcaactcctggtcgcttgatggatctgttggagagggctagagtctcacttcaaatgataaagtatttagctcttgatgaagctgatcggatgcttgatatgggtttcgagccacagatacgtaaaattgttgagggcatggacatgcctcaacgtggtgagaggcagacaatgttgtttagtgcgacattcccaaaagagatacagaggatggctgcagatttccttgctgattacatctttcttgctgttgggagagttggttcaagcaccgatttaattgttcagagggtggagtttgtcctcgattcagacaaacgaagctacctcatggatcttattcatgcacaaaaggctaatggcacacatggaaagcacgctcttacattggtctttgtggagacaaagaggggggctgatgccctggaggactggctttttagaaatggtttccctgcaactagcattcatggagacaggacacaacaggaaagggagcatgcccttaggtccttcaagagcggagcaactcctatccttgtggcgactgatgttgctgctcgtggtcttgacataccacatgttgcccatgtgattaattttgacctccctaatgatatagatgattatgttcatcggattggaaggaccggacgtgctgggaaatctggtcttgcgactgcattcttcaacgagagcaacactacgcttgcaaggccattgagtgatctcatgaaagaggcaaaccaggaggttcctaagtggcttgacgggtacgctgcccgctcagcctacggaggtggaggtggtagaaaccgcagacaaggtagtggtgccagatttggtggccgtgatttccggcgagataggggcagtggtggttcctacggaggaggtggtggtggtggtggaggatatggcggatcatcaggatacggtggtgcttatggcggcggcggcagcagtggctatggtggtggtcagagtacgagttcttgggactgaactgaattctggttagaagtgaaaaatgggtcaacctgttgggtgtgaaaaatgggtcaaccgttatcgattagtccctgttggatggagcgaatgcctgaaatttgttgcttgacttgcgagtacggtgtcaggaggtttcccagtgccttaatcttgcattttgtgttgtactagggattgcttatgttattatctgaattggtggtttcttttctacgcctcatgcttgtgctgtcttcttcacaaagtatcttgtgctaacttctgatcatagatataatttcatctaggtctcatttatatc

SEQ ID NO: 105706 - DNA, 899 bp, Zea Mays
cgacgcacggacgtccatccatgcgtaccagcagagcctcaccgccggcgcggcggcgcggcgctatattataagaattgaagaacccaagtctttgagctggagtcgtccatcgcgacataccaacttaacctttcgtgacacagacagaccggccgccgccgtcgtcaatgtcgaagctgcagagatcgtcggtgtcgttccggcgtcagggctcgtcggggcgcatctgggacgacccgctgcggggcctggacctcaaggggctgtcgtcgtcgacgacgacgacgacgacgacgccgaaggcggcgccgttgcaccccgacgccagccttctcgcgggggacccctcgccccgcgtggtgtcccgctcgctgctgatgcgccacgccggcgccggcgcctcatcggcaggaatcatagtggagagcccagacgtggtggcctccgcgtccccgtctgatgcggccagcgtcggcgtcaccagggcagacggcggcgagcgccaggagaggcccaagaagctgcggcggaggatctcgtccgcgttctgcgcctgcatggggcatcccccggcgtcgcacgcgcagcagtaggcaggctacggtgcgtactcaaatctaccagctgcatgcggtccgtcgtggggaatggctgacgcgcggcctggggttctcactctctttcttgctatgcaacaaacatttgtgatttgtgcttacgcgtgagaccgtacttgctgtaagatttttctcccctcttttctgtggatgtcataggatatatcaattgcgcgaggccctggcttcaattttggtgctgtttgattgtggattttgaacggtaacgtaaacgttatctgataacgatgtaaatggaaaaaaagtaagccgttattt

SEQ ID NO: 105707 - DNA, 2550 bp, Zea Mays
cccgtttcgccatcgcctcaagtacaaaccgaccgccccgtcgttcctcccaatgctccgcacccggacccgccctcgcccacgcgcacgccgcgcgcccgcgacgccgtagcagcgcgcgccgtcgagtggtggggctaggatctgcgtcgagtgatgagaaaggcagcgtcgacggcgatggcgggggcgggggctaccttccgccgccgcgcgatggaggggctggcgaccgtgctgctcctctacgcgctcctcgtgctcgccctcgagtcgccgctcgtctccacctcgccattcggtggcgccgcgggcggtacagcgcggaagctccacctctccttcggcgcgggcgagcgcgcggcgcccgtccccggcgcgtcggcgcacgggcaggatcatcggctctcccgcttcgcctccggcctcgacgtccgcctcctcgactccgcccgctccggcgcgctccgccggtccatagcggacgccgtcgcggcgggcgcccgcgcgttctccgacctcgaggccctcgaccccgccgccgtcgccgcgccctccggcgagagcgacgcggccaggtgcccgcactcgatcgcgctcaccgcggaggagctcggcgcgcggggccgcgtggtggagctgccctgcgggctcgcgctggggtcccacatcacggtcgccgcgacgccccgggcgccgcacgaggagcggaaccccgcgatcgcggtgctcagggacggggagcggcacgccatggtgtctcagttcatggtggagctgcaggggctcagggcggtcgacggcgaggacccgccccgcgtgctccacttcaacccgcgcctccgcggggactggagcggccacccggtgatcgagcagaacacctgctaccgcatgagctggggcgccgcgcagcgctgcgatggatggaggtcacgcccggatgaggagactgtggatgggttggtcaagtgcgagaagtggattagggacgatgatgacaggttggagaaatcgaagacaacatcaaagacggcatggtggctgaatcggctgatcgggcagaaggaggaggtcaatttcggttggccatttcctttcgtggagggcaggctctttgttcttactctcagtgctgggttggagggttaccatgtgagcgttgatgggcgacatgtcacttcgtttccttaccgcactgggtttgtgttggaggacgctacaggcctgtcactgaatggggacctagatgtgcattcagtgattgcagggtctttgcccactacacacccaagttttgcgccacataattatctggagttttctaatgtttggcaggctcctctgctgcctgatgagccagttgagattttcattggcattctgtcagcagccaatcattttgctgaacgtatgggtgtgaggaagacatggatgtctgctgtccacaagtcaccaaacatggtggctcgtttcttcgttgcactgcatggcagaatggaagtgaatgcggagttgaagaaggaagctgaattttttcgggacattgtttttgtgcccttcctggacaactatgatcttgttgttatgaagactcttgcaatatgcgagtatggggttcatgttgtctctgctaaatatgtaatgaagtgtgatgatgatactttcgtgagacttgattcagtagtcactgaaattaagaaggtaccaggtgggagaagtctttacatggggagtatgaatatacaacacaagccactacgccatgggaaatgggctgtaacctatgaggagtggccacaagaggtgtatccgttatatgcaaatggccctggatatgttatatcatctgatattgctgattttatcatgtcagaattcatgaagcaaaagttgatgctcttcaaaatggaagatgtgagcttgggtgtgtgggttgagcagttcaataagacaagacccgttgaatacgttcacagcgacaaattttgtccaaatggatgcgtccctgactactatactgctcattaccaatcgccaaggctaatgctatgcatgtggcagaagttactggaaggaagaccagactgttgcaatgcgagataacaatgatggcgtagttcaaaaaagaagaagaaaacaacaattacagaatgagtagcatttgaccatcatccatagagccagtctcatgtaatcaacaaattaggttataaagtaatctgcattacatgggattaattcatacatcttcatggtagtttatatcctccttgagtcatgcaactgatcctacctagtcacaacagtgggcaagccagcacactaataattgtgctctgtgctctctttgagcgcccaaacacataggtagaagttggcaggtgctctggagatgcccggggacttaatttggaaatatagagagtcgaaatagttcagttaagttattactgtttccagaatggctttaaggtctggttgtagttgcagctaaacacatctggttaacagggcaaccttcaagatttcagtcaatttgtttaacgc

SEQ ID NO: 105708 - DNA, 1231 bp, Zea Mays
gttcccgtcctcctcgttgttttgttccgtttccccccttgcctcgctcgtcgcgtacagctggacgcctcctttctcgctgcgggctgttgccttgcctccgtcccctcccctcgtcgcctccgactccacctcccctccccggtctctgagagagggagcccggacccggagaccgccagcaagcgcgaggcagaggaggagcatggcggccccgccgtcgaggtcgcggggcgactacgaccacctgattaagctcctgctcatcggcgacagcggagttggaaagagttgcttgctgctgcggttctctgatgacacattcacgacaagttttatcaccaccatcggcattgatttcaaggttaggacggtcgagctcgatggaaagcgtgtaaaattacaaatttgggacactgctggtcaagaacgtttccgaacaattaccactgcttactacagaggagctatgggcattctgcttgtatacgatgtcacagacgaatcgtccttcgatagtacgcaacaacatgcacacattaggaactggattcgcaacatagagcagcacgcatctgataatgtcaacaagatcttggtgggcaacaaggtcgatatggatgcgaagcgggtggtctccacagctcaaggtcagaagctcgcagatgaatacgggatcaagtttttcgagacgagtgcgaaaacgaaccgaaatgtggagcaggtattcttcgccatggcaagggacgtgaagcaaaggctcaccgagaccgttgccgctgcggctgagcccccgaccattcagattagcaggccagaccccgaccaggctgacgcagcctcctcgcggcggtggtcgtcgtcctgctgtaacacctgatctggcgactgccgtggcgaaatcaagcagcgtgaatcttgatgcgcgtgactggactgctaggttactgattgtcgcatgtgttcactttcattccggtgccgtgccaagccaagccgggatgtataaatttcgctgtctagtattcacctcaatcaatgtgttaactcccgctgcttcgcacgtcacgtcgtttgtttgttgagagcaaaacgtgtgtggggcagataaaaaaaaaagccctggtgggtttgctcctgtcacgtactaaacagaacgtgtctgatgattgtgtcgacggtggaacttggaagcgtgcttgtctcactattgttccgtgttttcgtccaa

SEQ ID NO: 105709 - DNA, 1207 bp, Zea Mays
gtcctcctcgttgttttgttccgtttccccccttgcctcgctcgtcgcgtacagctggacgcctcctttctcgctgcgggctgttgccttgcctccgtcccctcccctcgtcgcctccgactccacctcccctccccggtctctgagagagggagcccggacccggagaccgccagcaagcgcgaggcagaggaggagcatggcggccccgccgtcgaggtcgcggggcgactacgaccacctgattaagctcctgctcatcggcgacagcggagttggaaagagttgcttgctgctgcggttctctgatgacacattcacgacaagttttatcaccaccatcggcattgatttcaaggttaggacggtcgagctcgatggaaagcgtgtaaaattacaaatttgggacactgctggtcaagaacgtttccgaacaattaccactgcttactacagaggagctatgggcattctgcttgtatacgatgtcacagacgaatcgtccttcgataacattaggaactggattcgcaacatagagcagcacgcatctgataatgtcaacaagatcttggtgggcaacaaggtcgatatggatgcgaagcgggtggtctccacagctcaaggtcagaagctcgcagatgaatacgggatcaagtttttcgagacgagtgcgaaaacgaaccgaaatgtggagcaggtattcttcgccatggcaagggacgtgaagcaaaggctcaccgagaccgttgccgctgcggctgagcccccgaccattcagattagcaggccagaccccgaccaggctgacgcagcctcctcgcggcggtggtcgtcgtcctgctgtaacacctgatctggcgactgccgtggcgaaatcaagcagcgtgaatcttgatgcgcgtgactggactgctaggttactgattgtcgcatgtgttcactttcattccggtgccgtgccaagccaagccgggatgtataaatttcgctgtctagtattcacctcaatcaatgtgttaactcccgctgcttcgcacgtcacgtcgtttgtttgttgagagcaaaacgtgtgtggggcagataaaaaaaaaagccctggtgggtttgctcctgtcacgtactaaacagaacgtgtctgatgattgtgtcgacggtggaacttggaagcgtgcttgtctcactattgttccgtgttttcgtccaa

SEQ ID NO: 105710 - DNA, 1396 bp, Zea Mays
gttgttttgttccgtttccccccttgcctcgctcgtcgcgtacagctggacgcctcctttctcgctgcgggctgttgccttgcctccgtcccctcccctcgtcgcctccgactccacctcccctccccggtctctgagagagggagcccggacccggagaccgccagcaagcgcgaggcagaggaggagcatggcggccccgccgtcgaggtcgcggggcgactacgaccacctgattaagctcctgctcatcggcgacagcggagttggaaagagttgcttgctgctgcggttctctgatgacacattcacgacaagttttatcaccaccatcgggtatgtacccaggcaacatcatcctctcttttagtcattcatttatggtgatattctgaacttcacttttcccatcttctgtaaagcattgatttcaaggttaggacggtcgagctcgatggaaagcgtgtaaaattacaaatttgggacactgctggtcaagaacgtttccgaacaattaccactgcttactacagaggagctatgggcattctgcttgtatacgatgtcacagacgaatcgtccttcgatagtacgcaacaacatgcacgtgaattcccccatccgtcgacagaagatggaaaatgctagccccactttgtttgttcatgtatctgtttgttttttcttaatgaatcgtgtagacattaggaactggattcgcaacatagagcagcacgcatctgataatgtcaacaagatcttggtgggcaacaaggtcgatatggatgcgaagcgggtggtctccacagctcaaggtcagaagctcgcagatgaatacgggatcaagtttttcgagacgagtgcgaaaacgaaccgaaatgtggagcaggtattcttcgccatggcaagggacgtgaagcaaaggctcaccgagaccgttgccgctgcggctgagcccccgaccattcagattagcaggccagaccccgaccaggctgacgcagcctcctcgcggcggtggtcgtcgtcctgctgtaacacctgatctggcgactgccgtggcgaaatcaagcagcgtgaatcttgatgcgcgtgactggactgctaggttactgattgtcgcatgtgttcactttcattccggtgccgtgccaagccaagccgggatgtataaatttcgctgtctagtattcacctcaatcaatgtgttaactcccgctgcttcgcacgtcacgtcgtttgtttgttgagagcaaaacgtgtgtggggcagataaaaaaaaaagccctggtgggtttgctcctgtcacgtactaaacagaacgtgtctgatgattgtgtcgacggtggaacttggaagcgtgcttgtctcactattgttccgtgttttcgtccaa

SEQ ID NO: 105711 - DNA, 1310 bp, Zea Mays
gttgttttgttccgtttccccccttgcctcgctcgtcgcgtacagctggacgcctcctttctcgctgcgggctgttgccttgcctccgtcccctcccctcgtcgcctccgactccacctcccctccccggtctctgagagagggagcccggacccggagaccgccagcaagcgcgaggcagaggaggagcatggcggccccgccgtcgaggtcgcggggcgactacgaccacctgattaagctcctgctcatcggcgacagcggagttggaaagagttgcttgctgctgcggttctctgatgacacattcacgacaagttttatcaccaccatcggcattgatttcaaggttaggacggtcgagctcgatggaaagcgtgtaaaattacaaatttgggacactgctggtcaagaacgtttccgaacaattaccactgcttactacagaggagctatgggcattctgcttgtatacgatgtcacagacgaatcgtccttcgatagtacgcaacaacatgcacgtgaattcccccatccgtcgacagaagatggaaaatgctagccccactttgtttgttcatgtatctgtttgttttttcttaatgaatcgtgtagacattaggaactggattcgcaacatagagcagcacgcatctgataatgtcaacaagatcttggtgggcaacaaggtcgatatggatgcgaagcgggtggtctccacagctcaaggtcagaagctcgcagatgaatacgggatcaagtttttcgagacgagtgcgaaaacgaaccgaaatgtggagcaggtattcttcgccatggcaagggacgtgaagcaaaggctcaccgagaccgttgccgctgcggctgagcccccgaccattcagattagcaggccagaccccgaccaggctgacgcagcctcctcgcggcggtggtcgtcgtcctgctgtaacacctgatctggcgactgccgtggcgaaatcaagcagcgtgaatcttgatgcgcgtgactggactgctaggttactgattgtcgcatgtgttcactttcattccggtgccgtgccaagccaagccgggatgtataaatttcgctgtctagtattcacctcaatcaatgtgttaactcccgctgcttcgcacgtcacgtcgtttgtttgttgagagcaaaacgtgtgtggggcagataaaaaaaaaagccctggtgggtttgctcctgtcacgtactaaacagaacgtgtctgatgattgtgtcgacggtggaacttggaagcgtgcttgtctcactattgttccgtgttttcgtccaa

SEQ ID NO: 105712 - DNA, 2970 bp, Zea Mays
ttttaattatagcttcaaacagctaactttaatacgaaacgaacatgtaatatactcgatacaaaatttacaacccaacattaggtttcatcagttcaccgtcgtaaaaagtaaaactaccggaagtttgtaactaacccaacaaaaccgccgttatcatacgcgtattaccacctatccgttgtgcttgctgttccagcctcctcacaacacaagggtccatgccctgcgccgccgccgcggcgaccccccaccccgcgtcccccgcaacggtcacagctcacctcagctcaacgcgcccagacccggcgaccccgaccctcctctccagctagtatttaccaccacccagcccccttcccgcaccgcaccaaacggctactacccctcccctcccctcccaggctcccacccccactgccttccagaaccttccgccgtccgcgatgccgacaccgcctccgcggaagaagcgcctggtccgcgcaggcctcctcgccgccgcggccggttacttcgccttcgtcctcctcttcgagctgcccctgctgccctttctggcgtcgtcctcccccgccgccaccacctcctcctcctcctcctcgctccccttccagcacccgcgccggcgggagctggaggccgcggcggcggcgttcacgtccccgttctcgcccgcccgcccctccaagcgggccttccccgccgccgccgcaccggccccgggctccacgccgcggctcccgatcttctcttccctcctcctcctcccgcggcccaatgccacggccacccccttcgacaacaccgccgccgacgccttcgccgcggccaagccgcacctcgcccacctccaggccacggccaaccccaccgccgcgtctgcgcccgcgtcgtcgccgccgccgacctgccccgcctcggtcgccgtgcaccgggagcagctcccctacgacggcgtccgcgtggtggagctcccctgcgggctggcggtgggctcccacgtcaccgtggtggcccggccccggcccgcccggcccgagtacgaccccaagatcgccgagcgcaaggacggggaggccgcggtcatggtgtcgcagttcatggtcgagctggtcggcaccaaggccgtcgacggggaggcgccgcccaggatcctgcacttgaaccccaggatccgcggggactacagccggaagcccgtcgtcgagatgaacagctgctaccggatgcagtggggacagtcgcagcgctgcgagggcttcgcctcccgccccgtcgaggacaccgttgacgggcaactcaagtgtgagaaatggatccgtgacgatgacagcaagtcagaggaatcaaagatgaaatggtgggtcaagcgtttgattggcaggcctaaggatgtccgcatcatttggccatacccattcacggaaggcaagctatttgttatgactttaacagctggtttggaaggttaccatgttaatgttgatgggcggcatgttgcttcgtttccttaccgcactggttactctcttgaggatgcaactgcattatccctgaatggagacatcgatattgagtcgatttttgctagttctctacccaattcgcatccaagcttcgctcccgagcgataccttgagatgtctgaacagtggagagctccacctctgcccactgaacctgttgagcttttcatcggcattctttctgcagccagccattttgctgagcgtatggctgtaaggaaatcgtggatgatgtatacaaggaaatcatccaatgttgtagctcggttctttgtggctctgaatggaaagaaggaggttaacgcagagctcaagaaggaggcagagttcttccaggacattgtcatagtgccttttatcgatacctatgacctcgttgtgttgaagaccgttgccattgctgagtatggggtgcgcgtcgtccctgcaaagtacgtaatgaaatgcgacgacgacacattcgtgaggatcgattcggtactggatcaagtgaagaatgttggaaacgataaaagcgtttacgtagggagtataaactacttccatcgaccactaagatctggcaagtgggcagtaacgtacgaggaatggcctgaagcactgtatccgaattatgctaatggacctggctacgtaatttcatccgatattgctcgctacatcgtgtccgaattcgacaaccagacgcttcggctgtttaagatggaggatgtgagcatgggcatgtgggtggagaagttcaacaggacgcggcgggcggtggagatccggcacgacgtgcggttctaccagtcgggctgctacaacggctacttcacggcgcactaccagtccccgcagcacatgatctgcctgtggcggaagctgcagtccgggagtgcccggtgctgcaacgtcagatgacgcattgcgagagagagcctgattttgtactctttcttgatcaaagaggagagaaacagatggtggtggacgacgggtcggcagcccgtaagcgcagctcttctgcgatggacacagctgacgacgacccgttacgacggtgggtttgcaggaggaggttgctcttctggaccttgtgatgcgatgattctttcattcttttggtcggtggcccgtttgagctgctgattctgacagccctggtcggcgtccatggtcggggattctcttatgctgctgctgctgctaccacctgttgatatttttaggtggtagatccagtacatgaggctaagtagggctccggatcatatgggatctatccttgtgctttgcgtcaaacttctttgacctagaaattttaacttgggtgagttcggttggtaggctgtgcttgtctataaaaaatgattttctgagtttgtatttgtgttggcttatcttatatacgaacttgtgcgtgaaaaaaaaaatcaacgtgtcttcttttgttatgcca

SEQ ID NO: 105713 - DNA, 1869 bp, Zea Mays
tctccccgggcacatgcccgtgggcacgcgtgcaggccactggccacccccacgcagaaaaaccagcggccgcgcgcaccgacccggccgacgactccggcgaccgcgcgcacacgacaaaaccccggcggcgacgacagacccacaggatcagacgactcagcgagcggaacaccccctggcgccggccgttaaagtcaagtcaagcaccggagccggtgtataaagctccggcgactggtgcccaccacggctagctgccgtcgtcgcagaagtaggagctcgcgtttctccatccgtacgtcctgcagtagtgattgggcagcatcgtcatcgatcgatcgccatgaggctccgcggcgtgctgcgcctcgtcctcgcgctcctcctcgccgccaccgccatcgtgccggtgctgctccttagcgagaacggcggcggcggcgtcgcacctgcgccgccgttcaactcctcgcgtgtcaaggccgtctcgtggcatccaaggtacaccgcgacatcgtcgagcacgtagtagctactagctagtaggaggagctagcgagccgaggaggacacatcacatgcatgctgacgagggccttgtttaaatttcgtgttgtttctcgtcgtccctgatccctcccggcgcaccccgcaaccgcacgcaggatcttcgtgtacaaggggttcctctccgacgccgagtgtgaccacctcgtgactctggcgaagaaaaagatccagcggtccatggtggcggacaacgagtccggcaagagcgtcaagagcgaggtgcgcaccagctccggcatgttcctcgacaagcgccaggacccggtggtgagtcggatcgaggagaggatcgcggcatggacgtttcttcctcaagagaacgccgagaacatgcaggtgctgcgctacgagccggggcagaagtacgagccgcacttcgactacttccacgacagggtcaaccaggcccgcggcggccaccgctacgccaccgtgctcatgtacctgtccaccgtccgcgagggaggcgagaccgtgttccccaacgccaaggtaggtgtaggtagctagctaggtgctctcgatcaaggctgctttgcttgcttgctcgcagtcgcagtcgcagtcgcagatcgagattctcttccatgttcgttcttgacactggcagcccaatccgatgcagggttgggagtcccagcccaaggacgccactttctccgagtgtgcacacaaaggattggcaggtaattaatctcccacccaagagaatggtgcaccaggccaggccatgccatgccatgtctgtcttcaagaacggcaggagaaaggcgagaagcttcggacgacgacgctgacagattcgcttattgcttgcttgccgcgcgcgtgcagtgaaaccggtgaaaggcgacgccgtgctcttcttcagcctgcacgccgacggcacgccggacccgctcagcctccacgggagctgcccggtgatccggggcgagaagtggtcggcgcccaagtggatccacgtcaggtcgtacgaggacgaaccccaggcagtactcgtgctccccgaggaaaccgacggcgcgcgggtgcgccgataggagcgagcgctgcgcgaagtgggccgcggcgggtgagtgcgcctggaacccggcgtacatgctcggcgccggcgatgagggggcgcctgggcagtgccgcaggagctgcggagtctgcgattcgtaggcgcgtccttgccttttctttctttcttcctttctttgtttgttttgggatgcagtattcagataactagtggctgtttttctgtacttgatgatgatgtgtacatagctagtgaaagctttcttc

SEQ ID NO: 105714 - DNA, 1583 bp, Zea Mays
tctccccgggcacatgcccgtgggcacgcgtgcaggccactggccacccccacgcagaaaaaccagcggccgcgcgcaccgacccggccgacgactccggcgaccgcgcgcacacgacaaaaccccggcggcgacgacagacccacaggatcagacgactcagcgagcggaacaccccctggcgccggccgttaaagtcaagtcaagcaccggagccggtgtataaagctccggcgactggtgcccaccacggctagctgccgtcgtcgcagaagtaggagctcgcgtttctccatccgtacgtcctgcagtagtgattgggcagcatcgtcatcgatcgatcgccatgaggctccgcggcgtgctgcgcctcgtcctcgcgctcctcctcgccgccaccgccatcgtgccggtgctgctccttagcgagaacggcggcggcggcgtcgcacctgcgccgccgttcaactcctcgcgtgtcaaggccgtctcgtggcatccaaggatcttcgtgtacaaggggttcctctccgacgccgagtgtgaccacctcgtgactctggcgaagaaaaagatccagcggtccatggtggcggacaacgagtccggcaagagcgtcaagagcgaggtgcgcaccagctccggcatgttcctcgacaagcgccaggacccggtggtgagtcggatcgaggagaggatcgcggcatggacgtttcttcctcaagagaacgccgagaacatgcaggtgctgcgctacgagccggggcagaagtacgagccgcacttcgactacttccacgacagggtcaaccaggcccgcggcggccaccgctacgccaccgtgctcatgtacctgtccaccgtccgcgagggaggcgagaccgtgttccccaacgccaagggttgggagtcccagcccaaggacgccactttctccgagtgtgcacacaaaggattggcaggtaattaatctcccacccaagagaatggtgcaccaggccaggccatgccatgccatgtctgtcttcaagaacggcaggagaaaggcgagaagcttcggacgacgacgctgacagattcgcttattgcttgcttgccgcgcgcgtgcagtgaaaccggtgaaaggcgacgccgtgctcttcttcagcctgcacgccgacggcacgccggacccgctcagcctccacgggagctgcccggtgatccggggcgagaagtggtcggcgcccaagtggatccacgtcaggtcgtacgaggacgaaccccaggcagtactcgtgctccccgaggaaaccgacggcgcgcgggtgcgccgataggagcgagcgctgcgcgaagtgggccgcggcgggtgagtgcgcctggaacccggcgtacatgctcggcgccggcgatgagggggcgcctgggcagtgccgcaggagctgcggagtctgcgattcgtaggcgcgtccttgccttttctttctttcttcctttctttgtttgttttgggatgcagtattcagataactagtggctgtttttctgtacttgatgatgatgtgtacatagctagtgaaagctttcttcagatgatgatg

SEQ ID NO: 105715 - DNA, 1438 bp, Zea Mays
tctccccgggcacatgcccgtgggcacgcgtgcaggccactggccacccccacgcagaaaaaccagcggccgcgcgcaccgacccggccgacgactccggcgaccgcgcgcacacgacaaaaccccggcggcgacgacagacccacaggatcagacgactcagcgagcggaacaccccctggcgccggccgttaaagtcaagtcaagcaccggagccggtgtataaagctccggcgactggtgcccaccacggctagctgccgtcgtcgcagaagtaggagctcgcgtttctccatccgtacgtcctgcagtagtgattgggcagcatcgtcatcgatcgatcgccatgaggctccgcggcgtgctgcgcctcgtcctcgcgctcctcctcgccgccaccgccatcgtgccggtgctgctccttagcgagaacggcggcggcggcgtcgcacctgcgccgccgttcaactcctcgcgtgtcaaggccgtctcgtggcatccaaggatcttcgtgtacaaggggttcctctccgacgccgagtgtgaccacctcgtgactctggcgaagaaaaagatccagcggtccatggtggcggacaacgagtccggcaagagcgtcaagagcgaggtgcgcaccagctccggcatgttcctcgacaagcgccaggacccggtggtgagtcggatcgaggagaggatcgcggcatggacgtttcttcctcaagagaacgccgagaacatgcaggtgctgcgctacgagccggggcagaagtacgagccgcacttcgactacttccacgacagggtcaaccaggcccgcggcggccaccgctacgccaccgtgctcatgtacctgtccaccgtccgcgagggaggcgagaccgtgttccccaacgccaagggttgggagtcccagcccaaggacgccactttctccgagtgtgcacacaaaggattggcagtgaaaccggtgaaaggcgacgccgtgctcttcttcagcctgcacgccgacggcacgccggacccgctcagcctccacgggagctgcccggtgatccggggcgagaagtggtcggcgcccaagtggatccacgtcaggtcgtacgaggacgaaccccaggcagtactcgtgctccccgaggaaaccgacggcgcgcgggtgcgccgataggagcgagcgctgcgcgaagtgggccgcggcgggtgagtgcgcctggaacccggcgtacatgctcggcgccggcgatgagggggcgcctgggcagtgccgcaggagctgcggagtctgcgattcgtaggcgcgtccttgccttttctttctttcttcctttctttgtttgttttgggatgcagtattcagataactagtggctgtttttctgtacttgatgatgatgtgtacatagctagtgaaagctttcttcagatgatgatgacg

SEQ ID NO: 105716 - DNA, 1602 bp, Zea Mays
tctccccgggcacatgcccgtgggcacgcgtgcaggccactggccacccccacgcagaaaaaccagcggccgcgcgcaccgacccggccgacgactccggcgaccgcgcgcacacgacaaaaccccggcggcgacgacagacccacaggatcagacgactcagcgagcggaacaccccctggcgccggccgttaaagtcaagtcaagcaccggagccggtgtataaagctccggcgactggtgcccaccacggctagctgccgtcgtcgcagaagtaggagctcgcgtttctccatccgtacgtcctgcagtagtgattgggcagcatcgtcatcgatcgatcgccatgaggctccgcggcgtgctgcgcctcgtcctcgcgctcctcctcgccgccaccgccatcgtgccggtgctgctccttagcgagaacggcggcggcggcgtcgcacctgcgccgccgttcaactcctcgcgtgtcaaggccgtctcgtggcatccaaggtacaccgcgacatcgtcgagcacgtagtagctactagctagtaggaggagctagcgagccgaggaggacacatcacatgcatgctgacgagggccttgtttaaatttcgtgttgtttctcgtcgtccctgatccctcccggcgcaccccgcaaccgcacgcaggatcttcgtgtacaaggggttcctctccgacgccgagtgtgaccacctcgtgactctggcgaagaaaaagatccagcggtccatggtggcggacaacgagtccggcaagagcgtcaagagcgaggtgcgcaccagctccggcatgttcctcgacaagcgccaggacccggtggtgagtcggatcgaggagaggatcgcggcatggacgtttcttcctcaagagaacgccgagaacatgcaggtgctgcgctacgagccggggcagaagtacgagccgcacttcgactacttccacgacagggtcaaccaggcccgcggcggccaccgctacgccaccgtgctcatgtacctgtccaccgtccgcgagggaggcgagaccgtgttccccaacgccaagggttgggagtcccagcccaaggacgccactttctccgagtgtgcacacaaaggattggcagtgaaaccggtgaaaggcgacgccgtgctcttcttcagcctgcacgccgacggcacgccggacccgctcagcctccacgggagctgcccggtgatccggggcgagaagtggtcggcgcccaagtggatccacgtcaggtcgtacgaggacgaaccccaggcagtactcgtgctccccgaggaaaccgacggcgcgcgggtgcgccgataggagcgagcgctgcgcgaagtgggccgcggcgggtgagtgcgcctggaacccggcgtacatgctcggcgccggcgatgagggggcgcctgggcagtgccgcaggagctgcggagtctgcgattcgtaggcgcgtccttgccttttctttctttcttcctttctttgtttgttttgggatgcagtattcagataactagtggctgtttttctgtacttgatgatgatgtgtacatagctagtgaaagctttcttcagatgatgatgacg

SEQ ID NO: 105717 - DNA, 2551 bp, Zea Mays
tctccccgggcacatgcccgtgggcacgcgtgcaggccactggccacccccacgcagaaaaaccagcggccgcgcgcaccgacccggccgacgactccggcgaccgcgcgcacacgacaaaaccccggcggcgacgacagacccacaggatcagacgactcagcgagcggaacaccccctggcgccggccgttaaagtcaagtcaagcaccggagccggtgtataaagctccggcgactggtgcccaccacggctagctgccgtcgtcgcagaagtaggagctcgcgtttctccatccgtacgtcctgcagtagtgattgggcagcatcgtcatcgatcgatcgccatgaggctccgcggcgtgctgcgcctcgtcctcgcgctcctcctcgccgccaccgccatcgtgccggtgctgctccttagcgagaacggcggcggcggcgtcgcacctgcgccgccgttcaactcctcgcgtgtcaaggccgtctcgtggcatccaaggtacaccgcgacatcgtcgagcacgtagtagctactagctagtaggaggagctagcgagccgaggaggacacatcacatgcatgctgacgagggccttgtttaaatttcgtgttgtttctcgtcgtccctgatccctcccggcgcaccccgcaaccgcacgcaggatcttcgtgtacaaggggttcctctccgacgccgagtgtgaccacctcgtgactctggtgagcgacgacgaccgcgccgccgatggcggggtttgcggtacaagtactaactgctgcatggtggattgaacaggcgaagaaaaagatccagcggtccatggtggcggacaacgagtccggcaagagcgtcaagagcgaggtgcgcaccagctccggcatgttcctcgacaagcgccaggtacgaccttccgtatctacactacacacagctagcatgctccatcactgacagagtgtggctgacagtaacgtggttttcctctcgtcttgttccgctcggtcggtcgcgcaggacccggtggtgagtcggatcgaggagaggatcgcggcatggacgtttcttcctcaagagaacgccgagaacatgcaggtgctgcgctacgagccggggcagaagtacgagccgcacttcgactacttccacgacagggtcaaccaggcccgcggcggccaccgctacgccaccgtgctcatgtacctgtccaccgtccgcgagggaggcgagaccgtgttccccaacgccaaggtaggtgtaggtagctagctaggtgctctcgatcaaggctgctttgcttgcttgctcgcagtcgcagtcgcagtcgcagatcgagattctcttccatgttcgttcttgacactggcagcccaatccgatgcagggttgggagtcccagcccaaggacgccactttctccgagtgtgcacacaaaggattggcaggtaattaatctcccacccaagagaatggtgcaccaggccaggccatgccatgccatgtctgtcttcaagaacggcaggagaaaggcgagaagcttcggacgacgacgctgacagattcgcttattgcttgcttgccgcgcgcgtgcagtgaaaccggtgaaaggcgacgccgtgctcttcttcagcctgcacgccgacggcacgccggacccgctcagcctccacgggagctgcccggtgatccggggcgagaagtggtcggcgcccaagtggatccacgtcaggtcgtacgaggacgaaccccaggcagtactcgtgctccccgaggaaaccgacggcgcgcgggtgcgccgataggagcgagcgctgcgcgaagtgggccgcggcgggtgagtgcgcctggaacccggcgtacatgctcggcgccggcgatgagggggcgcctgggcagtgccgcaggagctgcggagtctgcgattcgtaggcgcgtccttgccttttctttctttcttcctttctttgtttgttttgggatgcagtattcagataactagtggctgtttttctgtacttgatgatgatgtgtacatagctagtgaaagctttcttcagatgatgatgacgatgatatgagtcggcaaccaatagatataaacgctgcagctacaattcatagagacaaaatcaccatagaaaccaatgtattaaatcgcgggctaagaggtttagcggctgggttccagaacagctaagtccagctataaccggctatagcggaagctaaaccttttagcggatttgcaaaaaaaaaagagtataaacatgaacatctattgaagaatacatgcctgtttgcttctcttgctgagatatggtgccggttgaactggacagcaattggaggttggagagtggagagaatactattggagtactgccttgattattgctacttgcttcattgcttgccgccagcagtgagctagggacagggagtagtggccgagatcctacaggagcagcaacggcatctcctgcttcatccccatcgccgccaacgtgttgaacttgaaccgttgaagccagccgccgccatcaggtt

SEQ ID NO: 105718 - DNA, 981 bp, Zea Mays
gatgcagggttgggagtcccagcccaaggacgccactttctccgagtgtgcacacaaaggattggcaggtaattaatctcccacccaagagaatggtgcaccaggccaggccatgccatgccatgtctgtcttcaagaacggcaggagaaaggcgagaagcttcggacgacgacgctgacagattcgcttattgcttgcttgccgcgcgcgtgcagtgaaaccggtgaaaggcgacgccgtgctcttcttcagcctgcacgccgacggcacgccggacccgctcagcctccacgggagctgcccggtgatccggggcgagaagtggtcggcgcccaagtggatccacgtcaggtcgtacgaggacgaaccccaggcagtactcgtgctccccgaggaaaccgacggcgcgcgggtgcgccgataggagcgagcgctgcgcgaagtgggccgcggcgggtgagtgcgcctggaacccggcgtacatgctcggcgccggcgatgagggggcgcctgggcagtgccgcaggagctgcggagtctgcgattcgtaggcgcgtccttgccttttctttctttcttcctttctttgtttgttttgggatgcagtattcagataactagtggctgtttttctgtacttgatgatgatgtgtacatagctagtgaaagctttcttcagatgatgatgacgatgatatgagtcggcaaccaatagatataaacgctgcagctgtttgcttctcttgctgagatatggtgccggttgaactggacagcaattggaggttggagagtggagagaatactattggagtactgccttgattattgctacttgcttcattgcttgccgccagcagtgagctagggacagggagtagtggccgagatcctacaggagcagcaacggcatctcctgcttcatccccatcgccgccaacgtgttgaacttgaaccgttgaagccagccgccgccatca

SEQ ID NO: 105719 - DNA, 950 bp, Zea Mays
attgcccacgcaatataatattcctgcctcccgcgcgcaataactagccctcgcatggatggatctatctacctctcttcgtccccgatttattacgccatggcatggctagccagctgcttgcgcgccatttattatgggtgcgtgtgctcttcacctgtccctgtccctgtcctctcctcctcccgcactttaaaaacccctcgaccgctctccatccagttctccatcgaacccccgccaccaccagtccagcagcaccaggccagacaggcacacctcgaagaacaagagctggtcctcctggtaataagcgagagagagagagaggccaatggcagccaagtggtggctcgtcgcctccctgctgctctgcctcgccgtcgcatcggcggcggcaagggcaataatgccccgcgactgcgacactgctgccgccttcgcggcgggcgacggcagtgccggcgccgtggacgaggacgacgagcaggccaagaccgccgacgtgttcggcgggcggaccggcggcggcggcctcttcggcggcgtccacggcccgctgggcggcggcgtcgctgggttcggcccgttcggcggggccgtcgccggcgcgggcccgttcggcgggttcggaggcggcggcggcctcggtggcggaggaggagcaggtggcgccggcgtcccgtgaggcgtgagcaacgctgtgcttgtgcatggccatggatgcatgcgtgcgtgcgcgtgtaataatgtgtctgtgcggtacgactgtacgtacgtgccgtgtgcctgcccgcgctcttgtgatgaagaatgtgggtcgtcagccatcagcgtgtgtgtgtgtgtgtgtgtgtgtgtgttggacttggacctgtacaccctccttccgtcttcccactgtatgttaatcagcattcttcgaaccatgcaacgtcgccattattgtc

SEQ ID NO: 105720 - DNA, 794 bp, Zea Mays
ttagcttttattagcttttactgtttctataatgttttgtatctatgtggattacagctgacagctgcagcagtccgaaataagagctagaaaacgagcattttcgaacagagtcgcctgcaacctggggagcaaacgtagtacgtaacatctactgacataggagtagcaacacggatcagggtagcacagcacacggggctatacatgcacaatagtggcatccaaaattacacgacacaacccccctcccacttcgcccctcggttcacccagtcatttcccgaccaaccaacagcaatcaacaccgacaccaggaatgactctttatctggtgaccaccaagaattatcggcgcaggacgacttaacacgacgactaaagaagcaaaaaaaaaactccacatgtagtctcctccttctcgcaggtgccagggcagggcagggcagggcacggccatccgtaagtccccctcctcacttgctgccgcacttgaagccatggcacaccgacaggatgatgatgaggatgagcgcgatgatgatgcccagcacgatcagcttgatcttcatgttttggagccacatcttccgccgcaccttggtgccctgctgcctgaaatcttgtgcctgcaaacagttttttttttaccccccaatttttacaagttacgtgtatgcagattggcttgctttccgttgatcctattttgcagttaaaaggagctgttttttatttattattgttatttctttccctatttctcagaattcggtacctgccaagtgctctca

SEQ ID NO: 105721 - DNA, 1229 bp, Zea Mays
aaattattattttctcggtcgcgactcgcgagcggcaattggacgcatcgcatcggatctcttcctccggtcttctctgacctctgggcctctgactccgcgcccacaccgccactgcctctggcctccagccacctcccgatctggccgagctcgcctccccggaggcggcgcatggatcccgcctcgtcggtggccgccgagttttggcggccgccgtaccaccacctccgggcctcgtccgtcgtcaccgccgccgcccgctccgggggcggctccagcagccgcaggagaccgcggcgcgacgccgcggcgtcgtccgaggaggagccgtccaagctcgtttccacgtcgggcaccgccgccagcagcagcgcgggctgccaggactcggctgacccagaagcaaaacggttgaaacagatagcacctagtgaaaaaaatgacagaaggacagaagctgaaacaaattcagggaacgctagcaagtctgctgataaaaagcctgcacctaaagagccaccaaaagactacatccatgtgagggctagaagaggtcaagcaacggacagccatagcctcgcagaaagagcacgacgagagaagataagtgaacggatgaaagttcttcaagatattgtccctggatgcaacaaggttatcgggaaagcatcagtccttgatgagataataaattacatccagtctttacagcgtcaagtagagtttttgtccatgaaacttgaagcgattaatgctcatgtgagcaatgcaactgtagcttttccaaccaaagattttggtgttgcgccatataatactgctcctagcctgacgttggacccacaaacgccaagggaatacgcccagggctcgatgtcagattggcttcacatgcaggtcggcaacgcatatgaaagagtgacatgaataaaacgaggaatccataaaacaagctgaattccttgtggtagccaataaagagtaccaggatcaaccgagtccacagtaccaggttcattttcttcttcttctcgtggtcatcgtgacgccaaagttagtttattttattcctagtttgggggcattagcgccgtagatgcgtcattccacatccatctaggagggagcactgtcgtttactgtatacggatttcgtgatgtatcccgggaaatttttgtagatcggactcgtagaagaagagattgcaattgcaatactgtgtatc

SEQ ID NO: 105722 - DNA, 3255 bp, Zea Mays
ccaaacgggccaactaacaaacctgacggacacgccagccacgagagacgagaacgagacccagcccgactccaacgcctcacgttcgttgacggcttgacgccacggcctccccgggtcgccttttcccatcctgcccctctcctctcacctctacgacgcggaatcccatttttacccttctcacctcctccgctccctcccatggcttccacctccgcctcctcggcccccgtctccccctcccacccaaaccctaaccctacccccgacgcagatctcccatctgatcgccccatgcccgacgccgacggcggaagtggaggcgcctcgcccgcttccccggagaagcgggaggaggaggaggaggtgccgggggaggtggcggcggcggcggcggccgtggagcagccgaccccgcggaagacgcgccttccgcgtgcttgcaacaacaagcccaaacctcctcctccgccgccgccgcccgagcgtccgcgccgccgtgccgcggcggcgggcggcgcggacgagacgccgcaatgccgcgtggtcacgccgctcgtgtcggagcccgaggcgcccgcggagctgccccgctggcggctccgctgcatgtgggagctcggctccgtcctcaacttcctccacgtgttccggcctctgctgaacatcactggtgatttcacggctgaggagctcgaggtggcgcttatcactcccaacgagattctagatgatgtgcatatgccactgctaaagtcaattcctcctgtaactcgcatggctatgggacgtggaacctgggtgactgtcctgtgcagaaagctgaaggattggtggcattgggttgcagaaggtgatctgccaattgttgcatctcatggaactgaaattgagacgtacaaaactatagaaccagctattcgtttactaatcttgaaagcgatatgtgatatccgtgttgagcaagaggatattcggaacttcattgacagttctcttaagcatggacagaacttttctacctttcgtaaagatcggattggaggggattcccttggaatctcatactggtatgaagatgatgagattctcgggcatagattgtatcgtgaaattagacgagtagagcaggtcaagaaggagccaggaaagaggtctaggggaaaaggaggatcttcagctatttcagtcgtgtcctaccagtgggaaactgttgcgtccactttcgacgagtttgatgatgtggcagaaaaactcttttcaagtcggaacaggacagaggtttcacttggaaagaagctgaagattgaatatcttccagagatagaaaagatccataaaaagaaagagaggttgctcaaaaagcaacagagagaagctctccttcttgatagctacttgacatcagatggacttaccaccggccgttctctccgtgatagaaagcccgtgacttatacatttgatgactatgatcgctcaataaatgaagccatcaaaattacgaaaaaaagagaggagaactcagctgagcctgttgctactactgccaatagaagggtgcttcctccaagagcggaggcagcaagcaatgggaagctaaataatggtccctcaccaacaaccaacgactcggatgatggaaattcttcaaaatcagatgacgaccgagacagcgacggtgaacaagaaaatgaggcacttgatcgcagcaaccggaggaggaaaagatctcagagatacacacaggactttgttgaggctgtctcggatattgatcctaactttgacagtgacgacgatatcatgggagaagcagtgtatgatgaggaatatctgagaagtcgcaaacagaataagacatcaagcgcttctgaagaggatgaggagttccggttggaagaagatggtgaagatgatgatgaagaagaggaatattcattgagtaccagtgaagatctagaggagccgcaacggcataaaaaattggaaactcgtggccggcgaggtaccaagctgaggtcagttgatgaaatccaaacaggtctcagacgcagcaagcgttcttctcgtcctcgtattaactatcaccaatatgatttttctgactcggatacggggcctggaaaggcaaagaaatctgatgcatcagattctgaagctggctctgatgccgagaatgatatggagctctcgacatcgagtcaagagggagaggaagaagaggatgatagtcatgatgaagaaaatggtaataatgtgaatgataaaatggatgaggaccacaccgtggcagaaaataaagtagaaccagaggaggaggagcagaaggagcagccgcctatagagaagatggatgctcccagcacggaaagtagacgtgtaggaagaacattcctagatctaaacgagcttgcacctggaggtggctttgatgagagcccaagcttgacagtgaaagatgacatagacaacatttagggaataaagttttttttgatacatttgagtgctgttggtcagttttctgacttcgaagcaagggtggcagatcgatgggtttgagcttatggctgttttcattgatttgcagtaacaggacaagcgaggttccacttgaagtgactttgagcttcttcggtgcttatgtcatactcggaggtgcttatgttatacttggaggccatgaggagggtagttttgcttttgattatgtatactacatgacggtcgcaatcgatcacagctgtattatggccaggctgatgctgcgttgaggccggtctgtaggatataaatttattgcctccacttatttagtcttaggcatggtgatgtcaatgagatcatggagggaaacctgtactccgagtgcagtgcagttcgtccgtcggcattcgcgagaccttttccacttgtagattgtaggttttgagaccgagcaggattagttctgtatctaaatctgacagtctgattttttcccccgtcacacctgtgacctgtgtagctgacactgagctgtccttgatggagaagatgctgcatgtattgagctgatgttgtagcctatggacatgtccattacactgactgagagtggctggcctggactggagattgctaatttgctgtatggttcataaaatccgtatcctctctgcatatttggttagtcacaaaactatgcaagataaatgatctaggtgctctgttccattaagcactgcaaaattatgtcaaatgtttggt

SEQ ID NO: 105723 - DNA, 1959 bp, Zea Mays
ggattgattgttttgagcttattaatcaactgtttctgattcatgcagaagaaagagaggttgctcaaaaagcaacagagagaagctctccttcttgatagctacttgacatcagatggacttaccaccggccgttctctccgtgatagaaagcccgtgacttatacatttgatgactatgatcgctcaataaatgaagccatcaaaattacgaaaaaaagagaggagaactcagctgagcctgttgctactactgccaatagaagggtgcttcctccaagagcggaggcagcaagcaatgggaagctaaataatggtccctcaccaacaaccaacgactcggatgatggaaattcttcaaaatcagatgacgaccgagacagcgacggtgaacaagaaaatgaggcacttgatcgcagcaaccggaggaggaaaagatctcagagatacacacaggactttgttgaggctgtctcggatattgatcctaactttgacagtgacgacgatatcatgggagaagcagtgtatgatgaggaatatctgagaagtcgcaaacagaataagacatcaagcgcttctgaagaggatgaggagttccggttggaagaagatggtgaagatgatgatgaagaagaggaatattcattgagtaccagtgaagatctagaggagccgcaacggcataaaaaattggaaactcgtggccggcgaggtaccaagctgaggtcagttgatgaaatccaaacaggtctcagacgcagcaagcgttcttctcgtcctcgtattaactatcaccaatatgatttttctgactcggatacggggcctggaaaggcaaagaaatctgatgcatcagattctgaagctggctctgatgccgagaatgatatggagctctcgacatcgagtcaagagggagaggaagaagaggatgatagtcatgatgaagaaaatggtaataatgtgaatgataaaatggatgaggaccacaccgtggcagaaaataaagtagaaccagaggaggaggagcagaaggagcagccgcctatagagaagatggatgctcccagcacggaaagtagacgtgtaggaagaacattcctagatctaaacgagcttgcacctggaggtggctttgatgagagcccaagcttgacagtgaaagatgacatagacaacatttagggaataaagttttttttgatacatttgagtgctgttggtcagttttctgacttcgaagcaagggtggcagatcgatgggtttgagcttatggctgttttcattgatttgcagtaacaggacaagcgaggttccacttgaagtgactttgagcttcttcggtgcttatgtcatactcggaggtgcttatgttatacttggaggccatgaggagggtagttttgcttttgattatgtatactacatgacggtcgcaatcgatcacagctgtattatggccaggctgatgctgcgttgaggccggtctgtaggatataaatttattgcctccacttatttagtcttaggcatggtgatgtcaatgagatcatggagggaaacctgtactccgagtgcagtgcagttcgtccgtcggcattcgcgagaccttttccacttgtagattgtaggttttgagaccgagcaggattagttctgtatctaaatctgacagtctgattttttcccccgtcacacctgtgacctgtgtagctgacactgagctgtccttgatggagaagatgctgcatgtattgagctgatgttgtagcctatggacatgtccattacactgactgagagtggctggcctggactggagattgctaatttgctgtatggttcataaaatccgtatcctctctgcatatttggttagtcacaaaactatgcaagataaatgatctaggtgctctgttccattaagcactgcaaaattatgtcaaatgtttggt

SEQ ID NO: 105724 - DNA, 1349 bp, Zea Mays
cacaccagtagtcttccccacgactggtattatctgcaaatcagccatgaaacatgcagctgggagatgtcctttgctagagccatattcaagtttcaaatatctccagcttgtacagttgggccacagagcctttagtatgaaaaagatagattacaattgttttcccagtgtttaattaaactaatgcatgattttctccgattgattgaccagagactattgattctcacgctgcaaaaaaaaaaggttccatgcccaggtttccatgaattaagctgctaagtgcaatcaggcatttgctctacttgagttacccatcaagtgcccctagctccttcatatcttccaagaacgccatgtaagagtcgtcgatgcttggcggcttgggtgccgctgaaggaggccgagcgtcgcttcttatgagggtcaccgagggctttgaaatggatactgttgatagttgtggctgctgctgcacctttggttttggcttggggagagcagattctctcttgacacggactgatgcaggaacctgtagtgattcaaggcagaatgagcaatcctactacggatctctggaaaaaggaaaaaaaagatcacgcaaaaaatatgatgacagatggcataccatagccgtcagctcaggagtgtgctgtgctaatggtctcttcacaactgttggggcagccgacttcacgtatgatggctgctgaggtaactgaggccttggggcaaaggcagcaaactcatctagttgcataggaggtcctggcaaaaatggaggcctaagcatcggcggcggaccagggagcacaccatacggtggcattggcatttgagacggtggaaatcctggaggaggtggagggggcctgttaactccagccgccataagcgatggccttgaatctggtggtggcggaggtggtggaaatctcatgactccaggagctagcatatcagattgcattggaggccttggaggtaaaggtggcaaactaggtggtggaggcagcggtggtaagactctcgctgcagtatcttctttaagtccaggagtgtcctttgaagtgccagcagcctccatgtcattagattttggtggcaacccaggcggcgggggtggtggaggcaggacaactgagggctgcaactgcaaacaaggttacatcagaccaagtcacaaagaatccgttttgctttcatttgcactagacgctgctggcggatttaaagacctctgcgatggaggtggtggcggctgaagtactgtatgaccggatacaggttctctcagaggtggaccaggaggaggaggtggtggtgggggcggtggcgggagt

SEQ ID NO: 105725 - DNA, 2228 bp, Zea Mays
aacatgtaaaagaagaagagattcatccctccgccactccccaacatgtaaaccagaccattctcctctccgaattcaataattcctccgccgcaccacgcttcctcctcctctgctccgcctcttcatccagcgagcgtcctccgattgctgacggatccctcctcgccgccgccgcgggccgaccgtggggagaggaggggaggcgggagtgatggaggccgccgaccacgggaagctctttgtcggcggcatctcgtgggagacgagcgaggaccgcctccgcgagtacttcggccgcttcggcgaggtcaccgaggccgtcatcatgcgggaccgcagcacggggcgtgcccgcgggttcggctttgtggtcttcgccgatgctgctgtcgccgagcgcgtcactacggaaaaacatatgatcgacggacgaatggtggaagcaaagaaggctgttcccagggacgaccacagtattgtgaccaagagcaacgccagcagcatagggtcacctggaccgggacgcaccaggaagatctttgttggaggcctgccctcgaacgtcacggaggctgacttcagaaggtactttgagcagtttggcgtcatcactgatgtggttgtgatgtacgaccacaacacgcagaggccgaggggctttggattcatcacctacgattcagaagacgccgtggacaaagccctgcacaagagcttccatgagctcaatggtaaaatggttgaggtcaagagggctgttccaaaggagcagtcgcctggacctgccgcacgctcacctgtgggagtggggcagaactatgctatgaacagggttcatagcttcctcaatggcttcaaccagggttacaatccgaaccccataggaggttacggcatcagggtggatggaaggtatggcttgatttcaggtgcacgaaatgggttctcttcttttggaccagggtatgggatgggcatgaatgttgaaggtgggttgggcggaacatttggtgcaagctctggtttcatcagcaactccaacgggaggcaaatgggttcgtacttcaatgcaagttcgaacagattgggtagccctattgggtaccttggccttaatgatgttccgggatcaatgttgagttccatgtctaggaatgtttggggtaatgggagtctaaactacccgagcaatcctacaaatatgagtgcttttgcttcacctaggaatgggggccaagtcagtcttcccagtgacaattggggaggtcttccttctgctcatgggatggacaacatttcaagccttgggtcagggaaccttggtcgtggaactggagataataactttggtttgccttctggtagctatggcaggaacaactcaactggtacaattggtgagcctttttctgcagcaggcaatacatatgaagtaaacaatcgagatacatatgggagcagctctatttatggtggcacagcctggaggttcgcatcatctgaggttgacatgccttcttttgttcatgatattggaaatgttgatccgactattaaatgatacatgtcagcaagtcacatgggcaactaccctgttaacaacaatcagccaagcagaggcatcagttcctagggggcggcgagtattacacttgggggtagtagaagaaagaaacacccattcagccaggcaatcccggcgcacacggctgtgaatcggtcggtgattgtcaggttaatacacaggttagtttttgtgtagctaacccagcggcgtggtttgcgaacaccgacatgctagaggtggaagctgctaggctagctagaggaaaggagcgcggatggatatacagaaacatttcgtgaaggttttgtttttgttttgttttttggtttttgcgggggtggtggtcatgttctagttttggttcgtacgcgcgtggtgaggccttttggagttttgaaatgagatgtagtagtaattgttgcggcacatattttagaagtcaagccatgttccaacagaagctggaaagagatgtccgctgtatacgggtgagcatgtataccaaccaaagggatgctgtattatacattagcctgtgtgtgtgtgtgcgtgtttttatttttgtttgatccggtttttagccatttgtcttttttttttcaatctggagattttgctgacttgctctgaattattatgcatgcagtggtgtttattt

SEQ ID NO: 105726 - DNA, 1724 bp, Zea Mays
gtatttattgctcttctgtcttctccccgctcgtattggcacgcaccacatcaaccgccgcccgtatagctttgtgagatggcggagccgggcaaaagagcggtggcgcagtggcggcggtgggcgctggccaacctgggcccgttcgcggccctgttcaccaccaacttcggctcggcgtggctgatcctggcgccggtggtgtcgctggtggccacctacgcgccgcggcggctgttccggacctacttcaacctgttcctccgccggcgctcccgccgcctgctcaacgtcgtggacccctacgtgaccatcgacatctcggagcccggcggcgaggtgcgctactcgcgctacggccccgtctccgacaacgacagcacctacgaggaggtgaaggcgtacctgagcggcgccgcgcgcgagcaggacgcgcgcgagctccgcgccgagggcgcccgggagggcaacggcctcgtcgtcagcatgcgcgacggccaggacgtggccgacgagttccgcggcgtcccgctctggtggtcctccgtggtcgccagggacgtgcagggccagcgcaagggcgaccggcgcttccagcggctcaccttccacctgagccaccgcgcgctcgtcgtcgacgagtacctgccccacgtccgccgccagggccgcgagatcctcttcagcaaccgccgccggaggctctacaccaacagcaagtcacgcgactcctacagctacgagtacaagtcgtggagctacatcgacttcgaccacccgacgacgttcgacacgctggccatggaccgggccaagaagagggacatcatccacgacctcgacacgttccggaacagcagggagttctaccggcgcgccggcaagccgtggaagcgcgggtacctgctgtacggcccgccgggcacgggcaagtccaccatggtcgccgccatggccaactacctcgactacgacatctacgacgtggagctcaccgtggtgcacaccaacagcgacctccgcaagctcctcatcgacaccaccagcaagtccatcatcgtcatcgaggacatcgactgcacgctcgacgtcaccggcgaccgcgccggcaggccgcggcgccgggccaacggcggcggcgacgccgacgacaggccgcgcgactcggtgaccctgtccggcctgctcaacttcatcgacgggctctggtcggcgtgcacgggcgagcggatcgtcgtcttcaccaccaaccacgtcgagaggctggacccggcgctgatccggcgcggcaggatggacatgcacatcgagatgtcctactgcaggttcgaggcgttccagacgctcgccaagaactacctggacatcgacgaccacgacgacctgttcgccgccgtcggggaggtactacgggaggagaacctcacgccggccgacgtcgccgagtgcctcatggcggccaggcgcgctggctccggcgagccttccccgtgcctccagatactgatcgatgagctgaagaagagagcggtggagaaggcgaaggccgaggcagaggctaaggcaagagcagaagcacaggccaaggcatgggcggaagcagaggccagggctgcggtggaggcaaatgcggccgcaagggaccgtgcaatggcaacccacagtaatgtttaattttatatacacgaagaacagaaagtttggagatttgagacaacttgcaa

SEQ ID NO: 105727 - DNA, 323 bp, Zea Mays
attcttccacctttttatctcagggcacatcggattcggatcgaatagtccacctacaaccatattcacaactgcaaccagatttgcgttatatttcaaaacagaggcactcgcacaattgtccctcttttatatcgtataattaaaagatttaatcaataaactgaatccatatttatgttactaagatttttatgaacaaaactagaccacttttgcaatatggtatttaaagatttatcttaagtctatgttctacttgtggagcatgcaccctattaaataaaagtgatgtacatgtttcttcaaaagatttataattt

SEQ ID NO: 105728 - DNA, 1888 bp, Zea Mays
ctcaggctctcagcaaaccctacacccgtctgttctcgtcgtggcggccgccccccattccccatccttgtcgccgtgacgcctgacgccttctccccggaccccgatccggctccggcaatcccacgcccaggctgtccagctccaggctccaccgctccagcacgacagcaccaccagcgccgccctgcccctgtccctactccctaatcccacgcggccacacccaggtcccaggaaccagcactaggaaccagccggcgtccactccgtccagcggaaattcgaaaccagcgtccagcactagggtgaactggctgtttggacccgttctttatcttgcgtcgttcagccggcgtcctctctctctctctcgtggcgacgactgggcgacctccccgcccccgctgctctacgccaggtgcccaggtcttcgtcgggcccttcgccgaagagcagccaacagcttaggttaaaatcaaaaaaatttgtcgggcggataatacaaggcctacaccagaaggaataccctttgtgcgacaggcgaacagctgtctctctctctgcagtgttatttggtttattatatgcagttgcaggggagaaaactaaggcatgttcactgcagctagaagcacagccgcagcagatgcagcaggcttcttatacagtatttgcagcttagaagttggagtggcagctgcagctagctgcagcaaacactcctaacaataatagtggagagagactttcatgctgtttaaatttaggttgccggtctgcgagttgaatcatggcggagcacttggcttcgatcttcggcactgagaaggacagggtcaactgccctttttacttcaagattggggcctgtcgtcatggggatcgctgctctcgtctgcacaacaggccaactatatcaccaactcttgtgcttgctaacatgtatcagcgccccgatatgataacccctggagttgatgctcaaggccaacctattgaccctgagaagatgcaggagcattttgaggacttctatgaggacatctatgaggagttggggaagtttggtgagattgagaatctgaatgtttgtgataaccttgctgaccacatgattgggaatgtctatgtccagttcagggaggaagagcaagcagccgcagcatacaatgctcttcaggggcgcttttactctggccgccctataattgttgagtattctcctgtgaccgacttccgtgaagcaacctgtaggcagtttgaggagaacagctgcaaccgtggtggctactgtaatttcatgcatgtgaagcaaattggcagggatctcaggaggaagctgtatgggcgttctgcttccaggaggtaccatgggagaagccgaagccgaagcccgccaccacaaaggaggggccaccgtgaccgtgatgactaccgtggtggcggcggtggtggaaggggaagaggtagcaggtatgacaggtacgatgatggagccggcagaggtggcaggcatgacaggtatgatgatggagcaggcagaggcggcagacatgacaggtatgatgatggaggaaggcgcaggcatggtagccccccaaggcgtgcaaggagcccagtcagggaaagcagcgaggagcgaagggccaagattgagcagtggaaccgtgaacgagagggaaaacagtgagggctactgttcgccggactctctcatccctatattctaagtatgcttgtgtggatgacattctgcctggctaagtaaaacctttttaagatcaggattcctcggttcattttatggttaaaccagacatcatttgtttccatctgtgttgtgtcggatcctttgctattatgttattttgacaattggtgtcaa

SEQ ID NO: 105729 - DNA, 1628 bp, Zea Mays
ctcaggctctcagcaaaccctacacccgtctgttctcgtcgtggcggccgccccccattccccatccttgtcgccgtgacgcctgacgccttctccccggaccccgatccggctccggcaatcccacgcccaggctgtccagctccaggctccaccgctccagcacgacagcaccaccagcgccgccctgcccctgtccctactccctaatcccacgcggccacacccaggtcccaggaaccagcactaggaaccagccggcgtccactccgtccagcggaaattcgaaaccagcgtccagcactagggtgaactggctgtttggacccgttctttatcttgcgtcgttcagccggcgtcctctctctctctctcgtggcgacgactgggcgacctccccgcccccgctgctctacgccaggtgcccaggtcttcgtcgggcccttcgccgaagagcagccaacaggttgccggtctgcgagttgaatcatggcggagcacttggcttcgatcttcggcactgagaaggacagggtcaactgccctttttacttcaagattggggcctgtcgtcatggggatcgctgctctcgtctgcacaacaggccaactatatcaccaactcttgtgcttgctaacatgtatcagcgccccgatatgataacccctggagttgatgctcaaggccaacctattgaccctgagaagatgcaggagcattttgaggacttctatgaggacatctatgaggagttggggaagtttggtgagattgagaatctgaatgtttgtgataaccttgctgaccacatgattgggaatgtctatgtccagttcagggaggaagagcaagcagccgcagcatacaatgctcttcaggggcgcttttactctggccgccctataattgttgagtattctcctgtgaccgacttccgtgaagcaacctgtaggcagtttgaggagaacagctgcaaccgtggtggctactgtaatttcatgcatgtgaagcaaattggcagggatctcaggaggaagctgtatgggcgttctgcttccaggaggtaccatgggagaagccgaagccgaagcccgccaccacaaaggaggggccaccgtgaccgtgatgactaccgtggtggcggcggtggtggaaggggaagaggtagcaggtatgacaggtacgatgatggagccggcagaggtggcaggcatgacaggtatgatgatggagcaggcagaggcggcagacatgacaggtatgatgatggaggaaggcgcaggcatggtagccccccaaggcgtgcaaggagcccagtcagggaaagcagcgaggagcgaagggccaagattgagcagtggaaccgtgaacgagagggaaaacagtgagggctactgttcgccggactctctcatccctatattctaagtatgcttgtgtggatgacattctgcctggctaagtaaaacctttttaagatcaggattcctcggttcattttatggttaaaccagacatcatttgtttccatctgtgttgtgtcggatcctttgctattatgttattttgacaattggtgtcaaatcttttgaggtgtgctattagcttatgatgatgtcagttgtgg

SEQ ID NO: 105730 - DNA, 1762 bp, Zea Mays
ctcaggctctcagcaaaccctacacccgtctgttctcgtcgtggcggccgccccccattccccatccttgtcgccgtgacgcctgacgccttctccccggaccccgatccggctccggcaatcccacgcccaggctgtccagctccaggctccaccgctccagcacgacagcaccaccagcgccgccctgcccctgtccctactccctaatcccacgcggccacacccaggtcccaggaaccagcactaggaaccagccggcgtccactccgtccagcggaaattcgaaaccagcgtccagcactagggtgaactggctgtttggacccgttctttatcttgcgtcgttcagccggcgtcctctctctctctctcgtggcgacgactgggcgacctccccgcccccgctgctctacgccaggtgcccaggtcttcgtcgggcccttcgccgaagagcagccaacagcttaggttaaaatcaaaaaaatttgtcgggcggataatacaaggcctacaccagaaggaataccctttgtgcgacaggcgaacagctgttgccggtctgcgagttgaatcatggcggagcacttggcttcgatcttcggcactgagaaggacagggtcaactgccctttttacttcaagattggggcctgtcgtcatggggatcgctgctctcgtctgcacaacaggccaactatatcaccaactcttgtgcttgctaacatgtatcagcgccccgatatgataacccctggagttgatgctcaaggccaacctattgaccctgagaagatgcaggagcattttgaggacttctatgaggacatctatgaggagttggggaagtttggtgagattgagaatctgaatgtttgtgataaccttgctgaccacatgattgggaatgtctatgtccagttcagggaggaagagcaagcagccgcagcatacaatgctcttcaggggcgcttttactctggccgccctataattgttgagtattctcctgtgaccgacttccgtgaagcaacctgtaggcagtttgaggagaacagctgcaaccgtggtggctactgtaatttcatgcatgtgaagcaaattggcagggatctcaggaggaagctgtatgggcgttctgcttccaggaggtaccatgggagaagccgaagccgaagcccgccaccacaaaggaggggccaccgtgaccgtgatgactaccgtggtggcggcggtggtggaaggggaagaggtagcaggtatgacaggtacgatgatggagccggcagaggtggcaggcatgacaggtatgatgatggagcaggcagaggcggcagacatgacaggtatgatgatggaggaaggcgcaggcatggtagccccccaaggcgtgcaaggagcccagtcagggaaagcagcgaggagcgaagggccaagattgagcagtggaaccgtgaacgagagggaaaacagtgagggctactgttcgccggactctctcatccctatattctaagtatgcttgtgtggatgacattctgcctggctaagtaaaacctttttaagatcaggattcctcggttcattttatggttaaaccagacatcatttgtttccatctgtgttgtgtcggatcctttgctattatgttattttgacaattggtgtcaaatcttttgaggtgtgctattagcttatgatgatgtcagttgtggtttgtcactagatttgccatttggctttcagtcgtgtgttgcggatt

SEQ ID NO: 105731 - DNA, 2100 bp, Zea Mays
ggcgtcctctctctctctctcgtggcgacgactgggcgacctccccgcccccgctgctctacgccaggtgcccaggtcttcgtcgggcccttcgccgaagagcagccaacagcttaggttaaaatcaaaaaaatttgtcgggcggataatacaaggcctacaccagaaggaataccctttgtgcgacaggcgaacagctgtctctctctctgcagtgttatttggtttattatatgcagttgcaggggagaaaactaaggcatgttcactgcagctagaagcacagccgcagcagatgcagcaggcttcttatacagtatttgcagcttagaagttggagtggcagctgcagctagctgcagcaaacactcctaacaataatagtggagagagactttcatgctgtttaaatttaggtgatttttgggaattaacttgcagatttattaattattatataggtaaaaagtgtagtatcagttactaggagcaagaacttgccctgatgacacagttattttggtttttctcctaatatttaaccttttgagtaagtgtgcagattaggtcttaaaaagggattgcgattaagattttattgccagagcctgagctgtagaattttccatttacacacgtgactgtacagggggtaaacttgcaggaatattacttggtgttcctataagatacacatgctgtgaaccctgatttgttttagctgcttttgttcgtttttgtctacttagccttgcacactgaggacctttattgaggtattccttgatccccatggttctagataacaaaccatgagtttacatcattatcccctctatctcaccttatattgaacatggtttttgatactattcttctttgtgcttgaaggttgccggtctgcgagttgaatcatggcggagcacttggcttcgatcttcggcactgagaaggacagggtcaactgccctttttacttcaagattggggcctgtcgtcatggggatcgctgctctcgtctgcacaacaggccaactatatcaccaactcttgtgcttgctaacatgtatcagcgccccgatatgataacccctggagttgatgctcaaggccaacctattgaccctgagaagatgcaggagcattttgaggacttctatgaggacatctatgaggagttggggaagtttggtgagattgagaatctgaatgtttgtgataaccttgctgaccacatgattgggaatgtctatgtccagttcagggaggaagagcaagcagccgcagcatacaatgctcttcaggggcgcttttactctggccgccctataattgttgagtattctcctgtgaccgacttccgtgaagcaacctgtaggcagtttgaggagaacagctgcaaccgtggtggctactgtaatttcatgcatgtgaagcaaattggcagggatctcaggaggaagctgtatgggcgttctgcttccaggaggtaccatgggagaagccgaagccgaagcccgccaccacaaaggaggggccaccgtgaccgtgatgactaccgtggtggcggcggtggtggaaggggaagaggtagcaggtatgacaggtacgatgatggagccggcagaggtggcaggcatgacaggtatgatgatggagcaggcagaggcggcagacatgacaggtatgatgatggaggaaggcgcaggcatggtagccccccaaggcgtgcaaggagcccagtcagggaaagcagcgaggagcgaagggccaagattgagcagtggaaccgtgaacgagagggaaaacagtgagggctactgttcgccggactctctcatccctatattctaagtatgcttgtgtggatgacattctgcctggctaagtaaaacctttttaagatcaggattcctcggttcattttatggttaaaccagacatcatttgtttccatctgtgttgtgtcggatcctttgctattatgttattttgacaattggtgtcaaatcttttgaggtgtgctattagcttatgatgatgtcagttgtggtttgtcactagatttgccatttggctttcagtcgtgtgttgcggatt

SEQ ID NO: 105732 - DNA, 2179 bp, Zea Mays
cactcgatccacactctcaaccagctcattaaatacaagagcatgtgcagaaaacaagctcataatcgacacacacctaacagagtaacagacaccaaacaacgcccatcactcgcgccgtacatcctgcctcctcccgcgcgcgcgcgcgcgtgcacgctagctagctgccggtcgcctcgccaccatggtgttcgacgcgagcggcagcaggtcggcggcggcggcgtcggggaaccctctccgcgtgatcctgacgcgcgggttcgcgcggcaggtgctcgcggggcggtggttgacggtgttcgcgagcctgctcatcatggcgtcgtccggcgcgacgtacatcttcgggagctactccggcacgctcaagtcgtcgctcgggtacgaccagcgcacgctcaacaccgtgtccttcttcaaggacctcggcgccaacctgggcgtcttctcggggctcatcaacgaggtgaccccgccgtgggtggtgctggccatgggcgccgccatgaacctgtccgggtacctcatggtgtacctggccgtgtccgggcgcaccgcgccgccgccgctgtggctcgtgtgcctctacttcttcgtgggcgccaactcgcagtcgttcgccaacaccggcgcgctggtgacctgcgtcaagaacttccccgacagccgcggggtggtgctcggcatcctcaagggcttcgtcggcctcagcggcgccgtgtacacgcagctgtacctggccctgtacggcggcgacgacgccgagtcgctgatcctcctcgtcgcctggctccccgcggcggtgtccgtcgtgttcgtccacaccatccggtacatgccgtacccgcgccgccgtggcggcggcaggcaggagacgagctccgactccgaccccttcttctgcttcctctacctctccatcgcgctggcgtgcttcctcctcgtcatgatcgtggtgcagaagcaggtgcccttctcccgcgccgcgtacggcgtggccgccacgccgctgctcatcctcctcctcatgcccctcggcgtcgtcgtcaagcaggagtacaagatctaccgggagcgccagctcgacgcggccgacccgccgccgccgaccatcatctccgcgtcggcaacggacgccagcaagaaaacagagcagcagccggcgccggcgccgccgccgacgacgtcgtcgttctgtgggtgcgtgaggaccatgttccgtccgccggctcgtggggaggactacacgatcctgcaggcgctggtgagcgtggacatgctggtgctgttcgtggcgacaatctgcggcgtgggcgggacgctgacggcgatcgacaacatggggcagatcggcgagtcgctgggctaccccgccaggagcgtcaacacgttcgtgtccctgatcagcatctggaactacgcggggcgcgtgacggcgggctacgcctcggaggcggcgctggcccggtaccgcgtgccgcggccgctgctgctgacgtgcgtgctggcgctggcgtgcgcggggcacgtgctgatcgcgctgggcgcgccgcggtccctgtacgcggcgtcggtggtcgtcgggttctgcttcggcgcgcagtggccgctggtgttcgccatcatctcggaggtgttcgggctcaagtactactccacgctctacaacttgggcggcatggccagccccgtgggctcctacatcctgaacgtgcgcgtggcggggcggctctacgacgcggcggccgcgcagcagcgcggccgcggcaggatctgcctcggggtggagtgctaccggcggtcgttcctgatcgtcacggcggccacggtggtcggcgcgctggtgtcgctggtgctggtgtggcggacgtggacgttctacaggggcgacatatacgcgaggttccgggacggagacgagggcccggggcgggacgggcgcctgccggtcgaccagaaacgggaggaggaggagagggagaaggcggcggccaacggcaggaaggcgtgaggtggtgagcgggagcgggaaggcatggtcagggacgacgacgggtggggtgtacatgtacatgtgaatatagtacttttttgttgcattcacccgtgatgaccgacccttgttacctttcaaatttaaatagcctaaaaaaagccttcttgtccgtttcca

SEQ ID NO: 105733 - DNA, 201 bp, Zea Mays
gttctgccatcattcctgttctaccattcccgttctgccaccattcccattccttgttctgcgtttctcattctcatgttctgtcattcccatgttctgccatcattctatgttctctcattcccattctttgttctatctttctcattccccctccccgcaaagcccattcccatttccctgtacaacccacgtctagct

SEQ ID NO: 105734 - DNA, 97 bp, Zea Mays
tgtcttgaagatatacaagaagaacttgtggaactctcctttggattctccacgatgccaaatgaagaaatttgaaggaaaattcacaagatgtcaa

SEQ ID NO: 105735 - DNA, 120 bp, Zea Mays
attccatgttatttcttatatttctttctttaattttcaatatgaattattattttttatcattgtgagtttttgtcaagtttctcgtatatggtttctaacaagacaataaataaatcg

SEQ ID NO: 105736 - DNA, 1862 bp, Zea Mays
aggccactgccatgtggggccgggtcgccaggactttctccactgcgccatcccaggtcaggggggaatcgcgtcgtccggcgaggaaatcgcaacaacctcccgcttgctagcggaggcggagtagcgggggtcgttggggtcgggctcctctcgtcgacctggatggtaccatataaaccactgtcgggcaaacaacccagagcgtttagagagagagaagacagggagaaggaggaagagccgccgcggtggaccgggtgatttgtcagggttgtcaggggagtcgtcaggacacgggcaagctttgtacgctaccaattcagcgaataaccgacgggggtgcgtggaattgctcaccggagcaaaccctccgccgccgaaccaccatccttctgagcagcgcacgctagcgtccggttcctggacgcacgccgtgaactcgaagtccaccgctctgtgagcatcaagcgccggcatcgctagggtttcacgcccccatccccccagggcgccgtcgatcccggtcggccatctcccggtgcctggtaactggtaagcccccttcgctagctgcatatttctctcgcgcatcccccctcacatctccgtctcggtccatctcctgccttcacagatcgttaatttcatcgatgggtgccatggaggaccgcagctccaagcaggcaggcgcgggcttggtggcccacctccacgacgacctccttgtggagatcctctcccgcgtccccgccaagtccgtctgccggttcaagtgcgtgtccaaggcctggctcgacctcattgccggtcccgaccaccgtaagaagctccgccaacccatgcagggactcatctacatgaatccagagaaggaccgccacagcttcagcttcctggacctgccactgacagtaggatccgtgcctctggacgttgccgaccctgcaggcttcatctcctacctgacggaacagcctgggatccatcgcctcgtcttactggattcctgcaatggcctgatcctattccagcaccttatggagctgccgcactacaacagtttgggctatgtcgtgtgcaacccaaccacgaagcaatggcgagccgtgcccgagcccgactgcagctcccatgtaccaatgaactacacatatttggcttttgatccgactgtatcctcccacttccacttggtccggttcaaaaagaatcgcgagtacatggagcccatgtcgacgcatgcttactcgtctaaaactgggatatggacctatagccaaactgtgaaagaagaagaagaatggcagaatcaggtctacttatctataagtaatcgatgcgcctttgttaatggcttcctgcatttgctagtttggggctcgaacaaaatgcagatactcattgtagatgtacaaggacgtccaagaaggatgatcagactgccagacgcggctgctggtaattgtgagggatgctactgtgtttactttggccaatcccaggggcatatgcactgcattactaaacaactattcgacttcaacgaagagaaatacgagctgtccatctgggctcttcaggattacgatgcacaagagtgggtgctgaaggacactgtgagctcgctccagctctttggaggaaattgtcccacaagtgtcgcattggagttgtacagcgaggtggccagcatgcatctcgatcgcaatgtggtcttcttcttttcacactgtgaacggagattcatagcatatgacatggacagtaaggaagtgagtgttttcagcagttccaaagctatacacaggtggaaggttggttgctatgttccttgtttctcactggcgcctctcaaataa

SEQ ID NO: 105737 - DNA, 2016 bp, Zea Mays
cgggtcgccaggactttctccactgcgccatcccaggtcaggggggaatcgcgtcgtccggcgaggaaatcgcaacaacctcccgcttgctagcggaggcggagtagcgggggtcgttggggtcgggctcctctcgtcgacctggatggtaccatataaaccactgtcgggcaaacaacccagagcgtttagagagagagaagacagggagaaggaggaagagccgccgcggtggaccgggtgatttgtcagggttgtcaggggagtcgtcaggacacgggcaagctttgtacgctaccaattcagcgaataaccgacgggggtgcgtggaattgctcaccggagcaaaccctccgccgccgaaccaccatccttctgagcagcgcacgctagcgtccggttcctggacgcacgccgtgaactcgaagtccaccgctctgtgagcatcaagcgccggcatcgctagggtttcacgcccccatccccccagggcgccgtcgatcccggtcggccatctcccggtgcctggtaactgatcgttaatttcatcgatgggtgccatggaggaccgcagctccaagcaggcaggcgcgggcttggtggcccacctccacgacgacctccttgtggagatcctctcccgcgtccccgccaagtccgtctgccggttcaagtgcgtgtccaaggcctggctcgacctcattgccggtcccgaccaccgtaagaagctccgccaacccatgcagggactcatctacatgaatccagagaaggaccgccacagcttcagcttcctggacctgccactgacagtaggatccgtgcctctggacgttgccgaccctgcaggcttcatctcctacctgacggaacagcctgggatccatcgcctcgtcttactggattcctgcaatggcctgatcctattccagcaccttatggagctgccgcactacaacagtttgggctatgtcgtgtgcaacccaaccacgaagcaatggcgagccgtgcccgagcccgactgcagctcccatgtaccaatgaactacacatatttggcttttgatccgactgtatcctcccacttccacttggtccggttcaaaaagaatcgcgagtacatggagcccatgtcgacgcatgcttactcgtctaaaactgggatatggacctatagccaaactgtgaaagaagaagaagaatggcagaatcaggtctacttatctataagtaatcgatgcgcctttgttaatggcttcctgcatttgctagtttggggctcgaacaaaatgcagatactcattgtagatgtacaaggacgtccaagaaggatgatcagactgccagacgcggctgctggtaattgtgagggatgctactgtgtttactttggccaatcccaggggcatatgcactgcattactaaacaactattcgacttcaacgaagagaaatacgagctgtccatctgggctcttcaggattacgatgcacaagagtgggtgctgaaggacactgtgagctcgctccagctctttggaggaaattgtcccacaagtgtcgcattggagttgtacagcgaggtggccagcatgcatctcgatcgcaatgtggtcttcttcttttcacactgtgaacggagattcatagcatatgacatggacagtaaggaagtgagtgttttcagcagttccaaagctatacacaggtggaaggttggttgctatgttccttgtttctcactggcgcctctcaaataagcactacaagcaattagtgcgtggtctaatacaagtatgagctgctagcaacttattagttagactgtaataaggtcaggtgaagtattttgtccatgcgtgtttggtctaattagttccgcaagccttttgaggcatttatatatatatatgtagtctatatttatggatgctagttaaattaatggatacattgtatgatttatgtttttggctatatataagttattatatgcatgatttatatgcttccttt

SEQ ID NO: 105738 - DNA, 977 bp, Zea Mays
gccttttgtctgtacttgttctgctgggaacttgggcaacaacaatgaagctaagcaggccaatattctttctggcacgttgattttgctggtttgtgtaataggtcaatacatctcatcaaagaaagaaggaattcgggtattgtacctataggttcactgcaattaggtgtttgtaggcaccgagctgacctaatgaagtatttgtgtgaccgggcggatcctccaattccttgtgagcttgtgaggggccatcttgactatacacctcatgcttggaacattgttcctgttaaaaagaggaatggctgggtaaggatgattgttgatgcttgttaccccaccagcataaatgaagagacagatccagagtacttttgcaggtagcagcttgtgatcttatattcctatactccgtaagcagaaatcattttagcttcccttgtttccccattcttatttcctgatgtattcatatgaagtgcaccatgcttgtcctatgtcatggtcaatattgcgtttgcattgtttcagttatgctaatattgtttggcataaagaatgacctacaaaattccacaccacatatttctaaaataggcctattttaaatagataatttccaatttttagcttatatttgtttcatgtgatttcaatattattttgttatttagatacagaaggtgaacatgttgaataaaatattattatgtccacatattataaaaagaacagtattgtaaattattatatggtacgctctaccttttgttatattctatttataatatggtccatgatgctgctaacaagttggcagtcctatctttacaaaatttacctgtggttgtgtagctgttctccgtctgtacaattttcaattagaaaaattatagcagctaagaaaaatatcttctctttgtcgcagaaactgatggttaatgctggtagatactcttttaatctctactact

SEQ ID NO: 105739 - DNA, 465 bp, Zea Mays
tcgtaccacccatccaggctctctaggttgtggacctcggactacgacattcggtgtagtgcaccgccaagttgttgccggtgtcggactggccaaagacaaagttgtctgtgcagaagatctggccgtaggggcccgtgcggaaggcgtccatggtgccaggttcaaggtccatgagcaccgatgcgaccggacttgcgacgacggtcggggtcgacgacgcagcggctgcgtgtgcgtggatgagcgagggaggggcgctaaatgccggcgaggattgggggagcggttgcatatccacgacagcatgcgctcccgcatgtccaccgccttgtgccaccgctccgcgacggtgagggccagcgctccaaatccactggcggcgtgggattgaggtcgtccatcgcatctaggtcaggctccagccgccggaggtggtggctgcggcatggcgaaggaggtgag

SEQ ID NO: 105740 - DNA, 843 bp, Zea Mays
gtgtgtttcgtctttatatatgtgcttttggagaaagctgataggctaaattgtttgggttctaggcagtagctagaaagagacttggaagctgagaaaagctgctgcaatatattgcaagaacttatctcacaccatttcaaactcgctcgcttctttcttttctacatacattcatagtacatcgatatgtgctccaatttataaaattttaagcgaaatttcttgtggatggtgaccactaccaagtctggatcgtgagtagtacttgggagatactaatcattgtttggtatactaaaataatctgttgtggttctatgcattcagaatatgtgttcatgattttatttttgaggaattggatgatgtgttgtttactatcctcggggctacatggtgtgggctgtgaaggccggctgatgtacatagagaggctagagaaggtgtcctagagtttgagagagcttttagggagaggttctctgcctacacattagctgctaagaggcatattgactccactaccatcttcgatgtccaaggggctcacatggatcaagcaaactttgagaccgtgccgaaagcatgccatccctggaatccttcagttgggagtaacatttggttccactgtgtggtttttgctctctaaatatattgcttgtcatacatatgtttgtggtctcatagatttggattttgagcagcaccagtttcttatttttgttaatgcaagccttgaagcgtatcaaactctatgaactggtatgatttggaagataggaattgtaacttctgtgttgcaaataatctatgaggtgtgagctgctagaggtaaaa

SEQ ID NO: 105741 - DNA, 840 bp, Zea Mays
tgcgtaaacccgcgtacgcgccccacaacgtgggcccgccacccagggttttccgtccatttctgaccccagtcgcttcgcctataaatgcggcgtgcgggcgccccgagcgaggggccaccaaagaaatcttgcaatccacccctcgaaagaaaacctcaatcaacaccagaagctctcgatcccaccgaggaagaagagaggaatggcgtccgaggagggagtcgtgatcgcctgccacaccaaggccgacttcgacgcccacatggccaaggccaaggaggccggcaagctggtgatcattgacttcacggcctcctggtgcggcccctgccgcttcatcgcgccactgttcgtcgagcacgccaagaagttcacccaggctgtgttcctgaaggtggacgtggacgagctgaaggtagtgagagcctggtggtgtcccaacccaatagcaaacgccgacgagtgatccaccagttcagttcatctgtcagttctaataccgacgacgacgctgttaatttcctccccgtttccacaggaagttgccgcggcctacgatgtcgaggcgatgccgaccttccacttcgtcaagaacggggtgacggtggagaccgtcgtcggtgccaggaaggagaacctcctggcccagatcgagaagcactgcgccgcggccgtgcctgctgcgtagagaggatggagaccagcacagcacgtggcggtggcggttgtcttgtcgttttcagtttgggcttgtcagcgctgtggctgggtggtcgattgttgtgaactggagcatgcagttctaatactttggaatttggatgtctggcttcgttc

SEQ ID NO: 105742 - DNA, 760 bp, Zea Mays
tgcgtaaacccgcgtacgcgccccacaacgtgggcccgccacccagggttttccgtccatttctgaccccagtcgcttcgcctataaatgcggcgtgcgggcgccccgagcgaggggccaccaaagaaatcttgcaatccacccctcgaaagaaaacctcaatcaacaccagaagctctcgatcccaccgaggaagaagagaggaatggcgtccgaggagggagtcgtgatcgcctgccacaccaaggccgacttcgacgcccacatggccaaggccaaggaggccggcaagctggtgatcattgacttcacggcctcctggtgcggcccctgccgcttcatcgcgccactgttcgtcgagcacgccaagaagttcacccaggctgtgttcctgaaggtggacgtggacgagctgaaggaagttgccgcggcctacgatgtcgaggcgatgccgaccttccacttcgtcaagaacggggtgacggtggagaccgtcgtcggtgccaggaaggagaacctcctggcccagatcgagaagcactgcgccgcggccgtgcctgctgcgtagagaggatggagaccagcacagcacgtggcggtggcggttgtcttgtcgttttcagtttgggcttgtcagcgctgtggctgggtggtcgattgttgtgaactggagcatgcagttctaatactttggaatttggatgtctggcttcgttctgttatgatgatgatgatggattgatggtgatggcatggcaac

SEQ ID NO: 105743 - DNA, 103 bp, Zea Mays
ctattgtcggaaagccactcgcgctcatttgtcaatagacatttgacctgtgtgactgcctgtcgacgtcctcagccatcagtgccgtacgccaaaaaaaaaa

SEQ ID NO: 105744 - DNA, 981 bp, Zea Mays
tctttctaaaccctacccgactccgccgccgctcccgctccgccccagcgcatcgcccgccgccacagcgtaccgcgacctcatctatcaccttcagctttcaatcatggcggacgtcgatgtcgaaccggaggttgccgccggagctcccaagaagaggacgttccgcaagtacagctaccgcggcgtcgacctagatgcgcttctcgacatgtccactgacgacctcgtccagctcttccccgcgcgcgccaggagaaggttccagaggggtctgaagaggaagcccatggcgctcatcaagaaactgcgcaaggcgaaaaaggatgctcctgctggtgagaagcctgagccagtcaagacacatctccgtaacatgatcattgtccctgagatgattggaagcattgttggtgtctacaacggcaagaccttcaaccaggttgagatcaagcctgagatgatcggccactaccttgctgagttctccatctcctacaagccggtcaagcacggcaggcccggtatcggtgccacccactcctcgcggtttattcctctgaaatgagctggtactcggctctttagtatcccaagacattttgtgttgttccattccagctcaagaattcaaagctaagcattgcacaattatgctgttttgttggaagtatttgagttaatcatatctaagctgagttgctacgttcttgtttttccccttgattttgggtttattcctgaaagtttgaagaatatccttacaattttggggtgccgcgtgtggcttgattgaaatgtgacggtgccaatttattgggtggccccgttatcatgaaaaagctgctccgagctaatatcgtctgtattctattagattcttgtcgtttttattcttgattcgctagaaagtttcgagaaatcagaaatgtgtgactgctcgtttctgagctaatcgtatatgttggcacccaaaataaa

SEQ ID NO: 105745 - DNA, 815 bp, Zea Mays
atgtacagtatgctagctgcagtgccttctgttctgtgccaggtagatgcggtcaatgcaagattgtgtttatcagtcatcatctgtggaactttgtttacttatacttgttacacaatttcctcacgagctatatcccactgtcctgaacagaaaaaggatgctcctgctggtgagaagcctgagccagtcaagacacatctccgtaacatgatcattgtccctgagatgattggaagcattgttggtgtctacaacggcaagaccttcaaccaggttgagatcaagcctgagatgatcggccactaccttgctgagttctccatctcctacaagccggtcaagcacggcaggcccggtatcggtgccacccactcctcgcggtttattcctctgaaatgagctggtactcggctctttagtatcccaagacattttgtgttgttccattccagctcaagaattcaaagctaagcattgcacaattatgctgttttgttggaagtatttgagttaatcatatctaagctgagttgctacgttcttgtttttccccttgattttgggtttattcctgaaagtttgaagaatatccttacaattttggggtgccgcgtgtggcttgattgaaatgtgacggtgccaatttattgggtggccccgttatcatgaaaaagctgctccgagctaatatcgtctgtattctattagattcttgtcgtttttattcttgattcgctagaaagtttcgagaaatcagaaatgtgtgactgctcgtttctgagctaatcgtatatgttggcacccaaaataaa

SEQ ID NO: 105746 - DNA, 316 bp, Zea Mays
gaaaaaggatgctcctgctggtgagaagcctgagccagtcaagacacatctccgtaacatgatcattgtccctgagatgattggaagcattgttggtgtctacaacggcaagaccttcaaccaggttgagatcaagcctgagatgatcggccactaccttgctgagcacccactcctcgcggtttattcctctgaaatgagctggtactcggctctttagtatcccaagacattttgtgttgttccattccagctcaagaattcaaagctaagcattgcacaattatgctgttttgttggaagtatttgagttaat

SEQ ID NO: 105747 - DNA, 79 bp, Zea Mays
gccactcccggaacctgcgcagggtccgtctcggcctcggcctcattaaggccctcttcgagcaattcctcgacaccga

SEQ ID NO: 105748 - DNA, 1356 bp, Zea Mays
aggggacattgtatgatgctgctacgacagcttacgggcaggtctgcgcgcagtttcatagctaggcgatcaggaaggttgttggtgctggcatgtacactcttccaaccagggagcagttgatagtgcggctgaatgaaactggttttctgttacttgcacgagttattgccgcaacatgttgtgtgacactatccgcttcaatggctgcacaactaggttcaactccaatggctgcattccagatctgcttgcaaacctggttggcttactcacttcttgccgatggattggcttttgctggacaggccatacttgcaagtgcatttgctcgtaaggaccatccgaaggccactgccacagcttctcgtatcttgcagctagctttggtcttgggacttctcctaagcatacttcttggtgttggtctgcgtatagggtccagattatttacatccgatcagggtgtactgcatcatatctacataggaataccggtatgttttctctgctaaatgctaaggacgatggcaagtcgcgaccttcaccatgatctgttttgctgcttctaggtcagaaaagcaagcacagcagcaaaacagatcggtttggaagtcaagttcagccgtatcgtcggacaacagttttatggacagcatgcacacagccatcatgcactctagacaacctcctcctgaactcaaaccaagagcttcatgtacaccggtaagctggtgaagcatggtggcatatcatgttccatattcgatggctgagacctggtagagcgtgaggtcctaccaccaccgctctcgcgggtcgaagatgtcgcgcagtgggaaagagccatgtatgctggcacaaaaaagaaatgacttctattgacaagtcctccctgaagtccaaactgttccaaactgttagaacatgagtctagatatgcccttgatcatcagtttctggttcatgtacagtagcagtacaggactagcctaaccctgtggctgtgacctgtcagtcatctacactgcaagaatgcagagaggggaattgtagtgtagggtttatttgctgccatatgtacatgtacgtgggtgcagccatgtaaatttgtaaatataaatccggtagcgtttagaaaggaaattaaattgtctggattgaaacaccgtgttgttgacatcatgcaaattttaaatatacctaatttaggtcgagaagtctcatgctatgatatgttgtttgatttacaatatcgtgtgtataaatatttcatgtttttcactttatttgttttgcggtaccaaacatataacgatttcatgtgtttcccgtgccaacgcacgggcatagacc

SEQ ID NO: 105749 - DNA, 1118 bp, Zea Mays
actaccgtgcgcggctatataagctgagattccgacgcgaacgtctttctaaaccctacccgactccgccgccgcccgccgctccgcctcagcgcatagcccgccgcgacctcatcgatcaccttcaactttcaatcatggtgagttccccgccaaaactgtatccaccaccaagatccagggcgtccttctgactcgcacatggactaatttgttttgcgcaggcggacgtcgatgtcgaaccggaggttgccgccggagctcccaagaagaggacgttccgcaagtacagctaccgcggcgtcgacctagatgcgcttctcgacatgtccacggacgacctcgtccagctcttccccgcgcgcgccaggagaaggtacctttcgtgccacgactcgtttgtttccgtagtatttttgtttgctgagtttgttttgataggttccagaggggtctgaagaggaagcccatggcgctcatcaagaagctgcgcaaggcggtcagtttccaaccgcttagttttcattaccactttttgttagcgtgttccgatcaagataagtgcgtggatcgttatgctgtcatgatttacccgtacgatatgaggtgtgatcttggtgtcaaaattttgatcaaatctcagcgcctattgttgtttagtgtaaatatcgtcttgaaagaagatgcaattaatcaaccagaagactgtttacttgaatgcttggcaaggttgctagtatgagtgttgcaattacaaatgtcgtagcaaggttgctagtattgactgtagcaattacaaatgttgaatcttgttatctatgtctagaaggagaatttgttgtattttgtagagctcctatatcatttgttctctcttttctctagacaaataaggttgttggtttagaaattgcttactgaatggtgcatacttctccattttctttgttatgtagtctgctgttttgtgacctgccttgtatcaatcataccattgttgtgtctgccgaatactattgggatattgataaatcaaagtttctatcctgaatgtacagtatgctagctgcagtgccttctgttctgtgccaggtagatgcggtcaatgcaagattgtg

SEQ ID NO: 105750 - DNA, 883 bp, Zea Mays
actaccgtgcgcggctatataagctgagattccgacgcgaacgtctttctaaaccctacccgactccgccgccgcccgccgctccgcctcagcgcatagcccgccgcgacctcatcgatcaccttcaactttcaatcatggcggacgtcgatgtcgaaccggaggttgccgccggagctcccaagaagaggacgttccgcaagtacagctaccgcggcgtcgacctagatgcgcttctcgacatgtccacggacgacctcgtccagctcttccccgcgcgcgccaggagaaggttccagaggggtctgaagaggaagcccatggcgctcatcaagaagctgcgcaaggcgaaaaaagatgctcctgctggtgagaaaccagagccagtcaagacacatctccgtaacatgatcattgtccctgagatgattggaagcattgttggtgtctacaacggcaagaccttcaaccaggttgagatcaagcctgagatgatcggccactaccttgctgagttctccatctcctataagccggtcaagcatggcaggcccggtatcggtgccacccactcctcgcggtttattcctctgaaatgagctgttacccggctctgtagtctcccaagagtcagttggcaatgttcgttcagcttttctacttgttttgaacaagttaaatgcccaagatattttgttttgttccattccagctcaagaattcaaagctaagcattgcacaattatgctgttttgttggaagtttttgagttaatcatatctaagctgagttgctattttgggttgtttattcatgaaagtttgaagaatatacttacaattttggggtgccgcctgccgcgtgtggcttgattgaaatacta

SEQ ID NO: 105751 - DNA, 876 bp, Zea Mays
actaccgtgcgcggctatataagctgagattccgacgcgaacgtctttctaaaccctacccgactccgccgccgcccgccgctccgcctcagcgcatagcccgccgcgacctcatcgatcaccttcaactttcaatcatggcggacgtcgatgtcgaaccggaggttgccgccggagctcccaagaagaggacgttccgcaagtacagctaccgcggcgtcgacctagatgcgcttctcgacatgtccacggacgacctcgtccagctcttccccgcgcgcgccaggagaagaggggtctgaagaggaagcccatggcgctcatcaagaagctgcgcaaggcgaaaaaagatgctcctgctggtgagaaaccagagccagtcaagacacatctccgtaacatgatcattgtccctgagatgattggaagcattgttggtgtctacaacggcaagaccttcaaccaggttgagatcaagcctgagatgatcggccactaccttgctgagttctccatctcctataagccggtcaagcatggcaggcccggtatcggtgccacccactcctcgcggtttattcctctgaaatgagctgttacccggctctgtagtctcccaagagtcagttggcaatgttcgttcagcttttctacttgttttgaacaagttaaatgcccaagatattttgttttgttccattccagctcaagaattcaaagctaagcattgcacaattatgctgttttgttggaagtttttgagttaatcatatctaagctgagttgctattttgggttgtttattcatgaaagtttgaagaatatacttacaattttggggtgccgcctgccgcgtgtggcttgattgaaatacta

SEQ ID NO: 105752 - DNA, 1564 bp, Zea Mays
ctgagattccgacgcgaacgtctttctaaaccctacccgactccgccgccgcccgccgctccgcctcagcgcatagcccgccgcgacctcatcgatcaccttcaactttcaatcatggcggacgtcgatgtcgaaccggaggttgccgccggagctcccaagaagaggacgttccgcaagtacagctaccgcggcgtcgacctagatgcgcttctcgacatgtccacggacgacctcgtccagctcttccccgcgcgcgccaggagaaggttccagaggggtctgaagaggaagcccatggcgctcatcaagaagctgcgcaaggcggtcagtttccaaccgcttagttttcattaccactttttgttagcgtgttccgatcaagataagtgcgtggatcgttatgctgtcatgatttacccgtacgatatgaggtgtgatcttggtgtcaaaattttgatcaaatctcagcgcctattgttgtttagtgtaaatatcgtcttgaaagaagatgcaattaatcaaccagaagactgtttacttgaatgcttggcaaggttgctagtatgagtgttgcaattacaaatgtcgtagcaaggttgctagtattgactgtagcaattacaaatgttgaatcttgttatctatgtctagaaggagaatttgttgtattttgtagagctcctatatcatttgttctctcttttctctagacaaataaggttgttggtttagaaattgcttactgaatggtgcatacttctccattttctttgttatgtagtctgctgttttgtgacctgccttgtatcaatcataccattgttgtgtctgccgaatactattgggatattgataaatcaaagtttctatcctgaatgtacagtatgctagctgcagtgccttctgttctgtgccaggtagatgcggtcaatgcaagattgtgtttatcagttatcatctgtggaagtttgttttcttatacttgttactcaatttcctcacgagctatatcccactgtcctgaacagaaaaaagatgctcctgctggtgagaaaccagagccagtcaagacacatctccgtaacatgatcattgtccctgagatgattggaagcattgttggtgtctacaacggcaagaccttcaaccaggttgagatcaagcctgagatgatcggccactaccttgctgagttctccatctcctataagccggtcaagcatggcaggcccggtatcggtgccacccactcctcgcggtttattcctctgaaatgagctgttacccggctctgtagtctcccaagagtcagttggcaatgttcgttcagcttttctacttgttttgaacaagttaaatgcccaagatattttgttttgttccattccagctcaagaattcaaagctaagcattgcacaattatgctgttttgttggaagtttttgagttaatcatatctaagctgagttgctattttgggttgtttattcatgaaagtttgaagaatatacttacaattttggggtgccgcctgccgcgtgtggcttgattgaaatacta

SEQ ID NO: 105753 - DNA, 1190 bp, Zea Mays
cgtgcgcagctatatataagctgagattccgacgcgcacctccttctaaaccctacccgactccgccgccgctccgccgccgctccgcctcagcgcatcgccctccgccacagcgtaccgcgacctcatcgatcaccttcaactttcaatcatggcggacgtcgatgtcgaaccggaggttgccgccggcgctcccaagaagaggacgttccgcaagtacagctaccgcggcgtcgacctagatgcgcttctcgacatgtccacggacgacctcgtccagctcttccccgcgcgcgccaggagaaggttccagaggggtctgaagaggaagcccatggcactcatcaagaagctgcgcaaggcgaaaaaggatgctcctgctggtgagaagccagagccagtcaagacacatctccgtaacatgatcattgtccctgagatgattgggagcattgttggggtctacaacggcaagacattcaaccaggttgagatcaagcctgagatgatcggccactaccttgctgagttctccatctcctataagccggtcaagcatggcaggcccggtatcggtgccacccactcctcgcggtttattcctctgaaatgagctgttacccgtctctgtagtctcccaagagtccgttggcaatgtccattcagcttttctacttgttttgaacaagttaaatgcccaagacattttgttttgttccattccagctcaagaattcaaagctaagcattgcacatttatgctgttttgttggaggtatttgagttaatcatacctaagctgagttgcaacgttcttgtttttttccttgattttggattgtttattcctgaaagtttaaagaacatccttacaattttgtggtgccgcgtgtggctttgaaatatgacggtgccaatttattgggtggccccgttaacattgtatcttgaccagatgtagccttgttggcaagcacttgacactgacccttagttgcctctcctagtgatggatagctgctggtaatttgtagcaccaacatttcaagttttgtttggttgtgagcaatgaaaaagctgctcggagctaatatcgttcgtatttaattcgattacatccatatgcttattaggttcttgtcgtttttattctagagcaaagcgtatatgttggctcccaaaaataaaaa

SEQ ID NO: 105754 - DNA, 1729 bp, Zea Mays
agattccgacgcgcacctccttctaaaccctacccgactccgccgccgctccgccgccgctccgcctcagcgcatcgccctccgccacagcgtaccgcgacctcatcgatcaccttcaactttcaatcatggtgagttccccgccaaaactgtacccacctccaagatcctgggcgtccctatgactcgcacatggactaatttgtgttgcgcaggcggacgtcgatgtcgaaccggaggttgccgccggcgctcccaagaagaggacgttccgcaagtacagctaccgcggcgtcgacctagatgcgcttctcgacatgtccacggacgacctcgtccagctcttccccgcgcgcgccaggagaaggtacctttcgtgccgcgactcgtttgtttccgtagtatttttgtttgctgagtttgttttggtaggttccagaggggtctgaagaggaagcccatggcactcatcaagaagctgcgcaaggcggtcagtttccaaccgcttagttttcattaccactttttgttagcgtgccccgatcaagataattgcgtggatctgttatggtgccattattaacgatgcttattagattcttttttttctattcttatgtctttcgtgttcagctagaagaattcgagaaaaccgaaatgtgtcttctcgaatgagtttgatgcatcttctcttaattttacccatacgatatgaggtgtgatcttggtgtcaaaattttgagcaaatctcagtgcctattgttgtatagtgtaaatatcgtcttgaaatgatatgctattaatcaaccagaaggctggttacttgaatgcttggcaaggttgctattattgagtgttgcaattacaaatgtcgtggcaatgttgctagtattgagtgtgtagcaattacaaatgttgaatcttgttatctatgtctagaagcagaagttgctgtattttgtagagcttctatatcatttgttctctcttttctctagacaaataagcttttggtttagaaggtgcaagtaaatatacttttgaaattgcttctgaatggtgcatactttttcgttttcgtatttatgtagtctgctgttttgtgacctgcctttgtttcaatcagactattgttgtgtctgcctaatactattgggatattgataaatcaatttttctatcctgaatgtacagtatgctagctgtagtgccttctgttctgtgccaggtagatgcggtcaatgcaagattgtgtttaccagtcatcatctgtggaagtttgtttacctatacttgttacacaatttcctcacgagctatatcccactgtcctcaacagaaaaaggatgctcctgctggtgagaagccagagccagtcaagacacatctccgtaacatgatcattgtccctgagatgattgggagcattgttggggtctacaacggcaagacattcaaccaggttgagatcaagcctgagatgatcggccactaccttgctgagttctccatctcctataagccggtcaagcatggcaggcccggtatcggtgccacccactcctcgcggtttattcctctgaaatgagctgttacccgtctctgtagtctcccaagagtccgttggcaatgtccattcagcttttctacttgttttgaacaagttaaatgcccaagacattttgttttgttccattccagctcaagaattcaaagctaagcattgcac

SEQ ID NO: 105755 - DNA, 101 bp, Zea Mays
attgttttgcactgtgtactacactgtttacagagtggagtttgaatataggtatatggatgtgtaagctgccggagatattctaagaacaatatttatgg

SEQ ID NO: 105756 - DNA, 2170 bp, Zea Mays
agacagggacaaacccgtcacttgtctccgcgcccacggagttctccgtccccctcccaacaacggcaacaacaccgtgacccaccgcccgggtccacctgtcaacgtcgtccttgccccgtccccacaccgcctacacccactacgccacgtactctgtgggcccaccaaccgtccacgtcacccacccccctccgtcgtacaaacagcactctcctccctcttttaagaccttgccgggcacctcagtagtcactacctcactgtcccactcctccgtcctcgtcgactccgaagaggagaagagagcacgaatcgccggaggtggacgccaccggcgagtctcctttgggccacacgtaaggcggcgtagactgtagaggttgtttggttgtaataagcagcgcacgccgcacgcgccattcccgttttggttgccaagtgaagagaggacggtggttgtagttgtggttgtgttgagtggggaaggggacggtgcagctgtggaaagtagcggccgtcgatgacgtttctgttcccggcgaagaaccagcagggtacgatggagggcaggccgtctgcgccggcgagggtgtcgatgttccggaggctgatggtgcgggtgaccccggctgagcggctggctggtgacggcaaggagagggacaaggacgagaggccgccggcgtccggcgccggagcggacgcggaggtcgggtcggtggggctggacaagatggtgctcagcttcatggaggactcctccgcggccgcggagcggccaccgcgtgggcgatgcagcagctgctttaacggcaacaaccaggacggcagcgacgacgaggacttcgacttcctgccgtccgcctccgcccccgccgcggcgccagccgcggccggcgacgccttggagctgctgaagggcttggtgcagtgcgcgagcacgccggagcggaacctgctcgcggacgcgtcccggatcgcggagcgctgcggctccgggtccggctccggccggaagaaggcggacgtccggcgcgccgtggcggacgggctgcgcgcgctcgggtacgacgcggcggtgtgcacgtcgcggtgggacaggaccccctcccacccggccggcgagcaccagtacatcgacgcgaacgtggagcccggggccggggcggcggcccgcgtccgcgtccgcgtggtggtggaggtggacttccggtcggagttcgaggtggcgcggcccaccaaggcgtaccgcgccgcgctgcaggcgctgccgccgctgttcgtgggcagcccggagcggctgggccgtgtcgtgggcgtggtggcggacgcggcgcggcagagcctccgcaagcgcgggctccacttcccgccgtggcgcaagcgcgagtacatgcgcgccaagtggctgtccccgcacgcccgcagcagcagcagcgcggacaggacgccggcgcccgccacgccggtttccgccgccgccgccgccttctccggcgagttcgagctgtggttcgacgagaaggagaaaccgaaggcggcggactacgacggcggcattcctggcggagaagacgacggggcgggcaagaaggtcacggtcatggtgtcgccgacgccgacgccgtggcgtgcggaagagcccggggcggctagcaagctgtgcccgcaggccaagcggaaggtggtgaccgggctggcgtccctgctgccgctcgcaagctgatcaacatcaaaccaagaggagagactccgtccggctccaaaaaagttttcccttttcccacctctacctccagaagatttccattccccccgcgttcgtcgatccgtccgagggccggctccaggtgttttagcggttttccggcgcctcggaacagagagtgaaaaaaaagagagagagagaaacgcctccctttttccgtcgaatttttttcctttgttttgttcctgcgaaagaacaaaattttcagttgtccgccgccgggggaacgggaggaatccgggcagatttgggttccctgtcctctgttcttgggagggagagaaattatgaagcatcactgctgctatgatctataaaagcgggttgagtactctatcgtattcatcatgtcatgtcaggcctgtgacttcaattgaaagtaccataattactctgcaa

SEQ ID NO: 105757 - DNA, 1435 bp, Zea Mays
cggagctggcccggcacggtggctaacgggctcgggccggcccagcacggtaaccgtgtcgtgcttgggccgcaagtgtggcacggcgtgcctggcttgagcacggcccgtgtaaccgtcgacccgtttaaggcccgtccgggagagaaatattctctctctgatctctcactcagtcactctcatccaagatccatattttgctcttattttcctctctcaagctgaagccacgtcccctctggtggcccctcgctggcggatccggtgctccggtcggtcaggccgttgaggagccgggtgacgccgtgaggagccggtcaaaatccctagatggatgttgatccggccgccgaggctgaggagcatgcacttgaggattacaatgagcaccttgatgagatggcgttgtttggccataatgtggatgttgctgtcaacatcgacgcggtggagccacagccaacaccgaccatggccgggacagtgacagggtcttcgagccccgctgccactggtagtggtagcactgttcgtgacacccgatccaggaagaggctacccacgtccagagtatggtctgacttcgatgaggtaactggtgtagacgacaaaggtaagaaggtaagggtctctgccatttgcaaacactgcaaaactaccttgtctgctagatcttcctctggtactggacatttgcttaggcaccaacaacattgtaaagctaagattgagcattatcgagctggcatagtacagtcagtccttaaattcaatcctgatggttctactcctattgcatctactgtagcatccatctctgatctgtcttcttacctagacagtgatactgtcacccaatttggtgcagacttcaacattcttaattggtggcagaggcataagcttacttatcctattcttgctcttcttgctaaagatgttttgactgttcctgcttctaccatatcttcagaatctacatttagtcttgctggcagggtgctcgaggagcgacgacgacgactaacaacagatatggttgaggtcttatcctgtattaaggattgggagctagcagacaagcatatgcagaatactgtcgaaaacgatacgaaggaacttgaagcaacctatgagaacatgtaccttgatgttgaagacagagacaaggacaaagatggagaatcaagacctagaagaagttgagtttgtagctgtctctgtggctgtttcattgtggctgtttacttcaatgtggctgtttacttatcttttgatgtaataaactactctaaacacttgaacaattaggagctggttgtactcttttccttcctagggttttctcacgaggtgtgagtttttacctaggaaggtttttaatgaggcagcactgcactaacagctcccatattattcaccttatcttgca

SEQ ID NO: 105758 - DNA, 934 bp, Zea Mays
cgacgtcctcctcctcctcctcctctcccttccctattctttctctcacacgctaaatggatgggcacgctacgccgtattcctcccccgcagccgcttccttcgcccacacgcccccgcgctcggaatactccgaggagggtgctcgaggcgaaccaagggcgatggttcatctcgctttcgtctcgctgcgtgcgctctctgtcactccccctctctctcctcatcagatccggccacttcctgctcgcctcgccaccggtcccgcgccccggaaccctagagctctccccgcggcagggccgccggagtccccgggcgcgtggagaaaatggaggcggcgctagaggcggcgtgtcaaggacaccaaggagcgtctggccggggtcaagcggctgcacgaggcgcttgacgccgcggcgcggcgcgcggcggccgaggtcaccacgctggtggacacctgcatggatctgacgcgggatgccaacttccgcatcgcccagggcggcctccaggcgctctccgtcgccgccgtcgtcgccgacgaccacttcaagatccacctcaacgccctcgtccccgccgccgtcgagcgcctcgacgacggcaagcaacccgtccgcgacgccgcgcgacagctcctcatcacgctcatggaggtgagctcctttcgtcggcgctctcagtggcctgtcgtctctcctgggaaatgcatgtagctggggaggtagattaagttgcgagttcgaactaagagatcgagcaggagcagattggggatttgaggcttgtttttttaggtaggtcgggtggggcacggtacattgcatagttgtgctgaagtgaggaatccaaaggtctattcggctgaccattatagattgacatgcattacatttaaatggatcaatggtctaacatttttgtaggaatc

SEQ ID NO: 105759 - DNA, 1289 bp, Zea Mays
cgacgtcctcctcctcctcctcctctcccttccctattctttctctcacacgctaaatggatgggcacgctacgccgtattcctcccccgcagccgcttccttcgcccacacgcccccgcgctcggaatactccgaggagggtgctcgaggcgaaccaagggcgatggttcatctcgctttcgtctcgctgcgtgcgctctctgtcactccccctctctctcctcatcagatccggccacttcctgctcgcctcgccaccggtcccgcgccccggaaccctagagctctccccgcggcagggccgccggagtccccgggcgcgtggagaaaatggaggcggcgctagaggcggcgtgtcaaggacaccaaggagcgtctggccggggtcaagcggctgcacgaggcgcttgacgccgcggcgcggcgcgcggcggccgaggtcaccacgctggtggacacctgcatggatctgacgcgggatgccaacttccgcatcgcccagggcggcctccaggcgctctccgtcgccgccgtcgtcgccgacgaccacttcaagatccacctcaacgccctcgtccccgccgccgtcgagcgcctcgacgacggcaagcaacccgtccgcgacgccgcgcgacagctcctcatcacgctcatggaggtttcttcaccaacaatcatagttgaaagagctggtagttatgcatggactcataagatttggagggtgagggacgagtttgtacgtacggtggcatctgcagttgggctatttgcttctacggagatttccttgcaacgagttttgctttcacctgtcctgcaactaatgaatgattcgaaccaaagtgttcgagatgctgctatctcttgtattgaggagatgtacaagcacatgggatcacaatttcatgaagagttgcagcgccataatctgccttcatatatggtacttttattgctagggcttccttttaatagttgggctagcagtttcatgctttagataattattattttggtgcctgcagctaaaagaaataaattcaaggttggataaaatagaaccaaaggttcgatcatctgatacagcaatgcagtataaggctgtagagtctagaggcaatgctgggatgtagcctgttggtagtgggacaccttcaggttctgttattgatctggaaaatgaggaatcaggttcaaaaggtaaaaggccattaggatgggactccatgaaagcatcaaggaagaaggcaatgtccagttcctcccagtctactgactacctttt

SEQ ID NO: 105760 - DNA, 1774 bp, Zea Mays
cgacgtcctcctcctcctcctcctctcccttccctattctttctctcacacgctaaatggatgggcacgctacgccgtattcctcccccgcagccgcttccttcgcccacacgcccccgcgctcggaatactccgaggagggtgctcgaggcgaaccaagggcgatggttcatctcgctttcgtctcgctgcgtgcgctctctgtcactccccctctctctcctcatcagatccggccacttcctgctcgcctcgccaccggtcccgcgccccggaaccctagagctctccccgcggcagggccgccggagtccccgggcgcgtggagaaaatggaggcggcgctagaggcggcgtgtcaaggacaccaaggagcgtctggccggggtcaagcggctgcacgaggcgcttgacgccgcggcgcggcgcgcggcggccgaggtcaccacgctggtggacacctgcatggatctgacgcgggatgccaacttccgcatcgcccagggcggcctccaggcgctctccgtcgccgccgtcgtcgccgacgaccacttcaagatccacctcaacgccctcgtccccgccgccgtcgagcgcctcgacgacggcaagcaacccgtccgcgacgccgcgcgacagctcctcatcacgctcatggaggtttcttcaccaacaatcatagttgaaagagctggtagttatgcatggactcataagatttggagggtgagggacgagtttgtacgtacggtggcatctgcagttgggctatttgcttctacggagatttccttgcaacgagttttgctttcacctgtcctgcaactaatgaatgattcgaaccaaagtgttcgagatgctgctatctcttgtattgaggagatgtacaagcacatgggatcacaatttcatgaagagttgcagcgccataatctgccttcatatatgctaaaagaaataaattcaaggttggataaaatagaaccaaaggttcgatcatctgatacagcaatgcagtataaggctgtagagtctagaggcaatgctgggatgtagcctgttggtagtgggacaccttcaggttctgttattgatctggaaaatgaggaatcaggttcaaaaggtaaaaggccattaggatgggactccatgaaagcatcaaggaagaaggcaatgtccagttcctcccagtctactgactaccttttaagaattcatgacattcaaatagcaagactgaagcaaagtgaagaaaaatcaggtaagaaacaacagaatattgagttcttgaaggaagttgaactgaaaaagttggaggtccaaaccaaggaactagaaatgcagcaaaccaaaatgatgattgaagaaaggatccgaaaggacgcagagctgaaggaactcctagctatggaatgttttaccagaggatgtgagacctgtatacatcgcgaggagaaaaggtttaatcgagtttttcatcaacaatcctgtctgaagagtactattgtatttcataatttgttgcgaacctagtgtcggcgtaacgtggtccggtgtgttcggacatatgtcatttcgagatttttgaacatttgcttaattgtttgagaacagtagcttggtttttgaactcgtgtcgtgtactagaagattgcgaaatttttattattaaaaaacatataattccaactatttatgactaacgtatttatattaattacgaagtttgctaattaattgtatactaagtgacggtcgcgcactgttcatagagc

SEQ ID NO: 105761 - DNA, 886 bp, Zea Mays
ctatctaggcagcataaagtttttctagtaagccttcatttgtttttcactacaggagatgtacaagcacatgggatcacaatttcatgaagagttgcagcgccataatctgccttcatatatggtacttttattgctagggcttccttttaatagttgggctagcagtttcatgctttagataattattattttggtgcctgcagctaaaagaaataaattcaaggttggataaaatagaaccaaaggttcgatcatctgatacagcaatgcagtataaggctgtagagtctagaggcaatgctgggatgtagcctgttggtagtgggacaccttcaggttctgttattgatctggaaaatgaggaatcaggttcaaaaggtaaaaggccattaggatgggactccatgaaagcatcaaggaagaaggcaatgtccagttcctcccagtctactgactaccttttaagaattcatgacattcaaatagcaagactgaagcaaagtgaagaaaaatcaggtaagaaacaacagaatattgagttcttgaaggaagttgaactgaaaaagttggaggtccaaaccaaggaactagaaatgcagcaaaccaaaatgatgattgaagaaaggatccgaaaggacgcagagctgaaggaactcctagctatggaatgttttaccagaggatgtgagacctgtatacatcgcgaggagaaaaggtttaatcgagtttttcatcaacaatcctgtctgaagagtactattgtatttcataatttgttgcgaacctagtgtcggcgtaacgtggtccggtgtgttcggacatatgtcatttcgagatttttgaacatttgcttaattgtttgagaacagtagcttggtttttg

SEQ ID NO: 105762 - DNA, 1478 bp, Zea Mays
ctaaatttcaaacggaatccccatgacaaacgcaagaaacacgaaagcaagaaccggaaggaacagccacgccaatatacagagcgagccagcacacagtttttttttcatacggctggtctgcaattaggtgcctcgactgcttgctagccgccggattaatctttccctaccctaaggctcaggttttagtgggatatgatgaagctaaaaagtggacgacgaccgttctataaggatgttaagcttgtagactgccgttcaggctcaagtcttccacatttggctgctcaagcaaagtttgcagccatgaacatgaagactgaagatgtcaatcctcgtcgaccagttcaagtcagacgaagtagatgggctcttggtgatgtaaccgaggtgttggatcataattcgtggaggcttgggaagattacagaagtactgaagaatgactattttgtcatcaggctagtgggttgcatccaaccaagagaattccacatatcttgcttgaggattccacatgatcgcaagcagttgactgttggaggcagggaccatcaagcctatgaagaggttgatcactatgctaagaggaaagcagccaatatctgtgcttccaccggtgctagagctgtcaagagaaaactagaagcaagcaggatcccacctaatggtttagtcagaagaacaggcaaggaacagaaagtatctacacatgaatttcgccagttaaccaagaacgagttgcctccaaaggtgtctgctaggaatgccatcgacgaagatgatcattttcataggcctttaagtagcagatacaacgatctgcctgagaaacctctgcgcaccagagaagaggacgagtgctcggtggctagctgcagcgcgaattacacaagtggaacgaaaaggccttcgagcaatacggacactgcttctagtccgccaaagaagaataagaacgcaatggttaggtgcatgaagggtttgcttgatcgattagattctggcagtagcaaagacgtagatacagctacgcagattcaagaaataattgagacaaaaagaaaggagcagcaagctgcagatttcaaggagatagacctgtgtttggcactggcaaaggaatgtggggctactgaggagacagacgagttcttcgtagcttcccaactgtttgcaagctgcaaatttcaaagacatgttttcctaggactgtcttcaaatgcaggaaggatggcttggttgaagaagcactgcaagggctggactttttaaggactttagtttatgtcataggactggcttttctatttgtgtatcatgaagttaagtctatgaactgttagttatatttggtttgtgaactgttatgtacggctgtgatgcataaactttgtgatgcatgaatcttgttgtggttgtgctgcatgattttgcatgatttgtggaggttgtgcatgaatcatttgcatctt

SEQ ID NO: 105763 - DNA, 1565 bp, Zea Mays
ctaaatttcaaacggaatccccatgacaaacgcaagaaacacgaaagcaagaaccggaaggaacagccacgccaatatacagagcgagccagcacacagtttttttttcatacggctggtctgcaattaggtgcctcgactgcttgctagccgccggattaatctttccctaccctaaggctcaggttttagtgggatatgatgaagctaaaaagtggacgacgaccgttctataaggatgttaagcttgtagactgccgttcaggctcaagtcttccacatttggctgctcaagcaaagtttgcagccatgaacatgaagactgaagatgtcaatcctcgtcgaccagttcaagtcagacgaagtagatgggctcttggtgatgtaaccgaggtgttggatcataattcgtggaggcttgggaagattacagaagtactgaagaatgactattttgtcatcaggctagtgggttgcatccaaccaagagaattccacatatcttgcttgaggattccacatgatcgcaagcagttgactgttggaggcaggatcaatgaactgaataagccgacccgatttgctgactgctcctctcaccactcaaaatttgtgatggaacaggaccatcaagcctatgaagaggttgatcactatgctaagaggaaagcagccaatatctgtgcttccaccggtgctagagctgtcaagagaaaactagaagcaagcaggatcccacctaatggtttagtcagaagaacaggcaaggaacagaaagtatctacacatgaatttcgccagttaaccaagaacgagttgcctccaaaggtgtctgctaggaatgccatcgacgaagatgatcattttcataggcctttaagtagcagatacaacgatctgcctgagaaacctctgcgcaccagagaagaggacgagtgctcggtggctagctgcagcgcgaattacacaagtggaacgaaaaggccttcgagcaatacggacactgcttctagtccgccaaagaagaataagaacgcaatggttaggtgcatgaagggtttgcttgatcgattagattctggcagtagcaaagacgtagatacagctacgcagattcaagaaataattgagacaaaaagaaaggagcagcaagctgcagatttcaaggagatagacctgtgtttggcactggcaaaggaatgtggggctactgaggagacagacgagttcttcgtagcttcccaactgtttgcaagctgcaaatttcaaagacatgttttcctaggactgtcttcaaatgcaggaaggatggcttggttgaagaagcactgcaagggctggactttttaaggactttagtttatgtcataggactggcttttctatttgtgtatcatgaagttaagtctatgaactgttagttatatttggtttgtgaactgttatgtacggctgtgatgcataaactttgtgatgcatgaatcttgttgtggttgtgctgcatgattttgcatgatttgtggaggttgtgcatgaatcatttgcatcttagttgtcttgtgaat

SEQ ID NO: 105764 - DNA, 1533 bp, Zea Mays
cggaatccccatgacaaacgcaagaaacacgaaagcaagaaccggaaggaacagccacgccaatatacagagcgagccagcacacagtttttttttcatacggctggtctgcaattaggtgcctcgactgcttgctagccgccggattaatctttccctaccctaaggttgaaagtggtttgaatttttcaagaacaaaagtttccaacctgtaagattatcttctgtttctgggatctgcccatctggggaattgctcctgcttcagcctcttagcttgaggctcaggttttagtgggatatgatgaagctaaaaagtggacgacgaccgttctataaggatgttaagcttgtagactgccgttcaggctcaagtcttccacatttggctgctcaagcaaagtttgcagccatgaacatgaagactgaagatgtcaatcctcgtcgaccagttcaagtcagacgaagtagatgggctcttggtgatgtaaccgaggtgttggatcataattcgtggaggcttgggaagattacagaagtactgaagaatgactattttgtcatcaggctagtgggttgcatccaaccaagagaattccacatatcttgcttgaggattccacatgatcgcaagcagttgactgttggaggcagggaccatcaagcctatgaagaggttgatcactatgctaagaggaaagcagccaatatctgtgcttccaccggtgctagagctgtcaagagaaaactagaagcaagcaggatcccacctaatggtttagtcagaagaacaggcaaggaacagaaagtatctacacatgaatttcgccagttaaccaagaacgagttgcctccaaaggtgtctgctaggaatgccatcgacgaagatgatcattttcataggcctttaagtagcagatacaacgatctgcctgagaaacctctgcgcaccagagaagaggacgagtgctcggtggctagctgcagcgcgaattacacaagtggaacgaaaaggccttcgagcaatacggacactgcttctagtccgccaaagaagaataagaacgcaatggttaggtgcatgaagggtttgcttgatcgattagattctggcagtagcaaagacgtagatacagctacgcagattcaagaaataattgagacaaaaagaaaggagcagcaagctgcagatttcaaggagatagacctgtgtttggcactggcaaaggaatgtggggctactgaggagacagacgagttcttcgtagcttcccaactgtttgcaagctgcaaatttcaaagacatgttttcctaggactgtcttcaaatgcaggaaggatggcttggttgaagaagcactgcaagggctggactttttaaggactttagtttatgtcataggactggcttttctatttgtgtatcatgaagttaagtctatgaactgttagttatatttggtttgtgaactgttatgtacggctgtgatgcataaactttgtgatgcatgaatcttgttgtggttgtgctgc

SEQ ID NO: 105765 - DNA, 544 bp, Zea Mays
ctcagagcacagtaccagtgatgatgaccatcaatcagttggaaccggcagttgtttccctgatgatgttatgtctgcatgtgagtatgggcaggagactgaggacgcctatggctctggtttgtttcagaacgtccatgagctggagctgcgagcatatcgatcaaccgtcagagctctccatgctgcaggacccctgacgtgggagcaagagtcgctcctgacgaacctgcgcctctcgctcaacatctcgaacgaggagcacttgcttcagttgaggcatctcctagctctttgaatttttttcaaaaatcaatatgttttttaacacctgtggattacctccaactcgcagagatcaccgcaggcttgtagcgtgcgtaactcgagggtgtaactcgagggtgttgtatatagagaagagtccagagaaattcacctgtagctgttgtacttagccagaactttgttgctaggagtaagtcttgcatttttttagtgtttttacaatttcgaggaaatgtaaagcttcgaaatattagtc

SEQ ID NO: 105766 - DNA, 1534 bp, Zea Mays
tcaccacaacctacggccgtgaatctcacgccgacgtggcctccgccgcggccgcccacctcgtcgtcacgggcgggcgagccacctctccccgaggctctagctccccacgcctataaaagccggccacccactctggcaagtggcaaccaccacactacaactcgacaccgagaaaagcgcagcaaagcaacgcaaagcccacgccgctacagtgctacagcgagcgagcctcttgcctgccgctacgagccaacgactcgaacgcatacactccaatggcagcgacggtgatggcctccatgagccccctcgcctccgccacccccggcgcgcgtcgcgctttccctgtacggctgctgctccaggcatctgcgctcgcgccgcgccggcgcgccttggccgtgaccgtgagggcccagagcgacgacgccgaggccgagccaaaggaggcggcggcggcggccaccaccccggcgccaaagtccaaggcggcggcggcggcgagccccgggctgtgggacgcgctggcgttcagcggcccggctcccgagcgcatcaacggccggctcgccatggtgggcttcgtgtcggcgctcgccgtcgaggcgtcccgcggcgggggcctcctctcgcaggccggcagcgggtccgggctcgcctggttcgcggccacggctgccgtgctgtccgtggcctcgctggtgccgctgctcaggggcgacagcgccgaggccaggagcggcgccgtcatgagcgccaacgccgagctctggaacggccgcttcgccatgctcggcctcgtcgcgctcgccttcactgagtacctcaccggcgcaccgttcatcaacgcgtagaggcggttcagtccaagccagtgcttatatattttggaagttggaactgtgtatgctagtcagctatagcggcaccatgcccgtagtaggagcctagctacagttggacgagctactttttattgggatttactagtcttgggccatttacttctcttcttattaaagtccactcataaatcagaaatccaattttatctgacgggaataagggcggaagacactagtcaaagttgtttaggctatccacactcgtacaaccctaaatttttactctaaaaataatattctatcctgatcagcgagattctttactctataccacaattctccgcactcatatttactctatatctaaccctatccctgggaacacactacacgtcctccacgtggtccaaccaggcgggcgcggcatcggctgccgtcctcgtgcacagtggatagagcagcaccgtacgagcgctaggagtggcgtaccgccgcggtgcatgcagtttccagtgccgttttcagttcccgctgcagcgtattgccttgcgctaaaactttagcgtgcccttcccagtgcatggctgcgggcagccttaaccaattcaacatcatgttcaagtgtttataatattgaatataaattgtacatatgtatatatgatttttgtaaaataaaaaaataa

SEQ ID NO: 105767 - DNA, 1886 bp, Zea Mays
cccccccctactactcctactcccaccacctacaggctacagttgccgtccacatcgcccgccgcgattggccgtgacctccgtcaagacacagcatgagaaccagccaatcacaaaaacacgccaaactttcggaacaagaaaaaaaggcgtaaaaaattcagatgaaaaatacaatttcgtagaaaaagtaaacagccacaccggtcaactttacaaatggcagccgaaaccaaagcgcgtctttgtgcgtgtatataaacaccgaactcgcagtgacgcatcagcaataagcgcaaacgcacacaagcggaggacaaacaaacagcaagagagcggaacgccgaaaggcaaaggcaaaggcaacggcaacgcaagccagaggcagagcgcgccccgccacgatgaagaaggaggaggtggcctcgccggcggcggcgacggtggtcctgctgctcctgtcgtcgtcgttggcggccgtctccggccagccacagccgcagccgcagcccgggggcagcaagcagacggcggcgaacaacccgcggctgcagaaggcgtacgtggcgctgcaggcgctgaagcgcgcggtgacggaggaccccaagaacctgacgcggagctggtgcgggccggacgtgtgcggctacttcggcgtgtactgcgcggcggcgccggacgagccgcgggagcagacggtggccggggtggacctgaaccacggcgacctggcggggacgctcccggaggagctgggcctgctggcggacctagcgctgctgcacctcaactcgaaccggttcgcggggacgctcccggagtccctccccaagatgcggctcctgcacgagctggacgtgagcaacaaccgcctctcgggcgggttcccgcagcacatcctgtgcctgccaaatgtgaagtacgtggacctgcggttcaacgagctgcgcgggccggtgccgccggcgctcttcgacaagccgctggacgccgtcttcctcaacgacaacgccttcgacttcgagctgccggacagcctgggcaactcgccggcgtccgtgctcgtgctggccaacctgcgcctgcgcgggtgcatcccgcgcagcgtgggccgcatggcgggcacgctggccgagctggtggcgctcaactcgggcctccgctcctgcctcccgcaggagctgggctggctgcgcgagctcaccgtgctggacctcagctccaaccagctgcaggggatgctgccggagtccatggccggcatgcacagcctgcagcagctccacgtggcgcgcaacgagctgtggggccacgtccccgagggcgtctgcgcgctgcccgcgctccgcaacttcacctactcgtacaactacttctgctccgagccaagccgctgcctcgacgtccgccacgtcgacgaccgccagaactgcatcgccgcccgccccgaccagcgccccgcagaccagtgcctcgccttcctccaccgcccgcccgtgcgctgcgacgacagcggctgcttcgccccgccgccgccgcactactagagatccatgcgtactctggctctgccggcggtgggagagagacagaaggagagggagacagtcgccgccggctcgccgcgtcggggcttgtaaacttcgcttgtgtggacgtgtggtgagggatgtgagagtgagaccgagagggggggtaaatccgtaaacagaaaacgaccgtatatattatacagctgtaattctttttttcttcttcttttaccttactttccacaggagtggtgtcgattggagtatttggtgggatatattgtagacagaaactatagtgaattttacagcgttaattcaattacccactgaccagtgaccaacaatctcttg

SEQ ID NO: 105768 - DNA, 1380 bp, Zea Mays
cgcaaacgcacacaagcggaggacaaacaaacagcaagagagcggaacgccgaaaggcaaaggcaaaggcaacggcaacgcaagccagaggcagagcgcgccccgccacgatgaagaaggaggaggtggcctcgccggcggcggcgacggtggtcctgctgctcctgtcgtcgtcgttggcggccgtctccggccagccacagccgcagccgagccgcgggagcagacggtggccggggtggacctgaaccacggcgacctggcggggacgctcccggaggagctgggcctgctggcggacctagcgctgctgcacctcaactcgaaccggttcgcggggacgctcccggagtccctccccaagatgcggctcctgcacgagctggacgtgagcaacaaccgcctctcgggcgggttcccgcagcacatcctgtgcctgccaaatgtgaagtacgtggacctgcggttcaacgagctgcgcgggccggtgccgccggcgctcttcgacaagccgctggacgccgtcttcctcaacgacaacgccttcgacttcgagctgccggacagcctgggcaactcgccggcgtccgtgctcgtgctggccaacctgcgcctgcgcgggtgcatcccgcgcagcgtgggccgcatggcgggcacgctggccgagctggtggcgctcaactcgggcctccgctcctgcctcccgcaggagctgggctggctgcgcgagctcaccgtgctggacctcagctccaaccagctgcaggggatgctgccggagtccatggccggcatgcacagcctgcagcagctccacgtggcgcgcaacgagctgtggggccacgtccccgagggcgtctgcgcgctgcccgcgctccgcaacttcacctactcgtacaactacttctgctccgagccaagccgctgcctcgacgtccgccacgtcgacgaccgccagaactgcatcgccgcccgccccgaccagcgccccgcagaccagtgcctcgccttcctccaccgcccgcccgtgcgctgcgacgacagcggctgcttcgccccgccgccgccgcactactagagatccatgcgtactctggctctgccggcggtgggagagagacagaaggagagggagacagtcgccgccggctcgccgcgtcggggcttgtaaacttcgcttgtgtggacgtgtggtgagggatgtgagagtgagaccgagagggggggtaaatccgtaaacagaaaacgaccgtatatattatacagctgtaattctttttttcttcttcttttaccttactttccacaggagtggtgtcgattggagtatttggtgggatatattgtagacagaaactatagtgaattttacagcgttaa

SEQ ID NO: 105769 - DNA, 1403 bp, Zea Mays
cgcacacaagcggaggacaaacaaacagcaagagagcggaacgccgaaaggcaaaggcaaaggcaacggcaacgcaagccagaggcagagcgcgccccgccacgatgaagaaggcgtacgtggcgctgcaggcgctgaagcgcgcggtgacggaggaccccaagaacctgacgcggagctggtgcgggccggacgtgtgcggctacttcggcgtgtactgcgcggcggcgccggacgagccgcgggagcagacggtggccggggtggacctgaaccacggcgacctggcggggacgctcccggaggagctgggcctgctggcggacctagcgctgctgcacctcaactcgaaccggttcgcggggacgctcccggagtccctccccaagatgcggctcctgcacgagctggacgtgagcaacaaccgcctctcgggcgggttcccgcagcacatcctgtgcctgccaaatgtgaagtacgtggacctgcggttcaacgagctgcgcgggccggtgccgccggcgctcttcgacaagccgctggacgccgtcttcctcaacgacaacgccttcgacttcgagctgccggacagcctgggcaactcgccggcgtccgtgctcgtgctggccaacctgcgcctgcgcgggtgcatcccgcgcagcgtgggccgcatggcgggcacgctggccgagctggtggcgctcaactcgggcctccgctcctgcctcccgcaggagctgggctggctgcgcgagctcaccgtgctggacctcagctccaaccagctgcaggggatgctgccggagtccatggccggcatgcacagcctgcagcagctccacgtggcgcgcaacgagctgtggggccacgtccccgagggcgtctgcgcgctgcccgcgctccgcaacttcacctactcgtacaactacttctgctccgagccaagccgctgcctcgacgtccgccacgtcgacgaccgccagaactgcatcgccgcccgccccgaccagcgccccgcagaccagtgcctcgccttcctccaccgcccgcccgtgcgctgcgacgacagcggctgcttcgccccgccgccgccgcactactagagatccatgcgtactctggctctgccggcggtgggagagagacagaaggagagggagacagtcgccgccggctcgccgcgtcggggcttgtaaacttcgcttgtgtggacgtgtggtgagggatgtgagagtgagaccgagagggggggtaaatccgtaaacagaaaacgaccgtatatattatacagctgtaattctttttttcttcttcttttaccttactttccacaggagtggtgtcgattggagtatttggtgggatatattgtagacagaaactatagtgaattttacagcgtt

SEQ ID NO: 105770 - DNA, 449 bp, Zea Mays
cacataaacacaaaagcaccacaattatatattcacaaaagcatcacaattataatatcattcacaactagatcatttacagatagctagctagatcattcacaacagctccagagatgataagtcacaaaagcaccacagcgacatcactccagcttgaagcagttcaaaagcccacaactacatcactaatgtttcatatcactccagcttgaagcagttcaaaagcccacaactacatcactctagctgctccagagctgatcagtcacaaaagcaccaaagctacactaatgcttcaagcagttcaaaagccttcagacaaccactccagcttcttgtatcctcctgttttaaggtacaagctttctttgtccagaacaccctccactagacggtgttgcagccttatgcaccaacttcagctggtgcaatcaaggttaatcatc

SEQ ID NO: 105771 - DNA, 396 bp, Zea Mays
ggaatccgtagctcaagtagctctggttcttctaactatccgactggacaagacccagtctataacccttatgcatggcaatggcaaccgagtcaaggaacctatggaccccctctaccatcaggcgaagcaccaccatcgatcatgtacgggtatggaaactatggacctcctccaccaccatattcaaatttatcaaatatgtatccaccgggaccacaatatgggtatggacaagttcccgctgcaccggtctatcactatcagtatgacggattggatcaatatcacgacccttccaacatgcctgagtactatcactatgactcgagctgaacatgtgagtattgtgaaataagtcgacctatgtgtcgttgcctcgttggagaggtgtaa

SEQ ID NO: 105772 - DNA, 2810 bp, Zea Mays
tcgtccactgctgcttgctggctgctcttgtccgctggtgcaaagatgtagatggcgggaggcagcgtcggcagcagtcagctccgctcgccgccggtgatgggtacgcaaacgcaagtacgtgtacgtttgcccgggtgtgtgcatcctgcacgcgcgctccgctcccgccatcccagtcccacgcacgccacactgtcactgcccgcccgctacggagtccggacgcagcgcagccagctttacccgccatctcctcccgccacgccaccgcacccgacccactgcttccttccctcgactggggccgactggctcgttgcctcccacccatccacggacccacctctttattcacccccgacacccctcctcccttcgctttcccctcctcgcctcgggggtgcgcgaatttcgactagggtttcgcggaccgagagggaagcggggagaggagagggcgggtagggtttccgcgggcgggccccgcatggcctcggcggcagcggcggcggtggcgccggccgcggaggagaagaagggcgcgggcgggccggtcacgggggacatggtcagcgcgggcttcgcggagctggagcggcagcagcggctgctcgccacctgcacgcgcctctaccagcacctgtccgaccacatcggctcgctcgagcgcgggctcgccgcgcgctccgacgcgctccgcgtccgccgcagggcattcgacgcgcgcacccaccgcgcgctcgactcgctccaccgccgcgaggcctccatcgacgcctccgtctcgcgcgcgctcgaccacctccactccatctccgccaaggggtcaccgccggctccggatccggcacacgccgccggcgccggcgcggccgagggcctgcgcgccctctgcgcgcggatggactccgccgcgttcctgggcttcgtggtggcccgccgcaaggaggccgacgcgctgcgggcggagatgccggcggctctcaagctctgcgtggatccggccaagttcgtcatggacgccgtcgccgacgtcttccccgtcgaccgccgcgaggcccggagccccgccgacctggcctgggcctgcgtgctcatcctcgaggccgccgtgcccgcgctcgccgacccggacccggacatcggccccgcgcgcccgctcgtgccgcgggcggcgcgcgagcgcgcgcggggcatggccagggagtggaaggacgccgccgagaagaaggggggcgtggagggggccaagccgcccgacgcgcacgccttcctgcagcacgtcgccacgttcgccgtcgcggagaaggaggacatgccgctgtaccgcaggattgtcgtcagcttctcctggcgccgacagatgccacgactcgccctcactctcggccttgaggaagaaatggctgatatcattgaggaactaattgctaagaggcagcagcttgatgctgtgaattttgcttacgaggctgggcttcaggagaagttccctccagttcctcttctgaagtcctacctggaggactctaagaagacgtcgaccgccgcttcagataattcaagcactagcagcagtgggcaatcagggagcaacgcgaacaagaaagagcagtctgcactgcgagctgtcatcaagtgtgtcgaggaccgtaatcttgaagccgagtttccactggagggtctccggaagcaactcgaagagctggagaaagccaagaccgagaagaagaaggcggcatcaagcgctaccagtggcggcagcagcagcggccctgcaaccaagcgcatccgcgcgagcaacggaggcccaatgcctcccgccaaggcaggtcgtctcgctaccaatgcctgcgcgtcttctttcccaggtcccaccacattcacccagtctccctcccacgcaccacacgccaatacctcctccccttcccatgcatcacacgccgccacagcctccccttcccacacatcctatgccacgccgcctccttacccggttggacatggcctgtactgcagccggagcccgccggtgatcaggggggagccatacgcttacccaccagccgaggaggtagtcggtttcaacgtcggcatcaccatgccatactccaccccacccatgagctacccccctgccccctatggcgggtacggcagcgggatggcagcttacgccaacggaatggcccctgctttccaccaggcttactaccggtaggttcagtcatgaaacaaaccaaaaacaaagtaaaacaacaaaaaaagtcgctgatgaatgacatgacaacaactgataatcgcgcaatggccctgttttgtagcgactgactacaacggtaggttgggtatgtcatcttctatgtcctttccatcaccaccactaggtttgtgtgttgtgtctagctcgtctcatcttagaccactgcctttcttttttcactggtaaggaacctggaacctgggtgtaaattatgtatggtatcagcgagactgtcgtcgcagccttgtgtaactctgttcggaactttgatctttttttttgttgttgttgaaaagatcagcatgtgatcgttaagtaccggatgtaccatgaactttaaccaaaagttttctcagtttagttgtgtgatttggtgtgtggcatggcctcggtgcctctcatttctcgtatgtgttttgtgtttggtgcctctcatcatcatgcatgttttattttgctcgtaaacatatttacgtttaacagatttgcctatggtgcctctcttcatcatgcatgtcctcatttatgatgaaaaaaaaaa

SEQ ID NO: 105773 - DNA, 522 bp, Zea Mays
tacaagcacaaggacgcgctccgtgccaccgaggacagcggccgcgccgccgtcgccggggccggcgcccttggggacggtgacaacgagctcgcccgcggcgtaggtggcggtggccatggcggggcgcgtgcagggcgggaggcggaagcgccagcggtcgagctcgaaggcggcggcggcggccccgtcgtcgtcgtcgtcgccatcgccgccgagggaggaggaggagaggccgcggacgacgaccttggtgacccctgggtggatctcgacggcgtgcgcgcgggcgcccgcgagggagaactcgtcggcggcggcgacgaaccgcagcgccgccgcgtcctcctcgacggacacgtccgcgtcggccgcgaacgggagctccagcaccttgtcgaatatgtgcggcaggcggcgcagcttcttcccgccgagcgcgcccgccgccgcggaggcgcagcgttgcacggcgatggtgcgcttccgcggggccgggtggaccctcatggcgggggggct

SEQ ID NO: 105774 - DNA, 562 bp, Zea Mays
tacaagcacaaggacgcgctccgtgccaccgaggacagcggccgcgccgccgtcgccggggccggcgcccttggggacggtgacaacgagctcgcccgcggcgtaggtggcggtggccatggcggggcgcgtgcagggcgggaggcggaagcgccagcggtcgagctcgaaggcggcggcggcggccccgtcgtcgtcgtcgtcgccatcgccgccgagggaggaggaggagaggccgcggacgacgaccttggtgacccctgggtggatctcgacggcgtgcgcgcgggcgcccgcgagggagaactcgtcggcggcggcgacgaaccgcagcgccgccgcgtcctcctcgacggacacgtccgcgtcggccgcgaacgggagctccagcaccttgtcgaatatgtgcggcaggcggcgcagcttcttcccgccgagcgcgcccgccgccgcggaggcgcagcgttgcacggcgatggtgcgcttccgcggggccgggtggaccctcatggcgggggggctccttgccgcgtcggggggtgcggaagaaagcgaccggcgg

SEQ ID NO: 105775 - DNA, 95 bp, Zea Mays
cataacatgcctagcagcgaaacagaacaagtttgattggccacttgtcacttgtcaccaccatacaaacaaatgggacaagtaccatttgttac

SEQ ID NO: 105776 - DNA, 2797 bp, Zea Mays
acctcggagtgaaatgaatggccatctccatctcatcccctccacccctccccggctccacctcacctcactgtcccctaccttcctctccttcccgcccgcgccgtgtcctcatccgcctccccatgggccccatccccgcctacccctccgctcggtggccgtcgcggccgccgccgacccccgcgccgcgcacgcggcggcagtcaagtccggcgcgctcggcccctcctcagacgcccgcactgccaacgccgtcatgtgcgcgtaccttcgcgtgggccgcctgggcgacgcgcgggacgtgttcgactggatgcccgcgcgcgacgccgcctcctacagcgcgctcatctcgggctacgcgcgcctcgctggtggctccggctccgtcacggccaccgtcgcctccgcggagcttcttggacgcatgcgcctcgcggacgggctgctccccaccgagtacacctttgtgggcctcttcaccgcctgcgcccgcaggggcaacccgcgcctcgggacacaggtgcacgccctcgccgccaagtccggccactcctcgttgctcctcgtggccaacgcgatcctcggcatgtacgtcaagtgcggccgcttcggggacgcgatgagggcgttcgatggcatggaccgccgtgacgtctcgtcgtggaacgccgtcctggccgggctcgtcgagctggggcggcacgatgaggcgttcgagatgttcggcgagatgcgggcgagcgggaacgtccgcgccgacaggttcagtctgtcagcgctcctcacagcagcaggcgagggggttgggcagctccaaggggaggcggtgcatgctctgtcgttcaagtcggggctggagacggacctgagtgtgggcaacgcgctcatcgggttctacgcggagcatggtgcctctgttgaggacgtggtgagcgttttccagaggatgcccgtgaaggacgtgatttcgtggactggtttgctgaatgggtacatggagtttggtctcgttgacatggcactggatgtgtttgagcggatgccgcagaggaacttcgttacatacaatgcggttctcactgggttttgtcggaacaaggaaggcgtgcgcgccacttttgccaagaaggcggggctccgagggctgggtttgtttaggcaaatggtggaggatgggctggagatctcagatgtcacggtgacaggcgtgctgaatgcttgtgctattgctgcggataggaaggtgagcgagcaggttcatgcgtttgtgatcaagtgtggatgtgtgtctagtccatggagtgatgctgcgttgattgacatgtgcatcaaatgtggccgatctggagacgcgcatctgttatttgagcaatggcagcatgaggagagctttcacattgcctggaattctctactgctggcaagtgtcagaggtggtgagtatgagaaagcactttcgaccttccttcagatgtttagaagcagtggtgcagaattcattgatgagttcatgttgacttctgtccttggagtatgtggcagtctaggttttgctgaacttggaaaacaaatgcatacttttgctgcaaaatccgggcttctgagcgctcgtggagttggtaacgcaattatcagtatgtacggcaagtgtggggagttgaaagatgcaatcagtttgtttgagcggatgagttgtcgagacttggtgtcatggaatgcaatgatcactgcccatcttcttcttcatcagggggatgatatattgaagatatggtctgagatggagagatcaatggtcaggcctgattccattacctttcttctggtcatatctgcttgcagtcacacaagctcagactccacagacaaatgcagaaaactctttctttctatgccaagcacatatggcattgaaccagccatggagcactatgcagcctttgtttatgtccttggctgctggggccgttttgacgaggcagagcagcttataggtggtatgccattgcagcctggtgcattagtttggcggtctttgctagacagctgcagcaagcactccaacatggctgtgcggaggcgggccatgaagcatctgctggcattggaaccacaagacccgtccacgtacgtgctgacttcaaacctactatctgaatcagcaaggtggcgctcctctgagaacacaaggctagagatgtatgaaaagggtatgcgcaagatcccggccaggagctggacgtttcatggcaacatggtccactcatttttcgcacgggataaatcacacccacagtccagggacatatacgctggcctggatgtgctaatcctcgagtgcatcaaggccgggtacgagccagacaccacctttgttctgcacgacgtcgaggagtaccagaagaggcacttcctgatgtaccacagcatgaagctagcatcaatgtacggtcttctgatggcaggccctgggcagacaatccgcgtcgtgaagaacatccgcatgtgtggggactgtcactctttcttggagcacgcctctgctgccaccggtaaagtgatctcggtcagggactcgtctgggttccacattttcaggggagggaaatgttcctgtagtcaatagagactgctagagtgggtgccagttttgacatgtttgcagtttaggaactataggagctagtgagttacccttgtacttacatcactgtgatattcttcaggtgcctgacgcatccacgtagatatttccagagtataagttcaacaccccggttgttttagtttc

SEQ ID NO: 105777 - DNA, 3085 bp, Zea Mays
accaatccgactctcgtccctccccgactcaccccactgcccagccgcacgcgccgccgtgtgttcgcgctctctcccactgtgtctgtgacgactgggtaggctacagccgccgcccgtcgccaggtgccgatcccttcgccgacgaagagcatccaccaggctccggccaagggcgtgatggcggctgtagggagcttgcagccgggggtggagactctacatgtgcaggattacaaggacgcgcctccagccaaggctgtggcggccgcggtagagagcttgcagccggcgatggagagcctacatgtgcaggaattcaaggacgcggctccggctaagggcgtttccgccgctgctgtagggagcttgcagccggggatggagaacctgcaggtgcaggattacaaggacgctagcatgtattatggtgcttacccggcttatccctatggagcaccctatggtggctggggggagtactccacatacttgagccatgatggagcacagacaccaactgctggcgcgtatgctgacatgtactatggccatgctgcatatggtcatatttatgggtctcagaattaccagtatccatcgacctacagcaagcaacagaattccactgccaagctgtcgtccaatggtaaaagtgagaaattggctccagctccggaaggggatgtctccactattgttgttgatgaggtgaaagtcctgaaaaatccaaacccgaccctgaaggcagacaggaatgcaccaggttccaatggttcatatggccgatctagtgtgcgttctggtaactatcagaaccagactagttggtcacactatccatattatagtagtgagatgttctctgacaagcagcaaaagtttaccagcaatcacaattcgactgctcccaatgataaaaccaaggggcagtcgaggaaccaaaacacgagacagtatcctcatctcatgggtctgcaaacaccaacttccccatcagtttactcagctaatggaatatatcggtatgatggcagctatggacctagcctttggtatggatcacacatgtatagttctgggttatatggtggatggaattcactgtatgatgggaagtacagaaccagaggaagatgtaataatggctattatgcttatggtaatggaagccttgatggctttaatgagctgaaaagagggccaagaagtgggatgtacacaaaccagctggggcttggagctactactgaagtaccagcaaaagagcaggaccttctgtctgctaatggttcacatcctgccatgaaggaccagtataatcgggctgactttgcggaaacatactcagacgcaaaattcttcattatcaaatcatacagtgaagacgatgttcacaagagcgtaaagtacaatgtgtgggctagcactccaaatggtaataagaaacttgatgctgcctatcaagaggctaaagaaaaatcaagcgaaactcctgttttccttcttttctctgtgaatgcaagtggccagtttgttgggcttgctgagatggtgggtcgtgttgattttaacaaaacagtagatcattggcaacaggacaagtggactggttgtttccctgtcaagtggcacattgtgaaggatgttccaaacagtttgctgaagcacatcattctcgagaacaatgaaaacaagccagtgacaaacagcagagatacacatgaggtgaagcttgagcaaggccttcaagtgcttaaggttttcaaggatcatgtgtgcaagacatctatactggatgactttggcttttacgataatcgtgagaagatgatgcaatataggaaagcaaagcagcagcagtcactgaaaaaggtcatcgatgtgaaggtgcctaacgccactgacgcagatacaagtctcgtaggaactggatcaacggaactcaccaatgttgaggctgatgtcttgaacaaagagctttcattagacaaagcagtagagaaaaacgaggagaaaggaaatgatgtcgccccacaggacctgaaatcatcagctgagaagtcggcaagcccaaatggctgttaatttttttttttttggttagctcggccattgacagtggtatggggcgggaacctgaggctgggggttgtttgaggaaatcctgagatcccattgagcttgtttcttgcccttgttttctatagttcatagaggattagttagttgcttgtgtgtttgggtgataggtgaggtcagtgtcctggcatggcaggtatttaggaatagaaggacgattaactggggtttacaatggtggttcatgggtttgaggttgtgtttccatctatttgcctttcccctctctatattccagttcctacctctctagattctggacaaacgtagtgcttatttaatgctggctggtttaagaacctgaaatggacaaaggaatccaatcaagtgtttacaaacttccttccctgattacattatgtgaaaaccgtctactctcaaacttgtacagctgtctgctatctgttgtgatccgaaccactatgttgagaagggcctgttgtatttgcattgcgtgaccggcttgtaaattcccatgttaatgttcacctagaacaaatgcatcactcactatgcttacaacaatttattttggaagaagcgtccttggtattttcacaaactgtcagtatgactggatctggctaatcccagcgtagtatttaatgttaaaaaaataagagaattgttctgggaaaagagaaaaggaacacagccttacagatgcaagtggaactgaagctaaaacttgagcagtaataatatgcgcactaattactggcaggtgaattcatctgcctgacccttctcttcactgactgcagcagctgtcacagctgatgaattcggatgccttttgttcataaaaggcccgtccgcccgttactggcccaactagtgcgaagtaaccctaacaaaacaggcaccgatccggctctcctccgtgactccgtcccactgcccagccgctgtgcgttcgcgctctctcccacactgtctgcga

SEQ ID NO: 105778 - DNA, 657 bp, Zea Mays
atggggaggccgagcagggggcggcagcgcatcgagatccgtcgcatcgaagaaggcggccggctgcaggtcaccttctcgaagcgcaagtccggcctgcaaaagaaggccgccgagctctccctcctctgcggctcgccggtcgccgtcgtcatcttctcccccggcaggaaggtgttcgcgctgggcaccccctcggtcgaccacgtcctccgccgccacgctcctccggtcctcggcgaaggagaggaggacgggctccttccggcgctccaggacggaaacgtcgtgatgagcagcagcgctatcgccgaccgcgcggaggtggagaacatcgtgcggcgtacggaggagaccaaggcgcgttcggtggcggagaaggcgcggatggacgccgtcgggaaggccgtgaggcaggccgcggcaaaggccggaaggaggttctggtgggaggcggactccggcgagctcggggacgctgagctgccaggattcgccaaggcgctccgtcggctcagggtcaacctgcagcgccatttggactcgctgtcggcgtctgctaataagcaactgcagtaggagcggctgtgcaaaactggctcatttcatttggtgttgcttaggcacttagggtatattactaatgtttacaacgtt

SEQ ID NO: 105779 - DNA, 1654 bp, Zea Mays
ctgctgacatgaatttcacacaatgctttactgcttttctggtaggtttgaggtaaaaaaaatgcgagacgacaacgacgaaagcgagcaggcatggccgcgagcttatctctccacgtcactgccggctgcgggtccaagaagaagaagaggtacaagcaggcggggaagagcagagcagtgaccagtgagctgcttgtccaagaatcgctcccactcccggctgtcgggagagcgcagcccagctagccgcctccgcttcttggaggtcgatggccgcgaaggggttgagggaggtggggaggaggagggcggcggaggtcgggcggcgctgcttgtctggcgggagcgctgggccgccggcgccggcggcgaagcggaaggagggagggaaggcggtgaacctgttcacggccgtcaaccaggcgctccacatcgccctcgacaccgacccccgcgcctacgtcttcggagaggacgtcgggttcggcggcgtcttccgctgcacgacaggcctcgccgatcggttcggcaagagcagagtgttcaacacgccgttgtgtgagcagggtattgctggatttgccatcggcctagcagcgatgggcaatcgagctatcgcagaaatccagtttgcggactacatatttccagcctttgatcagattgtcaatgaagcagctaagttcagatatcggagtggaaatgaatttaactgtggaggcttaacgattcgaactccctatggtgctgttgggcatggtggtcattaccattcacagtcaccagaggctttcttctgtcacgttcctggactcaaggttgattttggtggcctctcattaactattatcttttttcagcaaaatgccaaaccaatatgttcctgaatgcatacctcctgtataagtggatgttcttctgaacatgttttcaactgcggcagcaaggcttggttgatgcagttgtcataccacggagtccacgcgaggctaaggggttgctgttggccagcatccgagatccaaacccagttgtattttttgagccaaagtggctgtatcgcttggctgttgaagaagttcccgaggaggattacatgctgccattatccgaggcagaagtgattagggaaggaagtgatataacacttgttggatggggagctcagcttgcggtgctgaaagaagcctgtgaagatgctgcaaaggatggggtgtcttgcgaactcatcgatctgaaaacactcgtaccatgggacaaggaaacggtagaggcctcggtgaagaagaccgggaagctcctcgttagccacgaggctccagtcaccgggggcttcggcgcggagatcgccgcgtccattgccgagcgctgcttccagaggttagaagcacccgtggcgagagtctgcggtctcgacacccctttccctctcgtgtacgagccattttacatgcccaccaagaacaaggtcctggacgcgataaaagccactgtagatttctgaaacatgttgcttgatcgatacagagtactctagtagtctagttagatgtgcacggtttgtgctggtctgggtctgtagcctgaggatgagcgatccacaaaccggcttatttgtattcaacaatacagcgataaataaagccgcaag

SEQ ID NO: 105780 - DNA, 1796 bp, Zea Mays
ctgctgacatgaatttcacacaatgctttactgcttttctggtaggtttgaggtaaaaaaaatgcgagacgacaacgacgaaagcgagcaggcatggccgcgagcttatctctccacgtcactgccggctgcgggtccaagaagaagaagaggtacaagcaggcggggaagagcagagcagtgaccagtgagctgcttgtccaagaatcgctcccactcccggctgtcgggagagcgcagcccagctagccgcctccgcttcttggaggtcgatggccgcgaaggggttgagggaggtggggaggaggagggcggcggaggtcgggcggcgctgcttgtctggcgggagcgctgggccgccggcgccggcggcgaagcggaaggagggagggaaggcggtgaacctgttcacggccgtcaaccaggcgctccacatcgccctcgacaccgacccccgcgcctacgtcttcggagaggacgtcgggttcggcggcgtcttccgctgcacgacaggcctcgccgatcggttcggcaagagcagagtgttcaacacgccgttgtgtgagcagggtattgctggatttgccatcggcctagcagcgatgggcaatcgagctatcgcagaaatccagtttgcggactacatatttccagcctttgatcagattgtcaatgaagcagctaagttcagatatcggagtggaaatgaatttaactgtggaggcttaacgattcgaactccctatggtgctgttgggcatggtggtcattaccattcacagtcaccagaggctttcttctgtcacgttcctggactcaaggttgtcataccacggagtccacgcgaggctaaggggttgctgttggccagcatccgagatccaaacccagttgtattttttgagccaaagtggctgtatcgcttggctgttgaagaagttcccgaggaggattacatgctgccattatccgaggcagaagtgattagggaaggaagtgatataacacttgttggatggggagctcagcttgcggtgctgaaagaagcctgtgaagatgctgcaaaggatggggtgtcttgcgaactcatcgatctgaaaacactcgtaccatgggacaaggaaacggtagaggcctcggtgaagaagaccgggaagctcctcgttagccacgaggctccagtcaccgggggcttcggcgcggagatcgccgcgtccattgccgagcgctgcttccagaggttagaagcacccgtggcgagagtctgcggtctcgacacccctttccctctcgtgtacgagccattttacatgcccaccaagaacaaggtcctggacgcgataaaagccactgtagatttctgaaacatgttgcttgatcgatacagagtactctagtagtctagttagatgtgcacggtttgtgctggtctgggtctgtagcctgaggatgagcgatccacaaaccggcttatttgtattcaacaatacagcgataaataaagccgcaaggtgcaaaattgtaggatgtcatgatgtatcgaagtgttcccagcgaaattcgttgtatgtaattgtcgcactgatcagtggtatgttctgtctgagcttgaagtcttgatgccactacacgcacacgaggacacgacataggccgcgccatggctgtgtgttaggagtggctgccatgtggggctattgccagggagcaagtgggtttctacaactataaaaggacatttgtataggctaagaaggacatcatcaattatcagaatacaaacacaattatcatat

SEQ ID NO: 105781 - DNA, 3321 bp, Zea Mays
ctccgggccagaaaaccgaacacgcccaaaagttcgaaccttttctctcccggcccactctatccatctcagctccgtcgccgtgtctgaggttgttggccgcgaccgcggggtggggcggagtacctccgctccgcctcttcggagctggctggactgtggccagccggatccgcgacgtcccagtcccacattccagcagcttcccttcctcctcctatctctcccccgcaccctcctcctcagttcctagagccgctggagctccgacccagaattccactcgcgtcctctcccgccacggtcgctactgtacagtacagtccagccccgaaatctgtccactcgttcgcaacccagtccggcggcccgagtggctctcgtcggctccaagaagctcgcaccgcggtcccgtgcggatggcggcgaggctcgcggcggcggtgctgctctgcgcctgcgcggtggggccggcgacggcgctgggggtgaactggggcacgcaggcgacgcacccgctgccgcccaaggccgtggtgcaggtgctccgggacaacggcatcaagaaggtgaagctgttcgatgccgaccccgccgccatgcgcgcgctcgccggcaccggcatcgaggtcatggtcgccatccccaacgccatgctcgcgggcctggccgccgacgccggccaggccaggaactgggtcaagcacaacgtcaggcgctacgacttcgacggcggcgtcaccatcaagtacgtggccgtcggcaacgagccgttcctggagtcgtacaacgggtccttcatcaacgtcacgctcccggcgctgaagaacgtccagaacgctctgaacgacgccgggatcggcgaccggatcaaggcgaccgtgccgctgaacgccgacgtgtacaactcccctcggagcaacccggttccgtcggcggggcggttccgcgccgacatcgcggggctgatggcggacatggtgaggttcctggctcggaacggcgcgcccttcaccgtgaacatctacccgttcctgagcctgtacctgaacgagcacttcccgctggactacgccttcttcgacggcggcgcggcgccagtggacgaccacggcgtgctgtacaccaacgtgttcgacgccaacttcgacacgctggtggcggcgctgggggccgtggggcacggcgacatgccggtggtcgtgggcgaggtggggtggcccacggacggcgacaggcacgccaaggcgtcctacgcgcagcgcttctacgcgggcctgctgcggcggctggcggcgaacaccggcacgccggcgaggccgggccagcgcccggcggaggtgtacctgttcgggctcgtcgacgaggacgccaagagcgtcgcgccgggcaacttcgagcgccactggggcgtgctgcggtacgacggccagcccaagttcgccatggacctcacggggcagggccgggacacgacgctggtgccggcgcgcggcgtggcgtacctgtccaggacgtggtgcgcgctgaaccccagagccaaggacctcggcaggctcggcgccaacgtcgactacgcctgcacgttcgccgactgcacgccgctggggtacggctccacgtgcggcggcatggacgtcgccggcaacgcgtcgtacgcgttcaacgcgtactaccaggcgcagaaccagaaggacgaggcctgcgacttccagggccttgcgctgcccaccgagaccgacccctccaccgccacctgcaacttcaccatacagatccagacgggggcggcggccatggcgtcgctcggccggagcgcgagcgccgccgcgctggtgctggcgtcggcgtcgctgcagctcctggcgctgttgtggtagcagctggttttgtgtggatgtgcgtgctggcatgaagatcaacgtcgtgtacggttggttgattgatttctgtgcatttttttatcattcaaaacacgtttttttatatataatttggaccggagtagatgcttgtttactttctaaggttgacatgtgcataatttgattgttcaatgggccatgggcttcatcccgttgccacggcccgacggcaagcgagcccagaccaaaaccctacacgacggcggatggctccgacgcctacaaatacacgaggctggatggcggaccctctgccctccactcaaatcactctgccgccgccaccttcgccaccgtgcattcgatgtctgactagggttcgttgccgtcttccccgcgcctccttcactttgaatcgccagatctcgatccgcgctattttgcttgccttgcctcgttcgcgtcgcttcttcttccgtttgttttggtctgcctaacattgcaattgtccggcgctgcattcggtgcgtcgggcaatctatccttgggcgagattgaacccaaggggagggcgctttcctagcacttcccgcctgctttttaagctccggcggtcctgcctcatcccagggttcgccggtgacaaagcaggcaaatttcttacgtttactctttttgatgtttggtttgactggccttctttgcttgcgatggctatggcggggatgacgaagaaaatcaatcggattcccattgatttctacgcgaaagatgagatcttaaccagctacttctgactcgcgatatcgctctcattggggccgaccaatctttgttttttttccctttttcttttctgttgtgatgataatccgctggggccggtgatgtgatcaaaatatttgctactcttgatggagcaaaggctccgcctgacgaccaagaaccaccaagatctctgaggccctctttaatgagttttcctgatttttgtcgaaacgtatgaaatattagaatggatgggacactaactagcacgggaataacaagtgccgattcaaaatcgttgcacgaatttcatcttgttaacattgggtacagtaactccacgaaatctaacctataggaaacgagccaaatttcccaaaagaaatctgcatgtttgtaaatgtaaaggacaaccaggtcggcgaaagactgttattcgcattcagtaaagaattaaattttcgaagcacatatttttgagttgtgaatgtgcgtgtgtgttttctaacaccatcaaaatgtttgctagtgggccattagtctttagtcttatgggaagagctctctgatccgaagatcaaccgacagatgtaatggatttgaacttaaatttatcttcggggcatcagaagcaaacatgacattccagtccatggaaataaattgagacgaatgatttgaagtgtaa

SEQ ID NO: 105782 - DNA, 116 bp, Zea Mays
gggataaagagatggggagttatgtcaatatttatatcattaataagaattacataaatataagtcatatagtgagttagtcagtctagaaaatagatattataaaagaaaaaaaa

SEQ ID NO: 105783 - DNA, 1025 bp, Zea Mays
ttccaccactccttttccacccgtgaaacctttcccacgcgctgacacattccacccacccatcaccccttccttcctttccattctctgtcgccttcgcccctccaaggttctctgattccagacgcaaccctgcggctgcggggtcaaggagccagagggggtgcacagcgatcgttctgccggagatcgaaaccctcagctagggtctgaggcgccgggctgcggccgccgagatgtcgacgccggcgaggaagcggctgatgcgggacttcaggcgcctgcagcaggacccgcccgccgggatcagcggcgcgccgcacgacaacaacatcatgctctggaacgccgtcatattcgggccggatgatacgccttgggacggaggcacgttcaagcttaccttgcagtttacagaagattacccaaacaagccaccaactgttcggttcgtctctaggatgtttcatccaaacatatatgctgatggaagcatctgcttggatatcctacagaaccagtggagtcctatatatgatgttgctgcaatcttgacttctattcagtccctgctgtgtgatccaaacccgaactcccctgcaaactcagaagccgcaagactgttcagcgagaacaagcgggagtacaaccgcaaagtccgcgagattgtggagcagagctggacagccgactagtgcaggaggatgctcatcgtgcccgaaagggcacaataaggaaccatgaaaaaacatccttgtgtttgtggttcgccagacctgtcgaaacattgaagaactctagttctagtctgtcgttgtcatggttttggtctgatccagagcaccggttgctcatggtggtggctgtcgtaatgtagcggttgttgttgacatatatcttcttaaaatgatcctgcttgtgtacaaaaactatagcgtgggaatggtggttcgatggaccgatggaaccatgttcttgcattgaggtttcacaaagtctaaatggcttctttctttctttttttt

SEQ ID NO: 105784 - DNA, 845 bp, Zea Mays
acattttgaatgtgtgctgaaaaggctaagtctatttttattagtatgttaagatcgtgattttatattgattttcatgtgtcaacaaggtcaataagatttctcctagccctagcgtgctgggatatttgaatggttatgtgctattatgttagcattgcgaagttcactgactattgactgtgtgtaacatctataggcacgttcaagcttaccttgcagtttacagaagattacccaaacaagccaccaactgttcggttcgtctctaggatgtttcatccaaacatatatgctgatggaagcatctgcttggatatcctacagaaccagtggagtcctatatatgatgttgctgcaatcttgacttctattcagtccctgctgtgtgatccaaacccgaactcccctgcaaactcagaagccgcaagactgttcagcgagaacaagcgggagtacaaccgcaaagtccgcgagattgtggagcagagctggacagccgactagtgcaggaggatgctcatcgtgcccgaaagggcacaataaggaaccatgaaaaaacatccttgtgtttgtggttcgccagacctgtcgaaacattgaagaactctagttctagtctgtcgttgtcatggttttggtctgatccagagcaccggttgctcatggtggtggctgtcgtaatgtagcggttgttgttgacatatatcttcttaaaatgatcctgcttgtgtacaaaaactatagcgtgggaatggtggttcgatggaccgatggaaccatgttcttgcattgaggtttcacaaagtctaaatggcttctttctttcttttttttattaaggt

SEQ ID NO: 105785 - DNA, 237 bp, Zea Mays
aggcccaggcccaagcgctgcccgttgccggtctgcagcagcaccgccgtccctagtacgctctccagcagggtgggtacgacccgccaccggagccgtacttggcttcctacccgcccaccgcgtcgccggagccgtacttggctacctaccccgccaccgtgaggggcgcgcacccacacaacggcctcgatggcgcctacgacagcggatggttcaggtactaagcgaatggcg

SEQ ID NO: 105786 - DNA, 1539 bp, Zea Mays
actgcgaagtaaccctaacgcctggtgccagccgccgcgctctcgctcgctctaacgccgacgcctggtgccgactgccgaggccttcgctggttactagcaccgccccagctccttctcccttttccggcggaggtgaacaccgccaccactagagcgccacgatgaggccgatcctgatgaagggccacgagcgcccgctgacgttcctgcgctacaaccgcgacggggacctcctgttctcctgcgctaaggaccacacccccacggtctggtacgccgacaacggcgatcgcctcggcacctaccgcggccacaacggcgccgtctggacctgcgacgtctcccgcgactcggcgcgcctcattaccggatccgccgaccagaccgcaaagctatgggaggtcagcacggggaaggagctcttcagctttcgtttcgacgcgcccgccaggtccgtcgagttcgccatcggggacgcgctcgccgtcgtcaccaccgacaacttcatggaccacgttcccaccgttcaggtcaagcgcatcgccgaggacatcgacgaccagacggaggagtctgcactcgtcatcaccggcatcaagggaaggatcaacagggccgtttggggcccgctgaacaggaccattatcactgccggggaggatgccaccattcgcatctgggactcagagactggacagctgctgaaagagtctgataaagaatctggacatcagaagaccatttcatcgttgtcaaaatccttggactggtcgcattttatcactggctccttggataaatctgcaaagctatgggatacaagaacgctaaccctgatcaagacgtatgtcacagagagacctgttaatgctgttgacatctctcccactcatgatactgtggttctaggaggtggtcaggatgcaatgaatgtgactatgacagatcgccgtgctggtaaattcgaggctaaattctatcacaagattttgcaagaggaaattggtggtgttaaaggacattttgggccaattaatgctttggcatttaatcctgatgggcggagtttttcaagtggcggtgaagatggttatgtaaggctgcatcattttgattccgactacttcagcatcaagatgtagataaagaacaccagactaacccgaggctgtttgaggcccaactcctccagtttcttggttcaggtgctgttttagtttttttttggttcaggtgctgctggttggccatgacgcacgcagagcaggctcagctcctctaggggtagtggcagtctgttgcttgttttaagacgatgttgctccggacaagcagctttgtcttctgcatgaggaatttgtgcacacatggcaatgaaaagatccttgaaccgctgtcttgagctgtcgttctcgatccatggtttccaatctagtttcgatttgtattctctgttcatctaattgttccaatacggtagtagacacatttcaaaacccgtgtttttttgtttgcttaaaaggcaaattttacttg

SEQ ID NO: 105787 - DNA, 1213 bp, Zea Mays
cctggtgccagccgccgcgctctcgctcgctctaacgccgacgcctggtgccgactgccgaggccttcgctggttactagcaccgccccagctccttctcccttttccggcggaggtgaacaccgccaccactagagcgccacgatgaggccgatcctgatgaagggccacgagcgcccgctgacgttcctgcgctacaaccgcgacggggacctcctgttctcctgcgctaaggaccacacccccacggtctggtacgccgacaacggcgatcgcctcggcacctaccgcggccacaacggcgccgtctggacctgcgacgtctcccgcgactcggcgcgcctcattaccggatccgccgaccagaccgcaaagctatgggaggtcagcacggggaaggagctcttcagctttcgtttcgacgcgcccgccaggtccgtcgagttcgccatcggggacgcgctcgccgtcgtcaccaccgacaacttcatggaccacgttcccaccgttcaggtcaagcgcatcgccgaggacatcgacgaccagacggaggagtctgcactcgtcatcaccggcatcaagggaaggatcaacagggccgtttggggcccgctgaacaggaccattatcactgccggggaggatgccaccattcgcatctgggactcagagactggacagctgctgaaagagtctgataaagaatctggacatcagaagaccatttcatcgttgtcaaaatccttggactggtcgcattttatcactggctccttggataaatctgcaaagctatgggatacaagaacgctaaccctgatcaagacgtatgtcacagagagacctgttaatgctgttgacatctctcccactcatgatactgtggttctaggaggtggtcaggatgcaatgaatgtgactatgacagatcgccgtgctggtaaattcgaggctaaattctatcacaagattttgcaagaggaaattggtggtgttaaaggacattttgggccaattaatgctttggcatttaatcctgatgggcggagtttttcaagtggcggtgaagatggttatgtaaggctgcatcattttgattccgactacttcagcatcaagatgtagataaagaacaccagactaacccgagctgcatcactggtctgttgcaacaaatggcaacgctgaagtatcctaagaaatccatttcttg

SEQ ID NO: 105788 - DNA, 1623 bp, Zea Mays
cctggtgccagccgccgcgctctcgctcgctctaacgccgacgcctggtgccgactgccgaggccttcgctggttactagcaccgccccagctccttctcccttttccggcggaggtgaacaccgccaccactagagcgccacgatgaggccgatcctgatgaagggccacgagcgcccgctgacgttcctgcgctacaaccgcgacggggacctcctgttctcctgcgctaaggaccacacccccacggtctggtacgccgacaacggcgatcgcctcggcacctaccgcggccacaacggcgccgtctggacctgcgacgtctcccgcgactcggcgcgcctcattaccggatccgccgaccagaccgcaaagctatgggaggtcagcacggggaaggagctcttcagctttcgtttcgacgcgcccgccaggtccgtcgagttcgccatcggggacgcgctcgccgtcgtcaccaccgacaacttcatggaccacgttcccaccgttcaggtcaagcgcatcgccgaggacatcgacgaccagacggaggagtctgcactcgtcatcaccggcatcaagggaaggatcaacagggccgtttggggcccgctgaacaggaccattatcactgccggggaggatgccaccattcgcatctgggactcagagactggacagctgctgaaagagtctgataaagaatctggacatcagaagaccatttcatcgttgtcaaaatccttggactggtcgcattttatcactggctccttggataaatctgcaaagctatgggatacaagaacgctaaccctgatcaagacgtatgtcacagagagacctgttaatgctgttgacatctctcccactcatgatactgtggttctaggaggtggtcaggatgcaatgaatgtgactatgacagatcgccgtgctggtaaattcgaggctaaattctatcacaagattttgcaagaggaaattggtggtgttaaaggacattttgggccaattaatgctttggcatttaatcctgatgggcggagtttttcaagtggcggtgaagatggttatgtaaggctgcatcattttgattccgactacttcagcatcaagatgtagataaagaacaccagactaacccgaggtgatacttcagctgtcagctatttgtgagaatttgtttgctaattttgttatcgcttgcttacctatgtgtaattgtttgggttactgtaacacgtgtcagctgcatcactggtctgttgcaacaaatggcaacgctgaagtatcctaagaaatccatttcttgcattcgctgttcaaaatacagctgcgatggttgttttgacctccaccgtttcattccttttcaggctgtttgaggcccaactcctccagtttcttggttcaggtgctgttttagtttttttttggttcaggtgctgctggttggccatgacgcacgcagagcaggctcagctcctctaggggtagtggcagtctgttgcttgttttaagacgatgttgctccggacaagcagctttgtcttctgcatgaggaatttgtgcacacatggcaatgaaaagatccttgaaccgctgtcttgagctgtcgtt

SEQ ID NO: 105789 - DNA, 1672 bp, Zea Mays
gacaatagcaggcacacaccttttattcacaaaagccagccaagtattacagtatcacgtatcaggagaaggacgcactccactcagcagctatacctatatgttccgttcttctcactggatagtgagagacggagatcctgacactgcacgcgtaccatttttcacaactcagctgatgtatgttccttcatttacagtgtgtgtgatgcatgtgcatgtgtaaccggatcaggctgcggcgacatgactctgttccttgaccacgctctctccaccctgttccagagtctgtacatgcgcaggcttctcttcgttggccttccccttgccgcctccttccagatccagctctttcagctgcctcaggatatcttctctcttggcatgtaggtcttgcagtttggtgtccaccttctccagctttgctctgagcttcacgggatcggtcgtcttctccttggcgcccttgtctttcttcttctctttcttctccttgtcattcttctcacccttgtccttcttatctttcttttctttgcccttctcctcgcctccgtcgtccccagcaccatccttcttttccttcttcacttggcccttgccctccgaatccttcgctttacccttattgtcttcctctgccttccctgaatcgtcaccaccttccttctttttcttgtctttctcctttgtatccttcttcttggtaccctttcctcccgcaccgtcacccgagcctgtgacctcttccttctcaacaaacttggcctcaatctctacctcgacctcctccttgccgtcttcctcgccggacggctcgcccttgctcttgaccttcatatggatctcatccttggaccccttctcctccttcagcttggcagattctctgtccttccccatcttgactgcaaccaagccgccctgcatgacgcagttacaaaattcggtcactaccgataccgaatgggtttgctgcgccatggatgaatggagcacgcacgttaccgagcaaagacaaacactgcactgcggcgaaccaactggagtaacaggactgcaggagagggggagcttttcttctcaccttgactgtggcgacgcttggacgtgtcttatcttcttgcccaaagatcacgcagtagaagcagaagaaaacgatccgccgtcgagacggcgcgttgcgggatgggagatcagctcggctgcctccaattagttggcaagatctgggaggcaagcaaaccagaggcgggacgcgtgccgcagtggatgggaggacatccagccagcctacccttcctttatactacagtaaagaccggagtggagatggagaagaggcgggtgggaaaggaggagaaggccggcggaaggtgacgtgcgtcggtgggggacgtttgccgacggtggagcgccgcgtggcgagcgacctgccgtgtcggccgggcgggtcggagtttcggcgggccgtgggctttatctgaaatggcttttctggcggtagccgagtgggctcatgggcgcgttccgcacactgggcttcgtcgaacaccaataattctcaaggcctttcagcctatgtggctttttaccaccgtcgagatgttttctgggagatttgtggtgggaaaacaattgcaaacaatagtagcatatattgttgtgc

SEQ ID NO: 105790 - DNA, 1265 bp, Zea Mays
ggccacaccttccgtctcccggcctccgctcgcctgtccctgtctctctctctcctcgctgagtcgccgccagccatgaacaacctcctcacggattcctttgagctcccccggcgggactcctcaagagatgcagacattgaaatgggaatgcatcaagctgatgcttcagacaacttaaaagatttcttgaagaaggtcgatacaattgagagtttaattgcaaagctgacaaatctattgaataagctacagactgcaaatgaggaatccaaagcagttacaaaagcaagttccatgaaagcaattaagcagcggatggagaaagatattgatgaagtggggaaaattgctcgtcaggcgaagacaaaagttgatgaattggaaaaagacaacttatcaaataggcaaaaacctggatgtggaaaaggttctgccgtggaccgatcaagagagcaaactactggagcagtgaaaaagaaattgaaggagcggatggatgactttcagaccttgagagaagcaatcaggcaagagtatcgggaggttgttgaaagaagggtttttactgtaactggtaatcgtcctgatgaagagacaattgatgacttgatagagaccggaaaaagtgagcaaatattcaaagatgctatccaacatcagggaagaggccagatactagacactgttgctgaaatacaggagcgacatgatgctgtaagggatctagagaggaagcttctggagttgcaacagatattcatggacatggcagttcttgttgaggcgcaaggagacatgatcaacaacatcgagacccatgtaagcattctctacttctgcattgaacctgttgtgtataggataagcatcgttttttttctttgttttgtaatagcaagcttgatggaatcatcccatcctctgtttcaaggtctcgaacgccaccaaccacatacagcaaggtgtgagcgcgctccagaacgcgaagaaactgcagaggaattcgaggaagtggatgtgctacgccatcatcatactgctggtgatagtcgtggtcattgtcgtcgcagtcatccagccatggaagaagggcacctagcgtggtggtgccttttttcctgtttgtgtaatatgtgtgcagttttttttgtgggtgattcgtgatttgttgttgtacctatagtcgacgcaacaggagctctggcatttcgattcattctgtctagtgaaaggacactgccatcatatgccgataaaaataa

SEQ ID NO: 105791 - DNA, 1178 bp, Zea Mays
ggccacaccttccgtctcccggcctccgctcgcctgtccctgtctctctctctcctcgctgagtcgccgccagccatgaacaacctcctcacggattcctttgagctcccccggcgggactcctcaagagatgcagacattgaaatgggaatgcatcaagctgatgcttcagacaacttaaaagatttcttgaagaaggtcgatacaattgagagtttaattgcaaagctgacaaatctattgaataagctacagactgcaaatgaggaatccaaagcagttacaaaagcaagttccatgaaagcaattaagcagcggatggagaaagatattgatgaagtggggaaaattgctcgtcaggcgaagacaaaagttgatgaattggaaaaagacaacttatcaaataggcaaaaacctggatgtggaaaaggttctgccgtggaccgatcaagagagcaaactactggagcagtgaaaaagaaattgaaggagcggatggatgactttcagaccttgagagaagcaatcaggcaagagtatcgggaggttgttgaaagaagggtttttactgtaactggtaatcgtcctgatgaagagacaattgatgacttgatagagaccggaaaaagtgagcaaatattcaaagatgctatccaacatcagggaagaggccagatactagacactgttgctgaaatacaggagcgacatgatgctgtaagggatctagagaggaagcttctggagttgcaacagatattcatggacatggcagttcttgttgaggcgcaaggagacatgatcaacaacatcgagacccatgtctcgaacgccaccaaccacatacagcaaggtgtgagcgcgctccagaacgcgaagaaactgcagaggaattcgaggaagtggatgtgctacgccatcatcatactgctggtgatagtcgtggtcattgtcgtcgcagtcatccagccatggaagaagggcacctagcgtggtggtgccttttttcctgtttgtgtaatatgtgtgcagttttttttgtgggtgattcgtgatttgttgttgtacctatagtcgacgcaacaggagctctggcatttcgattcattctgtctagtgaaaggacactgccatcatatgccgataaaaataacgcttcgtatccgtcggtgaaaaga

SEQ ID NO: 105792 - DNA, 308 bp, Zea Mays
cccttcacgttccccgtcgagaaggttcgaccttctctgatctccatcctgcccctggcaagctcgtcactgccattcctagcatgggcgctggggcttgactcctgcgtcgtactcatcttcctcaacacctcacctacgcccaccaggtgttcgacagagtgccatctgtccgtcttgcaggctggacatggacatcggccaccatgtgaatggcctgcgtaagcacccatccaacgaggtccggcaactggtgaagctgctcgttaggaaatggaaggaaatagtggatgattgggtgaggctgc

SEQ ID NO: 105793 - DNA, 812 bp, Zea Mays
taaagcttggaagggagctttctatgatttatttttctgactgtttcatcacatgttctttccctagatgaaagtcttgatttatttttggttctgcaggatcattgcgtctctgcgagctaatcagctctgtgagcgtctccctagccccaatggcgagtcaactattgattgccatcagatctcaaagatgccaaatcttgcattcaccatagcaaataagactttcaccttaacaccagagcagtacatagtgaagctggagcaagcaggacaaactatctgcatcagtgggtttatggcatttgacgtaccgcctcctcgtggtcctctctggatacttggtgatgtttttatgggtgtctaccacactgtttttgacttcggcgagaacatgattgggtttgccaaatctgcatgaggactggagttctgcgctttagtagcatgtccagtttgttatcccggtattgtacatatatatgttgccaactggtgtaatctgcagtgtttaatagtatatattcatgcagaaatctagaagattgtggcatgatatgtgtttgcaaatggagctatgttatgtatggagctccaggacctagagttttatgtaaagggagacgatgaggattagggcttttaacctattctcatcacgttattgtcctgattactatgtgtaagtatggttgctgagcttgtttgggagcaagacaattggaggggatgagtggactaaaattcccttcctatcaaaaattgaatatgaagagtattttagatctctcaatcttcttcaattctcttgc

SEQ ID NO: 105794 - DNA, 150 bp, Zea Mays
gtttttttcttttctgcgctcagggcgttgtatttcggaccactttggacctttcctctcttaatataatggtgcgcagttctcctgcgcgttcgagaaaaaaatatatataagacaattttgtatcaggaataccaaactatttctaaa

SEQ ID NO: 105795 - DNA, 1993 bp, Zea Mays
accactctgctccactccgccatggccacctccctcctacgcctctctcgccaccgccgcgcgctgctcgccatctcctccgtccgccttgcgctctccacccagccccacgtcccatctccgtccccatcccctaccccctcctccgcccgccgcctcccgcatttcctctccttcctcgccgccgccgccgccgccgccgctgggggagcaaccgtcgcgctctgcgactccggcctagatcaccgggtcgggggcaaggacagcgccgatctggtggttcgtggggagcggaagttcgtgccgcaggagttcatcgacgagctcgcgtccttcctcggggacaacatcactctggactacgaggagaggagcttccatggcacgccacagaacagcttccacaaggcggtcaacctgcctgatgtcgtcgtgttcccgagctcgcaagatgaggtacaaaggattgtgatggcctgtaacaagcacaaggttccaattgtaccatatggtggggctacctcaatagagggtcacacactggcacctcatggtggtgtttgcatcgacatgaccttgatgaagaaaataaaatccctgaatgttgaggatatggacgtagttgttgaacctggagttggatggatagagctgaacgaatacctgaagccctatggcctattttttcctcttgatccagggcctggggccaccattggaggaatgtgtgctactcgttgttctggttcattagctgtgaggtatggaacaatgcgggataatgtgattaatcttcgggctgttttgccaaatggtgatgttgtcaagacaggctcccgggctcgaaagagtgcagctgggtatgaccttgctcgtttgatcattgggagtgaaggaactttgggtgtaattacagaagtgactttacgactccaaaagcttccatctcattctgtagttgcaatgtgcaatttcaaaacaattaaggatgctgctgatgttgctattgcaacaatgctttctgggatacaggtttcaagagtggaattgttggacgaggttcagataaaggcaataaatatggcaaatggcaaaaatttgcctgaagtgccgaccttgatgtttgaattcatagggacagaagcatatgctctggaacaaactctcttggttcaaaaaattgccactgaacaccatggatcagattttgtttttgtcgaggagccagatgctaaagcggaactatggaagatcaggaaggaggcactttgggctggttttgctatgaaacctgatcatgaagctatgataacggatgtttgtgtccctctatccagacttgctgaatgcatatctacatcaaagcgattgcttgatgcgtcgccattgacttgtctggttattgctcatgctggtgatggaaattttcacacaattatcctgtttgatccaagccaagaggaccaacgaaaggaagcagagagactaaaccatttcatggtccatacagctctgtctatggaaggtacatgcacaggagagcatggtgttggcacagggaaaatgaagtacctggagaaggagttgggcatcgagtcactcaggacgatgaaaagaataaaggcggcgctggatcccaacaacatcatgaatccgggaaagctgatcccgcctcacgtctgcatatgaccgtcacctgactggaggatcgatccccccatggccatcagtgggcttgttggctcactcatcaaaagctttggttccgcgaggcgtgacgcggtgctctgctgacagttgcaataatgcgctgaactgctctgtgcctgtatggcatgcgttggaggcaaatgcacgtaggcgtcacatcaaaactataccggtaccaaaaaaaaaaaaaaaaaactgaactgcctcagggaagggatgggaaataatggagcaaacattcgtctcctgacgccgttttaacaggagaaccctttttacgatc

SEQ ID NO: 105796 - DNA, 1885 bp, Zea Mays
accactctgctccactccgccatggccacctccctcctacgcctctctcgccaccgccgcgcgctgctcgccatctcctccgtccgccttgcgctctccacccagccccacgtcccatctccgtccccatcccctaccccctcctccgcccgccgcctcccgcatttcctctccttcctcgccgccgccgccgccgccgccgctgggggagcaaccgtcgcgctctgcgactccggcctagatcaccgggtcgggggcaaggacagcgccgatctggtggttcgtggggagcggaagttcgtgccgcaggagttcatcgacgagctcgcgtccttcctcggggacaacatcactctggactacgaggagaggagcttccatggcacgccacagaacagcttccacaaggcggtcaacctgcctgatgtcgtcgtgttcccgagctcgcaagatgaggtacaaaggattgtgatggcctgtaacaagcacaaggttccaattgtaccatatggtggggctacctcaatagagggtcacacactggcacctcatggtggtgtttgcatcgacatgaccttgatgaagggcctggggccaccattggaggaatgtgtgctactcgttgttctggttcattagctgtgagtttgtaggtatggaacaatgcgggataatgtgattaatcttcgggctgttttgccaaatggtgatgttgtcaagacaggctcccgggctcgaaagagtgcagctgggtatgaccttgctcgtttgatcattgggagtgaaggaactttgggtgtaattacagaagtgactttacgactccaaaagcttccatctcattctgtagttgcaatgtgcaatttcaaaacaattaaggatgctgctgatgttgctattgcaacaatgctttctgggatacaggtttcaagagtggaattgttggacgaggttcagataaaggcaataaatatggcaaatggcaaaaatttgcctgaagtgccgaccttgatgtttgaattcatagggacagaagcatatgctctggaacaaactctcttggttcaaaaaattgccactgaacaccatggatcagattttgtttttgtcgaggagccagatgctaaagcggaactatggaagatcaggaaggaggcactttgggctggttttgctatgaaacctgatcatgaagctatgataacggatgtttgtgtccctctatccagacttgctgaatgcatatctacatcaaagcgattgcttgatgcgtcgccattgacttgtctggttattgctcatgctggtgatggaaattttcacacaattatcctgtttgatccaagccaagaggaccaacgaaaggaagcagagagactaaaccatttcatggtccatacagctctgtctatggaaggtacatgcacaggagagcatggtgttggcacagggaaaatgaagtacctggagaaggagttgggcatcgagtcactcaggacgatgaaaagaataaaggcggcgctggatcccaacaacatcatgaatccgggaaagctgatcccgcctcacgtctgcatatgaccgtcacctgactggaggatcgatccccccatggccatcagtgggcttgttggctcactcatcaaaagctttggttccgcgaggcgtgacgcggtgctctgctgacagttgcaataatgcgctgaactgctctgtgcctgtatggcatgcgttggaggcaaatgcacgtaggcgtcacatcaaaactataccggtaccaaaaaaaaaaaaaaaaaactgaactgcctcagggaagggatgggaaataatggagcaaacattcgtctcctgacgccgttttaacaggagaaccctttttacgatc

SEQ ID NO: 105797 - DNA, 2000 bp, Zea Mays
accactctgctccactccgccatggccacctccctcctacgcctctctcgccaccgccgcgcgctgctcgccatctcctccgtccgccttgcgctctccacccagccccacgtcccatctccgtccccatcccctaccccctcctccgcccgccgcctcccgcatttcctctccttcctcgccgccgccgccgccgccgccgctgggggagcaaccgtcgcgctctgcgactccggcctagatcaccgggtcgggggcaaggacagcgccgatctggtggttcgtggggagcggaagttcgtgccgcaggagttcatcgacgagctcgcgtccttcctcggggacaacatcactctggactacgaggagaggagcttccatggcacgccacagaacagcttccacaaggcggtcaacctgcctgatgtcgtcgtgttcccgagctcgcaagatgaggtacaaaggattgtgatggcctgtaacaagcacaaggttccaattgtaccatatggtggggctacctcaatagagggtcacacactggcacctcatggtggtgtttgcatcgacatgaccttgatgaagaaaataaaatccctgaatgttgaggatatggacgtagttgttgaacctggagttggatggatagagctgaacgaatacctgaagccctatggcctattttttcctcttgatccagggcctggggccaccattggaggaatgtgtgctactcgttgttctggttcattagctgtgagtttgtaggtatggaacaatgcgggataatgtgattaatcttcgggctgttttgccaaatggtgatgttgtcaagacaggctcccgggctcgaaagagtgcagctgggtatgaccttgctcgtttgatcattgggagtgaaggaactttgggtgtaattacagaagtgactttacgactccaaaagcttccatctcattctgtagttgcaatgtgcaatttcaaaacaattaaggatgctgctgatgttgctattgcaacaatgctttctgggatacaggtttcaagagtggaattgttggacgaggttcagataaaggcaataaatatggcaaatggcaaaaatttgcctgaagtgccgaccttgatgtttgaattcatagggacagaagcatatgctctggaacaaactctcttggttcaaaaaattgccactgaacaccatggatcagattttgtttttgtcgaggagccagatgctaaagcggaactatggaagatcaggaaggaggcactttgggctggttttgctatgaaacctgatcatgaagctatgataacggatgtttgtgtccctctatccagacttgctgaatgcatatctacatcaaagcgattgcttgatgcgtcgccattgacttgtctggttattgctcatgctggtgatggaaattttcacacaattatcctgtttgatccaagccaagaggaccaacgaaaggaagcagagagactaaaccatttcatggtccatacagctctgtctatggaaggtacatgcacaggagagcatggtgttggcacagggaaaatgaagtacctggagaaggagttgggcatcgagtcactcaggacgatgaaaagaataaaggcggcgctggatcccaacaacatcatgaatccgggaaagctgatcccgcctcacgtctgcatatgaccgtcacctgactggaggatcgatccccccatggccatcagtgggcttgttggctcactcatcaaaagctttggttccgcgaggcgtgacgcggtgctctgctgacagttgcaataatgcgctgaactgctctgtgcctgtatggcatgcgttggaggcaaatgcacgtaggcgtcacatcaaaactataccggtaccaaaaaaaaaaaaaaaaaactgaactgcctcagggaagggatgggaaataatggagcaaacattcgtctcctgacgccgttttaacaggagaaccctttttacgatc

SEQ ID NO: 105798 - DNA, 1298 bp, Zea Mays
actataaacttaattaaatttataaaaagacaccgaattgtttgtaggttcaagcagcctcgcacggtcacacacactttgcacgcttgtctcacgtgttgaggagccaaccggctgtccggccatgtcgtcgccggctgcaggcacggcagcggagccgcacgtcgtggaggactgcctcggcttcgtgcagctgctgagcgacggcacagtgaggcggtccacggactactccatgctccgtcccatcggccgcgtgccgtcggacacggacctgcccgtgcagtggaaggacgtggtgtacgaggacacgcgcggcctccggctccgcatgtaccggcccactggcgccgcagccggggagacgaagctgccggtgctggtgtacttccacggcggtggcttctgcctgctcagcttcgaggtggccagcttccatgccggcgcgctccggctcgccgccgagctcccggcgctcgtgctgtccgcggactaccgcctggcgccggagcaccgcctccccgcggcgctggacgatgccgagtccgccttcgcctggctgcgcgcccaggccgcgccgccctccgccgcgggcgcggagtcggacccgtggctcgccgagtcggccgacttcgcccgcgtgttcgtcgccggcgactcggccggcggcaacatctcgcaccacgtcgccgtgcgtcacgctagctccggtggagggctctccctcgccccgctccgactcgccgggtgcgtcatgctctggccatacttcggcggcgaggagccgacgccgtccgaggcggcgttcccggccgaccagcccatgggcacggcgctgttcgaccagatgtggcgcctggcgctgccggcgggcgcgaccaaggaccacccgttcgcgaacccgttcgcgccggggagcgtcccgctccgcgacctcggcgcggccttcccgccgctgctcgtcgtggaccccgaccaggacccgctgcacgaccgcgtggtcgactacgtcgccaggctcaaggcggccgggaaggccgtcgagctcgtcgtgttcgcggggcaggggcatgggttcttcgccatggagccgtgcggtgaggccgccgacgacctcatccgggtcatcaggcgatttgtgtacggtgcttaatttgtcaatattatcagtatatcacagtagtggaaatattgacaaattaagaaatggctggattttcagctcaggttccgaaaacgactggacgatgcatggctttagtcatggtacatgtcgtttcaccacaatcaccatatat

SEQ ID NO: 105799 - DNA, 1041 bp, Zea Mays
cacattgccatgtcgtcgaccacgaccacctcgccagcgtccggtgtctccggcgaggctccacctccgcgcatcgtggaggactgcctcgggctcgtccagctcatgagcgacggcaccgtcaagcgcgcgccggcctcccacgtcctcctccctgacgaggagccggcgccgccctgcttggcctctgccgacgatgcggcatcggtccgatgcaaggacgtcgtctacgacgaggctcgcaacctgagcctccgcatgtacgtgccatcgtcctccagggcggggaacggcggcgccgagaagctcccggtgctggtctacttccacggcggcggcttcatcgtcggcagcttcgcgtcgccggagttccacgccgcgtgcgcccgcctcgccgccgcgctcccggccgtggtgctctccgccgactaccgcctggccccggagcaccggctccccgcggcgctccaggacgccgacgccatcttctcctggctcggcgcgcaggagcagcaggctgcggcgggcgggggcgccgacccgtggctcgccgacgcggcggacctgggccgcgtgttcgtgtcgggcgactcggccggcgccaacatcgcgcaccacgccgccgcggcgccggggcggcgcctcgccgggtgcgtgctgctgtggcccttcttcggcggcgagcggaggacgcggtcggaggcggcctgcctgggagacgcgttcctgacgctcccgctgtacgaccagatgtggcgcctggcgctgccggcgggggcgacgcgggaccacccggccgcgaacccggaggtgggcgagctcccgccgctgctcgtcgcggccggcgaccgcgacatgctgatcgaccgcatcagggagtacgtggcgcgggcgcgggcgcgggccgccgccgcgggcaacaggcgcgtcgacctcgtcgagttccctggcgcggggcacgggttcgccatcctcgagcccgatggcgaggctgcgggtgagctagtccgcgtcgtgcggcggtttgtgcatggcggatga

SEQ ID NO: 105800 - DNA, 2693 bp, Zea Mays
gttgcagacagctacagccgtatgtccgtgtgacattctgctcagtcggccaatcctcaccaaattctccatcaaatccaaccaacccctcaccgcctatgccgccgcgggccgcctagggttccggcggccgccgctccctcgccggcgcgatggggaacacctgcatcggtcccagcgccccctcggaccgccacagcttcttcaacaccgtctccctggccgtgctctggcgacccccggccgccgctgaccgcgccgagccttccccgaccgctgaacccagctcatccactccctgctctcccccctccagggcccctaaccctgtcaccatctccgactccgagcacccgccacactccacctccaccgccttaggccccgccgcgccgcccaatcctaacggcaagcccaagcccaagcccaaggtgaagcgcgtgcagagcgccggcctcctcgccggctccgtgctgaagcgcgactccgagcggctcaaggacgtctacaccctgggcaagaagctcgggcaggggcagttcggcaccacctaccagtgcgtcgagaaggcaaccgggaagcacttcgcctgcaagtcaatcgccaagcggaagctcgtcaccgatgaggacgtcgaggacgtgcgccgcgagatccagatcatgcaccacctggccggccaccccaacgtcgtatccatcgtgggagcctacgaggacgctgtagccgtgcacctcgtcatggagctgtgcgctggaggggagctgttcgataggatcatacagcgggggcactactctgagaaagccgccgcacagttggcccgggtgatcatcggggttgtcgaagcatgccattcacttggggtgatgcacagagacctcaagcctgagaatttcttgtttgtgaaccaaaaggaggatgcacccttaaaggctattgatttcgggctctccatcttcttcaaaccagagacccatgtgagcgaactgcaaagcgttccttacacatttctgcttaatattgagttattaactcatggtatagcaatcatgttaagtttcaagagttctattgtgataccatggttatcgcggcgccctggcgaggcgagtcgcctccagggcgactggacgcctaggcgacagttagacgcccaatcgttcagatatgaaggtcaactagttagacaaccaactagccatagaggagaggagcagagcgcggaggtgtggagtgcagcggcgtgggtggagcagcgtggtgcggctggacgtcgcctaggtgaaatattttctgatgtcgttggaagtccttactatgttgcccctgaggttctgaaaaaacgctatggctgtgaggttgatgtgtggagtgccggtgtaataatttatatcttattgagtggggttcctccgttttgggctgaatctgaacaagggatatttaaacaagttctaaaaggtggtcttgatttttcatccgatccctggcccagcatttcggagagtgcaaaggatttggttaggaagatgctaaatcgtgatcccagaaagagattgactgcacatgatgctctatgtcatccttgggtttgtgtagatggagttgctcctgacaaacctctggattctgctgtcttaaccagattgaaacagttttctgcaatgaataaactaaagaagatggcccttagggtcattgctgaaaatttgtctgaagatgaaattgcaggattgaaagagatgttcaaaatgctggacactgacaatagtgggcagatcacgttggaggaactaaaaattggtttgaagagagttggtgctaacttaaaggactcagaaattacaacactaatggaagcggcagatattgataacagtggttccatcgactatggagagttcctagctgcaactttacatctgaacaaagtcgagcgagaagacaacctcttcgcagcattctcatactttgataaagacggcagcggttatattactcatgatgagctacaaaaagcatgtgaggaattcggtatagaagatgcacacctagaagatatcatccatgacgttgatcaggacaatgatggtcggatcgactacaacgagtttgtaacaatgatgcagaagggaaataacccactagggaaaaaggggcactgccagatgagctttggtcttagagaagcattgaagcttggctaagtggcatgatcaatcctgtgtgaagtgccattcggcttcatatgccaactttagctgatgaaactaagtccgtgaatttgggacgccggtaccaaaggtggagcaagtgcgcgatacgattagctttgggataccaactaagcagtgagcatgcaggaacacattggtgatctttcgtcgttaaccccccatgtacatggcttttttgaggtgggataggaatggcggttgtgtttcccatggccattctttgcacgttatgaagctcagctgcaggatgctcttatatagagagaaatgttagtcacatcacatcgcgtgtccatactgtatagcgaaacttaacatgttgtaatatcggtcggacaatgtgtgcgtgttgtatgttatctttcttagatagaggcacaggcttagcgttgtcatatatgtattgcaagaatatgcaggctgtatattaaccaaatgatttttttgtgtaca

SEQ ID NO: 105801 - DNA, 1853 bp, Zea Mays
cggggccgtttcctcgccttttcccttgccgtggacgcgtgccgcggtcgtcgccggccgcgggaggagatcgattccacgcggcggacttggtctacagtctactaatctattctctatctctagcagtggtaccatttggcggcgatcgccgtgctattgcttgggccttggactgagtaggtttggaggtagcgatacgagacactcgcccccgattcccctcccgttgccgaagcctgtgttgcagggatcgttcgcggaagcggtttttgatcggagagagagaaagagagagcgagggagggaggtggggatggacgcggcggcagcggcggcggcgcagatggagaggcactcgtcggcggcggcgcagatggagaggcactcgtcggcggcggccttcgtggagggcggcgttcaggacggctgcgatgacacctgcagcatctgcctcgagaccttctccgacagtgacccctccgcggtgaccagctgcaagcacgagttccacctccagtgcatcctcgagtggtgccagaggagctcccagtgccccatgtgttggcaggcaatcagcatgaaggaccctacgagccaagagctccttgaggccgtcgaggaagagcggaacgacgtgcaggaaaaccacgcgcgcacaaccaccgttttccgtcacccgctgctcggagatttcgaggtaccggtggatgcagacgacgccgagatcgaggagcggatcatgcagcacctggccgccgccgcagccattcgccggtcgcaccgccacgccagaagagaaggccgccgcagcagcagggcggcggcagctcatggccatggccacccacaaccacaaacacaagtcctgttctttccgtctgctggcgaggccactcctggtggttctggttccccgtctccgcatccgcggcaagaacatgctgcttcttctgtggtttctcctccgccattgcccgccgttgcctccgcagaaggaacggatgcagacagtactgcctcggttggtggcgctgtcgggccagatgacagtgtttccaggagccagtcttcgcctgtcaaccacgatgaagctggaccatctgctgacgcgcagtcattctcagacacgatcaaatctaggctgcagtcagtctctacaaagtatatatcactcccagtctcctacatttccactcctcctaagaacaccagatgcatgcccctgtctaattctaaaccgtcgcttgacttacatagccatacattcattgttctcaaatctcaacgatggatggcaggtacaaggactccataacgaagagcacgcgcgggtggaaggagaggtggttcgcgcagagcagcgccatgtcgaatcttggctcggagatgaggagggaggtcggtgctgggatcgccgccgtttcccgcatgatcgagaagcagctggagacacggccggatgggagtgggacagcgccgtcgcctgctaccgcttcgtctccagctcacgcccaccctggttcggatgcaagtagtcagggtcagggagctgctgttcccgctacacctgcagccgctctgaataacgctacgcctgcagctgctgctgctctgaatgacgcctcgtcgtcttcgacagcttgaacgcgcgccaggatcatgttcagtgagtttgcactaggtgtggttttcaagtgctttagatgcttgcaatgcaatgcgtcgcgtgtatagtcagtttgtcaattagcctcattggtagccagtgaaacagatagtggatgccaagctactgttcgatcagtgaatgtttcagaataaagttggatacttggatgcgcacaagaaca

SEQ ID NO: 105802 - DNA, 1729 bp, Zea Mays
cggggccgtttcctcgccttttcccttgccgtggacgcgtgccgcggtcgtcgccggccgcgggaggagatcgattccacgcggcggacttggtctacagtctactaatctattctctatctctagcagtggtaccatttggcggcgatcgccgtgctattgcttgggccttggactgagtaggtttggaggtagcgatacgagacactcgcccccgattcccctcccgttgccgaagcctgtgttgcagggatcgttcgcggaagcggtttttgatcggagagagagaaagagagagcgagggagggaggtggggatggacgcggcggcagcggcggcggcgcagatggagaggcactcgtcggcggcggcgcagatggagaggcactcgtcggcggcggccttcgtggagggcggcgttcaggacggctgcgatgacacctgcagcatctgcctcgagaccttctccgacagtgacccctccgcggtgaccagctgcaagcacgagttccacctccagtgcatcctcgagtggtgccagaggagctcccagtgccccatgtgttggcaggcaatcagcatgaaggaccctacgagccaagagctccttgaggccgtcgaggaagagcggaacgacgtgcaggaaaaccacgcgcgcacaaccaccgttttccgtcacccgctgctcggagatttcgaggtaccggtggatgcagacgacgccgagatcgaggagcggatcatgcagcacctggccgccgccgcagccattcgccggtcgcaccgccacgccagaagagaaggccgccgcagcagcagggcggcggcagctcatggccatggccacccacaaccacaaacacaagtcctgttctttccgtctgctggcgaggccactcctggtggttctggttccccgtctccgcatccgcggcaagaacatgctgcttcttctgtggtttctcctccgccattgcccgccgttgcctccgcagaaggaacggatgcagacagtactgcctcggttggtggcgctgtcgggccagatgacagtgtttccaggagccagtcttcgcctgtcaaccacgatgaagctggaccatctgctgacgcgcagtcattctcagacacgatcaaatctaggctgcagtcagtctctacaaagtacaaggactccataacgaagagcacgcgcgggtggaaggagaggtggttcgcgcagagcagcgccatgtcgaatcttggctcggagatgaggagggaggtcggtgctgggatcgccgccgtttcccgcatgatcgagaagcagctggagacacggccggatgggagtgggacagcgccgtcgcctgctaccgcttcgtctccagctcacgcccaccctggttcggatgcaagtagtcagggtcagggagctgctgttcccgctacacctgcagccgctctgaataacgctacgcctgcagctgctgctgctctgaatgacgcctcgtcgtcttcgacagcttgaacgcgcgccaggatcatgttcagtgagtttgcactaggtgtggttttcaagtgctttagatgcttgcaatgcaatgcgtcgcgtgtatagtcagtttgtcaattagcctcattggtagccagtgaaacagatagtggatgccaagctactgttcgatcagtgaatgtttcagaataaagttggatacttggatgcgcacaagaacacccgagagaccac

SEQ ID NO: 105803 - DNA, 1988 bp, Zea Mays
gtacctcatatttctctttatatgcaccacgaaacacctccgttgtacactacgccaccaccaatgtctgcggccgtggcattggcggtcatcttggccgtctacgtcgtcctcaggtatatatcctctccgagaggcaggtctaagcctctgaaccttccacctggcccgcgaggatggccggtgatcggaagcctcggcgcactggcaggcgcgcttccgccgcaccgagcgctggccgcgctagcggcgcgccacggcccgctcatgcacctgcgcctcggctcctaccacgcggtggtggcctcgtcggcggacaccgcccggcttgtcctcaaggtccacgacctcgccttcgccgaccggccgcgcacggccgccggcgaggtcgcctcctacggctacctcggcatcgtgcacaccccgtacggcgcctactggcgcatggcgcgcaagctctgcgccaccgagctcttctccgcgcgccgcgtggactcgttcgagcgcgtccgcgcccaggagatgcgcgcgctcgcgcgcggcctgttcgagtgcgccggccgcggcgccgtcgcggtcagggagcacgtggcgggcgccacgctgcggaacatcctccgcatggcggtcggggagaagtggtcgggctgctacggtagccccgagggcgaggcgttccggcgcacgctggacgaggcgttcgcggtcaccggcgcggtcagcaacgtcggcgagtgggtcccgtggctgggctggctcgacctgcagggctgcgtccgccggatgaagcgcctccgcgcgcagtacgaccgcttcttcgagcagatcctcgacgaccacgaccacaagaagacgcggcgggagcgaggccgacccggcgccggcgactccgcggcggacgatgacctggtcgacgtgctgctgcggctggtcgaggaggacgaggacaggccggagacgacggaggccagcaggctcacgcgcgacggcgtgaaagcgttcgtccaggacatcgtcgccggcggcacggagagctcggcggtcacgatcgagtgggccatgtcggagctcctccgccggccggacgccttgcgggctgccaccgccgagctcgaccgcgtgattgggcacggccgctgggtcacagagcgcgacctcccggacctcccctacatcgacgccgtcgtgaaggagacgatgcggctgcacccggtcggcccgctcctcgtcccgcaccacgcccgcgagcacacggtggtggccggctacgacgtccccgccggtgcgcgcgtgctggtgaacgtgtgggccatcgctcgcgaccccgcgtcatggcctgacgcgcctgacgcgttccggccggagcggttcttgaacggcagctccggcgccagcgtcgacgtgcgcggcgcgcactttgagctgctgccgttcggggccgggcggcggatgtgccccgcgcacggcctcgcgatgaagctggtgaccgctggcgtggcgaacctggtgcacgggttcgcgtggcggctgccggacggtatggcgccggaggatgtgagcatggaggagctatttgggctttccacgcgccggaaggttccgctcgtcgccgtcgcggagcccaggctgccggcgcacctctacactaatgtcacgccgccacagcaggtcgcgggctccacgattgcgaacttgtccaccaggccggagtacaagctcgtgttctgaatcattcaccgccactaaaaataaagcaggaaaaactacacttcctgcgtgctagacgtccgggcggaacacaacagtgcttgctcacgttcttctattggttgtactaaaaatatggactagcctgaactttctgaacctaattcacctgtctgcttggtttcaccatgttcaccaaacacaatcgatgcaactatctgttgaaagcaccaggtgcaggttattcacttatcaattgaaacaactggtcttgtgctaaa

SEQ ID NO: 105804 - DNA, 2052 bp, Zea Mays
atgccggcggacgggggcgctgtggcgggggcgccatgcggggcgtgcaggacgctccggtgcagatgcgtgccgcgctgcgtcttcgcggcctacttctcggcggaggagttcgccgccgtgcacggcgtcttcggcgccagcaacgtgtccaagatgcccgaggacatcggactccccgagcagaggcggctcgccgtggacacgctcgtcgaagaggccagggcgtgggcgcgggaccccaccttcgaccgcgtctcctacctctgcatcctccaggaccaggaggtgaacgacaagtacagggagcaggtcgacgatgcgcgggaggagttcgacgccgaggtcgcgtccgagccggtcgacgttgctgccgcagggctggaggcgcaggcgcaggcgcaggtcgacgccgcgctgcagcacgagcaggactacaggctgctgggcggttggggggcgacgacgggcgagcagcagcaccttgtgacgcaagacgccgagaatgagcacggcatcatccttgggcacggccacccggccgagctatcccaggagattctgcagctgcaggagttgttggatatggcagagctctccagaaacagaaagcagcagatcatccagaaaacagagatggggcagtactgggacgcggcggcggggggcgcgagggaacatgacctactgacgatgatgcagcaggccccggccgctgcgtggcagcaccaataccccgccccgcagtatgccgggattcgtggcgggcctggcggccaccaggagatgccgcagccgatggaggaagcctgcacggcggagtttgctacggggatgggcatcatgtcgcagcaattcgcctcggcgcagccgtaccacgaccacgaccctgcggcggtgccccacgcgtcgccatggctccagcgtatgcctgaggcgcagcagccggctgccgcgtcgcaggtggcgagcgagcaggacatgctgctgttgctgctactgcagcagcatcaggtcgcggcggcggggttgatgtccgcgggcggcgctcgtcagttggataacgtcgccgcacaatacgatgacacggaggtcgcactggggtacgggtacggccatccggacatgcaccagcaccagcaccagcaggtggccgccgcggggcaggttgccggagtggatgacgacatgaacccccgggagatgacgcagcagcagcacgctcagcaagggctcgacatcgcccttggaaacggccacctggacggcgaaaccgaggcgatgctgcaggagttggccgccctgctagagcaggcgggaaagcaggaaacgatcaggaagcagcagggcgtggcgacagggatggggcagtgggacgcggtgacggggatcgcgtgggagcaggacgtgacgacgatgacgcaccagcagagcccggacgctgctgcgtggctccaggtccaggagatgctggagcagatggaggaagcgtcgtccacgccggagtttgctgagatcatagcgtggcaagccgaggcgcggtacgcccaggaagagctcgccatcacccttggtaacgaccacccggactggtcaacccaggatatcctgcaagcgcaggagttgttcgccatggcagagctggccaggaagcaggaaatggtcaggaatctggtcgccgcggcggcgctcgccagagagcaggaaatgatcgcgcagcagcagcagcaccccgaggcgcagtactccgggacagagctcgacatctcgctgtggcaaggccccggccacggccacccgtactggcatcagccgacgatgcagcagatgctgcaggagaagcagctgccgacggtgcaacagctgttgcaggagcagcagctggccgacgcgattggattcggcacgcaccaggccagcacgactttggtgccgcagtatgcgaacggtgagcacgggagcggcaccggcgccgcaatggcgttccagtcgccggggtctgacaaggacgcgccattcccattcccattcccattatatgtaggattgtag

SEQ ID NO: 105805 - DNA, 798 bp, Zea Mays
tcctcccccactggcgctacacccactgcgtccttcgtccatgttgctcaatctgtcaatattattagcctcgtcaacattcggctcgatatgctgctctccacggcgtatcgccgttggcgccgtctgtttttggtcgttctcgatcggttctgcctcacccatcacattgatggctccccggcattgccgctcgaccccacctagcttcaagaggatcttactgtcctcatttggctccacctccacgccacgctcgccgacgacctcctcgacattgtgatggacgacgacatcaccactgctcatggcgtctagaataagatcacatgcttctttctcggtaacaaggcaagtcgtgcagtccattttgaacaagaactccatagcctcatccagggagaactctctgctgcagcttactgtcatcgcctcaaaactctctccgatgcactggcggactgtgaccaaccggtgcaagatcgtgctcttgtgcaccaactaatctgtgggctcaaccccaaataccatgtgcttcgccaaatgctgccagctctgcctatgttcccaacttttatggaggcatgggaccaactcatcgtcgccgaacaaacactgcagctatctggcccgtcccagactgcccccaccacgctgctgaacatcgacggcaccaactccaacagcaacggctctgctccaacctcccgtcaggacaatgatcgcggccagcacaactctggccgtggctacgatggtcgtggtcgtggctacggtcgatggtacaatcaaggtggc

SEQ ID NO: 105806 - DNA, 3479 bp, Zea Mays
gtaactccaaaacctccctgccttctctccttccatcaccgcaactccaaagcctcttatcgtcttcttccatcgccgaacgacgactgggcccgctgtcgctgccgccgccgccctacttcgccaccttcgccggcgacgggcaccaccagtgtggactgtaatgtttgatgatgatgatgatggagtggacccacaaattgaggatgtcaacagatactactttgaggatggtgaagagaaaccagtttgtttcagtatcttgcctttccagtttggtgaggacgatagcgaggcagttttcctcagaaaggatgttttcttgtgtggatttgtggataaaaatcttcctgtgtacaaggaggtggtagcttggaagataaggcttgacagtgagcatcccaacatctatgtgctttctattgagcacaagtggataaagctgttgaaaccacgaaaatgctatggagacattgttcgatcaacattgattacggtgcaaatgctccacttttttgggagaggggagcaaagaagttcgaatcacctttgggatcaccttgatgaagtttttggtaaatacaatcctaaacccgtggaggatgacttgatgaagcaccataccctaatcaagttgtttgtagagaaagatcaaaccttgatgaagtcaaagattcttcaaaggctcattgagaatggctttaagagaactaaaaaggccttaggtatggaagcacaatccattgttagtgacgggtggcgtgctagaaaaaatgatgataacaattatggtaacaaagatgacagtggtgatgattgtgatggtgatggtagcagtgatgatggtgatggcagcagtgatgatgatgttaccgatcaaatatgtgcgctatgtgatgatggaggacatttgcttagctgtgacggtccatgcaagaggtctttccaccccacaaagaaagatggcagagaatctaaatgtgaaagtcttcattacacttcagcagaagtaaagagaattggtacttatctatgtgcaaactgcaaaaataagcaacaccaatgttttagatgtggagagcttgaaccatcccatgggccaaatgctaaggtctttcaatgcaatcaagcatcttgtggatatttttaccaccctaagtgcattgcacaattattggatcctaatgccactgatggtgagttggaaagaaggattatgtcgggaatgtcatttccgtgccccatacattggtgtttcaaatgtggccacatggagaacaaagctcaaagagcacttcagcttgcagtgtgtagacgctgtccaagagcatatcacagggaatgccttccaagggacttatcctttggaacaaaggacaaggatggtaaccaacgcgcttggaagctttccgacacaattttcatttactgcctagatcatgaaatagacaaggatactggcacaactagtaggaaccatataaaatttccagctacacctgaatacaccaaaacaaaagggcttggtaacagcaaaggaaggatgactggcaaaaggagaaagaacaaaaggagaaagaacactgaccaatcaacaaaacctacagatttgccaaacaggttgtgtggagcagaaagtgagcaagctgacaatgtaggtgcaaaaagcacattgccccagattgttgtagagcctcactgtgcagcaaagcacttgaagggtgatccacaaattgccaaacagggtgttgctgctcgtcaaaatggtgcagaaactatgaaagggcatgaaaatcaatttggcatttcattttgtgttgcaagtactgaaacagagaagagggtaacatgtttggcacaaaggggaacatgtttagggacacaatatgatgggccatcaaccaagggcatgtatgattgttctgttcaggacacccctatggacgacgatgttgagttggataatgtggcctgcataatcgcggtggataaatatgtcaatgggagggggaaaacacaagaggactacactagaaaagaagctgctcagcgcaaagactcgagtgaaaatcaagggcagaatgatgctctagagctagacaacctccggatggagatgcaagctgacgaacgtccgttagaaccaggaaacaagagggacaggaagtggcagaaaaatgtatatggactcggatcagcttcgggacagaaggaaaccttgtccaggagagaaaatccacggtcagatagagggatggtccacagtaacgacagcaaaacaatttattacaggaagggtgggacggaagtcgataatgttgatgaccaccctttagaaaagcaagaccaccaggatacatcaagtgacggatctaaaaagagaagccgaccagtggacaacgcatctggtggcaacagaccatacttggatgagaacaagaagcgtaatctcagagaagatggaagatatgctcattatgaagactggagaagtgaaaggaatacagcagcagacacgtctggatataaggcccaatcagaagagaagcctgtatggacaaacactcgaacaggatcaagggagcattcactggacaggcaaaggatagagtgcggtgacagctatcgtggaacctataacaatagacaaagacatgaatggctgcacccgcacgctagtggtaattcctcgagaattggttgggatgacaggaggcagtggagttcatctcggtcaccatttccttcggctgaatttggtggtgaccgttcctgttctcgtgcccatccgagaggttctaaatacagaaccggcgggaggcatgatcacccccagtacctgggactgggaacacctcaacatggtacaagtagaccgcaccacacaatgggctgggacagggacaccttccatgatcaccagcatggcagaagaccgccgcaccacacaatgggctgggacagggcccccttccgtgatcaccagcatggcgaatacgacgactccaggtatggtgaatatgatgcaactgacaatggtcctgacagcgcgcatcgaccctacacggctgctggcgtggctggacgttcagcaccgagttatcagcttgctggtggttatggagagggatcaagggcttggcggccagttacggacaagtacgccccatggcccttgccttgaccgcacaaactaatattagccaaggagccagagtgagctacaagaacaccgtttgctattgtcggaaatgctttcttcgaggactgtctcagtacggggaattgatgggtcggtgttgaaacccaaatgatatctgccttccagttgcttgctttgcctatcgtaatcactgcatgttatttcacataagcagctggattctcaagttatgtgggcggtgcatttgagttatactagatgacagcctgtgcatattgttactgaagtaaaatatcttttttattaggttcccctt

SEQ ID NO: 105807 - DNA, 3328 bp, Zea Mays
atgtttgatgatgatgatgatggagtggacccacaaattgaggatgtcaacagatactactttgaggatggtgaagagaaaccagtttgtttcagtatcttgcctttccagtttggtgaggacgatagcgaggcagttttcctcagaaaggatgttttcttgtgtggatttgtggataaaaatcttcctgtgtacaaggaggtggtagcttggaagataaggcttgacagtgagcatcccaacatctatgtgctttctattgagcacaagtggataaagctgttgaaaccacgaaaatgctatggagacattgttcgatcaacattgattacggtgcaaatgctccacttttttgggagaggggagcaaagaagttcgaatcacctttgggatcaccttgatgaagtttttggtaaatacaatcctaaacccgtggaggatgacttgatgaagcaccataccctaatcaagttgtttgtagagaaagatcaaaccttgatgaagtcaaagattcttcaaaggctcattgagaatggctttaagagaactaaaaagcctattttaaaggccttaggtatggaagcacaatccattgttagtgacgggtggcgtgctagaaaaaatgatgataacaattatggtaacaaagatgacagtggtgatgattgtgatggtgatggtagcagtgatgatggtgatggcagcagtgatgatgatgttaccgatcaaatatgtgcgctatgtgatgatggaggacatttgcttagctgtgacggtccatgcaagaggtctttccaccccacaaagaaagatggcagagaatctaaatgtgaaagtcttcattacacttcagcagaagtaaagagaattggtacttatctatgtgcaaactgcaaaaataagcaacaccaatgttttagatgtggagagcttgaaccatcccatgggccaaatgctaaggtctttcaatgcaatcaagcatcttgtggatatttttaccaccctaagtgcattgcacaattattggatcctaatgccactgatggtgagttggaaagaaggattatgtcgggaatgtcatttccgtgccccatacattggtgtttcaaatgtggccacatggagaacaaagctcaaagagcacttcagcttgcagtgtgtagacgctgtccaagagcatatcacagggaatgccttccaagggacttatcctttggaacaaaggacaaggatggtaaccaacgcgcttggaagctttccgacacaattttcatttactgcctagatcatgaaatagacaaggatactggcacaactagtaggaaccatataaaatttccagctacacctgaatacaccaaaacaaaagggcttggtaacagcaaaggaaggatgactggcaaaaggagaaagaacaaaaggagaaagaacactgaccaatcaacaaaacctacagatttgccaaacaggttgtgtggagcagaaagtgagcaagctgacaatgtaggtgcaaaaagcacattgccccagattgttgtagagcctcactgtgcagcaaagcacttgaagggtgatccacaaattgccaaacagggtgttgctgctcgtcaaaatggtgcagaaactatgaaagggcatgaaaatcaatttggcatttcattttgtgttgcaagtactgaaacagagaagagggtaacatgtttggcacaaaggggaacatgtttagggacacaatatgatgggccatcaaccaagggcatgtatgattgttctgttcaggacacccctatggacgacgatgttgagttggataatgtggcctgcataatcgcggtggataaatatgtcaatgggagggggaaaacacaagaggactacactagaaaagaagctgctcagcgcaaagactcgagtgaaaatcaagggcagaatgatgctctagagctagacaacctccggatggagatgcaagctgacgaacgtccgttagaaccaggaaacaagagggacaggaagtggcagaaaaatgtatatggactcggatcagcttcgggacagaaggaaaccttgtccaggagagaaaatccacggtcagatagagggatggtccacagtaacgacagcaaaacaatttattacaggaagggtgggacggaagtcgataatgttgatgaccaccctttagaaaagcaagaccaccaggatacatcaagtgacggatctaaaaagagaagccgaccagtggacaacgcatctggtggcaacagaccatacttggatgagaacaagaagcgtaatctcagagaagatggaagatatgctcattatgaagactggagaagtgaaaggaatacagcagcagacacgtctggatataaggcccaatcagaagagaagcctgtatggacaaacactcgaacaggatcaagggagcattcactggacaggcaaaggatagagtgcggtgacagctatcgtggaacctataacaatagacaaagacatgaatggctgcacccgcacgctagtggtaattcctcgagaattggttgggatgacaggaggcagtggagttcatctcggtcaccatttccttcggctgaatttggtggtgaccgttcctgttctcgtgcccatccgagaggttctaaatacagaaccggcgggaggcatgatcacccccagtacctgggactgggaacacctcaacatggtacaagtagaccgcaccacacaatgggctgggacagggacaccttccatgatcaccagcatggcagaagaccgccgcaccacacaatgggctgggacagggcccccttccgtgatcaccagcatggcgaatacgacgactccaggtatggtgaatatgatgcaactgacaatggtcctgacagcgcgcatcgaccctacacggctgctggcgtggctggacgttcagcaccgagttatcagcttgctggtggttatggagagggatcaagggcttggcggccagttacggacaagtacgccccatggcccttgccttgaccgcacaaactaatattagccaaggagccagagtgagctacaagaacaccgtttgctattgtcggaaatgctttcttcgaggactgtctcagtacggggaattgatgggtcggtgttgaaacccaaatgatatctgccttccagttgcttgctttgcctatcgtaatcactgcatgttatttcacataagcagctggattctcaagttatgtgggcggtgcatttgagttatactagatgacagcctgtgcatattgttactgaagtaaaatatcttttttattaggttcccctt

SEQ ID NO: 105808 - DNA, 333 bp, Zea Mays
attgttttacaattcggttttcatctctatgagtaaaaaatatcaatagacttagccccaatccgttttagcaaaatttaaatttgcccaacaaatagacttagtccattgataaaaagttaattttgtcttggctggggtgcgccatgctcgggcagcagtgcaacgtccgagcgacactcaaggaccccaatagcaagctattatgatgggttctcccccgtaaaaaataaatttaatatcgaaatgaacacatggttcacatatcagatattaaactgataagaacagatactacacttgatcttagccaaaaggccgagaaaggtatga

SEQ ID NO: 105809 - DNA, 1433 bp, Zea Mays
agggggtgtttggttttagagactaatttttagtccctccaatttattccactttagtcactaaattatcaaatatggaaattaaaatagagttatagtttccatattttgcaatttatagactaaagtggaataaaatggtgggactaaaaattagtccctagtaaccaaacactaccttaactctacatgtacatacagtacgtgtagctggactggggtccttaactcgcgtcagggatgtggtgcggttggtgccggtgcctggtcgggctcctctcctcctccagatgcgtacgtgcccggctccacagggcagctagggcctaggggcggctccagctactaattagcttcgcattcattgccaaatctcaagctaaaatgcaaattaccatgcatggtggatttcaggcggcgatccagaccttcggcggcacgagctgaggttcgtccacgaccacgagtcgtcgtctgcgcccgccggtggggcatcatcagccgccatggccgcgcacccggagctgctgctgctggacaggtaccagtaccaccaccatggccgcttcgacctgaccgttgggcaatccatggtgagtgcgtgagctgttagtgataataagagtaagaagctccaacgacgacgacatactaatatataatcttattatacactatatatacgtgctgctcccctgtcgccgtcgatcggtcggttggaaattaaggtgcttaacaacgacagcgccattgctggccatcagatctatggcgccactgcgtactatcatcccttctacggagcccaagctctgcacgggagggtgctcctgccgccggcgatcgcggccgacgagccggtctacgtgaacgccaagcagttcaacggcatcctccggcggcgcctggcgcgcgccaagcgggcggccgccacggaccgccgggtctccgggagccgcaagccgtacctccacgagtcacggcacctgcacgcgctgcgccgggcgcggggcaccggcggccgcttcctcaacacccggagccgcgacggcgaccccgaggccggcagcgcggggaaggcggcgaggctgcaggaggaggaccggcaggcggacgccgtgttcctctcgtcgttggcgagcatggcgggcggcgatgccacccggtggcccagcgcgccgtcgcgggggcggggctgctgcgacctgctcaaggcgtgacggacggccgtgcgtcgcctggtggtggccgtggctctctaggacgcctactcactgattcttggctcccggtgtgtgagcagactgcagagggagatgcagcagcgacttgtgttgtcaatgtttcgtgcagagttgcagacccttttcaaacacctttccttttgtttgatttgacgagatcgacggatgtggtcactgttcaacccaaaa

SEQ ID NO: 105810 - DNA, 115 bp, Zea Mays
aaaaaatatgtgtttatttgtatgtttaacactataaaaatagagtttgtatattttatctatttatgtttttcttatgaacagaagagattaaaatgagctgtaaaatgaatag

SEQ ID NO: 105811 - DNA, 1278 bp, Zea Mays
atgccgtgcaagtcgcgcgagctcccgcttgaaaggggcgtcgtgcagctggcactgtcgcaggcgctcgtccactactaccctttctgcgggcgcatcgtggacggctcgcacatcgagtgcaccggagagggcgcggtggagttcgtcgccgcgtccgcggactgctccctgaagcaagcggcggcggccaagctccacgaacgaccgtcatttttatccctcgtggaggagctcgccgtgtactacccgatgggcagctacggcgccgccgacccgctgctgacggtgcaggtgacggagttcgcgtgcggcggcttcgcgctcggggcaacgtggagccacgcggtggccgacggcgccggcgtcgcgcagctgctgggcgccgtcggcgagctcgcgcgcgggctgccgacggcgccctccgtggcccccgtccgctgggacgcggcggtctcgagccagcccccgcagccggaccccgggcgggacgccgtgatggcgagccttcccgcgtggttcgacgacccggcggcggcggaaggccactccttcatgcaggccctcgagcccctgccgctcgccttgctcgacgtcaccgtccccaccagcttcatcggccgcgtcaaggcggagctcccgggctccaccacgttcgaggccgtgctcgccgcgctgtggcagtgccgcacccgcgcgatcctgtcgtcgtccggcggcggcggcgggcctgcagacgacggcgccttcttcctctcctcctccgtttccttcgcggttaacgtgcgcaggcacgtgggcgccaaggatggctactacggcaactgcgtggtcgacaagctggtcacggcgtcgagcagcacggtggcaagcgcgggtgtcgtgcacctcgtcgagatgatcaaacgcgcgaaagagcaagtagctgaccagctcgtcgtcaacaaggagaaggagaaggagatcaaggaggaggagaatataagcagcagcaagagcaagagcaagagcagcaacaaccagcagctgcgagggtttgatgggcgatacggcatgttcagcgtgtcatcctggaggaacatcgggttcgaggacgtcgatttcgggagcgggcagccggcaagggtgatgtgccacgtgccaggggtgccacccatcccgggctgcatcgcgtgcctgcgttgcgaggggagagacggagtcaacgtgctgtcgtgctgtgtcaaggaggagcatgccgacgccttcctcgcagagatagcaaagctggggtgatcc

SEQ ID NO: 105812 - DNA, 1234 bp, Zea Mays
ttcaactgttgacccatcatacggagtagaaccggacaggatggccgccgctcgcgcacgggtgctgcgcgagctgccggcaaggtgctggacgaaatgcctccgccgcgcttcccctttcccctccacctcgcccgccgcctcctcgctctccagcctcagccgtgcttccacgtctccctttccgctcgcctctcgctcccggcgccttctacactcgctgccctcggcggcggtgcgcgtgcgcgtgcgcgcgcagctgcagacgcgcttcttggcgagcgaagccgcgcggggcggtgtcggcgggcgcgggccagcagcggacagcgaggaggaggcgcaggagtgggcggtggagtgggaggacagcgaggacgacggctacgagcccgagatcggcgacggcggggacggcggcggggtcgcgctgcggggcgtcggttggggcgagcgtgccctcgtggcggccgaggaggttctcgccggccattttggggatgacatcgcaatgttcgccttcaaggtgtcgcccaagggatacgtctacgtgcgcctcgacaagctgaccgacgtgtacgggtgccctgacatcgaggaaatagagaaattcaatagactctacaagcagaaactggatgagatcgtcgaaagaggcgaaatatccctggacctggcactcgaggtatcatcgccaggcgcagagaggcttctgaaggtgcctgaggatctggaccgcttcaaggacatggctatgagggtgcagtacctcgctgaaggcaacagtgaccttgcgtcgaagcagagcctgctgaaggacggcatcttcttgctcgagtccgttaacgctgaggctgggcactgtgtttggaggctggcagatgtgaaggaaaaccgagcagaagctgggaagggaaggccgctgaacaggaaacagagagactggaggctgcagacttgcttcaccgcagtgaagaaggtgaccttgtacttggacgccaactagtaaatccgggccaggaggactattatggcttgtgaaaactatcctaaccctagcagattatgtagaataagaatgttgggttttctttatatagagtagagctatgttggtaggctgcacaaattggatatccatgaaattgctttgctatgagttgctagtgcgaaattgactgatgtttctcacacttgcagtataatgacacctttttcttttcaaattataaga

SEQ ID NO: 105813 - DNA, 178 bp, Zea Mays
caaaaaggttgttacactcacagctttagaagtgttcgtatgttgttgtattcagcaggatggagcttccactgaagttgttattatcagcctgactataagtacacacatacatagatatgagaaatatttgtcgtagataacaaaaaagtctaatctatacagaataaacaaaaaa

SEQ ID NO: 105814 - DNA, 216 bp, Zea Mays
atgcacaacgcccacgagcgcatcaccaagctcgagaacatgtgctggtggatctggcacctcacgcgtaagaagcaggagttcgagcatagtggagaccccaagggtcattttcaggcactgctagctctagcgatggatggtttagagaaaggaaaggctggcactgctggctcaagcgatggagggtttggagaaaggcaaggctatgtatga

SEQ ID NO: 105815 - DNA, 2520 bp, Zea Mays
ggagtctctcttcttctccttccctccgccgcgccgcgaatacgatgccgccgcggtcaccgccgctagcagctgccgccgatgtagcctccgtagtcacccgctgccctcacgcggaaccctcttcagaactcaccgcctccacgattcccgcctaccgcgcgctcatccgcgagctcgtctctgccggccgcctcgacgacgtcgacgccgccctcgcttctgctcgctcccacctcgccccagactccctccaaccactctacgtagcctccattcaagcctacgcccgcgccggccgcctccgtgccgccgtcgacgccttcgagcgcatggacctcttcgcctgcccgcccgccgctcccgcctataacgccatcatggacgccctcgtcaacgccgcctatcacgaccaagctcacaaggtctacgtcaggatgcttgccgccggcgttgctcccgatgctcgcacccacaccgtccgcctcaagtctttctgcctcaccggccgccctcacgtcgccctgcgcctgctgcgcagcttgtcggagcgtggctgtgacgccaaaccggccgcctactgcacggttgtgcgaggcctttatgcccacggccacggttacaatgcgcgtcacctgttcgatgaaatgctcggcagggatgtcttccctgacgttgccactttcaacaatgttttgcatgctctttgccagaaaggggatgtcatggagtcgggggcactactggccaaggtcctcaagcggggcatgtcagcaaacaagttcacttgcaacatatggatccgtggcctctgtgaagacggcaggttggaagaggctgttgcgctagtggaaaggatgggtgcctacgttgcgccagatgttgtcacttacaacacattgatgcgtggcctttgcaaggactccaaggtccaggaagctgcacagtaccttggtaggatgatgaatcagggctgcataccagatgatttcacctacaacaccatcattgatggctactgcaagagcggcatgctgcaggaagctactgagcttctgaaagatgctgtctttaaaggttttgtaccagaccgggtcacatattgctcactgatcaacggactgtgtgccgagggtgacattgagagggccctagaactcttcaatgaggcacaagcaaaagatctgaagcctgaccttgtcgtctacaactctcttgtcaagggtctctgtcgccagggtctgatcttgcatgccttgcaggtcatgaatgagatggtcgaggaaggctgccatcctgacatttggacatacaatattatcatcaatggcctatgcaaaatgggaaatatttcagatgcggcagttgtgatgaatgatgccattgtgaaaggataccttccagatgtctttaccttcaacacattgattgatggctactgcaagagattgaagctggacagtgcacttcagcttgttgaaaggatgtggacgtatggcattgctcctgatgttatcacatacaactcagttttgaatggtctctgcaaagctggcaaagccaaggaagtcaatgaaacatttgaagagatgatacttaaaggatgccggccaaatgctattacttacaacatactgatagaaaatttttgcaagattaatcaactggaagaggcttctggcgtgatagtcaggatgtgtcaagatgggttggttcctgatgcagttagtttcaacacgctgattcatggattctgcaggaatggtgatcttgatggagcatacctactctttcagaagttggatgagaaagggtactctgcaacagctgacactttcaacattctgattggtgcgtattctagtaagctgaatatgcaaatggctgaaaagatttttggtgaaatgatcagcaaaggatataaacctgatttgtatacttatcgcattctagttgatgggttgtgcaaggcggcaaatgttgaccgtgcatatgcgcatcttgcagaaatgataagcaagggttttgttccatcgatggctacttttggccgcatgttaaatttactcgcaatgaatcatcgggtttctgaagctgttgctattattcacattatggtgagaatgggagttgttcctgaggttgttgataccattttgagtactgataagaaggagatagctgcaccaaagatacttgttgaggaattgatgaagaagggtcacattagttatcgtgcttatgaagttcttcatgaaggagtgagagataataaattaactagaaaagctcgaaaggcagatgcatctattatgtttgtttcacaacatcataaaagatcatatcaataagctgataaagctttcatgtgtctgagcataagatctatttatgctattaattgagttctccagattcatggatgctgctgtacgctgttatttcagggtctcattgttcagaatttggtgattatctgatcctaattgtattaatacaaagactcagggcatttcctat

SEQ ID NO: 105816 - DNA, 470 bp, Zea Mays
agtccgagctagctcccttctcttcttcccatggcggctgtcgtcgagttccctgcgcaagcgtcgcgcgcagccgcgtcttcaagcccgggtcttcttcctcccttgctcgccctgggtcctgctccctgcgccgcttctctaccggccgagctcctttgcagctccagcgccggccagagctcccctgcgtgccgtgtgcccatctccatagcgcgcagctccccacctccatggccgccgcgctcctccctgccccagcccggcgtttctctggccgaccgagctccctcgccatggagttcccgacgctctgcccagccccagcgcttggcttccatcctagccgcgccctactcggcttctccggtgccggccgccgctccaagtcgccgttccagccgacctcattactcgttgctcctgatggctgattggaccttgtaatgttgcgacaacgacacgcaatg

SEQ ID NO: 105817 - DNA, 1655 bp, Zea Mays
ggacggtggagtgctgtgctctcgggtcgcgtgaacccgttctggtcttgagaaacccggtggcgagttgacatatgcaagggttaagtgctacatatgtcgtgtggttggagatccccagctgggtattaatcgattcggatcgccgaacttctcggatatgaagactggatcttcgaccttcagcgtagataacaagtgaaactaaagatgctaaaataaagctagtgtaggacaagtgaatgctctagattaggaaaaatctagattcaggaaaagtacttaactggtgaagtaaaagcttcgcataaggatccactactagtaagcttttctgcaaaaatgagtctttgaaacttgatgagccttaccttgaatccttttaaatccagcaacccttgagagtcttttctttagtcgggtaagtcttgctgagtaattgtgtactcagagttttattccctgttgtttttcaggttatatttttgttctgttgtggatggtgctaagtgccggtgggctcgaccttcttatataagtatatcccatctttagcttctttattgaggactgtcacttaagctagcatgtattttaaaacttataaatgttttatacattcaaattgtaatattttgaatcaaattctcttgtaatcactccgatgatatattgtaatatggttataacttgtaaatgttgtaacttgtaatcattttgtaataaagaatttattttcgctgcaagtgtttgtatgtgagttgtatttacttaatcctgcgatcttggcggtaagtcgtttatccggggtcgtcggggcactcggacagatcctgataagttgtttggtacacacgcatagctgtctgaggtctttgagacaaggacatgtgcatgtgggtccaataacctgggaggttctgcgatagattggttgataaattgcaagtaaagttacaatacctaccaaaattgggctataatttaatacaaaactatctcttgccccctaaaatcccttacatttgggtataatttttgaatgcttgaatgcactatattgcatgactgagtagtaaatcattgttatactctgtagagtatctcatttagctattattttttcattctaaatgtctgagtaatgactgtgcagctgttgatgaaaggtgcttcattgcttgaatgcaatattggaaggctccagttatcgtcttatttgaatgcagtcccactcagggtacatattgaaacactagttggggcatattccaagttactctataaattacaggcatgaccaaaatcatttataagtttgtagtaagtactataggtatataaacaatactgattaattaaatcttctcaaatgctttctatgacctgttaaatgcaggctgttgtgcttttctgcctgagcttgtgacaatattctgaacaacctactgtatgttgctgctggtgcttccatatgtttcctctgccattcagatattcagtagagaagggtgacagctgacagacaccctcattgtgaagttattcccttaattttctttgtgtgacctcattggtatttttgtacatgatatctagctctaataatcatagtaacacttagtttatgcctataagattgctgcaaatgcatt

SEQ ID NO: 105818 - DNA, 3068 bp, Zea Mays
gtagtctttaattttatatatatgatcgagctgcagatgagaagctgcacgcgatgccccagcaagcagtattagttgggttgacggcgggcatggtggcggcggaggggaaggcagctgggaacaagacgatgatgcagaagcagcaggcgagcagctgctgctcggaccgtgaccaggacatggcggacctggagctggcgcttgaggcggttgttccggtgagcgtgcagcggcaggactcgctgtacagggacgcgacgagggcgggcggcggcgggcagcagcagcacgaagggtgggctcggactctgaggctggccttccagtgcgtgggcgtcctctacggcgacatcgggacgtcgccgctgtacgtctactcgagcaccttcgccggcggcatccgggacaccgacgacctcctgggcgtgctctccctcatcatctacagcttcctcctcttcaccatcatcaagtacgtctacatcgcgctcagagcaaacgacgacggggacggcggcacgttggcgctctactcgctcatctctcgccacgccaaggtgagcctggtgcccaaccaccagcccgaggacgagctgcagacgacggacgccgccgccgccgtgctgggcaagcacgggagcgtgcggcgccggaccgtgcagctggcggcgtcgcacgggcgggagcagcgggcggtgtgggtgaaggagctgctagagacgagcaagcccgtgcgcatctccctcttcttcctgaccatcgtggccaccgccatggtcatcagcgacgcctgcctcacgcccgccatctccgtcctctccgccgtaggggggctcaaggagaaagcgccaaacctcaccacaggtacggccggtgcgaggccgagggtacgtacaccagatcgtgtggatcactgtgggcatcctggtgcttctgttcgccgtgcagcgcttcggcacccacaaggtgggctacctgttcgcccccgtctcctcctgtggctgctcctcatcggcggcgtgggcgtgtacaacctgctcaggcacgacgtcaccgtcctccgcgccttcaaccccaagtacatcctggactacttccggcgcaacggcagggacgcctgggtctccctcggcggcgtcctcctctgcttcaccggcaccgaggcgctgttcgccgacctcggctacttcagcatccgctccatccagctcagcttcggcttcggcctcgtccccgccgtgctgctcgcctacatcggccaggccgccttcctccgccggtacccggagcaggtgtccaacgccttctaccagtccacgcccgagtccatcttctggcccaccttcgtgctggcgctggcggcgtcggtcatcggcagccaggccatgatctcctgcgccttcgccaccatctcccactcgcaggcgctgggctgcttcccgagggtcaaggtgctccacacgtcgcgccagtaccggggccagctctacatcccggaggtgaacttgctgctcgccctcgtcgcctgcgtcgtcacgctcgcgtccaagaccacggccgtcatcgccgaggcgcacggcatctgcgtcgtcctcgtcatgctcatcaccacgctgctgctcaccctggtcatgctcctggtgtggcgcgtcaacgccgcctgcgtcgcgctcttcttcgccgtcttcgccgccgccgagtccgtctacctctcctccgtgctctaccggttcgcgcacggcgggtacatccccgtcgccatgtccgcggtgctggtggccgtcatggtgctgtggcactacgtgcacgtgaagcggtacaagtacgagctggagcgcacggtgtcgcacgagagcgtggtgcgggacctgctgccgcgctgccgcaccgtccccggcgtcggcctcttctacacggacctggtgcagggcatcccgcccgtgttcccgcacctggtggacaagatcccgtccatccacgccgtcctgctcttcgtctccgtcaagcacctgccggtgccgcacgtggacgcaacggagcgcttcctcttcaggcaggtggcatcgtcgtcggagtcggacacagctgcaggcccacgggtgttccggtgcgtggcgcgctacggctaccgggacctgctggaggaggccagtgacttcgcgggcagcctggtggagcgcctccagtactacatccgcgacgtcaacctctacggcgtggagcaccagcagccgggcgccaaggtgagctacccgagctcgcgctgcgacagcatgatattgatggcgcggcagaggtcgtcggtcatgatgctgcggcagtcgtcggcggcatcctactactcgtcgtacgcagcggcagcggagacccagcagctgcagctggcgagggccaggtccacgtccggggcggggggcatcctcctccactcggcgtcggagagggccgagcagctggcccgcgccaggtccacgggcatcttcgcggaggagatgctgacgccggcggagtcgttctcggagctgtcgaggatggggagcatcggcggcggaggaatgcaggcggtgaagatcagcctggaggagatggcgcggatcgaggaggagcagcggtttatcgagcgggagatggaaaagggggtggtgtacatcctcggggagagcgaggtggtggcgcggccccactcgtcgctgctcaagaagctgctcgtcaactacgcctacgccttcctgcggaacaactgccggcagggggagaagatgctcgccatccccaagtcgcagctgctcaaggtcggcatgtcctacgagatctgatctgatctgattctgatggcgcgcgcgtcaccgatcgatctcccagctccatcatgccgtcgtcctcattatatatatatgacccagactccatatagtatagtacactactagtcttcagacagatttgatttcgtatgctttctctgcagtgatgctactagctacctagctagctagtacaattaattgtggcacacttgttagctgctgcagtagcataattattaagtaatttgcttctcatct

SEQ ID NO: 105819 - DNA, 1308 bp, Zea Mays
tgggcataaataaagtccatcctccttccgtgagacgagatgagaccaagaaaagattcgcggcggtggagtcggagctcaactcatcaatagggtttgatcagcgctccgctcgtgctagccacccagcccccccgcgcccacttgcgacggcgatggcttcgccgtactcgctcagctgggccgacgcgccgccctaccactaccacgggagaccccagccagcgcccgactcacccgcatcctccgacggggccgggccccgctcgctctggatcggcggcctgctgccatggatggacgaggactacctctacggctgcttcaccacctcgcgcgagcttctttcccttgtcatcaaacggaacaagcagactggccaatcagagggctttggcttcctcaaattttctgaccataccgccgctgctcatattctcaagtcttacaatggtcagaagatgcctaacgctgttcaagatttcaagctcaactgggccacccaacaacctgctcccaagaaacttcctgatccagatttcaagctcgacctggccacgcagcaggagaggcatgccgccgttgattcctcatctgatcattccatattcgttggggacttggcctacaatgttacaggatacatgctacaccatgtgttcaaggcccgctacccatcagtgaagagcgcaaaaatcatctttgacaagttcactggcctctcaaaatgctatggatttgttcagtttggagatgtcgatgagcagatacagcactgacagaaatgaatggagcctactgttctaccaggcctatgcggattggacctgttcccaagaagaaaagtgcgtacgccaccgtatgactaagtaatctgcggttcagctgctctgatagattttagtgtcctttgtttccttgagttggaacgcctcaagcatatatctttgtgtaggctgttcctctgagtttctttcctccagcattaatgtattcttcatgccatcacatttaatttgtctgaagactgaacttttttagcccctagtaagtagtaaagtaaggattatcagcactgcttgcttattaggatgccagtggagcagttcactctacttagatttctcattcaaggagaggtctttgactctttgtgtaccacattgctttgtttctgtttcttttggctcttccttatttcataaaagcaacaaaatacagtgtgtgcaatcttaagttatctggtcacaagggcatccatgcaagtatatgcttaatactaagacagtacatgcagatgttttcagt

SEQ ID NO: 105820 - DNA, 1765 bp, Zea Mays
tgggcataaataaagtccatcctccttccgtgagacgagatgagaccaagaaaagattcgcggcggtggagtcggagctcaactcatcaatagggtttgatcagcgctccgctcgtgctagccacccagcccccccgcgcccacttgcgacggcgatggcttcgccgtactcgctcagctgggccgacgcgccgccctaccactaccacgggagaccccagccagcgcccgactcacccgcatcctccgacggggccgggccccgctcgctctggatcggcggcctgctgccatggatggacgaggactacctctacggctgcttcaccacctcgcgcgagcttctttcccttgtcatcaaacggaacaagcagactggccaatcagagggctttggcttcctcaaattttctgaccataccgccgctgctcatattctcaagtcttacaatggtcagaagatgcctaacgctgttcaagatttcaagctcaactgggccacccaacaacctgctcccaagaaacttcctgatccagatttcaagctcgacctggccacgcagcaggagaggcatgccgccgttgattcctcatctgatcattccatattcgttggggacttggcctacaatgttacaggatacatgctacaccatgtgttcaaggcccgctacccatcagtgaagagcgcaaaaatcatctttgacaagttcactggcctctcaaaatgctatggatttgttcagtttggagatgtcgatgagcagatacagcactgacagaaatgaatggagcctactgttctaccaggcctatgcggattggacctgttcccaagaagaaaaattctttccgcagcaaacagtggactgagtcttatcacgatgcaaacaattcaaggctatttgttgggcaacttgaccaaagtgtgacttctgaagatctgatgcaagcctttagtccatatggggagcttgttgatgtgaaggcattaccagggaagggctgtgggtttgtcacgtactctaacagcagaggaagccattagaatgctgaatggaagtcagctgggaggtaaagccataaaactttcgtggggttacccttctgctgacaagcaggctcaaaggaacagcggcggcgggttcggacgcgactgcttcgtttggtctcctcagtatccctacgcttacgctcagacatgccaaccgggatatggatattaattaccgatagcaagctgcccacagtgcagtgagatcgtgtgaagaaagatgtcagtcacaaggaacagctgctagggtgtagagggatttttggtccatgtttttttttctttttggaaattggttcctcctatggttgcataccgtgaagcatcggcatctggatccatacatgagaatgcaaacaacgattgaatgtacatttacacacatactgctactactatattaattactgtaccttgaattttttgtctaccctatattacgcagcacgtccattaatttttatgggttggacgttggagaacgttgttgtgtggcccagagacatcaaataaacatcagtttttatggaaagaggattatttttctcaaaggagacaggcaagaagaaagaagagagcttgacccaaggagacatttgacccacacgagctagataaaggagacacgaaagagagctttgactcacacgagctagatatcgaagtactacctctattcatttttaaaaaatatttgtctagtttattttt

SEQ ID NO: 105821 - DNA, 1444 bp, Zea Mays
agatgagaccaagaaaagattcgcggcggtggagtcggagctcaactcatcaatagggtttgatcagcgctccgctcgtgctagccacccagcccccccgcgcccacttgcgacggcgatggcttcgccgtactcgctcagctgggccgacgcgccgccctaccactaccacgggagaccccagccagcgcccgactcacccgcatcctccgacggggccgggccccgctcgctctggatcggcggcctgctgccatggatggacgaggactacctctacggctgcttcaccacctcgcgcgagcttctttcccttgtcatcaaacggaacaagcagactggccaatcagagggctttggcttcctcaaattttctgaccataccgccgctgctcatattctcaagtcttacaatggtcagaagatgcctaacgctgttcaagatttcaagctcaactgggccacccaacaacctgctcccaagaaacttcctgatccagatttcaagctcgacctggccacgcagcaggagaggcatgccgccgttgattcctcatctgatcattccatattcgttggggacttggcctacaatgttacaggatacatgctacaccatgtgttcaaggcccgctacccatcagtgaagagcgcaaaaatcatctttgacaagttcactggcctctcaaaatgctatggatttgttcagtttggagatgtcgatgagcagatacagcactgacagaaatgaatggagcctactgttctaccaggcctatgcggattggacctgttcccaagaagaaaaattctttccgcagcaaacagtggactgagtcttatcacgatgcaaacaattcaaggctatttgttgggcaacttgaccaaagtgtgacttctgaagatctgatgcaagcctttagtccatatggggagcttgttgatgtgaaggcattaccagggaagggctgtgggtttgtcacgtactctaacagggcatcagcagaggaagccattagaatgctgaatggaagtcagctgggaggtaaagccataaaactttcgtggggttacccttctgctgacaagcaggctcaaaggaacagcggcggcgggttcggacgcgactgcttcgtttggtctcctcagtatccctacgcttacgctcagacatgccaaccgggatatggatattaattaccgatagcaagctgcccacagtgcagtgagatcgtgtgaagaaagatgtcagtcacaaggaacagctgctagggtgtagagggatttttggtccatgtttttttttctttttggaaattggttcctcctatggttgcataccgtgaagcatcggcatctggatccatacatgagaatgcaaacaacgattgaatgtacatttacacacatactgctactactatattaattactgtaccttgaa

SEQ ID NO: 105822 - DNA, 339 bp, Zea Mays
atgatggtgttaacggcaatgtatgcaggcctcagcttgtctgttgggagactcctagcctgcaactcaaccaagatctgtgcttataccatttgtttgtgctttctaatggtaaaatgtaatggaattccttccagatgtaaaagtgggaaaaaatttggagaggatttaaaatggaaggcgagtgtggcacctgatggtatatttctgcccagaagagcacgagcaaggtgtaggtggagaaaaacaacagaccagggagatctagcaacaccaacttgtatacttttgcgcggaggaggaagacgtggacatggaagccgaataccagagcacgga

SEQ ID NO: 105823 - DNA, 922 bp, Zea Mays
atgtggaacgatggaatcgacaatgaggaagcagattgagtagatataggtgagaatggttaattacccccgttgacaaggaagttcatgaggtggaagaccttctgcgtggtccatccgaactcgggcacccggcgctggatcctgacgagctgaatctgcaggggggcatgacagagggagcagaggtgaggatccaacggagttgaacgctgcccggtgcctcttgcgcccgctctggaactggaagcagaagggcgcaggagcggaaccaatcggcgaatagcagctgagatcaagcattaattccccgcctccgcgctgccctgtcccccgcagaggaggcaaggaggggagggaggggcgggcgtaccagtgcgacggcggagacgagggcgtaggcggcggcgagggagaagaaggccgcgtcctggcactggggcgactcgttgacgtcatcccaccagccccggagcgcgtcggctgccgaggaagaggatgcggcggtagcgaaggaggatgcgaggtccctcctcatctggccccctctgcttttctcttgtgtgccttgcctgcggtgcgcgagggaggaagaagacgcacaaaggagagaggcaacaagggaaaaggcagtgggcccacgcgtcagtgtgtgttttgggcgtgcgcggcggctggggcccggcagcagtgaggtggggagagcggtgggattcccttctctcttttttttttcagcagcggattgcgtttggcgccggcacacgtcgcccactcgaactaccaacgtccgtttctctcttttctaatctaaatacttataagagcaacttcaatagttattctaaataactcttaaatttaagaagtaaataaaaaaaattcaatgattatctaaaaagaaacagaaaaaagaaaagaa

SEQ ID NO: 105824 - DNA, 1023 bp, Zea Mays
ccaccaccgcggcggcgcgagcgtcactgccctgccctctcctcctcctgtcctactgctctaccgtcctctcccccccgcgccgctgccgcaaccaaaaccctaaaagtcgctttctatccacttgctccgccgcctccaccaccgggcgccatggcggacacagtgcagtaccgcctggagcggatgaccgacgaactggacgacctggagcgccggggcctcttcacgcgcggcgagctagctgacgtcgtccgcaaacgccgcgacttcgagtaccgcctccgccgccactccccgctccgccaggactttctcgactacatcgcctacgagctccgcctcgactccctccgcaacctccgcaagcgcgccatcatacgcgccgccgccgaagacgacgacgacgagcctcagcacgacgctcgcagcagcgacgacgagggaggccggaggaagaggaagaaggataaatccaagaagaagtggaagaagtccgtctccgacgtcgcgggcgtcctccgcgtcctcgacatctaccggatggccaccgtcaggttcaagggcgatctcgacctctggttccggtacctcgagttctgccgcgacaagcgacacggcaggatgaagcaggttctggcacaagccattcgcttccatcccaaggttcctgggctttggatctatgcagcagcatgggaattcgatcagaacctgaacgttgccgcggcacgtgcactgatgcagagcggtctcaggtcttgccctcagtcagaggatatgtggatcgagtatcttcgcatggagcttacctaccttaacaagctcaaggctcgaaaggttgctcttggagaggatgtcaagacgctgcaaaagaaagacaacgatgcgagccagtggaaagaggaaaacaaggaactgttcatgccactgaatgaacaggtcaaagatcctaaggagccaggctcggctggagatgccctggaggagaaggaagacctgttttggcgtcaagggttgtta

SEQ ID NO: 105825 - DNA, 1073 bp, Zea Mays
tcgcagaaaagctttgtgatggtcctctttcaaatgctgcaaatttgtggagcctgagatttactatggagataaattcaattgcaactgctcctggcagttcttccttgagcaaggagaacctgagctctctgcttgatctatttagcactgtactctccaagttgtctgtaactgaggctgagagactgtggcatatggccatgaagttgttttcccatgataaggtctgtttcgagaagctggtgaagtgtgcgatgctatcattaagtctggcaggtggcagtgattcaggagcatcagtttcttctgctatcgttggatggtatttgcaaagagatggtgtgaagcatgctaggaagatgtataagagattgcttgctttacctcggccaagcctcaagttcatgcaatactgcatagcgctggaggcgaaccttgcatcgctcggagacaacggcgccctcaaagatgctcggcggctatatgattcagcgctcgacctgtatccccaggaaagagaagtgtggcggagctactacgacctggagctgaagatgggaacatcggagtctgccaacgccgtgtactcgcgctctcgtaaggtgctgggtgactccactgccttgactgctccccggggctaggtcgcagcatgcaatgtattccaagatgcaatgtgattttttttgtttggatctgtgttttccaatcctctctgagtctgggtcagcaagcaattaagctgatgcatcgaaattttggctctaaatgggagacctacaatgtgctgctggggaacactgtatatcttgttcaaaaaacaagagtactgcagctgctggtggctgtctcctttgagaacacttgcctgtgtcccttttctttctttttcttttttgtttgagcagtagctgggctgttggtgatgctgttccttagtgttgaggtgctatggtgtaacagtgtcaattgcgacgtgaacaaattctgggatctcgaaccatttgttgagattttgaaagtgtactggtggtcataatttttgttgggacctcgaaccatttttttag

SEQ ID NO: 105826 - DNA, 1371 bp, Zea Mays
ctctctcctccctcctcctccatttaccacctggtggtcagtcagtcacccaccccacaccgccgccgggaacttgttcatcgagccgagaggatagatagatagatagatagatagatagatagggtaaccgatcgaatccgccaaccaaacaatggcgtccgacggcagtggcgtggtgacggtgtacggcaacaacggcgcggcgctgctggagccgccgaagcagcccaagtcgtcgactttctccgtgaaggtgggcctggcgcagatgctccgcggcggtgtgatcatggacgtggtgaccccggagcaggcccgcctcgccgaggaggccggcgcctgcgccgtgatggcgctggagcgtgtccccgccgacatccgcgcgcagggtggcgtggcgcgcatgtcggacccgggcctgatccgcgacatcaagcgcgccgtgaccatccccgtcatggccaaggcccgcatcgggcacttcgtggaggcgcagatcctggaggccgtgggcgtggactacgtggacgagagcgaggtgctgaccccggccgacgacgcccaccacatcaacaagcacaacttccgcgtgcccttcgtgtgcggctgccgcgacctcggcgaggcgctgcgcagggtccgcgagggcgccgccatgatccgcaccaagggggaggccggcacgggcaacgtcgtggaggcggtgcgccacgtgcgctccgtcgcgggcgccgtccgcgcgctccgcggcatggacgacgacgaggtgttcgcctacgccaagcgcatcgccgcgccctacgacctggtcatgcagaccaagcagctggggcggctccccgtcgtgcagttcgcggcggggggcgtggccacgcccgccgacgccgcgctcatgatgcagctcggctgcgacggcgtcttcgtcggctccggcatcttcaagagcggcgaccccgcgcgccgcgcccgcgccatcgtccaggcggtcacccactacagcgaccccaccatcctgaccgacgtcagcgcggggctcggggaggccatggtcggcatcaacctcaacgacccaaaggtggagcgatacgccgccagatccgagtgaacacttccctttcctactccacttatatttatcagtatcatctccgctccgccggctctgccaacaaatttttttgcactgcatgcagtagcttaagtaataatggaatgagtgaatgaaatggtgacaaacgaagccagaagctctgtaattttatgccgttcttattaagtttgcataggctcccctggattatgaatcagtcactcagcctgcttatgacttacgaatcacatgcttttcatctggtcggattgtatttc

SEQ ID NO: 105827 - DNA, 1438 bp, Zea Mays
gttttttctgttactctagataatgcatcagctaattctaatgctatgaacatccttgcaccaagattctctggttatgttggttctctattcttgcatcagagatgtgcatgtcacataattaatctcattgtaaaatctggtttgaagcgtttgaaaccttatgttgaagatttcagaactgcaatatcatttttaaatgcttccaaccaacgcatcgctgcatataaatcttattgtgttgctatggatgttcgtcctcgcaaatttggtttggatatggatgttagatggaactctacatatctaatgctaaaacatgtcattccatataagaccacattctctgtttttatccaaacacactatcagcaggtgatgggtcaaacattacttacacaagcacattgggagattggtgagaaaattctaacctttcttgagttgttttatgattcaactgttgctctatccggaatttattatccaacctctcctcttatgttgcaccatattattgagattgcttctcatctgagcaactatgagaacgatatattgcttagagatattgttgtgcctatgaaatctaaatttcttaagtactagaaaaacattcctatactatattcatttgcttttgtcttagaccctagagctaaactcagaggtttcaacagtgcactccagtttctttctaatgtgacttttactgattactctgattattacaataacgtgcgtactgagttatctaatgtttttgccaagtatgatagcaaatttggtggcaccaggttgcaaagggcaactcaatccgtaagtactagcaaagtgaaatctgcttggggtaagatttatggtacttcatcttctaacactggaactactactacttctgttggccatacttcttcgccttctaatttttgtccagtctctgagttgtccatgtatgttggcagtgatccaattactatgtttgatgatgattttgatattcttagttggtggcgtgagcataagaatacataccctattctctccattttagctaaggatgttctaactgtacctggatgttgtaactgtacctgtttcaactattagctctgaatctgtttttagtcttactggcagggtgcttgaggagaggagacgttgtctaactagtgagatggtggagaccttgacatgtttgaaggattggcagatgggcgacgatcgagaacagcacaacttggagaatccagagcttcaacaagccttcgagaatcagtatctagatggtgatggtgatgataatcaagatgctcaacctgttattgttgcctagtgtgcatgtggccgtgtaggattttatcattgtatctgtatttcgtatgtatggctgtattactcaactaaactctcgaaacattgaactgattactatttt

SEQ ID NO: 105828 - DNA, 367 bp, Zea Mays
ggcgggaacatgaggccgacattggggtcatcgaggaggaacggagcctggcacagcgccaccacctgcgcacgggaacgggatgaagtgccgtctgggtaagaaagaagagaaggcgtcgtcgagcaaccaactccatgaggatgcgatgcggatgagatggcgaccctgacctggcgcgggaaggtgagcggcttctggccgagggcgtgcgggttgccgacgttggtgaagatgatcttcttgccctccttctggagctgggaggcgcggaggtacagctccccgcgcaccgcgtactgcgccttcttgactttctcgttcagctcctcgtagtccatcggcctcctcctcgccatcttgcctc

SEQ ID NO: 105829 - DNA, 622 bp, Zea Mays
tgattggaaggggcacagcttatgcatttcaaagagaattggattctgctatttctgatttcaccaaggctatacaatctagcccatcggctggggaggcatggaagcgacggggacaagctcgtgctgctttaggagagttcaaggaggccattgaagacttgactaaagcattggaatttgaaccaaattctcctgatattttacatgaaagaggaattgtgaacttcaaattcaaggactacaactctgcactcgaagatctttcgacatgtgtgaagcatgacaagaagaacagctccgctcacacttatttaggtcttactctttcagcacttggagagtacaagcgtgctgaagatgagcatgtcattggtttaaagtatgacgagagtttccttgactgttgggctcaccttgcccagctttatcttgatttggcatatccagagaagttgttgaattgccttgagaaagctattcaaattgattcaaggttcgcaaaagcttaccatctgcgtggaattctctaccatggaatgggtcgacataggagtgctattaaagaattatcggttgctttgacatatgaaagttcaagtatagagtgcctatacttacg

SEQ ID NO: 105830 - DNA, 1649 bp, Zea Mays
agtgggcgccttaacaagcaagacttcaaattcacaaagcatcaaacaactcttcttctagctgcagattcaattgggaagaagattcaatacaattgtcatggcttcttaccaaatcaacgtcagtaccgcatggccgggttggctgctattgagattgctcagaaagtgtccaaggcttggcgctttctaaggaatccgaagaacatcgcaaagttagttaggaaaagggataaacttaacatgagccagaacaggggaggttattgtagcactagcactttggctggatctccaacttccagcccaaatgaagacagggtctcctccgggatctctctttcctggcaggatgtctataacattgctgttaagtggagacaaatttctgaaccttgtgatccagttgtttgggtcaataagctaagtgaagagttcaattctggatttggttctcataccccaatgcttcttggtcaagcaaaagttattcgctactatccatattaccaaagagtcttggaaactgcgaagactataatgcttgacttgaagtatgtcaataatgcagaggaccgtgcaatttttcttacagatattgacaagttgaaaaagatagaaattgcatcgtcatgctcagatttgtaccatgtagttggtgagacctactgggttgctacaagatgtgatagtatggcgtttcgggggaggcgccttgaagggacaagaattaccactcaaaacataggcaagacaggatttgactttgcaattcgaacaccttgcacgccatcgagatgggaggagtatgatgaagaaatgactgcagcctgggaggctatttgtgaggcatattgtaatgacacaaaccccacacgagaccctggtgtgcttgatgctgtgaaggacgcgatattgcggatgacatattactggtacaattttatgcctctttcgagaggctcggctgttgttggctacgtagtgttgctcggtttattcctggcagcaaacatggatattactgccagcattccacccggtgtccaagttgattgggaggcgatcctgtctccagatcccggcacatttgttgacgccgtgaagccctggttgtacccatccacaaaaataagcaggtgcctgaaagattacacggacgtcagctgcgcgttcagcacgacaggttcggttgtagcggccctaacatctgttgacccataggttatttgtccaagtgttataggttgctccagttgttagtgtatttgtttcaaaatacctcagctttgcttagcttgtcagaatttctcagtttgcaaaaagtttgtatgtttctgtgttgtatacagatatgcagtaatgttgtaacttgaaaaaaaataagatttattttcattggaacaagttttttttttttttttgtaataaacagttaaacaccaataagttttgcagttacttcttggatgtttgtatgccatggtatatggtcttgaacacttagcctagaggatttccctcttatttatagagctattactcaaggccttgtggtatttgacatttatcagagtccataagcacgaatccactactttcaccatcatcattgactgacttcgagctctacacatacgcaagtcaag

SEQ ID NO: 105831 - DNA, 213 bp, Zea Mays
atgatagcttacatcacagttgtgagaagaaggaacaatatcctcaagcttctttccagtgaaaacgtcaatgccaacaaagtggcacttggcatgcccatgcttcccagtcttggaagtggagacctcaacaacctaaaacaagaacgtatactaaattgtttagacatgttcagacaacatgttaggtgcagaaccaccacatgggaatag

SEQ ID NO: 105832 - DNA, 933 bp, Zea Mays
atgtataggagcgctgctgggtctagggccagcgggcctagcacccacctgtcccccgcagattcgctcgggaatccgtccaagactccaagtagccaaccatatcgcaactgctgctccccgccggcagcgtcagcggcgacttctccctccgctcccctctctctttcgctcgccttatcgcccttctctcgcccgcgacggggaggtccgccgttccgatcactaccccttcgcgccgctgacctcagaggaggaggcatgaggctgctgccgagggaggcggacaaattggcgctgcacaatgccggcttcctcgcgcagaagcgccttgcccggggcctccgcctcaactacaccgaggccgtcgcgctcatcgccgcgcagattcttgagcttattcgcgatggagacaaaaccgtgacagacctcatggacctggggaaacaactattgggcaggtgggtttgcctacttagtaaatttcttgctgtgctttcctgcatcattacatatttacgtttatctataatgcgtctaccatcaagacctggcattgcttcactcatcagatgataataggagactttatcttcaattgccttcaaattacttttaatgtctgtcaaaaaatttaacagcacctcacttctgaatggatacattaaaatgcctaaatgcatcaagaatagcttctcagatatgtgcttgactgcttgtttcaagtactcaggttattatgtgagattttatgggtgggatgggggatgagatgtagaagacggcctgtgttatttcatacatgcacacatcattgttttgagatgaaatatatttgagatatgcctttttatatgtcacagtacaatgcttgcgacttcatctcaatgaatgtgtcagttgatcatctacctaaacaaaaaaaggaaaaaa

SEQ ID NO: 105833 - DNA, 1123 bp, Zea Mays
atgtataggagcgctgctgggtctagggccagcgggcctagcacccacctgtcccccgcagattcgctcgggaatccgtccaagactccaagtagccaaccatatcgcaactgctgctccccgccggcagcgtcagcggcgacttctccctccgctcccctctctctttcgctcgccttatcgcccttctctcgcccgcgacggggaggtccgccgttccgatcactaccccttcgcgccgctgacctcagaggaggaggcatgaggctgctgccgagggaggcggacaaattggcgctgcacaatgccggcttcctcgcgcagaagcgccttgcccggggcctccgcctcaactacaccgaggccgtcgcgctcatcgccgcgcagattcttgagcttattcgcgatggagacaaaaccgtgacagacctcatggacctggggaaacaactattgggcaggagacaagttcttccagctgttccataccttttacatactgtgcaggttgaaggaacatttgtggatggaacaaaactagttactgtacacgaccctatctccttggatgacggaaatttggagctagcattgcatggttcttttctcccaggtcattgattctaatgagcatgtctggttcaattatgttcatgatttttctaatttatatggttacagacttgattgatgtggttatggagtctgtggagatctgcctttttaagaatgtttttcaagggcagttatgtccctgaaagtctttcatgtattgtgctattcagtaagagttcattaatggaaaacaacaacaacaacaaagcctttattaatgaaaaaaagtaaataaaaaaggactgtacacaatatcatttaaatgttgcagtgccttcacctgaaaagttttccagcgatgacgttgaagaatatcctggtgaaatacattacagttctagtcgcatagtcctaaaccttcatcgcagggctttatctctgaaggttgttaacaaggcagacagacccattcaggtgagcacgcctgggtatttttgtttggaccctggtgcaaacctgcaaagactttgtttcctacttatccttttgctgccaaaataaaaaaaaa

SEQ ID NO: 105834 - DNA, 1273 bp, Zea Mays
atgtataggagcgctgctgggtctagggccagcgggcctagcacccacctgtcccccgcagattcgctcgggaatccgtccaagactccaagtagccaaccatatcgcaactgctgctccccgccggcagcgtcagcggcgacttctccctccgctcccctctctctttcgctcgccttatcgcccttctctcgcccgcgacggggaggtccgccgttccgatcactaccccttcgcgccgctgacctcagaggaggaggcatgaggctgctgccgagggaggcggacaaattggcgctgcacaatgccggcttcctcgcgcagaagcgccttgcccggggcctccgcctcaactacaccgaggccgtcgcgctcatcgccgcgcagattcttgagcttattcgcgatggagacaaaaccgtgacagacctcatggacctggggaaacaactattgggcaggagacaagttcttccagctgttccataccttttacatactgtgcaggtgttctttgctcatagtatataatacttactactttcatccatatgcatccagatttcctatggaagcattacatgggtcagagagtagtgggaaactatgtgtgagatttttgcaattttttgtatcaatttttaccatgtgatctaggttgaaggaacatttgtggatggaacaaaactagttactgtacacgaccctatctccttggatgacggaaatttggagctagcattgcatggttcttttctcccaggtcattgattctaatgagcatgtctggttcaattatgttcatgatttttctaatttatatggttacagacttgattgatgtggttatggagtctgtggagatctgcctttttaagaatgtttttcaagggcagttatgtccctgaaagtctttcatgtattgtgctattcagtaagagttcattaatggaaaacaacaacaacaacaaagcctttattaatgaaaaaaagtaaataaaaaaggactgtacacaatatcatttaaatgttgcagtgccttcacctgaaaagttttccagcgatgacgttgaagaatatcctggtgaaatacattacagttctagtcgcatagtcctaaaccttcatcgcagggctttatctctgaaggttgttaacaaggcagacagacccattcaggtgagcacgcctgggtatttttgtttggaccctggtgcaaacctgcaaagactttgtttcctacttatccttttgctgccaaaataaaaaaaaa

SEQ ID NO: 105835 - DNA, 3107 bp, Zea Mays
atgtataggagcgctgctgggtctagggccagcgggcctagcacccacctgtcccccgcagattcgctcgggaatccgtccaagactccaagtagccaaccatatcgcaactgctgctccccgccggcagcgtcagcggcgacttctccctccgctcccctctctctttcgctcgccttatcgcccttctctcgcccgcgacggggaggtccgccgttccgatcactaccccttcgcgccgctgacctcagaggaggaggcatgaggctgctgccgagggaggcggacaaattggcgctgcacaatgccggcttcctcgcgcagaagcgccttgcccggggcctccgcctcaactacaccgaggccgtcgcgctcatcgccgcgcagattcttgagcttattcgcgatggagacaaaaccgtgacagacctcatggacctggggaaacaactattgggcaggagacaagttcttccagctgttccataccttttacatactgtgcaggttgaaggaacatttgtggatggaacaaaactagttactgtacacgaccctatctccttggatgacggaaatttggagctagcattgcatggttcttttctcccagtgccttcacctgaaaagttttccagcgatgacgttgaagaatatcctggtgaaatacattacagttctagtcgcatagtcctaaaccttcatcgcagggctttatctctgaaggttgttaacaaggcagacagacccattcagattggaagccattaccattttatagagaccaatccttatctggtttttgataggaaaagggcctatggcatgaggttgaacatacttgctggaacagctgttcggtttgagccaggggatgcaaaaagtgttatacttgtaagcatcggaggtcataaggtaatcaaaggtggaaatggcattgctgatggtcctattgacagttcaagtcttaatgtggtgatgcagaaggttaatgcaaatagttttggacatgaagattatccagatgcaagggaaggtattattggtgatggttcatttgactgtactgttgatcatgagaagtatgcgagcatttatggacctaccaccggtgataagattaggcttggtgataccaatctttatgctgagattgaaaaggacttcgccttttatggtgatgagtgcatatttggcggtggaaaagttctgcgtgatggcatgggacaagcttcagggtacccagaatctttctgcctagatacagttataacaaatgctgttgtgattgattataccggaatatacaaggctgatatcggtataaaaggtggacttatagttgctattggaaaggctggaaaccctgatgtcatggatggtgtccataacaacatgattgttggggtcaatactgaagttattgcatctgaaggcatgattgtcactgctggtggcatagattgccatgtccactttatatgtcctcagttggcagaagaggcaattgcaagcggcatcacgacattggtgggtggtggaaccggaccagcacatggaacttgtgccacaacttgcactccagcaccatctcaattgaaattaatgttgcagtccactgatcaattgccaattaacatgggattcacaggcaagggaaatacttcaaaacctgaaggattggctgaaatcattaaagctggagcaatgggtttgaagctgcatgaagattggggaactaccccatccgcgatagataattgtttatctgttgcagaagattttgatattcaggtcaatatacacacagataccttaaatgaatcaggctgcgtggagcatacaatcgcagcttttaaaggtagagccatacatacatatcacagtgaaggtgctggtggcggtcatgctccagacatcatcaaagtttgtggggtaaaaaatgtgttgccctcttcaacaaatcctacccggccatttacttcgaacactgtagacgagcaccttgatatgctgatggtttgtcaccaccttgataaaaacattccagaagatgtagcatttgccgagtctagaattcgagctgaaacaattgctgctgaggacatattgcatgacatgggagccataagtattatatcatctgattcacaggccatggggcgcgttggagaggtgataacacgaacatggcaaactgcaaacaagatgaaggtacaaagaggtagtttacctggatctggtgacgctaatgccgccccggacagtgacaacctccgtataagaagatacatagcaaaatacacaataaatccagcaatagtgaatgggttttcagactttgttggttctgttgaggtgggaaaattagctgaccttgttctttggaaaccatctttcttcggcgctaaaccagaactggttgtaaagggaggtgcaattgcatgggctaacatgggtgatcccaatgctagcattccaacacctgaacctgttgtgatgcgacctatgtttggtgcatttggaaaggctggaagttccaattcaattgcatttgtgagcaaggctgctaaagaagctggtgtcgcaacggagtacagactagaaaagagggtggaagctgtaggccgtgttcgaggcctgacaaagcttgacatgaagctcaacgacgccctcccgaaaatagaggtcgacccggagacctacacagtgaccgctgatggagaggttttgacatgccaaccagcacccacactgccactgtctcggaattacttcctgttctagaaagccactgcatcagcaaaccaccaccactactcacgccctatgcatgcacatcgtcatatacgagtataaaagatgcaagttcaattctgtacgctaccctctttttaataatatggccaatgagcaaattctttggcagtagaacacttttgccctctgctatctgcagatgctcgcatatttgtgcggaataaaacttggaacggtgtagatttctgttccctgctccaaatgtggctatacatactgttgtatttgccgagttgttatcttctcccatgttgtcaaggttgccacgtatattattcagagtcttc

SEQ ID NO: 105836 - DNA, 1702 bp, Zea Mays
cacctctgcctcgcaccagtaccacaacgccacgacacgccggcgaggtggacgagcggcggcgatggcgggcggcgaccgggagcgagacgcggacgaggagacgaggaatcagatgatgcagaaccttttcggggaccagtcggaggacgaggacgatgcggacgacgacgacgtcgccgagatggtcgatgaggacgacggccaccagccgcagtcgcccccgcagtcgcccccgcagcgccaccaggagctggacgacgatgcctacgacgatgaggaggaggacgcccgcagccacgcgcccgcccgcgcaagcggataccactccgaggaagtggatggtgaggcagagaatggaggggaaggggaaggcgaaagtgaagggcaagttgtaatcgaagaggaaagtgaaggtgaagctcatggtgccgatcttgatcaaggagaaagtgatggggacaaagtccagagctccccagaaagagaactcgatgaccagaggatggaacctgatgcaagaggaatggacagtgaagatgaaggctaccagcagaggacagtatctggcagaagaaggggagttattgcctccgaatcggagggatctgaagatagttactatgctgctggagctcaagaagacgaggaacctcgccaaacaaggaaacaaagctctccgttggaggaagaaagagatcatgaagtagttcgtgatgtgtttggtgatagcgatgaagatgaaccagctccatatcgtgttcgccatgaaatcgatgaagattctcataggtctcacatggaggatgaaggccattatgagaaggacatgcaaccagatgacgttgtggctgacgaagatatgcgatatgaatctgatgataatcgtgaactgaaaccaaaagagaaaccagtcggtccaccactagacttggtggttccatttaagcaaccaccagctcgacctgacaaaatgaatgtgatcaaggtatcaaacattatggggattgaccctaaaccctttgatccaaaaacatatgtggaagaagatgtttttgttacagatgaatctgggactaagaaaaggatacggctagaggacaatattgtgcggtggagaaccattaggaatgcagatggcactacatcttgtgaaagcaatgcacgctttgtaaaatggaaggatgggactatgcagcttctgattggcaatgaggttcttgatatatctgtacatgaggcgcatcatgaccagtcccatctgtttttgaggcatgggaagggaattctacaatcacaaggaaggcttttgcacaaaatgcgatttatgccatcctccctgtcttcaaagtcgcatcgcttattaactgctctggttgattctcagaataagaaaactgttaagatgcaaaaatggtttgagactaaggatcctgagaaagcgaaaatggaaaaagaaagggttagcaaatcactattacttcattatctggtgtatgtaacacaggatgtgcatgtcttgcttttgtccaatatagctgcttgaactaagatccctagttcaggtgtgcattacttgtgttgtgcttttcctgttcatctgtttctcctgttggttgtcctatacatagttccttacatgtgtagtatttccttgagaaggtttgaactaccccgatgtataaacttattgtttttagtt

SEQ ID NO: 105837 - DNA, 2411 bp, Zea Mays
cacctctgcctcgcaccagtaccacaacgccacgacacgccggcgaggtggacgagcggcggcgatggcgggcggcgaccgggagcgagacgcggacgaggagacgaggaatcagatgatgcagaaccttttcggggaccagtcggaggacgaggacgatgcggacgacgacgacgtcgccgagatggtcgatgaggacgacggccaccagccgcagtcgcccccgcagtcgcccccgcagcgccaccaggagctggacgacgatgcctacgacgatgaggaggaggacgcccgcagccacgcgcccgcccgcgcaagcggataccactccgaggaagtggatggtgaggcagagaatggaggggaaggggaaggcgaaagtgaagggcaagttgtaatcgaagaggaaagtgaaggtgaagctcatggtgccgatcttgatcaaggagaaagtgatggggacaaagtccagagctccccagaaagagaactcgatgaccagaggatggaacctgatgcaagaggaatggacagtgaagatgaaggctaccagcagaggacagtatctggcagaagaaggggagttattgcctccgaatcggagggatctgaagatagttactatgctgctggagctcaagaagacgaggaacctcgccaaacaaggaaacaaagctctccgttggaggaagaaagagatcatgaagtagttcgtgatgtgtttggtgatagcgatgaagatgaaccagctccatatcgtgttcgccatgaaatcgatgaagattctcataggtctcacatggaggatgaaggccattatgagaaggacatgcaaccagatgacgttgtggctgacgaagatatgcgatatgaatctgatgataatcgtgaactgaaaccaaaagagaaaccagtcggtccaccactagacttggtggttccatttaagcaaccaccagctcgacctgacaaaatgaatgtgatcaaggtatcaaacattatggggattgaccctaaaccctttgatccaaaaacatatgtggaagaagatgtttttgttacagatgaatctgggactaagaaaaggatacggctagaggacaatattgtgcggtggagaaccattaggaatgcagatggcactacatcttgtgaaagcaatgcacgctttgtaaaatggaaggatgggactatgcagcttctgattggcaatgaggttcttgatatatctgtacatgaggcgcatcatgaccagtcccatctgtttttgaggcatgggaagggaattctacaatcacaaggaaggcttttgcacaaaatgcgatttatgccatcctccctgtcttcaaagtcgcatcgcttattaactgctctggttgattctcagaataagaaaactgttaagatgcaaaaatggtttgagactaaggatcctgagaaagcgaaaatggaaaaagaaagggttttgggccaaaatattcgagcccattcaatccttcaacgcaaaagagaaaaagtgaaccgcaagtacacacagcctgcccgtccaaggcggcagctttctccagggttcttggaagacgctctagatgaggatgatgagcctggctatgattctcggcgaatgccaggccgtaggcgttttgaggatgaattggaggctgaagcactagctgagaggcgtatcattaacgcgaagaagtcaaatatgagcagaaatgttccccacaaaccaccgtaccctcctgcccgtccaccgagacgtcaagcggatgaatactcggggagtgagagggaggagtcagagtacgaaacggatggcgaggatattgaacattcactgcctcgtggaagaagggaggacgagctggatgaggaggaagaatacgaggaagatgttgaagaagaagaagcgcctctgtcggatgaagaaatggaggcaccgaaacgtaagagagaatcagggggtggtgggcaaaggcgcgaggagctggtgtctgaggaggacgacgaggaccacgacgattctccgccaaggaagcagccggctgtttcgcatcgtagaaaggctgtcgtgtttgatgacagcgacgaggactaaaatttgtaaaaccgtatgacgacctgacatgatacgcttgctttttctccccatttgtttaagagaatgattagttatttttcgtcatgctggtgtaatatggttgcaattctacctacagaggtgagattgtacatgctttaatgatgcgtgggctacagtgaaaggaaacgcaagcatgaaacgatttttttttctttttggttagaaaggaacagcgaaacatgaagaaatcgataattggattggagcacgttcataatagaaccacaataacgtactggaaataaaaaaaaaaactgaatgctgg

SEQ ID NO: 105838 - DNA, 1374 bp, Zea Mays
ttttctttttcaaatttagcttttgcttaataaaatttcattttcttagaggtctcacatggaggatgaaggccattatgagaaggacatgcaaccagatgacgttgtggctgacgaagatatgcgatatgaatctgatgataatcgtgaactgaaaccaaaagagaaaccagtcggtccaccactagacttggtggttccatttaagcaaccaccagctcgacctgacaaaatgaatgtgatcaaggtatcaaacattatggggattgaccctaaaccctttgatccaaaaacatatgtggaagaagatgtttttgttacagatgaatctgggactaagaaaaggatacggctagaggacaatattgtgcggtggagaaccattaggaatgcagatggcactacatcttgtgaaagcaatgcacgctttgtaaaatggaaggatgggactatgcagcttctgattggcaatgaggttcttgatatatctgtacatgaggcgcatcatgaccagtcccatctgtttttgaggcatgggaagggaattctacaatcacaaggaaggcttttgcacaaaatgcgatttatgccatcctccctgtcttcaaagtcgcatcgcttattaactgctctggttgattctcagaataagaaaactgttaagatgcaaaaatggtttgagactaaggatcctgagaaagcgaaaatggaaaaagaaagggttttgggccaaaatattcgagcccattcaatccttcaacgcaaaagagaaaaagtgaaccgcaagtacacacagcctgcccgtccaaggcggcagctttctccagggttcttggaagacgctctagatgaggatgatgagcctggctatgattctcggcgaatgccaggccgtaggcgttttgaggatgaattggaggctgaagcactagctgagaggcgtatcattaacgcgaagaagtcaaatatgagcagaaatgttccccacaaaccaccgtaccctcctgcccgtccaccgagacgtcaagcggatgaatactcggggagtgagagggaggagtcagagtacgaaacggatggcgaggatattgaacattcactgcctcgtggaagaagggaggacgagctggatgaggaggaagaatacgaggaagatgttgaagaagaagaagcgcctctgtcggatgaagaaatggaggcaccgaaacgtaagagagaatcagggggtggtgggcaaaggcgcgaggagctggtgtctgaggaggacgacgaggaccacgacgattctccgccaaggaagcagccggctgtttcgcatcgtagaaaggctgtcgtgtttgatgacagcgacgaggactaaaatttgtaaaaccg

SEQ ID NO: 105839 - DNA, 1594 bp, Zea Mays
gttcgacaacagcctggccacccacaaacacacactccttcgcctcgcgccggccgtcgtcgcctccctccaccgaacgatccctcctcctcctcctcctcctcctcctcgcatcccaccccaccccaccttctccttaaagctacctgcctacccggcggttgccgccgccgcaatcgatcgaccggaagagaaagagcagctagctagctagcagatcggagcacggcaacaaggcgatggggcgcggcaaggtacagctgaagcggatagagaacaagataaaccggcaggtgaccttctccaagcgccggaacggcctgctcaagaaggcgcacgagatctccgtcctctgcgatgccgaggtcgccgtcatcgtcttctcccccaagggcaagctctacgagtacgccaccgactcccgcatggacaaaattcttgaacgctatgagcgatattcctatgctgaaaaggctcttatttcagctgaatctgaaagtgagggaaattggtgccacgaatacaggaaactgaaggccaaaattgagaccatacaaaaatgccacaagcacctgatgggagaggatctagagtctttgaatcccaaagagctccagcaactagagcagcagctggagagctcactgaagcacatcagatcaaggaagagccaccttatggccgagtctatttctgagctacagaagaaggagaggtcactgcaggaggagaacaaggctctgcagaaggaacttgcggagaggcagaaggccgtcgcgagccggcagcagcaggtgcagtgggaccagcagacacatgcccaggcccagacaagctcatcatcgtcctccttcatgatgaggcaggatcagcagggattgccgcctccacacaacatctgcttcccgccgttgacaatgggagatagaggtgaagagctggctgcggcggcgcagcagcagccactgccggggcaggcgcaaccgcagctccgcatcgcaggtctgccaccatggatgctgagccacctcaatgcataaggagagggtcgatggatcatgacgtacgcgtaccatatggttgctgtgcctgcccccatcgatcgcgagcaatggcacgctcatgcaagtgatcattgctccctgttggttaaaccctagcctatgttcatggcgtcagcaactaagctaaactattgttatgtttgcaagaaagggtaaacccgctagctgtgtaatcttgtccagctaccatgtatgcttgttactgcccagttacccttgaaatctaggggcgcttttggtgagagggtgcagtttactttaaacatggttcgtgacttgctgtaaatagtagtattaatcgatttgggcatctagtaagtaaattaagggtgtgtttgatttggcttttactctctaaaagttaaaagctaaattaaagagctggatctagaaaatagacttttctaaaagccgactttgtgatggtgcaaaattgaaagcgtcttagcttttggctaaagagttgtttggtttgactcttttgtcctctaaaaaccaaaagtcaaaccaaagagctagatctaaaaaca

SEQ ID NO: 105840 - DNA, 918 bp, Zea Mays
atggggcgcggcaaggtacagctgaagcggatagagaacaagataaaccggcaggtgaccttctccaagcgccggaacggcctgctcaagaaggcgcacgagatctccgtcctctgcgatgccgaggtcgccgtcatcgtcttctcccccaagggcaagctctacgagtacgccaccgactcccgcatggacaaaattcttgaacgctatgagcgatattcctatgctgaaaaggctcttatttcagctgaatctgaaagtgagtcatcaaaatttgaagttaaatgtcttccactttctgtgataactataactctttatgagactgctaatataagtcgtcctcaaaataattggctatgtccactggctccatgtatgggaaattggtgccacgaatacaggaaactgaaggccaaaattgagaccatacaaaaatgccacaagcacctgatgggagaggatctagagtctttgaatcccaaagagctccagcaactagagcagcagctggagagctcactgaagcacatcagatcaaggaagagccaccttatggccgagtctatttctgagctacagaagaaggagaggtcactgcaggaggagaacaaggctctgcagaaggaacttgcggagaggcagaaggccgtcgcgagccggcagcagcaggtgcagtgggaccagcagacacatgcccaggcccagacaagctcatcatcgtcctccttcatgatgaggcaggatcagcagggattgccgcctccacacaacatctgcttcccgccgttgacaatgggagatagaggtgaagagctggctgcggcggcgcagcagcagccactgccggggcaggcgcaaccgcagctccgcatcgcaggtctgccaccatggatgctgagccacctcaatgcataa

SEQ ID NO: 105841 - DNA, 1723 bp, Zea Mays
cgcactcataacctccgttaaatccacaaaacaaattgcacttagaataacgcaacatcaatatttaaaagtgagaaatcaaagctcctcgtctttgcagtcgtctagcgccaagaagcaaggataacgttctagctttgggacataggccgttgaagatatgatcgatcagacggggcctagatctaatctagctagctagcaagtgaccatatcttatcctttgtagccagtacccaccatgccgccgccatgcgtaatgtggcgtcgacgtcacaatatatagggtagcccaccagctagcctccggtcgtggcacgccggccggccggccattgttcgttggcagcgagagttggagcgacgggcaagccaatccagcatgggcggcggcggcggcgtgcatcggcgagcggcggcgctgctcttcgtggtggtgctagccgcggtggatcaggccggcaaaagcgtctgcgaggcgcagctccggcgcgggtactacgccggcgtgtgccccgacgtggagtccatcgtccgcggcgtggtggccaggaaggtccagcagacggcagccacagtcggcgccaccgtgcgcctcttcttccacgactgcttcgtcgagggctgcgacgcgtcggtgatggtggcgtcgacggcgaacaacacggcggagaaggaccacgtcatcaaccagtccctggccggcgatggcttcgacacggtgatcagagccagggcggccgtggacgccgtgccggggtgccgcggcaaggtgtcctgcgccgacgtgctcgccatggccaccagggacgccatcgcgctggccggcgggccgtcgtacgctgtggagcttggtcggctggacgggctgaggtcgacggccagcagcgtcaacgggaggctgccggcgcccttcttcaacctggaccagctgagccagatgttcgccgccaacgggctgtcgcaggccgacatgatcgccctctcagccgggcacacggtggggctggcacactgcggcacgttctcgggacgtctgcgggggccgtcggcgccggaccggacgctggactcggggtacgcggcgcagcttgcggcgtggtgcccggccggggtggacccgcgggtggccgtggccatggaccccgtgacgcccgtcgccttcgacaaccagttcttccgcaacctgcaggccgggaagggccttctggcgtcggaccaggtgctgcacgcggaccctaggtccaggcccaccgtcgacgcgctggcccagagcagcgtggcgttcgagcgggccttcgtggaggccatgacgaagatgggccgcgtcggcgtcaagacggcccgggaccggcagggcaacgtccgccgcgactgtgccgtgctcggctgattaattaataatacagacaggcctttcgatgtttttattcagtttgctccggactttttaacgtacgtgcgtacgcacggcggattgccacatgcatgcactgatacgtatctatacgtatcggatcgtgtcgtctactactacagctgggtacgtacgtcactggtgaattgaagtttacacgtagctagattgattgattaggtcctttggcattgggaaggaacgaaacaacctaccacactagtctcacctaatactgattctagcgcgtccgtatatctaatctaacgactttatacgcaaaagaaatgttatggatttatggcc

SEQ ID NO: 105842 - DNA, 1545 bp, Zea Mays
cagtttcagcaacgtcaaagcacacagagtttcctgctgaggagagcgagatagagctcccaaatggaagctttcctttccgctgtcctgggtgagctgacgagtcgatccataaatttcatcatcaacaagtgctcgaagccacctgcaatggctgtggaggaaagcctgcaaagggctcttcttcaggcacgggccatcatcgaggaggcagtgggacgtcgcatcacaaaccaagccatgatccagcagctgggcatgctgagggacaccatgcaccgaggctattacgcacttgatgcgttcaggtaccagcctcgctatggagaggacggaaacgttccagctgttaggcgctttatttccctatcaaaggtacactctgtgaaggatccctatttctcctgccgaactgcacagttccgtgaacaactacaggatgcgctagacaggctgagctccatgattgttgatctgaatgagttggtggtgttcttggcgagctaccctcgtctgtatcgccagccttacaacatgcatatcctactcggtaactgcatgtttggtcgccaagtggaagcagaacttgtcactgagttcctgttgcacacgcagcctcatagtctccaagaattggaggtcctgccgattgtcggtccactcagagttggcaagagtaccctcgtcgctcatgtttgcaaggatgaaagggtccgcgagtatttctcagaaattttgtggctgtacgaccatgattttacagatgacgagctagctttcaaacaaggatgtgcaatggaaaatcaaatttcgaacctgaacaaagacaagagagtgctagttgttgtagaactatctggagatctctatgaagatgcttggaataggttgtatcttgcttccaaacagagcatctgtagcgggagtaaaatcatagtcacaagccgttcagacaagattgtaaggtttgggacaacacgggctctaactcttaagcttttgtcccatgaggcatactggtatttcttcaaggtacttacgtttggaagcaatgatcccaacacgcacccaaggcttgcccaactggccatggagatagccagaaagctaaattgttcaattaatggtgcatatgtcacctcttatttgttgagggacaattttaacgtacacttttggtgtaaggttctgagctttttgagctggtgcatccagaagcatatctccaaatttggggtgcatccttctgttctttttagtcaaaatgtacctgtagagcttggtagaatggctgcgccttctgaagatttcatgctttgtgatcagtatcaccggtcttcccaagaagaggttccagagataagaatccaagatgtgatgtatggaagcatcaagagacatggaaaatttgatgtattagtatggagatctcagatacccccctactacagctatgtcaatgcttgtgtgattcaagagcgaaaaaatacaggtggaaagaggaagcgttgcatcaacgatggagccacagtctcttaattttgt

SEQ ID NO: 105843 - DNA, 1997 bp, Zea Mays
cgattcaccacattcagctcgccgtgttgcgctcactcaaccaaatccaatcccggcggagggaagcgtcgtctaaattccaaccctaggccatggcgaatgcggcttcatccgcatcgtcgccgggggcaggtccctcctcctcgccgcaggccggtggagacgggggaggggacgcgcacacgccgcggcagcggcagggccggcccccgcgcgccggctccgacccgctcctcatcgtctgcggctgcttcagcgtcgtcacggtcgccaccgcgcttctctgcgtcgccgtcaacgtcgtctccgccgtccagtccttccgcgccggctccgatatattcgggggcatattccggtgctacgcggtcgtcttctcgctattcgtcgccgtcctcgagaccgagtgggggttcatcatccgtttctggaagatatttgaatactggcctgcacggggaatgctccagatctttgttgctgtcatgacgaaggcatacccaagtattgaaaggaatgatctcaaattgctccaggagattgccagctacatgcttcttgcatgtggagctgtctatgttgtctcggggatattgtgcattggtgtgctaaaacgttctaggcagcagaaagcaatatcacgggagcaagcagccaaagacctgcaagtaagtacttggttcatacttcaaatgtgacatcatggaatcctttgattggatatttctttgttttgagctattgtcttttcggtctttaagataccctttctgtggcttgtgcctaaatttactcactgttgctcagtttcatcttcagtagttcaattattccgctttcagttactgtgtcataagattattctttttcttcagccctgtttgttttcttcccatgtatagttcaggaggtgtagctcattagaaaatagaaatataaaaatctggcttaaaaaatggtgcccctctttaacccaaaatgatcaccctgttctgcagtgttgtttatgcgtgttgaatttagaatgctatgttataattatcccgggccatattgcatcaagtataatatgtgctaacaggagaactgcatctggtttctaaaagagagtatgcacaacctgcaaaatcgataatggtgccacagaccattattattttgttgatcatagccaaccaaagtccattggatagtgtattgccaaaaccgctccacttagtttcgaggttcagggtgcagcctataaatagcacaggcatatttttgggtctgtacattgttactgccagctcatctttcctcattttctcaattcgtatggtgtttcaggagttggagaaacggagagaggaacttgaggcattgttacttgctgaacggtcggagttggtttgaaggctgaccaccgtgatctaacaatttatcttctgttgtagataaatgctttcttttttctttttctaatgatagcatactgcttggtcatggccctgagtcattcatccagaagtcacttgattgaagtgtatcttcttctttagtttctgtgagtatggatcctttgttatgtttataccaagtcaacagattctaaattgtctctactctacatattgatgtggctttgcaatcgctagattctaaacttattatctctattctacatgctgatgttgctttgcagtgacttgggcctcacatttgacgttttgcattatagtgatattttgcatcggatccacttttcttaattattaccgatacagagttgcatatgtttctgttgttaacaccatgctttttacggacagggattgcagcttccctcttggtttcagctgaattgtgggcttcttggtttcagagcattgtattgattcatcgtctggggctgtaagattgcagcatgaatttgatgtagcaccctgacttgtgtcgtccaatcctgtcgtgtacgcataaatgcattgctgaataattcacctgatttttgcact

SEQ ID NO: 105844 - DNA, 1456 bp, Zea Mays
cgattcaccacattcagctcgccgtgttgcgctcactcaaccaaatccaatcccggcggagggaagcgtcgtctaaattccaaccctaggccatggcgaatgcggcttcatccgcatcgtcgccgggggcaggtccctcctcctcgccgcaggccggtggagacgggggaggggacgcgcacacgccgcggcagcggcagggccggcccccgcgcgccggctccgacccgctcctcatcgtctgcggctgcttcagcgtcgtcacggtcgccaccgcgcttctctgcgtcgccgtcaacgtcgtctccgccgtccagtccttccgcgccggctccgatatattcgggggcatattccggtgctacgcggtcgtcttctcgctattcgtcgccgtcctcgagaccgagtgggggttcatcatccgtttctggaagatatttgaatactggcctgcacggggaatgctccagatcttgtaagtgtttttttacttctgtatgaccatatattttcttcttctaattttgtttccaaaactcagcactcaatctgtgtttatatatttgaatgcacaattgagtaaaccacttatgcttggtgctcatccagatacgggatgtgattgttattctttttttttcaagtaattcagaaaaatagatatcagatgaagttgtagatgtgacagtgaggcattgatttgtattgttcagttgtttgttttgttaaacaaaaaaattatctgcttacaatgtcaacttgctttcgccataaacctggaccaagatttgatgagcaacaacaatcatgtgctggattgtattacattcatattccttttacttttggttgctggcagtgttgctgtcatgacgaaggcatacccaagtattgaaaggaatgatctcaaattgctccaggagattgccagctacatgcttcttgcatgtggagctgtctatgttgtctcggggatattgtgcattggtgtgctaaaacgttctaggcagcagaaagcaatatcacgggagcaagcagccaaagacctgcaagagttggagaaacggagagaggaacttgaggcattgttacttgctgaacggtcggagttggtttgaaggctgaccaccgtgatctaacaatttatcttctgttgtagataaatgctttcttttttctttttctaatgatagcatactgcttggtcatggccctgagtcattcatccagaagtcacttgattgaagtgtatcttcttctttagtttctggattgcagcttccctcttggtttcagctgaattgtgggcttcttggtttcagagcattgtattgattcatcgtctggggctgtaagattgcagcatgaatttgatgtagcaccctgacttgtgtcgtccaatcctgtcgtgtacgcataaatgcattgctgaataattcacctgatttttgcactt

SEQ ID NO: 105845 - DNA, 1133 bp, Zea Mays
cgattcaccacattcagctcgccgtgttgcgctcactcaaccaaatccaatcccggcggagggaagcgtcgtctaaattccaaccctaggccatggcgaatgcggcttcatccgcatcgtcgccgggggcaggtccctcctcctcgccgcaggccggtggagacgggggaggggacgcgcacacgccgcggcagcggcagggccggcccccgcgcgccggctccgacccgctcctcatcgtctgcggctgcttcagcgtcgtcacggtcgccaccgcgcttctctgcgtcgccgtcaacgtcgtctccgccgtccagtccttccgcgccggctccgatatattcgggggcatattccggtgctacgcggtcgtcttctcgctattcgtcgccgtcctcgagaccgagtgggggttcatcatccgtttctggaagatatttgaatactggcctgcacggggaatgctccagatctttgttgctgtcatgacgaaggcatacccaagtattgaaaggaatgatctcaaattgctccaggagattgccagctacatgcttcttgcatgtggagctgtctatgttgtctcggggatattgtgcattggtgtgctaaaacgttctaggcagcagaaagcaatatcacgggagcaagcagccaaagacctgcaagagttggagaaacggagagaggaacttgaggcattgttacttgctgaacggtcggagttggtttgaaggctgaccaccgtgatctaacaatttatcttctgttgtagataaatgctttcttttttctttttctaatgatagcatactgcttggtcatggccctgagtcattcatccagaagtcacttgattgaagtgtatcttcttctttagtttctggattgcagcttccctcttggtttcagctgaattgtgggcttcttggtttcagagcattgtattgattcatcgtctggggctgtaagattgcagcatgaatttgatgtagcaccctgacttgtgtcgtccaatcctgtcgtgtacgcataaatgcattgctgaataattcacctgatttttgcacttaatgtctcttgtgatgtggtaactcagtccttgagccataattatgattatgttttcatgt

SEQ ID NO: 105846 - DNA, 1400 bp, Zea Mays
cgattcaccacattcagctcgccgtgttgcgctcactcaaccaaatccaatcccggcggagggaagcgtcgtctaaattccaaccctaggccatggcgaatgcggcttcatccgcatcgtcgccgggggcaggtccctcctcctcgccgcaggccggtggagacgggggaggggacgcgcacacgccgcggcagcggcagggccggcccccgcgcgccggctccgacccgctcctcatcgtctgcggctgcttcagcgtcgtcacggtcgccaccgcgcttctctgcgtcgccgtcaacgtcgtctccgccgtccagtccttccgcgccggctccgatatattcgggggcatattccggtgctacgcggtcgtcttctcgctattcgtcgccgtcctcgagaccgagtgggggttcatcatccgtttctggaagatatttgaatactggcctgcacggggaatgctccagatctttgttgctgtcatgacgaaggcatacccaagtattgaaaggaatgatctcaaattgctccaggagattgccagctacatgcttcttgcatgtggagctgtctatgttgtctcggggatattgtgcattggtgtgctaaaacgttctaggcagcagaaagcaatatcacgggagcaagcagccaaagacctgcaagagttggagaaacggagagaggaacttgaggcattgttacttgctgaacggtcggagttggtttgaaggctgaccaccgtgatctaacaatttatcttctgttgtagataaatgctttcttttttctttttctaatgatagcatactgcttggtcatggccctgagtcattcatccagaagtcacttgattgaagtgtatcttcttctttagtttctgtgagtatggatcctttgttatgtttataccaagtcaacagattctaaattgtctctactctacatattgatgtggctttgcaatcgctagattctaaacttattatctctattctacatgctgatgttgctttgcagtgacttgggcctcacatttgacgttttgcattatagtgatattttgcatcggatccacttttcttaattattaccgatacagagttgcatatgtttctgttgttaacaccatgctttttacggacagggattgcagcttccctcttggtttcagctgaattgtgggcttcttggtttcagagcattgtattgattcatcgtctggggctgtaagattgcagcatgaatttgatgtagcaccctgacttgtgtcgtccaatcctgtcgtgtacgcataaatgcattgctgaataattcacctgatttttgcacttaatgtctcttgtgatgtggtaactcagtccttgagccataattatgattatgttttcatgtat

SEQ ID NO: 105847 - DNA, 4901 bp, Zea Mays
aatttgggaaggactgcctactttagagagcggtacaaaaacttaactccagccgagatggagcttaatcgtgaacgccttaggttgtataataatacaccaaagcggaaagggtcaaagatagagtacataagaaaacgtagagcactgttggctgacacattgagtcaggagtccatcgccatggagtccccaacatatacccctgaggttgtacaccctacaacagatgcaattgaacctaatggatctgctcttaccccctgcgactgggttatccctgatatcgccagtaacccgttcctaccagcttcaacacagaccgaggatgccgattcactgcgtatgtctactagaccactaagacgtaaacaacatgtgccacgtggtgaaagacaagctatcttagcccgtcgaaaccggcaatttgaagcatccatttcaaggaacatggctactgtggctgaggatatcattagtgacgccgaggaaggggatgatcggacacaaccccatatgactgcaaagatcaacaacaatggtaattactatcatttttatcccccccccccttttatcctgaatgcccaggtattttatgtggcttgtattttcaccctccagttgatgacgatgacggtgtcgtatttgaagacgatgctgatgagaacgagggatacctattcgctgggcaatgtactaatttcaatctttttatgatatgatacaaatgcttatatataaatacatatatgtcttactcattgtttccaaaaaaaatatcagatgaggataccgatgaggatatagagatcgatggtagtcaagatgaatcgagtgccattgatgttcctgacccgtacgacaaggtgtatagcaacatccctgaagaaacccatatgctaaagactgttcccaactgcagttattgcaccgcgaagaagtttgagtatgagacacctggtttttgttgtcgtggtgggaaggttgagctagccccactggagacccctccccaactcaagaggttgtgggatagtgcagactctgatgctaggcactttcgtgataacattaggttttttaatggccatttctctttcacatccctatactgttgcctcgatagtatgacaactaatgtaagggattctggtatatacacgttccgagcacagggcatgatgtatcacaatatcaagtcatttggtagggatggtggggcagagcataaacaccttgagctttacttttatgatgatgatcccactctcgagcatcggtaccgtaagtgtcgcgaagagcatcaacagaaagacaaagaggttattcgacagatagtcgacatactacgtggaaacccgtactccgagcaccttaggaccatgggtcacgttgagaaccttgatgactatcgtatcgcgttgaacctagaccagacgttgaaccagaagacatataacacacctctcacttcggaggtggccgctgtctggatcgaagggagcgaagggcgaggccagttcagcaagagtgttatcctccatgggaaggacagttcaagccactgcatccgctcataccatggatgctacgatgcactatcatatccattgttcttccctagaggcgaacttggctggcacggaaatatcccaaaggttggagtatccatggacgaagtggatgcataccgtgcgacacatagggcaagtaatgcaaatgatgaagatgcggaatctcctagccatttatgtgtgtctgtacgtgactactactgctacaaattccagattcgccccggggtattcaatcctatacttcatggaaagcggctttttcagcagttcgcggtcgacacgtacataaagattgagaactctcgtttagattacatacgcaagaatcaggatcggttaagggcagacctgtaccagggcttggtggatagcatgctagatggagatattagaggagagaaggttggcaagcgaactgtgctgtcgacgtcgtttattggcggtcctcgtgacatgagacgtcggtatatggatgctatggctctggtgcggaagtttggtaaaccagacatatttcttaccatgacatgtaaccctaactgggatgagataaggagggagcttctccctgggcagacaccgcaagatcgtgcggatcttgtagtgtgtgtctttcatgcgaagctacaagagttaaagcatcggctgactaaacaggatattcttggtaaggtccgagcctacgtctatgtcgtggagtttcagaagcggggtttgccgcatgcccattttctacttataatgcagaggaagtacaagctcacatgtcctgagcagtacgaccttttgatctcagccgagatcccaagcaacaagtaccctgaactacgaaagatggttatcaagcatatgacgcatggcccgtgtgggtcgctaaaccctaactgcccatgcactaagggtcgtaaatcgtgcaagaatcattaccctcggcctttcagtgacacaaccttgcaagggaaggattcgtaccctatttatagacgtcgtgacgatgaccgtaaagaaaaggtccgagggtgcgaactggacaatagatgggttgtcccttataacccatacctccttcgtctcttcaactgccacatcaatgtcgaggcatgtgggagcatcaaggctgttaaatacctgttcaaatacatatacaaaggccatgatcgtgcgtctgttgttatgagagatgcgagcaaggcagatgatgatgttgatgagatcaagcagtatagagatgcaaggtgggtgactcctccggaagccttgtggaggatatacggctttgagcttagtcagatatctccacctgttatgcagcttcaactccatcttccaaacatgcacatggtggcgtttcacgagcggcaaatggtcgagcgagtcgtcaaccgtccaggtgttgataggtcgatgctcacatcatattttgaggcgaataggtttaataaggaggctcgtggcatcctatatcgtgacttccctgagtggtacacttggcagagtggtaagggaaaagtatggcaacggaggaaacgagatacaggtggacaagtcggtaggatagtctctgctcatccggctgagggggagcgctactatcttcgtgttctcctaaaccacgtgactggcgccgcctcctatgtggatctaaggacagttgatggtgtcaccctaccgacttttcgtgaggcagcagagagaaggggactacttgagtcggacaacacactagatgagtgtctcactgaacgtgctcttttccagatgccatcgtcgctgcgacggctttttgccacaatactggtttactgtgagccaagcgatgtggctgtactctggcagaaacacaaagattctatgtcagaggactatcaacacaagagtcagaacaaaactcatgttgagcagatggtattgattgacattaggaacatgctgcagtcaatgggaaaggacataaagacattccctctacctcctatgatcgacgcgtatgacgatgctattggtactgctcgagaggtttacgaggaggaaagtatccaaccgacagtggaagatgtggctcttaaagactctcttaacgaggaacagagggccgcctatgataagattatgtctgccgttgacaccgatcagggcggattattctttgtggatggacctggtggcaccgggaagacttatctatacagagtactgctcgcgacgctacgcaaccagggcaagattgcagtggcaacagctacatctggcgttgcggcttccataatgcctggaggaagaaccgcccattcacgcttcaagataccactcactattgacgatggcgctgtatgtagcttcacgaagcagagtggaacagcagagttgctacggaaagcatctctcattatctgggacgaggcttctatgactaagagacaagccgtggaggcactggacaatagcatgcgcgatataatgggtcgccccgcactaccatttggtggtaaaaccattgtcttcggtggagatttcagacaggtcttgcctgttgttcgtaaagggtcaagggctcaagtggtcgcgtcttcgctacgaatgtcttacctatgggagtccatgtcccacttaaagcttgttagcaacatgagagcaaaaaacgacccttggtttgcggagtttttgctgcgcgtaggcggtggaactgaggaaacaaatagtgacggcgacattcgtcttcctgatgatgtgtgtgtgccttacagtgggagtgacaacgatcttgacaacctaatagactttgctttcccaaatctcaacgaaaatatgtctgattccacctacatcacttcaagggcgatactgtcaacacggaacgactgggttgatatgataaatgttaagatgattgatcgttttcaaggggagcatatggtgtatcatagtttcgatagcgccgtggatgatccccacaactactacccacccgagttcctaaacacattgacgcctaatgggctaccacctcatgttttgaagctcaagattggatgtcctgttatattgctccggaatatagaccctgcaaatggactttgcaatggcaccaggctggtcgttcgtggcttccaaagaaatagcattgacgcagagattgtactgggtcaacacgttggaaaacggattttcctaccgcgtataccgttgtgtccctccgatgaagagatgttccctttccagttcaaaagaaagcagtttcctgtacggcttagctttgcaatgacggttaacaaagcacagggtcagactattcccaatgttggtgtatacttgcctgaacca

SEQ ID NO: 105848 - DNA, 132 bp, Zea Mays
atgctcatggatagggctgatacatcaggttttgtcagtggtggtatacattacatgaacatccatgcgtattttcattttgtgtatactatgtgcttcctcagtggtgaagttgtaaagctggagttctga

SEQ ID NO: 105849 - DNA, 3014 bp, Zea Mays
aaaataaagcccccgactcagaatggaggcggtcgtcgtcgtggccgcggccgtcgccgtcgccgtccacccgctccgcgccccgccctcgcgtccccgcctccaatgccattaaccctacgcgcacggcggctagtgtttcgttccctcgtcctcctcccacccctggccgtgacgatgccgtcctggtggaagcgctccaagtccgcgttccaccgctcgcccgtcaccccgttctcctccgcatccacgccgtcctctcccgcgcgggcgtccacctcgtgcgtccagcccggaggccgcgccgggagaagggacctcctcgcgccgcccaagctcacccgccagcgaaagctgcgccacgtcgacgacctctacgtcgcgctcggggacctccgcgtcgacgtctccgacaggtcgtcctcctcctctccgccgcagcagaggcgcctcgccaccgcctccgaggccatcgagatcccggtacccaccctcgtctccaggtccgccagcgccagggagggcggcgcgccgccgcccaggtccgcgtcctcgcccgtcctccacccgctgccgctgccctcgcccaggccaccggatccgtccggggccggggccgccgatgggtggtgcgacaggacgacgcacgcgcccagggtgacaagccagattgcacaaaagtttcctgagcacaatgaattattaccaaatggaataaaacgggctacctttagtcaccacaggaatgcattccgtgagaagttccaggataagagttcggcagaaattattaactttcagttgaacattcctgctaaaagcgctccgagcagtggcttttcgagtcctgtgtgcagccctcgaagatttagcaatgctgacttctcatctaccgtggcacctgctcaaggaccccttgcgtggtcctctccatctatccaatcgacagattttatgggagtttcatcctgtcctgaaaaatacacgggggttccagaccaaacttctttctctagcggattgagaagtcctattcttatgccaaggattaccagtgctcctccatcacctatgcactctaaattgtacccagataacaatatttcacgcattgaaggaaatgggagtgtcagctttcacccattaccgctcccccctggtgctttaagtccaatgcaaacaggttttaccactcaatctgctccaaaagttgaaatgccctcagtggctggtcagtggcaaaaaggaaaacttctaggtagcggcacatttggttgtgtgtatgaagctaccaataggcacactggagctctctgtgcaatgaaagaagttaacataattcctgatgatgctaaatctgctgagtccttgaagcaattagagcaggaagtaaagttcctaagccaatttaagcatgaaaacatagtgcagtattatggcagtgatattattgaagatcgtttttacatttacctggaatacgttcacccaggttcaattaataagtatgtcaaacaacattatggagcaatgacagaatcagttattcgcaacttcacccgccacattctaaggggtctagcatttttgcatggccaaaagattatgcatagggatatcaaaggagcaaatctgctagttgatgttcagggtgtagtcaaattggctgactttggaatggcaaagcatttaagtactgcggcccctaatctttcactgaagggaacgccatactggatggccccagagatggttcaagctacactaatgaaagatgtaggctatgatctcgctgttgacatatggagtcttggctgcaccatcatagagatgttcgatggaaagcctccttggagtgatcttgaagggccagctgcgatgtttaaggtgttacataaagacccaccaattcctgaaaatttgtccaatgagggcaaagaatttttacagtgctgtttcaagaggactcctgcagagaggccaaccgcaagcgagctgttggaccatccattcatccgcaattcaagtcactacaacaaacatggttccatacattcatttgcagggattaaagtcaatgatacaacttacagttcaagagacaactggccagcttcgaagagtgactcaaacatgaaaggaaaaaataccaatgttgaaccaagcagagctgctaggtcatccgaatcaactttccgattggctccactaacaatccaggaagctactcctaacttctcacctcggccttttgtgaacagcatgcagtttacaagcgtaaaccctcagcctagtccattgccaaggcctaacgggaaggaagttttgttctgaccgtggatgctgcatgccatgtagagtgccatttctatcaggcgcagttcggcctcaatgtgccttgcagagtcctgcgcagttaaaggatgttgggttttataagatcatctgtgtgaccacgccacattgtgactgctcatggagcactgcacatgcagcgtttgaccttaacttctaaccattttttagtaaggatacaaacatatgaattgtacagtttaccaggatttgcacgagagatccttgaaagcacaagcacggatgtaaattgtctccagaaatggttggtgtcattttttttggaagcatagaactaggactagctctatgtaaaactgaaagttcctttcagtcaacaggaattaggcgtagctctgtgttgcttttgctgctcaccaatgtaaaaatcattcttttgctgtatcactgattattcattttttggctaaattatcgaaacaggtcattcttttgctgtatcactgattattaattttttggctaaattgtcaaaaacaggtcaaattttgcacttctacagtttgtgcgaaatggttctcgtgttttaaaaaccgtgattttgtttatggaggtaaaatagtactacttctgttctcgaatatttgtcgttggctagttaatttttcaactaaaacgcgctgaataaaaagaaacga

SEQ ID NO: 105850 - DNA, 328 bp, Zea Mays
gcctaaaaatgagttatgaaatggctcttttgccccttgccttagtaaactagtaagcctgctcgttctcaacctcacgtacgctcccagcccaggagtccgctcctcccaggcacaagcaaagcagccgctcgcggagcttcccggcgaccctcccgacagtgtgctctctgctagtggctccagctccttcgccctctccttcactccatgtgctcattaatctgaaattggttggggatttgagctgggatggatcctgcttgtgtttcagaagggtaatctcctctcgcattctaaaaattgttctaatttttttggtattttc

SEQ ID NO: 105851 - DNA, 1994 bp, Zea Mays
catgcaattccatcagaggtaaattcttacagccactcagctaattgaatccttgtccgcgatccgaattccatactgttcatctcacatgtgtgtgtgtgtgtacgctacctttcatgatcaggcgaagggacgctgtagatgcttgagcagtgctaatggcggaggcggtgggttcggcgctcgtccaaggcgccgtcagccaaatcctatccaacctgatcgacgggcacgaggaggagagaggagagaagtccaaggacgacaccgagaccaacctggagcggctagagatggcgcacatcaggctgggggcagcgctggagacgtccgagaggtggcgcggggtcacggccgacaacgcgtcgctgctgcgctggcggaggaacctgaagcgcgcggcccgggagtgcgacgccatgctccacgagtgcaagcgcagggtcctggaggacgaggcgacggagcgggaggcgagtcgcggtcgcctggccttccccagacgggcggcgcgcgcggccagggcgctcgtctcctccgccctcggcctcaacaacctgcagccgagcagggccgccgtgcggaggttcgagtggtacgcggacggcgcgggcgagttcctgcggttcgtggagctcggctgctgcgcgccgcgctgccgcgtgccctccgccgccgacgctttcgtccggaacctcgccgcggggaggaagctgcagcacgtggtggagctgggggaccggtgcacgttcttcctgctgtggctgccgtttttcatcagtgatcctccggcggaggagcgcggggtcgaggtggtcctgttcttcatccagaaagacggcctggcgccccagaacagcttctacttcagcgtcaccctgcagctctcggagagcacggacgttctcggggtcgccgtcgaatgcctggacctgtacacgccgcttttcgggtctagagtcgagacggtcaggaacatgctcacgcggctgcctgcgcaggacttgtcgtgctcgtgggcgccgtttcttgattcgcgccagaaaaggcactgggagaacctccattcctgtgtctctcagtggcatcgcccagacccgtcgtgctgcaggcagcacgagcttcactgtggtagtagcagcaacacaagcacgccgccagacgtctctctgctagcgtcggtcatcggagtgcacctgcagtgccaggtcgcgttgcaggatgagggctccctgcagtacctgacagccggcctgctgtttgcgccgcacgctggctcttcacaggacctgcgtccggctgcggacgacgacagcgcatcatcagccgtggtggtgagccaccacagcagcgacgacgagcaccgtcgcgcgcacgcaggcgtcaccttggcccaggtggaagaggtcacgctgcccatggccgtcgactacttccgccggtacgcggacgcgccggtctaccggatgctgtggaaggcgaggcatggcgccgcgtacattcaggtcgcgaaggcggcgtcaggcacggagacgcagagcgcgcggcggggcggtagcagggcaagaagcgcggcgatgcgacggcggcaggaggaggaggagccgtacgtgatccctcacttcctcagcctgtgggccgcgcacgcgcccagccggctgcaaggctccatcgcgaggtggatgcggaaggagaaggagaaccggcttgcaccttcgcagatgcgcctcgagttctaggtcattttgcaaacctgtatgcactcatgcttgcatatataatcagtaaactggtcgttatgcctcttccggtcttcccctctaaaaattcttcgggtatcacaggtttactggttagaccatatattctttttatttatgaactatgcacatgctgttgattaattaacgctaatcgtggaacttagctcggtcaagaacaaaatggcaaaccccccccccccccccccccccccccccccgggaaatgaaaga

SEQ ID NO: 105852 - DNA, 1409 bp, Zea Mays
ctgagatttcgcgctccgttcacccaaaatttccccatctccgacctcccccttcctctccccctgccgctccccgcgccgagaaggagaaccccagccgccgcgcagcgcgccgcccatggcctcctcgtcggagaacgcggctgtgccgccggaggaggagccccaggccccgccgccgccggacacagagcctaccgaggcggcgcccggcgaggcggaggatgagccgcaaaccctagagcgggcgcaggagctcttcgacaggggttccaaggccatcgaggatgaggacttcgtcgacgccgtagactgtctcagccgagcgctcgagatcagggcttcacattatggagagctcgcaccggagtgtgccagcacatacttcaaatatggatgtgccctgctatacaaagctcaggaggagagtgatgttttgggaaatgttcccaagagcttgccaaatgaagactcagtgaagagtacagctactaaagatgacagtggaacctcaaaggtctctggtaccgatgcggaggatgctgcgtcatcagaaaaagttgatgctgaagaaggtcacaactcaaatggcaaaaatcaggagaatgggaatggtgaagttgagaaagatgatgacgacgtcgacgatgatgagaagatgggagatgaagaggataatgatttggatctttcttggaaaatgttggacattgctagggcaatagttgagaagagccaagataacactatggagaaagtaaaaatatattctgctcttgctgaagtggcaacggaaagagaggacatggacaactcactcagtgactatatgaaagctttatccatgttggagcatttggttgagcctgaccatcgtcgagttgtggaattgtatcctctttgtcatagttacactattttgtctgctaaagagagatattacaacctgcagtcagaattatatgacattaggatcatcaaattgacttgaatgtaattcttacgtcatatataatgactggagtctggaggtagtattattacataaataagcatctgcaacctggtcgtgccttgctctatttttcatgcctttattttatagttatttgtagcctgataaacttataatttgggttggtaaagaatgccttttttatattcaataaattagttcagttgttttggtggaatgcgtatccataacattatttacttgaacgcacatgctactttagatgatatgattgcttcccagggtcagtttgttgatcttcctttgttatttgccttaatccagtcttagaaacttccgcatttgtttggtttatgaactagtttccaagatcggagaagcaatttcatactgtgcaaaagcaatttcgctatgcaagtcacgcatacagagc

SEQ ID NO: 105853 - DNA, 1756 bp, Zea Mays
gagatttcgcgctccgttcacccaaaatttccccatctccgacctcccccttcctctccccctgccgctccccgcgccgagaaggagaaccccagccgccgcgcagcgcgccgcccatggcctcctcgtcggagaacgcggctgtgccgccggaggaggagccccaggccccgccgccgccggacacagagcctaccgaggcggcgcccggcgaggcggaggatgagccgcaaaccctagagcgggcgcaggagctcttcgacaggggttccaaggccatcgaggatgaggacttcgtcgacgccgtagactgtctcagccgagcgctcgagatcagggcttcacattatggagagctcgcaccggagtgtgccagcacatacttcaaatatggatgtgccctgctatacaaagctcaggaggagagtgatgttttgggaaatgttcccaagagcttgccaaatgaagactcagtgaagagtacagctactaaagatgacagtggaacctcaaaggtctctggtaccgatgcggaggatgctgcgtcatcagaaaaagttgatgctgaagaaggtcacaactcaaatggcaaaaatcaggagaatgggaatggtgaagttgagaaagatgatgacgacgtcgacgatgatgagaagatgggagatgaagaggataatgatttggatctttcttggaaaatgttggacattgctagggcaatagttgagaagagccaagataacactatggagaaagtaaaaatatattctgctcttgctgaagtggcaacggaaagagaggacatggacaactcactcagtgactatatgaaagctttatccatgttggagcatttggttgagcctgaccatcgtcgagttgtggaattaaacttccgcatttgtttggtttatgaactagtttccaagatcggagaagcaatttcatactgtgcaaaagcaatttcgctatgcaagtcacgcatacagagcctgaaaagttccaaggatgctttgttggctggtatagatggtgatgcatctgctgctgaagctgaaggaggctcagaaaaatctgccattgaaaaagagctagagcagcttactagcatattgcctgatcttgagaagaagcttgaggacctgtctgaagcaaacccaagcgctgacatggatgagatggtgaaggcaatcgtgtccagggtaactgatgtgatgccaaaagctgcatcttttacttcttcccagatggcaacctcaagcaatggattcgactcctcggttatgtctacggcagcgacaaccggaagctctggaagcaccgtgactgaccttggggttgtaggcagaggcgtcaaacgagctagcatcaagccgatctctgctgaacctgctgctaagaaacctgcacttgattcaccatctcaacaaggtgacagcagcatcaactctgaggttgttcctgcaacgcagactggagacgagtcagtatctaagtaaattacaatttcattagccctactgtaatgttaacttgctggaacatattagctgctatgtaaacgcttaagaagggactgctggggccatagactcatcgtgagctgaccattgaaatgttaaattgctgagatcatcatggcggtaaatcatgtctgctatatcaaatatgcttggtgagatgtgtactttctgatttttttgatgtatctgaccgtagtagcccatcacttgcctatccactgctgtggctgtgc

SEQ ID NO: 105854 - DNA, 696 bp, Zea Mays
attcattccattccccccattcgacgccagccgcggcaaccgccacacggacggccatctcaaccgccacactagctacaagcgagctttccaaatcccgcggacgggacaccaatggggctgtgcatgtcgcgcggcgagaccacgccgacgcgggcggccccgccgcccagcaaggacacggcgctggtgctgatgccgagcggcgagatgcgggagtacccgccgcacacggccacggccgcgcgggtgctgcaggacgcctccgcctccgcctccgcagactggttcctgtgcgacgcggacagggtggggttcgagggccccgtcccggcgctgggcggcgcggaggcgctgcgcgcggggcagatctacttcgtgctcccggccgccgcgcgccgccgcggcctgcggcgcgaggacgtcgcggcgctcgccgtccgggcctccgccgcgctctccgctcgccactcctgcgcgcgcggcaagcggagcaggcgctgcggcgccgtcgcgcccctcgtcttcgcgccgcctcctccgccggaggatgaggaggaggagcacgggcggtgggagacattcgtcgcggcgcgcaaggctcctccggtgcgccggcactcgcgtccgacctcacggcgatcccggagtgcgagatggcgagtgagtagcgagggctcagactggcggggatga

SEQ ID NO: 105855 - DNA, 1001 bp, Zea Mays
ccaaacaagagaggatcagcacgcttgtagacggaggaccgcattgtatcacggacgacgtgatacaaactttacaaagcaaccggcatgtgtctggttcaaccaaccgtcccatcccccatgaggccatcacccacccacgtaatctaacgcaacgacctccgtactgtaaacgacctgggtaccgtacggagagtcgaccacacatggcctagagtcctgcttgttttgttgctgatcctaaactaaaagctacttctgcaggggcaacgccccagttcaacagccatcgcctgagcagcgcaacagctgccaccaaaaccaccagcaccagtggggggggggggggggggggggggggcaaaccaaaactgagtgcgtgcgaccaaccaaaagcacaacagatccccgcagcgacgacggctcagctggtgagcgacgacagcatgccgccgccactcttggccggcaccaccacctcccagcccgggcctttcagcggtacaagaggcgaggccgcgtttgcgccgccagcgccaggcggcgggcccatcaggtcgctccggtccatcagcctctggaggtcctcgtcgctgatgtcggtctggacgatcctgtcctcctcggtctgctcgtccttgagaagcgccagcagctcaccttcctacgaccagattgggatgcgtcggaggtatcacatctaaggcgctcggcttagctctgtcttgctcgaactgtcccttgccgatcaccacgtgctccagcttcagcttcccaaaggctctcttcatcatccgcccctgcgaatgatgggatgcgtggtggtgagtaggcatgtacgtacattcactagataacccaaacaacagtcttcaactcccagatgactgccgcacctcaacggagtgtgacgtagccagcctatacacatgcactgggcgtgtttggccgatccggtggcatcggtccatggcctgcaaatccatctgagggttctggag

SEQ ID NO: 105856 - DNA, 1560 bp, Zea Mays
acgcgcacaagtccgcggccgcccgcacaccgccagccagccagccacccgcccacctctagcccctaggctcccctcccgcaaaaccctagcgctctctctctctctctgtctgccggcgcgatggaggatgctgccgagagccgcaagctcttcgtcggcgggatcccggccggggcgcaggaggcagacctgcgggcccacttcgcgcgcttcggcgaggtgcgctccgtcgtcgtcatgcgcgacagggagacgggccacggccggggcttcggcttcgtcgagtttgaggacaaggcagccgccgccgccgccgccgcgctgggcgacgcggacaggcccaggcacttcctctgcgggcgcgcggtggacgttaagagggccagggcaagagctccacgaaaccagcgcgagcagcactcccagcctcatcaggtcgaacaaggcttagaccaggggaaccaggacaatcagtaccccatggggaacggcaccgcggacagtggtgacaacgtgaactacggttcaaaaaaggtcttcgttggcggactgcaggatgacaccactgaggaggagttccgggcctactttgagacgtttggcactgtaacggatgtcgcggtgatatatgacagcgcaacgaaccggtcgagggggttcggcttcgtcacctttgattcggaggaagcagtagggaaggtgatgcggcagagctttcacgacttgaacgggaccaaggtagaagccaagattgctatccccaaggacgagcagtattaccgcaacagagggcgtggcgcacgctcctctggtgggagggtccctgctggctatgaaggctccatgtaccaaccgccatacaatgctggatatggctcctacaatggctacatgccacaacctgttcacgtgcagccctactttcctgccccctattttcctgtggcgggttatccctatgggagtggatacccaagccaagtcgtcatggcaaacgctcctgatatgatgtcaagatgggttcctccagcttatggaaattatcctcaaatgtatccatggtacattctatacagagctggttatggtggtccagccacctcttttcagcatggaattaatggtggaggagctgataacaaaaaggatcaaactaatgtagatatgcagcaagctgacaacacttctagcgttacaacgatgttggaacatatgaagctaggttcacaatgactttcaggactaatacttctacaatggtgacactggagtacaacaattgtttgggaactcgcaactgtgaagacgacttggacttagattctttggttgacaagtatatcattagaattcttccagcttacctacgattcctattcctcccgcctgtaaactagtaaaagcatgctgcaagttgttactggctcccctcccctcttgtaccaatgttaaattcttacgtcgtttaatgcatcagaatcatactgttaaaatatacttgtttgctgcatgctttgacagattgttaccagaatgatggaatcatccatctatctc

SEQ ID NO: 105857 - DNA, 1459 bp, Zea Mays
acgcgcacaagtccgcggccgcccgcacaccgccagccagccagccacccgcccacctctagcccctaggctcccctcccgcaaaaccctagcgctctctctctctctctgtctgccggcgcgatggaggatgctgccgagagccgcaagctcttcgtcggcgggatcccggccggggcgcaggaggcagacctgcgggcccacttcgcgcgcttcggcgaggtgcgctccgtcgtcgtcatgcgcgacagggagacgggccacggccggggcttcggcttcgtcgagtttgaggacaaggcagccgccgccgccgccgccgcgctgggcgacgcggacaggcccaggcacttcctctgcgggcgcgcggtggacgttaagagggccagggcaagagctccacgaaaccagcgcgagcagcactcccagcctcatcaggtcgaacaaggcttagaccaggggaaccaggacaatcagtaccccatggggaacggcaccgcggacagtggtgacaacgtgaactacggttcaaaaaaggtcttcgttggcggactgcaggatgacaccactgaggaggagttccgggcctactttgagacgtttggcactgtaacggatgtcgcggtgatatatgacagcgcaacgaaccggtcgagggggttcggcttcgtcacctttgattcggaggaagcagtagggaaggtgatgcggcagagctttcacgacttgaacgggaccaaggtagaagccaagattgctatccccaaggacgagcagtattaccgcaacagagggcgtggcgcacgctcctctggtgggagggtccctgctggctatgaaggctccatgtaccaaccgccatacaatgctggatatggctcctacaatggctacatgccacaacctgttcacgtgcagccctactttcctgccccctattttcctgtggcgggttatccctatgggagtggatacccaagccaagtcgtcatggcaaacgctcctgatatgatgtcaagatgggttcctccagcttatggaaattatcctcaaatgtatccatgatatgcagcaagctgacaacacttctagcgttacaacgatgttggaacatatgaagctaggttcacaatgactttcaggactaatacttctacaatggtgacactggagtacaacaattgtttgggaactcgcaactgtgaagacgacttggacttagattctttggttgacaagtatatcattagaattcttccagcttacctacgattcctattcctcccgcctgtaaactagtaaaagcatgctgcaagttgttactggctcccctcccctcttgtaccaatgttaaattcttacgtcgtttaatgcatcagaatcatactgttaaaatatacttgtttgctgcatgctttgacagattgttaccagaatgatggaatcatccatctatctc

SEQ ID NO: 105858 - DNA, 1796 bp, Zea Mays
cacacaggggcagagggcggtcgcgcacacctttcccttcccccctctcgttcccctctccttcccattaatatctagccgcaccttccctctctcacctcctcatcctcctccaactgtgagcgtacgttccacggccgccgccattagtgttgagagagggagagaagctacagggaccggacgcctccttccttgctgaccggcgagctttattttcaggcccctcgctcgctagggttccatcatcccgcccgctgttccttttcgtccatggatcagaacttcgggaacctcgggaccggagccgggagcagcggcgggtgcgggggctccaactccaactccaaggcggtggcggcggtgtcgtcctcgtccttcctgcagctgccgctgtcgacggcggcggcggcgtcccccgcgtactacggcgcgccgctcgcgctcctgcaccacggcaccaccgcgggcccgtcgtcgtcgcagcagcagcagcaccagtcgccgtacgccaagcacggcgccgagatgtcggcggcggaggccgacgccataaaggccaagatcgtggcgcacccgcagtactcggcgctcctcgccgcctacctcgactgccagaaagtgggcgcgccgccggacctgctggagaggctgacggccatggcggcgaagctggacgcgcgcccgccgggccgccacgggccgcgcgacccggagctggaccagttcatggaggcgtactgcaacatgctcgtcaagtaccgggaggagctgacccggccgatcgacgaggccatggagttcctcaagcgggtggaggcgcagctcgactccatcgccggcggcggctcctcctcctccgcgcgcctctcgctcgccgatggtaagtcatcagaaggggccggctcttcggaagacgacgacatggatccgagcggccgcgagaacgagccgccggagatcgacccgcgcgcggaggacaaggagctcaagtaccagctcctgaagaagtacagcgggtacctgagcagcctgaggcaggagttctccaagaagaagaagaaagggaagctgccgaaggaggccaggcagaagctcctccactggtgggagctgcactacaagtggccgtacccttcggagacggagaagatcgcgctggcagaggcgactggcctggaccagaagcagatcaacaactggttcatcaaccagcggaagcggcactggaagccgtcggaggacatgccattcgtcatgatggaaggcttccacccgcagaccgcggccgcgctgtacctggacggcggcgcgttcatggccgacggcatgacgacgtatcgcctcggttcatgaaccgccgtggacaatccaaaaccaccgggcgaccgtgtcggagtgtttctgcgtaccaggaagatgcgatgcgagggacgttgttaattatgggggggttttgctgccggtttccgcgctgatcgccaccaaccaaggcggggtgcggtcagtgatctagtggcgctcgatctaagttgtctgtggcttctgtaatgttgttgttgatttcggcttgtaatctagctaggtattgtttcgaacttgagttgaaagtctgcaagtatcctgcagtgcagtgcaggcgattaattgggcgagcatgcagtcgcttgcctgtttgtatgattgattgcatggtttggatcggtggaacatgcatggtaaggcgtggcctgtctgaatcaacaaagatggctttgtcttttacggtgaactgcagaatgaacagacgattagct

SEQ ID NO: 105859 - DNA, 288 bp, Zea Mays
ccgcgcagcctggagtccacggtctcctcgatggagcccctgcgccagtactccagcacccggtcgaccagcatcttgcggccgtggcgcacggtgtcgacgaccggccggcggccgcaggtgacctcgagcaggaaggtgccgaaggcgaagacgtcggtgagcggggacgccttgccggtcctggagagctccggcgccatgtaccccgtggtgccgaccacgagcacgttgctggccttgacgtcgcggtggacgaccacctgctcccacttctcgtggaggtag

SEQ ID NO: 105860 - DNA, 2611 bp, Zea Mays
gtgcggtgcgcctgagcgagatgctatggatttgtggggcggcggccattgctttgctccaatgatcctcagttctgtagctcggcaacaatcagatagacgtacgatcatggatccacggagcgcccctacctgggcatgccccagcgtcgccgtggcggccttctacggcaccatgggccggcggatatggctggggaacgccatgctcctcgcgagcgcggccatgacaggagtcatggtgggggtaggcggcggctccggccgccaccgccaccgccaccgcctcgcccgcctcgtcttcctcggagccaacacgctgttcctgcccgtcgtctcctacgtcgtctccacgctccgcgacagcgccaacgactacgtcaacaaagaggacggcacgaccctggcggcgctgtgccactcggtgttccacccgtgcatggtcatcacgtgggcgttcctcgtccagatggcggccaccagcgccgcctccgccgccggcagcagagaagtcgaaggccggacgaaggcggcgggcccgccctgggagctgctcgtcaaggccgtctggaccttctacctcggcgccagcatcaccaacaagcgcttcttccgcggcctcttccgcgtctcccccagcgccaaccacgggccgctcacgctcatctgctccaaggtcatgttcgcgcctttcctcctcatctgtgccaagatctggatcaagtgctactcgttccggaaggcgcggaagtccttcgcgctggggcgcaaccctggccttgttttcgggtacatggaggagctacagcgagtgagaagaagccagcggcagcgtggtgggacgacgacgacagccgtaggtgatggtgatcaggacgcggtacttcctcctcctctcctggtcatgggagaagacagcaagccggtgaagaagcggcctcgggggtacgtgttcagcgacgcatggacaatgcccactgacggcggcagcactgctggcttggtgaccctcgacagagtgtgggagctggacagcgtggctccgacgtccaaagacctatgcctgtccttcgcgttgttcaagctgctgagatgccggttcgcgaggtacgatgacgacatcgctgacgtcgtcggccgcggcggcgcaacggggcacgacgagcctttatggacgagcctgctgctgaaggacgacgatggcgatgagcaacacggcagcagggtgttcagggtgatcgctgacgagctctcgttcgtccacgactactacaactcgtccctaccgacgtcgtatgctaagtgctggctaccagccgtgagcgtgctcgtctcgctcatgagcatcggctactgcgccgtggccgcgtacttcatcgccgcgtttgcgggcgaggtgcacaggcgcggccgcgggcagatcaactgcgagttctggtgcagcggcgggccaaccgagccggtgagccggctgcggaagaaagagttcgggagcctgtacttcgacgtgctgccggagttcctgctgctggtcctggtcgtaatcgctgaggcgagggacatcgcttcctacgcctgctccaactggaccaaagtggccatcatatgccaccacgtgagacgtgaacaagaagcaagacctcgccgccgacgatggtttgctctgcttctcttgcggtgcaggtgccagaaggtcgtgagcagctgctgggaggagaagatggggcagtgctcggtactgctggcgcttcgcccaacggcggccgcgggagcgaacttccttggccgtctcagtcgtcgcgtgttccgtcacctgccagacgagaaggtgaaggtcgaggtgccagcagcggtgaaggcttgcgtcgtggacgcgctaacaagagccacgacgacggccgcgcgccaggtaggcgtgggcggcggcgcggcgtccctgcagcgaagccaggccggaaagggtttcctctgggcgtgcaacggcaggacgatgagtacagccgacgtgatgcttacatggcacatcgccacctgcgtcttcgaggtgaggcacccttgctgccgctgggaggatacagatacagagcagggttcttcttccccgcgggtagtagttccggtcgtcgagcataggagcgccgccactcatctgtcacggtactgcgcgtacctcatgacctgggccccggagcttctccctgacgaggtcgcatggaccaagagcttgtatgaagctgtcaaggaggatgctgagcgtgtcctcgacgccgcccgtgccgccagcgccgccccggccccgccgttgatgatgcctgacgatgagtaccaggatctggtggcgttgcttagcgagaggtccagtcatgtggtagtgaagaatggcgcgaggctcggaaggcagctggtggagttggtcgagggcgaggagacagcgtgggcaatcctagcagggttctgggcggagatgatcctgtacgtggcgccatccaacaatctcaaaggacacagaaaggccatcgcccgtggtggagagctcgtcactctcctctgggcgctgctcttccatgctggcatacatactaggcctgctagtggggttggtgtttaaggc

SEQ ID NO: 105861 - DNA, 1958 bp, Zea Mays
cttggtctgattcctcttcttccgcgccgcctgtccggccggcagcggcagccatggcctcgaacaggagcagcagcacggttgtgggcgagatgcagagcagattggaccgggtgcggcgccagctctcctccacctccacccgccacctcctccagggccctctcttgaagcggtccgacacgctaagaaagtggaatgagcgctgggtcatccttgatccagcaactggaaagatagaatacaaggtcaataggagtgacaaagatgttaggggagtagtcgtgttcgattcaacaagcacagtgactttgtcgcctacgaactttcatggactggcaaaatacgatggatgctgtttctatattggaactccacagaaaaaggaatactttctttgtgcagaaactcccagcgctgcaagagcatgggtatccactttacatgcgactcagttggtgctacaggctcataaggaggccgtgaattcattgggtgagaatggtcctgcaaaattgggaacagttgcaactgttgtggctgtagccaatgccactgcaattgaagcaacaaaggaggtagaagccgcaatgaagatttccctacgggcagctttgggctcaactacacataaacttaccaaaggtcaattagatgatctcacaataatgatggagacccttcgagttaaagacgacgaactacaccaattattgcaggatattcgtgcacgcgattctaccatcaatgaaattgcggataaattacaggagactgcagaagcagctgaaacagctgcttctgcagcacgttcaattgatgaagagagaagattttttacgttagaacttgaacggctgaaacaagaccacgagaaacaagttgaagcatctttgcttaggttaagggaatcggaggagaaagcaaagcttcttgttgaagagagagatcgcttgcttacagagagagattccgctcttcaagaagctcagatgtggcgctcggagctaggaaaagctagaggaaacgctgtaattctagaagcggctgttgtcagagccgaagagaaagctagggtctcagcagcagatgctgacatccgcataaaagaagccatgaaccgacttgagtctgccaccaaagaaaaggaggatctcctagcccttgtggatgctctacaatcccaaatacaaaggtctgccgtccacaattctatccgactcacttctgtttccatccagtcggaagtttctcgaaaccggatccttctagagccagcttgatgagggacatattttttcaggcaagagactagcacgatacaggtctgcgaagagagctcggaactctgctcgactgcctcgaagcacatggaggatgataacgttgacaaagcttgcgtaagcgatccggattcagtaccggttacggagaacgttgttgagttggacgacgagggagtcgacatccctacggtcggggacaccgaatgggacgatccccgttcttccgaagtgtctgatgtaagggaagtaaccacagaacccgaagaaaacagcttggatattcctgtcgatacttgatgtccaaccccttctgtgagaagaatcgcttagaaggcttaagctggacgccggccattcttgttcgccgtggtgagttgtgttagtagatcctcgttttagttcattgttacattcttgttcaagtttcggcatgagttactgaatttgagtccatttagacttgtgtgccctgtctctcctgaaataaaaaagcgcaactgtgttgagtctgcaagtgtacacctgaactcactctcatgtttagaaggtcatctttggcattttccccttgttattcaggaaattcttgttgtatcctgcaaactgagctagtaaaatttgcactgattctttctatctacgatctatctatataaacactgtaaattttgc

SEQ ID NO: 105862 - DNA, 1856 bp, Zea Mays
cttggtctgattcctcttcttccgcgccgcctgtccggccggcagcggcagccatggcctcgaacaggagcagcagcacgattggaccgggtgcggcgccagctctcctccacctccacccgccacctcctccagggccctctcttgaagcggtccgacacgctaagaaagtggaatgagcgctgggtcatccttgatccagcaactggaaagatagaatacaaggtcaataggagtgacaaagatgttaggggagtagtcgtgttcgattcaacaagcacagtgactttgtcgcctacgaactttcatggactggcaaaatacgatggatgctgtttctatattggaactccacagaaaaaggaatactttctttgtgcagaaactcccagcgctgcaagagcatgggtatccactttacatgcgactcagttggtgctacaggctcataaggaggccgtgaattcattgggtgagaatggtcctgcaaaattgggaacagttgcaactgttgtggctgtagccaatgccactgcaattgaagcaacaaaggaggtagaagccgcaatgaagatttccctacgggcagctttgggctcaactacacataaacttaccaaaggtcaattagatgatctcacaataatgatgacaatggcaatgcatctgcaaccaacaggagacccttcgagttaaagacgacgaactacaccaattattgcaggatattcgtgcacgcgattctaccatcaatgaaattgcggataaattacaggagactgcagaagcagctgaaacagctgcttctgcagcacgttcaattgatgaagagagaagattttttacgttagaacttgaacggctgaaacaagaccacgagaaacaagttgaagcatctttgcttaggttaagggaatcggaggagaaagcaaagcttcttgttgaagagagagatcgcttgcttacagagagagattccgctcttcaagaagctcagatgtggcgctcggagctaggaaaagctagaggaaacgctgtaattctagaagcggctgttgtcagagccgaagagaaagctagggtctcagcagcagatgctgacatccgcataaaagaagccatgaaccgacttgagtctgccaccaaagaaaaggaggatctcctagcccttgtggatgctctacaatcccaaatacaaaggcaagagactagcacgatacaggtctgcgaagagagctcggaactctgctcgactgcctcgaagcacatggaggatgataacgttgacaaagcttgcgtaagcgatccggattcagtaccggttacggagaacgttgttgagttggacgacgagggagtcgacatccctacggtcggggacaccgaatgggacgatccccgttcttccgaagtgtctgatgtaagggaagtaaccacagaacccgaagaaaacagcttggatattcctgtcgatacttgatgtccaaccccttctgtgagaagaatcgcttagaaggcttaagctggacgccggccattcttgttcgccgtggtgagttgtgttagtagatcctcgttttagttcattgttacattcttgttcaagtttcggcatgagttactgaatttgagtccatttagacttgtgtgccctgtctctcctgaaataaaaaagcgcaactgtgttgagtctgcaagtgtacacctgaactcactctcatgtttagaaggtcatctttggcattttccccttgttattcaggaaattcttgttgtatcctgcaaactgagctagtaaaatttgcactgattctttctatctacgatctatctatataaacactgtaaattttgca

SEQ ID NO: 105863 - DNA, 1846 bp, Zea Mays
tctgattcctcttcttccgcgccgcctgtccggccggcagcggcagccatggcctcgaacaggagcagcagcacggttgtgggcgagatgcagagcagattggaccgggtgcggcgccagctctcctccacctccacccgccacctcctccagggccctctcttgaagcggtccgacacgctaagaaagtggaatgagcgctgggtcatccttgatccagcaactggaaagatagaatacaaggtcaataggagtgacaaagatgttaggggagtagtcgtgttcgattcaacaagcacagtgactttgtcgcctacgaactttcatggactggcaaaatacgatggatgctgtttctatattggaactccacagaaaaaggaatactttctttgtgcagaaactcccagcgctgcaagagcatgggtatccactttacatgcgactcagttggtgctacaggctcataaggaggccgtgaattcattgggtgagaatggtcctgcaaaattgggaacagttgcaactgttgtggctgtagccaatgccactgcaattgaagcaacaaaggaggtagaagccgcaatgaagatttccctacgggcagctttgggctcaactacacataaacttaccaaaggtcaattagatgatctcacaataatgatggagacccttcgagttaaagacgacgaactacaccaattattgcaggatattcgtgcacgcgattctaccatcaatgaaattgcggataaattacaggagactgcagaagcagctgaaacagctgcttctgcagcacgttcaattgatgaagagagaagattttttacgttagaacttgaacggctgaaacaagaccacgagaaacaagttgaagcatctttgcttaggttaagggaatcggaggagaaagcaaagcttcttgttgaagagagagatcgcttgcttacagagagagattccgctcttcaagaagctcagatgtggcgctcggagctaggaaaagctagaggaaacgctgtaattctagaagcggctgttgtcagagccgaagagaaagctagggtctcagcagcagatgctgacatccgcataaaagaagccatgaaccgacttgagtctgccaccaaagaaaaggaggatctcctagcccttgtggatgctctacaatcccaaatacaaaggcaagagactagcacgatacaggtctgcgaagagagctcggaactctgctcgactgcctcgaagcacatggaggatgataacgttgacaaagcttgcgtaagcgatccggattcagtaccggttacggagaacgttgttgagttggacgacgagggagtcgacatccctacggtcggggacaccgaatgggacgatccccgttcttccgaagtgtctgatgtaagggaagtaaccacagaacccgaagaaaacagcttggatattcctgtcgatacttgatgtccaaccccttctgtgagaagaatcgcttagaaggcttaagctggacgccggccattcttgttcgccgtggtgagttgtgttagtagatcctcgttttagttcattgttacattcttgttcaagtttcggcatgagttactgaatttgagtccatttagacttgtgtgccctgtctctcctgaaataaaaaagcgcaactgtgttgagtctgcaagtgtacacctgaactcactctcatgtttagaaggtcatctttggcattttccccttgttattcaggaaattcttgttgtatcctgcaaactgagctagtaaaatttgcactgattctttctatctacgatctatctatataaacactgtaaattttgca

SEQ ID NO: 105864 - DNA, 3201 bp, Zea Mays
cctttcgacatgtcattttcaggttgcttgcctcctgcaatccccctcttgcacagttgcacacaccaacacagatcttgagagctcgcgagcatggatctggtgtctggggcgattggcaagctcgcccccaagctcctccagcttctgcaagatgagtacaacctgcagaagggagtgaggcatcaaatccagtttctttcggaggagctggagagcatccatggcgccctccgcaaggtggctgccgtgccaccggaccagctggatgagcaggtcaagatctgggctcgccaagtcagagaggcatcgtacgacatggaggacatcctcgactccttcctcgttcgcgtagaggggcgccctgagcccagtggtgacaaggaaggctcaaaggcgctgtgaagaggatgggcaagctgttcgtagatgccaaggctcgccgcgacatcgcaagcgccattgaggccatcaaggggcagctacagcaggtgtccgagcggcgtgataggtgcaaagtcgatgatattgtggccaagcttgccgcaagctcaacaattgatcctcgtctcgaggccatgtacagagaggtgacacaacttgtcggcatcgacggggcaatgggtgagctgataccgatgttgtccctcacgggggatgatgtgtccaacaaggagcttaaggtagtctcggttcttggaattggaggattgggcaagaccactcttgctaaagtggtgtatgataagctcaagtcccagttcgattgtggggcttttgttcccgttggccgaaatcctgacttgaagaaagtcttcagggatatccttatggatcttgatgaacacagatacacggatctcaacatgttaatattggatgaaaggcagctcattaacaaactccgagacttcctcgagagtaacaggtacatcattgttattgacgacgtatgggaagcaaaatcttgggaaacattaagattggctttcattgacaataataaaggcagtagaataatctcaactacccgtaaatctgaagtcactagtggtaacaaggtttacaagccaaaaccactttcagatgataactccaaacgattattttatacgaggatatttggtggagaagacaaatgccctgacaatgaagtggatgaggtatctaataaaattctaaggaaatgtggaggaataccactagctatcatcacaatggctagtttattggtgggtaagtcatggggacaatggtttgaggtctgcaactctattggttttggcgataaagatattgagcaagtagacaaaactatgtcaatattgtctcttagctactatgatcttccctgtcatctaaggacttgcttattatatctaagttcattcccagaggattacattattgataagaattctttgatatggaagtggatagctgaaaattttgtccataagaaaccaggagtttggttatttgaggttggagagggatacttcaatgatcttgtcaacagaagcatgatccaggcagtggcatcaaaagacagcagtataatagatggttgccgcgtgcatgatatggtgcttgatctcctccgttctttggcacgcgaagaaaacttcgtgactgtcttatataatgatgaggacatgttgtcagaaataagcagcacgcgtaggttagcccaccaaaagagtacaatggatgctcatctgcacaattataagcagggcatgcaacatttgaggtcattaacagtctacaggtgtggtgctgataaggagctctcgtttcttctgagctttaagctcttgcgagtcctagatttagagaatgtatatactacgagctggcacaatgctaggcatattgggaatctaattcatctgaggtaccttgggttaaaacacacatatatgcctgagctaccagaagaaataggagctctgaagtttctgcagacactggacctggtggagaatttcttcatggaggaactgccatcgagcatagggcagctaacacagttggtgtgcctacgtgcttcagggttgataacaagcatgccccgtggggtaatcaaaacgctcacggccctggaggagttggcagtacaatgtcaattcaacgagcgtttctgcaggtaccaagggcaattcaaggaactaggcagcctgagtgaacttagggtgctaaagattaaggtcattagcacgatggaacagagcatactgccagatcttatgcaatctctaggaaatctccataagatccagagtctaaaactggagagtcatcctggttgcggtcgtgccgacaatgcaatgtttgatgcaatggcgctaccgggacatctcagacatttgcttgtgtcagagtactttgtccatttgtacaggctaccgtcgtgcattaatcccctatgccttgttaaactctcccacctggaattatatgtgatcgatatggacgagcatagtatgcaaatcctcggggagttggccgagctccgccatcttgtgctgtcaacgagatccacagtaagagttaataacgttgccgctgatggtttcttccacaagttgagatcctgcaagttttatacctcgatggtcctgtttgtgctcaacgaggactcgagtgtctcgtttaccctgtggaacgggacagatgatctagtgctgagctatggaaagaaggatggtgagtgtccaagtgcgccggccgtcatgccaaacctagaagagcttctgtttagcgcccagccgaagtggtccctgatgaaatgccaaggtagccatggcaacctcggcctggagcacctccgttcgcttcagaaagtcacagcggtgatcagctgcgaactgtatatgtttgaggcggagaagatggaagcagagctcggcatcagctgcgaccggtatttcgttgaggcgtgggtgatggacgcggaggatgggctgagagatgcgatcggtgttcatcccaaccaccctactcttgttctcggtcgcaagaatgaaggtgtcctcgcaagtgatgtggtacgtataccttgctattcgagctcagttccatccagtcatcggtagataccaccatttttactaacaaaactttcaatttccagtcggacgatactgatgctgattcagccacaagaagaacatgagggtgagggctcttctgttcacc

SEQ ID NO: 105865 - DNA, 4712 bp, Zea Mays
cctttcgacatgtcattttcaggttgcttgcctcctgcaatccccctcttgcacagttgcacacaccaacacagatcttgagagctcgcgagcatggatctggtgtctggggcgattggcaagctcgcccccaagctcctccagcttctgcaagatgagtacaacctgcagaagggagtgaggcatcaaatccagtttctttcggaggagctggagagcatccatggcgccctccgcaaggtggctgccgtgccaccggaccagctggatgagcagaggatgggcaagctgttcgtagatgccaaggctcgccgcgacatcgcaagcgccattgaggccatcaaggggcagctacagcaggtgtccgagcggcgtgataggtgcaaagtcgatgatattgtggccaagcttgccgcaagctcaacaattgatcctcgtctcgaggccatgtacagagaggtgacacaacttgtcggcatcgacggggcaatgggtgagctgataccgatgttgtccctcacgggggatgatgtgtccaacaaggagcttaaggtagtctcggttcttggaattggaggattgggcaagaccactcttgctaaagtggtgtatgataagctcaagtcccagttcgattgtggggcttttgttcccgttggccgaaatcctgacttgaagaaagtcttcagggatatccttatggatcttgatgaacacagatacacggatctcaacatgtacatcattgttattgacgacgtatgggaagcaaaatcttgggaaacattaagattggctttcattgacaataataaaggcagtagaataatctcaactacccgtaaatctgaagtcactagtggtaacaaggtttacaagccaaaaccactttcagatgataactccaaacgattattttatacgaggatatttggtggagaagacaaatgccctgacaatgaagtggatgaggtatctaataaaattctaaggaaatgtggaggaataccactagctatcatcacaatggctagtttattggtgggtaagtcatggggacaatggtttgaggtctgcaactctattggttttggcgataaagatattgagcaagtagacaaaactatgtcaatattgtctcttagctactatgatcttccctgtcatctaaggacttgcttattatatctaagttcattcccagaggattacattattgataagaattctttgatatggaagtggatagctgaaaattttgtccataagaaaccaggagtttggttatttgaggttggagagggatacttcaatgatcttgtcaacagaagcatgatccaggcagtggcatcaaaagacagcagtataatagatggttgccgcgtgcatgatatggtgcttgatctcctccgttctttggcacgcgaagaaaacttcgtgactgtcttatataatgatgaggacatgttgtcagaaataagcagcacgcgtaggttagcccaccaaaagagtacaatggatgctcatctgcacaattataagcagggcatgcaacatttgaggtcattaacagtctacaggtgtggtgctgataaggagctctcgtttcttctgagctttaagctcttgcgagtcctagatttagagaatgtatatactacgagctggcacaatgctaggcatattgggaatctaattcatctgaggtaccttgggttaaaacacacatatatgcctgagctaccagaagaaataggagctctgaagtttctgcagacactggacctggtggagaatttcttcatggaggaactgccatcgagcatagggcagctaacacagttggtgtgcctacgtgcttcagggttgataacaagcatgccccgtggggtaatcaaaacgctcacggccctggaggagttggcagtacaatgtcaattcaacgagcgtttctgcaggtaccaagggcaattcaaggaactaggcagcctgagtgaacttagggtgctaaagattaaggtcattagcacgatggaacagagcatactgccagatcttatgcaatctctaggaaatctccataagatccagagtctaaaactggagagtcatcctggttgcggtcgtgccgacaatgcaatgtttgatgcaatggcgctaccgggacatctcagacatttgcttgtgtcagagtactttgtccatttgtacaggctaccgtcgtgcattaatcccctatgccttgttaaactctcccacctggaattatatgtgatcgatatggacgagcatagtatgcaaatcctcggggagttggccgagctccgccatcttgtgctgtcaacgagatccacagtaagagttaataacgttgccgctgatggtttcttccacaagttgagatcctgcaagttttatacctcgatggtcctgtttgtgctcaacgaggactcgagtgtctcgtttaccctgtggaacgggacagatgatctagtgctgagctatggaaagaaggatggtgagtgtccaagtgcgccggccgtcatgccaaacctagaagagcttctgtttagcgcccagccgaagtggtccctgatgaaatgccaaggtagccatggcaacctcggcctggagcacctccgttcgcttcagaaagtcacagcggtgatcagctgcgaactgtatatgtttgaggcggagaagatggaagcagagctcggcatcagctgcgaccggtatttcgttgaggcgtgggtgatggacgcggaggatgggctgagagatgcgatcggtgttcatcccaaccaccctactcttgttctcggtcgcaagaatgaaggtgtcctcgcaagtgatgtgtcggacgatactgatgctgattcagccacaagaagaacatgagggtgagggctcttctgttcacctaaacgcgtgtaaacagccgactacacgcgttcaaacactaaacggtatgtttgcttacagcttaggccctagtcactaaattaaacaccaaacacgtctaaatggtcaaaccagtttaaaatagtttaaacggtggcattaaacagtggctaaacgggtgtaaacgccaaaacatgtgttgcaacggcagtttcatttacaggccgtaagcaatggtacgctttcccggcccatttggtgctggttaggttaagggtaaatgggtcggttcggttaagggtggattaaagggcattagagagaattaatctcttgctagttaaatttgaataagccgagatttaatctcctaaatccctcttcaatccgaatgtcgtaaccgaacaggaccttaagggattttttcaacacgttatcaccagtctagcggcttttcaatgggttccatgtcgtatatagatagagatgcgtttggtttaatttattctctgtttctacattcaaaaagcaaaagttaaactccgtttggcgcagctccttgtgacgaataatgactccactcggcgatctgatgcgtgcctcctctcagtctctcactactccggcccgttcaaccaacaccctcaccatacaaagttacaaaccaagcaacaaagccacagcaccagagatattttctaatgtttatgtgaattaattagtttatagttagactaatagatatattcgagacctcttacaggcgatcgtttgaactcttccaaaacaataacatatgcatattgatcatggtggagaataatatatgtaaaaataataatatgcatgtggcatctttaatggtgaagcatgcatttccatattcatgaaatatatgacagtcaaccacaaaaatcgttgtagtgcggttaatttgcatataaacaatcttagagacaatacaaacaaatcttatataatctattgtttcacaacaggttgaacaaaacaacttctaattttttttcaaagtcattagattttttataatagatagctcataggaggttttgttttttcgcagtagaccgctgaaccaagcacactctaggccagtcgatcgacgtgctcttgaaagcgaatttcttatgtgcacttagctttgggcatattttcgaataacactatgcatcctaatttagtttgagatatgtatgagtgcatattttcatctaacaacattgtttgtctagttgtcaaaactcatcaaaagacatgtactcctccattatattccacagctagactagacactagagaacgtctaaccatatgttttcagttggacatggattattatagggagtggctcctggataaagaccttctctaatagcgaaagtgtacgcggcgtaaaagagcaacccgaaggtgataggagtaagcgctgaagctattgccagagaggttcggcttgatatggtaacaaagaccaaggacaataccaacttaaagggtgaaaaagaccacttattccgtgataatttatattacaattacgagtaaatatcaagggcatgaatgtaattttgtttgggctgtgtcccgtgcctataaatatatgaacagtagtaccgtattgttcaggctggattgtaatcactcccacgtcattctcgctcttacaccttttggcaagccgaaagtacaattataatacaactattggcaatgtttattcatgctcaatagagatgataataatgataaatcattggtatatgacaattattatctttatccctccg

SEQ ID NO: 105866 - DNA, 2911 bp, Zea Mays
atggatctggtgtctggggcgattggcaagctcgcccccaagctcctccagcttctgcaagatgagtacaacctgcagaagggagtgaggcatcaaatccagtttctttcggaggagctggagagcatccatggcgccctccgcaaggtggctgccgtgccaccggaccagctggatgagcagaggatgggcaagctgttcgtagatgccaaggctcgccgcgacatcgcaagcgccattgaggccatcaaggggcagctacagcaggtgtccgagcggcgtgataggtgcaaagtcgatgatattgtggccaagcttgccgcaagctcaacaattgatcctcgtctcgaggccatgtacagagaggtgacacaacttgtcggcatcgacggggcaatgggtgagctgataccgatgttgtccctcacgggggatgatgtgtccaacaaggagcttaaggtagtctcggttcttggaattggaggattgggcaagaccactcttgctaaagtggtgtatgataagctcaagtcccagttcgattgtggggcttttgttcccgttggccgaaatcctgacttgaagaaagtcttcagggatatccttatggatcttgatgaacacagatacacggatctcaacatgtacatcattgttattgacgacgtatgggaagcaaaatcttgggaaacattaagattggctttcattgacaataataaaggcagtagaataatctcaactacccgtaaatctgaagtcactagtggtaacaaggtttacaagccaaaaccactttcagatgataactccaaacgattattttatacgaggatatttggtggagaagacaaatgccctgacaatgaagtggatgaggtatctaataaaattctaaggaaatgtggaggaataccactagctatcatcacaatggctagtttattggtgggtaagtcatggggacaatggtttgaggtctgcaactctattggttttggcgataaagatattgagcaagtagacaaaactatgtcaatattgtctcttagctactatgatcttccctgtcatctaaggacttgcttattatatctaagttcattcccagaggattacattattgataagaattctttgatatggaagtggatagctgaaaattttgtccataagaaaccaggagtttggttatttgaggttggagagggatacttcaatgatcttgtcaacagaagcatgatccaggcagtggcatcaaaagacagcagtataatagatggttgccgcgtgcatgatatggtgcttgatctcctccgttctttggcacgcgaagaaaacttcgtgactgtcttatataatgatgaggacatgttgtcagaaataagcagcacgcgtaggttagcccaccaaaagagtacaatggatgctcatctgcacaattataagcagggcatgcaacatttgaggtcattaacagtctacaggtgtggtgctgataaggagctctcgtttcttctgagctttaagctcttgcgagtcctagatttagagaatgtatatactacgagctggcacaatgctaggcatattgggaatctaattcatctgaggtaccttgggttaaaacacacatatatgcctgagctaccagaagaaataggagctctgaagtttctgcagacactggacctggtggagaatttcttcatggaggaactgccatcgagcatagggcagctaacacagttggtgtgcctacgtgcttcagggttgataacaagcatgccccgtggggtaatcaaaacgctcacggccctggaggagttggcagtacaatgtcaattcaacgagcgtttctgcaggtaccaagggcaattcaaggaactaggcagcctgagtgaacttagggtgctaaagattaaggtcattagcacgatggaacagagcatactgccagatcttatgcaatctctaggaaatctccataagatccagagtctaaaactggagagtcatcctggttgcggtcgtgccgacaatgcaatgtttgatgcaatggcgctaccgggacatctcagacatttgcttgtgtcagagtactttgtccatttgtacaggctaccgtcgtgcattaatcccctatgccttgttaaactctcccacctggaattatatgtgatcgatatggacgagcatagtatgcaaatcctcggggagttggccgagctccgccatcttgtgctgtcaacgagatccacagtaagagttaataacgttgccgctgatggtttcttccacaagttgagatcctgcaagttttatacctcgatggtcctgtttgtgctcaacgaggactcgagtgtctcgtttaccctgtggaacgggacagatgatctagtgctgagctatggaaagaaggatggtgagtgtccaagtgcgccggccgtcatgccaaacctagaagagcttctgtttagcgcccagccgaagtggtccctgatgaaatgccaaggtagccatggcaacctcggcctggagcacctccgttcgcttcagaaagtcacagcggtgatcagctgcgaactgtatatgtttgaggcggagaagatggaagcagagctcggcatcagctgcgaccggtatttcgttgaggcgtgggtgatggacgcggaggatgggctgagagatgcgatcggtgttcatcccaaccaccctactcttgttctcggtcgcaagaatgaaggtgtcctcgcaagtgatgtgtcggacgatactgatgctgattcagccacaagaagaacatgagggtgagggctcttctgttcacctaaacgcgtgtaaacagccgactacacgcgttcaaacactaaacggtatgtttgcttacagcttaggccctagtcactaa

SEQ ID NO: 105867 - DNA, 533 bp, Zea Mays
cctcttcaatccgaatgtcgtaaccgaacaggaccttaagggattttttcaacacgttatcaccagtctagcggcttttcaatgggttccatgtcgtatatagatagagatgcgtttggtttaatttattctctgtttctacattcaaaaagcaaaagttaaactccgtttggcgcagctccttgtgacgaataatgactccactcggcgatctgatgcgtgcctcctctcagtctctcactactccggcccgttcaaccaacaccctcaccatacaaagttacaaaccaagcaacaaagccacagcaccagagatattttctaatgtttatgtgaattaattagtttatagttagactaatagatatattcgagacctcttacaggcgatcgtttgaactcttccaaaacaataacatatgcatattgatcatggtggagaataatatatgtaaaaataataatatgcatgtggcatctttaatggtgaagcatgcatttccatattcatgaaatatatgacagtcaaccac

SEQ ID NO: 105868 - DNA, 826 bp, Zea Mays
ctacttcacccagatttccaggctcccatcccatcctcacctccgacactacgcctcgtacctcgtgcccaccgccaccaactttgctcccgatgctccgcggcttcgccttggcacgcgtcggtcgtgcccgcggcctcgctcctccactagcatagctgcataggcacaggtgaacccgcacaacgacataggcggcgctccgcgcctggctcctatcggctaccgccacgcctggctttgcctcggcacgcgccgagtcgtgccttagcccccaacccccctcttgcacaggtgcacgagatatctccaacctcgcctccttgctgattagtcgtcttgtatcttcaacattacgaagtgatgatggccttcttttcctgaaaggatgatgactatcttgctcctctccaagctgatcaagaaaaagagttgaagcttgtgcagtaggttgaactccacagggtagaggaagctgcagtaagagaggctgctcttgaacatcaaaagaaagaaaagaagctaaaaaagaacatgaggaagaggttaggttccccaacatgtccagtttgtccgcaagggttttgcggggatttcgaacaagcattaaaccgttccgggttggattggaaaatggactgtggactgccttataatccttgggggcatgctgtgcacgacatggccactgagagccgatggaggccagatgagaagaagctggcttctgctgccactgagaaattcgaagaggaagataatacctcctattgtcaacaatgatgtgtcaatggagtgtgtacaacatgaaaaaaaccaaacatga

SEQ ID NO: 105869 - DNA, 603 bp, Zea Mays
catggtgataaatcacaggccgaaagagataatgttctcaatcagtttcgaactggcagggctccaatattagtagccacagatgttgctgctcatggacttgatatcaaagatatcagagtggtaattaattatgacttcccgactgggatagaggactatgtgcatcgcatagggtgtacaggaagagctggcgctactggagtctcgtacacctttttctctaaacaagagtggaaacatgctggtgatttggtgaaactcttgcaaggtgccaaccagcatgtccctccacagctgcgtgacatggctgcacgcagtgcttctggaggtccaagaaaccagactgctgggatgagtcgctgggatgggcctggtggtagtcgttttgaacctggtgttgaaagcccaaccatgtttagtggtcgggaagccgcaacccagacaggccggtcacggggttatgacagaagaagtgatggcaggagaattagtaggagcaggagtcgcagcaggagctggtcacgcagcagaagccgcagcaggagctggagccgtagtcggagctgaagcagtagcgggagtcgcatcagaagcaagagc

SEQ ID NO: 105870 - DNA, 750 bp, Zea Mays
atggactcctggaccgaggcgcagctccgcaagatggaggccggcggcaacgaccgcctcaacgccttcctcacagcgtggggtgttcccaaggagacgtctcacgtcgcgaagtacaacttcaacgccgcgaccgcctaccgcgactgcatcgcctcgctcattgagggcaagccttggaccgacccgcccgtagtcaaggagacgcccggatctggcgcgcccgccccggctaggaagccacccttgcacgcctctagaggcggcggcgggtgggacgactgggacgatgattttcggccggacatgaggcggaatcagtcggttggatcattcgccgtcgcgggggcacagtcagggaggcagccgccgaggtctaaatcaacacaggacatctacactaggcagcagctggaggcgtcggtggctaataaggatgatttcttcgccaggaggatggcggagaacgagtccaagcctgagggtatcccgccatcccagggcggcaagtacgttgtgtttggatccagcccagcgccatcggctaataggaacggcggtgctgctcagggcgatgtcttgcaggttgtctctcagggatttggatgcctttcattagttgcagcctctgctgcccagtctgctgctagtgttgtccaagtcggcacaaaagaaatccaatcaaagctcaaggtcattggtgatggtggtgatccaaatggccactatgacaaggatgatcatcaatga

SEQ ID NO: 105871 - DNA, 921 bp, Zea Mays
atggcgagccaggccatgcctagctctctacgtacacacggtgcgtgcatgtgcatccctgatgaaaagcatcaaagaaacaatagtttacgtcggtcacgcgacgctgaaggaggcggcggccttctcgacgcccttcctggcgcccttgaaccaccgcttgtcgccggcctgcgccttgcagatgtagagcttgccgtcggagacggtggcggtgatgagctggtgcttgccgccctcgtcgccgtccgccgtcctggtcagcacggtgatgctgtagtactgcttgccgtccaccacgggggtggagctctccagcacgttggcggtggccacggcgtcggtctcgaacccgccctcggagtcggtcttgccgccgtaggcctgcttgccgagcaggtagtcgacctgcgagaggaactcctcgggggagccgtactcggtgatggccttcttggaggtgggctggatgatgacggacacgttgctgttggcgtcgaagttgtcctcgtagcggagcacctgcccggggaactcccgctccttgctggggttccacttggacgggatcagcagcttgaagccgtcgccgacgtaggagatgaagtccgtgttcttcttggtcttgccgaacacgttggctgcttccccgtaggcggcggcggcggggctcgccttggcgccgacggccgcgacgccggcgaggagcgcgagcgcggcgcggcgcgacacgtcgctctccgccgcggcggcctgctgcttctgggccttgcagacgaacagttgcgcgctgcgcggcggggcggcgaggcgcggcgacggcgcggccacgcgggcggtggactggtggaggaagcacgaggtggacgccatggatcccaacttccaaagccgcttgcttttcttgcttcggctgcctga

SEQ ID NO: 105872 - DNA, 1927 bp, Zea Mays
tttgacttcatgtgccttattttagaaacttgagctcacaaactttatcttatttggtctttatatggtggaatcatgttattttataatctctgttcattcagtcagtcgttatgaactctcatctaatcgctcacttcattggtcgtgttgtatcaagacatattgcatggagtaaacaataacctcagttagccaaatcaaaataatattatacagagagcggagacaatcaataaaaaatcttaaatttttttgatagataatttatgtgcgtattgttgtaagccgtcgtaatagacgggcaaccgactagttggccatctatacacgtgcgcctccagcgagtccacgctgcacgccagacgccacccttttcccatctcccgtggccagccagacaaacaaatctctcgcgcctcccactcctccccgccactcgccgccagcgaccaaccatcgcccgcccagcagcagcacggtcccacgccaggactcgacccacgcgcggctagctaagctcccgccgccatgatcacggccctgcaggtctccggcggcggcctgccgctcctgttcgcccggcgccggcgccgggcgttccggccgccccaagcggtggcgtccgacgccgccgccgccgccgagggcacggcgagggaggatggcgggaaggtggccctgggcgggtccggcgtagccgtcaccaagctcggcgtcggggcgtggtcctggggcgacaccacctactggaacgagttccggtgggacgatacgaagctgaaggcagccaaaggagcgtttgacgcgagcatcgactgcggaataaccttcttcgacaccgccgaagtgtacggagcaggggtatcgggagcgattaattcagagagtttactaggaaggtttatcaaggagaggcagcggaaggagcaggtggacgtggctgtcgcgaccaagttcgcagctcttccatggaggttcggtcgtgggagcgtcatctgcgcgctcaaggcctcgctggatcgccttggcgtctcttcggttgagctctaccaactccattggccagggatatggggcaacgaagactacctggacggccttggagacgctgtggagcaagggcttgtgaaggcagtcggggtctcaaactacagcgagaaacgtctccgagacgcgtacgagcgcctcaggaagaggggggtcccgctcgcctccaaccaggtgaactacagcctgatataccggaacccggaggagaacggggtgaaggcggcctgcgacgagctcggcgtcactctgatcgcgtactccccgatcgcccaaggtgctctgacgggaaagtacacgccggagagtcctcctaaaggccctcgaggacggatatacacgccggagttcctgacgaagctccagccacttatcaaccggatcaaggagatcggaggaagctacgggaggacttcaacccaggtggtgctgaactggctggtgtgccagggcaacgtggtgccgatcccgggcgccaagaacgccgagcaggcgcgggagttcgctggcgctctcgggtggagcctggcgcccgacgaggtggaggagctccggtccatggcgcgccaggtcaagcccgtcatcggcttcccagtggagaagctgtgaccacccccatggcactggtatatatcaggtgtatagtaggactgtaggtacgtagatgggcaaagcataccatttccatcgcgagactgcggacgatgtatgctacattgctactgaacgtagcgtcacgccgtcgaccagatcacagtagctgtctgtgctaaggacgcgtttgactacttgcgaaaatcatgggtttacatgaaaaaaacataaaaagataatgtttttatccacaacaatggcatttttatcgtcgaaaaaccaa

SEQ ID NO: 105873 - DNA, 1723 bp, Zea Mays
tcctccccgccactcgccgccagcgaccaaccatcgcccgcccagcagcagcacggtcccacgccaggactcgacccacgcgcggctagctaagctcccgccgccatgatcacggccctgcaggtctccggcggcggcctgccgctcctgttcgcccggcgccggcgccgggcgttccggccgccccaagcggtggcgtccgacgccgccgccgccgccgagggcacggcgagggaggatggcgggaaggtggccctgggcgggtccggcgtagccgtcaccaagctcggcgtcggggcgtggtcctggggcgacaccacctactggaacgagttccggtgggacgatacgaagctgaaggcagccaaaggagcgtttgacgcgagcatcgactgcggaataaccttcttcgacaccgccgaagtgtacggagcaggggtatcgggagcgattaattcagagagtttactaggaaggtttatcaaggagaggcagcggaaggagcaggtggacgtggctgtcgcgaccaagttcgcagctcttccatggaggttcggtcgtgggagcgtcatctgcgcgctcaaggcctcgctggatcgccttggcgtctcttcggttgagctctaccaactccattggttggctcatcagccttttctcaaccgatttctcaatctctctctctctctttctatgtgtgtgtggactgtggacactgtcggttaactcttggcatatccttttcaggccagggatatggggcaacgaagactacctggacggccttggagacgctgtggagcaagggcttgtgaaggcagtcggggtctcaaactacagcgagaaacgtctccgagacgcgtacgagcgcctcaggaagaggggggtcccgctcgcctccaaccaggtgaactacagcctgatataccggaacccggaggagaacggggtgaaggcggcctgcgacgagctcggcgtcactctgatcgcgtactccccgatcgcccaaggtgctctgacgggaaagtacacgccggagagtcctcctaaaggccctcgaggacggatatacacgccggagttcctgacgaagctccagccacttatcaaccggatcaaggagatcggaggaagctacgggaggacttcaacccaggtgctatgtccatctacatctataaactacaccagagtagtgtattactctgtgtacgcagttgtctttcttctctaacatacatgcatggctgataatgagcaagtgtgcatgcctttgtctgtacaacttggccaccaggtggtgctgaactggctggtgtgccagggcaacgtggtgccgatcccgggcgccaagaacgccgagcaggcgcgggagttcgctggcgctctcgggtggagcctggcgcccgacgaggtggaggagctccggtccatggcgcgccaggtcaagcccgtcatcggcttcccagtggagaagctgtgaccacccccatggcactggtatatatcaggtgtatagtaggactgtaggtacgtagatgggcaaagcataccatttccatcgcgagactgcggacgatgtatgctacattgctactgaacgtagcgtcacgccgtcgaccagatcacagtagctgtctgtgctaaggacgcgtttgactacttgcgaaaatcatgggtttacatgaaaaaaacataaaaagataatgtttttatccacaac

SEQ ID NO: 105874 - DNA, 100 bp, Zea Mays
ggagctttcaggctgtggataatttccatccacgaaacctcgttgtagaccagatgtcgaacactttgctgcttttgattatttctctgctactcctgtg

SEQ ID NO: 105875 - DNA, 1525 bp, Zea Mays
aggagaggagaagtcaacacctaccagccagcagagacaagagcacgggggcagagacagagagcaaagcaaccccctcaccaagatccgatccatcccatctacgcagcggaggtctcgcatctcagagcgggcaaattgccgaggaagacaagatcaggaggccagtagaacacctgacccgagtagtaggacaggtagagcagatcaagaaaaacggggaggagcagcttccagatgcacctgagcggcgggggccggatgttgccgccgaagcagctgctgaccatcgtcatcatcatcttctccacgctctccttcatcaagctccttctcctcaccagctcgtcgtcctcgtcagcgggcttcacctcccgcagcagcccggcgtgggacgcagacggcggcggtaacgggacggctaggagcgcgctcgcctccaaggagctcgctctgctccgctccgtcatcgccgcgcgggcgccgtgcaggctgctggtgttcggcctgtccccgcagctcctcgccctcgccaagctcaacttcggagctggcgcgggggccgccaccgccttcgtcacagacagcgccgacgacgcggacgccgcgcgccgcgcgctcctctccgaccgcggggctgggtccaccgccgcggcggccgttcaccagaccaggtaccgcgacgcggcggcggaggcgtggccgctgctgcggcgcgcgcgggggagcccggcgtgccggcggcccacggggacggtgcgcaagtccgggtgcccgttggcgctcacatcgctgccgcgggaggtgctcgacgcgcggtgggacgtggtcgtcgtcgacggacccagcggggcggcgcccgaggagcccggccggatggggactatctacaccgccgcggcgctggcgcgcgccatggctggcggcgaggcagtggacgtggcggtgcacgatgtggaccggacggtggagcggtggtatgcgtgggagtacctctgcgaggacaacctcgtcgccgcaaagggccgcctctggcacttccggatcgccgccggtgcggggccgacggacgcgttctgctccatcggccccgtccacatcttgtaggactgctggacgagcaagggcaagattccaagatcaccggtggcattgccatttctttcccaatcggggaatggggatgaaattgggtgatccacatcttttgcaaagctcatgccaagaagaaagaagatcaagcaatttttgcttttaggaaaaagattgagctgttcatagaattatcgataaatctgttcaaatcttttgctgaactaggcagtggagaggagcatgttcaagaagagcccttcttctaaacaactacactggtattttttttcatgcactgcttgattttagaaagaagaaaaaggtaaaagaatggaatcacttggagatacaggaggaagactaaattaaattcatgttgtagttcttaatgctatgacattgttgtaaaagaatccaatcatttggagat

SEQ ID NO: 105876 - DNA, 1316 bp, Zea Mays
ttgtacagaatctggagaattgtagagtatcaagttaattttgttctgtttaagatatgtaagaaagtacataaatgtactttagattggtgaatattttgtttatagaaggacttaaagcttcattttgttgttgattttttagattgataccattttcgttggagaatcaggttcgcaaatgcgcgactctgcactgagtttaacaaaatgcttagcacaaacagcacaaaagactttcagtgattttgaagaagctgttgaaaaggatgcaacaaagaatattcatactgatggaacagttcatcctttaacaagctatgtgatcaactatgttaagtttttgtttgactaccagtcaactctaaagcagcttttccaggagttcaaggaagatgggacaggttctgagctggcagctgtaacaatgaaaatcatgcaagccttacaaaataatttagaagcaaaagcaaaacaatacaaggatcctgcattgatgcacatatttttgatgaataacattcactatattgtcaaatctgtccgcagatcagaagccaaagatttgttgggtgatgactggattcaaaggcaccgaaggattgtacaacaaaatgccaatcagtatagaaggattgcttgggcgaaggtgttgcaatgcctctctggtcaaggtttgacttcatcaggtggtagtggtcatgtaggaagtgatggtggcaatagcagtggagcttcaagaacagctgtgaaggagagattcaggtctttcaatgtgttgttcgaagagatctaccacaagcaatgtggctggtccgttccagacactgagctgcgcgagtcactaagactcgcggtcgctgaaatcctgttgcctgcctaccgatcattcataaaacgttttgggcctctcattgagaatagcaaagcacctgggaaatacgtgaagcacactcccgagcaactcgagctgctgctaggcaatttattcgaggggaaacaagaacgtgcttgatagtttggtaccgcccgcagcaaggatgtgctgctcttctatgtaaaatacaaaataataaaaataaaaaagatctggaggccctgttagcgttagcattgcttgtgttctccccaatccttgtttagccgcattattatttgtacagaagaatatatgtgtcagctgtgccttgtgttgatctgatagcaggcgtgttcctggtttctttaatgactggcgttggtcattcgttcgggtggagcactaagatggcgacccatctgtagtttttgagatagaaaaatacttccccctcgtc

SEQ ID NO: 105877 - DNA, 189 bp, Zea Mays
ggtgtggatcaaaacaacccacaaaacgatgtcggccgatgagcccgaagatggatggactaagcagatgtcagaacaaaagttgatcgtcaactggccttcatttaacaacactaaagtagtgttatcccaggcaagccccggtgcatttgccacctccttgttgtttaaaacttttatcacttatat

SEQ ID NO: 105878 - DNA, 1783 bp, Zea Mays
ctctatctataaaacacccccgccctgccccttcctggctccacccctcctgtatcctcccaattcacgacaacccaaacaaacaacccccctacacacacacacggaggcccggtccgggtggccgtttcgattcgatgcttgtggccgcccatcagcgaacgagtcgcagccggatcccgactcacccgagggcgctcggccgcctctgaagccggaaggagcgcgcgcgtcggacatgggggagctcgcggcggcttcctcgcccccgccgcccgccgtgctgcaggtggtcttcgtcgacggcgagcagagcgtggacctgggcacggtcgccgtgcagccgtcgctgagcggtgtgaagcggctgcaggccgtggtggcggaccgcgtgggcgtcgcgccgtaccagatctcggcgtccctggcgcggccccgccgcgcgcgccgcgtgcccctcgacgacgccaccgacctcgccgccgccgtcgcgcgggagggcagcgggtgctacgtcgtcgctgggctccgccgctcccgccgcgagcgacggggcggccggtcccgtcgcgacaggaagggagccaaggacgcgggcgcgccagcggagaagaccatcctgaagcgcctcccgccaacggatctggcgtccctggtcggcactccccctccgccgcttcccttcccccacgccgttgccgcggccccgccgctcgcgctcgacgggtggggctacgacgactacgaggcccggctgcgggagctgcagcttcagcgcgattggtacatgttgagcaccgtgggagtgggagcgggtccggacccagcctacctccatctggcggctggcgggcacccggagcacgaggatccggcggcgccgtggtccccggggcggcgcccgtctccgtgcccagagtgcgaggcggcggcggcggccatgcgccagccggcgttccactggtgcgtgcacgacgcggtggtctccgctgtgttccgctcccacgtgggtcccatcgagcgccctccgaagaagaccccctctccgcctccgcttctgcctctgccgccgagccctggtcgcctcctcggcatgcccgtctacgagttcatcgaccagcacctgctcttccgtcgtcgtcgcctgccccactctagcagcaactgtacgtagacaaaaacaagcgggactgctggagtggatgggattggggatgaattgtggatggacggaggttgcgtgtgggagttggtttgcgcagcgcgaggaggtagaggattttcgtttcgatagtagctagtcaccgcagcagtcgtttctcctccttggtgtgcaaggaagccatgacgtggtacctggacggacacgcttgctcgctcttgtctcggtccggcacgcggcagggcttcttcgcctggttcaccgtggcactgtagcagtagaaaaccaaatttccccccttcctttttttcctttttctttcctgtggcctgtgggttgtggtgcactggtgcgtgcctgaacaatgtggcatgggcgagtccatggcttgattcgtttcggccatatttgtggactcctcttttgtttttccttttttctgagagaagagagagagatttgtttctgttatatcgaagtggtatatgcagaaggcttctattgtagccttgtgagtgtaactgttcgtctcgtgtagggatggcaacgggtacatacccgtcgggtattaccattccatacccgtacccatcaaaaaaaattctacccatcgggttaccc

SEQ ID NO: 105879 - DNA, 1148 bp, Zea Mays
ttaataagaaagcaagagctatagtgcattccaacttctgagaattaaacattaagcacatagacggacttgttgtggatattcaaagctagcagctaacaaaatcacccgctgcgaattggtggagagcggcacatacgcagtcaagtcaactggcaaaagcaccaaaagattgagaatctcctaggatgcacaactactgtgcagttttctacaccaagttgctgagcatgacaaccaactcctccataacagaggggcagcttctgctcagatgctcaaagccgtcagtggcggcgactgccctcaaatttgcaggagagctgagaaaatggaagcagaccttcttcagtgcatggcagcggtgttgctcagcgagcgccaggatggttgctatcgtgcccacatggatgcactcacacagcttcttttcacatagcaatttcagcctctccaagttgtatttgtccgcagcgaccagtaggtgctgacacaaaacgtcttcatcgtctccgtcttcaccttgtttcatcgtctctgtctctaacaagtcggtgtaaaggaagtagagcaatgccttgaacaccagaggttccatgtcctctatgcgcaccacgcctccggtgtggcccccctcttccatcgcaccaaagagatctgcactgaagacaggcgaacgggctgcgagcacgcaccggtgtgcggcgaacgtctcaccggcgacgtcgaacaccacatcggcgcccttctcggtcagcaggagaatgccgagatgctggtgcagtcctcccagtatcaacggctgctccgccacgtcaccgacgaaacggaacttgaaccgcgccttcactgtctcagcgacccagtcgtggagatagagagaaagcgagacgtactctttggtctccgagctcctgccgttggggtagtagcgaatgtgccagcgatggccgcccacggtgaacgggagggacgcgatgtactctcctgtgggggtccccatggtgtgggagtagccatcgatcctgaggatgtggtacccactcgcgacagtggcgacgatggccgaggcagaccaggacggcttgccgccgccagccatgacaatccctccctgcattttggactccattttggagtagggtttg

SEQ ID NO: 105880 - DNA, 1687 bp, Zea Mays
caacacaccacaccattgtagccctgcctactctactctccaacaccacagctagtagctgtgctagctgcatctatatatcgtcaccagcaacgccattgcttgtagctcgatcgcgtcgttaggtttgtgttgttagcatagtgatggaggaggacccgcagccgcaggtggaggtgccctgctacttcctgtgccccatctcgctggccatcatgcgagaccccgtgacgctccccaccggcatcacctacgaccgcgacggcatcgagcgctggctcctcactgccaccacctgcccgctcaccaagcagcccgtgccggcggactgcgaccccacgcccaaccacacgctgcgccgcctcatccagtcatggtgcgcgctccacgacgccgacagcgccgaccgcgtccacacgcccaagccccgcgtcgaccgcaccgccgtcaccgcgctggtctcccgggtccactccgccgccaccgggtcggcgccgccgcagcgcccacagctcctcgccgcgctgcgcgagctcagggacgtggcggccgagagcgaccgcaaccggaagctcgtcgccgccgtcccaggcgcggtggacgtcctagccgcggtgttcgcggcgtcggccaacaagtcgtcggaaggcacaggcaccgccgatgccgtccgcgacgatgcgctcgaggtcatcgccttgctcccggtccccgagcaatgcctgcgccgcctcgaggagacgaacgaggcgctggtctccgcgctcgtctccgcgctgcagtggtccagcgccccgtccagggcgcgcgcagcgctgctcctggagcgcgtcacggccgccctgccgcccagccggctggcatccctcccggagcaggtgttcagggaggccgtggagctgctccgcgacaggccggtgtccaggcccgcgaccaaggcggcgctgcaggtgctggtgcgcacggcagcgtggggacgcaaccgcgtcaaggcagtggacgccggcgcggtgcccgtgctcgtcgacatgctcttcgacgacggggcggagcgccgcgcgtgcgagctcgtcctggcggctctggaccgcctgtgcgggtgcgcggatgggcgcgccgagctggtggcgcacgccgcgggagtggcggccgtgggcaggaaggcgctgagggtgtcggaggtggccacggacaaggcagtcagggtgctgcggtccgtggcgaggcacgcggggacgtcggcggtggtgcaggagatggcgcaggccggcgtggcggcgatgctgtgcgtggtggcccagtcggagcagtacggcaagaggacgagagagcgcgcgcgggagacgctacggctgcacgcgagggcatggcggacctcgccgtgcttgaatcaccacctccaggccgtgtacccttgctagaagcacgccaatatttgctcgatcacgcatgcataggggtggatatcgagccagctcggctcgttatggctcggctcgttctggctcgttattgtaacgagccagctcggctcggctcgttatactaacgagctaaacagctggctcggctcggctcgttaggaagctcgagccagctcgttaggctcgcgagccacacaactaaatacaaagatctatgtacataaatatatatatataaccaaaaaatcatattttaagtgttt

SEQ ID NO: 105881 - DNA, 505 bp, Zea Mays
ctttcacaacaaaatccccgtcttctgtgactggctggctaggtagctaggtaaccgtgcgtgcatgagcgagcagggcaagaggccgacgacgacgatgtccggcggcgggtcggcggccgagtcgccggcgagctcgtgcgtgtcgtcggacgcggaggacgaggtacagcaggcggtggcgccgaagccgatggtggtggtggggtgcccgcagtgcctcatgtacgtgatggtgtccggggaggagcagcagcccaagtgcccgcggtgcaagagccccgtgctgctgcacttcctccgcggcggcaacggcaagctgccagccggccggcagtaacgcatcacatatattattagtattatattagctaattaagctagctagcagctatagctcttgtgtgttttagttaattaattgctgctgcccttttctagtagtcttttctttttttatgcatgttaacgtcgatggattggatccaagaatgttgttactacc

SEQ ID NO: 105882 - DNA, 462 bp, Zea Mays
agagcggaaaatgtgattcaagaaatggcagatgttggattggatcggaacctaatatcaagacataccacattcataaaggttgggttagagtcactttcaaatagagtgttgaattcgagcaaatgaaattagctgggcttaagccagttgaggctccttatcagccacttctcacgagggcaattgtgatggagggaagcacctacacaagaatcttgagtgcctgtactgtaggcaaatgtttgagaaagatttgactgttgacctgcacattgctattcattggtccaaatggctgcataagattgagaggacgggaggggcactagcagaactgcagaagcacttcagagaatatatctatccatttggaattcatcagaaaatttggaggctttgaattttgtaaacgaaggggtttcttagtcttgaagtgattcagactttagtgataatgaa

SEQ ID NO: 105883 - DNA, 2264 bp, Zea Mays
tcgtgctgctgctagcctagcctagcctgctactcgaacttctcgtctcgtctcctcctcgctcaggcaggggaacccaacggaactcctcctccccagcagacagccgagagtacataggagacgagaagatcccatccactaccgcccggtcgcggtcctccgccctccgccctccccgccgctcgttcggtgcagggtgctgctccgcttgctccgtcccgtgcaggtcgccctcgcgtggatcggaatgggcgcctgcgtgtccaaggccgcctgctgctgccgccagccgcacaacggggttaccaacgagaggactgatactgtgacggaggacgaggaggcatacgacctgcctgcgttccaggagttcaccttcgagcagttgcggctagctacatcggggtttgcggtggagaacatcgtgtccgagcaaggtgagaaggcgcccaatgtggtatacaaggggaagctcgatgcccagcgccgcattgctgtcaagcgctttaaccgctctgcctggcccgacccgcgccagttcctggaagaagctagatcagttggcctgctccgaagcaaaaggttggcaaatttgcttggttgttgctgtgaaggcgatgagagattgcttgttgcagaatacatgcccaatgatacgctagcgaagcaccttttccattgggagtcacaatcaatgaaatggaccatgagattaagggttgttctctgtctcgctgaggctttagaatattgcactaacaggggccgtgctctctaccatgatctcaatgcctatagagctctgtttgatgatgactgtaaccctagactttcctgtttcggtctcatgaagaacagccgggatggaaaaagttacagtaccaatttggcatttacgcctccagaatacatgaggactggacgtattactcctgaaagtgtcatatacagctttggaaccttgctgattgatgttcttagtgggaagcatattcctccgagccatgcccttgacctgattcgggaccgaaacttcaatatgctcttagactcatgtttagagggtcaattttcaaatgaggaaggaacagaaatggtccgattagcttcaagatgccttcactatgaaccccgtgagcgacctaatgtcagatcacttgtgcaagtattgactcctctacagagggatgtcgagactccatcttatgtgctcatgggcattccgcgtggtggggcatcttctaccgaaccactgaatctttcccctcttgccgaagcttgttccagaaaggatctgacagcaatacatgaaattctagaaaagacaggctacaaggatgatgagggaactgcaaatgagctctcttttcagatgtggacgaatcagatgcaagatacgttgaactcaaaaaagaagggtgacaatgcttttcgacagaaggattttactgctgccattgattgctattcccagtttattgaagttggtacaatggtttccccaaccatttatgctcgacgttgcctgtcatatctgatgaatggcatgccacaggaggcattgaatgatgcaatgaatgctttggtaatatctcccacatggtcaacagcattctatcttcaggcagcagcactattatcacaaggcatggagaatgaagcacaagaagcactcaaggatggttgtaacttagagcaaagtagcagcggtggacattgattgtgaacatatttgtagtccccaaaatgcacataatgtcaggtgcttgtttgaagagagagtaatattggctttggctatggaagcagcaggcgttggtaatttgtcaatttggctaggggtttgttaaccttattcagattttgtgcttgtggaacgtcgtccctcgtccatatcttcatgtaggaatgtacatatggaagaaagcgacaacagaggctctgaaagagaggacaaagacatccaagaggtgaataaggaaattattaatggggagaagaaagtgaaacttttttcttggtcctactgaaacaagagaaggaaaacataagaagaagaaaaaaaaagattgctgatgtacatgtctgtctttgctggtggcaggtgacctgtacagcaagcggttgtttttacgctgtcttaattcttcgtttcttatgcgttagctcccattggtatatttctggatatgatagtggaattcttttaaaaggccaaaaatgtcagcgttctggttgttcgagagttcaacgctttcacc

SEQ ID NO: 105884 - DNA, 2233 bp, Zea Mays
tcgtgctgctgctagcctagcctagcctgctactcgaacttctcgtctcgtctcctcctcgctcaggcaggggaacccaacggaactcctcctccccagcagacagccgagagtacataggagacgagaagatcccatccactaccgcccggtcgcggtcctccgccctccgccctccccgccgctcgttcggtgcaggtcgccctcgcgtggatcggaatgggcgcctgcgtgtccaaggccgcctgctgctgccgccagccgcacaacggggttaccaacgagaggactgatactgtgacggaggacgaggaggcatacgacctgcctgcgttccaggagttcaccttcgagcagttgcggctagctacatcggggtttgcggtggagaacatcgtgtccgagcaaggtgagaaggcgcccaatgtggtatacaaggggaagctcgatgcccagcgccgcattgctgtcaagcgctttaaccgctctgcctggcccgacccgcgccagttcctggaagaagctagatcagttggcctgctccgaagcaaaaggttggcaaatttgcttggttgttgctgtgaaggcgatgagagattgcttgttgcagaatacatgcccaatgatacgctagcgaagcaccttttccattgggagtcacaatcaatgaaatggaccatgagattaagggttgttctctgtctcgctgaggctttagaatattgcactaacaggggccgtgctctctaccatgatctcaatgcctatagagctctgtttgatgatgactgtaaccctagactttcctgtttcggtctcatgaagaacagccgggatggaaaaagttacagtaccaatttggcatttacgcctccagaatacatgaggactggacgtattactcctgaaagtgtcatatacagctttggaaccttgctgattgatgttcttagtgggaagcatattcctccgagccatgcccttgacctgattcgggaccgaaacttcaatatgctcttagactcatgtttagagggtcaattttcaaatgaggaaggaacagaaatggtccgattagcttcaagatgccttcactatgaaccccgtgagcgacctaatgtcagatcacttgtgcaagtattgactcctctacagagggatgtcgagactccatcttatgtgctcatgggcattccgcgtggtggggcatcttctaccgaaccactgaatctttcccctcttgccgaagcttgttccagaaaggatctgacagcaatacatgaaattctagaaaagacaggctacaaggatgatgagggaactgcaaatgagctctcttttcagatgtggacgaatcagatgcaagatacgttgaactcaaaaaagaagggtgacaatgcttttcgacagaaggattttactgctgccattgattgctattcccagtttattgaagttggtacaatggtttccccaaccatttatgctcgacgttgcctgtcatatctgatgaatggcatgccacaggaggcattgaatgatgcaatgaatgctttggtaatatctcccacatggtcaacagcattctatcttcaggcagcagcactattatcacaaggcatggagaatgaagcacaagaagcactcaaggatggttgtaacttagagcaaagtagcagcggtggacattgattgtgaacatatttgtagtccccaaaatgcacataatgtcaggtgcttgtttgaagagagagtaatattggctttggctatggaagcagcaggcgttggtaatttgtcaatttggctaggggtttgttaaccttattcagattttgtgcttgtggaacgtcgtccctcgtccatatcttcatgtaggaatgtacatatggaagaaagcgacaacagaggctctgaaagagaggacaaagacatccaagaggtgaataaggaaattattaatggggagaagaaagtgaaacttttttcttggtcctactgaaacaagagaaggaaaacataagaagaagaaaaaaaaagattgctgatgtacatgtctgtctttgctggtggcaggtgacctgtacagcaagcggttgtttttacgctgtcttaattcttcgtttcttatgcgttagctcccattggtatatttctggatatgatagtggaattcttttaaaaggccaaaaatgtcagcgttctggttgttcgagagttcaacgctttcacc

SEQ ID NO: 105885 - DNA, 290 bp, Zea Mays
gctcacctgtcacgcgtcctatgtataatggggtgtatatatttgacagacccaaaatatcacatgtgtaatgggctggtttgtttccacaggcagaaagacgaacaaacaaaccagcacgtcgtatggcgaatttgcagcgagtcagacgccctcacctgccggccggcgaacccgtcgtggtgaggctcacgttgttgcgttcccgggcctcgggccaccaccaccgcctgccgccgcgcggaaacgcacccgcggagcccgccgcccgcgcgcgccccgagcagaaa

SEQ ID NO: 105886 - DNA, 2338 bp, Zea Mays
gcgatgctgcctaccacacaagctctgctcccttccccccgggtattttcatgtcatgtcttccttcacttccaacctccatagatccagttcagagcgtgagcatggcagacacagaagcctccggtactgtcgtccatccttcccgttcccgccgtcgacgctcctccatcttacacggtgcaaccgtagctatcctcttctttgtcatcatatttgcctacctttatctttatctgtatctttatcttgtgcttcatcgctccgttaggtatggtattgcatcgctagccattgagatagtagcctaccttgccgtcgcctgcctgtacatctgcaactcggttcggcaggagaagctcatctccgctggctttcttctacttctcctgctcgtcttcctcctctcatctattggagttcgcacctccaggtttcgcatcgacttcgttttcggggccaatattgtggctgtatcctcctactgcgtctggaagtttaactatacttcttcgatgagcaaagtgagaagaaccatctcacatgttgcaatcgtaactatcctattatctgtggtcatatttgactatgtttgtcgtttctaccctataagctattatccagattcgtattctcttcctgattactacagagacggtgcaatacggctactcattcagttggtagcctacgccgccatcggctgcctatacatctgcaactcctccactaggaagatgaaagtcgtctctgctgcttttcttgtgcttgttctggctgtctcccttctctcctcgattaacaacgacaatgatcgtttcggatacatcttcgtggcaaatatcgtgactatatccttgtattgcatctggaagcattaccttgcgatactggtgacactggcttggctccaacgatggctttctgaagaagaagaagcagcagctgccgccatggccccaagcaaacgactggcacggggagaggatgaagaagcagggcttctcaaacccttggaccttgacctagtggaatccggcccacggcagttctcttacagtgagctcgccgccgccaccaagaacttctctgacgaccggagactcggcagcggaggctttggatccgtgtaccgcgggatcttgacaaccgacggcaggaaccgctgcgtggccgtcaagcgggtgtccaagaccgcgcggcaaggctggaaggagttcgtctccgaggtggtgatcatcagccggctgcggcaccgcaacctggtgcagctaatcggctggtgccagggcagcggcaacaagctcctcctcgtctacgagctgatgcccaacggcagcctcgacgaccacctccacaggccggacagcgtgctgatgtggccggtcaggtacggcatcgcgctcggcgtcggcgccgcgctgctgtacctgcacgacgacgccgagcagcgcgtggtgcaccgagacgtgaagcccagcaacgtgatgctggacgcgtcgttcaacgccaagctcggcgacttcggcctagcgcgcctcatcgacgacggccgccgctcgcacaccacgggcgtcgccggcacgttcgggtacatggacccggagtccatgctcgccgggaaggccagcgtcgagtcggacgtgtacagcttcggcgtcttcctcctagagatcacgtgtgggcgtcggccggcggtgctcgtgagagaggaggactacgtccacctggtgcagtgggtctgggactcgtacggtggcggaagcatcctcgacgcggccgacccgtggctcggcaacaacttcaacagccaggagatggcgtgcgcgatgctcgtcggcctctggtgcgcgcacccagaccgcagcctgcgtcccacgatccggcaggccgtcaatgtgctgcggttcgaggcgccgccgccgagactgcccgccaagatgccggttgcgacgtttgggccaccggcggctcatgcttccggctcaacaacgtcgtctgcagaagcactgatgacctggggcagtagcctgccaaccatggcaatggcagcgtcatcactcgacatcgagcattccagcacgaaaacatcttgatgtaatggcaagcaacacattgtggatttttatgtccgaattatttttatttttatgggccgggggatggttcatccagccatgtagcacagtatgagtgtgagccaagtcaagtcgacggggacagaacaggtcaatcagtgccatgatgtgcggcagcgacgactttgctcaacaagacaaggaccgggggggcggagctaacgtcgagttcggcaaggaaatacgtagacaatttctgt

SEQ ID NO: 105887 - DNA, 3533 bp, Zea Mays
acggaagcagcagcagccggcaggcacgcgcacgccgtcctcgtctacaactaggccccaggcaccccgctcctcctctccctcaaaaccccaccaaaaagcctcctctcccccctacactgtttccatcggcagacggctcccatggaggcggccgagtgaagcagccgcctgccagccagccatcgtctctgcgctgcttccgtggcccggatctgggagcgcggcgctgacagtattgtgagatacaacatcagctgatccaatggcgacatataagctgggtgtggaggtcgcaagtgctcatgacctgatgcccaaggatgggcaaggttctgcaagcgcttgtgttgagctcacctttgatgggcagcgcttccgaactgctgtcaaggagaaggacctgaaccctgtctggaatgagcgcttctacttcaatgtatcagatccttctaatcttcctgagctggcccttgaagcatatgtctacaatgtcaacaaaactcttgaaagttccaggtccttccttgggaaggtcaggattgctggcacctcatttgtgccctttcctgacgcggtggtcatgcattatccattagagaagcgtgggatgttttctcgcgtcaaaggagaactgggtatgaaagtatacatcaccaatgaccccgccatcaaagcttcaaaccctcttcctgcaatggatcctgtctccaataatcctcttccagccccaagtccagcagagcagattgcagctgatataactggtactaatctgcacacatctcaggagcataggtctgaggcaaagaccttacataccatcgctaaggaggtacatcatcatcataaccatggccatcttccagctacgtttggtgagcagccttccaagtactccattgaccagatgaaacctcaatctcaaccaccgaggattgtgagaatgtattcagcagcgtcccagcagcccatggactatgcacttaaagaaactagtccatttcttggtggtgggcaggttgttggtggccgggtcatacgtggcgaaaagaatgctagcacttatgaccttgtggagcgaatgcagtatctgtttgtacgtgtggttaaggcacgagacttgcccgacatggatgtcactggaggcctggatccttatgttgaagtgagagtaggcaactatagggggataacaaagcactttgaaaagcaaaagaacccagagtggaatgcagtctttgctttttccagggaccgtatgcaggcatctgtgcttgaagttgtggtcaaagacaaagatttgattaaggatgactttgttggctttgtgcgatttgatttgaatgatgtccctattcgtgtgcccccggacagccctctggctccagaatggtacaggcttgttagtaagagcggggataagtccatgggtgagctcatgcttgcagtttgggttggcacccaagctgatgaagcatttcctgatgcctggcattcagatgctgcaacacttgaagatccatctgcagtaacacacatgaagtccaaagtttaccatgctcccagattgtggtacctgcgagttaatataattgaggcccaagatgttgctatattagataagacccgctatccagatgtatttgtgagagcacaggtggggcatcaacttgggaggacaaaacctgtgcaggctagaaattttaaccctttctggaatgaagacattatgtttgtggctgctgaaccatttgaggatcaccttgttctgactcttgaggatcgtgtaggtcctaataaagatgaaatgcttggtcgtgtaatcatacctttggcaatgattgatagacgtgccgatgaccgcattgtccatgggaagtggttcaatctcgagaagcctgttcttgttgatgttgaccaactgaagaaggagaagttctctactcggcttcatctccgtctctgtcttgatggaggttaccatgttcttgacgagtctacaaactacagcagtgacctgagaccaactgccaagcaactctggaagccgtctattggtttgcttgaacttggtgtccttggtgctcaagggattgttcccatgaaaactcgagatggaaaaggttcatcagacacctattgtgttgctaagtatgggtcgaaatgggtaaggacacggaccatcatgaacaacccaaatcccagattcaatgaacagtacacttgggaagtctatgatcctgcaactgtgctgactgttggtgtttttgacaatggacaacttggagagaagactggggagaagacatctagtggcaaagatgggaagataggcaaggttcggatacgcctttccacactcgaaactggtcgtgtgtacacccactcgtatcctcttctggttctacattcgtcgggggtcaaaaagatgggcgaactgcacctggcaattcgattttcctcaacatctctggtaaacatgttgtacctgtattctaggcccttgcttccaaaaatgcactatgtgcgcccaatacctgtgcttcaggttgatatgctacgccatcaagctgtccagattgtggctgcccgacttagccggatggagccacctttgagaaaggaagttgttgaatacatgacagattttgattctcacttgtggagcatgaggaaaagcaaagccaacttcttcagactcatgacagttttctcaggcttgtttgcagttagcaagtggttcagcggtgtctgttcatggaggaaccccattaccactgtgctagtgcacattctctttataatgctggtgtgctttcctgagctcatacttccaacagtgttcctgtacatgttccttatagggatttggaacttccgctatcgacctcgttatcctccacacatgaataccaagatctctcatgcggaggctgttcatcctgatgaacttgacgaggagttcgatacattccctaccagccgcaaccctgaggttgtaaggatgaggtatgacagactcaggagtgttgctggaaggatacaaacagtggttggtgatatcgctacacaaggggagagggttcaagcattgcttagctggagggaccctcgtgccacagcagtctttgtcctgttctgtctggtagcagcaattgtcttctatgttacaccgcttcaagttattgctgcattaggagggttctatgtgatgaggcacccaaggttcagacataggttgccctcagtaccagtaaacttcttcagacggttgccagcaaggactgactctatgctataaataagccactacctggtggtcttatcgttgtaatccctagagatgctttctctgttactgtagtttgctcgccttcgttgctatttgtaactgtgtctgttcagaacttgagagcctgttaattgtatcagttgttgaattctgggaataattgcgagacatggttctgtgttgatcctttctaaaatatcaagctatcaatgtttagtagcttgcttttttggctgtc

SEQ ID NO: 105888 - DNA, 3540 bp, Zea Mays
ccccctacactgtttccatcggcagacggctcccatggaggcggccgagtgaagcagccgcctgccagccagccatcgtctctgcgctgcttccgtggcccggatctgggagcgcggcgctgacagtggagtacagtggactacgtcgtcagctgcaatacttcttgatccagatccaggcgtccttccaactcttccttctgcattcgtgtggagtggggattcttctggcctttcgagtgacttcttttctttagtgcagtattgtgagatacaacatcagctgatccaatggcgacatataagctgggtgtggaggtcgcaagtgctcatgacctgatgcccaaggatgggcaaggttctgcaagcgcttgtgttgagctcacctttgatgggcagcgcttccgaactgctgtcaaggagaaggacctgaaccctgtctggaatgagcgcttctacttcaatgtatcagatccttctaatcttcctgagctggcccttgaagcatatgtctacaatgtcaacaaaactcttgaaagttccaggtccttccttgggaaggtcaggattgctggcacctcatttgtgccctttcctgacgcggtggtcatgcattatccattagagaagcgtgggatgttttctcgcgtcaaaggagaactgggtatgaaagtatacatcaccaatgaccccgccatcaaagcttcaaaccctcttcctgcaatggatcctgtctccaataatcctcttccagccccaagtccagcagagcagattgcagctgatataactggtactaatctgcacacatctcaggagcataggtctgaggcaaagaccttacataccatcgctaaggaggtacatcatcatcataaccatggccatcttccagctacgtttggtgagcagccttccaagtactccattgaccagatgaaacctcaatctcaaccaccgaggattgtgagaatgtattcagcagcgtcccagcagcccatggactatgcacttaaagaaactagtccatttcttggtggtgggcaggttgttggtggccgggtcatacgtggcgaaaagaatgctagcacttatgaccttgtggagcgaatgcagtatctgtttgtacgtgtggttaaggcacgagacttgcccgacatggatgtcactggaggcctggatccttatgttgaagtgagagtaggcaactatagggggataacaaagcactttgaaaagcaaaagaacccagagtggaatgcagtctttgctttttccagggaccgtatgcaggcatctgtgcttgaagttgtggtcaaagacaaagatttgattaaggatgactttgttggctttgtgcgatttgatttgaatgatgtccctattcgtgtgcccccggacagccctctggctccagaatggtacaggcttgttagtaagagcggggataagtccatgggtgagctcatgcttgcagtttgggttggcacccaagctgatgaagcatttcctgatgcctggcattcagatgctgcaacacttgaagatccatctgcagtaacacacatgaagtccaaagtttaccatgctcccagattgtggtacctgcgagttaatataattgaggcccaagatgttgctatattagataagacccgctatccagatgtatttgtgagagcacaggtggggcatcaacttgggaggacaaaacctgtgcaggctagaaattttaaccctttctggaatgaagacattatgtttgtggctgctgaaccatttgaggatcaccttgttctgactcttgaggatcgtgtaggtcctaataaagatgaaatgcttggtcgtgtaatcatacctttggcaatgattgatagacgtgccgatgaccgcattgtccatgggaagtggttcaatctcgagaagcctgttcttgttgatgttgaccaactgaagaaggagaagttctctactcggcttcatctccgtctctgtcttgatggaggttaccatgttcttgacgagtctacaaactacagcagtgacctgagaccaactgccaagcaactctggaagccgtctattggtttgcttgaacttggtgtccttggtgctcaagggattgttcccatgaaaactcgagatggaaaaggttcatcagacacctattgtgttgctaagtatgggtcgaaatgggtaaggacacggaccatcatgaacaacccaaatcccagattcaatgaacagtacacttgggaagtctatgatcctgcaactgtgctgactgttggtgtttttgacaatggacaacttggagagaagactggggagaagacatctagtggcaaagatgggaagataggcaaggttcggatacgcctttccacactcgaaactggtcgtgtgtacacccactcgtatcctcttctggttctacattcgtcgggggtcaaaaagatgggcgaactgcacctggcaattcgattttcctcaacatctctggtaaacatgttgtacctgtattctaggcccttgcttccaaaaatgcactatgtgcgcccaatacctgtgcttcaggttgatatgctacgccatcaagctgtccagattgtggctgcccgacttagccggatggagccacctttgagaaaggaagttgttgaatacatgacagattttgattctcacttgtggagcatgaggaaaagcaaagccaacttcttcagactcatgacagttttctcaggcttgtttgcagttagcaagtggttcagcggtgtctgttcatggaggaaccccattaccactgtgctagtgcacattctctttataatgctggtgtgctttcctgagctcatacttccaacagtgttcctgtacatgttccttatagggatttggaacttccgctatcgacctcgttatcctccacacatgaataccaagatctctcatgcggaggctgttcatcctgatgaacttgacgaggagttcgatacattccctaccagccgcaaccctgaggttgtaaggatgaggtatgacagactcaggagtgttgctggaaggatacaaacagtggttggtgatatcgctacacaaggggagagggttcaagcattgcttagctggagggaccctcgtgccacagcagtctttgtcctgttctgtctggtagcagcaattgtcttctatgttacaccgcttcaagttattgctgcattaggagggttctatgtgatgaggcacccaaggttcagacataggttgccctcagtaccagtaaacttcttcagacggttgccagcaaggactgactctatgctataaataagccactacctggtggtcttatcgttgtaatccctagagatgctttctctgttactgtagtttgctcgccttcgttgctatttgtaactgtgtctgttcagaacttgagagcctgttaattgtatcagttgttgaattctgggaataattgcgagacatggttctgtgttgatcctttctaaaatatcaagctatcaatgtttagta

SEQ ID NO: 105889 - DNA, 2417 bp, Zea Mays
ccgaggagacgccgccatttatttcctccgtagattttacacgacattccccacctctctcctctcctcacatcctctgctaccttccctctccttctctgccgccgcttccgcggttgcgtctggccccggcgccgtctgcttcccttgctcgccccgtcgccgctcctcgctctctctttactccaactgctcccactcgctccccaaccacctcccacctctgtctccactccatctccacacgtggccgcgctgaaagcggcggtgcgtgcccgggcagccaagcaccagcgccgcgccatggctccgtgaattcgctcgcccgccgcgatcaagccagggttgatagttactcagttgcgggtttggcgcgagctcggtgccaccgcttagacttggccatgacgaggcactgtgctgaggcggcggcggcgacggcgccgagcctcctccgagtcctccttgccttgcactgcggggtgctgttcctgcaatgctcggcagcatctgccatgggcggcgacggaagctgtcaaactcatctctcaagggattcatcgcacctgaacttgggcggcttagtttcttgcaagagctgtatttggaccataacctgctctttggtacaattccaaaactaattggctcactgaagaacctgagggttctggacttgagcgtcaatcgactcactggaccgatcccttccgaattaggtggcttgagcagtgtgagcatagtaaatttccattccaatgggttgactgggaatataccgtcggagctgggaaaattacagaatctcgtcgaacttaggttggataggaatagattgaagggatcaattccaggaagcaatactgccagtttttctcctgcttcaaatattggatccacagctcacaatggactatgcccttcttcccgattatatgttgcggatttttcttacaactttcttgtcggaaaaattccatcctgcttgaaatatcttccaaggtcaagtttccaagggaactgcttccaggatgagtactctgtccaacaacgacctttgcaaatttgtacaagtggttctactggccagcaaggtgtcatatacggatccaaacatcctggccataaacatgaaaaaatggagcaaccaatttggcttcttgctttagaaatcgcaactggtgttcttctggttgtttttgtgattactggtatagttactgcttccagaagttgcaagctgaagccttctataagaatatcatcatggaatcgatcgaaaagttggagcgacgagataacagtgttgattgattctgatatgctgaaaagtctaccaaaattaagtcgccaggagcttgaagtggcctgtgaggattttagcaacatcattggctcaactccagagacggtagtctacaaaggaaccatgaaggatggacctgaagtttctgtgatatcgttgtgcgccttcgaaggtcattggactagccaccatgaactcttttaccaaaacaaggtcattgatctggcaagattgaatcatgagaacatagcaaagttcttagggtactgcagggagagtgatccattctctcggatgctagtcttcgagtacgcaccaaatgggacgttatttgagcatctacattatggagagggaggccaattttcttggctcaggcgaatgaagatagccattggaattgcccaggggttaagatacctgcacacggagctgcagcccccatttgctatatctgagctgaattcgaactccgtgtatgttacggaagattttactccaaagctggtggattttgaatgctggaaaatgatgttctcgagacactccatctcgagagacgagaaggctcgtgggcacttgaacagcaaatcctcttttcccggccacggggattctgcagcggatagacaagccgatgatatccaggccaacaccttcgctttcggagtgattttactggagatcatcagcgggcggcttccatactgcaaggataaaggctatttggtcgactgggcgagcaagtacctccagcaggcagaggagatcgggaagctggtggacccggagctgggcagcgtgcggagcgaggacctggcggtgctgtgcagcgtggtgagccggtgcatcgacccggacccgtcgaagcggccgtcgatgcagatcatcacgggcgtgctggagaacgggatcgacctgtcggcggccgccatcctcaaggagtcgtcgctggcgtgggccgagctcgccctcgccttgtgacacgctctactcccaccacctttgtgaatccatacggctgctgattgatttccttgactggcgtagggtttgctgccggtctcaactgagcagccgtttcgtatgaatgaatgaaacctgaaaggcc

SEQ ID NO: 105890 - DNA, 1890 bp, Zea Mays
cattttgtacttgcccactaggaagctgtcaaactcatctctcaagggattcatcgcacctgaacttgggcggcttagtttcttgcaagagctgtatttggaccataacctgctctttggtacaattccaaaactaattggctcactgaagaacctgagggttctggacttgagcgtcaatcgactcactggaccgatcccttccgaattaggtggcttgagcagtgtgagcatagtaaatttccattccaatgggttgactgggaatataccgtcggagctgggaaaattacagaatctcgtcgaacttaggttggataggaatagattgaagggatcaattccaggaagcaatactgccagtttttctcctgcttcaaatattggatccacagctcacaatggactatgcccttcttcccgattatatgttgcggatttttcttacaactttcttgtcggaaaaattccatcctgcttgaaatatcttccaaggtcaagtttccaagggaactgcttccaggatgagtactctgtccaacaacgacctttgcaaatttgtacaagtggttctactggccagcaaggtgtcatatacggatccaaacatcctggccataaacatgaaaaaatggagcaaccaatttggcttcttgctttagaaatcgcaactggtgttcttctggttgtttttgtgattactggtatagttactgcttccagaagttgcaagctgaagccttctataagaatatcatcatggaatcgatcgaaaagttggagcgacgagataacagtgttgattgattctgatatgctgaaaagtctaccaaaattaagtcgccaggagcttgaagtggcctgtgaggattttagcaacatcattggctcaactccagagacggtagtctacaaaggaaccatgaaggatggacctgaagtttctgtgatatcgttgtgcgccttcgaaggtcattggactagccaccatgaactcttttaccaaaacaaggtcattgatctggcaagattgaatcatgagaacatagcaaagttcttagggtactgcagggagagtgatccattctctcggatgctagtcttcgagtacgcaccaaatgggacgttatttgagcatctacattatggagagggaggccaattttcttggctcaggcgaatgaagatagccattggaattgcccaggggttaagatacctgcacacggagctgcagcccccatttgctatatctgagctgaattcgaactccgtgtatgttacggaagattttactccaaagctggtggattttgaatgctggaaaatgatgttctcgagacactccatctcgagagacgagaaggctcgtgggcacttgaacagcaaatcctcttttcccggccacggggattctgcagcggatagacaagccgatgatatccaggccaacaccttcgctttcggagtgattttactggagatcatcagcgggcggcttccatactgcaaggataaaggctatttggtcgactgggcgagcaagtacctccagcaggcagaggagatcgggaagctggtggacccggagctgggcagcgtgcggagcgaggacctggcggtgctgtgcagcgtggtgagccggtgcatcgacccggacccgtcgaagcggccgtcgatgcagatcatcacgggcgtgctggagaacgggatcgacctgtcggcggccgccatcctcaaggagtcgtcgctggcgtgggccgagctcgccctcgccttgtgacacgctctactcccaccacctttgtgaatccatacggctgctgattgatttccttgactggcgtagggtttgctgccggtctcaactgagcagccgtttcgtatgaa

SEQ ID NO: 105891 - DNA, 2536 bp, Zea Mays
ccgaggagacgccgccatttatttcctccgtagattttacacgacattccccacctctctcctctcctcacatcctctgctaccttccctctccttctctgccgccgcttccgcggttgcgtctggccccggcgccgtctgcttcccttgctcgccccgtcgccgctcctcgctctctctttactccaactgctcccactcgctccccaaccacctcccacctctgtctccactccatctccacacgtggccgcgctgaaagcggcggtgcgtgcccgggcagccaagcaccagcgccgcgccatggctccgtgaattcgctcgcccgccgcgatcaagccagggttgatagttactcagttgcgggtttggcgcgagctcggtgccaccgcttagacttggccatgacgaggcactgtgctgaggcggcggcggcgacggcgccgagcctcctccgagtcctccttgccttgcactgcggggtgctgttcctgcaatgctcggcagcatctgccatgggcggcgacgtgtcggcgctcatggcattcaagcgcgccatcatcgaggaccctcactccgtgctctcggactggactgacgcggacggcaacgcctgcgactggcgcggcgtcatctgctccgcgccccagggctctgtcatttccctgaagctgtcaaactcatctctcaagggattcatcgcacctgaacttgggcggcttagtttcttgcaagagctgtatttggaccataacctgctctttggtacaattccaaaactaattggctcactgaagaacctgagggttctggacttgagcgtcaatcgactcactggaccgatcccttccgaattaggtggcttgagcagtgtgagcatagtaaatttccattccaatgggttgactgggaatataccgtcggagctgggaaaattacagaatctcgtcgaacttaggttggataggaatagattgaagggatcaattccaggaagcaatactgccagtttttctcctgcttcaaatattggatccacagctcacaatggactatgcccttcttcccgattatatgttgcggatttttcttacaactttcttgtcggaaaaattccatcctgcttgaaatatcttccaaggtcaagtttccaagggaactgcttccaggatgagtactctgtccaacaacgacctttgcaaatttgtacaagtggttctactggccagcaaggtgtcatatacggatccaaacatcctggccataaacatgaaaaaatggagcaaccaatttggcttcttgctttagaaatcgcaactggtgttcttctggttgtttttgtgattactggtatagttactgcttccagaagttgcaagctgaagccttctataagaatatcatcatggaatcgatcgaaaagttggagcgacgagataacagtgttgattgattctgatatgctgaaaagtctaccaaaattaagtcgccaggagcttgaagtggcctgtgaggattttagcaacatcattggctcaactccagagacggtagtctacaaaggaaccatgaaggatggacctgaagtttctgtgatatcgttgtgcgccttcgaaggtcattggactagccaccatgaactcttttaccaaaacaaggtcattgatctggcaagattgaatcatgagaacatagcaaagttcttagggtactgcagggagagtgatccattctctcggatgctagtcttcgagtacgcaccaaatgggacgttatttgagcatctacattatggagagggaggccaattttcttggctcaggcgaatgaagatagccattggaattgcccaggggttaagatacctgcacacggagctgcagcccccatttgctatatctgagctgaattcgaactccgtgtatgttacggaagattttactccaaagctggtggattttgaatgctggaaaatgatgttctcgagacactccatctcgagagacgagaaggctcgtgggcacttgaacagcaaatcctcttttcccggccacggggattctgcagcggatagacaagccgatgatatccaggccaacaccttcgctttcggagtgattttactggagatcatcagcgggcggcttccatactgcaaggataaaggctatttggtcgactgggcgagcaagtacctccagcaggcagaggagatcgggaagctggtggacccggagctgggcagcgtgcggagcgaggacctggcggtgctgtgcagcgtggtgagccggtgcatcgacccggacccgtcgaagcggccgtcgatgcagatcatcacgggcgtgctggagaacgggatcgacctgtcggcggccgccatcctcaaggagtcgtcgctggcgtgggccgagctcgccctcgccttgtgacacgctctactcccaccacctttgtgaatccatacggctgctgattgatttccttgactggcgtagggtttgctgccggtctcaactgagcagccgtttcgtatgaa

SEQ ID NO: 105892 - DNA, 1551 bp, Zea Mays
tccgatagaatcctaccggattcgatttcgatccttctcaactcaatctcacgtggcacgcagtcatcatccagccatccgctccaggctccagctctaggggagtgcctcctcctcctcctcctcctcctcctcctcgtccttcccctaccctccccgcgcgcagatcccgacgcgggacgcctgcattcccttgcgcgggacgcgacaactccacgctacacagttcacacgccaagcgagggccgcatctagatccgcgccgccgagctgacttgactattgcaagtttgcaacccaccgccacgccttcttctccccccgcgatctacccggcccgggcgccgttgctgctactgctattactaatactactaccgcgtcgtagcggaggcagggacttgaggagcgggtgggttgcgatggccgctgcggggaggaatgcgggcgtcctcgcgctcttcgacgtcgacggcaccctcacagcgccgcgcaagggggtgacgccagagatgctagagttcatgaagcagctgcgccagcatgtgacagtgggcgtggttggcggatccgatctggtgaagattaccgagcagctcggcagtacagttattactgattatgattacgtcttctccgaaaacggcctggttgcacacaaaaatggccaactaattggaacccaaagtttgaaatcatttatcggagaagacaagctgaaggaatttattaacttcactcttcattacattgctgacttggatatcccaattaaaaggggtacattcatagagttccgaagtggaatgattaatgtatctcctataggaagaaactgtagccaagaagaacgggatgaatttgagaagtacgataaggtgcataacatccgacctaaaatggtgtcagtgcttcgtgaaaagtttgcacacatgaacttgacattttctatcggagggcagattagttttgatgtatttccccaaggttgggacaaaacttattgcttgagatatcttgaggaatttcaagaaatccatttctttggggataagacctacaagggtggcaatgactatgagatatttgaatctgaaagaacagttggtcatacagttaccagccccagtgacacagctcagcaatgcagatctctctttttgtcgaagtgatctccagcttatttccaacacatatttattaagtcatctttgactgaatgccttttggtatttttttcaatacaatacatgccaccattttttctttgaataattggatctataccattaaaagattgcaactttagatatatactattggctccacatatcattgactcatgtgaaccatacatgtaagtgagataacaatgatatatatttaaagttgtaatcctttaatgatactactgctccgtattcacaaattttcagattacatgtatacaactggcgaaaataaatcagatttacctgtttttactttacgccgtgttaattgagatgcttcttgggacatgggtgatgtagtaaaagatggtaattgtgc

SEQ ID NO: 105893 - DNA, 1451 bp, Zea Mays
tccgatagaatcctaccggattcgatttcgatccttctcaactcaatctcacgtggcacgcagtcatcatccagccatccgctccaggctccagctctaggggagtgcctcctcctcctcctcctcctcctcctcctcgtccttcccctaccctccccgcgcgcagatcccgacgcgggacgcctgcattcccttgcgcgggacgcgacaactccacgctacacagttcacacgccaagcgagggccgcatctagatccgcgccgccgagctgacttgactattgcaacggaggcagggacttgaggagcgggtgggttgcgatggccgctgcggggaggaatgcgggcgtcctcgcgctcttcgacgtcgacggcaccctcacagcgccgcgcaagggggtgacgccagagatgctagagttcatgaagcagctgcgccagcatgtgacagtgggcgtggttggcggatccgatctggtgaagattaccgagcagctcggcagtacagttattactgattatgattacgtcttctccgaaaacggcctggttgcacacaaaaatggccaactaattggaacccaaagtttgaaatcatttatcggagaagacaagctgaaggaatttattaacttcactcttcattacattgctgacttggatatcccaattaaaaggggtacattcatagagttccgaagtggaatgattaatgtatctcctataggaagaaactgtagccaagaagaacgggatgaatttgagaagtacgataaggtgcataacatccgacctaaaatggtgtcagtgcttcgtgaaaagtttgcacacatgaacttgacattttctatcggagggcagattagttttgatgtatttccccaaggttgggacaaaacttattgcttgagatatcttgaggaatttcaagaaatccatttctttggggataagacctacaagggtggcaatgactatgagatatttgaatctgaaagaacagttggtcatacagttaccagccccagtgacacagctcagcaatgcagatctctctttttgtcgaagtgatctccagcttatttccaacacatatttattaagtcatctttgactgaatgccttttggtatttttttcaatacaatacatgccaccattttttctttgaataattggatctataccattaaaagattgcaactttagatatatactattggctccacatatcattgactcatgtgaaccatacatgtaagtgagataacaatgatatatatttaaagttgtaatcctttaatgatactactgctccgtattcacaaattttcagattacatgtatacaactggcgaaaataaatcagatttacctgtttttactttacgccgtgttaattgagatgcttcttgggacatgggtgatgtagtaaaagatggtaattgtgc

SEQ ID NO: 105894 - DNA, 1447 bp, Zea Mays
tccgatagaatcctaccggattcgatttcgatccttctcaactcaatctcacgtggcacgcagtcatcatccagccatccgctccaggctccagctctaggggagtgcctcctcctcctcctcctcctcctcctcctcgtccttcccctaccctccccgcgcgcagatcccgacgcgggacgcctgcattcccttgcgcgggacgcgacaactccacgctacacagttcacacgccaagcgagggccgcatctagatccgcgccgccgagctgacttgactattcggaggcagggacttgaggagcgggtgggttgcgatggccgctgcggggaggaatgcgggcgtcctcgcgctcttcgacgtcgacggcaccctcacagcgccgcgcaagggggtgacgccagagatgctagagttcatgaagcagctgcgccagcatgtgacagtgggcgtggttggcggatccgatctggtgaagattaccgagcagctcggcagtacagttattactgattatgattacgtcttctccgaaaacggcctggttgcacacaaaaatggccaactaattggaacccaaagtttgaaatcatttatcggagaagacaagctgaaggaatttattaacttcactcttcattacattgctgacttggatatcccaattaaaaggggtacattcatagagttccgaagtggaatgattaatgtatctcctataggaagaaactgtagccaagaagaacgggatgaatttgagaagtacgataaggtgcataacatccgacctaaaatggtgtcagtgcttcgtgaaaagtttgcacacatgaacttgacattttctatcggagggcagattagttttgatgtatttccccaaggttgggacaaaacttattgcttgagatatcttgaggaatttcaagaaatccatttctttggggataagacctacaagggtggcaatgactatgagatatttgaatctgaaagaacagttggtcatacagttaccagccccagtgacacagctcagcaatgcagatctctctttttgtcgaagtgatctccagcttatttccaacacatatttattaagtcatctttgactgaatgccttttggtatttttttcaatacaatacatgccaccattttttctttgaataattggatctataccattaaaagattgcaactttagatatatactattggctccacatatcattgactcatgtgaaccatacatgtaagtgagataacaatgatatatatttaaagttgtaatcctttaatgatactactgctccgtattcacaaattttcagattacatgtatacaactggcgaaaataaatcagatttacctgtttttactttacgccgtgttaattgagatgcttcttgggacatgggtgatgtagtaaaagatggtaattgtgc

SEQ ID NO: 105895 - DNA, 1442 bp, Zea Mays
tccgatagaatcctaccggattcgatttcgatccttctcaactcaatctcacgtggcacgcagtcatcatccagccatccgctccaggctccagctctaggggagtgcctcctcctcctcctcctcctcctcctcctcgtccttcccctaccctccccgcgcgcagatcccgacgcgggacgcctgcattcccttgcgcgggacgcgacaactccacgctacacagttcacacgccaagcgagggccgcatctagatccgcgccgccgagctgacttgactattgcaaggacttgaggagcgggtgggttgcgatggccgctgcggggaggaatgcgggcgtcctcgcgctcttcgacgtcgacggcaccctcacagcgccgcgcaagggggtgacgccagagatgctagagttcatgaagcagctgcgccagcatgtgacagtgggcgtggttggcggatccgatctggtgaagattaccgagcagctcggcagtacagttattactgattatgattacgtcttctccgaaaacggcctggttgcacacaaaaatggccaactaattggaacccaaagtttgaaatcatttatcggagaagacaagctgaaggaatttattaacttcactcttcattacattgctgacttggatatcccaattaaaaggggtacattcatagagttccgaagtggaatgattaatgtatctcctataggaagaaactgtagccaagaagaacgggatgaatttgagaagtacgataaggtgcataacatccgacctaaaatggtgtcagtgcttcgtgaaaagtttgcacacatgaacttgacattttctatcggagggcagattagttttgatgtatttccccaaggttgggacaaaacttattgcttgagatatcttgaggaatttcaagaaatccatttctttggggataagacctacaagggtggcaatgactatgagatatttgaatctgaaagaacagttggtcatacagttaccagccccagtgacacagctcagcaatgcagatctctctttttgtcgaagtgatctccagcttatttccaacacatatttattaagtcatctttgactgaatgccttttggtatttttttcaatacaatacatgccaccattttttctttgaataattggatctataccattaaaagattgcaactttagatatatactattggctccacatatcattgactcatgtgaaccatacatgtaagtgagataacaatgatatatatttaaagttgtaatcctttaatgatactactgctccgtattcacaaattttcagattacatgtatacaactggcgaaaataaatcagatttacctgtttttactttacgccgtgttaattgagatgcttcttgggacatgggtgatgtagtaaaagatggtaattgtgc

SEQ ID NO: 105896 - DNA, 1438 bp, Zea Mays
tccgatagaatcctaccggattcgatttcgatccttctcaactcaatctcacgtggcacgcagtcatcatccagccatccgctccaggctccagctctaggggagtgcctcctcctcctcctcctcctcctcctcctcgtccttcccctaccctccccgcgcgcagatcccgacgcgggacgcctgcattcccttgcgcgggacgcgacaactccacgctacacagttcacacgccaagcgagggccgcatctagatccgcgccgccgagctgacttgactattggacttgaggagcgggtgggttgcgatggccgctgcggggaggaatgcgggcgtcctcgcgctcttcgacgtcgacggcaccctcacagcgccgcgcaagggggtgacgccagagatgctagagttcatgaagcagctgcgccagcatgtgacagtgggcgtggttggcggatccgatctggtgaagattaccgagcagctcggcagtacagttattactgattatgattacgtcttctccgaaaacggcctggttgcacacaaaaatggccaactaattggaacccaaagtttgaaatcatttatcggagaagacaagctgaaggaatttattaacttcactcttcattacattgctgacttggatatcccaattaaaaggggtacattcatagagttccgaagtggaatgattaatgtatctcctataggaagaaactgtagccaagaagaacgggatgaatttgagaagtacgataaggtgcataacatccgacctaaaatggtgtcagtgcttcgtgaaaagtttgcacacatgaacttgacattttctatcggagggcagattagttttgatgtatttccccaaggttgggacaaaacttattgcttgagatatcttgaggaatttcaagaaatccatttctttggggataagacctacaagggtggcaatgactatgagatatttgaatctgaaagaacagttggtcatacagttaccagccccagtgacacagctcagcaatgcagatctctctttttgtcgaagtgatctccagcttatttccaacacatatttattaagtcatctttgactgaatgccttttggtatttttttcaatacaatacatgccaccattttttctttgaataattggatctataccattaaaagattgcaactttagatatatactattggctccacatatcattgactcatgtgaaccatacatgtaagtgagataacaatgatatatatttaaagttgtaatcctttaatgatactactgctccgtattcacaaattttcagattacatgtatacaactggcgaaaataaatcagatttacctgtttttactttacgccgtgttaattgagatgcttcttgggacatgggtgatgtagtaaaagatggtaattgtgc

SEQ ID NO: 105897 - DNA, 1416 bp, Zea Mays
atgccttgttcacatgaatttgcagcctccataactgggatcagctgtggtaacaatgcctgtctgtccaaaatcgcagtcaaaggcatgctggccattggcctggaagtagaggttcatggcgtacgccgcgtgggcctgcaccgtgtccggctcgtagcagacgccgcccggccggatcgcggtacagtcgacgcccttttggccgcacgcgaagtcgatgttctcctgcagcaccatctcgtccgccgccggctccggcacgcaccatttccggctcgtcaccttcgctctcaccggctcaagggtctgcgaatcagtgaagatgccgacgtcgtagaccggcgtcatgtcgccgcggaacaagccgaaattcctctccgacaccggccctggcttgaggttctcgtcgaagagggagaagatggagacctcgaaggtgcggttgggcatgagcggcgtgccgacgccggagccgaggtggcggatggcgttgctgttgtagtcccgggcgaggtccgcgccgacgccgacctcccagtcctccccggccgatggccacccggtctccgacacggcgatgtcgacgtccccgaagcccatccgcctgacggccgagtgcacggcgtcgagctgcgcgtccagcatgttgccgtacaccagcccggtgccctggtccatgacgccgtcgttcacccggaacagcgcgaagtcgaggctgctgtcgttggcgagcgcgtagaacgggtacgcgttcaccatgaacggcgcgccggtcgcgcggaggaacctgagcagcggcctcacgatggccgcgtcgtagccgtcgcggaaccgcgccgccgacggctgctccgtggtggtgagcaccccgagcgagtgcgtggtggagaccttcacccggccgtgcagggacgcggcgaccagcgcggtgtgcaggttctgcatggccggcaccagcgccagcagcagcgtccggttggcctcggtggtcacctcgtcgccgaccaggaggcgcgagatattggtggcgcccgcgtagggcgtcacgttgtcgcgcacccagcgccgcgcgaaggtcagattcagcaggtgcgggacgacgccgttgggcaccgtcacgtccacggcgaggcccgtgccggcgaaggcccgcagcaggaccgggtcggcgtccaacagcctcacgcggtcgaagatggtgtcccgggccaggaaccgcgccacgtcggccggcgccgggagcgtcgtgccccgcgtgccgtagttgacgccgatgccgctagcgtccgcgcctgtgatggcagaaaccaagagcagcgttggaaggaggatctggagcaagacggtgcagagtgtcatcgtggcaagattggctgctgccacctactactactacttagtacttactactag

SEQ ID NO: 105898 - DNA, 601 bp, Zea Mays
cacctttgttgaggctgggctaagtgtaggagtgaagccccaaggctctctggaccgtcgaggattgatcgggcggcggcgccgtcgggcagaagcggtcgtcgccggacaaggcgcacaggtccaccatggacaccgtctaccaccaccaccatgtgtcgccgttgacaggcaacggcgccgccaccgccaccgtcggcgagaagctgggcgtggagcggttcgagctgccgttgttctacatctcgctgtcatggaaggagaaggaggacgatttccttgcgatgaagggcaccaagctgcccagcgaactaagaaaagggccaagaacgtggacaagaccctccaagtattaaacacctggcctgagatcgatttgatcatctatttctaacccgatccaaatcaatctttgctctcaaaacttaaacatgtgccccccttgctttttatcatgctgtttgtcttcccggggatgtggtggggtagggtccataggatggatttgaattcatgatagtatctacacatgtacactgcttaaagatactatctagtatctatatctattacaattttgtataaatactttttgatagtt

SEQ ID NO: 105899 - DNA, 471 bp, Zea Mays
tcaggagggcggttcctcaacacaaagcagcagctccaggagcagaaccagcagtaccaggcgtcgagtggttcaatgtgctcaaagaccattggcagcagcataatctcccaaagtggccccatttgcacgccctcttctgacgctgcaggtgcttcagcagccagccaggaccgcggctgcttgccctcggttggcttccgtcccacagccaacttcagtgatcaaggtggaggcggctcgaagctggtcgtgaacggcatacagcagcgtgtttccaccataaggtgaagagaagtgggcacgacaccattcccaggcgcgcactgcctgtggcaactcatccttggcttttgaaactatggatatgcaatggacatgtagctttgagttcctcagaataaccaaacgtgaagaatatgcaaagttcctcagaatcaacaattatctgctaacaatcatggtaaaaaa

SEQ ID NO: 105900 - DNA, 318 bp, Zea Mays
atggaggccacggcagtagcggcagctgacgtcaaatctgaggtcgagtctaaatgtggccggaggatccctgagattgccgcgctcgtgacgaccagagatctgtgcctgcgatggccggagattcgtgcacgtccccctgtagatccgtgccacgctgagcccctcctcaagtggtccaacaacgacatcgatgagttcatcgccttcgattcggtctacgggccccaggttcttatgacatggaaattcaacggtttaaatgatgtaacaagtctaccatgccgcttcaaaaacatagacatgcttaggtcataa

SEQ ID NO: 105901 - DNA, 1323 bp, Zea Mays
gttaaacctaactgcctctcctgtctcccagtctctcgccgctcgcctctcagccgccgcgtgcctcccagtctcccgccctcgcctctctcttcctctcctctctccctgcgcgccgccgccgtgcctcgccttgcccagagactaaggcgccaggatagtataaatttagttcacgtgattgtggacttctcgccttttggattcaacattttctgcttctcagctctggaatacagaagtgccattgtgggctcaagaggataatgtacgggaggcgtgcatcgcagctgctgaaggagatcgactcctctgaggctggccagctcgtgccattcaacagtgacgtgtttgatcaagtgattagagagtgcaatgagcacaactcacaatttcaatcgttgatcaggaaaatggtggagcaaaacttagatatcgagacaactagaaatgaagatcactatggtgcagctatccaccatctttccctgctccgtaacaaaagatgccttatggcttacatgtacaaccgagcagaagttatccagagttttagatggaaaattggccctgtgcttcctcatgacatacaagaaaagctccatttctcagaaaaggagtacttcaagaaccactctgcagccattaaatcatacatatcagagatggatatagatttgacagtggacatggttcctcccaaggatccttacattcaggttcgggtgctggaggacattggtgaagtatcgctcggtgaccattctgtgtcattgaccaagaactcactccatttcctaaggcgcacagacgctgaacagtttatatcacagggtcttatggaagaatttctggagtagggatcacatgtatgaatgtatgatggtacaataggatggtgcactgccctcgttctccccagcgatgctgcctgatgccctatttgcaacaatgaaaagacgcgttctgtaccaaggagcttcttaactagtcgctggacgatgatttcgaaagttgtgcaggcagtcctatactagattcattgcctctatttacatgtggatgacttttagttagtgtgccatccaagaaagcagatgttgcaaacattgtaacttgtgtattaacattggttttgctggtagatttcatatttgtgtttccaagattccatgtaatcaagaaaaaaaatgaaatcttggttgaaacagtctttcacagtgaggagttagtttcattttatagctaacatgcaagagacaatatgtctagttaacatttcatctatttctccattaattgcttgcctcatcatctaaactg

SEQ ID NO: 105902 - DNA, 1231 bp, Zea Mays
gttaaacctaactgcctctcctgtctcccagtctctcgccgctcgcctctcagccgccgcgtgcctcccagtctcccgccctcgcctctctcttcctctcctctctccctgcgcgccgccgccgtgcctcgccttgcccagagactaaggcgccaggatagtataaatttagttcacgtgattgtggacttctcgccttttggattcaacattttctgcttctcagctctggaatacagaagtgccattgtgggctcaagaggataatgtacgggaggcgtgcatcgcagctgctgaaggagatcgactcctctgaggctggccagctcgtgccattcaacagtgacgtgtttgatcaagtgattagagagtgcaatgagcacaactcacaatttcaatcgttgatcaggaaaatggtggagcaaaacttagatatcgagacaactagaaatgaagatcactatggtgcagctatccaccatctttccctgctccgtaacaaaagatgccttatggcttacatgtacaaaactaaaagttcacagtacaaccgagcagaagttatccagagttttagatggaaaattggccctgtgcttcctcatgacatacaagaaaagctccatttctcagaaaaggagtacttcaagaaccactctgcagccattaaatcatacatatcagagatggatatagatttgacagtggacatggttcctcccaaggatccttacattcaggttcgggtgctggaggacattggtgaagtatcgctcggtgaccattctgtgtcattgaccaagaactcactccatttcctaaggcgcacagacgctgaacagtttatatcacagggtcttatggaagaatttctggagtagggatcacatgtatgaatgtatgatggtacaataggatggtgcactgccctcgttctccccagcgatgctgcctgatgccctatttgcaacaatgaaaagacgcgttctgtaccaaggagcttcttaactagtcgctggacgatgatttcgaaagttgtgcaggcagtcctatactagattcattgcctctatttacatgtggatgacttttagttagtgtgccatccaagaaagcagatgttgcaaacattgtaacttgtgtattaacattggttttgctggtagatttcatatttgtgtttccaagattccatgtaatcaagaaaaaaaatgaaatcttggttgaaaca

SEQ ID NO: 105903 - DNA, 760 bp, Zea Mays
gttaaacctaactgcctctcctgtctcccagtctctcgccgctcgcctctcagccgccgcgtgcctcccagtctcccgccctcgcctctctcttcctctcctctctccctgcgcgccgccgccgtgcctcgccttgcccagagactaaggcgccaggatagtataaatttagttcacgtgattgtggacttctcgccttttggattcaacattttctgcttctcagctctggaatacagaagtgccattgtgggctcaagaggataatgtacgggaggcgtgcatcgcagctgctgaaggagatcgactcctctgaggctggccagctcgtgccattcaacgtaattccagcttctgtactcacttgtggttacgaatttggaatcatagggaatgctgcttgtatctcgtttatgtctattacaagccgcaattttgtattatctgatgtgttctgtgttcgatgggtgaattgagtgtcgaaaaactcctatatcctcagttgaaagttttactttacttccgtggtagtctggtagcacctcaaaaatcataaaccgtcagatcaaatattgttggtttggctgacagatgtgcctgcaattgtgtgccttttaaattcttctcccttctaaacatgttagttagtacgtgccatctagatttggaaaaaaatcatatgggacctggtttaattctctatcaagttaaaccctacccatacatatgaatttagataaaaaaagatcactacatgttt

SEQ ID NO: 105904 - DNA, 225 bp, Zea Mays
gctaaagtggtccaggagattagcgaagatgccactttctggcgccttgctggagcccctagggctgtgggctgagatgtctcctggtactatggatacatttgtctatgtaaggtgttggccgccataaaaagccacaccatttttgtaccgccccattttggggctcaccttcttattttaatgaaatgcagctctcctgcgttttcgagaaaaaaaaacaac

SEQ ID NO: 105905 - DNA, 1194 bp, Zea Mays
aatcctctagttcgattctttggcctcgcagcggtcaagttggataggacgaatggagctactgggtggaggttatggtgtgtggaaacttcgatctggcttcatttatggagtgttggagcaaaaatcgcatgggatgctgaggaacatggcggtatggagggagagggacagttttcagttacttatctatatgatgacacacgattcagcagtgcagccgtctctggtaatagtttactttggtggaaacgactcaattgatgctcattgttccggtctcgggcctcatgtgccgctagatgagtacatagggaacatgagaaagattgcagaacacctaaagagcctctccgagaagacacgggtccttttcctgagctgcccacctctgaacgaggagatgcttcgaaactcaaccagtactatactgagtgagatcgtccggaccaacgaaacctgccgtctgtactctgacgtgtgcgtagctctgtgcaaggagatgcacctgaaggtggttgatctctggcatgccatgcagaagagggaggactggaagactgcgtgcttcacggatgggctgcatctgtctgaagaagggagcaacattgtggtggaagagatcctgaaggtgttgaaagaggcagagtgggaaccatccctgcactggaaggcaatgccgacggagttcgccgaggactcccccttcgatcttgtctcctccagcggtgacgccaccgtgaacccgtcggagtggacaatccacaggaaaatacaatggaactgactgacttgtttgcggccttgatttgactccatggctggatggatggatgcatacatttgttctgccttgatggaattggaacgaatcatgatgctcaagaataacaatggaggaccagagttaagggacaatatgataccgtcatcttatctatttgatcagacctcggtgtctcgaagattgattggtcaatgttgtgttttccccatgattatggtgtgttgtgtgtttggattgatggcaaggttggctaggatgcatccatgtttcggagatatggccattcaagttgtgtgttttgataatagaatgagccgtttttttagatgcaatgagaatacttaactagctatatctcttaactatataaaaacaataacatgaagctactctccctgtttaattaa

SEQ ID NO: 105906 - DNA, 1179 bp, Zea Mays
aatcctctagttcgattctttggcctcgcagcggtcaagttggataggacgaatggagctactgggtggaggttatggtgtgtggaaacttcgatctggcttcatttatggagtgttggagcaaaaatcgcatgggatgctgaggaacatggcggtatggagggagagggacagttttcagttacttatctatatgatgacacacgattcagcagtgcagccgtctctggtaatagtttactttggtggaaacgactcaattgatgctcattgttccggtctcgggcctcatgtgccgctagatgagtacatagggaacatgagaaagattgcagaacacctaaagagcctctccgagaagacacgggtccttttcctgagctgcccacctctgaacgaggagatgcttcgaaactcaaccagcagtactatactgagtgagatcgtccggaccaacgaaacctgccgtctgtactctgacgtgtgcgtagctctgtgcaaggagatgcacctgaaggtggttgatctctggcatgccatgcagaagagggaggactggaagactgcgtgcttcacggatgggctgcatctgtctgaagaagggagcaacattgtggtggaagagatcctgaaggtgttgaaagaggcagagtgggaaccatccctgcactggaaggcaatgccgacggagttcgccgaggactcccccttcgatcttgtctcctccagcggtgacgccaccgtgaacccgtcggagtggacaatccacaggaaaatacaatggaactgactgacttgtttgcggccttgatttgactccatggctggatggatggatgcatacatttgttctgccttgatggaattggaacgaatcatgatgctcaagaataacaatggaggaccagagttaagggacaatatgataccgtcatcttatctatttgatcagacctcggtgtctcgaagattgattggtcaatgttgtgttttccccatgattatggtgtgttgtgtgtttggattgatggcaaggttggctaggatgcatccatgtttcggagatatggccattcaagttgtgtgttttgataatagaatgagccgtttttttagatgcaatgagaatacttaactagctatatctcttaactatataaaaacaataacatgaagcta

SEQ ID NO: 105907 - DNA, 2749 bp, Zea Mays
cctcttttggccgatctctcttccgttccgttccgctctgccgcagccaattgcttctgctgtgtccttttcctcccagcgagcaccttaccttacctctctctcctcgttgttgtgttgttgattgatcctggaagccgcagctccacaagctcccaaaaagcaacaacctttacctcgttgttcattgtatcttcctttcttccctgcttctggctccgccgccgccgcatctcttctgaagctgaacccgcgacagctaaccgccattgtttgcaggggagacaggagcgagcgagagagagagagagagagagagagagagagctcgcgacaaggttttgcccgcaccatatcgtcctctccccgcaagctccaaaagccaggtccagggactaaatagagcaaaggaagcctttcatcatcgtcgtcatacactaatcgaacgggagaatcggagggagggacatacatcacgtttttgtgctcctccgagtccgtccttctccaagatcccccattttccttctcgtttccaacctcctcctccttcctgaccgaccgatggcgatggtgtgacgccgccgcccgtccccgacaccgctgcgacctcagcatttccacaccgtctcggtctgggtctggtcttcgtctccgcctgcgccttcgttttgatccttaagctgagcttcccttccccgagcgccacctccgcccgtcctaccatggcgctggcttcaatgtgatacgcggaggtgcggtcggtcggtcgtgactcgtgaggaataggaagagggtaggagaggagaagaagagccagcgccggcgggaggggagatggcgggcggcgagggggagatgcggtcgctggcgctcacgcccacgtggtccgtcgccaccgtgctcaccctcctcgtcgcgggctcgctcctcatcgagcgctccatccaccgcctcagcaattggctgaagaaaactcatcggaatccactttacaaagcaatggagaagatgaaagaagaaatgatgctgcttgggttcatatctctgcttctggctgcgacgtcaagaatcatctcggggatctgcatcgactccaagtactacaacagcagattctccccgtgcaccaaagaagaggtccaagaatcgataaatgcagagcatgccattgctcacgcgcgcaagcatctactggaggtcatcctgcaccattcaccgaggagaaatctgaaaactagttaccataaccatgaaggctgccgtgagggatatgagtcatttgtttcgcatgaaggtttggagcagctgcaccggtttatatttgtaatggctgtgactcatgtgacttatagctgcctgacgatgttactagcaatactcaagatccataaatggagaaaatgggaggatgaagcattcagggataatcatgaatcattttctcagatcgcatatgagtcagcaactagaaggcaaccagcacttaccaaatcctattcattccgctcttggagccaaaataatgtggtcatgtggcttgtttgctttattgcgcaatttggtcagtctgttgttcgagcagactatcttatcctccgcaagggttttataatgacccacaatcttccgccaacatatgatttccacaattacatgatacgctcaatggaagaggagtttgagaagattgtcggagtgagtggactgttgtggggcttcgttgttgcttttatgttatttaatgtagacggatccaacctgtacttttggatagcaattcttcctgtaactcttgttcttctggtgggtgcaaagctgcagcatgtgattgcgactctaacagcagagggcgcaaagatgagcacctacgggccaaggatacagccaagggatgatctcttttggttcaagaaaccagagtttctcctttggttgatacacttcgttctctttcagaatgccttcgagttggcttcgttcttctggttctggtggcaatttggttatgattcatgcttcatcaaaaaccaccttttggtatattgccgccttatactggggtttgctggacagttcctgtgcagttacagtacattacctgtatatgcgctggtcactcagatggggtccaagtacaaggctgcgctgatcccgcggaggatcagggagaccatacatgggtggggaaaagcgacgaggaagaagcgccggcgccgccgcggcgacgactcgacggtccgcacggagacgagcacggtgtgctcgctcacggacgacgacgaagacttcgaagacgacgacgaccaccaccaccacggaccgtcgtacgataccccgagagccgggggccgcccgccgtacctgaagatcgagacgcatcgtcagtcgggcagcgggcacgacggccccaggcccggcggcaccccgtgcttccaccccagcggcagcggcagcgggcacgccatgctcctgcggcaggcctccgtctccgcgccgtcgtcgccgtcgtaccgcggaggcaataacgtgacaaggtcggcgtccatgcccgggatcgccgcgctgaggacaacgggctccggcacgccgacgcgcgtgagccatgaggagcctacttgatgcgcgcccgtgcatgccatggatggcttgctagtgcagacgtactgaggactgagctgctagtgtagcaccggatttgaaggtatatcgatatatatatacacacgaaaagatttggggtgacaaa

SEQ ID NO: 105908 - DNA, 1806 bp, Zea Mays
gtacttgcagagcagccatgtggctgaagaaaactcatcggaatccactttacaaagcaatggagaagatgaaagaagaaatgatgctgcttgggttcatatctctgcttctggctgcgacgtcaagaatcatctcggggatctgcatcgactccaagtactacaacagcagattctccccgtgcaccaaagaagaggtccaagaatcgataaatgcagagcatgccattgctcacgcgcgcaagcatctactggaggtcatcctgcaccattcaccgaggagaaatctgaaaactagttaccataaccatgaaggctgccgtgagggatatgagtcatttgtttcgcatgaaggtttggagcagctgcaccggtttatatttgtaatggctgtgactcatgtgacttatagctgcctgacgatgttactagcaatactcaagatccataaatggagaaaatgggaggatgaagcattcagggataatcatgaatcattttctcagatcgcatatgagtcagcaactagaaggcaaccagcacttaccaaatcctattcattccgctcttggagccaaaataatgtggtcatgtggcttgtttgctttattgcgcaatttggtcagtctgttgttcgagcagactatcttatcctccgcaagggttttataatgacccacaatcttccgccaacatatgatttccacaattacatgatacgctcaatggaagaggagtttgagaagattgtcggagtgagtggactgttgtggggcttcgttgttgcttttatgttatttaatgtagacggatccaacctgtacttttggatagcaattcttcctgtaactcttgttcttctggtgggtgcaaagctgcagcatgtgattgcgactctaacagcagagggcgcaaagatgagcacctacgggccaaggatacagccaagggatgatctcttttggttcaagaaaccagagtttctcctttggttgatacacttcgttctctttcagaatgccttcgagttggcttcgttcttctggttctggtggcaatttggttatgattcatgcttcatcaaaaaccaccttttggtatattgccgccttatactggggtttgctggacagttcctgtgcagttacagtacattacctgtatatgcgctggtcactcagatggggtccaagtacaaggctgcgctgatcccgcggaggatcagggagaccatacatgggtggggaaaagcgacgaggaagaagcgccggcgccgccgcggcgacgactcgacggtccgcacggagacgagcacggtgtgctcgctcacggacgacgacgaagacttcgaagacgacgacgaccaccaccaccacggaccgtcgtacgataccccgagagccgggggccgcccgccgtacctgaagatcgagacgcatcgtcagtcgggcagcgggcacgacggccccaggcccggcggcaccccgtgcttccaccccagcggcagcggcagcgggcacgccatgctcctgcggcaggcctccgtctccgcgccgtcgtcgccgtcgtaccgcggaggcaataacgtgacaaggtcggcgtccatgcccgggatcgccgcgctgaggacaacgggctccggcacgccgacgcgcgtgagccatgaggagcctacttgatgcgcgcccgtgcatgccatggatggcttgctagtgcagacgtactgaggactgagctgctagtgtagcaccggatttgaaggtatatcgatatatatatacacacgaaaagatttggggtgacaaa

SEQ ID NO: 105909 - DNA, 3229 bp, Zea Mays
tccatggctgccacaggtacgcttgcccttctcctcccagtgaccctctcctcgaggccctcccaccgcacgcgcggcttcatgcagatcccacgtcgtcagcagccgcgacggctcacagcggcggccaccgaagcctcctcctacaacctaccatctcgctcctcaccggaggcgccggagaccaggcagatacgcctggagacggagtcagcactggagtggggcggcgtgtgcgagcggctggcccacttcaccgccactgctgcgggccgcgccgcctgcgagggagggcgcgtccccgtcgggcggagccgggaggagagcgagaggctgatcgaccagacggcggcggcggtgctgcttccgacgccgctcgatttcggcggcgtcgaggacgtgtccgcgctcgtcgctgcggcggtcgcgggccgcgcgctggcggtgagggagctttgcgcagttgggcgcagcatccgtgccgtgcgggcagtgttccaccagttgaagaggcttgccgatgaaatgccggatggaaggtactcttctcttgtagatatactacaaggttgtgacttcttaactgagcttgttcaaaggatagagttttgccttgattccaccctttctcttgtcctggatcgggcaagcaaaaaactagagataatccgccgagaaaggaggaggaacatcgaaatgttagaatctctactaaaagatacagctgcaaagatttttctagcaggtgggattgataaccctctggtcaccaagcgccgttctaggatgtgtgttggtgtgaaagcttcacacaagcatttgatgcctggtggaatcgttctaagttccagtggctctggcgcaacatactttatggagccacaggatgctgttgagctcaacaacagggaagttaaactctcaggagaggagagagcagaggaactggtagtattgagcttgcttacctcaatgattgcagactcccaactgaagatcagaaatttgatggacaatgttttggaattggaccttgcttgtgctagagggtcgtatgccctatggacaaacagtgtcagaccaaccttcactgatagttataccattagccaatcagaccagtgcaatgactattcaatttatattgagggcattcgccatcctcttctacttgaacagtctcttatggcagaagaatcaactacagaagcatctgaaatgcctgttccattggacatgtgggtaaaaaagaatgcaaggatagttgtgatctctggacctaacactggaggcaaaactgccactatgaagaccttggggctgtcctcgcttatgtcaaaagctggtatattcttcccagccaaaggaaggcctaggattccatggttcgatcaggttcttgcagatattggtgatcaccagtcgctggagcacagcctctctacattcagtgggcacatatcacgtctgcgcaagattgtagaaatggtatcaaaagattctctagttctaattgatgagattggcagcggcactgatccagctgaaggtgtagctctttcaaccagcattttgaagtatcttgcaagtagagtgaatttagcaattgtgacaactcattatgctgatctaagtcggctccagtcagttgacaaccgattcgagaatgctgcaatggaattttgtgtagaaactctacaaccaacataccgaatcttatggggcagtactggtaattccaatgcacttagcattgcaaagtcaattggttttgatcaaaaagtgcttgatcgcgcacaagaatgggttgagaaactactgcctgataagcaaaaggagcggcaaggtttactttatgattctctcgttgatgaaaaagaacttttggaatcccaggcaaatgaagctgcatctgttctttcacaggttgaggggttgtacaatgagattcgcttggaagctgatgatctcgaaagcagagtagctgcattgagagcaagagagacccaaaaggtacaacaggaattgaaggttgtgaagtatcggatggacaccataatcaagaactttgaagctcagctaaagaattcaaaacttgaacaatacaattcgctaatgaggaaagcagaggctgccactgcttccgtggttgccgctcatcagccaagcgaaatagctttcgatgatgacgatgaaaaccggatctcgttcgtctcacaagttggagacaaagtgtatgttcaagggctgggaggagaaacgatggctaccgttgtcgaaactctcggagaagatgagagttgtatggttcaatacggaaagataaaggttcgagtcaagagaagcaggataaaactggttcaaagaggcacaaataacgaggcaacaacttcctcttctgtaaaagcaaagggccgaacaccgaagcagcgatcggcaacgacgacggacgtctccttcggccccgtggtgcagacgtccaagaacacggtggatctgcgcggtaagcgggtcagcgaggcggccttcgagctccgcatggccgtcgacgcgtgcaggccgtaccaggtgctgttcgtggtccatggcatgggcaccggggcggtgaaggactgcgccattgacgtcctccggaagcaccctcgcgtggccaggttcgaggacgagagccctctcaactacggctgcaccgtcgcctacatccagtgaacgggtgggtacagacagactgtttggaactgaacgcagacatttcagtacagaaatcagtttggttttgccttgcctaccagctcccagcgtgtccttgtcacagactcacagttgcggaatgccagttgggtgagctttttgctagtagctgatctgcgggtggatcggataaatggccttggcagttgtgatcagttcggccggcgtcctatgcattggcatcgcaaaatcaccagcggaagcaaggtgtgcgtgcacatgcgcgcctcttctttccagcaggattttgtgtggcgagggctgatgtggccaggttcgagccacgagagacaaaatacttgtggctcgtcaactcgttctcgacttgttttagttttgtcacaagttaagctagtatcttggctcggtttgttacaagccagctcgagttaagcttgttagctcgaatgatctagcatttgtaagcaaaacaaaaggcattcacagatgaactaataagtgataaactgtattaatt

SEQ ID NO: 105910 - DNA, 2144 bp, Zea Mays
gtcaaacaaaaaggcccaaaaagccgctccgagcctccgacctcgcatccggcccgattcgactagggttttagcactcccagtcccggctcccgccgtcgcctcgacgcttcccccctcttcctccgccgccaacccagcgagagagctcccagtccgcgaagacatggcggggaagaagcgcaagtccggctccgagaagccgacgaagcaccgcctcccgctgggagccgatgccgacgctgtcgccgaagcctcgaagcgccgccgatcgggcgccaccaagcagcaccaggcggacgaggaagcgtccatcccgccctctctcagcgccaagatcctccgcgaggcgcgcaagcagcaggaagaggagatgcgcgccgactccagcgacgaacagcgaccctcagccgtcgaggcgaccgcggggccgtccacgtcgtcctcgtttcccgtccccgccgccgacggcgagaatgagggggacgacgtcgatgagttcgacgggtttgacgcgctgagcgagtacgatggcggtgaggtggagatcaacgaggaggacgagaaggccctcgctgctttcatgtcaaaggacaaagctgccgagcgcacccttggcgatatcattctccagaagatcagggagaaggacgccgaggtcgcaactggtgaaggacgacctcgtgtaaaattggacaacagcattattgaactttataaagaggttgggaagttcttaagccggtacacgagtgggaaaattccgaaagccttcaagcgcataccatcgatggagtgctgggcagatgttgtgcagctaacggagccagagaattggtctcctaatgccgtgtatcaagcaacacgcctcttctcttcgaacatgaacacaaagaatgctgagcggttctatgaagccattttgctaccccgtgttcgaaatgacataaggaagaacaagaggctgcattttgcactctaccagtcgctgaagaaggccctttataagcccgcggcatttaacaagggaattttgctaccactctgtcgggaaaggaattgcaccctacgcgaagcagtgattattgggagtattatccagaaagtttccattccatttctccatgcaagtgtagctctagtaaaactagcagagatggagtactgtggcactacaagttacttcatcaagctatttctagacaagaaatatgctttgccataccgtgcacttgatgcagtgcttgcccatttcatgcgttttgttgatgatgagaggatcatgcctgttatatggcatcaatcactgcttgcatttgtggaaagatacaagaacgagttagagaaaaaggataaggagaaacttgcacgtttgttggatcaccagaaacactatttggttactccagaaattcgaagggagcttcgagggagctgcaacaggggtgaaaaagatacaaatttgcatacttatatcctttcagtggagcttgttatgatctttaccttgcatacatatactatattagctgaacaaaaaatgttgtaattaatgcaattagaattttgattcaagtctggttatttctttaacatgttttcttactgtcacctatctccgtcattaccaagcctatcgaggaagacaaatgggacgtaccacaagtgccaatggaggaagattagccagattctccaacatcgatttttacacttcatttgtttttgaattaaatttctaaagatattgctgtattttattgggcgtgaacttttagtgccaatattggggtaaaataggttcccagtagattgggcccccaatgttctgagggcattttgcagtcggaatgtgattcacacacagaaaagtttgttttgatcatttggagcattccaagggggcattcagcatggacatgtagcatactgtctttcgcagaagtgggtaagaaatggttgatcatgttactttgtagctgcgacaactaaaggtgtaccatacttgaaccagaaatgaaaatgaataacccggagttcgtttggtttttttagggtcttcgttgtttgcataattccctatctagacctcagtagatgttctctggaatggataccagctattttatttttaaaacaaaaaa

SEQ ID NO: 105911 - DNA, 2010 bp, Zea Mays
gtcaaacaaaaaggcccaaaaagccgctccgagcctccgacctcgcatccggcccgattcgactagggttttagcactcccagtcccggctcccgccgtcgcctcgacgcttcccccctcttcctccgccgccaacccagcgagagagctcccagtccgcgaagacatggcggggaagaagcgcaagtccggctccgagaagccgacgaagcaccgcctcccgctgggagccgatgccgacgctgtcgccgaagcctcgaagcgccgccgatcgggcgccaccaagcagcaccaggcggacgaggaagcgtccatcccgccctctctcagcgccaagatcctccgcgaggcgcgcaagcagcaggaagaggagatgcgcgccgactccagcgacgaacagcgaccctcagccgtcgaggcgaccgcggggccgtccacgtcgtcctcgtttcccgtccccgccgccgacggcgagaatgagggggacgacgtcgatgagttcgacgggtttgacgcgctgagcgagtacgatggcggtgaggtggagatcaacgaggaggacgagaaggccctcgctgctttcatgtcaaaggacaaagctgccgagcgcacccttggcgatatcattctccagaagatcagggagaaggacgccgaggtcgcaactggtgaaggacgacctcgtgtaaaattggacaacagcattattgaactttataaagaggttgggaagttcttaagccggtacacgagtgggaaaattccgaaagccttcaagcgcataccatcgatggagtgctgggcagatgttgtgcagctaacggagccagagaattggtctcctaatgccgtgtatcaagcaacacgcctcttctcttcgaacatgaacacaaagaatgctgagcggttctatgaagccattttgctaccccgtgttcgaaatgacataaggaagaacaagaggctgcattttgcactctaccagtcgctgaagaaggccctttataagcccgcggcatttaacaagggaattttgctaccactctgtcgggaaaggaattgcaccctacgcgaagcagtgattattgggagtattatccagaaagtttccattccatttctccatgcaagtgtagctctagtaaaactagcagagatggagtactgtggcactacaagttacttcatcaagctatttctagacaagaaatatgctttgccataccgtgcacttgatgcagtgcttgcccatttcatgcgttttgttgatgatgagaggatcatgcctgttatatggcatcaatcactgcttgcatttgtggaaagatacaagaacgagttagagaaaaaggataaggagaaacttgcacgtttgttggatcaccagaaacactatttggttactccagaaattcgaagggagcttcgagggagctgcaacaggggtgaaaaagatacaaatttgcatactttgtcacctatctccgtcattaccaagcctatcgaggaagacaaatgggacgtaccacaagtgccaatggaggaagattagccagattctccaacatcgatttttacacttcatttgtttttgaattaaatttctaaagatattgctgtattttattgggcgtgaacttttagtgccaatattggggtaaaataggttcccagtagattgggcccccaatgttctgagggcattttgcagtcggaatgtgattcacacacagaaaagtttgttttgatcatttggagcattccaagggggcattcagcatggacatgtagcatactgtctttcgcagaagtgggtaagaaatggttgatcatgttactttgtagctgcgacaactaaaggtgtaccatacttgaaccagaaatgaaaatgaataacccggagttcgtttggtttttttagggtcttcgttgtttgcataattccctatctagacctcagtagatgttctctggaatggataccagctattttatttttaaaacaaaaaa

SEQ ID NO: 105912 - DNA, 415 bp, Zea Mays
ccagggggccggggggcgttggccgaggccggcgatctccctgtaccatgcgcggagcatccagagcgcgtagaggatgacggccatgccggcgagccccacgacggagttggccgccttgagcgccgtctgcacgcagctccgcaccatccgccccgccatgccgatgccgatgccgccgtggctgaccggagcaagacctgcggcgccgatagctcagcacctcttgctccctctcggctgggtcgccggtccggtccggctcacctttatgttccgcgaacgaagcgggcggtcgcaggaaggaggatgcagcaggctgcgcgtgcgggagaagcggagaccggaccggacgtggatggagcgagattcctgccacgacttgacgttaaacaccggtaatgatgtgttatga

SEQ ID NO: 105913 - DNA, 2118 bp, Zea Mays
cgcccagccgcccagggcctaggccaccgtcagcgccgcccgcctccatctccgccccgagcggctgcgccccgcccgccgcccgcccgcagtccaccaggcgtcgagccccgccccggctcgcgcgcgtcgagcctctgtccggccccggctgcaacccactcactcagccagacctggcttctctgcagactgcaggttctcagtttctcttataacaggtacacccttccctcccggctgtgcgaagcaactccaccctaatttattttgcagaaaaagttatcggtccgcccttggttactgaaactggtcaggtgtatgtaattttgaagtaacaaaggatttggaacccagccctctgttctccaccaccgcttcgaagatgccgcaggtaatggtggtggcacggaacttcatggatatggtggctgctcttcctgcgggcaagcttgatatgctctatgactcagcctttatctgtgaggcagtactcaggtcacttcccccactggcaaagaagtatgcactgcagatgttgtatgtgctggcaccagtgaccgctgcagcaatggaagagtgggtgcttgatgaatatgctgccaagcataaggttgccattgataagcttctacagctcagggtctttgttgaagtgcgcgacagacgacgggacgtgagctacaagatgaatcagaagttccagggaaacatgcagaagtatttggttgatggtggaagtttaccaagggaacctttaccattaagtgtcactggtcgattgcccacaccagcagatctggaagcctatgctcttgatcaatgggagtgcttcttgttgcaattgatcaattcatctcaagtcgaaaaagggtcaagttttagctcctccatgatgaagacgtttcagcgtggtcttctgagttcaagggatggtgaagcttcaaagttgactgaaaatggcttccaatttcttctgatggaaacaaatgcacaactttggtacataatgagagaatacatttcatctgctgaggaacgtggagtggaccctacggagctgatatcatttctcttggaacttagctttcataaattgggagcggcttatagcttgaacactctgactgatgtccagaggattgccatcagggatcttgcagaattaggactagtcaaacagcagcagggtcgaaaggatagctggttcattcctacccaattggctactaatctttcagcaagcttgtcagattcgtcatctaacaaagagggatttgtggttgtggagacaaactttcgaatgtatgcatactctacttccaagttgcactgtgaaattctacgcctttttgcaagggtggagtatcaacttccaaacctcatcgtaggagctgttacaaaagaaagtatctatggtgcttttgaaaatgggataactgctgagcagataatttcatttcttaggcaaaatgctcaccctcgtgttgctgacaagatacccgctgtcccggagaatgtcacagatcagattaggttgtgggaaactgacctcaacagggttgagatgattccatcgcatttgtacgaagattttcctagcaaggaatggtttgaacaatgctgtgattatgcaagggataatgggtacttgctgtgggaggaccccaagagaatgagactaattgtacgaggggagttccaccccgaaatgagggagttccttcgcaggcaaagatgaggaacgaccttgtacttgacggaccatgctatgcttctttgtagtgcatagaaacactgtatcgggtaatagttctcctttaaatatcaggaaagggtctagaaaagggctcagtttttgaattattttggtgacctgtgagctgtggaagcatatgaataatgtggtgttcaatggagcaaggcccaacatccttgatctgcttctaaatgttactagtgactgtaccctatgctggtgtatggctggtggccaggtcctgttggaactcttaggtaggtagtatggtgggatggagttggtatgctcttaatttgttgttatttggattgattctatataggacggagtgattttaaaaatgaaaaaaactcaaa

SEQ ID NO: 105914 - DNA, 1990 bp, Zea Mays
cgcccagccgcccagggcctaggccaccgtcagcgccgcccgcctccatctccgccccgagcggctgcgccccgcccgccgcccgcccgcagtccaccaggcgtcgagccccgccccggctcgcgcgcgtcgagcctctgtccggccccggctgcaacccactcactcagccagacctggcttctctgcagactgcaggttctcagtttctcttataacaggtacacccttccctcccggctgtgcgaagcaactccaccctaatttattttgcagaaaaagttatcggtccgcccttggttactgaaactggtcaggtgtatgtaattttgaagtaacaaaggatttggaacccagccctctgttctccaccaccgcttcgaagatgccgcaggtaatggtggtggcacggaacttcatggatatggtggctgctcttcctgcgggcaagcttgatatgctctatgactcagcctttatctgtgaggcagtactcaggtcacttcccccactggcaaagaagtatgcactgcagatgttgtatgtgctggcaccagtgaccgctgcagcaatggaagagtgggtgcttgatgaatatgctgccaagcataaggttgccattgataagcttctacagctcagggtctttgttgaagtgcgcgacagacgacgggacgtgagctacaagatgaatcagaagttccagggaaacatgcagaagtatttggttgatggtggaagtttaccaagggaacctttaccattaagtgtcactggtcgattgcccacaccagcagatctggaagcctatgctcttgatcaatgggagtgcttcttgttgcaattgatcaattcatctcaagtcgaaaaagggtcaagttttagctcctccatgatgaagacgtttcagcgtggtcttctgagttcaagggatggtgaagcttcaaagttgactgaaaatggcttccaatttcttctgatggaaacaaatgcacaactttggtacataatgagagaatacatttcatctgctgaggaacgtggagtggaccctacggagctgatatcatttctcttggaacttagctttcataaattgggagcggcttatagcttgaacactctgactgatgtccagaggattgccatcagggatcttgcagaattaggactagtcaaacagcagcagggtcgaaaggatagctggttcattcctacccaattggctactaatctttcagcaagcttgtcagattcgtcatctaacaaagagggatttgtggttgtggagacaaactttcgaatgtatgcatactctacttccaagttgcactgtgaaattctacgcctttttgcaagggtggagtatcaacttccaaacctcatcgtaggagctgttacaaaagaaagtatctatggtgcttttgaaaatgggataactgctgagcagataatttcatttcttaggcaaaatgctcaccctcgtgttgctgacaagatacccgctgtcccggagaatgtcacagatcaggttgtgggaaactgacctcaacagggttgagatgattccatcgcatttgtacgaagattttcctagcaaggaatggtttgaacaatgctgtgattatgcaagggataatgggtacttgctgtgggaggaccccaagagaatgagactaattgtacgaggggagttccaccccgaaatgagggagttccttcgcaggcaaagatgaggaacgaccttgtacttgacggaccatgctatgcttctttgtagtgcatagaaacactgtatcgggtaatagttctcctttaaatatcaggaaagggtctagaaaagggctcagtttttgaattattttggtgacctgtgagctgtggaagcatatgaataatgtggtgttcaatggagcaaggcccaacatccttgatctgcttctaaatgttactagtgactgtaccctatgctggtgtatggctggtggcc

SEQ ID NO: 105915 - DNA, 1330 bp, Zea Mays
acttttgcccttcgaactaaaagcgcctgcatctcaaacccgacggcgctctcttctctatcctctgtgtcccctccaccaaaaccgacgacgacgtcgctctcctccaccggtgctcggcgctctccctccaccagcggtggtccacagacgctcggcgagctccaccggcgggcgctggcggctggtcagatccgctcggcagtcatccatctggcacatcgggtagctcgcgcctccgttggcagtcccaccgccgcccggccctcccccagcgcccccggtgatccggaccgcacccgcttactcggcctaacgaccggctcctgccccgacgcagccgaagctcccagcgtcctcctgcaggccgagctgaaggttcagcgcgccggtggagttagacgacgaaactccgtcacgtcatacctctccgcctcccgtcttccagacgtctctaatcggggtcccagcgtctcggagaagaggagcagcacggcacggcagctgtggcgaggaaggctcctgtcccatcccaacccagttagcagccgcccaaggaggaggagatccaatcggcgtgcgggcgtccgcggtccatccatcgatccaattccaatctgcaggcatctcgagtgcaccgtcggccgcaccagcaggcagcatcccgacaccgccgttccccagcagacagcagcaggtcgccgtcgttccccagcaggcagcaacaggtcgccagctcgcccccgcgtttgcttccggtcagctgatgtcgcatgcttttcggcagcgctagtcctcgacggacgacgaccagcatcagccgccgccccagtcgaccagcatccacggcggcacgagcccacgaccagcagatcaacgcggtggcagatcaacgagcccacgactagtcagaaaatttttacagcagcatatccaccggatacccgatacccgacgggtacccggtgggcacgggtatgggtccatttttttacccgattggcttggtgcgtatggatatttgtaaagggtcgagtatgatatcgggtcgggtattatacccgaacacaacccgacccgctgccatccctaaacgcagctattctgtcaattccttaaatagagcagcactgagcatatccggcggagaatttagttcagtgccggtttccatttcacttcatatctgggcttaatcttgtgtcagcttacctacacattgcaattgttgtcacatagcttatgaatgaagcacggaaatgatcgagttatattagaactatctacaccgacgtattgtgttgaatttaagatgccatcgatgcctttt

SEQ ID NO: 105916 - DNA, 773 bp, Zea Mays
acttttgcccttcgaactaaaagcgcctgcatctcaaacccgacggcgctctcttctctatcctctgtgtcccctccaccaaaaccgacgacgacgtcgctctcctccaccggtgctcggcgctctccctccaccagcggtggtccacagacgctcggcgagctccaccggcgggcgctggcggctggtcagatccgctcggcagtcatccatctggcacatcgggtagctcgcgcctccgttggcagtcccaccgccgcccggccctcccccagcgcccccggtgatccggaccgcacccgcttactcggcctaacgaccggctcctgccccgacgcagccgaagctcccagcgtcctcctgcaggccgagctgaaggttcagcgcgccggtggagttagacgacgaaactccgtcacgtcatacctctccgcctcccgtcttccagacgtctctaatcggggtcccagcgtctcggagaagaggagcagcacggcacggcagctgtggcgaggaaggctcctgtcccatcccaacccagttagcagccgcccaaggaggaggagatccaatcggcgtgcgggcgtccgcggtccatccatcgatccaattccaatctgcaggcatctcgagtgcaccgtcggccgcaccagcaggcagcatcccgacaccgccgttccccagcagacagcagcaggtcgccgtcgttccccagcaggcagcaacaggtcgccagcgctagtcctcgacggacgacgaccagcatcagccgc

SEQ ID NO: 105917 - DNA, 207 bp, Zea Mays
atggtcgcctgctccatgcgcaagtcgtcgttcaaggttcttgaggctgacatccagcacgccaacaccctcctggccgacgcgctggggctgctcatgatcctaatctacaaggtttatgtggatgggagcaccaccaccatgtcgtgcatgtttcagaactactctaccgctgctgctgctgctgcttctgctattctaacatag

SEQ ID NO: 105918 - DNA, 96 bp, Zea Mays
ttgtcgggatttagatgatggatttgaggcggtggattatactggctcagacttgtgtcttagtccggtgtagtggtgatcgtagtagagggtgta

SEQ ID NO: 105919 - DNA, 1962 bp, Zea Mays
cggagcaagcagaagaaagcaaagtgcagagcacgagcagcagcaccagtccaccaggccggcgccgcccaaaatctccgcgtccccccccccatggcctccttctttgcggacgacggcgccgacgacctcccgcgcgccacctcccaccccttcgactccgacgacttcggtgctgccgcagccgacgacgctagcgccggcgggtacgcctccttcgccgacggtggcgtcgaggaggtggacgaggagatcaccgtagagtcctacggcgtcccgatccgccacgtctccgggggatactcgccattctcccccgacctcgagcccaacggcagcgacggcccgaccctgccgccgcccaccgagatggggcgggaggagggaatccttctccgcgagtggcggaggaaaaatgctatggaacttgagaaaaaagaacagaaggagaaggagctacgtgcccaaataattgctgaagcagaagaattcaagaaagctttttttgagaagaggatacagaactgtgcgtcgaatatggtcaacaacagagaaagggagaagatttttgtagccagccaggagaaattccatgccaacgcagacaagcagtactggaaatcgatctcggatctcatcccgcatgaaatagccaccattgagaagcggggaaagaaagacaaggacaagaagccatccgtcacagttattcagggccccaagcctggcaagcccaccgacctctcccggatgcgccatatcttagtgaagctgaagcacgctccaccgccacatatgttgcaacctccaccagcacctgctgctaaagagggcgcaaaggatggctccaaagaaggtggaaaggatggtggtgccaaagacggcgcggcagccccagcaaacgacgccaagcagcctgcagagagccaagaaaccagcaccgccaatggcccctcggaggccgagaaagagcagcctgcggcgtcggagtgaccggaaaggaaagcgtagcattacagaaacacaagaggcttgactgtcagtagatggaaacgtgtttttgtttctgatgatttcgcagacccgtttatcccgtactgatcttttgcagagatctgcatcaggatgtcttcgtatgagcacagaacattcataatttagtatcaccacagtagtcgtatctttgctgttttcacccctgtccagttgtgtcgtcactgagatgcctgtgatctcatacaagttgaggtctgaaactgttacgatgatatggtactgccctaataataatctgaagctgtgcaacaaacagcaatcttgcattgctctgggtctggcatggattcactaatctatatgtacaagatctagctgccgcatttgcaggaggaaaacacacttggcactacatcatatagtcgccgccggttgacaaaacgcaaggaaggaattagtcaaaattacatggcggttgcttcacctggggctcatctcggtcaccgtgggtggcaccaccgtgctgaacatgttggagtcctcctgggacgccaggttcttgaacctggagtcggtggaagtggtggccttggacaaggggctccgcctgctgtactcctggaggtaccccggcgccgtcagctcgctctcgttgatccggacgggcttggacagcatggtgacgacctggggcatcgtcggccggcgcgcggcggccgcctgtaggcagaagagggccaccatgatgtacctgatggcttcttcgtcagggcagtctacaagggctggatccaccagttccttgagcctcttcgcttcgtacagctcccatgccttctctaggagaatcttgtcatccatgagtatgctcctggagctactagtgccgctcactatctccaggacaaggacaccaaagctgtagatgtccgctttcttggtgagctggccatgccaggcgtactc

SEQ ID NO: 105920 - DNA, 1476 bp, Zea Mays
cctgccactctagttttaatttgttattgcttcctttttcaacaatgtcttaggaaaaatgctatggaacttgagaaaaaagaacagaaggagaaggagctacgtgcccaaataattgctgaagcagaagaattcaagaaagctttttttgagaagaggatacagaactgtgcgtcgaatatggtcaacaacagagaaagggagaagatttttgtagccagccaggagaaattccatgccaacgcagacaagcagtactggaaatcgatctcggatctcatcccgcatgaaatagccaccattgagaagcggggaaagaaagacaaggacaagaagccatccgtcacagttattcagggccccaagcctggcaagcccaccgacctctcccggatgcgccatatcttagtgaagctgaagcacgctccaccgccacatatgttgcaacctccaccagcacctgctgctaaagagggcgcaaaggatggctccaaagaaggtggaaaggatggtggtgccaaagacggcgcggcagccccagcaaacgacgccaagcagcctgcagagagccaagaaaccagcaccgccaatggcccctcggaggccgagaaagagcagcctgcggcgtcggagtgaccggaaaggaaagcgtagcattacagaaacacaagaggcttgactgtcagtagatggaaacgtgtttttgtttctgatgatttcgcagacccgtttatcccgtactgatcttttgcagagatctgcatcaggatgtcttcgtatgagcacagaacattcataatttagtatcaccacagtagtcgtatctttgctgttttcacccctgtccagttgtgtcgtcactgagatgcctgtgatctcatacaagttgaggtctgaaactgttacgatgatatggtactgccctaataataatctgaagctgtgcaacaaacagcaatcttgcattgctctgggtctggcatggattcactaatctatatgtacaagatctagctgccgcatttgcaggaggaaaacacacttggcactacatcatatagtcgccgccggttgacaaaacgcaaggaaggaattagtcaaaattacatggcggttgcttcacctggggctcatctcggtcaccgtgggtggcaccaccgtgctgaacatgttggagtcctcctgggacgccaggttcttgaacctggagtcggtggaagtggtggccttggacaaggggctccgcctgctgtactcctggaggtaccccggcgccgtcagctcgctctcgttgatccggacgggcttggacagcatggtgacgacctggggcatcgtcggccggcgcgcggcggccgcctgtaggcagaagagggccaccatgatgtacctgatggcttcttcgtcagggcagtctacaagggctggatccaccagttccttgagcctcttcgcttcgtacagctcccatgcctt

SEQ ID NO: 105921 - DNA, 127 bp, Zea Mays
agtgtaccggtggaaccttttatatatacgtgtggtctggtgtcatggttaaaattgttgttgttggtacattgggttgctgtacatacatattgatcttatgcaatcttatttgcactgtacacgg

SEQ ID NO: 105922 - DNA, 1617 bp, Zea Mays
atgggggccgaggtggcggccgccggccgcagcttgccggggttcttggggaggaagaaccggtacgcgcgcgtggacgacgtgctcccgcaggagccggaggacggcggtggcgtccgtgttcgcggcgtcggcggcagctgccggcgatacgtctttgcttgctccgtcttcgcgtctctcaaccatgtcctgctcggctacgatgtgggtgtgatgagcggctgcattatcttcattcagaaggacctccacatcaccgaggtgcagcaagaagtgctggtcggatgcctcggcttcatctccctcctcggcagccttgcggccggccggacctcggacgctatcggccgcagatggaccatcggcctagccgctgccgtgttccagggcggcgcggtgatcatggcgctcgcgccgtcgtttggcctgctcatggcggggcggctgctggccggcatcgggatcgggataggcatcatggtggcgcccgtgtacatctcggagatctccccggagacgctgcggggctccctggcgtccctcccggagatcttcatcagcttcggcatcctcatcgggtacgtctccaacctcgccttcgcgggcctgcccgacaacatcaactggcgcgtcatgctcgccgccggcatcctcccgtccatctccattgcgttcgtgctgctggtcatcccggagtcgccgcggtggctggtcatgcagggccaggccggcgacgcgcgcgcggtgcttgtgaaggtctcggacagcgtggaggaggcggaggagaggctcgccgagatcgaggaggccgcgcgcgccactgccgcttccagcaacggcaaggaggcgtggcgggagctgctgcggccgtcgcctgtgatccgacggatgctggtgaccgggctgggcgtccagttcttccagcaggccaccggcatcgacgcgctggtgtactacagcccgaccatattccgcgactccggcatcacgacggagagccagctcctgggcgccaccgtcgcggtgggcgtggtgaagacggtgttcatcgtgatcgccatcgtcctcgtcgaccgcgtcggccggaagccgctgctgtacgtcagcacggccggaatcacggtgtgcctcgccgtgctggccgcgtcgctgtccgcactcgcgcgcggcgcgctgccgggcggcgtcgccgtcgggctcgccatcctcacggtgtgcggcttcgtggccttcttctcggtggggatcggtcccatcaacatggtgctgagctcggagatctacccgctgcggctgcgcgcgcaggccgtggccgccggcttcgcgctcaaccgcatggccagcggcgccgtggccatgtcgttcctctccatctgccgcgccgtgaccgtcgcgggcgcgttcgccgcgttcgcggccgtctcggcgctgtcggtggcgttcgtgcacctctgcgtgcccgagacgagcggcaagacgctggaggagatcgagtcgctgttcggtggcggcggtgtgagcgtgacgcacggtggctccggcgaagtggagctcggcgacgccgagcggcttgagcacaagaggctagtgtcgcacgggcacgcgtcgagctga

SEQ ID NO: 105923 - DNA, 1354 bp, Zea Mays
ccccaatccatacaggcccttattgcccacggcccacggcccaatgccgaaccaggcccagctccattttcgccgccgccgttggccggcaacggcattgccgcgcgcccgccgtatctggcttcggctgccgtcgcctccctccccgccctgcgcaacccctcctcgccgcgccgtcaagacgcctgtcttcttctcatctcgtcggcgctcgtcctccctccctccctcccccaggtcctgcttcctccccatggcgtggatctggatggtcctcgcggcgggagccgtgctcctgtgggcgatctctctgggaaggatcttctcctccgccgcgccgtcctgtgtgcccctgagcccgcagttcatgccccctctccgcggcgacaggaggacccggaacgtgatgctcgtcgtcgcccaccccgacgacgagtccatgttctttgctccaactatccttttcctcaagtcaaaaggtcacaacattcacattctgtgcatgtctcgaggtaatgctgatggtctcggagatactcgtaaagaagaattgtaccatgcctgtgaaacccttaagattccacatgaacaagttgaagtcttggaccacccgaaattgcaggatggatttcatgagaaatgggaccatgaactagtatcagaacttgtcatggagcatgtccaactatgggtcattgacatgattgtgacatttgattcatatggagtatcaggccacccaaaccacagagatgttcattacggcatatgcaagtttctccatgcgaataggcaaggaaatgttgaagcttgggaactagcaagcctgaatattcttcgcaagtacagtggtccggttgacatttggctttcttcgctgatctccgtctcaaggtcaaagcagtcaatctatactctagttaacagtagcccgtccagaagctatgaggcaatggctgcacacagaagtcagtgggtttgcaccatccaggcgctagaaccactgcgatttggaaagcgcgggaaggcagagcagagcatgatgctcccgagcgccgagctgtcgtcgtccaacggcggcggcgccagtggcctggcagccctgccggtcttcttgggcaggaagaacaagtacgtgcgcatggacgacgtgctcccttcggagcatgaaggcgacgacggcgggggcgggggcgggggcggcggcgccgtccatgtccgtggccgccaaagcagcaggagatacgtcttcgcctgctccgtcttcgcctccctcaactccgtgctgctcggttacggtaagcttcttgttctcgacttgcgtagccagttcttcgattaaaaagtactatag

SEQ ID NO: 105924 - DNA, 1258 bp, Zea Mays
ccccaatccatacaggcccttattgcccacggcccacggcccaatgccgaaccaggcccagctccattttcgccgccgccgttggccggcaacggcattgccgcgcgcccgccgtatctggcttcggctgccgtcgcctccctccccgccctgcgcaacccctcctcgccgcgccgtcaagacgcctgtcttcttctcatctcgtcggcgctcgtcctccctccctccctcccccaggtcctgcttcctccccatggcgtggatctggatggtcctcgcggcgggagccgtgctcctgtgggcgatctctctgggaaggatcttctcctccgccgcgccgtcctgtgtgcccctgagcccgcagttcatgccccctctccgcggcgacaggaggacccggaacgtgatgctcgtcgtcgcccaccccgacgacgagtccatgttctttgctccaactatccttttcctcaagtcaaaaggtcacaacattcacattctgtgcatgtctcgaggtaatgctgatggtctcggagatactcgtaaagaagaattgtaccatgcctgtgaaacccttaagattccacatgaacaagttgaagtcttggaccacccgaaattgcaggatggatttcatgagaaatgggaccatgaactagtatcagaacttgtcatggagcatgtccaactatgggtcattgacatgattgtgacatttgattcatatggagtatcaggccacccaaaccacagagatgttcattacggcatatgcaagtttctccatgcgaataggcaaggaaatgttgaagcttgggaactagcaagcctgaatattcttcgcaagtacagtggtccggttgacatttggctttcttcgctgatctccgtctcaaggtcaaagcagtcaatctatactctagttaacagtagcccgtccagaagctatgaggcaatggctgcacacagaagtcagtgggtttggtttagaagagtgttcgtcatgctctcaagttatacctacataaacatgctacagaaaatttagcacgtgatacgacgtcatatcagagcgagccgccattgtcgtctccaatgtcgtacttgtgcgttgtcaattgtatatttgtactgtatgtatcaatgattttataggcagtgctcatagggtgactgtacggcttcttgttcccaattctctaccatagtatatttgtaagttcttgggtgtggtcaaacgatttctggttcgatttgacgt

SEQ ID NO: 105925 - DNA, 1485 bp, Zea Mays
cgccgcctccgtcgaacacagagtcacttcgccacgaacaaaagcgcatcgatctcgctgtcgtcactcctcgtcacccagccacgaacagaggcaccacccagcatggccctgcaggcggcgctcctcccatccaccctctcatccgtccccaagaagtgcagcatcgccgtcgcggcgaaggacacggcattccttagcgtatcccagaagaaggtgcaggcggcgtcgctgtcggtgagaacgcgggtggcgacgacggcgcctgtggccacgccggggtccagcacggcggccaaggatgggaagaagaccgtgcggcagggcgtggtggtgatcacgggcgcgtcgtcggggttgggcctggcggcggccaaggcgctggcggagaccggcaagtggcacgtggtgatggcctgccgcgacttcctcaaggcggccaaggcggccaagggcgccggcatggcggacggcagctacaccatcatgcacctggacctggcctccctcgacagcgtgcggcagttcgtggacagcttccggcgcgccggcatgccgctcgactcgctcgtctgcaacgccgccatctaccggcccacggcaaggacgccgacgttcacggcggacggatacgagatgagcgtcggcgtcaaccacctgggccacttcctcctggcgcgcctgctcctggacgacatgcagaagtccgactacccgtcccgccgcctcatcatcctcggctccatcaccggcaacaccaacacgctggccgggaacatcccgcccaaggccgggctgggcgacctccgcggcctcgcggcggggctgcgcggccagaacggctctgccatgatcgacggctccgagagcttcgacggcgccaaggcgtacaaggacagcaagatctgcaacatgctcaccatgcaggagctgcaccggcggtaccacgaggagacgggcatcacgttcgcgtcgctctacccggggtgcatcgccaccacggggctgttccgcgagcacatcccgctgttccgcctgctcttcccgcctttccagaagttcgtcaccaagggcttcgtgtcggaggcggagtccggcaagaggctggcgcaggtggtcagcgaccccagcctcaccaagtcgggggtgtactggagctggaacaaggactcggcgtcgttcgagaaccagctgtcgcaggaggccagcgatccggagaaggccaagaagctctgggagatcagcgagaagctcgtggggcttgcctgagctcgccggcacggcgacggcgacatgatgactctgtcgagcagaggagctttcgcttcgttgtattatgtgtaccattagcatccattttgtttgtttctagaagttggtaatgaccgtcggagaagagcctgtaattgttcgatcatgtattattgcttacaaaatttttttcaaaaaccgatgaaataaaacaacaggcttaacatctctaag

SEQ ID NO: 105926 - DNA, 1482 bp, Zea Mays
cgccgcctccgtcgaacacagagtcacttcgccacgaacaaaagcgcatcgatctcgctgtcgtcactcctcgtcacccagccacgaacagaggcaccacccagcatggccctgcaggcggcgctcctcccatccaccctctcatccgtccccaagaagtgcagcatcgccgtcgcggcgaaggacacggcattccttagcgtatcccagaaggtgcaggcggcgtcgctgtcggtgagaacgcgggtggcgacgacggcgcctgtggccacgccggggtccagcacggcggccaaggatgggaagaagaccgtgcggcagggcgtggtggtgatcacgggcgcgtcgtcggggttgggcctggcggcggccaaggcgctggcggagaccggcaagtggcacgtggtgatggcctgccgcgacttcctcaaggcggccaaggcggccaagggcgccggcatggcggacggcagctacaccatcatgcacctggacctggcctccctcgacagcgtgcggcagttcgtggacagcttccggcgcgccggcatgccgctcgactcgctcgtctgcaacgccgccatctaccggcccacggcaaggacgccgacgttcacggcggacggatacgagatgagcgtcggcgtcaaccacctgggccacttcctcctggcgcgcctgctcctggacgacatgcagaagtccgactacccgtcccgccgcctcatcatcctcggctccatcaccggcaacaccaacacgctggccgggaacatcccgcccaaggccgggctgggcgacctccgcggcctcgcggcggggctgcgcggccagaacggctctgccatgatcgacggctccgagagcttcgacggcgccaaggcgtacaaggacagcaagatctgcaacatgctcaccatgcaggagctgcaccggcggtaccacgaggagacgggcatcacgttcgcgtcgctctacccggggtgcatcgccaccacggggctgttccgcgagcacatcccgctgttccgcctgctcttcccgcctttccagaagttcgtcaccaagggcttcgtgtcggaggcggagtccggcaagaggctggcgcaggtggtcagcgaccccagcctcaccaagtcgggggtgtactggagctggaacaaggactcggcgtcgttcgagaaccagctgtcgcaggaggccagcgatccggagaaggccaagaagctctgggagatcagcgagaagctcgtggggcttgcctgagctcgccggcacggcgacggcgacatgatgactctgtcgagcagaggagctttcgcttcgttgtattatgtgtaccattagcatccattttgtttgtttctagaagttggtaatgaccgtcggagaagagcctgtaattgttcgatcatgtattattgcttacaaaatttttttcaaaaaccgatgaaataaaacaacaggcttaacatctctaag

SEQ ID NO: 105927 - DNA, 1476 bp, Zea Mays
cgccgcctccgtcgaacacagagtcacttcgccacgaacaaaagcgcatcgatctcgctgtcgtcactcctcgtcacccagccacgaacagaggcaccacccagcatggccctgcaggcggcgctcctcccatccaccctctcatccgtccccaagaagtgcagcatcgccgtcgcggcgaaggacacggcattccttagcgtatcccagaaggcggcgtcgctgtcggtgagaacgcgggtggcgacgacggcgcctgtggccacgccggggtccagcacggcggccaaggatgggaagaagaccgtgcggcagggcgtggtggtgatcacgggcgcgtcgtcggggttgggcctggcggcggccaaggcgctggcggagaccggcaagtggcacgtggtgatggcctgccgcgacttcctcaaggcggccaaggcggccaagggcgccggcatggcggacggcagctacaccatcatgcacctggacctggcctccctcgacagcgtgcggcagttcgtggacagcttccggcgcgccggcatgccgctcgactcgctcgtctgcaacgccgccatctaccggcccacggcaaggacgccgacgttcacggcggacggatacgagatgagcgtcggcgtcaaccacctgggccacttcctcctggcgcgcctgctcctggacgacatgcagaagtccgactacccgtcccgccgcctcatcatcctcggctccatcaccggcaacaccaacacgctggccgggaacatcccgcccaaggccgggctgggcgacctccgcggcctcgcggcggggctgcgcggccagaacggctctgccatgatcgacggctccgagagcttcgacggcgccaaggcgtacaaggacagcaagatctgcaacatgctcaccatgcaggagctgcaccggcggtaccacgaggagacgggcatcacgttcgcgtcgctctacccggggtgcatcgccaccacggggctgttccgcgagcacatcccgctgttccgcctgctcttcccgcctttccagaagttcgtcaccaagggcttcgtgtcggaggcggagtccggcaagaggctggcgcaggtggtcagcgaccccagcctcaccaagtcgggggtgtactggagctggaacaaggactcggcgtcgttcgagaaccagctgtcgcaggaggccagcgatccggagaaggccaagaagctctgggagatcagcgagaagctcgtggggcttgcctgagctcgccggcacggcgacggcgacatgatgactctgtcgagcagaggagctttcgcttcgttgtattatgtgtaccattagcatccattttgtttgtttctagaagttggtaatgaccgtcggagaagagcctgtaattgttcgatcatgtattattgcttacaaaatttttttcaaaaaccgatgaaataaaacaacaggcttaacatctctaag

SEQ ID NO: 105928 - DNA, 1379 bp, Zea Mays
cgcctccgtcgaacacagagtcacttcgccacgaacaaaagcgcatcgatctcgctgtcgtcactcctcgtcacccagccacgaacagaggcaccacccagcatggccctgcaggcggcgctcctcccatccaccctctcatccgtccccaagaagtgcagcatcgccgtcgcggcgaaggacacggcattccttagcgtatcccagaagaaggtgcaggcggcgtcgctgtcggtgagaacgcgtcgtcggggttgggcctggcggcggccaaggcgctggcggagaccggcaagtggcacgtggtgatggcctgccgcgacttcctcaaggcggccaaggcggccaagggcgccggcatggcggacggcagctacaccatcatgcacctggacctggcctccctcgacagcgtgcggcagttcgtggacagcttccggcgcgccggcatgccgctcgactcgctcgtctgcaacgccgccatctaccggcccacggcaaggacgccgacgttcacggcggacggatacgagatgagcgtcggcgtcaaccacctgggccacttcctcctggcgcgcctgctcctggacgacatgcagaagtccgactacccgtcccgccgcctcatcatcctcggctccatcaccggcaacaccaacacgctggccgggaacatcccgcccaaggccgggctgggcgacctccgcggcctcgcggcggggctgcgcggccagaacggctctgccatgatcgacggctccgagagcttcgacggcgccaaggcgtacaaggacagcaagatctgcaacatgctcaccatgcaggagctgcaccggcggtaccacgaggagacgggcatcacgttcgcgtcgctctacccggggtgcatcgccaccacggggctgttccgcgagcacatcccgctgttccgcctgctcttcccgcctttccagaagttcgtcaccaagggcttcgtgtcggaggcggagtccggcaagaggctggcgcaggtggtcagcgaccccagcctcaccaagtcgggggtgtactggagctggaacaaggactcggcgtcgttcgagaaccagctgtcgcaggaggccagcgatccggagaaggccaagaagctctgggagatcagcgagaagctcgtggggcttgcctgagctcgccggcacggcgacggcgacatgatgactctgtcgagcagaggagctttcgcttcgttgtattatgtgtaccattagcatccattttgtttgtttctagaagttggtaatgaccgtcggagaagagcctgtaattgttcgatcatgtattattgcttacaaaatttttttcaaaaaccgatgaaataaaacaacaggcttaacatctct

SEQ ID NO: 105929 - DNA, 1323 bp, Zea Mays
cgccgcctccgtcgaacacagagtcacttcgccacgaacaaaagcgcatcgatctcgctgtcgtcactcctcgtcacccagccacgaacagaggcaccacccagcatggccctgcaggcggcgctcctcccatccaccctctcatccgtccccaagaagtgcagcatcgccgtcgcggcgaaggacacggcattccttagcgtatcccagaagaaggtgcaggcgctggcggagaccggcaagtggcacgtggtgatggcctgccgcgacttcctcaaggcggccaaggcggccaagggcgccggcatggcggacggcagctacaccatcatgcacctggacctggcctccctcgacagcgtgcggcagttcgtggacagcttccggcgcgccggcatgccgctcgactcgctcgtctgcaacgccgccatctaccggcccacggcaaggacgccgacgttcacggcggacggatacgagatgagcgtcggcgtcaaccacctgggccacttcctcctggcgcgcctgctcctggacgacatgcagaagtccgactacccgtcccgccgcctcatcatcctcggctccatcaccggcaacaccaacacgctggccgggaacatcccgcccaaggccgggctgggcgacctccgcggcctcgcggcggggctgcgcggccagaacggctctgccatgatcgacggctccgagagcttcgacggcgccaaggcgtacaaggacagcaagatctgcaacatgctcaccatgcaggagctgcaccggcggtaccacgaggagacgggcatcacgttcgcgtcgctctacccggggtgcatcgccaccacggggctgttccgcgagcacatcccgctgttccgcctgctcttcccgcctttccagaagttcgtcaccaagggcttcgtgtcggaggcggagtccggcaagaggctggcgcaggtggtcagcgaccccagcctcaccaagtcgggggtgtactggagctggaacaaggactcggcgtcgttcgagaaccagctgtcgcaggaggccagcgatccggagaaggccaagaagctctgggagatcagcgagaagctcgtggggcttgcctgagctcgccggcacggcgacggcgacatgatgactctgtcgagcagaggagctttcgcttcgttgtattatgtgtaccattagcatccattttgtttgtttctagaagttggtaatgaccgtcggagaagagcctgtaattgttcgatcatgtattattgcttacaaaatttttttcaaaaaccgatgaaataaaacaacaggcttaacatc

SEQ ID NO: 105930 - DNA, 1581 bp, Zea Mays
cgccgcctccgtcgaacacagagtcacttcgccacgaacaaaagcgcatcgatctcgctgtcgtcactcctcgtcacccagccacgaacagaggcaccacccagcatggccctgcaggcggcgctcctcccatccaccctctcatccgtccccaagaagtgcagcatcgccgtcgcggcgaaggacacggcattccttagcgtatcccagaaggtcagtgatcagctgcatctgcatctgcatgctgcactcgcagtcacaatgcgcttgaattgaacgtgtcactgactctgtcgtgagcatgccatgcgggcagaaggtgcaggcggcgtcgctgtcggtgagaacgcgggtggcgacgacggcgcctgtggccacgccggggtccagcacggcggccaaggatgggaagaagaccgtgcggcagggcgtggtggtgatcacgggcgcgtcgtcggggttgggcctggcggcggccaaggcgctggcggagaccggcaagtggcacgtggtgatggcctgccgcgacttcctcaaggcggccaaggcggccaagggcgccggcatggcggacggcagctacaccatcatgcacctggacctggcctccctcgacagcgtgcggcagttcgtggacagcttccggcgcgccggcatgccgctcgactcgctcgtctgcaacgccgccatctaccggcccacggcaaggacgccgacgttcacggcggacggatacgagatgagcgtcggcgtcaaccacctgggccacttcctcctggcgcgcctgctcctggacgacatgcagaagtccgactacccgtcccgccgcctcatcatcctcggctccatcaccggcaacaccaacacgctggccgggaacatcccgcccaaggccgggctgggcgacctccgcggcctcgcggcggggctgcgcggccagaacggctctgccatgatcgacggctccgagagcttcgacggcgccaaggcgtacaaggacagcaagatctgcaacatgctcaccatgcaggagctgcaccggcggtaccacgaggagacgggcatcacgttcgcgtcgctctacccggggtgcatcgccaccacggggctgttccgcgagcacatcccgctgttccgcctgctcttcccgcctttccagaagttcgtcaccaagggcttcgtgtcggaggcggagtccggcaagaggctggcgcaggtggtcagcgaccccagcctcaccaagtcgggggtgtactggagctggaacaaggactcggcgtcgttcgagaaccagctgtcgcaggaggccagcgatccggagaaggccaagaagctctgggagatcagcgagaagctcgtggggcttgcctgagctcgccggcacggcgacggcgacatgatgactctgtcgagcagaggagctttcgcttcgttgtattatgtgtaccattagcatccattttgtttgtttctagaagttggtaatgaccgtcggagaagagcctgtaattgttcgatcatgtattattgcttacaaaatttttttcaaaaaccgatgaaataaaacaacaggcttaacat

SEQ ID NO: 105931 - DNA, 2451 bp, Zea Mays
cccacttccaccccgtcgctgctgaactgaaccatcctagtaggtgtcggctccggctccgggctccctctccccctttcccttcccttccaccagccggactgccgaactccgaaccgaaggagagtgacgacgcgccccgcgcacgcatcgcagtcgcatcagtaacaaacaaaggcagaagctgtaacaacgacaggaaaccaaacacctcgcgtatagaatccgcccgcctggtggggcgagtaggtggctgccggtgccggagggacggcaatgccggaggcggcgcggggcctgctggatccggcggccgagggggaggtggagcaggaggaggagttctacgagtcgctggatcggatcctctcctcctcctgctcctccacctccgcctccgcctccgacgacgacgccgaccaccaccgccgccgcggcagcaggcgccaccaccacccgccatcctccgcgtacgacgtctggatctccgagcccacgtccgtcgaggagcgccgccgccacctgctccaccgcctcggcctcaccaccgacccgccgccgccgccgccgcctcctcgccgctcgccatcgcctcccgcgtctcccccggcctcgcctccggcgcccgcggaggagcccagatccggcggtgcgctcgggaggcccccgctggcgcggaaccccagctccagcggcggggagcagcaatgccggatccggaacctggacgacggcacggagttcgaggtcggggaggtgcaggtggtgcgggaggtgggcaccggccgccacctcaccctcgaggagttcgagctctgcgtcggccgctccccgatcgtgcacgagctcatgaagcgggccaccaccgcggcctccgcgtccgcctccgggcacgccgcccccgcgtccagcaagccccggaggaagcccggaggcggctggctgcgtggcatcaggcagctggcgggcaccgtcgcctacggccgccgctgcgccgacgagggggacaaggtcaaggagaagaaggagagggaggctcggcgcctcagctctgccactgatgacagcctcgatggcaccggctcgcgcaatgcgggaagggttcgggtgcgccagtacgggaaggcgtgcaaggagctcaccgggctgttcatgacgcaggagttggctgcccactccggctccgtgtggtgcatcaacttcagcctggatggacgataccttgccactgctggagaggaccgcgtgatccatgtgtgggaggtgtccgagggagaccgaaagggcgagttgctcggggaagcttcggtggcaaaggagaatggtggtggctgcagtccgtttctcgcgattgttgggaatgattcaccggagatggctgcattgtcgttcacctgcgccgaagggggctatgtggacaagaggagaaggccgaggaagcagaacaatcacaagtctgtagggtccgatcatctggttgttcctgagtgtgtgtttggtttcacagacaagccagtctgctcacttctggggcatgctgccgatgttcttgatctgtcatggtccaaatctcagtacttgatctcatcctccatggacaaaactgttaagctctgggacatcactaccagtacctgtttgaaaacattctctcatacggactatgtgacttgcatccagttcaaccctgtagatgataacttcttcattagtggatcactggatgagaaagttcgcatttggaatgtccgagatcgtaagattgaggattggaatgatcttcatgagatggttactgctgcttgctattcccctgatggacaggttgcgatggtgggctctcacaagggaagctgtcatatatttgatacatctgagaagaagcttcagtacaaaagtcagatagatttaagaattaggaaaaagaagtcaggccagaagaagataactggcttccagtttgctcctggaagctcctcggaagttctgattacttctgcagattcgagaatacgagttgttaacggcgatgaatttgttcacaagtttaaagggtttcggaacacgagtagccaaatctcatcttctgtagctcataacgggaaatacgtgatctgtgccagcgaggattctcacgtctatgtgtggagacatgacaacagttcccaccctagcaagagcaggagcacagttgacgtaaccaactcatacgaacatttccactgccatggtgtgaccgtggctgtcacatggcctggtgctgaagcccgatgttcgtttggacctgaaagcaacaagcacagtgattcatatgtggcaatgaactctggcccggacctcccagttgagaacactcggcacagctctgatgcatctgatatcatatgcaacgagagcccagcttgccaaggcgtgaccagcagaaccccagcagacactaggcgacggagc

SEQ ID NO: 105932 - DNA, 982 bp, Zea Mays
atctagtccgtacttgtgtgtgtctttgccgacggtggcaaaggaaagcgcgcggtcaattgatccctatctatatctaaggcctatagctaactagctcggtccggcgatagaggccgccatggcgtccatcatcgtcatcgccgccgtgctcgtcctggacgtcctcgccttcgtgctcgccatcggcgccgagcgccgccggagctacgtgaactacgtgagcgtggacccggccgggggggtcctactgcgtgtacagctccgacgcgtccacggcgtacggcgtgagcgcgctgctgctgctgctcgccgcgcaggccgtggccatggtcgccacccgctgcttctgctgcggccgcgcgctctcgccgggccgctggcgggcgtggtccggcatctgcttcatcgtctgctgggtgacgttcgtgatcgcggagctgtgcctgctggccgggtcggtccggaacgcgtatcacaccaagtacttccccaagggcgacggcccgccgccgtgcgccatgctgcgcaagggcgtcttcgccgccggcgccgccttcaccttcctcgccgcgctcttcgccgagctgcactacctcttctacgccagggcgcgcgacgccgccgccgccgtggccccgcccatcgtcggcggcatcggcatgacccgcatgtgatgagtggaagatattgtcctgcgtgtgatagtactgtactactgactgctgtcactacagcgtgctggaactgttgggtttgtaattctgtcaggaacacgtacgcaacatagctgcattgttagccatcgcccatcggcattcagcagcagactgtactagttttttttcccctcttcctgtgcgtgcattcaccacaaatcagcagaggtggatctgtcccagtccggcgcttgacgagaagcacaacacacaacggtgatcgaaagccagaaaatgttcagaatggtgacaacattatttca

SEQ ID NO: 105933 - DNA, 998 bp, Zea Mays
aagaaaaaaaaattgttgcatgtagttggcgcctgtcacccaaccaaaccagtagttgaggcacgccctgtttgctcacgatcacgaacgtacagcactataaaacacgcagggactggaaagcgagatttcacagctgaaagcagccaaaacgcagaagctgcactgcatacatcgagctaactatctgcagcgatgtctcgctcctgctgcgtcgccgtgtcggtgcttctcgctgtcgccgcgacagccagcgccaccgcgccggcatggctgcacgaggaggccatggccacgggcccgctggtcgcagagggtgcaagggtggcgccctccgcgtccacctgggctgccgacaagcgtcgccggcgaggccgagcggcggcatggccacgcagggcgacgaccagagctcgtcgggcggcagtggcagcagcggtgagcacggcaaggaggagggcgagaagcagggcaagagctgcctcaccaaggaggagtgccacaagaagaagatgatctgcggcaagggctgcacgctctcggcgcacagcaagtgcgccgccaagtgcaccaagtcctgtgtccccacctgctaggagccgaggccggagcttgccggcggcgagacctcgatcgatcgagtgcttcacttcacttctttgttatagttcttgtgtgttgccgttgcgttgcgttgcgtagacgaagggaataaggaagggtaattggattacctgttccagatctctgtgtaagcgtgttgtcgtgacaagtcatttgatccagagcgagcgatggatagatcgcgctcgcagttttaattgcaatgctagttcaatatgtctgcatcatgttggcaactacatagtccagattcaaaccgagatcgctgtttagcatgccagcataataatatcagtacaatcatattatattttatacaattgcacaatctgtctctagagatgtaggaattctacatcgggttatagcatcac

SEQ ID NO: 105934 - DNA, 1060 bp, Zea Mays
ctatcgtacaacaacagttctttagacggccatatcagctggacacagccaccgtactccgagattagcgcccccgtcggccaaacagtaccggactggccgccgttcacagttcacgccccgcgtggtccctatttcccggcgagcactaggctaccgccgccgccgtcaggtgccggtgcccagaccttcgtcgtgcccatttcaccggcgacgagcacccactagcccctgcccgcaggtgttgggaactggggatagagatggatcaccaccacccgcagcagcagcagcagcagtacggcgatccttaccgtgggctcatgacgtccccgcagcccgaccaccacctccacgctcttcagtaccatcagccgcagccgcagcaacagccggcgcttatgtctccaccgcagccacagccagcactgatgtctccacagccgcagcagacactgatgtctccaccgcagccgcagcagcatcaccacgcctctcttgcctcccacttccacctcctacatttggttacaagattagccgatgctattggtacaggaacaagggaccaaaatttcgatgcactggttgaagaattgaccagccagtttgctaggtgccaacaattgttgaactccatatcgggaacaataagctcaaagtctactacggttgagggacaaaggcagagtttggacgaaacacggcagctgcttgatcaaagaaaggagttgattacaaagtacagaggctctgtcgaagagctccttaagggagatcaaagataaagaaagcatcataaggcttaatatttaaggatttattgtcgtcaatacttgaactctgttacttgaattcggtggtatgcatcaatagagccggaagatgttctggagtaaggacctggcagtgtgatacgggaatttgacatctgaatagatattctcccttgtccctctggtaaaaaaaactgttgtcacatttgccttcgctgtgacttggatgtatcatgtatatctttgaccattgatatcttggttaatcagacggtgcattacaa

SEQ ID NO: 105935 - DNA, 847 bp, Zea Mays
aaaccattgagctcaaaacgccgatgtccatgaaaaatattttggcttacaatttgccaatcttcaagtctagtgaaggaattgacttcttaaacccaaactcccacatcagatcactagatccctccggcggcaaagagaaaaagaaaccccggcaggcgccaggcccgatccaaccaattggtaagcgggtagccaactcacacatgcagctaaagcatgcaacggcagcaaatccatgacacagacagaaggcagcacgcagcagggaaggtggggaagagaccttggtgtcgagcatgacggcgcagaggatgccggtgttgtgcatggcctggcggaggctgtcgagcgtctcctggtggtactggtgggtgccgtgggagaagttgaagcgcgcgacgttcatgccggcgcggagcagcttctcgagcatgggcacggagcgggaggccgggccaagcgtgcagacgagcttggtcttgggcagccgcgcgtcgccggcgccgcggtccaggtccgccaggatcttcgccatgtcgatgttcgccatcgcgcggcgctccggatctcgcctctgtctgctccgcggtccggggcacggggaatgggggagggagaggtgtcggcgtcggcgtcggcgtcgagcggcggagagcagcgagatgggattcgagatttggtggcgaagtttccctttatagaaaggagaaggggggtgggagtggggaattgcgattccgtgggcgtctctgggctgggcgaggacgacgagcggagaccggccggagatggaaggcgcatgcaccaggcaggggtcagtcgctggacacgtggtgcccactga

SEQ ID NO: 105936 - DNA, 879 bp, Zea Mays
tttctttgttttttcccctattattgaaagcaaatcaacatttttttcacttattgcttatctcatctcaacctcgatctccatctcctagtgtctcggggcttagcatgaaaaaaccctttcaactcaactccatagacacaaatcttattaccactaacatcaatggagtcctctccctccccatttaccagctaaataactacgtgaacaaaaaacattccgcaactgcaaacaacagacgcaggcttacaacataaatatctgtctccggaaaaaaatgcagtaaaaaggaggcagaaaagctgtttcatggaatcccagcagtgagaaccaggtcgtggtgatcacttcacgatgcagatcttgatgacggaggcgacgccaatacgatgaagagccacgatggcatcaccaggcttgcagagctgcttctgcacggccgacttcaacgcggcctcaaggatcacctccgtcgactctgaatccgtagccttcgcggagccctcggcgaggaggggaatgaggcctctgtagatcaggctgtgcctagctgggccctcggagctgatggtccagtcgaaagagtcggtcgtaagcacgggtacgacaacggagaggatggggaccctggggcggtacttggcgaccagtttggccgtggtgccaccgcgagtcaggacgacaatcagtgcagccttggccttgttggcagtcctcacagcagatgatgcaagggactccagagggctcattggaagaggcgcggacctgatcatggccttgaaaactgcctcgtggtccagggaagattctgcctcgatgcaaatacgagccatgatcttcacagccacctcggggtaggctccagcggcactc

SEQ ID NO: 105937 - DNA, 663 bp, Zea Mays
caaagatcataatgattcatgagcaactgatatatcatcatgaagatgagcaatggccaatggacacacatgtttctatttctccagtatattatgatcagagcccgcatatggtacaactcagcaacatgagtgggattaaatgaacaccaccaacaacaataacggcatcaaaactaagcaacacgttacgaatttcataagcctttgtgaagacgaacaccagtgtctcggcgacctcagtatgaaatgaatggatttgtaacacaattgtgatacattatgattcatctggggtagtttccccatgttggcagcaaccatccttcggtaaaatcttggggtagtttctctccaaggtgagcgccttatgtccatccaatacaaatgagataaaaaaaacatgcttggcctggttgtttccaactcatttgtacaggctgagtcccaggcccccaatatacagaacagtatacctcttgatgctctcctatcctatgaccttcctgatgacataccagaggtggcatgtatctccaaggagtgctccggaatgtaagcaaggcctgcagggcaacaatcacttctcaagtcttaaaaggataaaaggtagatgatacgaatacgaaccagccaaaacactgaatgtatttaagacatttg

SEQ ID NO: 105938 - DNA, 544 bp, Zea Mays
gcaactgatatatcatcatgaagatgagcaatggccaatggacacacatgtttctatttctccagtatattatgatcagagcccgcatatggtacaactcagcaacatgagtgggattaaatgaacaccaccaacaacaataacggcatcaaaactaagcaacacgttacgaatttcataagcctttgtgaagacgaacaccagtgtctcggcgacctcagtatgaaatgaatggatttgtaacacaattgtgatacattatgattcatctggggtagtttccccatgttggcagcaaccatccttcggtaaaatcttggggtagtttctctccaaggtgagcgccttatgtccatccaatacaaatgagataaaaaaaacatgcttggcctggttgtttccaactcatttgtacaggctgagtcccaggcccccaatatacagaacagtatacctcttgatgctctcctatcctatgaccttcctgatgacataccagaggtggcatgtatctccaaggagtgctccggaatgtaagcaaggc

SEQ ID NO: 105939 - DNA, 1415 bp, Zea Mays
gcccaccgtctcctccctccactttattacccacgtcgcgacgccgacaccgtcccgcgctccctccccctgccgcaccgcacccacgctacgctctccatgtcatacgcccacgcctcacgccaccgcggcgggggcatgccgcccacgacggcgctcgcggcgaaggtggcactggcgtccgcggcgctggccgcgttcgcgtccctggcgcgcctcgccgtcccgcgcctcgtggccgtggccgccgccgtgctcccgcgcgcctgggccgccgcgcgcctctggctcgtcccgccctacctcttcgtcaccgtgcacctcatcatcctcgtcatctggaagctgtccgaccacaggcactcccagcagcaggccgccgccgcccagcacaaggacgacccctggccgccggccgcggagctcccgtccaccgccgccgccgccacgccggccgtcagagccaaggaggagcagtacggccagcccctgccagctgagttctcctccccctccccggactccggcggcggcggctcctgcgtcaccaccgagtccgacgaggacgcctcctcgccttccccggacgtgctgtggcgtagcctggcgccggcgccgcaggagcgcgcggtcgtcctggagcgggaaccctcgctgccgccgtcgcaggccgtggacggcgacgacgacgacgacgacctggacgccacgtggaacgccatcatgcagaagacgcgcccggcggctccggctgctacccctccagctccagctcccgctcccgccgcgcaccatcagcaacggccgccaccgagggcccgggacccgtcggtcggcgccgaggagatgaaccggcggttcgacgacttcatcaagaagaaccgcaactccttcggcaggcaataggcgacctccgctccgttacgatccggccacctccccgccgtacgatgcgtatatacagtacaaggagacatgcatctttggttttccatctcggtgtgccgccggagctagcggagggaggcgggtcattcgattcgccatgcttagggttggagaatcactagtatatacagaggaagaatccgttcttgatcaagattagtcggctgcttggttaattagccgtgatgatgagctgctgtcgtgttcgatcggaggttggcgtggccgctttccgcaaggaaagcaaggaattggtcggcttctgcgctaccagtccggtccacttcgttcacctttccctttcggtgccaccaacatctaactgtacatgcatgcatgcttgcttgcttagtgctgaccgccgctaatgcgctggatatttctgggagctagtggaaacgaaagtgtactctgaatttcaagttactgtcaaaagtaagatcctgatctgacgaaggtgtgtactc

SEQ ID NO: 105940 - DNA, 1491 bp, Zea Mays
caacaccttcgagaagattcctctcctctcctccccgcgcgctgcctccgctccgctcatgtcgtccgcgccgagcaccacggcgtccaccatcgcagcctctatccacacgccgttctcctcgggtccccgcggggcccgccttccggccgcgctccgcctctcgctcgctcagctccggtcggccggatgccgcgcggcgccaggtcgcctcgctcgccctcgcgcgcgcgttcggtgcggcgcggcggccaggttcattgggcagggcgagttccccgcggaggtgctggagtcggagctgcccgtgctcgtggacttcgtcgccgactggtgcgggccgtgccgcctcatcgcgcccgtcgtcgattgggcctccgaggtataggttattctgctgctgcttggtggatggttatccgtgttttttattcgtctgtgctggtgttgtgtcgtactctggatgatgacggattaagagagcgactgcaatgtaagtaatttggtaacatcgacgacgctatagaagctaaagttatcaagataaggtagtgaacagcctcttttttaagtggggcttgagacaactaagaaaaatcaaagcactgcagttatccttactcccatatttgggatttgagttgacatcagtataaaagtccagaatccagtttttgttttcatgaaatccagtgaccaaaacgctttcataaaggaagtacacatcatagtgttcatcaggtgtggaggctattaggaacactgtaacagcatttggtttttttccccctaaatctaagaactgcattgcattttaatagttttgtgtagaagccattggttaacaagagcatctccaggagttcccaaaaaatcaattggtaagccaatgagtgtttcaagtggctaaaaaaaactctttgcagatgttctaatatgacctggtcgacaacacctattagcagaatgtgatgctttagacatatgcgtaaggaaacactatgcttgcctgaaatcagatttgtcagctttgataaagtctaatctggcgactcaggaatatgctgggcgattaaaaattgtcaagattgatcatgatgccaatccacagctgattgaagagtacaaggtttatggtctcccgactttgattctcttcaaggatggccaagaggtgccaggcagccgacgagaaggggcaatgataaaagacaagttcaaggaatacctggaacctctgttgactacaattacaacagccgcttaaggtcgttgcctccagcttgagcactgaggatgccaacggcactgggaatgttgaaggtttttttccttacatgagcaccatgtttagtttgtaattaactacgttgcgggatcatgtttgactatgtatgattgtcatttgcgtatatttggtaaggtatacataaagggttgtgatgaggtatgcccccactaattttaatacaaagcaagttcgttttcgct

SEQ ID NO: 105941 - DNA, 534 bp, Zea Mays
atgtcgtccgcgccgagcaccacggcgtccaccatcgcagcctctatccacacgccgttctcctcgggtccccgcggggcccgccttccggccgcgctccgcctctcgctcgctcagctccggtcggccggatgccgcgcggcgccaggtcgcctcgctcgccctcgcgcgcgcgttcggtgcggcgcggcggccaggttcattgggcagggcgagttccccgcggaggtgctggagtcggagctgcccgtgctcgtggacttcgtcgccgactggtgcgggccgtgccgcctcatcgcgcccgtcgtcgattgggcctccgaggaatatgctgggcgattaaaaattgtcaagattgatcatgatgccaatccacagctgattgaagagtacaaggtttatggtctcccgactttgattctcttcaaggatggccaagaggtgccaggcagccgacgagaaggggcaatgataaaagacaagttcaaggaatacctggaacctctgttgactacaattacaacagccgcttaa

SEQ ID NO: 105942 - DNA, 14668 bp, Zea Mays
cggagagccataccaaaccaaagccttcgcatccctccggaaccctagcatcctccctcctcgctcctgggatgccccagtagctccgatcggcgcctcaccgccatggatccgggcggcgggggcgggatgctcctggaggacttcggccagcgcgtggacctcacgcgccgcatccgcgaggtgctcgccaactacccggagggcaccaccgcgctgcgggagctcatccagaacgccgacgacgctggcgccgggcgcgtccgcctctgcctcgaccgccgatcgcacgggagggcgtcgctgctgtcccccgcgctcgcgcagtggcagggtcccgcgctgcttgcttacaacgacgcggtgttcaccgacgaggacttcgccagcatctcccgcattggagacagcaggaaggtcgcccagacgtggaagactggccgcttcggggttggttttaactcagtttaccacttgactgatttgccatcgttcgtgagtggcaagtatgttgtcctattcgacccccagggtgcttatctaccaaatgtgtcggcatcaaatcctggaaagcgcatcgactatgtcagttcgtcagcaatcacaatgtaccatgatcagttttcaccctactgtgcgtttggctgcgacatgaaagcatcatttcagggaactctgtttcgttttcctttgaggagctctgagcaagcatcttcaagtcggttatcaagacagtcatacacagaagatgatattttatctctttttgcccaactgtaccaagaaggcgtatataatctgctgttccttaaaaatgttctatcacttgagatgtatgtgtgggaatctggtatgaccgagccaaaaataatatactcttgctacttagggccacagagtgaaaagctgtcctggcatcgccaagcccttgtcaggttctctggcactcctgttgaatcttctaagcagaagctggactctttctcgatggattttatatcagaagcattcttgggcaacaagattgagaagaagagctctacctattttatcatccagggaatggcatctgcatcaagtaaaattggtatttttgcaactgcagctgccaaggaatatgatcttcacttactgccttgggcttctgttgctgcttgcatctccaacacagggcttgaggatactgttctcagacagggtcaagctttctgttttcttcctttgccagtaaggacaggactatctgtgcacgtcaatggttattttgaagtttcatccaaccggcgtgacatttggtatggtgctgacatggacaggggtggtaagcttcgctctgattggaacaggctactgttggaagatgttgtcgctccgttgttcagagaactgctgatgaaattgcggacgctttctgactccacaatatcatattattcactgtggccaactggtttatatgaggatccctggagtatccttgtggagcaaatttacaaggttatttacacctcgccagtcttgcactcagagattgaaggcgggacctggatatcaccggctgatgccttgcttcacgatgagggattctcaggaagcaataatcttaatgaagccctcgtgttggtaggcatgccaattgttcgtgtatctaatgcaataggcgatatgttttcaaaattttatatgcagtctatgctcaaaatagtaagtcctgctatagtgaggcatttcctcaaggattatgctaaacttgctacgctaggaaagtctcataagttaatattattggaatattgtcttactgatgtttacaatactgatatcggtaaatgcatgaatggccttccactgattccactagcaaatatgcggtatgggactttttctgctagttcgcaagaggactattattatgtctgtgataacatcgaatatgagcttctagctgaagttggtgatagaatagttgacagaagcatccctcctgtactactagacaagctgtatcagatagccagtgattcccaggcgaacattaggttcattgatggcccaatcttctgccagctcttacccaggttatttcctcctggatggaagcttaaagatcaagttccctggaacccaggcttgggtgggtcatctcctacagcagcatggtttaaacttttttggcagtatatagggggacgctcgtatgaccttcatttgtttagtgattggcctatactgccatctacctttggccaccttcacagggcatgcacaagctcaaaattaatcaaaacagaatcactgtctagtttgatgaatgaactcctggcaaagtttggttgcaagatactggatgctgaatatttgagtgatcacaaacaattgtcattttatgtatatgatggtgatgcaactggagttcttcagtcaatctttgaggttatctcattggagggtgttgatttgcaatctctgtttcaacgcattactcctggtgaaaaaaatgagctgtaccagtttcttctggatccaaaatggtatttaggagcctgcctttctgtcgtaagtataaaccaatgtaaaaagcttccaatcttcagggtatttgatggaggttctcccagcacttatggtttctcggatttgtttagttcaagaaagtatctgccacctcttggtgttcctgaccatttactcaatgacgactttattttctctatttgcccaagcgatgaagatatcataatgagatattatggcattgaacgcatgccgaaatcgaacttctaccagaggtatgttctgaatagattagacaagctgcaaacggagttgcgtgattcagttcttttaacaatcttacaagatctgcctcagctgtccttggaggatccaatgttcaaggaaaccttgaaaattcttagatttgttcccactatcaatggaactttgaaaagcccacaatctctttatgatccccgggtggaagaactttatgttcttctccaggaatcgggttgctttccccatggtttatttcaaaatccagatgttcttgatatgctgctttgcttggggcttagaacttcagtttctaccgataccatattagaaagtgctcgtcagattgattcacttgtgaacatagatcagcagaaggcccattcaagggctaaggtccttctttcatatcttgaagttcatgctcacaaatggtatgtgaataagctatttgatggtcgtaagaaggtaaacatgctagctaaagttaccactgcgctcagacctcgtgacaaatcttgggaatttgatcttgagaagttctggagtgatctgagattgatttgctggtgtcctgtgttggctactgcaccaagtccagctttgccatggccttcagtatcatcaatgatagctccacctaagcaagtaaggatgcaggaagatatgtggattgtttctgctagctcacgcattctcgatggtgaatgcacctcctcggccttgtcgtacagtttaggttggttgtcgcctccatcagggagcgtgattgcagctcaactgcttgaattgggcaagaacaatgaaattgtgactgatcaagtccttcggcaagaattagctttggtgatgcctaagatttattctttgctgacaaacttgattggttctgatgaaatggatatagtgaaagtggttctagaaggatgcagatggatttgggtgggtgatggatttgcgaaaacagatgaagttgttttaagtggccaccttcatctagcaccatacattcgtgttgttccaattgatttagcagtgttcaaagacttgttcttggaactcggcataaaggagcacctgtaccctgttgattatgctagtattcttggcagaatggccataaggaaagcttcagcttcacttgaagctgaagaactaagaacagctatcctggttgtgcagcatttatctgagttccggtttcaggatcagcaaacacaaatatatttacctgattcttcgtctaggctttgtctatcttctgaacttgtattcaatgacgctccttggttgcttgattttggtcatgacatcagtgggagtgcatcaagcattgctttaagctcaaaaaagtatgttcacaattttgttcatggtaacatttctaatgatgtggcagaaaggcttggtgttcgatctcttcgccgcctattgcttgctgagagttctgattcaatgaatttgagtttatcaggggttgctgaggcgtttggacagcatgaagacttgactacacggctcaagcacattgttgagatgtatgcagatggccctggaattctctttgagttggtacagaatgcagaagatgctaaggcttctgaggttgtgtttttgctggataagactcagtatggaacttcatccattctttcgcctgaaatggctgaatggcaaggacctgctctctactgctttaatgattcagtttttagtccacaggacctatatgccatctcacgaataggtcaagacagtaaacttgagaaaccttttgcaattggaaggtttggtcttggcttcaattgtgtgtatcacttcacagatattcctggatttgtttccggtgagaatattgtcatgttcgatccacatgcctgttatttgccaggaatatctccgtctcatcctggtttaaggatacagtttgtaggaagaaggatcttagatcagtttcctgatcagttcgccccattcttacattttggttgcaatttgcaacagccatttccaggtacactcttccggtttccccttaggaatgcggctgctgcttcgagaagtcaaataaaacgagaacagtatgcaccacaagatgtggaaatgcttttctcttcattctccgaagttgtatctgaggctctactttttctccgcaatgttaaaaaggtaactctatatgtcaaggaaaacaacagtaaggagatgcgacttgttcatcgtgtctccaggcataatagctctcagataggtaaagaacctcatgcacttggtgcaatgcttgcgtttatacatggaagccaaccatcaggaatggatagaaatcagtttttcagtaagttgaataagactaaagacagtgacttgccctggagttgtcagaaggttactattcttgaggaaaacccttcttcacacttgttgcactcatggattttagctgaatgtataggtgggggtcatgctagaaagttgtcaactgcctctgttagtaaatctcacttctttgttccgtgggcatctgttgctgcatatctgcattcagtgagtgtagatgatacaaaaggactatcagctgaagctgaagtcaaccatgataactcagttttcacaaacccagatcttggatcttctaagttcaggaaaaattttgaggctcgggccttttgctttcttcctctaccaatcaatactagcataccagtgcatgtaaatgcttattttgaactctcttcaaatcgaagggatatctggatcggaaatgacatggctgggggaggaagagtacggtcagaatggaatttagcgctgcttgaagatgtcgttgctcctgcttatgggcacctgcttgcagctgttgctgaagagcttggtccctctgacttgtttctttcattttggcctagtgctgcaggtgtggaaccatggtcttccatggtgaggaaactctatgtttctattgcagaacttggaattcacgttttatatacaaaagctcgaggtggtcactggctgtcaacaaggcaggctatttttccagatttcagtttctcaaaggcaatggagctggcagaagttctctctcaagctggtttgcctgtggtatctgtaaccaagccaataattgacagtttcattaatgcatatccatcagttcatctactaaatcctcatttgctgagaaatttgttgatccgacggaagcgtggcttcagaagcagagaagaggctatacttgttcttgagtattgcttgagtgatatgggagatccttccttttgcgataaattgcaaggtttggctctccttcctgtggcaaatggatcattcacaacattcaacaagcgaggggagggtgagagagtattccttacttcacaaatagaatttgaacttcttaaggattccataccacatcttgttattgacaactctttaccagatggtgtttcgaagaagttatatgacatagcttattctgcgtgcatgaacatatatatattcacaagtaatcttctcattgagctgttgcctaggatcttgccacctgaatggcaacatgctaagcagttgtcttggtttcctgagcagcaaggtcagccaagtatggaatggatggtatcactctggaattttttgaggcattcctgtgacgatatttcagtttttgcaaagtggcctataatacctcttgtagatggcaaggttgtgcaacttgggaatgctgcaaatgtaataagagattatggatggagtgaaaatatgcattccttgcttcaaaaactgggatgtttatttctgcgatctgatctgcagatagaacatccccagttagcgaattttgttcaggaatccactgctgctggtgttttgaatgctgtgcagtctgtagcttctaatctccaggatatcaaggaattgtttatgagcacttcattggcagaagcacacgaactccgaagtttcattttccagtcaaagtggttttctggaaatcagatcagctcctcccatatgaatacaatcaggaacctcccaatatttgaatcttataaatctagggaacttgttagcttgacgaatcctagaaaatggcttaaaccagaaggggtgcatgaggatttattggatgcaagctttataagaactgaatctgtgaaggagaggtcaattttggtatcatactttgatatcaaggaacctcaaaaggttgaattttacaaggaccatgtccttcctcgaatgtcagagtttctattgcagccagctattatttcagcagttattcgtgatgtgaaactgttgatagataatgatgattcagcaagagctgcattatgtgagaccccttttgtcttagcagccaatggagcatgggtccagcccttcaggctctatgatcctcgtgtgcccgagttactgaagttgctgcaccaagatactttctttccttcagaaaagttcatgatgactgaagtaattgaattgttgggtagttttggattgaaaagaaatttcgggtttagtactttgcttgacatggcaaggtcagtttcactggtgcagaattcaggacaaggtgatgcgtttgattatgggcaaaagctacttgcctatctaaacattcttgagtccaaaacttcaaagatggagggcggagaaacttttcttgaggatgggaatctggaagcatctgaaattagtgaaactttggaacctaacaatcacggggatgtgtgtgatccaagcgaccaaactagtgtatctttgttctcaaatttcgattatgatatgccagaagatttattttggtcagagctgaaaaatatttcttggtgtccggtgcatgttgcaccattgctcaaaggacttccatggttcatatccgaagatatcatagcacctccagtcatcacaaggccgaaatcacagatgtggcttgtttcatcaaaaatgcgaattcttagtgcagattcctgttccatgtatctgcaaagaaaactaggctggtgtgatccaccaaatgtgagcacattgtcttcccagttagtcgagctctccaagtctcatgatgaactcaaaatgttttctgcagacacagacattgatgctattctgcaaaaggaggtccaagtaatgtactcaaaattgcaagacataattggcactcccagtggcaacgctctaaaaaagtatctggatggatttcaatgggtttatgtaggagataggttcgtggcaccacaggcacttgcttttgattcacctgtaaaatatcatccctatctttacacagttccatccgaactgtcagaatttaaaaagttactctccgagttgggtgtaaggcagacatttgatggaatggattatctgaatgcgcttcgccgtttagaaggagatgtcaaaggagagccgttgtccacagatcaactcagttttgttcactgtgtattggaagcatttgttgactgttaccctgacagtcaagcacctgatgtgttactgaactcattggcgattccggattcacttggggttctgacacctgctagaaaccttgtctataatgatgcaccctggatgaatgctaatcccacttcaaagaattttattcatctcagcattggcaatgaactggctaataggcttggtgtacgatctctccgtggatcatcattgttggatgatgagttaatgaggaatttgccctgcatggaatatgctaaaataagtgagttgttggctttgtatggtgagagtgactttcttttgtttgatcttatagagctagcagactattgcaatgcaaagaaagtgcatctgatttatgacaaaagagaacatccgaaacagtccttactgcagcagagtctaggtgacctccagggttcttcgttgacagtggtctttgaaggaaccataatgaaccgcgaagaagtttgcagcttccaacttcctcctccctggaaactgagagggaacatccttaattatggcttgggacttcttagtagttactttgtttgtgatgcattgactattctttctggaggttacttttacatttttgatcccttgggcttgactggtggtacgacttccactgctacctcatcagcaagatacttctctttgttaggaaatgatttggttgagaggttttatgatcagttcctcccaatgcgtgttacacaggatgcttctttatgtactgcgaactccacgattatccgaatgccattatcgtcaaaatgcctcaaagaacttgaagcaggttgcaatatagtacagcgggtttttgaccgatttacacagaatccatccagtactctcctattcttgaggtcaatcattcaggtatctttatcaacatgggaggatggggcctctcagtcaactctgaattattctgtacttgttgacccatctgttgcttctttgagaaacccattttcggaaaagaaatggagaaaatttcaaatatccagaatattttcaagtacaagtgcagctatcaaaatgcaagctatagatgtgcatgtgattgagagtggctgcagttatattgacaaatggtttgttgccctttctcttggatcgggtcaaacacgaaacatggctcttgacaggcgttatcttgcctataacctaaccccagttgctggagtagcagcgcatatagctcggaatggagtatcaaccaatatacatccatctagttgtatattatctcccttaccactatctgggtttataagcatgccagtcacaactttggggcatttcattgtgaggcacagtggtgggcgctatatttttgacagtccacgtgatgcatctctgccagaacttaaagaggacagggtcaggttggttgaagcatggaataaggaacttatgttatgtgtgcgtgattcatatgttgagatggttctagaatttcaaaagcttaaaacagaccctctatcttctgctattgaaccaaggtctgcacaatctgttagtgctatattacagacatatggtgatagggtatactctttttggccaagatcgaagcagaatccaacttcgttcactgggcgtgtttctactggaactaatatggattcaccaagggcatctaaagcggattggcaatccttaatagagcaagtgataaaacctttctatgtacggttagctgatcttcctgtttggcaactttaccatggaaatcttgttaaagtggatgagggtatgttcttagctcactcaggaaatggagatgacgataacctcccatctgatagtgtttgtagtttcattaaagagcgctatcctgttttttctgtgccgtgggagttggttagtgagattcaggcagttggagttaccataagagagatcaggcctaaaatggtccggggactactaaaagcttctccatccattttacttagatccattgaaacatatatagatgttcttgaatattgcttctcagatatggacccttaccgcttctcggatgatctacctgatgaatcaagagttaacagccaacatgttggaacaacgaattcttcaatatcacattctatgccttcttcgagcagctcactgtcttaccaatcaagtactcagatggcaggtacttctggaggcgatgcacttgaaattatgacatactttggaaaagccctatatgactttggtaggggggttgttgaggatatcagcaaaaccaatagtccagcattccacaggactcaagctgctgaaactaatgtgttgtcatccatcatttctgagcttaaaggtgttccatttccaacatcgacaatgcgtctaacaaagttgggaatggctgaactctggatagccaatgagcagcagcagctattgatgagccctttgctggatcaatttatccattataaatgtctggaaaaacccttcttggctctgctgctttccactcaggttatccataggcctctgaaactgaggagcttttctccccacttactagcaggttatttgaagcgcatacttgatgagcgttggatacggattgtactagagaacaaatcctcatggattccttgggacaataatgctgaatcatcaactactccaactcccaaatggattagaagtttctggaaaatttttagttctttgaacggtgacctctctcttttgtctgattggcccttagttcctgcttatctggataagccagttctctgtcgtgtgaaggaacgccatctaatatttgtgccaccaattagtgattcaccagaccctcctggagatgatgtagctggacagcttgatacaccggactcccccagagaagatactagagcagaacagaatgcagtgcttgatactgcatttaggtcaatgaactcggaatttccatggttaacttctctgcttaaccagttgaatgtaccaatttttgatccctccttcccagagtgtggcgcaatgtgcaatttatttcctccaaatggtcgtactcttggacagacaattgtttataagttggttgcagccaaaaatgctgcacatttaccttcgctaattagcctatcaagtgaagattgcgataaactatttgggttatttgtttcggagttcatattaactaacaaccacttgtatcagagagaagaattggatgtcttgagaacacttccaatgtataagacagttacaggaacatacaccagtctgttaggttccgatcattgcattctttctcctacagcattctttcacccgagcgatgcccggtgcctttcttgctcatcaaatgcacatttgtttcttcaagctttgggggttgaacaattaaatgatcatgaaatactagtgaagtttgcgttgcctggatttggaaataaaacagctcaagagcaggaagacattttgacctacttgtatgctagctggaaagatcttcaactgaactctgctgtagtagaaaccttgaaggagacaaactttgtggcaaatgcaaatgaattttgtaaagagtttttcaaacctgaggaattacttgacccttcagatgctctgttgacttctgtgttttctggggagagaaataagttccctgctgaaaggttcatgtcagatggttggcttgttatactcagaaaagcaggccttaggacatccacagaagctgatatgataatacagtgcgcaagaaaaatagaaaccatgggacatgatattatgtcgtctttagaagatgctgatgactttgaggcagatttcacagacagcaaaaatgaaatcccttttgagatatgctctctggcagaatctgtagtaaatgtgctttttgcaaattttgctactttgtatgatagtgctttttgtgaaaagattggaaaaattgcatttgtgcctgctgaaaaaggttttccaagtattggtggtaagaggggtggtcgaagggtacttgcctcatacaatggagctatcttattaaaagactggccattagcatggagttctgctccaattcttaccaaacaaacaattgttcctcctgagtattcttggggagcatttcggcttaggagtccacctgccttcagtacagtttttaggcacttacagattgttggtagaggcaatggtgcggacacactagcacactggccaacctcagcagagataatgacggtggaagatgcctttctacaggtcttgcaatacttggataaaatatggggaacaatatcttcttcagaaaaaaaagaactggagaaactggcatttataccagttgcaaatggtactcgattggtcccagtgaagtcactttttgctcgtctgacaattaacatgtcaccttttgcttttgagcttccaagtcggtatcttccatttgtttcccttcttagagagattgggatgcaggaaagccttacaaattcatatgcaagagaacttcttttggatatccaaaaggcatgtggttaccagcgcttgaacccaaatgaactccgtgcagttatggaaatcttggaattcatgtgcaatggaatcaaccaaagtatcacagatggatcagatgggccttttgattcagtaataccagatgacggctgtaggctggtcactgctgcatcatgtgtgtatgttgacccatatggttctcgtttactgagtaacataattacatcaagactaagattcacccatccagaccttcctcagaatatctgcaaggccttgagcataaaaaagctctctgatgtcattgtggaggaacttgatggaaaagaagaaattaaagttgtcaatagcattcactcagttactctagacagaataaaagagaagctgcgaagtaaatctttgcaagatgcattaaggattgtgatgatcagcgtaaccaatcatttcccttcatttgaagcccttgctttggttcagatagaacggacactagaggatatatcacagaaactgcaactggttcaacgtctccatactcgctttctcttacttcccaatctccaagatgttacaagaaccatccagcgtccttctattcatgaatggtcaagcaacggaatgcaccgaagcatttgtttcgtcaacaaagctacgggttatattctaatcgcagagcccccaagttttttgacgatatatgatgttatcgcaattattgttagtcacaggttaggggcaccaatgatcttgccgattgcctcagtgtttgcatgcccagatggttcagagaaagaagtccttcaaattcttcacctgggttcagactttggagtttcaaaacgtgaagggagatacgacgcttcccttggagcagaattgttatctcaggatgctcggcaggtgcaattccttccattaagaccgttctatagtggtgaaattgtggcatggaagacaggcaaagagggggaaaagctcaggtatggtagggtccctgaagatgtaagaccctcagctggccaagcactttacagatttccagtagagacagctcctggcgaaactcgcatgatgctttccagtcatgtttactcatttaaaagtgtttcaatggctgatcttctgtctgcaccttcccaagtgaatggtgatgtggcattaggtggccaagagaacctcttggccaccaacactggcactgaagtcaccaaggatgcggatgctggacttgaatatggaaaagtatcttccactgaactggtacaagcggtccatgatatgctttcagctgcaggagtaaggatggatgctgagaaggaaacactctttgaggctactctttccttgcaagatcagcttaaagaatctcaagttgctctcttggtagagcaggagaaggcggaggcggctgtaaaagaggctgatgtcgccaaagcagcatgggcatgccgtatctgcctgaatgctgaggtcaacatgaccatcataccatgcggtcatgtcctatgtaaccgatgctcaagttcggtttcgcggtgcccattttgccggacgcaggtggccagaatgatgaaaatattcaggccataaaaaacattgaaggacgtttggtctgactaaccgcttcagcctgtgaatgtgttacgatatcggggctcggctcccttctggttgtgcgttgcattcctttctggtctgatgcatctcattattctccatcggtgatgattggtaatccgatatggggggtgcaagtatagttacgttgtacaggaacgatgcattgcagtgtacatattccaaaatgaaatcattttacacacttcgaagggcatcgatgtctgaagctggttttctcgtgcaatactttcagagtcaacactacactgccctggttatccattcagcatgtatggtggtg

SEQ ID NO: 105943 - DNA, 9179 bp, Zea Mays
cggagagccataccaaaccaaagccttcgcatccctccggaaccctagcatcctccctcctcgctcctgggatgccccagtagctccgatcggcgcctcaccgccatggatccgggcggcgggggcgggatgctcctggaggacttcggccagcgcgtggacctcacgcgccgcatccgcgaggtgctcgccaactacccggagggcaccaccgcgctgcgggagctcatccagaacgccgacgacgctggcgccgggcgcgtccgcctctgcctcgaccgccgatcgcacgggagggcgtcgctgctgtcccccgcgctcgcgcagtggcagggtcccgcgctgcttgcttacaacgacgcggtgttcaccgacgaggacttcgccagcatctcccgcattggagacagcaggaaggtcgcccagacgtggaagactggccgcttcggggttggttttaactcagtttaccacttgactgatttgccatcgttcgtgagtggcaagtatgttgtcctattcgacccccagggtgcttatctaccaaatgtgtcggcatcaaatcctggaaagcgcatcgactatgtcagttcgtcagcaatcacaatgtaccatgatcagttttcaccctactgtgcgtttggctgcgacatgaaagcatcatttcagggaactctgtttcgttttcctttgaggagctctgagcaagcatcttcaagtcggttatcaagacagtcatacacagaagatgatattttatctctttttgcccaactgtaccaagaaggcgtatataatctgctgttccttaaaaatgttctatcacttgagatgtatgtgtgggaatctggtatgaccgagccaaaaataatatactcttgctacttagggccacagagtgaaaagctgtcctggcatcgccaagcccttgtcaggttctctggcactcctgttgaatcttctaagcagaagctggactctttctcgatggattttatatcagaagcattcttgggcaacaagattgagaagaagagctctacctattttatcatccagggaatggcatctgcatcaagtaaaattggtatttttgcaactgcagctgccaaggaatatgatcttcacttactgccttgggcttctgttgctgcttgcatctccaacacagggcttgaggatactgttctcagacagggtcaagctttctgttttcttcctttgccagtaaggacaggactatctgtgcacgtcaatggttattttgaagtttcatccaaccggcgtgacatttggtatggtgctgacatggacaggggtggtaagcttcgctctgattggaacaggctactgttggaagatgttgtcgctccgttgttcagagaactgctgatgaaattgcggacgctttctgactccacaatatcatattattcactgtggccaactggtttatatgaggatccctggagtatccttgtggagcaaatttacaaggttatttacacctcgccagtcttgcactcagagattgaaggcgggacctggatatcaccggctgatgccttgcttcacgatgagggattctcaggaagcaataatcttaatgaagccctcgtgttggtaggcatgccaattgttcgtgtatctaatgcaataggcgatatgttttcaaaattttatatgcagtctatgctcaaaatagtaagtcctgctatagtgaggcatttcctcaaggattatgctaaacttgctacgctaggaaagtctcataagttaatattattggaatattgtcttactgatgtttacaatactgatatcggtaaatgcatgaatggccttccactgattccactagcaaatatgcggtatgggactttttctgctagttcgcaagaggactattattatgtctgtgataacatcgaatatgagcttctagctgaagttggtgatagaatagttgacagaagcatccctcctgtactactagacaagctgtatcagatagccagtgattcccaggcgaacattaggttcattgatggcccaatcttctgccagctcttacccaggttatttcctcctggatggaagcttaaagatcaagttccctggaacccaggcttgggtgggtcatctcctacagcagcatggtttaaacttttttggcagtatatagggggacgctcgtatgaccttcatttgtttagtgattggcctatactgccatctacctttggccaccttcacagggcatgcacaagctcaaaattaatcaaaacagaatcactgtctagtttgatgaatgaactcctggcaaagtttggttgcaagatactggatgctgaatatttgagtgatcacaaacaattgtcattttatgtatatgatggtgatgcaactggagttcttcagtcaatctttgaggttatctcattggagggtgttgatttgcaatctctgtttcaacgcattactcctggtgaaaaaaatgagctgtaccagtttcttctggatccaaaatggtatttaggagcctgcctttctgtcgtaagtataaaccaatgtaaaaagcttccaatcttcagggtatttgatggaggttctcccagcacttatggtttctcggatttgtttagttcaagaaagtatctgccacctcttggtgttcctgaccatttactcaatgacgactttattttctctatttgcccaagcgatgaagatatcataatgagatattatggcattgaacgcatgccgaaatcgaacttctaccagaggtatgttctgaatagattagacaagctgcaaacggagttgcgtgattcagttcttttaacaatcttacaagatctgcctcagctgtccttggaggatccaatgttcaaggaaaccttgaaaattcttagatttgttcccactatcaatggaactttgaaaagcccacaatctctttatgatccccgggtggaagaactttatgttcttctccaggaatcgggttgctttccccatggtttatttcaaaatccagatgttcttgatatgctgctttgcttggggcttagaacttcagtttctaccgataccatattagaaagtgctcgtcagattgattcacttgtgaacatagatcagcagaaggcccattcaagggctaaggtccttctttcatatcttgaagttcatgctcacaaatggtatgtgaataagctatttgatggtcgtaagaaggtaaacatgctagctaaagttaccactgcgctcagacctcgtgacaaatcttgggaatttgatcttgagaagttctggagtgatctgagattgatttgctggtgtcctgtgttggctactgcaccaagtccagctttgccatggccttcagtatcatcaatgatagctccacctaagcaagtaaggatgcaggaagatatgtggattgtttctgctagctcacgcattctcgatggtgaatgcacctcctcggccttgtcgtacagtttaggttggttgtcgcctccatcagggagcgtgattgcagctcaactgcttgaattgggcaagaacaatgaaattgtgactgatcaagtccttcggcaagaattagctttggtgatgcctaagatttattctttgctgacaaacttgattggttctgatgaaatggatatagtgaaagtggttctagaaggatgcagatggatttgggtgggtgatggatttgcgaaaacagatgaagttgttttaagtggccaccttcatctagcaccatacattcgtgttgttccaattgatttagcagtgttcaaagacttgttcttggaactcggcataaaggagcacctgtaccctgttgattatgctagtattcttggcagaatggccataaggaaagcttcagcttcacttgaagctgaagaactaagaacagctatcctggttgtgcagcatttatctgagttccggtttcaggatcagcaaacacaaatatatttacctgattcttcgtctaggctttgtctatcttctgaacttgtattcaatgacgctccttggttgcttgattttggtcatgacatcagtgggagtgcatcaagcattgctttaagctcaaaaaagtatgttcacaattttgttcatggtaacatttctaatgatgtggcagaaaggcttggtgttcgatctcttcgccgcctattgcttgctgagagttctgattcaatgaatttgagtttatcaggggttgctgaggcgtttggacagcatgaagacttgactacacggctcaagcacattgttgagatgtatgcagatggccctggaattctctttgagttggtacagaatgcagaagatgctaaggcttctgaggttgtgtttttgctggataagactcagtatggaacttcatccattctttcgcctgaaatggctgaatggcaaggacctgctctctactgctttaatgattcagtttttagtccacaggacctatatgccatctcacgaataggtcaagacagtaaacttgagaaaccttttgcaattggaaggtttggtcttggcttcaattgtgtgtatcacttcacagatattcctggatttgtttccggtgagaatattgtcatgttcgatccacatgcctgttatttgccaggaatatctccgtctcatcctggtttaaggatacagtttgtaggaagaaggatcttagatcagtttcctgatcagttcgccccattcttacattttggttgcaatttgcaacagccatttccaggtacactcttccggtttccccttaggaatgcggctgctgcttcgagaagtcaaataaaacgagaacagtatgcaccacaagatgtggaaatgcttttctcttcattctccgaagttgtatctgaggctctactttttctccgcaatgttaaaaaggtaactctatatgtcaaggaaaacaacagtaaggagatgcgacttgttcatcgtgtctccaggcataatagctctcagataggtaaagaacctcatgcacttggtgcaatgcttgcgtttatacatggaagccaaccatcaggaatggatagaaatcagtttttcagtaagttgaataagactaaagacagtgacttgccctggagttgtcagaaggttactattcttgaggaaaacccttcttcacacttgttgcactcatggattttagctgaatgtataggtgggggtcatgctagaaagttgtcaactgcctctgttagtaaatctcacttctttgttccgtgggcatctgttgctgcatatctgcattcagtgagtgtagatgatacaaaaggactatcagctgaagctgaagtcaaccatgataactcagttttcacaaacccagatcttggatcttctaagttcaggaaaaattttgaggctcgggccttttgctttcttcctctaccaatcaatactagcataccagtgcatgtaaatgcttattttgaactctcttcaaatcgaagggatatctggatcggaaatgacatggctgggggaggaagagtacggtcagaatggaatttagcgctgcttgaagatgtcgttgctcctgcttatgggcacctgcttgcagctgttgctgaagagcttggtccctctgacttgtttctttcattttggcctagtgctgcaggtgtggaaccatggtcttccatggtgaggaaactctatgtttctattgcagaacttggaattcacgttttatatacaaaagctcgaggtggtcactggctgtcaacaaggcaggctatttttccagatttcagtttctcaaaggcaatggagctggcagaagttctctctcaagctggtttgcctgtggtatctgtaaccaagccaataattgacagtttcattaatgcatatccatcagttcatctactaaatcctcatttgctgagaaatttgttgatccgacggaagcgtggcttcagaagcagagaagaggctatacttgttcttgagtattgcttgagtgatatgggagatccttccttttgcgataaattgcaaggtttggctctccttcctgtggcaaatggatcattcacaacattcaacaagcgaggggagggtgagagagtattccttacttcacaaatagaatttgaacttcttaaggattccataccacatcttgttattgacaactctttaccagatggtgtttcgaagaagttatatgacatagcttattctgcgtgcatgaacatatatatattcacaagtaatcttctcattgagctgttgcctaggatcttgccacctgaatggcaacatgctaagcagttgtcttggtttcctgagcagcaaggtcagccaagtatggaatggatggtatcactctggaattttttgaggcattcctgtgacgatatttcagtttttgcaaagtggcctataatacctcttgtagatggcaaggttgtgcaacttgggaatgctgcaaatgtaataagagattatggatggagtgaaaatatgcattccttgcttcaaaaactgggatgtttatttctgcgatctgatctgcagatagaacatccccagttagcgaattttgttcaggaatccactgctgctggtgttttgaatgctgtgcagtctgtagcttctaatctccaggatatcaaggaattgtttatgagcacttcattggcagaagcacacgaactccgaagtttcattttccagtcaaagtggttttctggaaatcagatcagctcctcccatatgaatacaatcaggaacctcccaatatttgaatcttataaatctagggaacttgttagcttgacgaatcctagaaaatggcttaaaccagaaggggtgcatgaggatttattggatgcaagctttataagaactgaatctgtgaaggagaggtcaattttggtatcatactttgatatcaaggaacctcaaaaggttgaattttacaaggaccatgtccttcctcgaatgtcagagtttctattgcagccagctattatttcagcagttattcgtgatgtgaaactgttgatagataatgatgattcagcaagagctgcattatgtgagaccccttttgtcttagcagccaatggagcatgggtccagcccttcaggctctatgatcctcgtgtgcccgagttactgaagttgctgcaccaagatactttctttccttcagaaaagttcatgatgactgaagtaattgaattgttgggtagttttggattgaaaagaaatttcgggtttagtactttgcttgacatggcaaggtcagtttcactggtgcagaattcaggacaaggtgatgcgtttgattatgggcaaaagctacttgcctatctaaacattcttgagtccaaaacttcaaagatggagggcggagaaacttttcttgaggatgggaatctggaagcatctgaaattagtgaaactttggaacctaacaatcacggggatgtgtgtgatccaagcgaccaaactagtgtatctttgttctcaaatttcgattatgatatgccagaagatttattttggtcagagctgaaaaatatttcttggtgtccggtgcatgttgcaccattgctcaaaggacttccatggttcatatccgaagatatcatagcacctccagtcatcacaaggccgaaatcacagatgtggcttgtttcatcaaaaatgcgaattcttagtgcagattcctgttccatgtatctgcaaagaaaactaggctggtgtgatccaccaaatgtgagcacattgtcttcccagttagtcgagctctccaagtctcatgatgaactcaaaatgttttctgcagacacagacattgatgctattctgcaaaaggaggtccaagtaatgtactcaaaattgcaagacataattggcactcccagtggcaacgctctaaaaaagtatctggatggatttcaatgggtttatgtaggagataggttcgtggcaccacaggcacttgcttttgattcacctgtaaaatatcatccctatctttacacagttccatccgaactgtcagaatttaaaaagttactctccgagttgggtgtaaggcagacatttgatggaatggattatctgaatgcgcttcgccgtttagaaggagatgtcaaaggagagccgttgtccacagatcaactcagttttgttcactgtgtattggaagcatttgttgactgttaccctgacagtcaagcacctgatgtgttactgaactcattggcgattccggattcacttggggttctgacacctgctagaaaccttgtctataatgatgcaccctggatgaatgctaatcccacttcaaagaattttattcatctcagcattggcaatgaactggctaataggcttggtgtacgatctctccgtggatcatcattgttggatgatgagttaatgaggaatttgccctgcatggaatatgctaaaataagtgagttgttggctttgtatggtgagagtgactttcttttgtttgatcttatagagctagcagactattgcaatgcaaagaaagtgcatctgatttatgacaaaagagaacatccgaaacagtccttactgcagcagagtctaggtgacctccagggttcttcgttgacagtggtctttgaaggaaccataatgaaccgcgaagaagtttgcagcttccaacttcctcctccctggaaactgagagggaacatccttaattatggcttgggacttcttagtagttactttgtttgtgatgcattgactattctttctggaggttacttttacatttttgatcccttgggcttgactggtggtacgacttccactgctacctcatcagcaagatacttctctttgttaggtgcggaatataatcactcaatttatttgcatatcaaatagaatcacaagttgttctactgtgaacacatgacacgaactttagattctcttttactgtaaaagaaataagaatatctttcttatgttgcaattttttcttctgtcaggttgaaattatatatgttgattagttataacatagtgtactcaaaatatgtgtattacttctccctaaatcaaagtacagacttggttaattgaaattctttatgtttgaaata

SEQ ID NO: 105944 - DNA, 797 bp, Zea Mays
aatcaaggacaagaaacacggcgacgaaaaggctaggtagagtcaaatccccgggagaccaaccacccccgcaccgccacgaacacgcccaaatcggagagccataccaaaccaaagccttcgcatccctccggaaccctagcatcctccctcctcgctcctgggatgccccagtagctccgatcggcgcctcaccgccatggatccgggcggcgggggcgggatgctcctggaggacttcggccagcgcgtggacctcacgcgccgcatccgcgaggtgctcgccaactacccggagggcaccaccgcgctgcgggagctcatccagaacgccgacgacgctggcgccgggcgcgtccgcctctgcctcgaccgccgatcgcacgggagggcgtcgctgctgtcccccgcgctcgcgcagtggcagggtcccgcgctgcttgcttacaacgacgcggtgttcaccgacgaggacttcgccagcatctcccgcattggagacagcaggaaggtcgcccagacgtggaagactggccgcttcgggtacgcctctactgcctcattctcaatgcggagcttgcctggagtggtcacttgcaatgccgagcttccaatctggttgtgacgatgttgcttttgtgttatggcaatatggcgtcgtaatcactaccatttgtcaagcttttttgagggtgttatcgttcccaataatttagggaatttatcgacgtgctgtgtagtgtaccgagagagtgggatacagggacagatcaatatatatgttatgttttatcttc

SEQ ID NO: 105945 - DNA, 366 bp, Zea Mays
atggcggcgcttaacctcagccataagcatgctgctaagagcaaatcacgagaaggggtgaaaactaacaagatgttacctggagcaggagagcgccatctcggctaccgggtgcaggttgcgggggagctgggggccaaggaggatcgcgaggagacgaggagacgaaaggcgcaggatacgatagccgtgcggctccaccatcatcgacaggttttacccgtcgaccatgctcacatcgtagaagtccaggccttcgtgtccgtcgaaggtgaactcacccagggtcgccagcttcgcagccttcgtgtcctgcagccgcgccggctgcgtggagcagcccatgcgagaagaggaatgaggtga

SEQ ID NO: 105946 - DNA, 2161 bp, Zea Mays
gcggtccggttccaacaggggtgccaaggtcattcccatcttcgccggcggcctcgacttctccggtcccacgcagcgctacctggtcgacccgattaccggcaagccgttcgtgaacgccgtggtgtctctcaccgggttcgcgctcgtcggcgggccggcgaggcaggaccaccccaaggccattgccgcgttgcagaagctcgacgtgccgtacattgtcgcgctcccgctcgtgttccagaccacagaggagtggctcaacagcaccttggggcttcaccccattcaggtggcgctgcaggtcgcgctgccggagctcgacggtgggatggagcccatcgtattcgctggccgggaccccaggacagggaaatcacatgcattgcataggagagtggagcagctctgcactagagctatcagatgggcagaactgaagaggaaaactaaggaggacaagaaactggcgatcaccgtcttcagtttcccacctgacaagggcaacgtcgggactgcagcatatctgaatgtgttcagctccatctactctgtgctgtcagacctcaagaaggacggctacaacgtagagggtcttccggacacacctgaagccctcatcgaggaggtgatccatgacaaggaagctcagttcaacagccccaacctgaatgttgcttaccgcatgaatgtgagggagtatcaggcgctcacctcctatgcctccttgctggaggagaactgggggaagccacctgggcacctcaactctgatggcgagaacctccttgtctatgggaagcagtatggcaatgtcttcatcggagtgcagcccactttcgggtacgaaggcgatccgatgcggcttctgctctcaaagtctgccagccctcaccatggctttgcagcatactacacctttgtcgagaagatcttccaggccgatgctgtcctgaactttggaacacacgggtccctcgagttcatgcctggcaaacaggttgggatgagtgatgcctgctaccctgacagtctcatcggcaacatccccaacatctactactacgccgcaaacaacccgtcagaggccacagtcgccaagcgccggagctatgcgaacaccatcagctacctgaccccaccggctgagaacgccggcctctacaaggggctcaagcagctggcagagctcatctcttcttaccagtctctcaaggacactgggcgtggtcctcagattgtgagctcaatcatcagcaccgcaaagcaatgcaaccttgacaaggatgtcccactgcccgaggaaggggaggagctcccaccaagtgagcgtgacctgatcgttggaaaggtgtacgccaagatcatggagatagagtcacggctccctccctgcggtctgcatgtgatcggcgagccgccaaccgctattgaggcggtggccacactggtgaacatagccgccctcgaccgccccgaggatggcataatctcgctgcccggcatacttgccgccacagtgggcagggacattgaagatgtgtacaggggaagcgacaagggcatactggctgacgtcgagctcctgaggcagataactgaagcttcgcgtggcgccatcactgcctttgttgagaagaccacaaacagcaaagggcaggtcgtcaatgttgccaacaatctcagtaacatacttggcttcggcctttcagaaccatgggtgcagtaccaagttcatcagggcagacagggagaagctgagggttctgtttgggttcctgggggagtgcttgaagctcgtggtacaggacaatgagctgggcagcggcagaggctactgggagacatcggaggagaacctggacaggctcagggagctctactcggaggttgaagacaagattgaggggattgaccggtaaactgatttgccagattcaaaggaatgagaagcttggaactcttgtgtctcattgaggctcttgtacaatgtgtgtgtagcttatatatataaaaacttgtaacatgtaataccggaggatacaatctttaacaaggagcgtggtggtgattggaaagtagcatgagcagcagaagtgaggttgtttttgtgcagagtttttttttggttctcccctgtttcattcacagaacgagtcac

SEQ ID NO: 105947 - DNA, 1209 bp, Zea Mays
gctcgcttcttctcctttccctgctctgtttccgagggacggcggccgccaagaacaattgtccagccacgagccaagaacaggcgccttactctagtagtctagtgtagatttttttttacttactgcgctcgagcgtcgcgtcagtgtccaggcgcgcgtttctccgcccgccggctccgtcctgtgagcaggcgccatgtcgtcgtcgctagtgtccaccccattcgccgccgcggcgcagaagcagctcctggcggcgcccgtgccgctgcactcgttcctcctgagcagccgtcgccagcagccgcggcgcgccggcgccatccggtgcgcggtcgccggcggcaacggcttgttcacgcagaccaagcccgaggtgcggcgcgtggtgccggccgacccgcggggcctgcctcgggtcaaggtcgtctacgtcgtgctggaggcgcagtaccagtcgtccgtcacggccgccgtgcagcagctcaacgctgacccgcgccgcgccgcgtcgttcgaggtcgtgggctaccttccgcgccgacctcgccgacgtcaacgtcttcatcggctccctcatcttcgtcgaggagctggcgctcaaggtcaaggccgcggccgagaaggagcgcgaccgcatggacgccgtccttgtcttcccctccatgcccgaggtcatgcgcctcaacaagctcggctccttcagcatgtcgcagctggggcagtccaagagccccttcttccagctcttcaagcgcagcaagtccaactccagcaacttcgccgacagcatgctcaagctcgtgcgcacgctgcccaaggtgctcaagtacctgccctccgacaaggcgcaggacgcctggctgtacatcctcagcctccagttctggctcggcggctcggcggacaacctccagaacttcctcaagatgatcgccggatcctacttgccggtgcttaggggcgccggcatcaagtacgacgaccccgtgctctacctcgactccggcatctggcacccgctggcgcccaccatgtacgaggacgtcaaggagtacctcaactggtacagcacgcgcgccgggacgccaatgacaggctcaaggaccccaacgcacccgtcatcggcctcgtcctacagaggagccacattgtcaccggcgacgacggccactacgtcgccgtcatcatggagctcgaggccag

SEQ ID NO: 105948 - DNA, 1135 bp, Zea Mays
ggcgtgttgtgaagcttcgagaggagaggaggccaggcaaaacccaaatcaaatttcgccttcgtcgtcgtcttatcgtctcagatttgactccatgtcggcggcgctcgcggtgacggacgaggtggccctgccgatccgggcggtgggggatctagcggccgccgccgaggtctcgcgggaggaggtcgccgtcatcacccagtgcgcggcgctcggtgggaagttgccttttgaagatgcatcagttggtgcggttcttgcagtcattaaaaacgtggaaagcttgagggagcaattggttgctgaaatcaggcgggtgctgaaagctggtggaagagtattggtgcagagccctgcaccctcatccagtcagaagccgaacactgatattgagcgcaagttactgatgggtggatttgctgaagtgcaatcttctgctgcaagctcgcaggatagcgtgcaatctgttacagttaaggcaaagaaggctagctggagcatgggctcttcttttccccttaagaaaacaacaaaagcccttcccaagattcaaattgacgacgactctgatctgattgatgaagacagtctcttgactgaggaggacctgaagaaaccacaacttccagttgttggggactgtgaggtgggggcagcaaagaaagcatgcaagaactgtacttgtggcagggctgaggccgaggagaaggttgggaagctggagctcactgcggagcagatcaataaccctcagtcagcttgtggcagttgtgggttgggtgatgccttccgctgtggaacctgtccctacagaggtcttccaccattcaagcctggcgagaaggtttccttgtctggcaacttccttgctgctgacatatgatggcatcgccaacatcggcaaaacaaggagacgggggtacctacgttgttagtcgactgaactgcattccaaatagcttctgttagccaatgcgaatttgcgtgtgagtgacttgtcttttggatgatatataagcgcctctacacaaacacaagtgtgcatcagtgcatgtgttttcagattgattttgtgagcctggatgcctcttcttaattgagacgaaggacgtggacacggacaacctataca

SEQ ID NO: 105949 - DNA, 1391 bp, Zea Mays
atggcggtgctggccgtggtggccgccgcgctgctgctgctctgggccggtggggtctccatcgcggcggcggggagtggcgacgaggaggagtgcgacctgttcgacggggactgggtctgggctggcggcggcgatggggttcctcgacatcggcttccgatgcgccgagaacggccgccccgagcttcgagaggagaggaggccaggcaaaacccaaatcaaatttcgccttcgtcgtcgtcttatcgtctcaggtagcagtcgcgtgatgaatccgggggcgtgcagataaaaccctccctcgattaaccctaattccttttctcttcggggatactcctttcaccgagtctcttctggttctcggcgtgtgctcgtgtgcagatttgactccatgtcggcggcgctcgcggtgacggacgaggtggccctgccgatccgggcggtgggggatctagcggccgccgccgaggtctcgcgggaggaggtcgccgtcatcacccagtgcgcggcgctcggtgggaagttgccttttgaagatgcatcagttggtgcggttcttgcagtcattaaaaacgtggaaagcttgagggagcaattggttgctgaaatcaggcgggtgctgaaagctggtggaagagtattggtgcagagccctgcaccctcatccagtcagaagccgaacactgatattgagcgcaagttactgatgggtggatttgctgaagtgcaatcttctgctgcaagctcgcaggatagcgtgcaatctgttacagttaaggcaaagaaggctagctggagcatgggctcttcttttccccttaagaaaacaacaaaagcccttcccaagattcaaattgacgacgactctgatctgattgatgaagacagtctcttgactgaggaggacctgaagaaaccacaacttccagttgttggggactgtgaggtgggggcagcaaagaaagcatgcaagaactgtacttgtggcagggctgaggccgaggagaaggttgggaagctggagctcactgcggagcagatcaataaccctcagtcagcttgtggcagttgtgggttgggtgatgccttccgctgtggaacctgtccctacagaggtcttccaccattcaagcctggcgagaaggtttccttgtctggcaacttccttgctgctgacatatgatggcatcgccaacatcggcaaaacaaggagacgggggtacctacgttgttagtcgactgaactgcattccaaatagcttctgttagccaatgcgaatttgcgtgtgagtgacttgtcttttggatgatatataagcgcctctacacaaacacaagtgtgcatcagtgcatgtgttttcagattgattttgtgagcctggatg

SEQ ID NO: 105950 - DNA, 1496 bp, Zea Mays
atggcggtgctggccgtggtggccgccgcgctgctgctgctctgggccggtggggtctccatcgcggcggcggggagtggcgacgaggaggagtgcgacctgttcgacggggactgggtctgggctggcggcggcgatggggttcctcgacatcggcttccgatgcgccgagaacggccgccccgagcttcgagaggagaggaggccaggcaaaacccaaatcaaatttcgccttcgtcgtcgtcttatcgtctcaggtagcagtcgcgtgatgaatccgggggcgtgcagataaaaccctccctcgattaaccctaattccttttctcttcggggatactcctttcaccgagtctcttctggttctcggcgtgtgctcgtgtgcagatttgactccatgtcggcggcgctcgcggtgacggacgaggtggccctgccgatccgggcggtgggggatctagcggccgccgccgaggtctcgcgggaggaggtcgccgtcatcacccagtgcgcggcgctcggtgggaagttgccttttgaagatgcatcagttggtgcggttcttgcagtcattaaaaacgtggaaagcttgagggagcaattggttgctgaaatcaggcgggtgctgaaagctggtggaagagtattggtgcagagccctgcaccctcatccagtcagaagccgaacactgatattgagcgcaagttactgatgggtggatttgctgaagtgcaatcttctgctgcaagctcgcaggatagcgtgcaatctgttacagttaaggcaaagaaggctagctggagcatgggctcttcttttccccttaagaaaacaacaaaagcccttcccaagattcaaattgacgacgactctgatctgattgatgaagacagtctcttgactgaggaggacctgaagaaaccacaacttccagttggtagagcaacaaaacccgtcaacttagttcaactccgtaagcaatagccagtttaggtttggatcctaaacagttaagtgatgttttcactgatgttttcaccagttggggactgtgaggtgggggcagcaaagaaagcatgcaagaactgtacttgtggcagggctgaggccgaggagaaggttgggaagctggagctcactgcggagcagatcaataaccctcagtcagcttgtggcagttgtgggttgggtgatgccttccgctgtggaacctgtccctacagaggtcttccaccattcaagcctggcgagaaggtttccttgtctggcaacttccttgctgctgacatatgatggcatcgccaacatcggcaaaacaaggagacgggggtacctacgttgttagtcgactgaactgcattccaaatagcttctgttagccaatgcgaatttgcgtgtgagtgacttgtcttttggatgatatataagcgcctctacacaaacacaagtgtgcatcagtgcatgtgttttcagattgattttgtgagcctggatg

SEQ ID NO: 105951 - DNA, 957 bp, Zea Mays
ggcgtgttgtgaagcttcgagaggagaggaggccaggcaaaacccaaatcaaatttcgccttcgtcgtcgtcttatcgtctcagatttgactccatgtcggcggcgctcgcggtgacggacgaggtggccctgccgatccgggcggtgggggatctagcggccgccgccgaggtctcgcgggaggaggtcgccgtcatcacccagtgcgcggcgctcggtgagcttagctggtttcgcccccgtcttgccctctttccattttttcttctatttctttccctcgaggcgaccatggcaagttgccaagttcgtgcttgtggatgcaggaacccgtcgatgcgtgctgttctctttgctgccttgcttgcatgcttcaattagcgagccttctggcgtgattccgcggaatgggctagattcttttttcttttgcaatcaaatttggagtagtggacgtttggttcttaagggttcccacttcaattagagaattagtttatcaaaccatccttccgggatcgggaggctagcaagttgctcaagtaatattgaagcgcagtcagtggacgccaagtttggccttgcaatgtttcttcctgtgatagtgccacttactgattcttcgaatgaaaactttcagtaccactagtagttttggccctgtggtatctcttgcgctactgccactttctaatgtgtagaatgaaaacgtcgagctgacgcctcaacaacaacaaaaaaaaaagaaaaagaaaagaacgtctcaacaacaaaaagaaaagaaagctgaagttatttcccaactccaaaaccgctgaatctgtggacatgcccttgcagacttcttcagatttgaacttgaacctctccttgcagttcttgatatctatgccatgtctcatgtgctagttgcttaagagcatctccagaagaacgctaaaaccaacccaaaaaca

SEQ ID NO: 105952 - DNA, 1058 bp, Zea Mays
atggcgagcgcgcgggtgccggcaggcgcacggaaaaggaggggcctggcactggcagcctggctgccttcgtccgccatgagcctcgcccatccatgggcagagagccagacagagggaggtcagaggagaggaccgagagtactcggctacggggctacggctgggtaccggcccgtgcctctgcgctctggccgctgcctgccgcctgccggtgccgctaccacgccacccgccaccgccagcccggtagctagggggggtggttccggccttgtgaatttctcggtgcgggttgcttggctcctcggatgcgagttccgccttcttttctttgtttcgctgcgggtttcttggctcctaggatgtgttccttccttccctggatcttgcacagtttcgacgaatgcatttgctctgccacgatttcctcggcgccgccgctatgaagatgcagtcaggagccactggatggactcgagggaattcctcgtgccagggaagctttcagatttcgtgttgcttcgtcctgaagcagatcgtcaggcttgtcgtgctgcttcgctgaaacgtcttcatgctttccctctctcctgcagttgcacagcagctccagtgaggatccatccatacatgaagaaaacgtgctgacggttcgcagagacacgatccgtgtccgcggggggggggggggggggggggggggggggcgcagttcagcacctgcgccgtgcaattgccatgttcgaaatccatctgcgcttgcgctgctcgccgtagcctgaacctggctgtgcaattgccatggttcccagggctgctgcctgtccatattcagaggaacacgaccggaggccaagcttccatgttttcccttcttctttatttcctgatgaaattaaatgaacaggaatgctctctgccaagccttactgtagtagtcagtagcagctcccagctccgtgtatgcttgaaattccagtacctgggaaattcagcgtgagccgcagctcggtttcggtttgggagtggtggtgtttgctgtgcagatcagttac

SEQ ID NO: 105953 - DNA, 2267 bp, Zea Mays
taaacgtggtaataagcccacgtcgcaatcaactgccatcgaaggcttggagccttggcttaaccagcaaccagcgcggcgacgcgtccgccggctcgcggatcgcctcgtgccctcgtccccgtgccggccccggccccgccccgccccgccccatccacccttttctcttttgtctttgcagcgccttctttgctcgtcgttgaaatatccacagcgaaaactaaaaacattcctccgcgacggctccaggctgcgaagtctcccaccaacgcgcgccgatccggaccgaaggcctcctgcagtcctgctctccgtctccctcgcggcctcgccccgtggatctccgctccggccgacgggcgcgatggcggagccggagcgggagcagcgcccgctgctagaggtagagcaatccgtcacgtccataccggaagatcatgaagccacatgttggggctgtgggctccggcttgtttttgcgggttactcgcctatctataagtgtggctggtgtggagccatcacgcaaagtaaccagaccacaaggaaacctgatagtgtatggttttcccactggaggcgcgtgcgggacagattctttgtcaccgtgctcatcctcttcatgctctttgtgatatgtggtggggtctgggcggtatatcctattgttttcaaaatcagcaacttctgtggcatctttcactgcatggtaacagctgtgttagctgtatttaccatcacaagctactgcttggcctcttctaaatctgcaggcgcgccaacaaatgtacgttggggcagctatcccttggttgggaaaagggatcttgagaactatactttttgtacatactgtaataaaccaaagccccccagagcacatcactgccgatcttgtaaaatgtgtgtggtggacatggatcatcactgcccatttattggcaactgtgtgggagcttcaaatcatcaagtgtttgtcatttttcttatttctgtggtcattagttgttcttatgctgctgggatgaccatatatgcaagctaccagatatggccctctgttgattttccaaacctagcatcatctcgtgattcaatgagcttttggaaaatatggttggagattattactacggttgcaggctctgccttcttcttgtcagcaagaggtctagttctggtatatctagcattcgctagtttatcagtcaatgctggtataggtgtactactgtgccagcagcttagttatatctacgaaggaaacacatatctcaaccatctaagttcaccgaatgcgttgcatggagagaggggtttgcataatattattagattttttgggtgcccttatccaatttccagagttctgttgcgatactcgaatgctggcaagttgcaggataattcagggtcaaaacttctctagaggtttcagtgatacactcttactgttccagcaactgaggcagtgtatggaattagttgttccgagtcaagatggttctgttacctggaatcatgatttgtgaacctcagttgaccatcaacagattagtttgagtaactgaagttgttcagggacgcaacactcatgacagtccatgttctggactctggagaggagttgttcatgtcactcacattgatttggtagaacagctctggcagatgctgaagtaccatgtggcctgcgcattcattgcctgcagacaatcataaggtgctgatggcattgcaataaattgcagtatctgaaatcccgcaccatgcatcatcactgcctttttcgatagggctgaagatggaagcttcacgcttttggttgctgcagaagaaacggacatcaggattaaatctgacagcggctttgagtggtgctaggatgtttggaaaaatgtgtgcctccttgatgctaatacacggacatgtatataggaaaatgatacacccagcctagtgaggttaaccgagagccaacaaattagggttatctggagcctaacagttcattaagtacaacaaaactcggggagagatccgatcgccccaaaattctagtccgatggggaagggtggttctcccttttagggctagtttgggaacctactttttcgaaaggattttcatttttctaagaaaaaatagttcatttttccatgagaaaatagaaatcccattagaaaatagagtttccaaactaggccttaagatggttttttcctcacaagttatgcaaggtgatataattctaaggcttaca

SEQ ID NO: 105954 - DNA, 1350 bp, Zea Mays
cactctccgatttcgtcacgaacccagtacggtattgtgctgacctgtgccattgtctatcctcggcgtgtgctcgtgtgcagattggactccatgtcggcggcgctcgcggtgacggacgaggtggccctgccgatccgggcggtgggggatctggcggccgccgccgaggtctcgcgggaggaggtcgccgtcatcacccagtgcgcggcgctcggtgggaagttgccttttgaagatgcatcagttggtgcggttcttgcagtcattaaaaacgtggaaagcttgagggagcaattggttgctgaaatcagtcgggtgctgaaagctggtggaagagtattggtgcagagccctgcaccctcatccagtcagaagccgaacactgaaattgagcgcaagttactgatgggtggatttgctgaagtgcaatcttctgctgcaaactcgcaagatagcgtgcaatctgttacagttaaggcaaagaaggctagctggagcatgggctcttcttttccccttaagaaaacaacaaaagcccttcccaagattcaaattgacgacgactctgatctgattgatgaagacagtctcttgactgaggaggacctgaagaaaccacaacttccagttgttggggactgtgaggtgggggcagcaaagaaagcatgcaagaactgtacttgtggcagggctgaggccgaagagaaggttgggaagctggagctcactgcggagcagatcaataaccctcagtcagcttgtggcagttgtgggttgggtgatgccttccgctgtggaacctgtccctacagaggtcttccaccattcaagcctggcgagaaggtttccttgtctggcaacttccttgctgctgacatatgatggcgatgcaagtgaacatcggcaaaacaaggagacgggggttacctacgttgttagtcgagtgaactgcattccaaatagcttctgttagccaatgcgaatgtgcgtgtgagtgacttgtctttcggatgatatatatataagctggccaatcgcgcctctacacaaacacaagtgtgcatcagtgcatgtgttttcagattgattttgtgagcctggatgtgaagaatgaatatcgctcaaccacattgtaaagctttacatacagactgcagagctagtcgccgctggtagcgaggtctagtactctggagagagatcgatcgaggggatggatgttaccaatgaaaagacacgcgcctctaggaacccccgcaagaggctcacagtacttcgtcgtgaaatcgaactgtttcagcctgtttggcctctgaaaatggctccggttgactatgaagtaaaaaa

SEQ ID NO: 105955 - DNA, 2013 bp, Zea Mays
atgttcagcagtaataaggcacagatccttgaatatttatgggggcatccatttgcaactctggacggtggcggcgagctgctcctggcccatttgcgcctgaatcaaacggtggagggagttagatgtaaaactttccacgccagccaaggatggtgggaggagttctctgcaaaattgccggctgtcgttggatggaagatagatggccgagatttaatatgcgcatatgagtacggtaccggtttgagcacacgatacgttgccttctcgaaacgccccgctcgacgactagggttttctggtaaaagaagcgaacacgatcctctccgctgtcgacatcggcagccgcattccaagccccgtcgcgggcatcaacagtgcctctcttctgcgtctgcggtggcaaacgacacggggcgagcagggtgcgcgaacctgaggttcgtaggcgtcgccttccgcccctcactgaagtcgtcgtcagcagctccctccagtctctgccacggtaaatggcgtgacctgacttagtacaagcacctaggggtctccggcctcgtgaagacgcactctccgatttcgtcacgaacccagtacggtattgtgctgacctgtgccattgtctatcctcggcgtgtgctcgtgtgcagattggactccatgtcggcggcgctcgcggtgacggacgaggtggccctgccgatccgggcggtgggggatctggcggccgccgccgaggtctcgcgggaggaggtcgccgtcatcacccagtgcgcggcgctcggtgggaagttgccttttgaagatgcatcagttggtgcggttcttgcagtcattaaaaacgtggaaagcttgagggagcaattggttgctgaaatcagtcgggtgctgaaagctggtggaagagtattggtgcagagccctgcaccctcatccagtcagaagccgaacactgaaattgagcgcaagttactgatgggtggatttgctgaagtgcaatcttctgctgcaaactcgcaagatagcgtgcaatctgttacagttaaggcaaagaaggctagctggagcatgggctcttcttttccccttaagaaaacaacaaaagcccttcccaagattcaaattgacgacgactctgatctgattgatgaagacagtctcttgactgaggaggacctgaagaaaccacaacttccagttggtagagcaccaaaatccgtcaacttagttcaactccgtaagcaatagccagtttaggtttggatcctaaacagttaagtgatgttttcaccagttggggactgtgaggtgggggcagcaaagaaagcatgcaagaactgtacttgtggcagggctgaggccgaagagaaggttgggaagctggagctcactgcggagcagatcaataaccctcagtcagcttgtggcagttgtgggttgggtgatgccttccgctgtggaacctgtccctacagaggtcttccaccattcaagcctggcgagaaggtttccttgtctggcaacttccttgctgctgacatatgatggcgatgcaagtgaacatcggcaaaacaaggagacgggggttacctacgttgttagtcgagtgaactgcattccaaatagcttctgttagccaatgcgaatgtgcgtgtgagtgacttgtctttcggatgatatatatataagctggccaatcgcgcctctacacaaacacaagtgtgcatcagtgcatgtgttttcagattgattttgtgagcctggatgtgaagaatgaatatcgctcaaccacattgtaaagctttacatacagactgcagagctagtcgccgctggtagcgaggtctagtactctggagagagatcgatcgaggggatggatgttaccaatgaaaagacacgcgcctctaggaacccccgcaagaggctcacagtacttcgtcgtgaaatcgaactgtttcagcctgtttggcctctgaaaatggctccggttgactatgaagtaaaaaa

SEQ ID NO: 105956 - DNA, 1453 bp, Zea Mays
ggaacgctggtccacggggatcggagcccggtagcaacaggcataaagcaccagcaggcagcaggcctaggagggccccggcccgggggtgcgctgtgtccacgtggcgttcaccatttcggcagaatccgatggcgcgcgctcctcattggccggcgctcaatccatccaaccgccgccgagatttccttcccgcgggcggatcaaaacttgtggctgccccgtgccgcggcgccgctattaataaaaaatctgacgacgtcctccttctcctgctcccttcaacggacttgaccactaaaagctaagcacacccccggccatggcgctcgcgtccacctccgccaccgcgcccgctgccgtgctcaagaccccgttccttggcgccaggcgcgcgctcgccaatgccgccgcgcccaagcccgcgccgcgccgcgcgctcctcgccgtcgccgcggccgccgccaagaagtcgtggatccccgccttcaagagcgacgccgagttcatcaacccgccctggctcgacggatcgctccctggcgacttcgggttcgatccgctggggctgggcaaggacccggcgttcctcaagtggtaccgggaggcggagctgatccatgggcggtgggcgatggccgccgtgctgggcatcttcgtggggcaggcctggagcggcatcccgtggttcgaggccggcgccgacccgggcgccatcgcgcccttctccttcggctcgctgctgggcacgcagctgctgctcatggggtgggtggagtcgaagcggtgggtggacttcttcaacccggactcgcagtccgtcgagtgggccacgccctggtcccgcactgccgagaacttcgccaacttcaccggcgaccagggctacccgggcggcaagttcttcgacccgctcggcctcgccggcaccgtcaaggacggcgtctacgtccccgacgtcgagaagctcgagcggcttaagctggccgagatcaagcacgcccgcatcgccatgcttgccatgctcgttttctacttcgaggccggacagggcaagacgccgctcggcgcgcttggcctatgatctgcatgctgccgcccacgacgtgtgtcgtatcatcagtcatcctgtgtggctgtgtgtttgactgtttgtgctcatagatcgatcgaatccaccgagctagttctcgattgcgagcgtcgtggtacggctgcatcggatcagacgcatccaacaaaatgggggagttttttttttgttcttcttcttccgtgtatgtaccatgtagtgtatagtagtctggatcgattcatgggaccaattaaggcagaatgagtgagcgagggacatttcgttacattaatctctcattccgccttgctgaattactatcgtctttcagaaacatggcgatattcctccgaagaccaattcatgaatcactagaaa

SEQ ID NO: 105957 - DNA, 1242 bp, Zea Mays
ggaacgctggtccacggggatcggagcccggtagcaacaggcataaagcaccagcaggcagcaggcctaggagggccccggcccgggggtgcgctgtgtccacgtggcgttcaccatttcggcagaatccgatggcgcgcgctcctcattggccggcgctcaatccatccaaccgccgccgagatttccttcccgcgggcggatcaaaacttgtggctgccccgtgccgcggcgccgctattaataaaaaatctgacgacgtcctccttctcctgctcccttcaacggacttgaccactaaaagctaagcacacccccggccatggcgctcgcgtccacctccgccaccgcgcccgctgccgtgctcaagaccccgttccttggcgccaggcgcgcgctcgccaatgccgccgcgcccaagcccgcgccgcgccgcgcgctcctcgccgtcgccgcggccgccgccaagaagtcgtggatccccgccttcaagagcgacgccgagttcatcaacccgccctggctcgacggatcgctccctggcgacttcgggttcgatccgctggggctgggcaaggacccggcgttcctcaagtggtaccgggaggcggagctgatccatgggcggtgggcgatggccgccgtgctgggcatcttcgtggggcaggcctggagcggcatcccgtggttcgaggccggcgccgacccgggcgccatcgcgcccttctccttcggctcgctgctgggcacgcagctgctgctcatggggtgggtggagtcgaagcggtgggtggacttcttcaacccggactcgcagtccgtcgagtgggccacgccctggtcccgcactgccgagaacttcgccaacttcaccggcgaccagggctacccgggcggcaagttcttcgacccgctcggcctcgccggcaccgtcaaggacggcgtctacgtccccgacgtcgagaagctcgagcggcttaagctggccgagatcaagcacgcccgcatcgccatgcttgccatgctcgttttctacttcgaggccggacagggcaagacgccgctcggcgcgcttggcctatgatctgcatgctgccgcccacgacgtgtgtcgtatcatcagtcatcctgtttctcgattgcgagcgtcgtggtacggctgcatcggatcagacgcatccaacaaaatgggggagttttttttttgttcttcttcttccgtgtatgtaccatgtagtgtat

SEQ ID NO: 105958 - DNA, 129 bp, Zea Mays
ccccggccatggcgctcgcgtccacctccgccaccgcgcccgctgccgtgctcaagaccccggcgccatcgcgcccttctccttcggctcgctgctgggcacgcagctgctgctcatggggtgggtgga

SEQ ID NO: 105959 - DNA, 147 bp, Zea Mays
atgaatgccttttggtctctctatgaatgcgatccctttgtctgttctcatatcatgcactttgacccctgcatcattagcccaagcaagaagatccgccctccacttcatcgaatggattggcccttcaccatcacgcaaaaccta

SEQ ID NO: 105960 - DNA, 1335 bp, Zea Mays
tccactccgctccatcctcactccctcccgatgccttccacttccctcgccgtccccaccggcgccgtcggcgtcgccggctctcgccgctatccattcatcagcaaccgatcagcctcaagcgccccgcgcctccgccgcgcgccccggctcgtcatggtctccgcctcggcgtctctcgaggccctcatctttgattgcgacggcgtcatactggagtcagagcacctccaccgccaggcctacaacgacgcgttcgcgaacttcggggtgcgctgcccgccgggctccgccgacctgctgtactgggacgaggccttctacgacaacctacagaaccgcatcggcggagggaagcccaagatgcggtggtactttggggaaaatgggtggcctccttcaaagatctttgagacaccaccttcgactgactctgataaggagaagctggttgatataattcaggattggaaaacagagagatacaaagaaataataaactctggaactgtgaagcctagacctggtgtcttgcagttgatggatgaagtaaaggatgcgggtatcaagcttgctgtttgctctgcagcaactaaaagttcagtcataatgtgccttgaaaaccttattggacttgagcgatttaatggcctggattgcttccttgctggtgatgatgttaaactaaagaagcctgatccaacaatatatataacagcatcagagaaattaggtgtggaaagcaagaactgccttgtggttgaggatagtgtcattggattacaggtaagtcttcagatatgtatctgattaaccacactaatcctgttaactatgagatccatttactttttaataggctgcaaaaggagcaggaatgtcatgtataataacatatacaccttcaactgctagccaagatttcaaggatgcaattgctacctatcctgaccttaataatgtcaggcttgaggacctcaagctattactccagaaaactcttgttactggatagcaaagtgtcttgttttccccaaagaatacattgaaaattttcttgatgcatgataatccacgctattattccctggatgttgaacagttggtgatgagtgttgaacagtagatgaatccaaacatacatcttgttgaacagttggtgctggatggtggaaggcatgattactcagatagataattaatgcaactagaaagatagatagttacgattgttaaaacttttgttgtgaagagtgatacaattgttgtgtatcgaaaaacaattttatcttacattttggagagaaaaattattatctcggggtgcccctcaca

SEQ ID NO: 105961 - DNA, 1262 bp, Zea Mays
tccactccgctccatcctcactccctcccgatgccttccacttccctcgccgtccccaccggcgccgtcggcgtcgccggctctcgccgctatccattcatcagcaaccgatcagcctcaagcgccccgcgcctccgccgcgcgccccggctcgtcatggtctccgcctcggcgtctctcgaggccctcatctttgattgcgacggcgtcatactggagtcagagcacctccaccgccaggcctacaacgacgcgttcgcgaacttcggggtgcgctgcccgccgggctccgccgacctgctgtactgggacgaggccttctacgacaacctacagaaccgcatcggcggagggaagcccaagatgcggtggtactttggggaaaatgggtggcctccttcaaagatctttgagacaccaccttcgactgactctgataaggagaagctggttgatataattcaggattggaaaacagagagatacaaagaaataataaactctggaactgtgaagcctagacctggtgtcttgcagttgatggatgaagtaaaggatgcgggtatcaagcttgctgtttgctctgcagcaactaaaagttcagtcataatgtgccttgaaaaccttattggacttgagcgatttaatggcctggattgcttccttgctggtgatgatgttaaactaaagaagcctgatccaacaatatatataacagcatcagagaaattaggtgtggaaagcaagaactgccttgtggttgaggatagtgtcattggattacaggctgcaaaaggagcaggaatgtcatgtataataacatatacaccttcaactgctagccaagatttcaaggatgcaattgctacctatcctgaccttaataatgtcaggcttgaggacctcaagctattactccagaaaactcttgttactggatagcaaagtgtcttgttttccccaaagaatacattgaaaattttcttgatgcatgataatccacgctattattccctggatgttgaacagttggtgatgagtgttgaacagtagatgaatccaaacatacatcttgttgaacagttggtgctggatggtggaaggcatgattactcagatagataattaatgcaactagaaagatagatagttacgattgttaaaacttttgttgtgaagagtgatacaattgttgtgtatcgaaaaacaattttatcttacattttggagagaaaaattattatctcggggtgcccctcaca

SEQ ID NO: 105962 - DNA, 100 bp, Zea Mays
aactggctgtgaaggccgtcttacaaattctcatgatgtatgtgtgcagcagttagttgtagcttcagaaagccacaccacgaaaagaggggaaatgcct

SEQ ID NO: 105963 - DNA, 95 bp, Zea Mays
agtcactctatacctcatgaggtgatgcatcataagttcattccatcagtttttggtggaatcaacccactcctcatctatatactaattattag

SEQ ID NO: 105964 - DNA, 783 bp, Zea Mays
gctgcagcctgactgtctgttttcagcacccgcaccacctgactgtctgttcgcagcacccggacctgtgtcaatggccgctgcagccgccgctccagcatctgtggcgccgtcctcgcccaaggccgccggcgacaacaggaagacggtggtgtccgtggacgcgtcggagctggagaagcacgtcctagcggtggacgacagctctgtggaccgtgccgtgatcgccaggatcctgcgtggctccaggtacaaggtgaccgccgtggagtcagcgacgcgcgcgctggagctgctcgcgctaggcctgctccccgacgtcagcatgatcatcaccgactactggatgcccgggatgactgggtacgagctgctcaaacgcgtcaaggagtcggcggcgctcagaggcatccccgtcgtcatcatgtcatcggagaacgtgtccacccgtatcacccgctgcctggaggagggcgccgagggcttcctcctcaagcccgtccgccccgccgacgtctcccgcctctgcagccggatccggtgactgcgtgtggtgctatgttaggagctaggatcctcaaccaaaaaaaaaaagattcctcttctttctttctttctctcctgcttggacatagatcttcaaacaaggagctaacatttggggggagactttttagctttagggatctcaacaagttgttcggaacgggggggatggagcacagcgttggctgttcttttctccattcctcttaataacatcaggtgtcaatgtcatgcacg

SEQ ID NO: 105965 - DNA, 693 bp, Zea Mays
ccttaagcaacccttcccttccattccattccttggccacgtaacccaattacccaacgcatcgaggagcgcacgaaggcaaccgccttcccatcccaccgggcatcggcccatctgatccgatcaggctagatcctgccggtgccggtcttcgcgccgcctatggccgaaggcgacgcgcccgcccccgccgcggctgcagcggcggcgtccccgcggtcgcccatgccgcaggagacgccggcgatgcagaagcggaggcagcgggggctcgtgtcgcgggtgtggaagggcatcttcggcggccgcgaggacgtcgagaagctgctgcaggcgctgtccaaggaggaggaggccgtgcgggcgcgccttcgccgccgggcccgcgcctcccgccagtccgcgcacaacgtcctcgccctcgccgccgcgctcgagattgttgccgttggatacgccatcatgaccacgagatcgccggacatcagctggcagatgagggcagtcagggtgctacccatgttcttggttcctgctctagctgctctcatctactcgaccattacaagcctcacgaaaatgcttgacaacagagaccaacaaactcttgaaaagctacgaactgaaaggcaagccaagattgatgaattgaaggagagaacaaattactacactactcagcaacttatacag

SEQ ID NO: 105966 - DNA, 1318 bp, Zea Mays
aagcacatatgctgtccgtcaccgcgcgcgcctccttgcccttcttcaccctttcctcccggacccggcgtctccgtgcccgtgcgtgccttctccggcctgcggtctcctccaccggccaccgctgcctcgcaattgggcaaggcaatcagaccgcccccatcaaccgccctgaccgcgcgagggagatcaaacgcggaggccgtccatccctcccgcgtcatcgtgatgccaggcctcgccgcagccgagcaggacgccgtctcgctggtgcggcgcgtcgcccgcgccctcaaccgccgcttcaccgacatcgtcgcgctgctcttcagccacaagggcgctggatcgctcggcgccgtcgcggggttcgccatcgccgtggtgttcgcgtggaagttcctgcgcccccgcagacgtgctcccaagcggcccccacctacccctgcagcggctcccgctgcgactgtgcctgatgcggccgagcctatcggtgactcaggcaaggtagtaacacgggaaattgtggtgaagcgactgaaaggctgcagaaaggttacatgccaacttctcggtgttgtttttgaggagacaattcctgaggagcttcagaaacatgccaccgttagaccctccgtggtagagctgctactggaaatatccagatattgtgatctctacctaatggagactgtaattgacgataagagcgaggaaaatgctctcatggccctggagacctctggacttttcagaactggtggcctgatgaaagagaaggtgctcttttgcagctctgaagttggtcgaacttcatttgttcgacagttggaatcagattttcacatagacacgagccttgacatagtttctcaactatctcggttcattcgatgccaactatttatttccacggtggaaggagaacagcttgcaggcaacgtattcaattctccaagtcttgagcagttcttctcttgatggcgggacgcaaagaaaggccttctgcactccaaacaaatgtgctgatttcacaattgtgacttgtgagttgtaggcttctagcgccccccggcctggacgcaacagacaccctacaactgttggagttcagttgtgatcatgcaagatgtatattaaacagacaataataagttggtaaaaaatattcatatttatttattatttctagtaaaagtacatggaaaatataaatatagaagctactcctggtcgtcttcaactcttcatttccacctagcttaagctgaaaaaagataattgaaacaggtatcagtatgatactttgcaaatacgt

SEQ ID NO: 105967 - DNA, 1409 bp, Zea Mays
aagcacatatgctgtccgtcaccgcgcgcgcctccttgcccttcttcaccctttcctcccggacccggcgtctccgtgcccgtgcgtgccttctccggcctgcggtctcctccaccggccaccgctgcctcgcaattgggcaaggcaatcagaccgcccccatcaaccgccctgaccgcgcgagggagatcaaacgcggaggccgtccatccctcccgcgtcatcgtgatgccaggcctcgccgcagccgagcaggacgccgtctcgctggtgcggcgcgtcgcccgcgccctcaaccgccgcttcaccgacatcgtcgcgctgctcttcagccacaagggcgctggatcgctcggcgccgtcgcggggttcgccatcgccgtggtgttcgcgtggaagttcctgcgcccccgcagacgtgctcccaagcggcccccacctacccctgcagcggctcccgctgcgactgtgcctgatgcggccgagcctatcggtgactcaggcaaggtaggcgctatgctggaatagaatgatggttcctggcattgttgattgcagtggccggctcgatctgtgacatcaagtttgtgtttgacaggtagtaacacgggaaattgtggtgaagcgactgaaaggctgcagaaaggttacatgccaacttctcggtgttgtttttgaggagacaattcctgaggagcttcagaaacatgccaccgttagaccctccgtggtagagctgctactggaaatatccagatattgtgatctctacctaatggagactgtaattgacgataagagcgaggaaaatgctctcatggccctggagacctctggacttttcagaactggtggcctgatgaaagagaaggtgctcttttgcagctctgaagttggtcgaacttcatttgttcgacagttggaatcagattttcacatagacacgagccttgacatagtttctcaactatctcggttcattcgatgccaactatttatttccacggtggaaggagaacagcttgcaggcaacgtattcaattctccaagtcttgagcagttcttctcttgatggcgggacgcaaagaaaggccttctgcactccaaacaaatgtgctgatttcacaattgtgacttgtgagttgtaggcttctagcgccccccggcctggacgcaacagacaccctacaactgttggagttcagttgtgatcatgcaagatgtatattaaacagacaataataagttggtaaaaaatattcatatttatttattatttctagtaaaagtacatggaaaatataaatatagaagctactcctggtcgtcttcaactcttcatttccacctagcttaagctgaaaaaagataattgaaacaggtatcagtatgatactttgcaaatacgt

SEQ ID NO: 105968 - DNA, 1326 bp, Zea Mays
aagcacatatgctgtccgtcaccgcgcgcgcctccttgcccttcttcaccctttcctcccggacccggcgtctccgtgcccgtgcgtgccttctccggcctgcggtctcctccaccggccaccgctgcctcgcaattgggcaaggcaatcagaccgcccccatcaaccgccctgaccgcgcgagggagatcaaacgcggaggccgtccatccctcccgcgtcatcgtgatgccaggcctcgccgcagccgagcaggacgccgtctcgctggtgcggcgcgtcgcccgcgccctcaaccgccgcttcaccgacatcgtcgcgctgctcttcagccacaagggcgctggatcgctcggcgccgtcgcggggttcgccatcgccgtggtgttcgcgtggaagttcctgcgcccccgcagacgtgctcccaagcggcccccacctacccctgcagcggctcccgctgcgactgtgcctgatgcggccgagcctatcggtgactcaggcaaggtagtaacacgggaaattgtggtgaagcgactgaaaggctgcagaaaggttacatgccaacttctcggtgttgtttttgaggagacaattcctgaggagcttcagaaacatgccaccgttagaccctccgtggtagagctgctactggaaatatccagatattgtgatctctacctaatggagactgtaattgacgataagagcgaggaaaatgctctcatggccctggagacctctggacttttcagaactggtggcctgatgaaagagaaggtgctcttttgcagctctgaagttggtcgaacttcatttgttcgacagttggaatcagattttcacatagacacgagccttgacatagtttctcaactatctgtatgttatcttgtatcttatttattccttgagcaggggattcttttgatattcatgtgttaacattttttccgtttataaccagcggttcattcgatgccaactatttatttccacggtggaaggagaacagcttgcaggcaacgtattcaattctccaagtcttgagcagttcttctcttgatggcgggacgcaaagaaaggccttctgcactccaaacaaatgtgctgatttcacaattgtgacttgtgagttgtaggcttctagcgccccccggcctggacgcaacagacaccctacaactgttggagttcagttgtgatcatgcaagatgtatattaaacagacaataataagttggtaaaaaatattcatatttatttattatttctagtaaaagtacatggaaaatataaatatagaagctactcctggtcgtcttc

SEQ ID NO: 105969 - DNA, 351 bp, Zea Mays
atgcggcggcggaatggtatggtatcaggcgtgggagtgcggtggggagagcctgcgcgagatgcggaagcaatgggtgctccttctacctgccgccgtcccgatgcctcggctttatcgacggactggggggaggggaggcgcgggcaggaccagacggagggagaggtgggggaggtggcgaaggcggaagcggaaggaagaagagtgcagtctggagtggtaaagcggcggcaggagcaggacagacaggaagccatgaagggagcaggaaggaggcggtttggtttggctcacgaggcgctctcgcccgcgccgcgaagaccagttccatggaccggagccctgtag

SEQ ID NO: 105970 - DNA, 174 bp, Zea Mays
gacaggcagatggttgacaaagccatccaggcaaactctggcgatagtgatgatgaaaaggtatgcatgttgaatcaagtgacaggatgtgtaggctcatattcttgtggcatgcaacttccatctgacctgatatcaaactgccccacaacggttcatccaatgaagggctga

SEQ ID NO: 105971 - DNA, 108 bp, Zea Mays
tctgacgttatagttggtcaacctactcgcccctcctttgatctatttctggatccaccactgcttgtttgtgtagccaaccatgtaaccaccagcgctgtttcctcc

SEQ ID NO: 105972 - DNA, 387 bp, Zea Mays
atgaggccgccggcgacgaaggatgcggtattggccaagccgtcttcgactacggaagcccctgcccccgccaccgagccggtggcgaccaggctcgactggtacatggagctgaggatgcgtaaggctgcacttgtgctctctagggatggcaatagccatggcttggtggtggctggtctcccgcgcgccaagcatgaatcttgggaccgcgaaagtggcagccatcaggagggaggtgaggtgacaggagaggaggaggttgctgagctcaccttcttcaggttctatcaggagaagctactacacgctggtggctccggtcatagccaacgtgccggagagcgtgtgggcatctccttcacatctcctcgccgaggttgctga

SEQ ID NO: 105973 - DNA, 381 bp, Zea Mays
aagcataaaatcatacagtttttagcataaataatacatgtggtaggcataaaacacaataatcgaaaagaaaactgcgtcggatcggaggatgtcacacgcgatcatcgctgcgcgcatctcacgccttccgtgacgtcgctcgctcgaacatcgtgcctcatgcgtcgccgtcgctactcgcacgtcgacgggcgtcgcttgctcgccggccttagaagtgccgcctcctcagggcttcggcgacgccgccgcttgcccgcacaagggctcggctgtcgctcaccctctagatcggggaatcgccgccactactccggatcgaggaacctccaccaccgcgcgtcgaggtaatggagttgcggccaccggcctgggaac

SEQ ID NO: 105974 - DNA, 837 bp, Zea Mays
ccaccccgaggccccgacccatccctctctctgccggaaccttcagatccgcataaaacctcgttccccatttggtttgtgccacgtgacaggatctgtgccgcgatggcgacgtcgaacacggcgcggatggaggacggcggcggcgacctgcggagcaccatcaagaagtggaatatcatctaccctgtctacctcaactccaagaagacggtcgccgagggccgccgcatcgccgctgccaaggcctgcccggaccccacctgcatcgagatcgctgactgctgttcgcacctcaagatcccccacgccatcgagttggataaggcgtaccctcgggatttcttccaggtggggagggtcagggtgcagcttaagaaagatgacggctcccccgtcaatcctgctattaaaacgaagaagcagctgatgatccaagtagcagagctagttcccaagcatcacggaaggacaaagaagcaggagccagcgcccaatcccggtggcagttcaaagaacacaaaaggcgggaaaaagaaaaagtgatgcagtatcattgtgttgttttttattctgttcgtcatcatacactaagcttctgtgaaaaagaaaaagtcttggacgttgttgttatgttgccattatgccatttttcatgtataagaacttactaagaatcttccattgactcggtaaaatgcaacataaaaaaatggcttcgctagattaaagggccctttgacaaaggttcgccttctctggctattttgtaattcgtctgacaaaacaggttcttttccctatgtttcgtaagttagattttcttacgtagtgtgt

SEQ ID NO: 105975 - DNA, 886 bp, Zea Mays
tttttctattgatttgttcgcgtcatattaacgccagggagggccttttctctctcctgtgaacgtcaaacagtgtctcttttccagttccagacctgaagaaactccgaccggccggtgggcggtggcggcagccggcaggatctgtgccgcgatggcgacgtcgaacacggcgcggatggaggacggcggcggcgacctgcggagcaccatcaagaagtggaatatcatctaccctgtctacctcaactccaagaagacggtcgccgagggccgccgcatcgccgctgccaaggcctgcccggaccccacctgcatcgagatcgctgactgctgttcgcacctcaagatcccccacgccatcgagttggataaggcgtaccctcgggatttcttccaggtggggagggtcagggtgcagcttaagaaagatgacggctcccccgtcaatcctgctattaaaacgaagaagcagctgatgatccaagtagcagagctagttcccaagcatcacggaaggacaaagaagcaggagccagcgcccaatcccggtggcagttcaaagaacacaaaaggcgggaaaaagaaaaagtgatgcagtatcattgtgttgttttttattctgttcgtcatcatacactaagcttctgtgaaaaagaaaaagtcttggacgttgttgttatgttgccattatgccatttttcatgtataagaacttactaagaatcttccattgactcggtaaaatgcaacataaaaaaatggcttcgctagattaaagggccctttgacaaaggttcgccttctctggctattttgtaattcgtctgacaaaacaggttcttttccctatgtttcgtaagttagattttcttacgtagtgtgt

SEQ ID NO: 105976 - DNA, 102 bp, Zea Mays
caggagattctaattttctatgtgaaattgcattggcaaggttatggtctaactacaactaaactacagcctacattcagaggccaaacgattaaattacat

SEQ ID NO: 105977 - DNA, 98 bp, Zea Mays
aaactgtaattcagagtacaaacctacacatccagtttgtttggggcatgtgactcagttaactgaaagaagcatctgattaattcatacatagcacc

SEQ ID NO: 105978 - DNA, 532 bp, Zea Mays
gcagcagcaggaggacacgttgtacttactactactacatgcacgcgagcgagacggaccaatgcaatgctacacacacgcttccattccaccacctccaaaagaattcggagtcacacagcctccaacaaacaatgaatcacgcttcaccttatttacatcctggtcggtcggtcggtttgtcggtcgatacctggatcatgttgtcgtcggagcccagatatagccgcccggccgcgacggacgacggatcgcacaacgaacgccggcgcggcggcagatgagccgagccgagctgagctgggagaggtgttgacaacgacggacggtcaaggccgagcgttagttgccggcctgcccggcccgatcaccgggaggcggagtcgccgctgcggtggtcggagacgagggcgtggatggcgctggagaggctgttgacggcggagacgaggcccgcgaagccctggcgccgcacctccgtgcgctcctcctccagccgcagccgccgctcctccagctccaggacctcccg

SEQ ID NO: 105979 - DNA, 1670 bp, Zea Mays
ctcaatcctgtccgatgtgatcccggggtttccattccgcagatgacgagctggcacctggaggaggcgctgcagctgttctacatcgacggcgagtccgccctcaccccggcgcatccggtggccccgccgcccacgtcggcggccgcgtcggcgttggcggcagcggccggggcggaagaggcgatgaggttcgctccacccccggcggctgcactgggcgatgcaatgttgcatggatttggggtcggggaggacgacgacgtccgcgcgcctctgcctgtgaagagggagactctgtacggcgagggcatcgtatccgtcatgcgacctaatgcatcagctgcatttcgtaactttgaacaagaagcaagacaatctgctgtttgggactctgaccagaatgctacatctagttctggtgataatcttgcttctttataccgtccacctttttctttgatgttcaacggaccctttgacaaggcaaagttagaggcttcttccctggacaaatggctattaatcaatttgcagtcgacagcggaatttagctctcacatgcttaatcgagacacttggggaaatgatgcggtggctcagttgattcggtcaaattttattttctggcaggtttattatgacaccagtgaggggaggaaggtatgcacctactaccatttggtgtccatgcctgctattctcctaattgaccccgtcactgggcaaaaaatgcatgcttggaatggaatggttcacccagatcgtttacttgaggatttactaccttacctggataaaggtccgaaggagcaccatgcagctcaacctcaaaagcgcccaaggaaagttgatccggaagcttctacgggcaagcaaggcaaaatagctgtagaggatgaagatgaagagctagcacgggcagtagcagcttctctagaggagagtaaagaagtcattgaagcatcagacgccagtgatgacatggttgaagctgaacccgaggaggaaaatgagcccaccctaaacaccaagcctgattaccctcctctccctgaagaacctacaggaagcagggaccttctctgcagggttgcgattcggctaccgaacaaccggaggatccaaagaaacttccttcacacagatcctatcaagctcttgtggtcattctgcgctcctcaggtcgaggacggggagaggagggctttccacttcgtccaggcaattcctggggcatcccagaaactggagttgggaagcgacctaacattcaaggaagccgggctggccaactcgatgatcaacctcttgttggactgagccgcccgctctctcaacctgcactttgagatgagacgccgtcggccggtcgaggggtttgtatttcaggatgggcttgaagatgatggtgcgcttgggtatcttctttccttgaggattaactcttatcttttgctccactggagctaggagtccgaggacaaaccaaaaaaaaaagtctggtgtgccctgagctgtttgtgtgtggaaatggtccttttgtcgttcgttcttgtgtccgtatacatcctgtccccggtagggcttaactctatttaatgcacatatctatgaaagattcagtctggagcttgctttgatgctcccctctgggctctggtcgtgtc

SEQ ID NO: 105980 - DNA, 1920 bp, Zea Mays
tcgtcttcatcaccccgcacgtctccacttccctttccttacttcccactccttccccacccacccaacccaaccctcccaatcccacactcgtcgtcccagtcccaccgaaccctactcaccaacaacagacccgcaggagaagggggaaagggggggaaattcctgtggagacgacttcgccgccatggcgggcgatcccccgacggccgcggagaaggagaccctggtctcctctttcctcgagatcgccgctggccagacccctgagactgccactcagttcctcctgatgacgagctggcacctggaggaggcgctgcagctgttctacatcgacggcgagtccgccctcaccccggcgcatccggtggccccgccgcccacgtcggcggccgcgtcggcgttggcggcagcggccggggcggaagaggcgatgaggttcgctccacccccggcggctgcactgggcgatgcaatgttgcatggatttggggtcggggaggacgacgacgtccgcgcgcctctgcctgtgaagagggagactctgtacggcgagggcatcgtatccgtcatgcgacctaatgcatcagctgcatttcgtaactttgaacaagaagcaagacaatctgctgtttgggactctgaccagaatgctacatctagttctggtgataatcttgcttctttataccgtccacctttttctttgatgttcaacggaccctttgacaaggcaaagttagaggcttcttccctggacaaatggctattaatcaatttgcagtcgacagcggaatttagctctcacatgcttaatcgagacacttggggaaatgatgcggtggctcagttgattcggtcaaattttattttctggcaggtttattatgacaccagtgaggggaggaaggtatgcacctactaccatttggtgtccatgcctgctattctcctaattgaccccgtcactgggcaaaaaatgcatgcttggaatggaatggttcacccagatcgtttacttgaggatttactaccttacctggataaaggtccgaaggagcaccatgcagctcaacctcaaaagcgcccaaggaaagttgatccggaagcttctacgggcaagcaaggcaaaatagctgtagaggatgaagatgaagagctagcacgggcagtagcagcttctctagaggagagtaaagaagtcattgaagcatcagacgccagtgatgacatggttgaagctgaacccgaggaggaaaatgagcccaccctaaacaccaagcctgattaccctcctctccctgaagaacctacaggaagcagggaccttctctgcagggttgcgattcggctaccgaacaaccggaggatccaaagaaacttccttcacacagatcctatcaagctcttgtggtcattctgcgctcctcaggtcgaggacggggagaggagggctttccacttcgtccaggcaattcctggggcatcccagaaactggagttgggaagcgacctaacattcaaggaagccgggctggccaactcgatgatcaacctcttgttggactgagccgcccgctctctcaacctgcactttgagatgagacgccgtcggccggtcgaggggtttgtatttcaggatgggcttgaagatgatggtgcgcttgggtatcttctttccttgaggattaactcttatcttttgctccactggagctaggagtccgaggacaaaccaaaaaaaaaagtctggtgtgccctgagctgtttgtgtgtggaaatggtccttttgtcgttcgttcttgtgtccgtatacatcctgtccccggtagggcttaactctatttaatgcacatatctatgaaagattcagtctggagcttgctttgatgctcccctctgggctctggtcgtgtc

SEQ ID NO: 105981 - DNA, 1305 bp, Zea Mays
gaagcagtcgtacttgtacactccttgtctccttcgctttggcacactggacacgtccaccacgtgaacacgtcaacagaagtgacccatcaaggggcccacaggtccacgagcccgagtgacgactgacgacagatcgcttgtgcgtcgctaacccgccgctagtcggctagtgggtgggaaatccgcagattcccgtcgctacttcggccacatggctgcagcggcggcgtggaccggcgccgcatcccccaactcgctgctgctctcgcgctcgcctccccacgccgccgcgctcgcgccttcgccgggaagctccatgcggaggcggctcctcctcggcgtcggcaccccggccgtggcggcgctggcggccgcggcgccgccagcggtgctgcaggacggagcggtcactgtgctcatcaccgccggcgcctactctcttgtgcgcgtcttcgacgagctcaccgagcggcggctcatcgaaaagagcttgagcaggaaggttgtgcacgtgctatccggcgtcctgttcatgtcatcttggcccctgttcagcaattcgacagaagcacggtatttcgccgcggttgtcccgttcctgaactccatgaggcttctgatatatggactccgtctctacactgatgaagctctggtaaaatcagtgacacgtgaaggaaaaccagaggaattgctgagaggtccactctattatgtcctggtgctgctgttcagcgttttagtcttctggcgtgagtcccccatcgggatcgtctccttgtcgatgatgagcggtggcgatggttttgctgacattgttgggaggaggtatggctcagcgaagctgccattcaatcggaagaagagctgggccgggagcatctcgatgttcatttctggtttcctgctgtccgcgatgatgatgctctacttctcaagcctgggttacattgatgttatctgggaagaggcacttggtaagctggcgcttgttgcactagcagcgacagtagtggagtgcgttcctgtgaccgaagttgtagatgacaacatatctgttcctttggccaccatgctggtagcttttctcttgtttagctccaaccgcacaatagttaattaaaatactactagtgcattatttaagacatgtgatgagttcttcagtgatgagttgtgcttgcttttgcttcctatgtgatctctagtacttgatggcgacggcctaacatctcccagtttttggtgtctccctccctgccttggctgttttggtggaaaagtattgttcgcttgtctaaa

SEQ ID NO: 105982 - DNA, 1142 bp, Zea Mays
gaagcagtcgtacttgtacactccttgtctccttcgctttggcacactggacacgtccaccacgtgaacacgtcaacagaagtgacccatcaaggggcccacaggtccacgagcccgagtgacgactgacgacagatcgcttgtgcgtcgctaacccgccgctagtcggctagtgggtgggaaatccgcagattcccgtcgctacttcggccacatggctgcagcggcggcgtggaccggcgccgcatcccccaactcgctgctgctctcgcgctcgcctccccacgccgccgcgctcgcgccttcgccgggaagctccatgcggaggcggctcctcctcggcgtcggcaccccggccgtggcggcgctggcggccgcggcgccgccagcggtgctgcaggacggagcggtcactgtgctcatcaccgccggcgcctactctcttgtgcgcgtcttcgacgagctcaccgagcggcggctcatcgaaaagagcttgagcaggaaggttgtgcacgtgctatccggcgtcctgttcatgtcatcttggcccctgttcagggaattgctgagaggtccactctattatgtcctggtgctgctgttcagcgttttagtcttctggcgtgagtcccccatcgggatcgtctccttgtcgatgatgagcggtggcgatggttttgctgacattgttgggaggaggtatggctcagcgaagctgccattcaatcggaagaagagctgggccgggagcatctcgatgttcatttctggtttcctgctgtccgcgatgatgatgctctacttctcaagcctgggttacattgatgttatctgggaagaggcacttggtaagctggcgcttgttgcactagcagcgacagtagtggagtgcgttcctgtgaccgaagttgtagatgacaacatatctgttcctttggccaccatgctggtagcttttctcttgtttagctccaaccgcacaatagttaattaaaatactactagtgcattatttaagacatgtgatgagttcttcagtgatgagttgtgcttgcttttgcttcctatgtgatctctagtacttgatggcgacggcctaacatctcccagtttttggtgtctccctccctgccttggctgtt

SEQ ID NO: 105983 - DNA, 1090 bp, Zea Mays
agcccgagtgacgactgacgacagatcgcttgtgcgtcgctaacccgccgctagtcggctagtgggtgggaaatccgcagattcccgtcgctacttcggccacatggctgcagcggcggcgtggaccggcgccgcatcccccaactcgctgctgctctcgcgctcgcctccccacgccgccgcgctcgcgccttcgccgggaagctccatgcggaggcggctcctcctcggcgtcggcaccccggccgtggcggcgctggcggccgcggcgccgccagcggtgctgcaggacggagcggtcactgtgctcatcaccgccggcgcctactctcttgtgcgcgtcttcgacgagctcaccgagcggcggctcatcgaaaagagcttgagcaggaaggttgtgcacgtgctatccggcgtcctgttcatgtcatcttggcccctgttcagcaattcgacagaagcacggtatttcgccgcggttgtcccgttcctgaactccatgaggcttctgatatatggactccgtctctacactgatgaagctctgggaattgctgagaggtccactctattatgtcctggtgctgctgttcagcgttttagtcttctggcgtgagtcccccatcgggatcgtctccttgtcgatgatgagcggtggcgatggttttgctgacattgttgggaggaggtatggctcagcgaagctgccattcaatcggaagaagagctgggccgggagcatctcgatgttcatttctggtttcctgctgtccgcgatgatgatgctctacttctcaagcctgggttacattgatgttatctgggaagaggcacttggtaagctggcgcttgttgcactagcagcgacagtagtggagtgcgttcctgtgaccgaagttgtagatgacaacatatctgttcctttggccaccatgctggtagcttttctcttgtttagctccaaccgcacaatagttaattaaaatactactagtgcattatttaagacatgtgatgagttcttcagtgatgagttgtgcttgcttttgcttcctatgtgatctctagtacttgatggcgacggcctaac

SEQ ID NO: 105984 - DNA, 1309 bp, Zea Mays
gaagcagtcgtacttgtacactccttgtctccttcgctttggcacactggacacgtccaccacgtgaacacgtcaacagaagtgacccatcaaggggcccacaggtccacgagcccgagtgacgactgacgacagatcgcttgtgcgtcgctaacccgccgctagtcggctagtgggtgggaaatccgcagattcccgtcgctacttcggccacatggctgcagcggcggcgtggaccggcgccgcatcccccaactcgctgctgctctcgcgctcgcctccccacgccgccgcgctcgcgccttcgccgggaagctccatgcggaggcggctcctcctcggcgtcggcaccccggccgtggcggcgctggcggccgcggcgccgccagcggtgctgcaggacggagcggtcactgtgctcatcaccgccggcgcctactctcttgtgcgcgtcttcgacgagctcaccgagcggcggctcatcgaaaagagcttgagcaggaaggttgtgcacgtgctatccggcgtcctgttcatgtcatcttggcccctgttcagcaattcgacagaagcacggtatttcgccgcggttgtcccgttcctgaactccatgaggcttctgatatatggactccgtctctacactgatgaagctctggtaaaatcagtgacacgtgaaggaaaaccagagtaaatccgatgaactgaagatccgtatgatcgtttagcttgctgctctgacgataacgactttgcttctttacagggaattgctgagaggtccactctattatgtcctggtgctgctgttcagcgttttagtcttctggcgtgagtcccccatcgggatcgtctccttgtcgatgatgagcggtggcgatggttttgctgacattgttgggaggaggtatggctcagcgaagctgccattcaatcggaagaagagctgggccgggagcatctcgatgttcatttctggtttcctgctgtccgcgatgatgatgctctacttctcaagcctgggttacattgatgttatctgggaagaggcacttggtaagctggcgcttgttgcactagcagcgacagtagtggagtgcgttcctgtgaccgaagttgtagatgacaacatatctgttcctttggccaccatgctggtagcttttctcttgtttagctccaaccgcacaatagttaattaaaatactactagtgcattatttaagacatgtgatgagttcttcagtgatgagttgtgcttgcttttgcttcctatgtgatctctagtacttgatggcgacggcctaac

SEQ ID NO: 105985 - DNA, 1101 bp, Zea Mays
gacgactgacgacagatcgcttgtgcgtcgctaacccgccgctagtcggctagtgggtgggaaatccgcagattcccgtcgctacttcggccacatggctgcagcggcggcgtggaccggcgccgcatcccccaactcgctgctgctctcgcgctcgcctccccacgccgccgcgctcgcgccttcgccgggaagctccatgcggaggcggctcctcctcggcgtcggcaccccggccgtggcggcgctggcggccgcggcgccgccagcggtgctgcaggacggagcggtcactgtgctcatcaccgccggcgcctactctcttgtgcgcgtcttcgacgagctcaccgagcggcggctcatcgaaaagagcttgagcaggaaggttgtgcacgtgctatccggcgtcctgttcatgtcatcttggcccctgttcaggtattccctgtccctagcatgcatcgaggttctcagattcataacgtttcacactgcaaagccaccaccaaagcatgctctgcccgcagcaattcgacagaagcacggtatttcgccgcggttgtcccgttcctgaactccatgaggcttctgatatatggactccgtctctacactgatgaagctctgcttgctgctctgacgataacgactttgcttctttacagggaattgctgagaggtccactctattatgtcctggtgctgctgttcagcgttttagtcttctggcgtgagtcccccatcgggatcgtctccttgtcgatgatgagcggtggcgatggttttgctgacattgttgggaggaggtatggctcagcgaagctgccattcaatcggaagaagagctgggccgggagcatctcgatgttcatttctggtttcctgctgtccgcgatgatgatgctctacttctcaagcctgggttacattgatgttatctgggaagaggcacttggtaagctggcgcttgttgcactagcagcgacagtagtggagtgcgttcctgtgaccgaagttgtagatgacaacatatctgttcctttggccaccatgctggtagcttttctcttgtttagctccaaccgcacaatagttaattaa

SEQ ID NO: 105986 - DNA, 2219 bp, Zea Mays
actcgtctccctcctcgcttgcgctctgtttcggtgtttcctgtttcggtgtttcctgtctctggtggcgacgactgggcggccgacgctgccaccgccctacgccaggtgaccaggtctttcgtattcgggatcttcgccggcgtcgagcacccggccattggcggaaatttgatgagttagagcttattactggtctgatactcctatacgatgtcactgaaacttccaattccgcaagggctttccttcttaagaagtgttggatggtttgaggaccggaaggttgattcagcagccaaacagcagttatccccaacgttgaaactccagacagataaggagacgtacagacctggtgattcagtcactgtgactatcgaaatctgtagcccagctagtttgaaggatgatgttgggcaggcagtgtcaggcgaggatgccccctcgctgttgttagatgtgctatcatttgaacttaaagggattgagaagctggatactcaatggttctctgttcctaagcccttaccagggtctaaacaaaggcgaggtgaacatatgtttctggattgttcggcaccatcactggtctctaaagtaataattggtgcagggcgaacaaaaacgtacattgcacgtgtggagctcccaaagactttgccgccatcttataggggcatcagtatccgctatttttattatgttaggaccacattatttggaaggccagttatgttgggtaatggagaccaatataaaggtcttgtgaataatgcaattcatctggaagctagagtcccattgcagatacgtgtttcccagaaaagcagcagcctactaaatgaagaagatgttttagggaatctgcctttttcggtggatcaaccgagcatattttggaagggaaaagatgaagattcagaatggagcaaagcaaatgataatgttgatctagaagaaggatatgatagttctaaagatgaagtttcatctgtttcctcatacaatccttcaaaagcacatcctgaattctccctaaggagctcgttgtcaatgcattctctgtcatcacggctctccacgagtgagctattttacaatcaagtggaacgacctaatttcccatcatacaatccaattcctcgattgtcagtgtcagagatttcagatgatcatgacggaggtttagtggcatctcaaaggaaactaaacattttgctaccagaccatacatcgaatgggcaaagggtttctccagattctgatcactcaaaagatgatgctggactcccccttacgccaaaaaatgttgatccagctggatctgaaggctttacgacaggaagatcttataatataagaattgatgaccaagttttgcttcggttttcaccaaagaattctgactcaacctattactttggtgatatgattggtggagcacttaccttctttcacggaactggaaaacggaggtgcctcgaggtatctatagccctggaaacatctgaaacaattaatcctcgcgcattacatccttcaagaaggggctcaccaacaataaccaagctacacagtgaacatcatgaggttgttgcggatcttcaccagacaagctttctgttttccattcccattgatggccctatgtctttttgtacctcaaaggtcactgtacagtggtctcttcgatttgagttcttcacaactccggaaggaacagacccagctaggtacgagcacccactccttgttgataaaagagagaagggtgaatgggtgctcccggtaactgtttacacacctccattgcgcagacgagctactcatgagaggaatggtagatctgtctcacctggaaatatcttcaactcttgaagtgcactgttgccgaagtatagttactttcagctggaaaggatttacagactattctgactggtacaattgcatcaaaaggattttctcgctgtaaattgttataggatttgcaatgcgatgtctatttttttaatagagaacaaatggagtgaaatacttgacttgcaccaaatggatttattggaccatttgtttcatcgatttgtatcccatgagagatgcatcctggccaaaatttggtgttcagtgcattcattatttagcttatagttgaccttgaccaaagtatgagagcttaccacgacgcaaccatttggttctctcgaatagtacac

SEQ ID NO: 105987 - DNA, 2217 bp, Zea Mays
actcgtctccctcctcgcttgcgctctgtttcggtgtttcctgtttcggtgtttcctgtctctggtggcgacgactgggcggccgacgctgccaccgccctacgccaggtgaccaggtctttcgtattcgggatcttcgccggcgtcgagcacccggccataatgcagtggcggaaatttgatgagttagagcttattactggtctgatactcctatacgatgtcactgaaacttccaattccgcaagggctttccttcttaagaagtgttggatggtttgaggaccggaaggttgattcagcagccaaacagcagttatccccaacgttgaaactccagacagataaggagacgtacagacctggtgattcagtcactgtgactatcgaaatctgtagcccagctagtttgaaggatgatgttgggcaggcagtgtcaggcgaggatgccccctcgctgttgttagatgtgctatcatttgaacttaaagggattgagaagctggatactcaatggttctctgttcctaagcccttaccagggtctaaacaaaggcgaggtgaacatatgtttctggattgttcggcaccatcactggtctctaaagtaataattggtgcagggcgaacaaaaacgtacattgcacgtgtggagctcccaaagactttgccgccatcttataggggcatcagtatccgctatttttattatgttaggaccacattatttggaaggccagttatgttgggtaatggagaccaatataaaggtcttgtgaataatgcaattcatctggaagctagagtcccattgcagatacgtgtttcccagaaaagcagcagcctactaaatgaagaagggaatctgcctttttcggtggatcaaccgagcatattttggaagggaaaagatgaagattcagaatggagcaaagcaaatgataatgttgatctagaagaaggatatgatagttctaaagatgaagtttcatctgtttcctcatacaatccttcaaaagcacatcctgaattctccctaaggagctcgttgtcaatgcattctctgtcatcacggctctccacgagtgagctattttacaatcaagtggaacgacctaatttcccatcatacaatccaattcctcgattgtcagtgtcagagatttcagatgatcatgacggaggtttagtggcatctcaaaggaaactaaacattttgctaccagaccatacatcgaatgggcaaagggtttctccagattctgatcactcaaaagatgatgctggactcccccttacgccaaaaaatgttgatccagctggatctgaaggctttacgacaggaagatcttataatataagaattgatgaccaagttttgcttcggttttcaccaaagaattctgactcaacctattactttggtgatatgattggtggagcacttaccttctttcacggaactggaaaacggaggtgcctcgaggtatctatagccctggaaacatctgaaacaattaatcctcgcgcattacatccttcaagaaggggctcaccaacaataaccaagctacacagtgaacatcatgaggttgttgcggatcttcaccagacaagctttctgttttccattcccattgatggccctatgtctttttgtacctcaaaggtcactgtacagtggtctcttcgatttgagttcttcacaactccggaaggaacagacccagctaggtacgagcacccactccttgttgataaaagagagaagggtgaatgggtgctcccggtaactgtttacacacctccattgcgcagacgagctactcatgagaggaatggtagatctgtctcacctggaaatatcttcaactcttgaagtgcactgttgccgaagtatagttactttcagctggaaaggatttacagactattctgactggtacaattgcatcaaaaggattttctcgctgtaaattgttataggatttgcaatgcgatgtctatttttttaatagagaacaaatggagtgaaatacttgacttgcaccaaatggatttattggaccatttgtttcatcgatttgtatcccatgagagatgcatcctggccaaaatttggtgttcagtgcattcattatttagcttatagttgaccttgaccaaagtatgagagcttaccacgacgcaaccatttggttctctcgaatagtacac

SEQ ID NO: 105988 - DNA, 2210 bp, Zea Mays
actcgtctccctcctcgcttgcgctctgtttcggtgtttcctgtttcggtgtttcctgtctctggtggcgacgactgggcggccgacgctgccaccgccctacgccaggtgaccaggtctttcgtattcgggatcttcgccggcgtcgagcacccggccattggcggaaatttgatgagttagagcttattactggtctgatactcctatacgatgtcactgaaacttccaattccgcaagggctttccttcttaagaagtgttggatggtttgaggaccggaaggttgattcagcagccaaacagcagttatccccaacgttgaaactccagacagataaggagacgtacagacctggtgattcagtcactgtgactatcgaaatctgtagcccagctagtttgaaggatgatgttgggcaggcagtgtcaggcgaggatgccccctcgctgttgttagatgtgctatcatttgaacttaaagggattgagaagctggatactcaatggttctctgttcctaagcccttaccagggtctaaacaaaggcgaggtgaacatatgtttctggattgttcggcaccatcactggtctctaaagtaataattggtgcagggcgaacaaaaacgtacattgcacgtgtggagctcccaaagactttgccgccatcttataggggcatcagtatccgctatttttattatgttaggaccacattatttggaaggccagttatgttgggtaatggagaccaatataaaggtcttgtgaataatgcaattcatctggaagctagagtcccattgcagatacgtgtttcccagaaaagcagcagcctactaaatgaagaagggaatctgcctttttcggtggatcaaccgagcatattttggaagggaaaagatgaagattcagaatggagcaaagcaaatgataatgttgatctagaagaaggatatgatagttctaaagatgaagtttcatctgtttcctcatacaatccttcaaaagcacatcctgaattctccctaaggagctcgttgtcaatgcattctctgtcatcacggctctccacgagtgagctattttacaatcaagtggaacgacctaatttcccatcatacaatccaattcctcgattgtcagtgtcagagatttcagatgatcatgacggaggtttagtggcatctcaaaggaaactaaacattttgctaccagaccatacatcgaatgggcaaagggtttctccagattctgatcactcaaaagatgatgctggactcccccttacgccaaaaaatgttgatccagctggatctgaaggctttacgacaggaagatcttataatataagaattgatgaccaagttttgcttcggttttcaccaaagaattctgactcaacctattactttggtgatatgattggtggagcacttaccttctttcacggaactggaaaacggaggtgcctcgaggtatctatagccctggaaacatctgaaacaattaatcctcgcgcattacatccttcaagaaggggctcaccaacaataaccaagctacacagtgaacatcatgaggttgttgcggatcttcaccagacaagctttctgttttccattcccattgatggccctatgtctttttgtacctcaaaggtcactgtacagtggtctcttcgatttgagttcttcacaactccggaaggaacagacccagctaggtacgagcacccactccttgttgataaaagagagaagggtgaatgggtgctcccggtaactgtttacacacctccattgcgcagacgagctactcatgagaggaatggtagatctgtctcacctggaaatatcttcaactcttgaagtgcactgttgccgaagtatagttactttcagctggaaaggatttacagactattctgactggtacaattgcatcaaaaggattttctcgctgtaaattgttataggatttgcaatgcgatgtctatttttttaatagagaacaaatggagtgaaatacttgacttgcaccaaatggatttattggaccatttgtttcatcgatttgtatcccatgagagatgcatcctggccaaaatttggtgttcagtgcattcattatttagcttatagttgaccttgaccaaagtatgagagcttaccacgacgcaaccatttggttctctcgaatagtacac

SEQ ID NO: 105989 - DNA, 1240 bp, Zea Mays
cacaggcacagatctcatctggtgtgtagtagactcgtcgtctcagctcgcgcgtgctcaccactgacctaccccgcttcaaaacagccaaactggaaaaaaagattctccgtccacgcctcgtcccaaccctagccccgtcgatctcgcatggccaccggcccgcgatctctccacgccctcctcggcggcggcgcagtcgccgacttgctgctgtgtaggcggaggaacgcctcggcggcggccgtggtgggcgccaccgcggtctggttcgtcttcgagcgcgcgggctacagcttcccttccgtcctgtccaacgccctgctcctcctcgtcgccatcctcttcttctgggccaagtccgctttgctgcttaacaggcctcttccacctcttcctaaccttgaggtttcagatgcagttgttgaaaaggctgcagattatgctcttgtatggatcaataggctgctggctgtcggtcatgacatcgccatcaagagaaataggaaagtttttataaaggtgatattgattttgtggctggtttcatttgttggaatgctcttcaactttcttacactcatttacattggtgtaatgctttctctgttggttccaccactctatgagaagtatcaggatcaggttgatgaaaaggttggcgtagcgcacagtataatatcgaggcacataaataccattgttatcagggctgggcaatcagccaaggagaagaagactgaataaaagaattgttttgatgtattgtggaacatctctggttgtcaagtggagttatgatagtgggcttttcatctttggactctccatatggccctccacttacattagttctcgatatgctgatctgaggttttgatgtgcgctgttgatttcaggaaatgagacggcttgtgtatttttttctttttgaacatgaggtttactatgggcgcatatcttactcgaaatgatattttgagaaattgcaactcgtgcatacaagtgtgtgggctgcttgcgctgttagccatatgatctctctgtcactgattttaattttaggctgctctgacgaactctgtggagctcattcgatgcccatctgctggtagctcgttttctgaaatactaataagatgtattttgcaaagacagctgtaccgtgtgaatgaatgggttattttgtcgacgattctgtaaggtgtagagaagtctttatcagtggacttttaccgtc

SEQ ID NO: 105990 - DNA, 506 bp, Zea Mays
cgcgaaaggaagcgccgcgccggagcttccctctcgcgcttgcccatgggccattgcccttcgctactcctgttgggagcagagcaaaggcgagagaaaagaaaaggaggagctcgcgctaccatgcctgcaaagccaaagcgtgtagtgcttggcttggctttcagtctccagtgtacactcgcttgccgtttccgacgcccaaggacgtgtactccacgaagttgcttcctttccgcggatagccaaaacacattgcaaagctggtcactcacttcactgcggtcgcttggacagtgggcactggcgctggcgtcgcagcaggtcgaggtgcagggcaggagcagcacggaattgatgggcacacatccaatgctcggtacgaccacgccacggctgctgccccccccctcctgctcgtgagtaccaaggcaatagaaggcgacgcacgaacaggagggattggctgccttctgcggctctgcagcctgcgggagggagtgggg

SEQ ID NO: 105991 - DNA, 4197 bp, Zea Mays
cggtggtggcattcctcgaggcccgagttggccagctctccccgtcgtcgtccgtccctctcctcgtctccgcctccccggactccggcagggagggaggtgaacgggccggggagagagatggggccggactcgtcgcccaagaagttgagcctcaaggagcagcgcgctgcctacctccagtggttcgccctcgccgacgaagacggagatggccgtctgacggggaacgatgcgctcaggttcttcgccatgtccaacctctccaagcccgagctgaagcaggtttgggcgatcgctgattccaaacgccaaggatatcttggattctacgagttcatgactgccatgcagctggtttctctcgcacaagcagggaacgaaatcaatcaagacacccttccaaatgcagatctcgagaagttgcagctccccacaatggatggtctggctaaaaaactaaactctgggagcaaggtcgagtctgctattgttgcatgtcatccatcagaagcacctactatgactgccagctggtttaactccaagtcaggaaagaagattcctttgaaatcagtcacttcaatcgtcgatgggctaaagaaatcgtacattgagaagttgaggcccttggaaaaaacctatcagttccatgacttcgtgtctcccttgctgactagcagcgatttcgatgcgaagccaatggtcatgctgttgggtcaatactccacggggaaaacaacattcataaagcatttactaaaaacaagttatccaggcgctcatattgggccagagcctacaacggacaggtttgttgtcatcacttctggaccagacgaaagatgcattcctggaaacaccatcgccgtccaagctgacatgccatacagtggcctgtcatcgttcggaacagcatttttgtccaagttcgaatgttctcagatgccacatccactgttagagcacgtgaccttcgtggacactccaggagttttatcaggggagaagcagcggacgcagcgcagctacgatttcaccggagtcacgtcgtggtttgcggccaagtgcgacctcatccttctcctgtttgatccgcataagcttgacatcagcgatgagttcaagcgtgtgatcgggtctctccgcgggcatgatgacaagatacgcatagttctcaacaaggccgaccaagttgatgcacagcagctgatgagagtgtacggagcactgctgtggtcgctcgggaaagtcctgaacacaccagaagtcatgcgtgtctacatagggtagcaccatggctgcatcagcgtcactgaaaaacaaacaaaaaactgaaataatcgcctcgatcttctttctagttcattcaacgacaagccgatcagggagacagcggctgggccgctgggcatggagctgttccagaaggaacaagatgacttgctctcggacctgaacgacatccccaagaaggcctgcgaccgtcggatcaacgagttcgtgaagcgggcaagggcggctaaagtccacgcgcacataatcagccatctgaagaaagagatgcctgcactgatgggcaaggccaaggctcagcagaagctgctcgacgggctggatcaacagttcgccaaggtccagaaggagctgcacctgccgccaggggacttcccgagcgtggaggagtacagggagctcctgagcgcctacaacttcgacaggttcgagaagctgaggcccaagatggtccagggcgtggacgacatgctggcctacgacatcccggacctcctgaagaagttcaggaacccctacgactgaagccggaaacccactctcttgcctcctcggggaggggtggcagagcttcagcgacggacgaggaggacgtgccggtgcagcagcggttcatctggtcagggaagagaaagatgcggcgccttttcacgactccatctctcttctggattactcagtgctgcagcgtaaactcgcgcgcagttccctgtaaaagctggagcttttctgagcgtgtaggtgcgttggtggaacttgggcccccacccaagatctcacctatctgcactgggctggccggctgtgcccgtcgccaaccaccgtgcttccgccattgcgtcgccgcataaccttggccaagcgtgaacttcatataataccaacttcatataatccgccattactggcaaggcgcatgtcccatgtcgtccgtagaactcgggctgatgacgggtgccactcaacagtcaacacacgggctagggctaattgtatatagaatttcatatactgccagcttcagctttcacagcaaacggaggttttattataaaaaaaaacatcgtgttccaaaccgccggtggtcttccttcctattcaacggctaaaaagtctattggtgtactttgaaaagctgcaggaggaggagagtaaaaaaaaaaaaaaggtggtgcggtgaccgtaggtctggacatgcgtagcgtagccaccggtgccgtgcacgcggtacagcagcagcagcacggacgtgcaccgctgtgtgtcgcttccggacccgtctacgttttacgtggtcataccaaagactccagtcgccaccacagaaatccaaggcgccagccagcacaaggccaaaggccaaaaccaagccggcgggcccgctttccgtcccgtcagattccctcccccgtccgtccgtccgtctctgccccatccctcacccctcctccctactccctaggcagcaaagcagcgagaaagcagctcgcagttcccacccaccaaaccaaactctcctccacaacctcccccgccgcccctcctcttctcggcttctcccctgccttgttcggccccaaaacggcaagagccgacgccagcaaaccctcgggttcgggagggaaggaaggaaggcacgagcagcgcgcctgcctacccgcagctaaccccaaacagcaacgtcgtagccgacgagagcctccgccacctacccaccaactcccgcccgtcgcctccgcttgggttctcgtcgagcagttggtgggcacctaccgcatccagagagagagtgagccactgagccagggcggcaagggggagatgaagaagctgtaccagggcggcaaggggcggcgggtgcacccggcgccggctgacgcatcggcagccgtggcgctgccggccgccgtgctggccctggcgtccgcgctgacggccgaggagcaggaggtgctggcctacctcctgtcctgcggcggcggcggcggccggcaccaccacggccgccgccgcggggcccacccgccggagatgggctgcgcctgcttcggctgctacaagagcttctgggcgcgctgggacgcgtcgcccaaccgccacctcatccaccgcatcatcgacgccgtcgaggaggagggcggggcggggggcccgcgccgccctccccggcgccggcgccgcggtggtggcggtggtggtggccgccgcggcggcggcgacgctgccgacgaggacgccgcggagacgggccccggcgtggaccacgacaacctcccggcgtgcgacggcggctccgggatggacatggaccaccgctgccacggagagtacgacggcgacggcgacggcgacgaggaggaggaggagaccagcagcgtggacggcgacgacgcgtcggtggacagcgagggcggtggcagcgccgagaagagcacggtggggaggctggtgcgcttcatcggggagaaggtttggggcgcctggaactgatcgggctgtggcccaccgccgccgctcgccggttcttgtagattaggggaaggggaccaccagcaaggactgcgtggtctcgtcaaggtcagtactcatcagtgccagtagtggctgttttgatcagggagcgcctcctgctccacgccctttttcctcttattgcttttgtttaatcatggcggatttgttgcactctgatgatgagtgatgacgagcatgccaggattggaggagggtggattatcccatccaatttctcacctctcttctccccctcccctcagcccccctgtaccatatttttgctcctttcgttcggtagtccagttcaacaatgaacttgcaagagaactctcgtcaacattcaatgtgccctgattcatatgcgttgaatgtcgtcagcatttg

SEQ ID NO: 105992 - DNA, 2136 bp, Zea Mays
cggtggtggcattcctcgaggcccgagttggccagctctccccgtcgtcgtccgtccctctcctcgtctccgcctccccggactccggcagggagggaggtgaacgggccggggagagagatggggccggactcgtcgcccaagaagttgagcctcaaggagcagcgcgctgcctacctccagtggttcgccctcgccgacgaagacggagatggccgtctgacggggaacgatgcgctcaggttcttcgccatgtccaacctctccaagcccgagctgaagcaggtttgggcgatcgctgattccaaacgccaaggatatcttggattctacgagttcatgactgccatgcagctggtttctctcgcacaagcagggaacgaaatcaatcaagacacccttccaaatgcagatctcgagaagttgcagctccccacaatggatggtctggctaaaaaactaaaaaagaactctgggagcaaggtcgagtctgctattgttgcatgtcatccatcagaagcacctactatgactgccagctggtttaactccaagtcaggaaagaagattcctttgaaatcagtcacttcaatcgtcgatgggctaaagaaatcgtacattgagaagttgaggcccttggaaaaaacctatcagttccatgacttcgtgtctcccttgctgactagcagcgatttcgatgcgaagccaatggtcatgctgttgggtcaatactccacggggaaaacaacattcataaagcatttactaaaaacaagttatccaggcgctcatattgggccagagcctacaacggacaggtttgttgtcatcacttctggaccagacgaaagatgcattcctggaaacaccatcgccgtccaagctgacatgccatacagtggcctgtcatcgttcggaacagcatttttgtccaagttcgaatgttctcagatgccacatccactgttagagcacgtgaccttcgtggacactccaggagttttatcaggggagaagcagcggacgcagcgcagctacgatttcaccggagtcacgtcgtggtttgcggccaagtgcgacctcatccttctcctgtttgatccgcataagcttgacatcagcgatgagttcaagcgtgtgatcgggtctctccgcgggcatgatgacaagatacgcatagttctcaacaaggccgaccaagttgatgcacagcagctgatgagagtgtacggagcactgctgtggtcgctcgggaaagtcctgaacacaccagaagtcatgcgtgtctacataggttcattcaacgacaagccgatcagggagacagcggctgggccgctgggcatggagctgttccagaaggaacaagatgacttgctctcggacctgaacgacatccccaagaaggcctgcgaccgtcggatcaacgagttcgtgaagcgggcaagggcggctaaagtccacgcgcacataatcagccatctgaagaaagagatgcctgcactgatgggcaaggccaaggctcagcagaagctgctcgacgggctggatcaacagttcgccaaggtccagaaggagctgcacctgccgccaggggacttcccgagcgtggaggagtacagggagctcctgagcgcctacaacttcgacaggttcgagaagctgaggcccaagatggtccagggcgtggacgacatgctggcctacgacatcccggacctcctgaagaagttcaggaacccctacgactgaagccggaaacccactctcttgcctcctcggggaggggtggcagagcttcagcgacggacgaggaggacgtgccggtgcagcagcggttcatctggtcagggaagagaaagatgcggcgccttttcacgactccatctctcttctggattactcagtgctgcagcgtaaactcgcgcgcagttccctgtaaaagctggagcttttctgagcgtgtaggtgcgttggtggaacttgggcccccacccaagatctcacctatctgcactgggctggccggctgtgcccgtcgccaaccaccgtgcttccgccattgcgtcgccgcataaccttggccaagcgtgaacttcatataataccaacttcatataatccgccattactggc

SEQ ID NO: 105993 - DNA, 2130 bp, Zea Mays
cggtggtggcattcctcgaggcccgagttggccagctctccccgtcgtcgtccgtccctctcctcgtctccgcctccccggactccggcagggagggaggtgaacgggccggggagagagatggggccggactcgtcgcccaagaagttgagcctcaaggagcagcgcgctgcctacctccagtggttcgccctcgccgacgaagacggagatggccgtctgacggggaacgatgcgctcaggttcttcgccatgtccaacctctccaagcccgagctgaagcaggtttgggcgatcgctgattccaaacgccaaggatatcttggattctacgagttcatgactgccatgcagctggtttctctcgcacaagcagggaacgaaatcaatcaagacacccttccaaatgcagatctcgagaagttgcagctccccacaatggatggtctggctaaaaaactaaactctgggagcaaggtcgagtctgctattgttgcatgtcatccatcagaagcacctactatgactgccagctggtttaactccaagtcaggaaagaagattcctttgaaatcagtcacttcaatcgtcgatgggctaaagaaatcgtacattgagaagttgaggcccttggaaaaaacctatcagttccatgacttcgtgtctcccttgctgactagcagcgatttcgatgcgaagccaatggtcatgctgttgggtcaatactccacggggaaaacaacattcataaagcatttactaaaaacaagttatccaggcgctcatattgggccagagcctacaacggacaggtttgttgtcatcacttctggaccagacgaaagatgcattcctggaaacaccatcgccgtccaagctgacatgccatacagtggcctgtcatcgttcggaacagcatttttgtccaagttcgaatgttctcagatgccacatccactgttagagcacgtgaccttcgtggacactccaggagttttatcaggggagaagcagcggacgcagcgcagctacgatttcaccggagtcacgtcgtggtttgcggccaagtgcgacctcatccttctcctgtttgatccgcataagcttgacatcagcgatgagttcaagcgtgtgatcgggtctctccgcgggcatgatgacaagatacgcatagttctcaacaaggccgaccaagttgatgcacagcagctgatgagagtgtacggagcactgctgtggtcgctcgggaaagtcctgaacacaccagaagtcatgcgtgtctacataggttcattcaacgacaagccgatcagggagacagcggctgggccgctgggcatggagctgttccagaaggaacaagatgacttgctctcggacctgaacgacatccccaagaaggcctgcgaccgtcggatcaacgagttcgtgaagcgggcaagggcggctaaagtccacgcgcacataatcagccatctgaagaaagagatgcctgcactgatgggcaaggccaaggctcagcagaagctgctcgacgggctggatcaacagttcgccaaggtccagaaggagctgcacctgccgccaggggacttcccgagcgtggaggagtacagggagctcctgagcgcctacaacttcgacaggttcgagaagctgaggcccaagatggtccagggcgtggacgacatgctggcctacgacatcccggacctcctgaagaagttcaggaacccctacgactgaagccggaaacccactctcttgcctcctcggggaggggtggcagagcttcagcgacggacgaggaggacgtgccggtgcagcagcggttcatctggtcagggaagagaaagatgcggcgccttttcacgactccatctctcttctggattactcagtgctgcagcgtaaactcgcgcgcagttccctgtaaaagctggagcttttctgagcgtgtaggtgcgttggtggaacttgggcccccacccaagatctcacctatctgcactgggctggccggctgtgcccgtcgccaaccaccgtgcttccgccattgcgtcgccgcataaccttggccaagcgtgaacttcatataataccaacttcatataatccgccattactggc

SEQ ID NO: 105994 - DNA, 612 bp, Zea Mays
atggcgagctcgctggcccgcctgggagcggcgctgccacgcgccgcggcccgcgccctgccaccggggcggtgggccgccgcggtgctcggcatcggcgcctcccgccgcgccgaacggtgccaagttcattccgacattaaagtagcccctacatcagacgtgaaggacgatagcaaatctgaaactaggaggatcaagatgctctatgacggtgattgccctctctgtatgcgtgaggtaaacatgctgagggaaagaaacaaatcatatggggcaataaagtttgttgacataagctctaaagattactctccagatgacaatcaaggccttgattatgaaactgtcatggggaagatacatgccattctttcagatggaactgttatcacagatgttgagagtatgagtgtgatgccaaggcaaataaaagaccaagtcagaattttgattctttttagtctaagcatcaggcatttagaaaattgtagctacgatggcaaatgcaatatatggcgtgtgggcgaaataccgaatgcaaattacaggtcgacctccgctagaaaagctgcaggcgaatgtaaagatgacaaagtatgcaagatgtga

SEQ ID NO: 105995 - DNA, 756 bp, Zea Mays
atggctgatggagctttatggcttctagctgttatgtttcaggccgggcacttgaagatgctcgatggctacattgatttcttcatggaccccagcctgtctgaatgctacctgcaacttaaagaagaactcgataaacttatacagcagaagcttgaagacccaaacttcgacatccacaaggaaggcaagtacatcctattcgccgtacaagagctcgccgccggcgacctgtgcgaagggaggttcgtgttcggccgcgagacgagccgggccaggctccggagccccgaggacgacggcaagagcaacctcataaaggacgggatgaaccccaagagcctgctgcatacgctgctgatgcgggccggccacaccccgcccaggtacaagacgaagcacctcaagacgaacgagttcagggccgtggtggagttcaaggggatgcagttcgtggggaagccgaagcggaacaagcagctcgcggagcgggacgccgccatcgaggcgctggggtggctgacgcagacctccggcgtgaatgccatcgaggcgctggagcgggacgccacggatcagggcatactcctctgcgaggagggcgtggatttcgtggagcgctcagctaggctagggcacgcgcggatcgcggagagggggaggcggggccatcctgtgcactggatctgggcgtggatgttggcgtggatctggtgcgcggaggtagtagctgggcgagggatttcgcagaggtag

SEQ ID NO: 105996 - DNA, 2081 bp, Zea Mays
gcagaggccagtgccactgctggcaggcgctgaggcgcccgagggccctcaagtggcgcgcgagccgcacgccaacgcccgcgacgcgacgaattatctttatcccctttccctctgccgtcctcgttcccggccgtccgtgccgaaggaagtatctgctgagtgctgacccagcccatgcccatccacctcgctccctcgaccgacccacccagcccagcgcgcgctcgcatggcgatgctgctccgcaaggtgtggggctccgtgctggcgcgcgccgcagcgccgggggccgacccgcgagcccgccgcgcgcaggcgcatcgcgcggagcagtaccagtaccacggctcgctatcgctgggcgcgctcgacgccgtccccaccgacgtgctcgcccagatcctgcgcctgctgggcccgctcgacgccgcgcgctccagcgccgtctgccgcgcctggcgcgtcctcgcctccgacaacggcctctgggctttcttcctccgcctcggccccgagccctaggacctcgtcgtcttcgccgagacgcacctcgccgccggccccgcctcgcacccgtggctgtactacgatagctcgccgcagctctcgttcaaacagatttacggcctccgagcgctggtcccgggtactctcatcgtggatggtggatctggttattgcaagtatggctggagcaagtatgctgctccttccgggcgttgtgctacattcttggaattcggtaacattgaagcacctatgtatgcaaggcttcgtcacttcttctctacaatatatacgaggatgcaaataaagccttcgactcagccagttattgttgtccttccactgtgtcactctgatgataccgagtctgctagggcctcaagaaaacaatacaaggagacgctgtactctgtcttgtttgacatgaatgttcctgctgtttgtgctgtcgatcaggcagttctatctttgtatgcttctaaacggacctctggtattgttgtgcacattggattcaatacgacttctgttgttcccatctttcaaggtagggtaatgtatgagataggtgttgaaactgtggggcaaggtgcccttaaactcactggatttctcaaggagttgatgcagcggagaaatatatcctgtgagtcactgtacactgttcgaaccatcaaggagaaactttgctacgtagctgctgattatgaagctgaattgcgtaaagatacacaagcgtcctgcgagatcgatggtgaagggtgtttcactctgtcggaagagagattcaagactccagaaatcctatttcagccccatatgggaggaatgcgtgctatgggcttgcataaagcagtatctctatgtatggatcactgctatgtttcaggaacggttggtgatgacagctggtacaagacggtcattttagctggtggttcgtcgtgcttgcctggtttaccagagaggctggagaaagagcttcaccaacttcttccaccttatatgtcagaaggaataagagtactccccccttcatttggcactgattctgcctggtttggtgcaaagatgatcagcaacgtgagtactttcactgaggcatggtgtgcaaagaagaaacaattccgtcagaagacaggccggagtggtacattgtttgccaattcctggtaatgaaaatctcagacacaagtcacgagcaagaaacttaaagagttccccgcatcaaaaatacggacataacatccggtccatgctccactgagcctccaccagtatatagaagcatgagcattcatgcccagtatatattcacgtccatatcatgcatatatggattatgagccagtgcatcatttggtggtgttgttataggatgttttggtaagttcgttgtggttataggttgttggcaaaagcgcagttgtctcgttttaattttaagtggaacgattaattagttattgagcatgagtctttgtttatagctatatatgtctcatgaaatttggtacagttctaaatgttgtaaaacgcaataaatcattttataaatgagatatgtcttt

SEQ ID NO: 105997 - DNA, 1247 bp, Zea Mays
ggaagcggaccaggaccggcaaattcactcaagcgggctgatgctgatctcctttagcggctgcgtttgcacttccacttccacacggcacaaccttgtcttcgtcgcggcttccttggctcggcacccagacctcagtgcggtgcggggccctgccgagtgccgcacgcgcacgcgcacgcacgccccgccgggcctataaatccttgtcgccttcgcccttactcgccgccccatccccatccccatccccatccaagaaatactacgcccatcggatccaccgccgaggcaggcagaggagcacacaccccaggagctgaggaccggtttcgccatggccgccaagaagctggtgctcaagctggacctgcacgacgacaaggacaagcagaaggtgctcaaggcggtctccaccctccacggtatcgactccatctccgtggacatgaagggctcgaatctgacggtggtcggcctggcggaccccgtcgacgtcgtggccaggctgcgcaaggtcgccgccgccgaaatcgtctccgtcgggccagccaaggaggacaagaaggagggcgacaagaaggagggggacaagaagaagaaggacgacgagaagaagcagcaggtcctgtggtacccgcacccgtggcacgccgccgccgcagcgcagcagtaccacccccacccgtacccgccccagtacgccgtccacagcgccgaggaggaccccaactcctgcgccatctgctgatccgaatacccggtcccgtcttctttttgtacatctagctcgcctgcctacctacctacctacctacctacctacctcaggctcgatccaccacgtcgtcggtgatcgccgggataggggccagaccgccagagcggctgtgttggttgcctgctgctctgctcatctctatcctgcgggcgtgggcggtgggccgtggggttggtcgttggcccgtccacaggtcgttatacgatggctcgtgcaaaatcatacacgcgaccccccaaccataaccatccaagagtagctagctgttggggtttttcacttttcaggctgttgctcatcagtgtcgttgtatagtgtgcagtgcatataatatatgtggtttgtgtccttgctatttaggtgtttgtggcacgaaactatatatatagagaaattttctctcgtttataaatgttaccttgttatgtaaatcatacgctttcacttctatttatttcaagtgcat

SEQ ID NO: 105998 - DNA, 1773 bp, Zea Mays
ctattttattaatataatcggcagccctgcctggttcgtttcaaaaaacaaactccaccccgtcggatctgctcttgtcggcgaggtagcgcactgtcggccatgggtggtgacatgccatcacaccgtcgacccgatcgccgcacgccatcagcgtgggaggcctccttcttggaggatcgacagctctccctcgccacgctcgagtttgggctaccgttcgagctcgcttcatcccaggagttcctcgcctacggggcagatgggaagcccatgtcagctgtttactcttccaaggagtttggtcttctgccgataccggagggtccccgctacggtagcatcgagtcctacattcttccccacctcccgctcggagatgcggctgctctccgcgacgcgggcgcgggcggcgcgaggttccgcatcgcgaaccttccccgtcttgaggcaaagctggcggctcgcaacaagcttctgggggtgacacgcgagatggtgcagttccacggctcgctgcagcaactcctgccgcagctcgtccaccaccgagccaaggtcgctggtcttctcaatgcggatgcggacacagaacttggcaagccagctgcccgcctcgagcacttccagaccgaggagatgcaggacatgatgtcgaggtgggagcaggacctgcagcgggctcgtgctgctgccacagctgcaaggcggagactgattctggcggttcaccacgccaccatcctcttcgtttcagataatgttcatgcaggcgaagatgttcacgacacattgcttatgcttgcgccagagttgcatgagaggctatttggtgacccttgccacgccgatccctgctcagagcccctcgtgcaagatggccaatggaaggttcgagagaaacgtacagatgttgccattcagcaattcatgaggtctgtgggcatggagatgaaacctgaagagtttgtggtgttctcactggcccggagtcggcgtgatattgttgagagtgagggggaaatcaccaggcaggagctcagactctccgtgatgcgccccatccaggatgtgatagtcgctgtgggctcactgcaggatgtccgtaacactttgaaggatcattttacatacccaaccctccttggaaatcaggttgatcctgaacaggagaaattacctatggactttcctttctacccgacatatgctactttgtccacccaggaacttaagcatgctgttaggcggcaccacactcagtccttttgagtatagagtgcactgagaagaggcagagaacaagtgttggtataatatctccttatactgctcaagtgattgcattgagaagcatgactttctatctgttaagagtaaaatctattgatggatttcatggtggtgaggaggacattattttgatttcaacagtttggtccaataaagatgggaaagtaggctctctgattctgagagaatcaacgtggctttcacaagagccaagtatcttgccctagactccctagtatagtgaagtcacatttaaaacactcttccactgcatttttagttcagtaattgctatatttctgccataatagttcagtagtgcctttggattcttggaaatggaaccactttactggctagcaattcaatatgggctgatttagtctgtgtcgttagcactatcttcttgaatatgacaagtggaagtgtgtttttcttcttctaaaagatagaatgcagatgcattttagccatgaatca

SEQ ID NO: 105999 - DNA, 829 bp, Zea Mays
ggaaatggcctctcctttaccagagtcgaaatattccgtgctgccatctttggaatggacatgcatatataacttgtttattctccgtgcttactcaaatagcacaaaatgacaaaaccgtacattcttagtctagatattgaattattgatcaccatgttttcattgcttactgccaaggtcgtcaactcgtcatattttgcattcttttattttttttataaggtgttaaaacatcattctgaaagaaatattttattggctagattaactgttctccagagtttttgataaagctaactggtgtccttttcttttgtctaaaacaattgtagagtgcactgagaagaggcagagaacaagtgttggtataatatctccttatactgctcaagtgattgcattgagaagcatgactttctatctgttaagagtaaaatctattgatggatttcatggtggtgaggaggacattattttgatttcaacagtttggtccaataaagatgggaaagtaggctctctgattctgagagaatcaacgtggctttcacaagagccaagtatcttgccctagactccctagtatagtgaagtcacatttaaaacactcttccactgcatttttagttcagtaattgctatatttctgccataatagttcagtagtgcctttggattcttggaaatggaaccactttactggctagcaattcaatatgggctgatttagtctgtgtcgttagcactatcttcttgaatatgacaagtggaagtgtgtttttcttcttctaaaagatagaatgcagatgcattttagccatgaatc

SEQ ID NO: 106000 - DNA, 279 bp, Zea Mays
atgaccctcttttcacatgggagcatgttgatcatgccatcggtgcatctacacaaccttaaggccacctttactaggagagctcatggtactcaagcgccaaatcttgaggatgatgaagatggtcttgatgtgggcgatgagaatgaagacgatgacaattttgtgcttgacgaccttgacatggatgatgaagaagaaacaaacaacagtggtggttgtggtgatgagcaagacaaggatgatgttggtttagatgatttggatgatggttattga

SEQ ID NO: 106001 - DNA, 1561 bp, Zea Mays
cgggactaccagagcggagacgccggaagggccaagacgacgcctataaaaagggcggggcggaggcgcggagcgggagcctgacccatatccaatccatccctccgggcgcggagaggaggaggaagcagagcagcgggcgcggcggacatgacgccgatgcggctggtcgtccgagcctgcaccgcaccccccatccgcgtactggttaattacctgtatgatggagggtgcagtggccagtactggacccagtcttccagagggttcgcgtagtgcttcaggaacgacctggccctgctgatcccgtcccttgagctcgtgtcatacctgacaggccttccgatgtcggtcgatgcaaacagctccttgtgctctggcgagagctggaagaactccgaggcggcctcgaatgcgcctgccatgacggagttgctgacgccgtggttcaccacctgtcaatcggcaccacaaggatatggtagcgtattgatcagcattggcactgaagcatcacaccagaatccgaggtttgcacaacatggagtttgttgacttgatcactggtgagttgccgcttaaagttccatggtaagtaagctggtcagcttgggtcacagcgtgagctgcatgggtgactgacacttgttttaaagggcacacaggacacgtgtgtctttgtttttttttcccctagagaatactcatggctggctgaggctggctggctgactgagttcactgtgactgtcagcgaacaagtgttgggaggacacggacagagcaacagacaagcagcacgcactgacctggaagcagccctgctcgcggcacgctctggtaatgtcctggatggcgagcgcccgcgtggccgggtccttcccgagcctgccaaggttgatgaccggcagctgccgcggcgagggcgaggacgaggacggcgccgtccgctgcacctggcccgccatggatgctggtaagaagcagaccggcatgcctcgtcgtgaacctccaagccagcaaagcagttccctagtcagtgtagctctggagatggagaagctcggtgcagtggtgtgcatgccaccaggcgacggacgtacctatttataggctctgctttgctgaatgtgcagcgaaaaggcagcagccgatggggactgccagtgcccactggccacagtggagtggacaccccctcccccccttttttttcttcttgtctctgcaagctgaccctgggcaaataccttgtacgtagacttttaggtgccaccaccacgacgacgacgacgaggatgatgcaaaagcgctgggaagggaagatttcggtccaggagcaggccgcggggcccccgtccgtgcgggcgcgggcgcgcgcgtgcgtccaggtgaacaagatctttcccccaggaggcagatcgccccggttcctttcgcttggcagtggtcaccagctgtggagtgggcatatttttctgttattctcgcgccaagttgcgcttgcgccgtgcgtgtctctgcgtgtgtggctgacggctgaacgcgcccgcatctgggc

SEQ ID NO: 106002 - DNA, 1552 bp, Zea Mays
gcctgggatgggggatatggagaactgaagaaaagcggctgagccacagaatgaatatgatacagttacttgcacatcaccagggtcatcttctggacaggcatactgacaaatgcgtgcatggacggatgcccgtcgaccgcctttaatttggtggagcaaagcgcaggtccaggtgaagaccatcagctgccctgcctgactcctgcctccagcatgtccgacctgtcaaggactgttcctcaggagcagctcgtgtcccaggacctgctgcacctctcgccaacgcccgtgatcaaccttggccacctcagccttgatgattccgtgacgcgatctggcgtgatcaaccaaatcgccagagcatgccatgatctagggtacttccaggttacaaaccatgggatcagtcaatccgtcatggattgtgctgttgaagcagcttcagatttcttccaactaccaagtgaggcaaaggaacagttcgcatcacaggacctccgcaaacctgttagatatgacaccagctctaaagatagcattagcatgtcacgggcattcctaaagcattatgcccatccgcccagagactggattcagtattggccagacaaaccaccaatctacagggaatacatgggaaagtatgctgttgaagtaaggagggtggctttgcatctgatgcaggcaatactagaaggcctaggattgggcaaggaatacatgaacgagaaatttcagcaaggctcacaactactgtcagtgaactgctatcctaaagcatcacaagacgccatgactatagggctggctccacactctgattatggatttcttaccatcttgctcacaagttgccagggccttgaagttgttgaccgcagcagcaacaactggaaaacagtccagcaacttccgcatgcgttgcatgtccatgtaggagaccacatggaagtcctgagcaatggtcaaatcaaaacagttgtgcaccgtgctgttttgaatcccgaagaagcaaggatttctatagcaagcattcatggttttgagctacacgagaaggtcgcctgtgccaaggagcttgtggatgaacaaaatcccccaaaatacaaagagagcagctttactgacttcctcgaccatctcacagctaatatggacaacaagaacaggaattttcttgaaagcctcagaatgtaaggactagaagccctaatttggtacaaccttaactacaagtccaaaaggtggttaactggtgcgttgatatctgagaaagcagatcgagctaaggtttactgtcacatgttgaactgaagtgtccatgtattttttttaacgaaatgaagtgtccatgtaatattcaataaagccctgtatgtggctgctggtgtccattccagttttacatgaagcatagaaaactcgcatgtgtaatcatctttggccattattttcaagaccacaatctataggctcaaaaaatgcctttgtaacgtggtgtggatgtgaaaatgtcttaaaatattttataaattgagcatgttaattg

SEQ ID NO: 106003 - DNA, 406 bp, Zea Mays
gatcttctcgcgtcgattgcttgcccagctcgcttcctcttcgtcttccttctcccccttctcctcgcctccggttaaccgccacagcctggattcgccttctcccgcggcggcacggccggccgctgctgctgcgtcggcgcgtgagatggatgattgcggcggcggcggcaagaggccgttccagctggcgcggtcgctgacgtaccaccaccacccggggcaccggccggcggccgcgtccaggtggcgacggcagcaccagcagcatcagctcgcggacgagccgcgtgcgccccggccgcaggcggtggtgctgtacacgacgtcgctgcgcggggtgcggcgcacgttcgcggactgcgccgcggtgcgcgccatcctgcgcggcttccgcgtggccgcg

SEQ ID NO: 106004 - DNA, 2070 bp, Zea Mays
ctattctgggcgatttccacgtcgccaaaggcagcagccgtggctgtagactgtagcacgaaagagaaatctgtaacccagcagccagcgagtcaggcaatggcggccgtcgtggcgctggcaccggcctctccagctctcctccctgtccccttccgcggccgccgcgacggccgggtggccctctcgcctcgccgaacccgctgctccgcggggcgctgcagagccacggcccagaccttccaggggggcgccgccgccagctacgcccgcgagatggagcgcctctccgccaaggagtcattgctcctcgcctttaaagatgctgggggtttcgaggccttagtcagcgggaagaccactgagatgcagaggatcgatgtcaatgagcgaatcgttggacttgaacgcctgaatcccacaccgcgccccacaacatcgccgtttctggagggtcgatggaactttgaatggtttggtgatagtagtcctggagcatttgcagcccgtcttttgtttgagaggtcacctacggctgttgcacactttatgggacttgatgtgctgatcaaggatggatactccaagctctcatcaaacctcaagtttgtaaacacgatacaaagcaagtttttactgactactcaattgtctgttgagggccccatcaggatgaaagaggaatatgttgagggccttatagagattcccagaatcaatgaagaatcattgcctgaacagttaaagggcttgcttggccaaactgcaggagctctacaacaacttcctagccctataagggatgctgtttcagaggggcttaaattgccacttagtggatcatttcaacgcttattcatgatctcttacttggatgaagaaatattgattatcagagatgctgctggagcacctgacgtcttaaccagacttgaggggccgcaaccgaatccaggtgacggcacagcagatgcagtgatatcggaatatgaaagctaatgcctcagtgctgactgtagctccgcacctagctcctgtttatggctcctttctcctctttggtcattttctcagtctcgcgcgtatataaagctttctagttctagtgttgtcaacgatgatgaccactcgagtgtttttacttaatacataccatttgtctattctgaatatgagcaacaatatctaaatattcaaatgtccatcaccagtttatatgaaacacggtaaaacaaaaaaaaaaggtactggttgtttaaagttaaaaactgaccagtaagttccaagatacgtacgggctggtaaccgctcgatgcgtgcagagaaccagtgacagacagcaacctctatcaaaaacaaaagagactagaagagttctattcaaacactgatgaagttcattgttctattgggctcatggaactatcaaaaagaggacagacatggaaccatgaaacatgtccggtgatttatgtttatggttgcaaaacgattaaagttgagatcgttcatctcataatgtaaatgcttgcagagaaactgaccaggagacttggggggtaaacattcccatgcaccatctgatcataacttaaagccggccaccccgtctgtgtcgcaggagctgaggagaaaatcatagaagccatcgttgtagccatccggatcgagatcgtacagtaaccctcccccttctccagacgatgtttcggcctccactttcatcggcgacgacatcgcagtcggctgccacgacgatagcgatgatggcgaagcatcctcgtccgtgagtgccgacgccgcgcaggagcccttttgggacgatggcattccggtgagccgctggacgaccttacgaaagtcccgagcctctgttttgataacctccggcgccaagacgtgaacgatcctgatcttacgcggcggcgtcttcgggatagcgtgggagagccggtgctgtgacgacgatgcaccgcgggacgggagcttcgcggcgtgtttcatggcgtcgccgttcgtgtgtgtgagtgtgagggggagagagaccgaacgagatggagccaccgccgc

SEQ ID NO: 106005 - DNA, 1420 bp, Zea Mays
acacgaatccttcggaccaaatccgtcctgcttcatcgaggcccaaggcccaatctccgtttctgataaagaaaccaaagagcaacctagcagtcttccttcacttctctgcttccgacctcgtagcgaatcggaccggggggctagggttccggtgcgcctctgcaatcggacgcgaggctaggctgggcatggagggaaccgctgcggcccggaagaggtcccggccggagacggcgaacggggctgccgccgccgggaagcgctccaaagacacggagtcatttcaaactggtctatcaagcaaatcgaagccttgcaccaagtttttcagtacgattgggtgcccgtttggcgagggatgtcattttctgcactttgtccctggtggttacccggcagttgcaaaaatgctgaatctaagtagctctgctgtatctgcgccatcaagaactcatgtggatcatgccgctcttaccggtgcctctcatccagcttctacggtcaagacacgcatgtgcaccaagtacaacactacagaaggctgcaagttcggtgataagtgccatttcgctcatagcgaaagagagcttgcgaagccagcctacatgtctcaagaaggacctcctatgggtggtcgatatggacgagctgaacctatgcaaccagctgccatgggccctccagcaggaaactttggtgcctcggcgactgccaagatcagtgtggacgcctctctggccggtggcataatcggcaagggtggggtcaacactaagcagataagtagaattacaggcgtcaagctctccatccgcgaccacgagtctaaccccaacctaaagaacatcgagctggaaggcaattttgaccagatcaagcaagccagcgacttggtgcgtgatctcatcgcaaccatcagcgcaagcatgccagcgaaaaatccatctgctgccgcggcaccagcaggaggaggccgaggcggtggtccagggggcaagagcagcaactacaagacgaagctgtgcgagaacttcttgaagggtgcctgtacttttggtgaccggtgccacttcgcccatggcgagacggagcagcggagaggtgctgcatgagagtcgaggtgctctaggcaatgagatgccatgtgctccctccttttgctactgtgaattttcgccttgcagcgctaggcggttggactgttgtgttgtgttgcgacgtcaatggattaaactctagatttcagctttctttttttaacatataagttcgagaaaacgttaaactgtcgtgcagcttgcattttgttggtcggtaagctagcaggctgctagcccatgacaaacctgtgtgacaaacctgtttgactgtcctagtgttgctgtgtgactcgtcaaaactagggctaaaaaaaaaa

SEQ ID NO: 106006 - DNA, 1359 bp, Zea Mays
acacgaatccttcggaccaaatccgtcctgcttcatcgaggcccaaggcccaatctccgtttctgataaagaaaccaaagagcaacctagcagtcttccttcacttctctgcttccgacctcgtagcgaatcggaccggggggctagggttccggtgcgcctctgcaatcggacgcgaggctaggctgggcatggagggaaccgctgcggcccggaagaggtcccggccggagacggcgaacggggctgccgccgccgggaagcgctccaaagtacgattgggtgcccgtttggcgagggatgtcattttctgcactttgtccctggtggttacccggcagttgcaaaaatgctgaatctaagtagctctgctgtatctgcgccatcaagaactcatgtggatcatgccgctcttaccggtgcctctcatccagcttctacggtcaagacacgcatgtgcaccaagtacaacactacagaaggctgcaagttcggtgataagtgccatttcgctcatagcgaaagagagcttgcgaagccagcctacatgtctcaagaaggacctcctatgggtggtcgatatggacgagctgaacctatgcaaccagctgccatgggccctccagcaggaaactttggtgcctcggcgactgccaagatcagtgtggacgcctctctggccggtggcataatcggcaagggtggggtcaacactaagcagataagtagaattacaggcgtcaagctctccatccgcgaccacgagtctaaccccaacctaaagaacatcgagctggaaggcaattttgaccagatcaagcaagccagcgacttggtgcgtgatctcatcgcaaccatcagcgcaagcatgccagcgaaaaatccatctgctgccgcggcaccagcaggaggaggccgaggcggtggtccagggggcaagagcagcaactacaagacgaagctgtgcgagaacttcttgaagggtgcctgtacttttggtgaccggtgccacttcgcccatggcgagacggagcagcggagaggtgctgcatgagagtcgaggtgctctaggcaatgagatgccatgtgctccctccttttgctactgtgaattttcgccttgcagcgctaggcggttggactgttgtgttgtgttgcgacgtcaatggattaaactctagatttcagctttctttttttaacatataagttcgagaaaacgttaaactgtcgtgcagcttgcattttgttggtcggtaagctagcaggctgctagcccatgacaaacctgtgtgacaaacctgtttgactgtcctagtgttgctgtgtgactcgtcaaaactagggctaaaaaaaaaa

SEQ ID NO: 106007 - DNA, 720 bp, Zea Mays
gtccccgtctctgtctctccaccgtaccggcgcgcgccagcagtgccaccacctgatccgcccggccagctagctagctccaccaccactactctccacatggaggcgctgctcccgaggtccggcggcgtcatctcgccaaagatcagcacgatcctgcagtcgcacgtgtacccgcggttcggccgcgtgctgcgcgcgctcgcccgggtcaagtcggcgctcctcgacgccctcggcaagaccaagtggggcgcgcggcggcggaagcagcacgcgccctccatcgcccgcggccgccgctcgaagaagaggaagagcagcaagggcgaattttcgaagaagccgccgcacctcacctggtccggcggcctgtcgccgcttcgaggcgcggccgtggatgcgctggacgtggactaccacgtgtacccgtcctgtgactatgagtcggtgtggaacgcggtcgtcgtgcccgcggcgaccggtgagtactgtgggtacctgcgctggctcgaggaggagatgccggacgaggtgggggtcgtggaggaggaggaggaggaggaggtggaggaagacgacggcgtcgcctctggcggcgggaacgagatcgaccggctagcggagcagttcatcgcgaggtgtcgtgccaacttcttgctggagaagcaggagtcgtacgaccggcgtcaggagatgatcgccaggagcctctgaatc

SEQ ID NO: 106008 - DNA, 117 bp, Zea Mays
ggtgcactattaatcaatttcttaaatttggtgggataaactcattctggttattagtactaactcaatttcttaaatatgataatagatcaacttattacattttttaaaccaaac

SEQ ID NO: 106009 - DNA, 1725 bp, Zea Mays
agagcgagggaccggaagtgagagacggaccgaggagagagatagagagacaaaggggagagaccaagcgccagagacacagagaggggggcggaggagagagagggagaggggaatcgcgggagggaggcggggttttggcgagatttgagtttccccccacgctcccgccatggtgtccgaccaggagatcgccagctgcgtcgagtccgtcctccgtggctccgccggcgggcccggggaggcgtcgctcgccgccgtgctgcagcaggcggaggccacgctcggcgtcgacctttcccacaaggcgggcttcatccgcgaccagatggacctcttcttcggcccgcgcctccagccgcagcccccgtccaagccccagccggcgccttccccgcctcaggccgtcgttgcccccgcggccgccgtgccgcagcctcatgtcttaccgcaggtgcaggcacatgcacaggcgcagcagatgcagccgcagcagctcgcgccgctccagccgcagctcatcttccagaccatccctcagctctccgccatggcccccgtccccgcggtctccgcgccgccggccgtgccggccatggcgttctacccgccgccgccgctcgccttccgctacaccaccggcctcgctggggccgccaccggtgggaccgtctctttccagcagccgacccctggggctgggggcactgcttcccctaccgctgcaccgcaggtcgccggcgacaacaaggaaagtgcttctaagcgaaaaagaggtggacctggtggtttaaataaaatttgtgcaatttcacctgaacttcagaccattgttggtgagactgctatgtcaagaacccagattgtgaagcagctatgggcatatatcaggcagaacaatcttcaagatcctgatgacaaaaggaagatcatttgcaatgacgaacttcgtgtggtttttgaaactgacaccaccgacatgtttaaaatgaataagttgttggctaagcacataaccccacttgacccaaaagatcagcttcatgaagtaaaaagaatgaaggctcccacagtggttcctcaaccacctcccattaatcagcccagtgtagttatttctgatgcacttgcaaagttcatcggaacagatggaacatttcctcaagatgatgccctgaaatacctgtgggattacataaaagcaaaccaacttgaggatgtcatcagtggatcaatattatgtgattcaaagcttcaagagctctttggctgtgagagtattcctatgtcaggactatcagaaatgcttggtcaccacttcatcaagaaaacatagcaaatcctcgttaactgatctaggattgcagtttggcagataggcctaacattacaatatggtgttcttgacagaatggacagcatagcgtctgtatttcttcaatgttatggaatatgaatggtgtctggcaaagatcatattatttgcggtagaggtagcctgtgctttgttacgtgtgcaggccaccgctgcggcgtctggtggaacctctttactgaattcgtagtgctagttcttaaatgtcaaaatgtcatttctgactatgtaaagttgctttctatttgagtgccagattgtactcttaaaaaggaatttgaaggaatttctgtaggtaccgataatcttgttacttccgaattgcgaagatgaaatctttgaaggtcagc

SEQ ID NO: 106010 - DNA, 639 bp, Zea Mays
gaactagcgaagaaaaggacgcggggcaccatggcgacggcacaggcagcgtcggcgtccccaacccaccaccgcgcgtctccagggatgtcgccgccgcagccgccgtaccccagcgccgccaggatcgccgactccgcctgcttcccccagtacaccgcctcgctcaagtgtttggaggccaaccaggacaagaccaagtgccagcagcagttcgacgattacaaggaatgcaagaagaaagagagggaggctcggctggaacggaataaaaccagatcactctttgggtgaacaatggcgtcccacctgagcaatatgctggcggtgcaataagtctcctgctgatgtgagcgaaatcacggcttttttctttggtttcatgatgatcctctgcaacttgtgcaaggtagggaatagaaataccgatctcgagattgagggagatgtaagggcgtctgggaacagctcattaacacaatggctacggtgaatgaatcgaatgagcgaggatgtattttgagaacaaccaggcgtcatgaaacgacagtttgttcaataaatttgtattccacccctgtaacgattgtacttcaaaatatttccatgtgttcttagctgccttgcatccagcttttt

SEQ ID NO: 106011 - DNA, 109 bp, Zea Mays
tttttttttttttattttttccacgcctcggacttcgccaagaccgaaacagtgtgcgtgcgcgtgcttgcttcgagtgctcatcacgtaccataccaactagtactac

SEQ ID NO: 106012 - DNA, 315 bp, Zea Mays
atgatgtgcaccccgctctctgtatcaaccacgtcgctgatctccccgaccttcagagcaaacgcggccttctcaaaaggcttctgcatcttacccctcccaaatgaacctaggtcaccgccgcgcttggccgagctgcagtcggagttctcggcagcgacgtcctcgaactcgcggtcaccggagacgatctggtcgcggagcgcgcgcgcgaggtcggccgcgtcgtcgcgtgtcgtggcggagatggcgacgccttcgggatcccgccacgaggccttgcggcgggagccctcgtgcttgatcaggatgtga

SEQ ID NO: 106013 - DNA, 1296 bp, Zea Mays
acacaaacagcttcaatggctcacgtacctttccagtgcgtgaagaggtctagacgacggcgacgatgaagtcggcggacggcggctagggctagcggacgcggggagatatatttgggcctccgcggcggtggcggatgctgctagaagcttatagaagaaagatgccactcgcccactccgtccaaaaccgggactcattccaatcggacggctgtcaactacgcgagcggttgggacactgaaactagggcccacatgtcggtctcttaaatctctgcgtccctgccgagctcaccgtcgccgccgttgtggttgtggactcgtgggggtcgacttccgccgccgaactccgctgtgtgacctaaagggaatcgttctcaacggcggtgggagcgatggatccgagttccgggaagcctgaggaggtggcggcttaccagagcaaagaggccaagcaggcgaggcttcagtccatgctcgccgcgctcctcgacgaccccatacttgccgacgtcaccaggaagccctccctcgccgacgtcgacactctgataaacctagagctcggcagcgccatgaggctgaccgttgtcaagttggataacacttccttcgatgtggcggtgttgaattccgccactgtcaaggatctgaagctggctatcaggaagaagataaatgagatagaacaagagaagatggggcatcgtcatatctcatggaagcatgtctgggataactactgcttgacacatcacaatgagaagttgatagaggacaattcaacgctttcttcttatggcgttcggaataactctaaggtctgtttctcgccgcacgtcatgtccagagtacatcggaaacactcgagaagaagaaaacaccgcttcttccatggtcttagcaggaaagctaaccccgccctgtgatttgttagctatataggagcaaagctggtgccaagccgcaacaaatgcatcgtgactatcatccttgtcagtagtatggtcatttcagaaacgtgatcgagccttggactgtgtgagtttaactggaagtatgcatggattattcattattcatggaagctatgtcagggtctcacattagctagtactctttttatgttgcatttatatggatgaaactatggctgttttttttttacaattgaactgtagttagtggctaggttatgagaactcttgctctatacttattcagtggctaggtaatgacaattcttgttctatataatggttgttcgagtgtgagaaattcacaatctcataa

SEQ ID NO: 106014 - DNA, 2962 bp, Zea Mays
atggcgcggtccaagaacggctgcctcaagatccttgtctgcgccggctccggatccgatccctccgccggctcagacgccgacgaccacccggacgaggagaacaacgccatatcagataaaagcagatggagcttccgtaggaggtctacaaggcaccgagttttgaagaactctgatatctcagaacctgagactcttagttccagcaaagcaaaggctgacattacaccgagcaacaatgtttatacttcaacatattcttatgcctcggagaagcctctgcaacaagacaagccagatgagaagactctgcatcaagagaagccagaggagaaacctctgtatcaaggaaactctgatgaaaagctgatggagaagccaagtgaaaagcctactgacaaacttatggaagaaccagctgaccagataattgaaaaatcaattgaactacccactcaaaggataaccgaaacaccaactgatgagccagctgaaaaaataaatgttgcaccaactgaagaaccagctggaaaaataacagagacggcatctgaaaatacagccgaagggtcaataaaaaatgcaacagaagagacacccgaaagggcagttgaggaactaattgaagaggcagatgaaagtatttccgtctcatcaactgtgctgaaggaggaggaaaacacctcacttgttgaaggaagcagtggagacccggaggaagatcatctggagtctgcagctactaatcttcagcctaggagtgacacttgcattgcaagggaagagctgctgaatcagaaggatctggtgaaactgcaagctgttatccgtggacatctagttagaaagcaggcttcagaatctttacaatgcttgcttgcgattattaaaattcaagggttgatcagggctcatcaagcacaacattcaccaggaaagattcaggagactattgttcattcttcaggtgagaaattgcttcgcaatggatttgctctcaagctcatggacaacacaccaacttcaaaatccattcgcataaaatgtgatccttcagaatctgatgttacatggggatggatggagaggtggacagccttaattccaccgatcactgtggtgcacctgccagagcataaagaaaatagtgagttgatgggtgaaactgtgaccgaacaagtgactgaacatgctcagtgtgatgaagacattgttcctttggattcagacctatctttcccaaagttggtggctgatgatgtgaaagaaacagtagagacatctgattttagtgccttggaggctcctgcaagtgtcccagatgaaagccctaagatggaaatgaaacatgatcctgaatcggagttgatcgaaactactaatgcagatgctgatcatgtaactgaccaaaaggctgaaaatgatgtggacgagccttttatgtccttggatcaacaatatgcccaagctgatgatgcatcaaggaatccctgtccactccctggaaaatttgaaccgtccaatgaggacagtggtgacgcatacaattctgagcagacactggagatggaaggtaaaaggtttgtggcaagaaagccatgcaatccagcctttgctgctgcccaattgaaatttgaagagctgagtacaaattcgacagtcagcaggtccagcagcccaccgcatctggatggggtgagcaagccaaggatgcacactcctagttcgcaagaagattacacgccaaagcaagatggcacaggcatacaagaaagctcagctggtcatgatactaaaatgagaattgctgcatcagaatgtgggactgaaatatcaatttcatccacactggactcaccagacagatcagaaggtgatggtggggagatagtgttggagattggagctctggaaaacagaaactatgtcactggcaaagctgataaagactccagtattgtccatcccggggtaaaagatgctcctgaagcagaagcccagccgcagaaggaagtagaagagaatgggcatgttcctgcccttgaaacggaagcccagccacaaaaggagccacatactgaaccggaagtggcagatttgcatggacaattggaaaaatcggtcacatcttatgccacacctgaagggactccaatgagccgaacgaccaccattccggagtctcatgggacaccgtcaagtgaggtctctgttaacaccaaaaggagcaggagcaacaagcccaagtcccacgcgagcaagaggtcgctggctagtccaggcagcgactcagttggacggagcagcaccgacaagttttcgaaggaatcaaggcatgccaagagagagagctcctcaagcaaagctgctaaatccgaccagggcgatcaagaacctcgtgtaagcaacagcaacagcaacccgttgcctagctacatgcagttcacagagtccgcaagagccaaggcgtcgtccccgaagatgagcccagacgtgcaggacagcaacgccgcgaggaagaggcactcgttgcccatgaccaacggcaagcacgactcgtcgcctcgcatgcagcggtcgtcgtcatcgcaagctccgcaaggcgtgaaaagcagtggcccttctcctcacagcgcgtctggtggcgcagacaagaggtggcatatctgactgatgatgagtaggccgagcacagcagcatatttcgccgtctaatccgttgattcgtcgttgggaaactgagtatggtttggaagacgggcagcttttgccgcttgatacgtgtacatttgtcgcttctcattggttgtgttatgtgactgatagtggtttgtgtgtgccccctttgacttgtaatgcaacagtggcatcaggagtgtgtggattggtctgttgtatttggcgacattgaagtttctgttggtgtggatgctactacgcctctcatttctttttgaaa

SEQ ID NO: 106015 - DNA, 573 bp, Zea Mays
atggccgcagctgagcacttgcacgcgatcgagctcgtacctgcaacttgcaagtcttgcagaaacccgtcgccctcaccgatcggcagcggccccgactcgccgcgcgcgcaccgccgcgtggcgaggccgcagcaggaggaggaggaggaggaggcggcggccgacgtggacacgcggtggaggacgtcgcggaagtggtcctcgtcgcaggggagcgcgatgggcccgggcgccgccgggaagccgtactcttcctccgcctgccgcagcagctcacggaacgacgggtggctgaggtgcgccacccgtaccacgaaccgcctggtggagccggacccggcggcggcggcggcggcctccacgcacacagccacgtgccccgccggcaccgaggtgcaggggcggggggaggagaaggagaaggaggtggtggtggagcgggaggcgtccgcggcgcggccgcgggaccgccaccgccaccgccgcacggcgcggcacagccacacgagggacgggatcgtgatcgccaccttgcacatgcttggcggcgtcgtgcggcgagatggatag

SEQ ID NO: 106016 - DNA, 1786 bp, Zea Mays
attcaaaaagcgatcctgaccttccacttccgcagtcccgcaagaaagaaagagaaaggagaaggaacagggaagcaaagcacaagaggtggccgccgcagtccgcaccccctccccaatcacgccacccgacaccgcgctccgcagattcgtagtcgctgctaggcttccggcgagatggacgtggtgaaggcggcgcagttgtcggggcggacgctggaacgggtagtggtgcatcccttggtgctgctcagcatcgtcgaccactacaaccgcgtcgcccgcgacacccgcaagcgcgtcgtcggcgtcctcctcggcacctcatcccgcgggtccgtcgatgtcaccaactcctacgccgtgccgtttgaggaggatgacaaggatcctaggatctggttccttgaccacaattaccacgagtcaatgttctccatgttcaagaggattaatgccaaggagcatgttgttggctggtacagcactggcccaaaactaagggagaacgacttggatgtccatgcattattcaacagttatgttcctaatccagtcttggtgattattgatgtccaacccaaggagctgggtataccgaccaaagcgtactacgctgtggaggaggttaaagagaatgcaactcagaaaagtcagaaggtatttgtccatgttccttcagaaattgcagctcatgaagttgaggaaattggagttgaacaccttctaagggatgtcaaggacacaacaataagcacacttgctacagaggtcactagcaagcttgcagccttaaagggactcgatgcaaggcttagggagatccgaagctatttggatcttgtaattgacgggaagctcccactgaatcacgaaattttgtaccatttgcaggctagtctctttcttgaaatttgtcatgtattacttttactggaattgaatgaactaaacggtaaatgctgaaatctaccagctttcttagtagcagtagtatcggaatgggaaacataagatgagtaaagggtgcttagtatatttttagttgattattaactttttctttgtattttagtacaaattgatcccttgatatcagttattctcccacacatagttttatttgtttttttttcattatatgaagcattgatttttaattctatcttaaagttctgcttcagaagaggattgtagagtatatattcattatgagttcttttttgcaggatgtctttaatctccttccaaatttgaacgtaaatgagctaattaaagcctttgcagtgaaaacaaacgacatgatgttggtgatatacctgtcttctctgatccggagcgtcattgcgcttcacaatttaatcaacaataagatgctaaacaaggagcacgagaaggccgaggattcgaaaccaaccgccattcctactgctgccggaagctaaacgtgcttttgatcactgattggtggctaagaaaagggaagaaacttgtgatgacatgttagcacggttgtgctcgaaccaactgtcttgaccttgaatggacattttttatgtttattttatgtatgatcaggtcaacggcaagagaaaccaattacactgtatgagctttaggtcacacctcaagttttctgtagatcttggtgctatttcatctgatgggttttcatgatgttgactccgtttcctgtgattgatttatagcgagcctgtacgttgtatgtcatgcaattcatctatctaaagtcttaaaaggcgctcggttttgaggccctctccgc

SEQ ID NO: 106017 - DNA, 1448 bp, Zea Mays
aggttattcaaaaagcgatcctgaccttccacttccgcagtcccgcaagaaagaaagagaaaggagaaggaacagggaagcaaagcacaagaggtggccgccgcagtccgcaccccctccccaatcacgccacccgacaccgcgctccgcagattcgtagtcgctgctaggcttccggcgagatggacgtggtgaaggcggcgcagttgtcggggcggacgctggaacgggtagtggtgcatcccttggtgctgctcagcatcgtcgaccactacaaccgcgtcgcccgcgacacccgcaagcgcgtcgtcggcgtcctcctcggcacctcatcccgcgggtccgtcgatgtcaccaactcctacgccgtgccgtttgaggaggatgacaaggatcctaggatctggttccttgaccacaattaccacgagtcaatgttctccatgttcaagaggattaatgccaaggagcatgttgttggctggtacagcactggcccaaaactaagggagaacgacttggatgtccatgcattattcaacagttatgttcctaatccagtcttggtgattattgatgtccaacccaaggagctgggtataccgaccaaagcgtactacgctgtggaggaggttaaagagaatgcaactcagaaaagtcagaaggtatttgtccatgttccttcagaaattgcagctcatgaagttgaggaaattggagttgaacaccttctaagggatgtcaaggacacaacaataagcacacttgctacagaggtcactagcaagcttgcagccttaaagggactcgatgcaaggcttagggagatccgaagctatttggatcttgtaattgacgggaagctcccactgaatcacgaaattttgtaccatttgcaggatgtctttaatctccttccaaatttgaacgtaaatgagctaattaaagcctttgcagtgaaaacaaacgacatgatgttggtgatatacctgtcttctctgatccggagcgtcattgcgcttcacaatttaatcaacaataagatgctaaacaaggagcacgagaaggccgaggattcgaaaccaaccgccattcctactgctgccggaagctaaacgtgcttttgatcactgattggtggctaagaaaagggaagaaacttgtgatgacatgttagcacggttgtgctcgaaccaactgtcttgaccttgaatggacattttttatgtttattttatgtatgatcaggtcaacggcaagagaaaccaattacactgtatgagctttaggtcacacctcaagttttctgtagatcttggtgctatttcatctgatgggttttcatgatgttgactccgtttcctgtgattgatttatagcgagcctgtacgttgtatgtcatgcaattcatctatctaaagtcttaaaaggcgctcggttttgaggcc

SEQ ID NO: 106018 - DNA, 1560 bp, Zea Mays
attcaaaaagcgatcctgaccttccacttccgcagtcccgcaagaaagaaagagaaaggagaaggaacagggaagcaaagcacaagaggtggccgccgcagtccgcaccccctccccaatcacgccacccgacaccgcgctccgcagattcgtagtcgctgctaggcttccggcgagatggacgtggtgaaggcggcgcagttgtcggggcggacgctggaacgggtagtggtgcatcccttggtgctgctcagcatcgtcgaccactacaaccgcgtcgcccgcgacacccgcaagcgcgtcgtcggcgtcctcctcggcacctcatcccgcgggtccgtcgatgtcaccaactcctacgccgtgccgtttgaggaggatgacaaggatcctaggatctggttccttgaccacaattaccacgagtcaatgttctccatgttcaagaggattaatgccaaggagcatgttgttggctggtacagcactggcccaaaactaagggagaacgacttggatgtccatgcattattcaacagttatgttcctaatccagtcttggtgattattgatgtccaacccaaggagctgggtataccgaccaaagcgtactacgctgtggaggaggttaaagagaatgcaactcagaaaagtcagaaggtatttgtccatgttccttcagaaattgcagctcatgaagttgaggaaattggagttgaacaccttctaagggatgtcaaggacacaacaataagcacacttgctacagaggtcactagcaagcttgcagccttaaagggactcgatgcaaggcttagggagatccgaagctatttggatcttgtaattgacgggaagctcccactgaatcacgaaattttgtaccatttgcaggatgtctttaatctccttccaaatttgaacgtaaatgagctaattaaagcctttgcagtgaaaacaaacgacatgatgttggtgatatacctgtcttctctgatccggagcgtcattgcgcttcacaatttaatcaacaataaggttgattcatatctgtttctgatactgtttcagtcatgtatgcattccttgtagataggttgataccttagtgacattgatcacttgtaatggaatcgctcaattttgctgtggacatgaaatcttgtctgttaattgctgtgattccagatgctaaacaaggagcacgagaaggccgaggattcgaaaccaaccgccattcctactgctgccggaagctaaacgtgcttttgatcactgattggtggctaagaaaagggaagaaacttgtgatgacatgttagcacggttgtgctcgaaccaactgtcttgaccttgaatggacattttttatgtttattttatgtatgatcaggtcaacggcaagagaaaccaattacactgtatgagctttaggtcacacctcaagttttctgtagatcttggtgctatttcatctgatgggttttcatgatgttgactccgtttcctgtgattgatttatagcgagcctgtacgttgtatgtcatgcaattcatctat

SEQ ID NO: 106019 - DNA, 997 bp, Zea Mays
attcaaaaagcgatcctgaccttccacttccgcagtcccgcaagaaagaaagagaaaggagaaggaacagggaagcaaagcacaagaggtggccgccgcagtccgcaccccctccccaatcacgccacccgacaccgcgctccgcagattcgtagtcgctgctaggcttccggcgagatggacgtggtgaaggcggcgcagttgtcggggcggacgctggaacgggtagtggtgcatcccttggtgctgctcagcatcgtcgaccactacaaccgcgtcgcccgcgacacccgcaagcgcgtcgtcggcgtcctcctcggcacctcatcccgcgggtccgtcgatgtcaccaactcctacgccgtgccgtttgaggaggatgacaaggatcctaggatctggttccttgaccacaattaccacgagtcaatgttctccatgttcaagaggattaatgccaaggagcatgttgttggctggtacagcactggcccaaaactaagggagaacgacttggatgtccatgcattattcaacagttatgttcctaatccagtcttggtgattattgatgtccaacccaaggagctgggtataccgaccaaagcgtactacgctgtggaggaggttaaagagaatgcaactcagaaaagtcagaaggtatttgtccatgttccttcagaaattgcagctcatgaagttgaggaaattggagttgaacaccttctaagggatgtcaaggacacaacaataagcacacttgctacagaggtcactagcaagcttgcagccttaaagggactcgatgcaaggcttagggagatccgaagctatttggatcttgtaattgacgggaagctcccactgaatcacgaaattttgtaccatttgcaggatgtctttaatctccttccaaatttgaacgtaaatgagctaattaaagcctttgcaggtaatcttgcatctttcttctgatttaacataacagaccttatct

SEQ ID NO: 106020 - DNA, 1041 bp, Zea Mays
atgcaccatgctggtgatatgagtaacacattgatgagtgtcatcgtcgaatacttcaacagtatttctggggccctctttgacactgtttctagaccctctaccatttctaaatatgatatctgtcctttcttgttggagaaagttaaaaagggttgcaactttaaagttaaagatagtttactgaagactcttgaggaaacccagaaaagagatatgattatgctcccgattctggatggcagtcattggcaacttcttgctaatttcatcgaattactgaagatacataaatgcatgaaatttgatgttaattcttttgaaaagatcaaagctagcgaaattgttgcatgcagaatgaaactcacacatatgctgatcaaatctaagcaaaatagtgctgatccatgtaatgtggttaaaaaactagatgtgaatataaagaaatatagcgttagttcccgaaaggtgatcacaagtaagaatttgacgatgctgatgggactaatagatcaagagattgaagagattaatgcaaaaaagagaaagcgaagtggacatccagcaggacaaccagaactgaaggacgatgacggtcaactaagggcaaacgcagtcaaggctcgcgacgctgaattgggttgtgaaatttccatgcctgccacctccatcaatggcatgattcgtttagcttctgttacagagcctgaaacgattacaccatttgctatgctatcccgggccacggctggaatcagaggatcgactcttatcatcaacatgcctggcaacccaaatgctgtggcggagtgcctggaagcactccttccggcgctcaaacacgccctgaagcagatcaagggtgacaagagggagaagcaccctcgccacactccacatgccgcagtggcgcctgtggaccagtgggagcggagcttccgagccgcatcaattggtagttgtcgtgggcgctggtgtgatctagtactaacttcaacagcttattcatccttatatctatattcagacttcactctataa

SEQ ID NO: 106021 - DNA, 464 bp, Zea Mays
atccacagggtgcatgtatgcctatcacatcctttaaaagcaaacccacatcctacagagtttcaacgtgcaataattagatggatgcttgatgatggatctggtcgacctggttttgttgctgagagcactggccatcaggctagtagccgcctccttagtatgaaatctgttaatgctatgctggaagtaccctccactggacaaatattggcagctgggacatctattgaagccatacttatttcagacataatatcttctttagataagctgcctgctccctcaaatccgcacccatctcgttttggatcttctgcagaaagtatcttcacagatgtatctcagattgcatctccacaggatgctgaagttaaagttgcaattctgactttaagtgacactgtttcatcaggcgctggccctgataggagtggtccaagagctgtatctgtagtgaattc

SEQ ID NO: 106022 - DNA, 1283 bp, Zea Mays
ttaacaacaattgctcggatggctgaggaagaagaaaatatgcctcatcgtggctctgttgtgggacgccgaactataccaagggatcgttacagtggttactttcgtttgatgcaagactacttcattcaacagccagtttatggtgacaatttatttcgtcgacggttccgaatgtcaaaaaatatgttcaatgatatttgtgaagctgtggcggcagcaaataggtacttcaggttgacacacaatgccgctgggcaggccgggttctcaactattcaaaaggttactgctgctttgcgaatgcttgcatacggaggacctgccgatagtttggatgagtactttcgcatgggtgagagcacgatcatcgaaacagtaaataaattcactcgcaccattgttgtaatctatggtgaggagtaccttaggcagcccaatacagaggatattgccaggcttcttcgaaaggctgaagaaagaggttttccaggaatgctcggaagcatcgattgtatgcattgggagtgggagaagtgccccactgcgtggcacggtcagtatcgaggtcaccacaagaaacccacaattatactagaagcggtggccagtcatgatctttgggtttggcatgcattttttgggatgccaggttcttgcaacgatataaacgtcttgcatcgttccccggttttcgataacctgtctagcggccatgctcctgaggttaatttcacagttaatggacgggaatacaatatgggttactacctagctgacggtatatatcctccatgggctacattgatcactcccattccagccgctgttagtaataagcagaatcggttcaatgagaaacagcaggagtaccgcaaagacgtcgagcgtacttttggtgtcctacaagcaaagtatgccatcatcaaaggaccttcaagaatgtgggatcccggggatatgaagtacatagttcaatgtgtcatcatactgcacaatatgggtatcaagtatgagagaggaatggagcagttggagatcgaggattatgagggagcatccagaccatcattggatcctaataggaatgtgtcggaggttcagcaactcatcaatgcccaccgacagatccaaagccgaacaaccaatgagcaattgaagaatgaccttgttgatcatatatggaacttgcatggctcatcaactgaaatcttgtataaaagtttggctcatcaaatacctagctgattgacgattccctgatttatcaacttagggcaatc

SEQ ID NO: 106023 - DNA, 667 bp, Zea Mays
atcatgctctgctgagaatctgcttttattaacctttggtgagcagttccaaacaggcccatggcaggattgatgtcgtcttgccttggtaggatcatggtaacagaagcaacgccgatattatgactttagagatctcatgagtttatggactgaaactaggttgggcagtggcatggttaactttattttgctctatatgggctcttcactctaaagcaacatggcaacaatgcatgcacacaatgcaggagcaaataacagctaattatttctggcaaagcctgaggtattgtgacgaggatgcagccccgtagatgtcagtgataagctacacagtttttcctcctctttcagtggatagcagaaatactcctttgtttcttcttatatatgctagagcttgactgaaattcttttcttacaggaagtggagagttttgcgccatttgagctggggggtgcatctgtatcgggcccataatgtagtatctccattttaaaaaggtttgagtttaggaaaagaattgtttactgtagtgattcaataacccttcaccctgtctgcattacaactttcatatatgatgtgaacgtttggtgacaagaaagagatggcgggcaatatctgtagactggatggtcaggaacctgtgaggtgatctgt

SEQ ID NO: 106024 - DNA, 1026 bp, Zea Mays
gccagacaatgcccaaatggtgtaattgtaaatttctgaatgccatgtattgcttaagaaactgaaacaaatgctatataaacatccttcaaaattagctgtatgtttgtgttctgtttgcatgtgctgttggtaagctgtactatgtgcaaacataacctgtttgggatccagacgtattcctgctggtaagctggttcctgctgtgtcccttttgctgtagaaggcaaggtacgtggtgccttaccttggctaagtcactgaatctggatccgtgatttggtaccgtaggctgagctgcctgacaagtggggtccacgtgacagtacccgtgcccccgattctgctcctggctgtgctcgcccaggcccagcaccgctcagtcagcgccgccgcaaccccgccccgaccctagtccaacgttcgtgccgcttgctgggccgccgacgcgccaggccgctggagcagctcgcttgccccccagcccccacgccgtgcccctcgctcagcctgcgctgcctcgcactcctcgcgccgctagcccggccggagccgctcttcttccaccgcgcttgccagctgccgccgctcctctaatggtgacgaggtggagccagaagagcccgggcctcaagatcctgtggatctggaccctgggcaccgccgcaattgtggtcggcggtatcgtccggatgcgggtaaacgatgtgcagaagatccttcgggaagaagaggaagccgccgctaccgccacggccacgtcgccccccagcgagcgagtcctgaaagacgaagagtagaacaggaagtggagagttttgcgccatttgagctggggggtgcatctgtatcgggcccataatgtagtatctccattttaaaaaggtttgagtttaggaaaagaattgtttactgtagtgattcaataacccttcaccctgtctgcattacaactttcatatatgatgtgaacgtttggtgacaagaaagagatggcgggcaatatctgtagactggatggtcagg

SEQ ID NO: 106025 - DNA, 648 bp, Zea Mays
ctcacgccagtgccagctgatgatttgctgatttgcttgcagttgtggtcggcggtatcgtccggatgcgggtaaacgatgtgcagaagatccttcgggaagaagaggaagccgccgctaccgccacggccacgtcgccccccagcgagcgagtcctgaaagacgaagagtagaacaggtaaaaaaggttgcccacttcctctcggcggaccgaactgtgtcatgcgcctccgttgtaatgttcagattttgcagtctgcaatacaatagagaaatgctcaattagttgatacaaacaggccccagttgggaactgaagataatctacgatcgcgctacctagcgatttcacgcgttagagagtgtttaattagctgaggatatagtgccatctggtactgatatgcaatatctgagggaagctctatgtttaggtctacatgttttggttagttttgtcagacactggatagttgtgtttcaacagttcactattgtctgaacacaacatgaacatgtgatcttactgaaaatttgggtatgctgctattattgtataaacatgtttaatttcttggtcatacttatgaactctctctctctctctctctctccacacattaggtcaatacagtgacagggctgtac

SEQ ID NO: 106026 - DNA, 1619 bp, Zea Mays
ggcggccgcgccccataccgtgctctgggccgctgcgtgggttgtgtcggtccatagcccagttggcgccgggtcgggttttgctagggtttactgcttgtcttcctttctcggcagtcggcaccttcgcggcttcgcctgatcgcctacgccgcttcgtcctgattctgattctctggtgctcccaagaagaaagtcagggaatgaaggaccgccacctctcgctgaaccagacccagcgggtccgcctcgaggccgcgcttcaagagctccagtccgttgcgcccgccgccgtgtccgccgccgccgtcaccgtcgcggacaccattcccgtcaatcaagaggacaacatcctcaaggggcatgggacgtcggaccaggacggggaggtggttgcgacgctctgcggggtggtggagcgggtcaacaagctggtctacgtccgcactcttcgcgcgagatacaagccggaggttggtgatatcatagttggccgtgtgattgagattgctcctaagcgatggaggttggagataaattttagccaagatgctgttctgatgctttcatctatgaacttgcctgatggtattcagagaaggagaactgctgttgatgaacttaatatgcggagtatctttgaagaaaatgatgttatctgtgctgaagttcgaggcttccaacatgatggatctctgcacctacaggcaaggagtgaaaagtatggaaagctggagaggggtcaattgctgatggtagctccatatttggttaaacgaaagaagcagcattttcatcatcttgaaaagtacaatgtcgacttgattcttggttgcaatggattcatctgggctggtgagcatgttgtggtgggtgaaaaaccaaaaacgacaggaggtcagcaggggttcagcactgaagctgagaatttcaccccattagagacaaggaagcatatttgccggcttgccaattctgtacgtgtgctctcagccctaggattcactctgaccgtcgaactgataatcgaaaccatggaagcaagtgcgtcatcaaatgtagagataaatgacatgctcggggctgagttttacgtccagacagcagagagggaggctaagcgccgggctgatctgttgagaaagaagaatgacgcaaggtgagtaggtagcgccctcgtcattgctgattggggctgcctgatttgcggagaacagagcctgacacgttgcgttgctccatccgcatgagatctgtagcagtgccataatacttatctgatggtatctaaggcaaaattagttaacatgttctatgtacacctttacgggtagcaattagcaaagatgtaaggggttctctctgctctgatgctgtacatgcatttgatcatggtgtctggtgccggcagtgttgtgcctggcaggtccgcaggtctttgatccgttcgttgctgaagtcgatgcacttctgagttgaaaaactggacgttcttcctattgaatattccagtaacatgaattatgttgcctgagaaatgtgcaaggcattagcctgatggctatatgaacaattcatttagccactctataaagttgtcaccacagggtgtggaaatc

SEQ ID NO: 106027 - DNA, 2001 bp, Zea Mays
ggcggccgcgccccataccgtgctctgggccgctgcgtgggttgtgtcggtccatagcccagttggcgccgggtcgggttttgctagggtttactgcttgtcttcctttctcggcagtcggcaccttcgcggcttcgcctgatcgcctacgccgcttcgtcctgattctgattctctggtgctcccaagaagaaagtcagggaatgaaggaccgccacctctcgctgaaccagacccagcgggtccgcctcgaggccgcgcttcaagagctccagtccgttgcgcccgccgccgtgtccgccgccgccgtcaccgtcgcggacaccattcccgtcaatcaagaggacaacatcctcaaggggcatgggacgtcggaccaggacggggaggtggttgcgacgctctgcggggtggtggagcgggtcaacaagctggtctacgtccgcactcttcgcgcgagatacaagccggaggttggtgatatcatagttggccgtgtgattgagattgctcctaagcgatggaggttggagataaattttagccaagatgctgttctgatgctttcatctatgaacttgcctgatggtattcagagaaggagaactgctgttgatgaacttaatatgcggagtatctttgaagaaaatgatgttatctgtgctgaagttcgaggcttccaacatgatggatctctgcacctacaggcaaggagtgaaaagtatggaaaggtacatgccagcttagatgacattatttgtgctactgtaccattgtactattatcagtatgtcccttttaatgcctccaatttagccttttgttatctgtaaaaggtagatgcctttaatgtgattgcagaaatggtctgtgtatatcatttggtgcaacaatgcaagggagactcatggatgtttcatagatgcgccttaacctgccatgcctttagtctttattatgttgatgatatcttaagttggtctatgatttgtacgtgtctggtctagttaaagtcttgtcctacccaaaaaaactattgctttctgagacccattaggttgatgctgatatgttttttttggggggggggggggttctgatttattgatgcagctggagaggggtcaattgctgatggtagctccatatttggttaaacgaaagaagcagcattttcatcatcttgaaaagtacaatgtcgacttgattcttggttgcaatggattcatctgggctggtgagcatgttgtggtgggtgaaaaaccaaaaacgacaggaggtcagcaggggttcagcactgaagctgagaatttcaccccattagagacaaggaagcatatttgccggcttgccaattctgtacgtgtgctctcagccctaggattcactctgaccgtcgaactgataatcgaaaccatggaagcaagtgcgtcatcaaatgtagagataaatgacatgctcggggctgagttttacgtccagacagcagagagggaggctaagcgccgggctgatctgttgagaaagaagaatgacgcaaggtgagtaggtagcgccctcgtcattgctgattggggctgcctgatttgcggagaacagagcctgacacgttgcgttgctccatccgcatgagatctgtagcagtgccataatacttatctgatggtatctaaggcaaaattagttaacatgttctatgtacacctttacgggtagcaattagcaaagatgtaaggggttctctctgctctgatgctgtacatgcatttgatcatggtgtctggtgccggcagtgttgtgcctggcaggtccgcaggtctttgatccgttcgttgctgaagtcgatgcacttctgagttgaaaaactggacgttcttcctattgaatattccagtaacatgaattatgttgcctgagaaatgtgcaaggcattagcctgatggctatatgaacaattcatttagccactctataaagttgtcaccacagggtgtggaaatc

SEQ ID NO: 106028 - DNA, 348 bp, Zea Mays
atgtcaggttccgacgctactacagcgattgacaccaagacttcgtctccaccaacacaacaggtcgttcagccggcactgcaaggagtgccaccattctcccttgacaccatggcaaaggccctctctgaggctgcccagcagatggccaacctcaacatgcagcaggtggtcgttctctcgcggctggccaccgtggagagccatcaggcatcctcatcagcgggtgccatggcccaaggcttttcctacgaggtgccgagggacaacacgacggcacttcatatttacttatccaccaccaccatacccccaccaccacgctgcccgccacccaacccctgttga

SEQ ID NO: 106029 - DNA, 1915 bp, Zea Mays
gaaggcaaagcgtggcagaaaaacgcggggagacaagggggaaacgccgtgagaagtcgccgataggtgcgcgggtcgcggtcgtcgcctcctctgcctccctggcgcccgcttggctcggttctacgcgtatgctgcccttgcgccttgcggcaaacgcaacaacacggagcgggcgtggggagcggagcggtgagcgaggatcgagggcaacgtggcgaggcactcccgagggggagaggcgactttgcttccagttccaggaaagagtgggctataaaaaggcgctcgagatccagatctgggccgatgcgaccgccctcgctgctctccctcaccctcgacgccgcgctcctccgcatcgccaatatcgccgacctctcccacctcccagaccacctcctcatcgacctcttccgtgtagagaaccctcagtgctggtaagctgacagagaaagttctcaagttgtttctagcaaccgactgtgaggatatcatattggctgttcggttgctcaacattaagcagccactcgtaccagtccttcccacaaggtgctctgagagattctagatctgctgccgctcacatcgttttgattacctgagaagatgcctttggaaattcaagatagtgaggttgacatagtgattgcggcactccagcccaacctgaccactttctttgaggcatggcgaccatttttctcccgtttccacatcattgtcgtcaaagatccagacatggcagaggatcttcaaatccctgcaggttttgatctcaaggtttacaccaagtcagatattaatgggttgcttggtgcctcctcatccataaacttatctggtcactcatgccgttactttgggtatcttgtctcacgcaagaagtatgtgatttcaattgatgacaattgcctcccagcgaaggacactgctgggtcgactgttgatgttgttgcacagcacatggccaatctgaaaacacctgctacacctttctttttcaacacactctatgatccatacaggaaaggtgctgactttgtccgtggttacccattcagcctgcgcgagggggttgagtgcatgctctcgtgtggtttgtggcttcataatgctgactacgacccgatgactcatgttgtgaagagaaatcaacggaacacaacatatgtggatgctgtgatgacggttccgcttggtgccatgctgcctgtgagcgggataaatgttgcattcaaccgcgatgtgctggggcctgctatgttcccaggcctgcgtctacgaaacgaagggaagcacagatgggatacccttgaagacatatggaatggcttatgtgctaaagtagtctgcgacagcttgggatatggtgtgaagaccggactgccttatgtgatgagaagtgatgcagaagcaggtaaagctctggagagcttgaaagagtgggaaggggtaaaagtcatggatgatgttctcccattcttccagtcgctcaagctatcgaggactgcagttactgttgacgattgtgttaaggagcttgctggagttgtccgtgagaagctaggacctaagaatgcaatcttcaccaaagcagccgatgccatggtggaatggaacaatctctggaaagtgcatggtgctcagaatgcatagtttgggagtttgcatgtttcctacagagcatctaatagttgtttggagtgcgcgttttacagttctaaattttccctgtggaactcatgaagctgaaataaacaacggtcctttatgccgtgaatttggcatgaatagctgagcatctcattgtatacgcttaagaattatgtaatgtaatgcatcaaaagaacatgtgatgttttcttgcatcttgtcttgttaaacggaatctgctaagaggttggatacc

SEQ ID NO: 106030 - DNA, 2057 bp, Zea Mays
acgaaggcaaagcgtggcagaaaaacgcggggagacaagggggaaacgccgtgagaagtcgccgataggtgcgcgggtcgcggtcgtcgcctcctctgcctccctggcgcccgcttggctcggttctacgcgtatgctgcccttgcgccttgcggcaaacgcaacaacacggagcgggcgtggggagcggagcggtgagcgaggatcgagggcaacgtggcgaggcactcccgagggggagaggcgactttgcttccagttccaggaaagagtgggctataaaaaggcgctcgagatccagatctgggccgatgcgaccgccctcgctgctctccctcaccctcgacgccgcgctcctccgcatcgccaatatcgccgacctctcccacctcccagaccacctcctcatcgacctcttccgtgtaggtacctcgccgcgccctccgccacctctcgaatctgtggcccgctgctgattgatcctgtacttgtaccggtgccaaggctccgcgtgcttggattcggtttaggcacattttgcggcgtggatttagtagtttcggattgatcctggtggctggggctgggtttgtccggtctttcagagagaaccctcagtgctggtaagctgacagagaaagttctcaagttgtttctagcaaccgactgtgaggatatcatattggctgttcggttgctcaacattaagcagccactcgtaccagtccttcccacaaggtgctctgagagattctagatctgctgccgctcacatcgttttgattacctgagaagatgcctttggaaattcaagatagtgaggttgacatagtgattgcggcactccagcccaacctgaccactttctttgaggcatggcgaccatttttctcccgtttccacatcattgtcgtcaaagatccagacatggcagaggatcttcaaatccctgcaggttttgatctcaaggtttacaccaagtcagatattaatgggttgcttggtgcctcctcatccataaacttatctggtcactcatgccgttactttgggtatcttgtctcacgcaagaagtatgtgatttcaattgatgacaattgcctcccagcgaaggacactgctgggtcgactgttgatgttgttgcacagcacatggccaatctgaaaacacctgctacacctttctttttcaacacactctatgatccatacaggaaaggtgctgactttgtccgtggttacccattcagcctgcgcgagggggttgagtgcatgctctcgtgtggtttgtggcttcataatgctgactacgacccgatgactcatgttgtgaagagaaatcaacggaacacaacatatgtggatgctgtgatgacggttccgcttggtgccatgctgcctgtgagcgggataaatgttgcattcaaccgcgatgtgctggggcctgctatgttcccaggcctgcgtctacgaaacgaagggaagcacagatgggatacccttgaagacatatggaatggcttatgtgctaaagtagtctgcgacagcttgggatatggtgtgaagaccggactgccttatgtgatgagaagtgatgcagaagcaggtaaagctctggagagcttgaaagagtgggaaggggtaaaagtcatggatgatgttctcccattcttccagtcgctcaagctatcgaggactgcagttactgttgacgattgtgttaaggagcttgctggagttgtccgtgagaagctaggacctaagaatgcaatcttcaccaaagcagccgatgccatggtggaatggaacaatctctggaaagtgcatggtgctcagaatgcatagtttgggagtttgcatgtttcctacagagcatctaatagttgtttggagtgcgcgttttacagttctaaattttccctgtggaactcatgaagctgaaataaacaacggtcctttatgccgtgaatttggcatgaatagctgagcatctcattgtatacgcttaagaattatgtaatgtaatgcatcaaaagaacatgtgatgttttcttgca

SEQ ID NO: 106031 - DNA, 1863 bp, Zea Mays
gaaggcaaagcgtggcagaaaaacgcggggagacaagggggaaacgccgtgagaagtcgccgataggtgcgcgggtcgcggtcgtcgcctcctctgcctccctggcgcccgcttggctcggttctacgcgtatgctgcccttgcgccttgcggcaaacgcaacaacacggagcgggcgtggggagcggagcggtgagcgaggatcgagggcaacgtggcgaggcactcccgagggggagaggcgactttgcttccagttccaggaaagagtgggctataaaaaggcgctcgagatccagatctgggccgatgcgaccgccctcgctgctctccctcaccctcgacgccgcgctcctccgcatcgccaatatcgccgacctctcccacctcccagaccacctcctcatcgacctcttccgtagaaccctcagtgctggtaagctgacagagaaagttctcaagttgtttctagcaaccgactgtgaggatatcatattggctgttcggttgctcaacattaagcagccactcgtaccagtccttcccacaaggtgctctgagagattctagatctgctgccgctcacatcgttttgattacctgagaagatgcctttggaaattcaagatagtgaggttgacatagtgattgcggcactccagcccaacctgaccactttctttgaggcatggcgaccatttttctcccgtttccacatcattgtcgtcaaagatccagacatggcagaggatcttcaaatccctgcaggttttgatctcaaggtttacaccaagtcagatattaatgggttgcttggtgcctcctcatccataaacttatctggtcactcatgccgttactttgggtatcttgtctcacgcaagaagtatgtgatttcaattgatgacaattgcctcccagcgaaggacactgctgggtcgactgttgatgttgttgcacagcacatggccaatctgaaaacacctgctacacctttctttttcaacacactctatgatccatacaggaaaggtgctgactttgtccgtggttacccattcagcctgcgcgagggggttgagtgcatgctctcgtgtggtttgtggcttcataatgctgactacgacccgatgactcatgttgtgaagagaaatcaacggaacacaacatatgtggatgctgtgatgacggttccgcttggtgccatgctgcctgtgagcgggataaatgttgcattcaaccgcgatgtgctggggcctgctatgttcccaggcctgcgtctacgaaacgaagggaagcacagatgggatacccttgaagacatatggaatggcttatgtgctaaagtagtctgcgacagcttgggatatggtgtgaagaccggactgccttatgtgatgagaagtgatgcagaagcaggtaaagctctggagagcttgaaagagtgggaaggggtaaaagtcatggatgatgttctcccattcttccagtcgctcaagctatcgaggactgcagttactgttgacgattgtgttaaggagcttgctggagttgtccgtgagaagctaggacctaagaatgcaatcttcaccaaagcagccgatgccatggtggaatggaacaatctctggaaagtgcatggtgctcagaatgcatagtttgggagtttgcatgtttcctacagagcatctaatagttgtttggagtgcgcgttttacagttctaaattttccctgtggaactcatgaagctgaaataaacaacggtcctttatgccgtgaatttggcatgaatagctgagcatctcattgtatacgcttaagaattatgtaatgtaatgcatcaaaagaacatgtgatgttt

SEQ ID NO: 106032 - DNA, 1240 bp, Zea Mays
acaaatatatatgcatacccaatcatctgacccaacagcaagcactgcactaatagcttatgtatgtatgtatgtggctccatgcttcaattctctctctatatatgttacaattaattacctcaataataatctcctctccctccaatgctgcttggtgtgtgtggtaccatcttccatgcatgtatgttcccaacctatacatacacctactaataatcttatcttaccagctaaatatatatatgtaccagcaataacaatctcttctcaataatctcctatcttaatcactcatccatctcatatgtggcacgaagaagagatatgcgatgatatagatacgaaaggcggcggcgcggcgaacgatggacggtgcaagaacaggaattaattaaccagcggtattaattaattactggttcggttgttggacgatcgatcattgggcggagaagaggtcgacgaggctctgcatgagctgcacctgcgcgcggagggagcgcacgtagtcggcggtctcgtcgaggaggctgccgtactccatctccgcgccgccggggacgagccggcggagcgcgtcggccctggccggttccccggcctgcctcggaggcgggccccgggccgccacggccgccggagccagcggcgtcggcgccgacgtggactccccggcgctggcgcggagcagcggcggcggaggagacgccgcggcggaggcgacgcgtctccgcagcaggacggctcccctggaggacctggcagccgccctgcgcgcgcgagcctggcggagcagcgcctgcgtccaggcccggcgtgggctggcagcgcgcgccatggacgagtaggccgcgcggcggatggtgcgcgggcggcgcggcgccggggtggtgctgtggatcctggccagcgcgcggaggaagtgaaaggccagcatgcgcttcgacgacggcggcggctcgtccgaggccgggtcgctggccgcggcccggcggcggaggttagggttagggtttggcggtggttcctggtgctgatggcgcgccgccgtcctcttcctggccatgaacaggcgcggcgcggaggagggggcagacgggtggaggaaggacgaccgatcagagagagagagagggtgcggtgggaggtgggcgcgtcgcttaaaaggcaggcgggaggaggagagaggaggaagagaaagagaggaaaggagagggaaaggaacacggctctgaca

SEQ ID NO: 106033 - DNA, 1572 bp, Zea Mays
aaccgctgggattcagtgggttgctttattgcttctgattaggcttacggtcgtgctccgcagttggtgccggaggaggaggacgacttgtggcacgcgtacaacctcattgccattggtgacagcctccaggccgtcaccgtacggaaagtgctgagagaggtggcatctggaggacgtgatgccgagcgtgtgaagcttaagttagaaattgtagtcgagtctgtagactatgacaaggagggatctgttttacgtgtgcgtggaaaaaatatcactgagaatgaccatgtgaagattggccagttccacacgttagagcttgagctgaagagaccttttgttctacgaaaggaaatttgggattggttagcacttgagaccattcagcaagcatgtgatcctgctgcaagtgctgatctagcagttattctcatgcaagaaggacttgcccacctattcctcattggcaaaagcataacagcaacccgggcacgtattgaaacatcaattcctaggaagcatggccctgcaattgctggctacgagacggccctcaagaagttctttgagtatgttttgcaagcatttctgaaacacattgattttgaagttgtccagtgtactgtaattgcaagcccaggttttacgaaggaccagttccgcgattatttgtttcttgaagctgcacggcgagatttaagagtaataattgagaacaagcaacgccttgttctggcgcatgcaacatcaggttacaagcatagtttaaaggaagttttggacacaccaggtgtgatggcactgataaaagatacaaaagcagcacaggaggtccgagctctgcaggatttcttcaatatgcttactaatgagtcagctcgtgcttgttatggaccgaagcatgttgagtttgcactgcaacagtttgctatccagactcttttaataactgatactttgtttcggaacgctgacattgctacgaggcaaaggtacgtgaagttggttgaagatgtcaagaaaaatagtggcacagtacacatattttcctcgatgcatgtctcgggcgaacagttggcgcaactgacaggaatagcggctatacttcgttttcctcttcctgaactagaggacatggagctgtgatgaaaccaacctttttgcttctcgataacattctttttggttgtgatctgttagcatactacctgtatcatgtgtaacgttatggagctatttgatattgtataggcaaccctggaaaggaattctggtattttttaaggtatatcctattcgttgtaaatggttcatcgtgcgttgtttgccagttctttttctcgttaagggctagtttagaaaccctaatttctcaagggtttttcattttcccaagagaatttagttcattttctcatgggaaattggaaatctcatggaaaaatagggttgccaaactagacctaagtcttgttgttatttttcacatcctaaactatctgcatgtaaagttaccactgagcgttggagctccagacatcagaactaattttcgtgggccttcttgtt

SEQ ID NO: 106034 - DNA, 1737 bp, Zea Mays
atccataacttctcgcaattgatctagtcaccatatccgcggtaaggtagtttctaaaaagactttttcatcccctcgccgcccgccgcccgccgcgattcacccccgccaggtcgccacgcccgcagcccgccgacgcaaagccgcgcgcgaggcctctcccctgcgtacgcggcgatgaagatcgtccaccgcgacctcgttcgcaacgggcctggctccgtcaagttggtgccggaggaggaggacgacttgtggcacgcgtacaacctcattgccattggtgacagcctccaggccgtcaccgtacggaaagtgctgagagaggtggcatctggaggacgtgatgccgagcgtgtgaagcttaagttagaaattgtagtcgagtctgtagactatgacaaggagggatctgttttacgtgtgcgtggaaaaaatatcactgagaatgaccatgtgaagattggccagttccacacgttagagcttgagctgaagagaccttttgttctacgaaaggaaatttgggattggttagcacttgagaccattcagcaagcatgtgatcctgctgcaagtgctgatctagcagttattctcatgcaagaaggacttgcccacctattcctcattggcaaaagcataacagcaacccgggcacgtattgaaacatcaattcctaggaagcatggccctgcaattgctggctacgagacggccctcaagaagttctttgagtatgttttgcaagcatttctgaaacacattgattttgaagttgtccagtgtactgtaattgcaagcccaggttttacgaaggaccagttccgcgattatttgtttcttgaagctgcacggcgagatttaagagtaataattgagaacaagcaacgccttgttctggcgcatgcaacatcaggttacaagcatagtttaaaggaagttttggacacaccaggtgtgatggcactgataaaagatacaaaagcagcacaggaggtccgagctctgcaggatttcttcaatatgcttactaatgagtcagctcgtgcttgttatggaccgaagcatgttgagtttgcactgcaacagtttgctatccagactcttttaataactgatactttgtttcggaacgctgacattgctacgaggcaaaggtacgtgaagttggttgaagatgtcaagaaaaatagtggcacagtacacatattttcctcgatgcatgtctcgggcgaacagttggcgcaactgacaggaatagcggctatacttcgttttcctcttcctgaactagaggacatggagctgtgatgaaaccaacctttttgcttctcgataacattctttttggttgtgatctgttagcatactacctgtatcatgtgtaacgttatggagctatttgatattgtataggcaaccctggaaaggaattctggtattttttaaggtatatcctattcgttgtaaatggttcatcgtgcgttgtttgccagttctttttctcgttaagggctagtttagaaaccctaatttctcaagggtttttcattttcccaagagaatttagttcattttctcatgggaaattggaaatctcatggaaaaatagggttgccaaactagacctaagtcttgttgttatttttcacatcctaaactatctgcatgtaaagttaccactgagcgttggagctccagacatcagaactaattttcgtgggccttcttgtt

SEQ ID NO: 106035 - DNA, 2259 bp, Zea Mays
gacagctcgtcctgcttcgtactaccagtagtagcacgtaaaccagggcgccacgccagccggatcggatcgtcttggatgtgggcatgtggctgtggacgagacaaaagtctccgcccgtcggccgtcgcccgccaaaggtctcttcgatccggcctctccgggccacccagtcggccagtcccacacaaggatggatcgctagcgccgatgagctatactctttgctcactgtactagtcacacgattggctacacgacacgagctcagagctctcaggtttcccaacgccggctgctggccaatggcgcagcaccacggcagccactccctggaggtcggcggcgtcggcgccggcggcgtcgagctcgacgacgacggccacgccgcgcgcaccggcaacctatggacctgcttcgcgcacatcatcaccgccgtgatcggctgcggcgtgctggcgctctcgtggagcgtcgcgcagctgggctgggtgggcggccctgtcgccatgctctgcttcgccttcgtcacctacctctccgccttcctcctgtcccactgctacaggtcccctgcctccgatgatggctccctgaaacgccagaggaactacacctacatggacgccgtcaggacgcacctgggtacgcgttgctcctgcatccttgttcttgttcctatcatatctatcggctagcgtattagcctttgcacatctttccatggcgactccacttacgagagctagcaagagcaacgcgcccaggggagaagcgcacctggctctgcggcctgttccagtacctcaacatgtacgggaccgcaatcgcctacaccatcaccacggcgacctgtctcagggcgatcgtgagggccaactgctaccacagccagggccacagcgctccctgcggcgccggcggcgaccacctctacatgctgctcttcggggcggcccaggcggtgctgtccctcatacccaacttccacagcatggcctggctctccgccgtcgccgccgtcatgtccttcacctacgccaccatcggcctcggcctcggcctcgccaagaccatagaaaatggggcgatcaaaggaagcgtcgccggagttccgatgagcaccgcgccgcagaaagtctggcgagtcgcgcaggccatcggcgacatcgcgttcgcctacccgtacaccattgtcctactggagatacaggacacgctcaaatcgccgccaccagagagcgagacgatgcagaaggggaacgtgctcgcggtcctggccaccacgttcttctacctcgccgtggggtgcttcgggtacgccgccttcggcaacgctgcgccgggcaacctgctcaccggcttcggcttctacgagccgtactggctcatcgacttcgccaacgcctgcatcgtgctccacctgcttggtggctaccagatgttcagccagcagatcttcaccttcgcggaccggtccttggcggccaggttcccgaacagcgcgttcgtgaacaaatcctacgccgtgaaggtgcccggcgcgccggcgtcgtggagctacagcctcaacctgcagcggctgtgtttccggacggcgtacgtggcgagcaccacggggctggccctcctcttcccctacttcaacgaggtgctgggcgtgctgggcgccgtcgtcttctggcccctcgccatctacctccccgtcgagatgtactgcgtccagcgcggggtcctgccgtggacgcggacgtgggtcgcgcttcaggcattcagcgtcgtctgcttcgtcgtcggcaccttcgccttcgtcggctccgtcgagggagtcatccgcaagaggctcggctagttgtggtattagcgccttttctgtcgtcaaccatgtcatgaatggtggaagtgtgtaaagagagtgtactgtatctaagttttttttatttccctgtgttcgcttagccatgagcccatgaccatgatgattgatgaatatatctacccgtgcgtgtttagatccaaagtttttttgtgatgctgtgtcactgctacgtaaatgatttttgtaacacttaatttatggttgttcagggagtttttcagataatgccactcttattaaagttacagagaatacatatgcaaatgaaattatttgggtcaatcaaaaatttcatacggaatgaacaaaaaagttcaaaatttagtgatcccactgaacttgaaaatagctgatagttgattataacttgctcatggaag

SEQ ID NO: 106036 - DNA, 2171 bp, Zea Mays
gctgcttggactcgtcagagaacttgcaagacccgacagctcgtcctgcttcgtactaccagtagtagcacgtaaaccagggcgccacgccagccggatcggatcgtcttggatgtgggcatgtggctgtggacgagacaaaagtctccgcccgtcggccgtcgcccgccaaaggtctcttcgatccggcctctccgggccacccagtcggccagtcccacacaaggatggatcgctagcgccgatgagctatactctttgctcactgtactagtcacacgattggctacacgacacgagctcagagctctcaggtttcccaacgccggctgctggccaatggcgcagcaccacggcagccactccctggaggtcggcggcgtcggcgccggcggcgtcgagctcgacgacgacggccacgccgcgcgcaccggcaacctatggacctgcttcgcgcacatcatcaccgccgtgatcggctgcggcgtgctggcgctctcgtggagcgtcgcgcagctgggctgggtgggcggccctgtcgccatgctctgcttcgccttcgtcacctacctctccgccttcctcctgtcccactgctacaggtcccctgcctccgatgatggctccctgaaacgccagaggaactacacctacatggacgccgtcaggacgcacctgggggagaagcgcacctggctctgcggcctgttccagtacctcaacatgtacgggaccgcaatcgcctacaccatcaccacggcgacctgtctcagggcgatcgtgagggccaactgctaccacagccagggccacagcgctccctgcggcgccggcggcgaccacctctacatgctgctcttcggggcggcccaggcggtgctgtccctcatacccaacttccacagcatggcctggctctccgccgtcgccgccgtcatgtccttcacctacgccaccatcggcctcggcctcggcctcgccaagaccatagaaaatggggcgatcaaaggaagcgtcgccggagttccgatgagcaccgcgccgcagaaagtctggcgagtcgcgcaggccatcggcgacatcgcgttcgcctacccgtacaccattgtcctactggagatacaggacacgctcaaatcgccgccaccagagagcgagacgatgcagaaggggaacgtgctcgcggtcctggccaccacgttcttctacctcgccgtggggtgcttcgggtacgccgccttcggcaacgctgcgccgggcaacctgctcaccggcttcggcttctacgagccgtactggctcatcgacttcgccaacgcctgcatcgtgctccacctgcttggtggctaccagatgttcagccagcagatcttcaccttcgcggaccggtccttggcggccaggttcccgaacagcgcgttcgtgaacaaatcctacgccgtgaaggtgcccggcgcgccggcgtcgtggagctacagcctcaacctgcagcggctgtgtttccggacggcgtacgtggcgagcaccacggggctggccctcctcttcccctacttcaacgaggtgctgggcgtgctgggcgccgtcgtcttctggcccctcgccatctacctccccgtcgagatgtactgcgtccagcgcggggtcctgccgtggacgcggacgtgggtcgcgcttcaggcattcagcgtcgtctgcttcgtcgtcggcaccttcgccttcgtcggctccgtcgagggagtcatccgcaagaggctcggctagttgtggtattagcgccttttctgtcgtcaaccatgtcatgaatggtggaagtgtgtaaagagagtgtactgtatctaagttttttttatttccctgtgttcgcttagccatgagcccatgaccatgatgattgatgaatatatctacccgtgcgtgtttagatccaaagtttttttgtgatgctgtgtcactgctacgtaaatgatttttgtaacacttaatttatggttgttcagggagtttttcagataatgccactcttattaaagttacagagaatacatatgcaaatgaaattatttgggtcaatcaaaaatttcatacggaatgaacaaaaaagttcaaaatttagtgatcccactgaacttgaaaatagctgatagttgattataacttgctcatggaag

SEQ ID NO: 106037 - DNA, 2163 bp, Zea Mays
gctgcttggactcgtcagagaacttgcaagacccgacagctcgtcctgcttcgtactaccagtagtagcacgtaaaccagggcgccacgccagccggatcggatcgtcttggatgtgggcatgtggctgtggacgagacaaaagtctccgcccgtcggccgtcgcccgccaaaggtctcttcgatccggcctctccgggccacccagtcggccagtcccacacaaggatggatcgctagcgccgatgagctatactctttgctcactgtactagtcacacgattggctacacgacacgagctcagagctctcaggtttcccaacgccggctgctggccaatggcgcagcaccacggcagccactccctggaggtcggcggcgtcggcgccggcggcgtcgagctcgacgacgacggccacgccgcgcgcaccggcaacctatggacctgcttcgcgcacatcatcaccgccgtgatcggctgcggcgtgctggcgctctcgtggagcgtcgcgcagctgggctgggtgggcggccctgtcgccatgctctgcttcgccttcgtcacctacctctccgccttcctcctgtcccactgctacaggtcccctgcctccgatgatggctccctgaaacgccagaggaactacacctacatggacgccgtcaggacgcacctggcgcacctggctctgcggcctgttccagtacctcaacatgtacgggaccgcaatcgcctacaccatcaccacggcgacctgtctcagggcgatcgtgagggccaactgctaccacagccagggccacagcgctccctgcggcgccggcggcgaccacctctacatgctgctcttcggggcggcccaggcggtgctgtccctcatacccaacttccacagcatggcctggctctccgccgtcgccgccgtcatgtccttcacctacgccaccatcggcctcggcctcggcctcgccaagaccatagaaaatggggcgatcaaaggaagcgtcgccggagttccgatgagcaccgcgccgcagaaagtctggcgagtcgcgcaggccatcggcgacatcgcgttcgcctacccgtacaccattgtcctactggagatacaggacacgctcaaatcgccgccaccagagagcgagacgatgcagaaggggaacgtgctcgcggtcctggccaccacgttcttctacctcgccgtggggtgcttcgggtacgccgccttcggcaacgctgcgccgggcaacctgctcaccggcttcggcttctacgagccgtactggctcatcgacttcgccaacgcctgcatcgtgctccacctgcttggtggctaccagatgttcagccagcagatcttcaccttcgcggaccggtccttggcggccaggttcccgaacagcgcgttcgtgaacaaatcctacgccgtgaaggtgcccggcgcgccggcgtcgtggagctacagcctcaacctgcagcggctgtgtttccggacggcgtacgtggcgagcaccacggggctggccctcctcttcccctacttcaacgaggtgctgggcgtgctgggcgccgtcgtcttctggcccctcgccatctacctccccgtcgagatgtactgcgtccagcgcggggtcctgccgtggacgcggacgtgggtcgcgcttcaggcattcagcgtcgtctgcttcgtcgtcggcaccttcgccttcgtcggctccgtcgagggagtcatccgcaagaggctcggctagttgtggtattagcgccttttctgtcgtcaaccatgtcatgaatggtggaagtgtgtaaagagagtgtactgtatctaagttttttttatttccctgtgttcgcttagccatgagcccatgaccatgatgattgatgaatatatctacccgtgcgtgtttagatccaaagtttttttgtgatgctgtgtcactgctacgtaaatgatttttgtaacacttaatttatggttgttcagggagtttttcagataatgccactcttattaaagttacagagaatacatatgcaaatgaaattatttgggtcaatcaaaaatttcatacggaatgaacaaaaaagttcaaaatttagtgatcccactgaacttgaaaatagctgatagttgattataacttgctcatggaag

SEQ ID NO: 106038 - DNA, 2136 bp, Zea Mays
gctgcttggactcgtcagagaacttgcaagacccgacagctcgtcctgcttcgtactaccagtagtagcacgtaaaccagggcgccacgccagccggatcggatcgtcttggatgtgggcatgtggctgtggacgagacaaaagtctccgcccgtcggccgtcgcccgccaaaggtctcttcgatccggcctctccgggccacccagtcggccagtcccacacaaggatggatcgctagcgccgatgagctatactctttgctcactgtactagtcacacgattggctacacgacacgagctcagagctctcaggtttcccaacgccggctgctggccaatggcgcagcaccacggcagccactccctggaggtcggcggcgtcggcgccggcggcgtcgagctcgacgacgacggccacgccgcgcgcaccggcaacctatggacctgcttcgcgcacatcatcaccgccgtgatcggctgcggcgtgctggcgctctcgtggagcgtcgcgcagctgggctgggtgggcggccctgtcgccatgctctgcttcgccttcgtcacctacctctccgccttcctcctgtcccactgctacaggtcccctgcctccgatgatggctccctgaaacgccagaggaactacacctacatggacgccgtcaggacgcacctggtacctcaacatgtacgggaccgcaatcgcctacaccatcaccacggcgacctgtctcagggcgatcgtgagggccaactgctaccacagccagggccacagcgctccctgcggcgccggcggcgaccacctctacatgctgctcttcggggcggcccaggcggtgctgtccctcatacccaacttccacagcatggcctggctctccgccgtcgccgccgtcatgtccttcacctacgccaccatcggcctcggcctcggcctcgccaagaccatagaaaatggggcgatcaaaggaagcgtcgccggagttccgatgagcaccgcgccgcagaaagtctggcgagtcgcgcaggccatcggcgacatcgcgttcgcctacccgtacaccattgtcctactggagatacaggacacgctcaaatcgccgccaccagagagcgagacgatgcagaaggggaacgtgctcgcggtcctggccaccacgttcttctacctcgccgtggggtgcttcgggtacgccgccttcggcaacgctgcgccgggcaacctgctcaccggcttcggcttctacgagccgtactggctcatcgacttcgccaacgcctgcatcgtgctccacctgcttggtggctaccagatgttcagccagcagatcttcaccttcgcggaccggtccttggcggccaggttcccgaacagcgcgttcgtgaacaaatcctacgccgtgaaggtgcccggcgcgccggcgtcgtggagctacagcctcaacctgcagcggctgtgtttccggacggcgtacgtggcgagcaccacggggctggccctcctcttcccctacttcaacgaggtgctgggcgtgctgggcgccgtcgtcttctggcccctcgccatctacctccccgtcgagatgtactgcgtccagcgcggggtcctgccgtggacgcggacgtgggtcgcgcttcaggcattcagcgtcgtctgcttcgtcgtcggcaccttcgccttcgtcggctccgtcgagggagtcatccgcaagaggctcggctagttgtggtattagcgccttttctgtcgtcaaccatgtcatgaatggtggaagtgtgtaaagagagtgtactgtatctaagttttttttatttccctgtgttcgcttagccatgagcccatgaccatgatgattgatgaatatatctacccgtgcgtgtttagatccaaagtttttttgtgatgctgtgtcactgctacgtaaatgatttttgtaacacttaatttatggttgttcagggagtttttcagataatgccactcttattaaagttacagagaatacatatgcaaatgaaattatttgggtcaatcaaaaatttcatacggaatgaacaaaaaagttcaaaatttagtgatcccactgaacttgaaaatagctgatagttgattataacttgctcatggaag

SEQ ID NO: 106039 - DNA, 2032 bp, Zea Mays
gctgcttggactcgtcagagaacttgcaagacccgacagctcgtcctgcttcgtactaccagtagtagcacgtaaaccagggcgccacgccagccggatcggatcgtcttggatgtgggcatgtggctgtggacgagacaaaagtctccgcccgtcggccgtcgcccgccaaaggtctcttcgatccggcctctccgggccacccagtcggccagtcccacacaaggatggatcgctagcgccgatgagctatactctttgctcactgtactagtcacacgattggctacacgacacgagctcagagctctcaggtttcccaacgccggctgctggccaatggcgcagcaccacggcagccactccctggaggtcggcggcgtcggcgccggcggcgtcgagctcgacgacgacggccacgccgcgcgcaccggcaacctatggacctgcttcgcgcacatcatcaccgccgtgatcggctgcggcgtgctggcgctctcgtggagcgtcgcgcagctgggctgggtgggcggccctgtcgccatgctctgcttcgccttcgtcacctacctctccgccttcctcctgtcccactgctacaggtcccctgcctccgatgatggctccctgaaacgccagaggaactacacctacatggacgccgtcaggacgcacctggcaagagcaacgcgcccaggggagaagcgcacctggctctgcggcctgttccagtacctcaacatgtacgggaccgcaatcgcctacaccatcaccacggcgacctgtctcagggcgatcgtgagggccaactgctaccacagccagggccacagcgctccctgcggcgccggcggcgaccacctctacatgctgctcttcggggcggcccaggcggtgctgtccctcatacccaacttccacagcatggcctggctctccgccgtcgccgccgtcatgtccttcacctacgccaccatcggcctcggcctcggcctcgccaagaccatagaaaatggggcgatcaaaggaagcgtcgccggagttccgatgagcaccgcgccgcagaaagtctggcgagtcgcgcaggccatcggcgacatcgcgttcgcctacccgtacaccattgtcctactggagatacaggacacgctcaaatcgccgccaccagagagcgagacgatgcagaaggggaacgtgctcgcggtcctggccaccacgttcttctacctcgccgtggggtgcttcgggtacgccgccttcggcaacgctgcgccgggcaacctgctcaccggcttcggcttctacgagccgtactggctcatcgacttcgccaacgcctgcatcgtgctccacctgcttggtggctaccagatgttcagccagcagatcttcaccttcgcggaccggtccttggcggccaggttcccgaacagcgcgttcgtgaacaaatcctacgccgtgaaggtgcccggcgcgccggcgtcgtggagctacagcctcaacctgcagcggctgtgtttccggacggcgtacgtggcgagcaccacggggctggccctcctcttcccctacttcaacgaggtgctgggcgtgctgggcgccgtcgtcttctggcccctcgccatctacctccccgtcgagatgtactgcgtccagcgcggggtcctgccgtggacgcggacgtgggtcgcgcttcaggcattcagcgtcgtctgcttcgtcgtcggcaccttcgccttcgtcggctccgtcgagggagtcatccgcaagaggctcggctagttgtggtattagcgccttttctgtcgtcaaccatgtcatgaatggtggaagtgtgtaaagagagtgtactgtatctaagttttttttatttccctgtgttcgcttagccatgagcccatgaccatgatgattgatgaatatatctacccgtgcgtgtttagatccaaagtttttttgtgatgctgtgtcactgctacgtaaatgatttttgtaacacttaatttatggttgttcagggagtttttcagat

SEQ ID NO: 106040 - DNA, 1983 bp, Zea Mays
ctaggttcgttttgagtgtgagccgtccagctcaagattttttttagccctacttttcacaaagctgctgcactcgtttagattctctgaccctgctcccgagaactcatcgacgccgtccatgctgtcctcctctccggcgccgtcacaagagggcgccgccgttccctcctcctgggcggaagctgcgtcctcggcggcgctccggcactaccgctcactggccaagaaagggaagccgcaggggcgcgagtccacggtcctcgccgccatcctcctctctgccccgcaggactcgcacagcctcactgtgctctccatgggcaccggcaccaagtgcctcggtgcctcgatgctcagcgcacgtggggacctcgttcacgacgcgcacgctgaggtcatcgctcgccgcgcgctgctccgcctcgtctactccgagatcggccgtggcgccccgcctgattggctggttgcttccggggatgctgggagatggaggctgagggatgggcactgccttcatctttacatcacacaactcccatgtggagtcatgccagtaccaccatcgcagtctgatttgccaagaaaacagctgaacagtatgaatgtcgaaattggctttgttcaaaggaaaccagggcgtggtgatacaacatcgtccatgagctgctttgacaaaatcacccgctggagcgttgtaggaattcaaggtgcattgctgtcacatatactggaacccttgtatttgtccaccattactattggacaattacctgatggtactcctgaacggttctctattaaaaataatatcaagaaggccctggatgctcgtctgtcctctctacccaccgaattgccgcctcctttcaaaatgcagaagccaaaggtttttgaggcgcctgtcccaccaacagagtttcaacagattcctggagacgtacgcctcttgacatgcgggtactcgatttgttggaataaatccggtttgcatgaagttgtcttaggcacaactggtaggaaacaaggaacctcatcaaaggcagcacacttaccctccaccgagtcactggtctgcaagagaagactactagaagcatttttgtcccttgagcatcctttggtgaggcaactaaaatgcgaggagctatcttaccgggcacttaaggatacggctcatgaataccatcacgcgcttgagctcctcaggaaggccccattttttggctgctggcgagctaagcctacatttgttgattcgtttgcagtttcacggtgatgtctcgtgaactggtgaatgccatctccctgtttctttttgtctgttgaaaaaacatactatctccgtcccaaaatatagttctttctagcctatttttttccgatccatattaataaacgtataaatagtgtagaatgaattatattttaggaccgagggagtaggtctgatccagctttgttctgtgtgaaattgtatatgttggtggtccatgaatgaatcaaactgaacttatgcgcgcgtgctgctgtcacttgattccaagcactccctcccggcctccccgcgccagagagttcaagttctgaataatggtaggatttcaagttcttttactcaagaatcgagatgtgaaatttatcgcgcgcgtgactgcgtgagcaccgaacaactaatgcctttctgctcgctcgcttcaatttcctggacgagcctcaccgaggtccaggtcgtttttgaggttcatcggcgtcaagccgtcagccgctgccggtccatttgttctcgacggatggatcctggaatcccgcccgactcccgagactggaggacaagagactccggagaccggatcacaagcaagcaacatgttcgtttggtttggctttaatttgtaacgaattttattgtttttacaggattttgtatctatagtttacagctgactttaatctgaagcaaacagcataatacataga

SEQ ID NO: 106041 - DNA, 2015 bp, Zea Mays
ctaggttcgttttgagtgtgagccgtccagctcaagattttttttagccctacttttcacaaagctgctgcactcgtttagattctctgaccctgctcccgagaactcatcgacgccgtccatgctgtcctcctctccggcgccgtcacaagagggcgccgccgttccctcctcctgggcggaagctgcgtcctcggcggcgctccggcactaccgctcactggccaagaaagggaagccgcaggggcgcgagtccacggtcctcgccgccatcctcctctctgccccgcaggactcgcacagcctcactgtgctctccatgggcaccggcaccaagtgcctcggtgcctcgatgctcagcgcacgtggggacctcgttcacgacgcgcacgctgaggtcatcgctcgccgcgcgctgctccgcctcgtctactccgagatcggccgtggcgccccgcctgattggctggttgcttccggggatgctgggagatggaggctgagggatgggcactgccttcatctttacatcacacaactcccatttgatttggtgactttgtgtaggtggagtcatgccagtaccaccatcgcagtctgatttgccaagaaaacagctgaacagtatgaatgtcgaaattggctttgttcaaaggaaaccagggcgtggtgatacaacatcgtccatgagctgctttgacaaaatcacccgctggagcgttgtaggaattcaaggtgcattgctgtcacatatactggaacccttgtatttgtccaccattactattggacaattacctgatggtactcctgaacggttctctattaaaaataatatcaagaaggccctggatgctcgtctgtcctctctacccaccgaattgccgcctcctttcaaaatgcagaagccaaaggtttttgaggcgcctgtcccaccaacagagtttcaacagattcctggagacgtacgcctcttgacatgcgggtagtatatggtactcgatttgttggaataaatccggtttgcatgaagttgtcttaggcacaactggtaggaaacaaggaacctcatcaaaggcagcacacttaccctccaccgagtcactggtctgcaagagaagactactagaagcatttttgtcccttgagcatcctttggtgaggcaactaaaatgcgaggagctatcttaccgggcacttaaggatacggctcatgaataccatcacgcgcttgagctcctcaggaaggccccattttttggctgctggcgagctaagcctacatttgttgattcgtttgcagtttcacggtgatgtctcgtgaactggtgaatgccatctccctgtttctttttgtctgttgaaaaaacatactatctccgtcccaaaatatagttctttctagcctatttttttccgatccatattaataaacgtataaatagtgtagaatgaattatattttaggaccgagggagtaggtctgatccagctttgttctgtgtgaaattgtatatgttggtggtccatgaatgaatcaaactgaacttatgcgcgcgtgctgctgtcacttgattccaagcactccctcccggcctccccgcgccagagagttcaagttctgaataatggtaggatttcaagttcttttactcaagaatcgagatgtgaaatttatcgcgcgcgtgactgcgtgagcaccgaacaactaatgcctttctgctcgctcgcttcaatttcctggacgagcctcaccgaggtccaggtcgtttttgaggttcatcggcgtcaagccgtcagccgctgccggtccatttgttctcgacggatggatcctggaatcccgcccgactcccgagactggaggacaagagactccggagaccggatcacaagcaagcaacatgttcgtttggtttggctttaatttgtaacgaattttattgtttttacaggattttgtatctatagtttacagctgactttaatctgaagcaaacagcataatacataga

SEQ ID NO: 106042 - DNA, 898 bp, Zea Mays
ctaacgcaatcgctcgctcgctcgctcgatatttagccgtggagaggggccgagggagggagcctgctccgctctgcagcacgaacatgatgaagccatcgtgtgtactgcttctttccagccttcttgtagccactcttgcagctacttcttcgtcctctcctccgtattccgtcggcaagcacccagggtggctgctggttctaggtcgcaaaggcagagaactcggccagtcgtcagggtaccattattaccagcatcagagcaagcagcccgagctgcagggagtggctatggaggtaaagaaacccgaggaggaggcgacggcgaggcgaacggccgatcagagcggggacgccgagacagggctgatctacagcgcggactacagcagcgtggccatgcatgctgcctctccgccgacggcgaagcccaagcacaggcaccccaccagaccataggaagctgtccttatgtaagccagtcgtatgccgtccgtttcgtgtgtttcttatctcgctggattgtacgagcagaagcacccctgctgtctctgtaaaatataggccctcctgatgtgctgcttctttccttctgttgctctcgctctctgtccctgccattgctgatgagtgctatggcgatatgttgatccaaacacacaaaatgggatggcaacacaattgtacgtcgaatcgtcgttaaagtggccccaaaaaagcaccgtgaaagaaggtagctatgttaggtggcatgctgccgacacacttgcacaacgccgacaagtctactgacatattacattttaaactaaggacctgtttgacgagattataaatctatatgtagctatttggatgactagattatataaatgaagattattgatttttgagac

SEQ ID NO: 106043 - DNA, 521 bp, Zea Mays
agttcgtactcactctcatacatatcaccaagaacatgttcaactttcattccgttgtcggcacatcagcgcctgaaccatgagcctgaaggctcaatccagcactgcagggagtggctatggaggtaaagaaacccgaggaggaggcgacggcgaggcgaacggccgatcagagcggggacgccgagacagggctgatctacagcgcggactacagcagcgtggccatgcatgctgcctctccgccgacggcgaagcccaagcacaggcaccccaccagaccataggaagctgtccttatgtaagccagtcgtatgccgtccgtttcgtgtgtttcttatctcgctggattgtacgagcagaagcacccctgctgtctctgtaaaatataggccctcctgatgtgctgcttctttccttctgttgctctcgctctctgtccctgccattgctgatgagtgctatggcgatatgttgatccaaacacacaaaatgggatggcaacacaattgtacgtcgaa

SEQ ID NO: 106044 - DNA, 2422 bp, Zea Mays
catcccaacccacgaagcagcagcagcagcagcaggcagccgcctcgccacgcgcccgagcaacgccgccgagagagcaacccgcccgcccgccggtgggcagtgagggcaattcgtcttcggctggtccccgtcccgctcccgcccgccaaccccaattgctcccctcccgaggtcagctcaattcctgctgtttctcggattcgattcggttccgccgggcgcgccatctccctcgccggagatccagcagttacgagctcgccggggcccgggatcatgcctccattgctctagggtttgggcgggtaatccaattggctcgcctggcccgcggcttccatgctcgattcaggcctgccgcgccgctccctgggcggctccttgatcccgcggcggttggtgtggcgccagcggagatgagatcccctccatggccggcgagctgggaattcgggtacggcctcgcgctctgcaggaagcggcgcaagccctaatggtttgatcctacggcgtgctatccccaattcgttggtttctctactccgggtctgatatcggggtttgctgcggtggtaattgcatggacacagtaagggaggaggcatggccaatggctgcaccacagcagcggaggcggcagccgtcagctccacaacagcaacatcagaatggccgtattgatctcagggatctcaaggctcagatgttgaagcggcttggtccggatcgctcgcggagatattttggctacttgaatggctacttatcggagaggctcagcaggcaagactttgaaaagctgtgcctgcagaccctggggcaggagaacctccagctgcacaaccggctaatccgtgcaattctctacaatgcctaccagggaaagtgcccgcctcctccattggatgcagggagacctgtagggtcatcagtaaagaaggcttctcaggctgctgaagtgttgaatacttgcaatagtgatgccaagttgttacaggttcagggattgagatctgtggccacagcacaggatcatactttgaaagatagtatgaataacatgggtccaaagtgtagggtggctgctgtaaatcacaaccaagttactcacggtgcttctggatctctggagaatggtactataaatccaattgagttaaagagattgcattttcaacaatgtgaacctgtagagccaccggcaaagcatccacgtgtggaacagttgccccccaataatatgcttttgcagagaagcatgagtagcactgcagaacgttctgcagaaatattaagaagtcctgtacgagctccactaggaattccattttgttcagcaagtgtgggcggtgcaaggaaatttccacctccaccaattgttacaggtgaggatcacttcaacagctgttttgaggatggtgggctgttcagcaccgagctgctgcatagacgtatggagaaaacagcagaaacactgggtttagctggtgtcactatgcatagtgctgagcttctaaatattgctctggatgagtacatgaaaaacttgattaggtcatctgttgagttagtaggaggtagtgttcagagggatgcaaggaaagggacactaccacacaagaaccaagtttatggaaatcggattaatggtgtctggctgccaaaccatgttcatatgcaatcaggcagtggttcatcaggaactacgaatgagattggaagtaaccaattgatctccgtaagtgattttaaggtagccatgcagctaaaccctcaacatcttggggagaactggccagtccttctggagaagatatgtctatgttcttcagaggaaaatgactgacagatggcgcctttttacttcacattgaagttctgtaccaatgtgcttcttggtgcccatccgatgtacatttgagctggaagtggcaagattgcaggcacaacacagaatatgcacatatggggtcaaagcagaattctgattccacgttcagccgtcggagttgtagtagtgaaagaaagacattctttttttcctgataaatcatgcccaaataaaggaaaacgtcttccggccaagccatgcagcttaggcctcattagcacttacaaggtggatagtgttacatctaaaagtcccaacttctatgtaacatctggcataagggactgggggcagcaaaatgcaagtgttgccttgtaacttataggaaaatgttctgtaagtttctaggtcaggatgtacattattgattgcaaaatttttctaggtatcttcagtactaatttcagggatctcgaatgttaatttcatttaattcttttgtaactgtgctatgagggttatatgttagatccctacctttctaccttgacgtgcgtgagtgtctttgggattaggttggtgccccca

SEQ ID NO: 106045 - DNA, 1574 bp, Zea Mays
agaaaaaaaaaaaagaggcgccgcagcgaggtcgaggtgattattatttaggcacaaggggcgctgtccggaaattccccaaatcgacctgggctggacccagccgcgccccgtctgcctcctgcttctctctccgcttccgcttcctgcgcctccaggctccacttctccgctcggcagtcggcactggaaggacagcatgtcggtctcggcgtcgtcaccggcggcggcggcgggcgatgagaagcaggaggcggcgcccgtcaggcgctgcaagggcgtcaacgacctcgacaaggtcgttctccgcgaggtccggggcagctccgcagaggtgtacttgtatggtgggcatgtgacatcatggaaagatgagcatggagatgaattactttttgttagcaataaggctattttcaagcctccaaaagctatacgtggaggaataccaatatgctttccgcagttctccaactttgggaatctggaaccacatggatttgcaaggaataggacatggagtgttgatgatgatcctccaccatttccagtgccaacctccaatagcgcttatattgacttgatcctcaaacctactgaagatgatttgaagatctggcctcatagtttttgaataccgcctgagggttgcacttagtcctggtggtgatttgatgctaacttcacgtataagaaacactaatgcagacgggaagccattctctttcacttttgcataccacacatacttcaagatttctgatatcagtgaggtgcgagtagaaggattggaaactctggattacctagacaacttacaagatagagctcgttccactgaacaaggcgatgcaattgtttttgaatccgaactggacagaatatatctgggcacaccatcgaaaattgccattattgatcatgagaagaaaagaacatttgttgtgaggaaaggaggccttcctgatgctggtcttgtgaatgctcatctttccttttgcttgctactgaaatagattattatcattgaaataattcaagaatgaagttcacgaggtttcatatattcttcgttacagttgtttggaacccctgggataaaaaagcaaaggctatgtcagattttggggatgatgaatataaacgaatggtatgcgtggaggcggctgctattgaaaagactgtcactctgaagcctggtgaagagtggactggaaagttggaactttctgctgtgccatctagctattacagtggtcagctagaccctgaccgtgtgattcaggattccactgtcccggaggactccatcagctagtccttattctatttttgcaggtaatatttctagaactagtgtatgcgctatataaagtctgtgaattgaatcaagtaaaaatcaaccgttgtgctaacatcacattctattgtagtattaaactatgatagaccaaatacatttcttgtacatgtaccgtgtcagtactcagtacatgtatgagcaaacacaaatatgatcattgtatcagtcagttcctaataatcaaggaaaccaagttttgttgatcaacaca

SEQ ID NO: 106046 - DNA, 146 bp, Zea Mays
cgaaatcaaacacatgcttaagagacaaggcggggtggcacgattaaggttgattgctccgttattagttcaggatccacaaacactgaaacacactataaaaagttatctaaacattttaactccaccaaaataaaaaaaaagaa

SEQ ID NO: 106047 - DNA, 708 bp, Zea Mays
ttcttcagcgcagggtccgcgttccgcctgtcgatgttgcccgcgacctcctccaacctcgcccggaactccgccagcgcctcggccgccctccgctcgcgcgtccactgctccgtgtccgggcgctgccccaggtacacctccgtgcccttgagccccatcggccccgaggcgatggacatgaagccgagcgcctcggtgaccggcgtgacgctcgccaggaagtccgactccgtgacctccgccccggcgtccgggcccggcaccggccgcgtggtgatggagggcccgttcgggacgaagcccaggtagtcgtactgcccgaagctgatggacgcgtggtacgccgagctcagccagacgacggtggcgcaggtctccacgaggtcggcgacgcagtccatcgccggccaccacggcgcgtccgccaggtcgccgtgccccacgttcctgacctcgctccaccacccctgcagctcgctgtccctcgccaccgcgccgtcgtcggcgtagtagatggcgcagtagtcagccacccacttcttgatcgccgcccacatgtcgagcccgtccaccgcgtacgggtagtcctttatcgccagctccaccgtctctggcttctttggatctccttttgccagacctctgttcgtcatgtatagcatgctgttgctatggtatgtgaacgaatacatgtcatttcgtttc

SEQ ID NO: 106048 - DNA, 207 bp, Zea Mays
atggaaggtgcagccggccaaatgctcgtcccgatcctcggcatcgttgccgtggccgccgtgaccttctacaccgtcagcttcatggagatgcgagacaaatccttcgaggagctcgacgagaagtactcggacttcgacgagtcaggcgggcggcagcggcggtctcgccgcagggccgagcgcgacaggaagaagtccaaatga

SEQ ID NO: 106049 - DNA, 509 bp, Zea Mays
tattcctttctgcatgaaaacagtcctctctggaatctcaccaaacagcagcctctctatgataacccatttgttgcactggatccgaaaaccatgggctgttgttggtgccttacgagcaacttgcaggaggctttctttagcatcagtgtactccaactgaattgtcctaattttgcccaagtagaacaagtatcggtagaactgcaaccgcatgacttccaaaagatcaaaggccaaaaacacttgttgctactgctaacacattttcccatttctagcaggcagcatggacaaaccccacaattctgcagtctctgcaacgcaacaaagcatggacaagcattgcttgtatcaaatgaaccacaattgttattctcaataaaggcttaaagttcagaaatgtgaaaatggtgtgtaaacaaattacttgtattgttgttcaactttgtagatatatggagctagttccctgcagacttcacaccagtttgcataaaactcaacaa

SEQ ID NO: 106050 - DNA, 1604 bp, Zea Mays
ccaccgagctctccgctaagcgctgtccttgccgccgtcctcccctccgtcccctacgcatccatttccgtgtgctcgtgtgtgcgcgcgcgggcactcctgctcctgctccctccggcccctcctcccctcccaggctcccagctagccgcgcccgcccgcgcgacctgcacctgcacagatcgggcggccgggccgaccgatcgatcgagatatcgtgtcaacgtgccggccggggcgtgggaagatgatgaacctatcggctgccgccaacggccgcgacgagttccccccctacgtcgtgccgtccaacgcggccgctccgcccccttccctgctcccaaccatggagcagcagcaggagagcagcatccacagggagcatcatcagctgctgggctacaacctcgaggccaactcgctggccctcctgcccccgtccaacgccgccgccgcccaccaccacaccaccttcgccggcggccacagcccccacgacatcctccacttctaccctcctccttccgccgcctcgcactacctcgccgccgccggcggcaacccctacagccacttagtctccgcgcccgggaccaccttccaccagacctcgtcgtcctactacccgccggcggcggcggcgcaggccgcgcccgagtactacttccccaccctcgtcagctccgccgaggagaacatggccagcttcgccgccacgcagctcggcctcaacctcggctaccgcacctacttcccgcccagaggaggctacacgtacggccaccacccgccgcgctgccaggccgagggctgcaaggccgacctctccagcgccaagagataccaccgtcgccacaaggtgtgcgagcaccactccaaggcgcccgtcgtcgtcaccgccggtggactgcatcagaggttctgccagcagtgcagcagattccatctgctggatgagttcgacgatgctaagaagagctgcaggaaacgcctagcggaccacaaccgccgccgccggaagtcaaagccatcggatgctgatgccggagacaagaaaagggcacatgcgaacaaagcagctgctgctaaagacaaagcagagagtagcagcaagaacatggatatcggagatgggttgggcgcacagatactgggaagtgcactcttgtccaaggaacaagatcaagccatggatcttggagaggtggtgaaagaagcagtggatcccaaggggaaggcatcaatgcaacagcattacggcttccccttccattcgtcgtcagcaggatcttgcttcccccagacccaagccgtctccagtgataccacatccaatataggtcaagtgcaagagccgagcttagggttccaccatcatcagcaccaccaacacagcaacatcttgcagctcggccaggctatgtttgatctcgacttcgatcactagtcaatatgtgatgcacatgcaccctctctttctcaccccacccctccctccctctatcttgtttgtgcgcgtaatccgaatatttttcctttttaaattatctgtgttaattactgtaacgtggacataataatgatagtctatgcttgccatgcaa

SEQ ID NO: 106051 - DNA, 101 bp, Zea Mays
cgtaacttttagctttaggcagaggcaacaacgtttcatagaggagaacttatttgatgtccatttatcactatcaatctatgtatgttacacatgtttgc

SEQ ID NO: 106052 - DNA, 3384 bp, Zea Mays
gccccatctcctcccgttccactcgacgcccaccaccactctctagtctcaccgccccccgtcccgctcattggacgagacgacggacccttcctttctcgcacgggaagagtagcgaggaggcgcggcgcccgtgcggcgtatgcccgtgcctgccgtcgggctccgcctctaggactagggtccgctccagcgccagccgtccgccatgggtgggctcgaggagatcaagaacgaagccgtcgatctggagaacatccccatcgaggaggtgttcgagcagctgaaatgcacccgcgaggggctgagctccagcgagggccagcagcgtctcgagatctttggccccaacaggctcgaggagaagaaggagagcaaggtcctcaagttccttgggttcatgtggaacccgctgtcatgggtcatggagatggctgccatcatggctattgcactcgccaacggtggtggcaagcccccggactggcaggacttcgtcggtatcatcgtgctcttggttatcaactccaccatctccttcattgaggagaacaatgccggcaacgccgccgccgcactcatggccaaccttgctcccaaaaccaaggttctgagagatggccgatggggcgagcaagaggctgcaatcttggttcctggtgacatcatcagcatcaagcttggcgatatcgtccctgccgacgctcgtctcctcgagggtgatgcactcaaggttgaccagtctgcgcttactggagaatccctcccggttaccaagggcccaggggacgaagtcttctcgggttccacttgtaagcagggtgagatcgaggccgtggtcattgccaccggagtgcacaccttcttcggcaaggccgctcatcttgtggacagcaccaaccaggtcggacacttccagcaggtgctgacagcaatcggtaacttctgcatctgctccattggggtcggcatcctcgtcgagatcatcgtcatgttcccaatccagcaccggaagtaccgcagcggaatcgagaacctgttggtcctcttgatcggtggtatcccaatcgccatgcctaccgtgctttcagttaccatggccattggttcgcacaagctgtcacagcagggtgccatcactaagaggatgactgccattgaggagatggctggtatggacgtgctttgcagtgacaaaaccggcacactcaccctcaacaagcttagcgtcgataagaacctcgtcgaggtgttctgcaaaggcgtcgacaaagaccatgtgttgctgttggctgcaagggcttcaaggactgagaaccaggacgctatcgatgccgccatggttggcatgcttgctgatcctaaggaggccagggctggtataagggaaatccacttcttgcccttcaaccctgttgataagaggactgctctgacgtacattgatgccgatggcaactggcaccgtgtcagcaagggtgctcctgaacagattcttgacctgtgccactgcaaggaggatctgaggcggaaggtgcactctattatcgacaagtatgccgagcgtggtcttcgttcgcttgctgttgccagacaggaagtacctgagaaaaacaaggagtcccctggtggaccatggcagttcgttggtctgttgcccctgtttgatccgcctaggcatgacagcgctgagacaattcgcaaggctcttgttcttggtgttaacgtcaagatgatcacgggtgatcagcttgctattggtaaggagactggaaggaggcttggcatgggtaccaacatgtatccatcctctgcgctgctcggccaaaacaaggatgctacgcttgaagcgcttcctgtagatgagctcattgagaaggccgatggttttgccggagtcttccctgaacacaagtacgagatcgtgaagagactgcaggagaagaagcacatcgttggtatgactggagatggtgtcaacgatgccccggctcttaagaaggctgacatcggtattgctgttgcggatgctactgacgctgcgaggagtgcttccgatattgtccttactgagccaggtcttagcgtcattatcagcgccgtcctcaccagcagatgcatcttccagaggatgaagaactacaccatctatgcagtttccatcacaatccgtatagtgctcggatttatgctcattgcgttgatctggcaatacgatttctctcccttcatggttcttatcattgccattctcaatgacggtactatcatgaccatctctaaggacagagttaagccatctccgttgcccgacagttggaagctgaaggagatctttgctacgggcatcgtgcttggaagctaccttgctctgatgactgtcattttcttctgggctatgcacaagaccgacttcttctcggacaaattcggtgtgaggtcgatcagggacagcgagcatgagatgatgtccgccctgtacctccaagtcagtatcgtgagccaggctctgatcttcgtcacccgttcccgtagctggtccttcgtggagcgccctggtctgctcctggtcaccgcgttcctgctcgctcaacttgttgccaccttcctcgctgtctacgccaactggggcttcgccaggatcaagggtatcggctggggctgggcaggtgtggtctggctctacagcatcgtcttctacttccccctggacctgctcaagttcttcatccgcttcgtgctcagcggcagggcatgggacaacctcctcgagaacaagaccgccttcaccaccaagaaggactacgggcgggaagagagggaggcgcagtgggccaccgcgcagaggacgctgcacgggctccagccgccggaggcttcctccaacacgctgttcaacgacaagagcagctaccgcgagctgtccgagatcgccgagcaggccaagagacgagctgagatcgcgaggctgagggagctcaacaccctcaagggccacgtggagtcggtggtcaagctcaagggcctggacatcgacaccatccagcagaactacacggtgtgagagcccctctgctgcgatgtcgacgacaacacctttgctgcccgacgggagccatctgattacagataaaaattttcctagctgtaaagctctctataccaccagatactgccatatgatggtatggttgggtacccgtctttctagggagtttcttttctctctctcttttcttattgttatgtttttcaatagtggagtgtgcgcgtgttgtaatcgtttttacctgcgttttcctctaactagccggtgatctcgcgggaagcgaggtgaagaaataatgcaactaaaattctctgccaaaagcattgttccttctc

SEQ ID NO: 106053 - DNA, 664 bp, Zea Mays
gaccagcacagtcatttaaaatctggttcagaccagatctctagttacaactacggcaatagagagaaagaagagcattgccctattttattgtttttctcggttaatggaagtggccaattctgtggcgtggctaagatgattggacctgtcgatttcgacagaagtgttaattactggcagcaggataagtggagtggtcagttcccagtgaagtggcacataattaatgatgtatcgaacaaccttctgcgacacatcattcttgagaacaatgacaataagcctgtcacaaatagcagggacacccaggaggtgaagctggaacagggcctccagatgttaacaatcgagccatgaggctgagacaacaattgtggaagatttcgacttctatgagcagcgggagaaagccttgcaggagaacagacgtcaacagcatgctgccagcaccgatacccagaaactggtggatatcaaggctcaagatgttgtggccgacatatcagatgcatttgccaaggccgtccggttgaagaatactgagaactgtgggacaacgcccaaaactgagggtgcttcagctgaaaagggatccgctgccacaaccaaggttgaaggaagagcaaacctgaacacaggccctatggaggaatcgcggcgg

SEQ ID NO: 106054 - DNA, 1041 bp, Zea Mays
gggaggcgagtatgcaaaatcggcagaagttctggccacacgactggaactgtgatggcttatgcccttgagtacaatgacgagaaaggaataagcttcttcactgacctccttgtcgtcggtgaggaccgccaaacatttgatctagaaggtgatagtggaagcctcattatcctgactggccaggacagtgagaagccgcgtcccatcgggataatatggggtgccacagcaaaccgtgggaggctaaagcttaggtgtgaccatggccctcaaaattggaccagtggagttgatcttggccgccttctggatcgtcttgaacttgatcttatcataaccagcgaatcactcaaagatgacctgcagcagcaaaggcacgcgttggtggctgctgctaattctgctgctgaggagttgtcgacagcagcagctcccgtcctagaagaggtgtagaagatcttcgagcctctggggatcaagattgagcagctgcgtcggcacgacatttcggcctctgaaggggaggaggcatctgggatcaatgtggaagagcgctagttcatctcaaactttgtgggcaggtcccctgtgcgtgatgacaagggtgctccaaggcaaattgcgaacctgaacaatccgtcagtggaagagctcgccatgttgctgcacctaggcgaccagtagcccaagcggcttcgcagacacagaatccgaccttgactggaaacagtgaagcgctcatttcactgtgtctacatcgaagagtcacaagtagtccgaagaaggtcacctgtagttcagcaaactgaacctgcatcagtagcttagaccagcagcttcctggcacaaacaatataatgaactatgttgaaacttgattcagcacttacatgatttgggtggtattcccttcagttttgttgtgctcgtgaagactttaatatgtacaatgctgagtccccgtatcaaaacaatgcaggtagtgataaaatggtattgatcaccttctcttttctaccattatcggtggagttgtat

SEQ ID NO: 106055 - DNA, 692 bp, Zea Mays
cagaatccataccaaatgatgcgggccccccaacccagaacaaaaagaacgggtcgacgaccaagaaaacattagtaaacggtctcgtggaccaatcaaatgccaactccgggctagaatcttcaggaaacgataaccctagctacaccaactcgagcagtgctgtgccacccgcaagcacccaaccagtcgagtctgcagccgctgctgtagacgttgattcggtcgagaaaggcccaggtacgacaccagagcaaccggcgaagcgaagggcacccaacgttcgacgaggacagagaagggtgctgcgaagcgcaacgagagaaggaagagcgacgtaggggatattgtgttatagcgaattaaagggggcaacacatgatccctagctaggttaactagagctatagcaatgactggccgtttccacgtacgagatgcgtagtgtgcatcaaactgtatccatgttgtattatcgtaggagtcgtaggccttacagtgaccacgcgtactggttagagttggtcgttcaggaccagtagctgcttgatttgggtttcggtgtcaggatttggttaggtcctgtgtgtagtttgcgcagtcggaaagagactgttggttgtattgcaggttgcaagcagactgtgttgtagcgaccaggtagtaaatccagcgagagctgctcctctctc

SEQ ID NO: 106056 - DNA, 1576 bp, Zea Mays
ctgcctcacgcttcctgttcgaactcttcgtcgcctcacactggtgctcctcctctccccatcgctccgccactcccatggcgtccctcttcggggctggccgccggcgatcaccggaggacgacggcgaggacgatagatccggcagagggaggaccaagcgcttccgcctctccccggaggaggacgcagcgtcgccggcggaggcggggcccggcgcggcgacggagaccggctggctctccggcttcgtctacggagcgaagagggtcatttcttccgttttactgttctcctcgcccgaggagaccggctcgggggaggacgaggaagaggagaaggacgacgacgacgacgaagagggcatccacttgaatgaacatgaagctactcatgacactcatggagcaatagttccttatagcgagccaaagcttactattgagcaaatggttatgaaggaaacattctcaagggatgaatgtgataggatggtagagctaataaaatcaagagttagagattctacttttcctgaagcccatgagtatgtaaagccagaagaaatccctagtaggaatgcaggcattacacatgacttcacaggaacatggcgctccttgagccgtgatcggaatgtccctgaatcagttccactctctagtatgagaacaagacctggtagtttttctcaaggctctccactccaagcatcacctgagctatgcactgcagcagttacggaagcaaaaaaatggttggaagagaaaaggcagggactgggcttcaagcctgaagacaatggaccatgcacactaaatactgatatacttagttctgtaactacaaaggaggactacctttccagcttttggacaaaattggaggaatcacaaagagctcgtattggatcatctggaggttctgctgatgctcctaaattctggaattatggttctaattccaggttatttgagaatgacacctctatattttcattgggcactgatgaaaaagttggagatcctaccaaaatctataatgggtctgggaaatttgcagcaacagaaccagttggtggatgctgcttacctattacacccactgaagatagaactgatggtattactgagcctgtggaccttgcaaggaacaacgggaatgcaccccaagaaaaccaggttgcatctgaaattctccctgataaagttccagagggtaacgatgtgtcttccactggaattactaaggacactactggccatagtggagatgttaaagctcccacttcagaaccacatttaggggaaacacgtatcaactcagcatcagtatctacatccaaacggacccttagattatccagctgagagcagggagcgattggccacatatcatggacaaccttgcctgcaggctcaggaaaggcataattgctgatgttagccagtaaatcatgtcttcaattggaatgccactacacagacaagtttgagacgatttatgttgaaaaaaaaactacaactcctggttccaggtttatatgggttttacaaccatcatgaggcttattgat

SEQ ID NO: 106057 - DNA, 651 bp, Zea Mays
gcagctccatcttccatcacacaaacatttcaacatctcctaaagcagcatcggctaataccaccgactcttgctcacacagctcgttctctgcagctgccgcacatagctagtgaacgaccatggcgtcccaggccatcgagagccaccgtgccggtgctgaggtcgtcaccggaggagacgccatctgcaggaagaagtcaatcgagctgctggaggagctcggcctccccaagggcttcctgccccttgaggacatccaggagttcgggtacaaccgcgagacagggtttatgtggctggtgcaggggaagaagaaggtggagcacaccttcaaaaagatcaagcagaccgtgtcgtacgccgctgaggtgacggcattcgccgagaagggcaagctgagaaagatcaccggcgtgaagacgaaggagctgatgttctggctcagcgtcgtcgaggtgtacgtccccgaggcctcgctagagaaggttaccttcaagactggcactggcctatccgacaccttcgatgcctctgcctttgcgctgggagagtaattagcagtcataaaaatggttggcttcaaaagacatgcataatctatcttttgtatttgtaaaattttcatatatattgagatgagtttgtggt

SEQ ID NO: 106058 - DNA, 1632 bp, Zea Mays
cagctccaccatccaggcggtctctcgtgacctcaacaatttaacccagcgggcagcgcagttgacgctcgccagcgagcacagaggacgttagaaagaggatcgaacacggtgagagtatctagttatccacagagattccaatcaagcttacggcccgggaagcgtcgtagacatggggaatgcactcgcaatcataaccacaatcatcgtgagcaagaggatgaagaagaaaatcataaaaaaggtcttggaggagatcgaaaaaaagaaccgcgagacgcaagccagcaacaacgccgtggaagatgcggtgatcgaggtcgggccagtcgagacgttcctgaatcagatcctgaacgagaagccgatgcgtttcagctccgagcaactggcggcctgcacccggaactactcgtcggagctgggatccggcggctacggcacggtctacaagggtgagctcccgaacggcctgctggtggccgtgaaggtgctcaaggtgtccatgaacaagaaggtgcaggaggcgttcatggcggagatcggcactataggccggacgtaccacgtgcacctcgtccgcctctacggcttctgcttcgacgcgaacaccaaggcactagtctacgagtatttggagaaggggtcgctggagaagtacctttactacggcgacgtggagtgcagcacgagcacgggcaaaaggcttgagtggggaacgctgcacggcatcgccgtcggcacggcgaaggggatcaggtacctgcacgaggagtgccagcagcggatcgtgcactacgacatcaagccggccaacatcctgctcacggccgatgacaccccgaaggtggccgacttcgggctggcacgactgggcgagcgcgaggacacgcacatgtcgctgaccggcggcggccgcgggacgcccgggtacgcggcgccggagctgtggatggcgctgccggcgtcggagaagtgcgacgtgtacagcttcgggatggtgctgttcgagatcctggggcagcgcaggaactacgacccctgccggggcgagagcagagagtggttcccgagatgggtgtgggagaggtacgagcagggtgagattgagtacgtcgtgtcgtgcgatgggatcggggaggcggacatggagaaggcagagatcatgtgcaaggtggcgctgtggtgcgtgcagttccagccggcggcgcggccgacgatgagcagcgtggtgcggatgctggagggggagatgccgattgtcccgcctgtgaacccattccactacgtcatggacagcagcagtggctcaactagctcggggctgtggagtgacacataccaaagtagcagagagaccattggcattgccatagacagtgagctatcggttagccctattgccaagtcgacttgattgtaagatgatgatcggactcatatgttgatgttgatgaaatcctgtactgtttgcttattataaacaaaaaaaggctgaggtttgtaaattagcatcatgcataagaatcaaagatatgcgagttgagtggattagtgtggtgtggcacatgtaggctatccctggctaataagctaagtaccgaaagatagagggcttgtttgacaata

SEQ ID NO: 106059 - DNA, 1578 bp, Zea Mays
cactgaatcagctagactgctctctcatcagctcaacgatttaggcatttagccctgcgggcagcagttgcgagcaaaggccaaagaacacggagaggctaaggctatccacacccacacagagtctaatcaagcttacagcccagaagcgtcacagacatggggaacgcagcagttgcaatcatatcttcagtctcggcaactgcgacggtagtagtaatgatcgccctcatcagaaggtgccgcgtcgtgaggaagaagataaagaagaaaatcgtaaagaaagtcttggaggagatcgagcggaagaaccgcgtgggggcagcctgcgacgccttggaagacgtggtgatcgagatcggtcccgtggagaagttcctcaacgagatcctgaacgagaagccgatgcgtttcagctccgagcagctggcggcctgcaccaagaactactcgtcggagctggggtccggcggctacggcgtggtctacaagggtgagctgcccaacggcctgctggtggccgtgaaggtgctcaaggtgtccatgaacaagaaggtgcaggaggcgttcatggcggagatcggcaccatcgggcggacgtaccacgtgcacctcgtccgcctctacggcttctgcttcgacgcggacaccaaggcgctggtgtacgagttcctggagaaggggtcgctcgagaagtacctctactgtgacgagggcagcacggccacgcggctggagtgggcaacgctgcacggcatcgccgtcggcacggcgaaggggatcaggtacctgcacgaggagtgccagcagcggatcgtgcactacgacatcaagccggccaacatcctgctcacggccgactacaccccgaaggtggccgacttcgggctggcacggctgggcgagcgcgagaacacgcacatgtcactgaccggcggcggccgtgggacgcccgggtacgcggcgccggagctgtggatggcgctgccggcttcggagaagtgcgacgtgtacagctttggaatggtgttgttcgagatcctagggcggcgccggaactacgacccctgccagggcgagagcaaggagtggttcccgagatgggtctgggagaggtacgcgcagggtgagatcgaggacgtcgtggcctgcgacgggatcgttggagacgcggacagagagaaggcggagatgatgtgcaaggtggcgctgtggtgcgtgcagttccagccgtcggcgcgaccgacgatgagcagcgtggtgcggatgctggagggggagatggccatcgtcccgcccgtgaaccccttccactacgtcatggaaagcagcagtgcctcgactagctcggggttgtggagcggcacataccagagcagcagagacaccactgccagagaaagtgagctgtcggctagcccagctgccaagtcgactgacgccatgattgaagatgttgagcgggcttatgcgtcagtgttggcgaaacagagcttgtagtcttgtacacattaattattgagtaaaatgcatccgcgacggtgggataattgactttccaaattagaaaaacagaaa

SEQ ID NO: 106060 - DNA, 1918 bp, Zea Mays
atcaccattcaccactgaatcagctagactgctctctcatcagctcaacgatttaggcatttagccctgcgggcagcagttgcgagcaaaggccaaagaacacggagaggctaaggctatccacacccacacaggttagctttacttcttccgctagctgatttcctctgcgtttgaagctcttgttgctgttgccggtcagggtattcgggctactcgccttgttaattcagtcaggagatagatagtaacctcatgcagtcatgctcgtgcgcgtttcttctgtagatcgatggaatgatcagtaacttttatcgattcagagattttgttcgggtcgattcctcctccatgctgtttgcattaggtatctcaggaagaaaatatgtttccttttttttccctgaaggattgggattgcaagctcgttcctgattttgactgtgctgttcatccaactaacttgcttatgtgacgcatgccatggcgcagagtctaatcaagcttacagcccagaagcgtcacagacatggggaacgcagcagttgcaatcatatcttcagtctcggcaactgcgacggtagtagtaatgatcgccctcatcagaaggtgccgcgtcgtgaggaagaagataaagaagaaaatcgtaaagaaagtcttggaggagatcgagcggaagaaccgcgtgggggcagcctgcgacgccttggaagacgtggtgatcgagatcggtcccgtggagaagttcctcaacgagatcctgaacgagaagccgatgcgtttcagctccgagcagctggcggcctgcaccaagaactactcgtcggagctggggtccggcggctacggcgtggtctacaagggtgagctgcccaacggcctgctggtggccgtgaaggtgctcaaggtgtccatgaacaagaaggtgcaggaggcgttcatggcggagatcggcaccatcgggcggacgtaccacgtgcacctcgtccgcctctacggcttctgcttcgacgcggacaccaaggcgctggtgtacgagttcctggagaaggggtcgctcgagaagtacctctactgtgacgagggcagcacggccacgcggctggagtgggcaacgctgcacggcatcgccgtcggcacggcgaaggggatcaggtacctgcacgaggagtgccagcagcggatcgtgcactacgacatcaagccggccaacatcctgctcacggccgactacaccccgaaggtggccgacttcgggctggcacggctgggcgagcgcgagaacacgcacatgtcactgaccggcggcggccgtgggacgcccgggtacgcggcgccggagctgtggatggcgctgccggcttcggagaagtgcgacgtgtacagctttggaatggtgttgttcgagatcctagggcggcgccggaactacgacccctgccagggcgagagcaaggagtggttcccgagatgggtctgggagaggtacgcgcagggtgagatcgaggacgtcgtggcctgcgacgggatcgttggagacgcggacagagagaaggcggagatgatgtgcaaggtggcgctgtggtgcgtgcagttccagccgtcggcgcgaccgacgatgagcagcgtggtgcggatgctggagggggagatggccatcgtcccgcccgtgaaccccttccactacgtcatggaaagcagcagtgcctcgactagctcggggttgtggagcggcacataccagagcagcagagacaccactgccagagaaagtgagctgtcggctagcccagctgccaagtcgactgacgccatgattgaagatgttgagcgggcttatgcgtcagtgttggcgaaacagagcttgtagtcttgtacacattaattattgagtaaaatgcatccgcgacggtgggat

SEQ ID NO: 106061 - DNA, 1360 bp, Zea Mays
gcggtactacacagtttcatcacatagttgctggcggctggccggcctctttctctttctcgtttctgccccctctgcttgcccccctttcatctcaggcgtcgaagagagagagagagagagagaggagttgcaagttggtgagatggatctgttggagcggaatattaagacggagacggaggagacgcgcaaggaacaggagcgtaaggaggaggaggcggaggcggaggcggaggcgggggagaggaagacccaggagccgccgcagcaaggccagggcctcagcctctcactcgccaacggcagtggcaggtctggaatgttgccgatgtcgaacgtgtccgctaatccttcacagcttacaattttctatggcggatcagtatgtgtgtatgactcagtgccaccggaaaaggctcaagcaatcatgcttatagctgcagctgcagcggcagcggcagctaccaaaagcagtgctgcccctactgttaagcctccaatggtgcctgcagccactgttgccccagcagctgtcgtttctcctgtgcttacacggtctccatcactgcagagcacttctgtagcaactgggcaacctcaggttgttgctgaacctagctcgatatgcaaacttcaggctgatctccccattgccaggaggcactctcttcagcgtttccttgagaaacgccgtgacagggtcgtgagcaaagctccatacagcaccgccaagtcgtccgatggcatggagtcaccgaggattgaggtgacagcggagggcaaggcccagtaacttgaaaggtccccgcggagtcccatcggtgaaggctgacgttgtgggaaggggcagggacgcgctgttgttgccttatgttatgtggcggcggcagcgtggaaccgcactaataatgtggaccggaacctctgttaccgtcgtttgtgctgtcgcgtgctaggtttatgctgaagtggattcctttactccgcacaccgaactgtgtctgttgtacatcacgccgtgacgccggtggtctcgtctgtctgacttcgttacatggatcgtctagtagtaacggaatgcagtaccacgtgtggacatgtgtttagtgtgaaagatgatggggctttgcttgcttgtttccactaccatttcccattttggcacttaacgtttgttcttctcttcgctaccttgttctcagctcaaatggtcccacgcagatgcatgtgtagggaggttgaaaatgatagaaatacgctcagatcaccttcgttccttgcttctcttgccgtttctgttggaccaaaaataaaataaaatttcgatgtcgtcccacgcagatgcatgcggaacccc

SEQ ID NO: 106062 - DNA, 1291 bp, Zea Mays
gcggtactacacagtttcatcacatagttgctggcggctggccggcctctttctctttctcgtttctgccccctctgcttgcccccctttcatctcaggcgtcgaagagagagagagagagagagaggagttgcaagttggtgagatggatctgttggagcggaatattaagacggagacggaggagacgcgcaaggaacaggagcgtaaggaggaggaggcggaggcggaggcggaggcgggggagaggaagacccaggagccgccgcagcaaggccagggcctcagcctctcactcgccaacggcagtggcaggtctggaatgttgccgatgtcgaacgtgtccgctaatccttcacagcttacaattttctatggcggatcagtatgtgtgtatgactcagtgccaccggaaaaggctcaagcaatcatgcttatagctgcagctgcagcggcagcggcagctaccaaaagcagtgctgcccctactgttaagcctccaatgagcacttctgtagcaactgggcaacctcaggttgttgctgaacctagctcgatatgcaaacttcaggctgatctccccattgccaggaggcactctcttcagcgtttccttgagaaacgccgtgacagggtcgtgagcaaagctccatacagcaccgccaagtcgtccgatggcatggagtcaccgaggattgaggtgacagcggagggcaaggcccagtaacttgaaaggtccccgcggagtcccatcggtgaaggctgacgttgtgggaaggggcagggacgcgctgttgttgccttatgttatgtggcggcggcagcgtggaaccgcactaataatgtggaccggaacctctgttaccgtcgtttgtgctgtcgcgtgctaggtttatgctgaagtggattcctttactccgcacaccgaactgtgtctgttgtacatcacgccgtgacgccggtggtctcgtctgtctgacttcgttacatggatcgtctagtagtaacggaatgcagtaccacgtgtggacatgtgtttagtgtgaaagatgatggggctttgcttgcttgtttccactaccatttcccattttggcacttaacgtttgttcttctcttcgctaccttgttctcagctcaaatggtcccacgcagatgcatgtgtagggaggttgaaaatgatagaaatacgctcagatcaccttcgttccttgcttctcttgccgtttctgttggaccaaaaataaaataaaatttcgatgtcgtcccacgcagatgcatgcggaacccc

SEQ ID NO: 106063 - DNA, 747 bp, Zea Mays
atgtcaccatttgcttgttggtggtctacccaacaaagaaaacttgcatcagcaaatgcttctcaaataattcagtcactccatgcaggttttgtcccagtaagttgttgtagcaaaggttttgaaccgctattccttcaaaatttcatatttatcaaaaatagggcctggtgcagtggtagtctctccacttgctgtttggagatccttgaaaaattaagcaagggtaaggatgtagaaaagttctcttccccataccctttcttctgtgggagcttttggcactgggtacgcacatctgaagttgttggcatgagtgatatagttactcaccccatatttgacagcatatggtgctactggaacatgtatcatattgttattttttatgcatgcactattttggtactcgtgatagtgcttttctatattgcacattgaacgctaaaacaagtcccatatgaattatttagtattaattattataagcaagcattagataagttccatgcgctctctgatttgcagctggaacctaagcatgatcagaaattaatataaacttttgcttatagcataagacccttgtttcttgcaggttttgcacggtgatgcagttcttgatgaattattggtgaattttcaaatcaaagcttgctgcgttgttgtttaggttttatggactatgaagtcaatttattttattaaaaataaaattgatcttatctttaaatgaccaggactgta

SEQ ID NO: 106064 - DNA, 1233 bp, Zea Mays
aaaggagcccttagtgtgttcatgtttttaagttagtaagatcatgtggttataatcatgctaatctgacgaaacagtggacgaccttagcgtctgtgccggcagtattacagttctcagaggtgctttatatgggtttcctttttttagtataagatggtgtagcagtctgatatggccatacttggggtctgccgtctgtgtgcctaaaccctttgttaacttggggcctgcgtgccaaaacctgttgggagcactgcttgttgaccggaatatatgaactacatctgatgatgtttatggtgatgcattcggactggggtttgctgccccaaactctacagaaatggagcacaagttcaggtaattgacatgccccagttgctaaattagtgaccatgatgattgattggcaactattaggtatcgcagcggacgaagccgacgatgagggcgaggcccgccgcaacccccaacaccgccgcactaccctggatcagtttcaacgatgcagtaaaagaaatgacgaaagaatcctagaagaacatcaccacgaactgacccagttcgagatcctcgcacacaggacgtgctgtgtcaaaaccgtcccatccaggcttgatcacgcacgcgtcctactgcgatgacggtgcctattgatgcataccccgtgccaaccgaccaaattgcccagatacaccagctccgtcttcaccgcggcgggcgggagcatctccgcttccggctcccgcgcctgttgctccttggcagcaaatccgctgcgttcaccataggcgcatagtactcaaacggccggggcggcggcacggagaagaagcccccacgcggcggcgggggaggcgtggcgaacatgcggatcacctgcggcggaggcggcagcacaaccgccggcgtcggtggtggcgggccccgcggcacgaactccggcgcctgcgcgttgaggcgactggaagagccggtcctgggcaagcccatgggccgctcggaagccggctcagtgaaccagcctgcggggatctgattagtgggcacatccatctgcggcatctaggctgggacttgggtaaacaaacggagcaggagcgacaagataacgaccgctactgctgctagctctcgttgtaggcgcgcgggtggaagctccctagcagcagcggcgtcggttaggggtacaagggcttcagtagtggcggagatggggagtttgtgctc

SEQ ID NO: 106065 - DNA, 345 bp, Zea Mays
atggcacatgtttgcaccaaaagttcaactcagagtcagagtttacagtttacatctagcaaatatgtgttagcagttgcccaacagcgaccgcttgctcagatccgcgcgcaggacacttggacgagccgcgagcggctgggcggggcggcggctggacctagactgggcgagcggcggcggcagcggcagcggctaggcgagcgacggcgggcaggcagcggctctgcggctgggcctgggcgagcgacggtgggcactgggcaggcagcggctgccggctgggcgagcggtggccggtgggcaggcagcggctgggcgagcggctgccggctggacgagtag

SEQ ID NO: 106066 - DNA, 1107 bp, Zea Mays
agcagaagcgatgtggcgcatgtaggtttcgtgtaccctttttacagatgctatttctgttctatcacaaaagaggtcagttggaaaaaaaaaaccttttctctggtcgatcagctgtgtagctagaacacaagaacagttattagctacacgcgatcgaggcccgcctgatggaaactgctgcatgcttgtgagtaggggactgccacaacaccaaaggggagaagaacatgtgcgtggtcggagccatcaacaactacacggcggcgctgaaagactcatcaagtccatttgatccgacggagagcttgatgttcctggcgcacttcgtcggcgacgtccaccagcctctccactgcggccacaccgacgacctcggcggcaacaccatcgtcgtccactggtaccgaaggaagaccaacctgcaccacgtctgggacgtgaacgtcatcgagacggccatgaaggacttctacggcaacgaccagagcaccatgatacaggccatccagcagaacatcacggaggagtgggctgatgaggagaagaagtgggaggcctgccgtagccggacaaagacctgtgctgacaagtacgctgcagagagcgcgaagctggcctgcacggcgtacgagggtgtcgaccaggactccaccttggaagatgactacttcttcgccgcgctgccggtggttcagaagaggatcgcgcaaggaggcgtcaggctggccgcgatcctcaacaggatatttggtgggaacagcagatcaggcttcagagcagttgattgatcgatccataccagtagtagatatcaaacgattggacatgtggaggagtgggtggggaggggcagacatgatctgccatctgaattagaataataagaggtatcttgttgccgtctggcaatattgtaacttcagtcttcagtagccactagctcacgaattttattatttcagaatcgaagcacttgtacgtactgtgcaatagaatagatgacgcggtcacacattcgtattcatatatgttcgcgtatctttcagatcgacgtgatgagaaatgtcttagaaggatatttgaaggattcacattcatctgcaa

SEQ ID NO: 106067 - DNA, 1274 bp, Zea Mays
ggtgtataaatagaggaacagagcagtagcatcaagagaccaggctggtggttgaggtgagaagctagaggagctagagcgagagagtcccatcgcaacacacaaagggaagaggaagaggaaggcgaggacgatgggcttgctcctgctgctccacgtcctcctcgtcgcggcggcggcgacagctcctgcagccgacgcatggggcaaggaggggcactacatggtgtgcaagatcgctgagagctttctgacgaaagaggcatcgacggcggtgaaggagctgctgccggggtgggccggcggcgagctcgcggagacgtgctcttgggcggacacgcagaggttccggtaccgctggtccagcccgctgcacttcgccgacacgccaggggactgcgagttcgactacgcccgggactgccacaacaccaaaggggagaagaacatgtgcgtggtcggagccatcaacaactacacggcggcgctgaaagactcatcaagtccatttgatccgacggagagcttgatgttcctggcgcacttcgtcggcgacgtccaccagcctctccactgcggccacaccgacgacctcggcggcaacaccatcgtcgtccactggtaccgaaggaagaccaacctgcaccacgtctgggacgtgaacgtcatcgagacggccatgaaggacttctacggcaacgaccagagcaccatgatacaggccatccagcagaacatcacggaggagtgggctgatgaggagaagaagtgggaggcctgccgtagccggacaaagacctgtgctgacaagtacgctgcagagagcgcgaagctggcctgcacggcgtacgagggtgtcgaccaggactccaccttggaagatgactacttcttcgccgcgctgccggtggttcagaagaggatcgcgcaaggaggcgtcaggctggccgcgatcctcaacaggatatttggtgggaacagcagatcaggcttcagagcagttgattgatcgatccataccagtagtagatatcaaacgattggacatgtggaggagtgggtggggaggggcagacatgatctgccatctgaattagaataataagaggtatcttgttgccgtctggcaatattgtaacttcagtcttcagtagccactagctcacgaattttattatttcagaatcgaagcacttgtacgtactgtgcaatagaatagatgacgcggtcacacattcgtattcatatatgttcgcgtatctttcagatcgacg

SEQ ID NO: 106068 - DNA, 1400 bp, Zea Mays
aatttgagaaacagacatcgctaaatcggtaataaatcaaaagctgagagatgtcgaccgccgtctcgtcccgccgactggcgactatcggcgtgatcggagccctcacgcttcagttcgtcgcgtcagcgacggcggggccgatagccctgcctggctgcccggagaactgcggcggcgtacaagtgccgtacccgttcgggatcggccgtggctgcttccacgaaggcttcaacctcacctgcgacgaggcgcagcacccggcgaagctgctgctgggggacggcgtcgaggtgctcgacatctccttgccggactgcacggtacgcatccagacaaaaatctcgtgggtagagtatgccgccgagttcaacggctcatggtccgttccggcgccggacgggcccttgatggtgtcgaccgcgcgcaactcctttgtggccttcgggtgcaacgtgctggcgaagctcatcccctacggcaccgtgcttagctacgccagcgcctgcgccgccgcctgcgtgaatacgcccgatgtctcctcctgctccggcgttggctgctgccagacgtccatcgcatctctcggctcagacctgccttggtacggtatccaggttaaacatctagaaggggaaacgggtaactactaccatagagcagttttcatagttgaccaggactggttcagcagagttgaggccgcgatggcgagcaacttcagcgctctattttttggaaatagatttcatgagaaggtagtgatggtggatagcgttccagtggtgctagagtggtcgttggatctaatacgcgacgcaggcttgtttgtgttgtcccctataggaccccaatcgtcagacttcagatgcctaagctcaaacagtttctcctatactattattggaaactacgatcgaagacggtgcaactgttctcacggatacgagggcaatccctatattgctgatggatgtcaagatattgacgagtgccagctgccagatatttacccatgtcatggaacctgcatcaatgtgcctgggacatacagatgctcatcaaagaaaggcatcaagagccttccaggcgacggcccattaacaacgagacgtttatggtgacttgttaatctcgtctcgaggatttatcaatctagtcttcaaaaatgccccaaaagttgagtcatgcaacggtaatagaggaagtgaaggtgccatattgcaaagtgggatgccaatcaggtattctgatatatatctactagcgcacctcgctccaaaaattgtaccaactgtcaatgtagaacgaagaagaactttgtagtaaatagatgaattcaaatatactctatactcttatgacacctaatatttatcgctgcagcagaaaatttctgt

SEQ ID NO: 106069 - DNA, 2594 bp, Zea Mays
aatttgagaaacagacatcgctaaatcggtaataaatcaaaagctgagagatgtcgaccgccgtctcgtcccgccgactggcgactatcggcgtgatcggagccctcacgcttcagttcgtcgcgtcagcgacggcggggccgatagccctgcctggctgcccggagaactgcggcggcgtacaagtgccgtacccgttcgggatcggccgtggctgcttccacgaaggcttcaacctcacctgcgacgaggcgcagcacccggcgaagctgctgctgggggacggcgtcgaggtgctcgacatctccttgccggactgcacggtacgcatccagacaaaaatctcgtgggtagagtatgccgccgagttcaacggctcatggtccgttccggcgccggacgggcccttgatggtgtcgaccgcgcgcaactcctttgtggccttcgggtgcaacgtgctggcgaagctcatcccctacggcaccgtgcttagctacgccagcgcctgcgccgccgcctgcgtgaatacgcccgatgtctcctcctgctccggcgttggctgctgccagacgtccatcgcatctctcggctcagacctgccttggtacggtatccaggttaaacatctagaaggggaaacgggtaactactaccatagagcagttttcatagttgaccaggactggttcagcagagttgaggccgcgatggcgagcaacttcagcgctctattttttggaaatagatttcatgagaaggtagtgatggtggatagcgttccagtggtgctagagtggtcgttggatctaatacgcgacgcaggcttgtttgtgttgtcccctataggaccccaatcgtcagacttcagatgcctaagctcaaacagtttctcctatactattattggaaactacgatcgaagacggtgcaactgttctcacggatacgagggcaatccctatattgctgatggatgtcaagatattgacgagtgccagctgccagatatttacccatgtcatggaacctgcatcaatgtgcctgggacatacagatgctcatcaaagaaaggcatcaagagccttccaggcttaattgctataatagcactaagtgctggttttggcctactattttcaattcttggtgtttccaacatcatcaataaactcaagcaaagaagggcaaaacttctaagacaaaagtttttcaagagaaaccatggtttgcttctacaacagttaatatcttcaaataaagatatagctgaaaggatgaagatttttagctttgaagaactagagcaagcaaccaacatgtttgaccagaatcgcatcattggtgatggaggtcatggaacagtctacaaaggtatcttatctgatcaacgtgttgttgccatcaagaagtccagagtagtggtccaaagggaaattgaccagttcataaatgaggttgttatactttcacagactaaccatagaaatgtggtaacactctttggttgttgtcttgagactgaggttcctttactagtttacgagttcatatcgaataggaccctatcctaccatcttcatggacaatatgaaaatcctctgtcatggaatgatagactaaggattgcactggaaactgcaagggcaatcgcatatctacactctgcagcttccatatcagtgttccatagagatatcaaatctgcaaatatactgctcaccgatacgttaacagcaaaagtgtcagattttggagcttcaaggtcaatttcaatagatgaaactggaatacataccgccatccaaggaacccatggttaccttgatcctgaatattattacactagtcgactcaccgagaagagtgatgtttatagctttggtgtaatcttagcagagctactaacaaggattaaaccggtattctctactcattcatcagagggcaaaagcctagcatcacacttcgtgtctgtgataaaagactgtagtttgttggatattctagatccacaaattgttgaagagggaagggctaaagatgccgaggctgttgcaaggcttgcggaagtatgcttaagcttgaaaggtgaagaaaggcctacaatgaggcaagttgagataacacttgaagatgtgctaggtccaaatgtccattcgagctgtcgagtttcaaggacaagtcaaggtgctcttaaagaccagacacagaaccaaaacaaaggcaatgaaggaactagactatacagtttggagaaagagttcatacagtcatctgaaattccaagatgatattttgcttttgtgggttcatatcttgtttagtaattttgagtgccattttgcacgcttggcgtcaattataaacctagagatatagccttgtgcacctccacaatattatggttgatgtagaactaataagctataccagtaaataattgaacttttggttatagtctgcttaggtggtgtatggtgttcattttgttatgtatccagtatcttgtcttgtggatgtgcaaatgtcacacgcaaagggagacagaaggacccgcgtcatattttatccaccttgatttgcactgttatgct

SEQ ID NO: 106070 - DNA, 1674 bp, Zea Mays
aggcatgtttagaatatacttgtctcttattcgatagagcggagacgatgattttacagtaactataaatcccacttatttttcatggaaaaggtaaatggcagcgcaacaagtatgttggtgtatctcttgtgggaaaaactctcgctattctcggatttggaaaggtcggatctgaagttgctcgtcgtgctaaaggcttaggaatgcatgtgattgcacatgatccatatgcttctgctgaccgggctcgtgcaatcggggttgaactagttagcatggaggaggccatgacaactgctgactttatctcgttacacatgcctcttacgcctgcaacggacaagatgctcaatgatgaggccttcgctaagatgaagaagggtgttcgcattataaatgttgcacgtggtggcgtaattgatgaagaagctctagtcagggcacttgattcaggggtagtagcacaggctgctcttgatgttttcactaaagaacccccagcagctgacaacaagttggtactgcacgggaatgttactgtcacacctcaccttggtgccagcacagtggaggcacaggaaggggtggctattgagatagctgaagctgtcattggagctctgaaaggggagcttgcagcttctgcagtgaacgcgccgatggttcctgctgaggtgctgtcagagcttgcaccttttgttgtgctcgcagaaaagcttgggcgcttggctgtgcaactagttgctggtggtggtggtatcaagtctgtgaaagtgacctatgcatctgcgcgggcccctgatgatcttgacacgagacttctccgtgcaatgatcaccaagggattgattgaaccaatctccagcgtttttgtcaatctggtaaatgccgacttcaccgcaaagcagaggggagttcgcatcacggaggagaggatcctgctggacggctcacctgaaacacctatcgactacattcaagttcagattgccaatgtcgagtccaaatttcccagtgcgatatctgagactggagaaatcactgtggagggcagagtgaaggatggtgttcctcatctaacaaaggttggagcattccaggtggatgtgagcttggaaggaagcctcatcctctgcaggcaggttgatcaaccgggtatgattgggtcagttggaagcgtcttgggtgaggagaacgttaatgtcagtttcatgagtgtcggaagaattgctcctcgcaagcatgctgtcatggcaattggtgttgatgaggaaccaagcaagggcacactgacgaagatcggggagattccagcgatcgaagagtttgttttcctcaagctctaggcgcgaatgtatgtttgaagttgcaagcatggtgtgcaattttgatgtagctagcaatccggaggacggatggttctccttgaaataagcttttaggagtatttttgtagtggcgctcttgaatatggtctggtatcgatgcctacttttgaacggggtgtttattaataaaaacttatatatcaatgcttggctcattggttgattcacttggcttctttggtacagttatctgtttgctttgttgcatgcagtctcggtttgaaaggcagggttgaaatttgtagctgatttgtttttcagctagtgtcgaataattttgtac

SEQ ID NO: 106071 - DNA, 2308 bp, Zea Mays
ataatagtaaagtgagagcgccgcaccaagccacaccaccaccagacgccacccaacaccctaaacccttcgacccaacccgcctccaactccaaagccgtcatggcggcgccgtccccgaccactaccgccgccgccgccgccgccgccacgacccaccaccgcgtgctcctcccatccgcgcgcccccgcgccgcgccctcttctctccgcctcccgctccgcgcgcagccccacgcccacgcccacgcccagcgcgcgcgcctcgccgcccccgtcgcggccgcggccccggccccggcggcgtcgacggcctcccccgagtcccccgcgtcgggcgccgtcgcggggaagcccacggtgctcgtggccgagaagctcggcgccgcggggctcgcgctgctgcgggagttcgccaacgtcgactgctcctacggcctctcccccgaggacctccgcgccaagatctcgctctgcgacgcgctcatcgtcaggtccgggaccaaggtcggccgcgacgtcttcgaggcgtccgggggcaggctccgcgtcgtcggccgcgccggcgtcgggatcgacaacgtcgacctcgccgccgccaccgagcacggctgcctcgtcgtcaacgcgcccaccgccaacaccgtcgccgctgccgagcatggcatcgcgctgctcaccgccatggccaggaacatcgcgcaggccgacgcgtcactcaaggctggtaaatggcagcgcaacaagtatgttggtgtatctcttgtgggaaaaactctcgctattctcggatttggaaaggtcggatctgaagttgctcgtcgtgctaaaggcttaggaatgcatgtgattgcacatgatccatatgcttctgctgaccgggctcgtgcaatcggggttgaactagttagcatggaggaggccatgacaactgctgactttatctcgttacacatgcctcttacgcctgcaacggacaagatgctcaatgatgaggccttcgctaagatgaagaagggtgttcgcattataaatgttgcacgtggtggcgtaattgatgaagaagctctagtcagggcacttgattcaggggtagtagcacaggctgctcttgatgttttcactaaagaacccccagcagctgacaacaagttggtactgcacgggaatgttactgtcacacctcaccttggtgccagcacagtggaggcacaggaaggggtggctattgagatagctgaagctgtcattggagctctgaaaggggagcttgcagcttctgcagtgaacgcgccgatggttcctgctgaggtgctgtcagagcttgcaccttttgttgtgctcgcagaaaagcttgggcgcttggctgtgcaactagttgctggtggtggtggtatcaagtctgtgaaagtgacctatgcatctgcgcgggcccctgatgatcttgacacgagacttctccgtgcaatgatcaccaagggattgattgaaccaatctccagcgtttttgtcaatctggtaaatgccgacttcaccgcaaagcagaggggagttcgcatcacggaggagaggatcctgctggacggctcacctgaaacacctatcgactacattcaagttcagattgccaatgtcgagtccaaatttcccagtgcgatatctgagactggagaaatcactgtggagggcagagtgaaggatggtgttcctcatctaacaaaggttggagcattccaggtggatgtgagcttggaaggaagcctcatcctctgcaggcaggttgatcaaccgggtatgattgggtcagttggaagcgtcttgggtgaggagaacgttaatgtcagtttcatgagtgtcggaagaattgctcctcgcaagcatgctgtcatggcaattggtgttgatgaggaaccaagcaagggcacactgacgaagatcggggagattccagcgatcgaagagtttgttttcctcaagctctaggcgcgaatgtatgtttgaagttgcaagcatggtgtgcaattttgatgtagctagcaatccggaggacggatggttctccttgaaataagcttttaggagtatttttgtagtggcgctcttgaatatggtctggtatcgatgcctacttttgaacggggtgtttattaataaaaacttatatatcaatgcttggctcattggttgattcacttggcttctttggtacagttatctgtttgctttgttgcatgcagtctcggtttgaaaggcagggttgaaatttgtagctgatttgtttttcagctagtgtcgaataattttgtac

SEQ ID NO: 106072 - DNA, 308 bp, Zea Mays
gacgcaaaccaactaactgttgggtcattcggtttggaagcccatcatgcacgcggattgtagtccactgtgaagcccgtaaacaaggcagccgaaagcttttgcgcttggcaaggcagaacccaccaaaggcagctcggcgcgaaggttccaccgttaatcgtaatctagtgcgtgccacttcaaaaaatcctccaagcgtgtgtgggtcccgtcccgtcccgtcccgagcgcacagcacacagcgtcgccaccatccgccgatccccgggttccaacggctcccgcggtcgcgccacttgaccgcg

SEQ ID NO: 106073 - DNA, 1203 bp, Zea Mays
aattgaagcgaacgtagcacagctcctgcctgctccacccactgtgcacctcacgcgccatgcttctctgttaaccaagctcgtgggccgtggccgctggtgttgttggtgcgcgtgtgggcgccgaggcccgagccgcatccacggaatccacgcagggaccatcggcctccacttggcccctgtggctggcctggagaccgtggacaacagctacttcatcacggatgacaacgtcggcatgctcaagctcgccaaggaggccggcagcatcctgttcgactaccggatcccgctggcggggacggacacgtgcagcgcgctggcgggcgcggcggacagcaacggcggcggcgtgcacaaggcggggatggtcatgaacgggctgcccatcagcgtgtacgcgccggagacggtggggtgcgcggtggtggacgcgtcgggggcctgcgcggcggccacgtccacgggcgggctcatgaacaagatggccggccgcatcggggactcgccgctcatcggctccggcacctacgcgtgcggcgcctgcgccgtgtcgtgcacgggcgagggcgaggccatcatccgctgcacgctcgcgcgcgacgtggccgccgtcatggagtacaagggactgcccctgcagcaggccgtcgactactgcgtcaaggagcgcctcgaccagggattcgccggcctcatcgccgtctccggcaccggcgaggtggcgtacggattcaactgcaccggcatgttccggggctgcgccaccgaggacgggttcatggaggtcggcatctgggagtgagctggaggccccgccatctaaacacaaatcaaaatcagtgtgcgtgcagctgcatgtggccatcctgcgattgccatgtgtttaatctccgggtcacaggtgttgtcgatgatccaccactagtagtagcgattgcatggagattggtgctcgggtcaataatgatggtgattgtgacggagtgccctgcaaaataattaataattcgtgtgaaaaagttgattatatggttcctgacactatgatgttcggcctttttttttgtcttcatctgtctttcattcgattattaaacatgtcctcattgggttgatagaaatctgggctgatagttggcccaagcccaacccaagtttcggtaccccaaatggttcctagagttttgggccccaata

SEQ ID NO: 106074 - DNA, 513 bp, Zea Mays
atggcgccctgggccattgccatccacggcggcgcgggcgtggacccgaacctcccggagcaccggcaggaggaggcgaagcgcgtgctggcgcggtgcctgcaggtgggcgtggacctgctgcgcgcgggcgcgcaggcgctggacgtcgtggaggccgtggtgcgcgagctggagacggaccccttcttcaactcggggcgcgggtccgcgctcacccgcgccggcaccgtggagatggaggccagcatcatggacggccgcggccgccgctgcggcgccgtgtccggcgtctccaccgtcaagaaccccgtgtccctggcgcgccgcgtcatggacaactcgccccactcgtacctcgccttcgacggcgccgaggagttcgcccgtgcgcaggtgagggccgcccgcccgccgacccaactaattcctccctggttaatctcgcgtcctcgtcaccttcactgtttctcttctcggttctcgctgcatgaatcgtgcatggctagctag

SEQ ID NO: 106075 - DNA, 289 bp, Zea Mays
taatttcgtttgtgttttcatcagcaggttttttctttcttcgcatcaagagtgggtggagggttgggtccggcgaaacgtcacgctggtccgcggcctgcccatcctcgtcggcggcgcctccctcgtcgctgtccttctcaaccgcgccgtttctggaatcgccgccgtagccgacgcctccagttcgcagtcgagggccgacatattgacgcttgctctctccgtgactgatattcttgccggactcgtttggttatccatccgtccgaaatccatttctccggtg

SEQ ID NO: 106076 - DNA, 2576 bp, Zea Mays
accaacataacaaatatatcaaacccaacataattttatcacaggttcaacaatattcaatattaaatggcaatatcatgccttcaaatcacacaaaacatagcattgattctacaaaactatggacaaaacgtagcattcattttatatgagacatataaatctggacccacatgtcatatattagcgggttccccatcgggtagcgggtatggggcaaaagagaacatactcacgcccaccatacccgatgggcataacaaatgacccaataaaatacctatgggtatcaaaatccgccatacccgtgccctaatagggtttttacccatcgggtttcgggtttcgggtacccattgccatccctgggtgggagagtaaactatggatctaaatgggccggcttacatgcagcacgagaagtgggctgaaagccgcgaaacagaaaagggcccacgactcgtctgctgaagtataaaagttaggggccgaaaatatagccgttgagcgcacacctgccattcgccgtgcggtactccgggccctcccagttttccccctctcccttccagtaccggcgccgctggccgactcccgtggcgacaacctgagaccggagcgccataatcctccggattcgagacaccgagcgcaccgcgaactttatctgctgtgtttggagctgaaaatgagtgaggcgaatactactcagcttgaccttgagaaaggattttctcaagtgtctaatgataatgattcgagtagccctgcgaccatgcacaagatgaaagttgagacagaagatggtggaagtgagattgaatcacccactccagaaaaacgtgaatctagaagcaaaggggtcgttgtgagttcactggcaaggaatttgcttgcagagaggtacagagacagattttcaaatcagctggtggaagatgagggtcagacagatgatgaagactataatggaagtgtttcgcctagtagtagccaatcacttttttcagaaagcattgaactgcttgataaacacaaggatttgctgagtcttttcaatagaatggagagttctattagattgcttcacctgcgtaagaagatggctacatttaataatattgccacccaggtggagattctcacaaaaaggaagttattatacagtcatttggcccagatgaagcatttattcccagaagcaatccagataaagaggatactagtacatgatgagaagagcctatgcatgtatgctgatatggaaatcacacttttaatggatgttgtggaatgcacaagtcctgatcagtctccatccatgacaatttgtgaggctttttactcaaagctattgagttttttggatgctcatcataagggtgcagacattcctgaggcaatcctaccggaactctttaattcaaagccaagggagaagttatatcttgaggcagtacacaatggatatgctgctgagtcacctctgcagggtgccactgaggagagattcttaaatgcttcccactttccacaatcttttcgaaaactcatgtcgcagaaaatcattgctgatggaattcaaaagactcaattgctgtctgatccagcagatttgagttctgtgattgcttatggtacaaaagggtcaaacggaaaccctaaaaaggaagatgaacatgctccagttccagggaagtatgaaatttctgctactccaagccgccatttgatctcttgttgtcaagagggtacgccaaaacaagggacctcagagtcaccattgttctctggaacacctgtaatgcagacaccaaaaaggcaattgccgacttcacttgacaaacccaaggccacatgtggacacattagtgaaccatgttcagccagttctgcccgcagatcactaaatacattgttaaagtttgaagtaggaagcccttattatgatggagtggaacatacggatacaactaaaaagggcatgatctcagaagactcatcgaattttaacaagtcatttgaggaagatagtcctgtcttatttattgataaagacaaaatcgacgaagtagactcagtggatagccaggaaaagatagcttcgctacataccacatttgacatagtctgcgacatttctcatcctaccaagaattcacttatcacgaaacaggaacttttccataatattcttgccaacaacttggagatagaagaaattggggagatagaagagcagctgaatattttagaggatctggctcctgatttgatatcaaagaagatgataaatggaggagaaatactttatagcatccaacctatatcagatcaaaattcagttcgggttaggcttgtagaacctgtatgagatagctacggttggttcaaagctgaagaaattatttatatgtatgtaccactaatgaaacccacattagctaattaacatcatggaagcatctgcatcagcagcatcgctcttgtctgattggacttgaaatctatattttttgttgaccctgctcaatgctgaaattttaatgaaacttaaatttgcactagctgctcaa

SEQ ID NO: 106077 - DNA, 1464 bp, Zea Mays
gtttgtttgttacagttggatgttaatctttctgcattacaggaagttattatacagtcatttggcccagatgaagcatttattcccagaagcaatccagataaagaggatactagtacatgatgagaagagcctatgcatgtatgctgatatggaaatcacacttttaatggatgttgtggaatgcacaagtcctgatcagtctccatccatgacaatttgtgaggctttttactcaaagctattgagttttttggatgctcatcataagggtgcagacattcctgaggcaatcctaccggaactctttaattcaaagccaagggagaagttatatcttgaggcagtacacaatggatatgctgctgagtcacctctgcagggtgccactgaggagagattcttaaatgcttcccactttccacaatcttttcgaaaactcatgtcgcagaaaatcattgctgatggaattcaaaagactcaattgctgtctgatccagcagatttgagttctgtgattgcttatggtacaaaagggtcaaacggaaaccctaaaaaggaagatgaacatgctccagttccagggaagtatgaaatttctgctactccaagccgccatttgatctcttgttgtcaagagggtacgccaaaacaagggacctcagagtcaccattgttctctggaacacctgtaatgcagacaccaaaaaggcaattgccgacttcacttgacaaacccaaggccacatgtggacacattagtgaaccatgttcagccagttctgcccgcagatcactaaatacattgttaaagtttgaagtaggaagcccttattatgatggagtggaacatacggatacaactaaaaagggcatgatctcagaagactcatcgaattttaacaagtcatttgaggaagatagtcctgtcttatttattgataaagacaaaatcgacgaagtagactcagtggatagccaggaaaagatagcttcgctacataccacatttgacatagtctgcgacatttctcatcctaccaagaattcacttatcacgaaacaggaacttttccataatattcttgccaacaacttggagatagaagaaattggggagatagaagagcagctgaatattttagaggatctggctcctgatttgatatcaaagaagatgataaatggaggagaaatactttatagcatccaacctatatcagatcaaaattcagttcgggttaggcttgtagaacctgtatgagatagctacggttggttcaaagctgaagaaattatttatatgtatgtaccactaatgaaacccacattagctaattaacatcatggaagcatctgcatcagcagcatcgctcttgtctgattggacttgaaatctatattttttgttgaccctgctcaatgctgaaattttaatgaaacttaaatttgcactagctgctc

SEQ ID NO: 106078 - DNA, 273 bp, Zea Mays
atggccgatgttcctggggtggattccaccgcggcaatgcgggaggacatggaggccatctgcgtggcgaagagccccagttggcgctggacttcagcaagggcagtggtgattgctgccaactccgacggctgggctgaagctgcagtttcagcttcagcagatcctggcatatctgataccaggttgttagaattaccccggctgcggaggttgtatgagtggctaatggttggaggaagaggtgtgagagattgccgtggtgacgcctga

SEQ ID NO: 106079 - DNA, 1076 bp, Zea Mays
atacctgtatgcattcccttcacgaaaacctggtgaggaatctaccaattgcttttcgtctcctgtccatcccttgtgcgctaccgctcctctcccttggcaacgacgactggcgccgccgctgccagacttcgctgggcatctcgccggcgacgagctcccaccaggattagagaaggtgatggcgaggagtgacagctgcctggcgcgcgtgggtgccggagttgcgatcggtggcgcggtcggcggagccgtcggtgcttgttatggaacttttgaggcattcagatacaagatccctttattgctaagatcagacatatcgggcaaactactgttggcagcgctgcaatttttgggcttttcttgggggctgggagcttgattcactgcggaaaatcctactagtttgtttccctcctttttctgaacacgactttgtcgatgtgcttcagaggaggattctagattttgagcgctaccctgagtggcttcagtgaaaactattcaacgcctgtacaatttaacagctaatacctcagggttggaaagagcaatcaagttatgtcctggtttggtgtggatggaaatactccctccatttcaaattaaaataaaattcgttttaaatacttaataggtttatacaatattttatgtatatgttttatgtgtctagatttattatcttctagttaaatatagacaaaaatctaaaactaaaacgaatactattttaagatagagggagtagaattcatgtttatacgagaatagccaatctctaatctagcgtattagggcttgtttagtagagtttcgctctatgattctctagttttgagagctgatgatcaaatagagcgattatgaatgattatctagtagtagtgaatctattttacgaaaatcgtttgacaaatagtatgattatctagtagtatctagtagtagtgaatctattttacgaaaatcgtttgacaaatagtatgattatctagtagtagtgaatctattttacgaaaatcgtttgacaaatagttcatgaagcgatttatgaggggttggagagtgga

SEQ ID NO: 106080 - DNA, 891 bp, Zea Mays
atacctgtatgcattcccttcacgaaaacctggtgaggaatctaccaattgcttttcgtctcctgtccatcccttgtgcgctaccgctcctctcccttggcaacgacgactggcgccgccgctgccagacttcgctgggcatctcgccggcgacgagctcccaccaggattagagaaggtgatggcgaggagtgacagctgcctggcgcgcgtgggtgccggagttgcgatcggtggcgcggtcggcggagccgtcgggatcttctggagctagctactactgatccctggtgcttgttatggaacttttgaggcattcagatacaagatccctttattgctaagatcagacatatcgggcaaactactgttggcagcgctgcaatttttgggcttttcttgggggctgggagcttgattcactgcggaaaatcctactagtttgtttccctcctttttctgaacacgactttgtcgatgtgcttcagaggaggattctagattttgagcgctaccctgagtggcttcagtgaaaactattcaacgcctgtacaatttaacagctaatacctcagggttggaaagagcaatcaagttatgtcctggtttggtgtggatggaaatactccctccatttcaaattaaaataaaattcgttttaaatacttaataggtttatacaatattttatgtatatgttttatgtgtctagatttattatcttctagttaaatatagacaaaaatctaaaactaaaacgaatactattttaagatagagggagtagaattcatgtttatacgagaatagccaatctctaatctagcgtattagggcttgtttagtagagtttcgctctatgattctctagttttgagagctgatgatcaa

SEQ ID NO: 106081 - DNA, 827 bp, Zea Mays
cctgcccctcgctcgccgcccaatcaacagctcagacgttgccgccacatccgagcaaaggtggaggcgtctgcctccacacacctcgccctcgccaccgccgtccctagagaagacacggaggtgcagagaagacacggaggacccgcatctcggcatctgcgcgactgcgttaagatcgcacaccatgtctgagattgtcaatcaaggaaaactggtgtctgatgagatcatcataaatctgttgtcaagacgcctggaagagggagaagaaaagggtgaattggggttcatccttgatggctttcctcgaaccatgagacaagcggtaagctaattatttgacctgaccataagtatgcaaaaacaaatacttgcctttgatcaggaagcatttttcacttgctttcgttaacgaaatggcccgatctgtggtttgttggtcaatgccatgtttttttattactgtcttatgctgggagcaaaatagaaacagagaatagcttcaattgatgccttttagaacggattctgtagagcaactcatggatactttctgcttgttttaacaaacgcggcagtgggcgagctctggtgtaggtagaagatgacccagatcatgttcgagaccttcaataccccagctatgtacgtcgccatccaggccgtgctctctctgtatgccagtggtcgtaccacaggtatcgtgctcgactcgggagatggtgtgagccacaccgtccccatctacgagggatacgccctcccccacgccatccttcgtcttgacctggccggtcgcgacctcaccgactgctcatctgcgc

SEQ ID NO: 106082 - DNA, 96 bp, Zea Mays
ttaagagtgaagcgtagactgcccccgcctctaccaactcctcctgctaccgcgcgcccagcccccgcgaaaatcgccgcaaccgaacgcccgcct

SEQ ID NO: 106083 - DNA, 702 bp, Zea Mays
atgccgacgggcacggcgcccacggtggtcaccttctgcgcctcgtcgaacagctccgtacggaggatgctgttctcgtcggcgaacaccacgatgccgtccatccgcttcgcccgaatctccctgagggcgtgcattcgcaggcttgcggtggagtctccagggccggtgatgtggaggaagtcgaggttggagcgggagagcaccgcggcgacggcgtcggtgcggtgccccggctcgacgacgatccacacgagctgggcgtcgacgaggcggagggtgtgcgccagagacgtgagcgatggcacctggagcgcggaggtggtggtcggggtgacggcaatgacgggcctggcgggccccgcgccgcggcgcttggcgctacgctgcgcgttctggacggcggcgaggatgcggtgggcgtcaagaagctcgctggggttcgggtggggccaggctcggacgcggatcgggtggcggccgacgaagacggggccgtggtggtggtggtgctgcgggcgcgcgctgatctcggcggccacggtggtggtggtggtgacggttgtcgtggtggtggtggtggtggtgatcgtggccatggccgtggcgttgccgcccgcgagcacgacggcgggcggtgacacgagcgagacgaggtgcgcggcggggttgatgggcggggtgggcaggaagaggaggtag

SEQ ID NO: 106084 - DNA, 913 bp, Zea Mays
gcgtccaagaaaatgaatgtagtataacattgctggtcgttgcaatatcagtccccattacatcaaataataatagatcgcagctgtgtcgagctacgccggggagcttagctgagttttacattgtgcgcgaaagcaaatttgccagggttccataaacaactgaaccctctttttttctgcagggtttatgtacaggagtgagtacctactaaaatcgatataggtagatagcggccgccgagccatgcttccgtcgtcaatcagggggccaggtgaccatttcccacgcaggggctctaatcgaccacccaggttgctgacgacctaatgccacgctgcgttttctcatgcgctgctcttcattccgtcagctgtgttgccggagaaagcccagtgcggcttggccagggttcgcttcgtagccttcactgacaatgggccgagcatttaccatgaggcaggttccctgcctgacgttgcagatggggtagtcatgggggcagcagctgtagtgatcgtcgcagcaggtggcgccctcgagcgggcagcagccccaggcgaagcagtacttgccgtactcgtagatgcagcagcaggtggtgctgtcagggcacgagtagtagttgtcgcacacggcgggcgccggggtcggggacggcgggctggggccagggttcggcgggttggcgccctccttcaacgggtatgacggctcaaccgcgataccgcacttgccgctggacgccttgatgttgcgctccatcctcacgtacccggactcgccccagctgctgccccatgagttcttcacgatccagtagtccttgccgttctctgtcccgtagccgacggccgtgacaccatggtccagcgctgttccacagcttccagtgaagataccctgaggcca

SEQ ID NO: 106085 - DNA, 1988 bp, Zea Mays
ttctataatttagaacacaggaaacattatatttttctaatatatttgttgactacaaggtgattaaaaacgggcttacagaccaccaccataccgtgaggagtctcggatgaggtacgacaggaccactctcagtcacacgatacgatgaccaaggatggtaaagtacgaagccgcagcctccaaaactttatagccccttgatttgatccgcgccgcacgaacaacgtgccgcgacctgacgcggtagatgatttcttttagccaacaaaccaggcaaggaccgggcaacagcagctgctaatcagcctctgtcaccataattaagacgctctcttggctgccttggtttggttcctgctcctccttactctacctgaccagctcggcagctccccagccgcgacagagtccacgacgacgatctttcttcccacccccgtctgcctccggatcccagctcccctgcccgctcggtcgactccctcgtcgccgagtccagctccgactccgagaaaaaatcaaatcgaccgagtccgcccgtgaagccgccgacagaaggagagagcacagagcgggcgaggcaggcagcatgaagtccatgggcagccgcgacaagctcgcggcggcgtcgagcccccgccgcgtcctcttggtggtcttcgccttctgcttcgcattcgccaccttcctcaccttcctctacaccacctcccacttcacgaccgcgcccggctccggctccggctccatcgcggcctctaccaccaccaccaccaccacgacctccggctctgcgggcggcggcggcggccaaggccaagcagggcccgagtccgtgtccaagcggctgccggtcccggtgttcgaggcgctggtccacttcgcgtccatctcgaacgcgacgcaccgcatgtcggacacggacatccgggccatgtcgtccgtgctccgcgcgcgggcgccctgcaacctgctggtgttcgggctgggcgcggaatccccgctgtggctggcgctgaaccacggcgggcggaccgtgttcctggaggagaacgagttctacgtcaagtacctggagccgcggcaccccgggatggaggcgtacgacgtgtcctacacgacgaaggtgcgcgacttccgggacctgctggcggcggcgcgggcggcgagggccaaggagtgccggcccgtgcagaacctgctcttctccgagtgccgcctcgccatcaacgacctgcccaacgacctctacgacgtggcctgggacgtggtcctcatcgacgggccgtccggctggaaccccaactcgcccggccggatgccgtccatcttcaccaccgccgtgctggcgcgctccggcgccaccgcggctaagggccccaccgacgtgctcgtgcacgacttccagttcgaggtggagcaggtgctgagcagggagttcctgtgcgacgagaaccgcgtcgcgggaagcggcaccccgtcgctcggccacttcgtcatccgcgggggtggggccggggccggcgacgccttctgctctgcccaggaggacggctcgtcgggggagaagacgcgccgccgccgcagccgcaagtaaattttacttgtccgctgtccgtctatcttgccacggagacgggcagacggcattagccgccagcgacctctcacttcttcctggcgagtggatctttaccgctcctcctcacccacctgttaattaattttttctctcttgcatatacatatatgttggttgttttgtttctcgggacaagaactgtaagaacaaccctggtaatatgattgcctccatcacaaaagaaaaaaaaattgaaaaagagaaagaaaaggagaagagaagtgatgtagcaacaaccctgaaagcatatatactagctagtagctttacacatcacggttcacattacagatagagaaaaggatgtgatcatgcaatggcaaatctgacggtttgtaacgaa

SEQ ID NO: 106086 - DNA, 3007 bp, Zea Mays
ggtttgtgctagcacacttgtttcaattttcaaagtgtgaccaccggcaccaggtcaccacatgtgacacggctgcagggagacgacacgacggtcaagtaaaagtaaaaaaaaaaaacctgaggctggctggctacgctgagcaaaccctgtgccgcccccaaatggagaaggcgccggcaccagcaccagcaccgggcacccaacgggcgttcgtgtccgcctatcggatctggtcgctttgacgaaggaaccagcgaatgatcactgctactagctagctaggttgttgcgcggccgcgataagagtaacatgacacttgttttgcttttgtttttactaggcttgctgagtgaggtgctgctgatggatcatggatgtggtgcggtgctgccttttataaccgcgcgcgcgcaccacacaacacaacagacaccaccacggccccgcgcgcgcgcgcctccctctccctcctagtcctaggcacacacaacacaacgcaatcctccaccggctccgctacccgcgggcgggcgggcgcttttcgcctcctctgctccgagctctcctaggttggaagagtctttgccaaggggataacaaaagagaaaagtacttgcataccccaacaaggcagcagcggctgcttttggcctcctttttctcgcacctcgctcctctattctcttctcttgttcgttcatcacccgagttggagtgcgaggcaagaaggagatcgagcctgaggagggagggagccagggagggaactggacgtccggaccaccaccaccaccaccacacacacaccagcctcgtacgaagtaaggaaggaaggaagcccagcgcctagcagccatgtgggaccttaacgactcgccggccgccgaggccgccccgccttccccgtccgccgacgactccggcgcgtcctcctcgtcggcggccgcgctggtcgagatacccgacgacgcggacgacgactcggccgccgccgccgcggaagccgtcgtcacgcgccagttcttcccggccccggccgccgtcggcgcggcgcccgggcccggctcgtcgagcgcgcgcgcgggctggcttcgcctggccgccgcggctccaccgcccgcggcgggcggcagtaacggcgtcgcgcaaaccggtggccccgcggcggcggcggcggcggctggcaagaagagccggcgcgggccgcggtcgcgcagctcgcagtaccgcggcgtcacgttctaccgccggacggggcggtgggagtcgcacatatgggattgcggcaagcaggtctatttgggcgggtttgacaccgctcatgcggcggctcgggcgtacgatcgggcggcgatcaagttccgcggcgtggaggccgacatcaatttcagtctggaggattaccaggacgacatgaagcagatgggccacctgagcaaggaggagttcgttcacgtgctccggcggcagagcacggggttcccccggggcagctccaagtacagaggcgtgacgctccacaagtgcgggaggtgggaggcgcgcatgggccagttcctcggcaagaagtacgtctacttgggcctgttcgacaccgaggaggaagccgccagggcgtacgaccgcgcggccatcaagtgcaacggcaaggacgcggtgacaaacttcgatcccagcatttacgccgaggagctcgagccggcggcgtcgacgggcggcggtggcgatgaccacaatcacaacctggacctgtcgctggggagctcggcggggaacaaaaggggcagccttgacgacggcggcggcggaggaggcggcggcgacgacgagacctcggaccagcgcgtccccatggcgttcgacgtcgactggcagacggccgcgccccggagcacgaaagcaaagctggacgcgagctccaagcaaccccagacccagatgctgcctcctccgcctcctgctgtcttgcgagtcgcccaccagctgccgttgccgttcggtcccaggcatccgcaatcgcagttcctgagcaacggcggcgatccggggacctcgggaggcctgtccctcgcgatcggcggcgcgggcggcgggcactggcctccccagctgcagcacctgcagcagcagaggctgcacggcgcctgggccaacggcggcggcacgagctggccgcctccgccgcacccgcacccgcacccgcacccgccgccaccgagcaccgccgcgaccgcagctgcagcatcatcacgattccctccctacgttgttactacgacgcaaggcccggcaggctgggctcagaagaatgggttccattcgctggccaggccaacctagtatgccaagaaccacgactggccggagcgttcattcgtcgtcgatcgtcgacccagggcaaacgacacctccaaccactgcacgacgacgttttaatttaccggatgccattctctctctcccctccccccttcccttctcccttctcccttctcccttctctgtgttcttgattgggtgagacatggatccgaggatggatggacggcctgtacctgaggagttcccgggaagaagacgagtgagtgagtgagtgattggtagggtaggcgactaggcgtcgcgtcaggcagtacgtccttttggcgccttttttcttctttcactcaccattggcgaccaccaatgaatgatgacactgactggggtgtcaacatcgcagctggttttgtttggtctcatgttgcatcactcgctgctccacgatgccttgctatggttggggggagatttgctccatccaccccacgccggtcaggcgacagagcctccgctgcgtcgtctcatccgtctggtgagttgccactgtcttagaatctgagtggtacggtacgtgtggatctcgcgcgcgtgtaaacctagtattatgtactacaaactgtcatcatcggagatcactcgaataagatatcgatcttgagattacgggcggcggctcctgtc

SEQ ID NO: 106087 - DNA, 2899 bp, Zea Mays
ggtttgtgctagcacacttgtttcaattttcaaagtgtgaccaccggcaccaggtcaccacatgtgacacggctgcagggagacgacacgacggtcaagtaaaagtaaaaaaaaaaaacctgaggctggctggctacgctgagcaaaccctgtgccgcccccaaatggagaaggcgccggcaccagcaccagcaccgggcacccaacgggcgttcgtgtccgcctatcggatctggtcgctttgacgaaggaaccagcgaatgatcactgctactagctagctaggttgttgcgcggccgcgataagagtaacatgacacttgttttgcttttgtttttactaggcttgctgagtgaggtgctgctgatggatcatggatgtggtgcggtgctgccttttataaccgcgcgcgcgcaccacacaacacaacagacaccaccacggccccgcgcgcgcgcgcctccctctccctcctagtcctaggcacacacaacacaacgcaatcctccaccggctccgctacccgcgggcgggcgggcgcttttcgcctcctctgctccgagctctcctaggttggaagagtctttgccaaggggataacaaaagagaaaagtacttgcataccccaacaaggcagcagcggctgcttttggcctcctttttctcgcacctcgctcctctattctcttctcttgttcgttcatcacccgagttggagtgcgaggcaagaaggagatcgagcctgaggagggagggagccagggagggaactggacgtccggaccaccaccaccaccaccacacacacaccagcctcgtacgaagtaaggaaggaaggaagcccagcgcctagcagccatgtgggaccttaacgactcgccggccgccgaggccgccccgccttccccgtccgccgacgactccggcgcgtcctcctcgtcggcggccgcgctggtcgagatacccgacgacgcggacgacgactcggccgccgccgccgcggaagccgtcgtcacgcgccagttcttcccggccccggccgccgtcggcgcggcgcccgggcccggctcgtcgagcgcgcgcgcgggctggcttcgcctggccgccgcggctccaccgcccgcggcgggcggcagtaacggcgtcgcgcaaaccggtggccccgcggcggcggcggcggcggctggcaagaagagccggcgcgggccgcggtcgcgcagctcgcagtaccgcggcgtcacgttctaccgccggacggggcggtgggagtcgcacatatgggattgcggcaagcaggtctatttgggtaagtttcgttcatgtccatgcatacacatccgtacttgggagagaggtgggtgactgccccaatccgaggcgttttcggttctggatccctcacaaatggcttggcttgtggacgacttgcaggcgggtttgacaccgctcatgcggcggctcgggcgtacgatcgggcggcgatcaagttccgcggcgtggaggccgacatcaatttcagtctggaggattaccaggacgacatgaagcagcagatgggccacctgagcaaggaggagttcgttcacgtgctccggcggcagagcacggggttcccccggggcagctccaagtacagaggcgtgacgctccacaagtgcgggaggtgggaggcgcgcatgggccagttcctcggcaagaagtacgtctacttgggcctgttcgacaccgaggaggaagccgccagggcgtacgaccgcgcggccatcaagtgcaacggcaaggacgcggtgacaaacttcgatcccagcatttacgccgaggagctcgagccggcggcgtcgacgggcggcggtggcgatgaccacaatcacaacctggacctgtcgctggggagctcggcggggaacaaaaggggcagccttgacgacggcggcggcggaggaggcggcggcgacgacgagacctcggaccagcgcgtccccatggcgttcgacgtcgactggcagacggccgcgccccggagcacgaaagcaaagctggacgcgagctccaagcaaccccagacccagatgctgcctcctccgcctcctgctgtcttgcgagtcgcccaccagctgccgttgccgttcggtcccaggcatccgcaatcgcagttcctgagcaacggcggcgatccggggacctcgggaggcctgtccctcgcgatcggcggcgcgggcggcgggcactggcctccccagctgcagcacctgcagcagcagaggctgcacggcgcctgggccaacggcggcggcacgagctggccgcctccgccgcacccgcacccgcacccgcacccgccgccaccgagcaccgccgcgaccgcagctgcagcatcatcacgattccctccctacgttgttactacgacgcaaggcccggcaggctgggctcagaagaatgggttccattcgctggccaggccaacctagtatgccaagaaccacgactggccggagcgttcattcgtcgtcgatcgtcgacccagggcaaacgacacctccaaccactgcacgacgacgttttaatttaccggatgccattctctctctcccctccccccttcccttctcccttctcccttctcccttctctgtgttcttgattgggtgagacatggatccgaggatggatggacggcctgtacctgaggagttcccgggaagaagacgagtgagtgagtgagtgattggtagggtaggcgactaggcgtcgcgtcaggcagtacgtccttttggcgccttttttcttctttcactcaccattggcgaccaccaatgaatgatgacactgactggggtgtcaacatcgcagctggttttgtttggtctcatgttgcatcactcgctgctccacgat

SEQ ID NO: 106088 - DNA, 2896 bp, Zea Mays
ggtttgtgctagcacacttgtttcaattttcaaagtgtgaccaccggcaccaggtcaccacatgtgacacggctgcagggagacgacacgacggtcaagtaaaagtaaaaaaaaaaaacctgaggctggctggctacgctgagcaaaccctgtgccgcccccaaatggagaaggcgccggcaccagcaccagcaccgggcacccaacgggcgttcgtgtccgcctatcggatctggtcgctttgacgaaggaaccagcgaatgatcactgctactagctagctaggttgttgcgcggccgcgataagagtaacatgacacttgttttgcttttgtttttactaggcttgctgagtgaggtgctgctgatggatcatggatgtggtgcggtgctgccttttataaccgcgcgcgcgcaccacacaacacaacagacaccaccacggccccgcgcgcgcgcgcctccctctccctcctagtcctaggcacacacaacacaacgcaatcctccaccggctccgctacccgcgggcgggcgggcgcttttcgcctcctctgctccgagctctcctaggttggaagagtctttgccaaggggataacaaaagagaaaagtacttgcataccccaacaaggcagcagcggctgcttttggcctcctttttctcgcacctcgctcctctattctcttctcttgttcgttcatcacccgagttggagtgcgaggcaagaaggagatcgagcctgaggagggagggagccagggagggaactggacgtccggaccaccaccaccaccaccacacacacaccagcctcgtacgaagtaaggaaggaaggaagcccagcgcctagcagccatgtgggaccttaacgactcgccggccgccgaggccgccccgccttccccgtccgccgacgactccggcgcgtcctcctcgtcggcggccgcgctggtcgagatacccgacgacgcggacgacgactcggccgccgccgccgcggaagccgtcgtcacgcgccagttcttcccggccccggccgccgtcggcgcggcgcccgggcccggctcgtcgagcgcgcgcgcgggctggcttcgcctggccgccgcggctccaccgcccgcggcgggcggcagtaacggcgtcgcgcaaaccggtggccccgcggcggcggcggcggcggctggcaagaagagccggcgcgggccgcggtcgcgcagctcgcagtaccgcggcgtcacgttctaccgccggacggggcggtgggagtcgcacatatgggattgcggcaagcaggtctatttgggtaagtttcgttcatgtccatgcatacacatccgtacttgggagagaggtgggtgactgccccaatccgaggcgttttcggttctggatccctcacaaatggcttggcttgtggacgacttgcaggcgggtttgacaccgctcatgcggcggctcgggcgtacgatcgggcggcgatcaagttccgcggcgtggaggccgacatcaatttcagtctggaggattaccaggacgacatgaagcagatgggccacctgagcaaggaggagttcgttcacgtgctccggcggcagagcacggggttcccccggggcagctccaagtacagaggcgtgacgctccacaagtgcgggaggtgggaggcgcgcatgggccagttcctcggcaagaagtacgtctacttgggcctgttcgacaccgaggaggaagccgccagggcgtacgaccgcgcggccatcaagtgcaacggcaaggacgcggtgacaaacttcgatcccagcatttacgccgaggagctcgagccggcggcgtcgacgggcggcggtggcgatgaccacaatcacaacctggacctgtcgctggggagctcggcggggaacaaaaggggcagccttgacgacggcggcggcggaggaggcggcggcgacgacgagacctcggaccagcgcgtccccatggcgttcgacgtcgactggcagacggccgcgccccggagcacgaaagcaaagctggacgcgagctccaagcaaccccagacccagatgctgcctcctccgcctcctgctgtcttgcgagtcgcccaccagctgccgttgccgttcggtcccaggcatccgcaatcgcagttcctgagcaacggcggcgatccggggacctcgggaggcctgtccctcgcgatcggcggcgcgggcggcgggcactggcctccccagctgcagcacctgcagcagcagaggctgcacggcgcctgggccaacggcggcggcacgagctggccgcctccgccgcacccgcacccgcacccgcacccgccgccaccgagcaccgccgcgaccgcagctgcagcatcatcacgattccctccctacgttgttactacgacgcaaggcccggcaggctgggctcagaagaatgggttccattcgctggccaggccaacctagtatgccaagaaccacgactggccggagcgttcattcgtcgtcgatcgtcgacccagggcaaacgacacctccaaccactgcacgacgacgttttaatttaccggatgccattctctctctcccctccccccttcccttctcccttctcccttctcccttctctgtgttcttgattgggtgagacatggatccgaggatggatggacggcctgtacctgaggagttcccgggaagaagacgagtgagtgagtgagtgattggtagggtaggcgactaggcgtcgcgtcaggcagtacgtccttttggcgccttttttcttctttcactcaccattggcgaccaccaatgaatgatgacactgactggggtgtcaacatcgcagctggttttgtttggtctcatgttgcatcactcgctgctccacgat

SEQ ID NO: 106089 - DNA, 954 bp, Zea Mays
gattgctcatcttttcaccaaaatatcaagtagcgtcatacttgaaatttgattgatcatcttctcgatttgatcttttattttcttataggagattggtcgtctatctggagcactccgcggccatcaacccccacgcttaaggtcagggtttctgttggagcgtcagggcgatggtgtttggggcgttcctttatcaacaaggggtagagaaggaagaaggttaatggagattcggaatgcacttgaaatgattcaaaggggggaaaatgtaaggctcgagtctatcttctatggcggcctcgacattcatgacagacacagggacatgcgccttgacattgacaatatgtcctatgaggaactattagcacttgaggaaaggatcggaaatgttagcactggcctcagcgaggaagctgtgataaagttgctcaaacaaaggaaattttcatcgtggagactaaaagcatctttggacccagaaccatgctgtatttgccaggaggagtacgttgatggagacgatctcgggaggctggactgcgggcacgacttccatgctggctgcatcaagcaatggctggtggtgaagaacgtgtgccccatctgcaagaacaccgcattgaaggcctgaaaccgaacaaaggcccgtcagagacacacccatgttccgtgtccattcgatcggtcgcaagatcatttacccgattggtttttactatgcgttttttggttgggaaaattttgccatttcacctgggaaagtggtgggggggtgttggaggtggaagagaagatggcggtccctgtaaactgctgctgctgctgctgcagtaaataatccctggaatttgtctccctgcatttaaacaaaatatttatggctgttataatggacgccgtcgtagggttataacttgaaagatagcattgtgtgccaccacccgccat

SEQ ID NO: 106090 - DNA, 2781 bp, Zea Mays
ctcccaccgcgcttgcatcctctcatcgccaccccaccctcctcctccctgtctttctccccccctctctctccccctcttgacaaattttcctccacccattcccttcctcccctcttcttcttctccacccactccaccgatccccctctttctctctgaattctctctcgtcgtgcccacccttccatctgtctgctgcctctctctctcgcaatcagtcactcggctcttgtttcttccgtctgctgggttgattctttctcttcctctccgtggagaaacaggaggagagaggaaagaagagaaatcggaaccagcctgttctttttgcctggattgcggttcttgcgagttgttcagaaactctgggccagtttctggtcctttaaactactggaaagaggaaccatcagagatgccaaggcagccaacaaattgatatctaattgccctactttggatcatcataatgcaaggacagaggaattctatggagcattttgctgatgtctttggattcgacgttgcatcgagttcaggcaaccctgtgatggatcagcagtcatattggaataatgttcttggatcagtagaatcacataatcttcaaggttatcagatggctcacagtgatgccgccatgccatatggaaatgaaccacagcaagatggtacatttcttggtttctgggaatcaggcgaagcaagttcaagtgccagtgcactaaactatggcagctctaataatgtcaaaacagagcatcttaacattggtggtggaggtggactgaggattggtgaaagccgactggtagctgacaatggcatttctctggatgtggatatcaaccttaacgccaacgttaacgatctttgtggtcaaagttcaaatgttaactgtgcctctcaaggtcctgagcagtattgtggcagtgatcgtaatgctataaattctcagccgactgacctgggattacacccattcaggacattcctactagatgcacagcaagcagaatcttttactttgaatcctagtgaaaaccctttgggtgatttttcatcaatgcaagaaagcattgaacaaagaccaggtggttccctggatggtcgccggctagcgtgcaagagaaaaaatattgaaggagccaatggccagagttcagcaggtgctagtacaagttttccccacaggaacgataatgcattccataacattgcttcttcaagttacaatcctgcacctatcagaaattcatcctctcccaagtgtttgccagttccaagttctattgaagatcaactcccacggtatggaactaatgtagggctctcagccggtacttatgaccttcatggaggggtcaacaatgctgtgaattcacagagaagtttccgagcaagaactaccacatctcaacaggttgctccctgtagtgtatggccctcttcaaatgctatcagactttctaattcatggaatcaccagccacctcatttccaaagtgcatttgatgatccccaggaggttattcctgtggtcagcagcctcaacttgcaataccaacatccaatgaatgttcctggtgtgccacaggctgctaaccgtttcactgaccatggagcttcatcatcgagagctgggagtttggagaacagaattattggtagtgaagaggttcctaggaggtatgccgcgcctaccaactactctgatttagttcccccacctgcagtagacctgagacgtttggtgccagaaccatttaattggagttctgatgtccgaggcactgcaatatcaggaagtattattcctcctgtatcaagaactaataacagttcaacagttaatccaccagcaggattcaatcaccaaaacctcaccagacgccatcctcgaaatttatcagaggagattggtcgtctatctggagcactccgcggccatcaacccccacgcttaaggtcagggtttctgttggagcgtcagggcgatggtgtttggggcgttcctttatcaacaaggggtagagaaggaagaaggttaatggagattcggaatgcacttgaaatgattcaaaggggggaaaatgtaaggctcgagtctatcttctatggcggcctcgacattcatgacagacacagggacatgcgccttgacattgacaatatgtcctatgaggaactattagcacttgaggaaaggatcggaaatgttagcactggcctcagcgaggaagctgtgataaagttgctcaaacaaaggaaattttcatcgtggagactaaaagcatctttggacccagaaccatgctgtatttgccaggaggagtacgttgatggagacgatctcgggaggctggactgcgggcacgacttccatgctggctgcatcaagcaatggctggtggtgaagaacgtgtgccccatctgcaagaacaccgcattgaaggcctgaaaccgaacaaaggcccgtcagagacacacccatgttccgtgtccattcgatcggtcgcaagatcatttacccgattggtttttactatgcgttttttggttgggaaaattttgccatttcacctgggaaagtggtgggggggtgttggaggtggaagagaagatggcggtccctgtaaactgctgctgctgctgctgcagtaaataatccctggaatttgtctccctgcatttaaacaaaatatttatggctgttataatggacgccgtcgtagggttataacttgaaagatagcattgtgtgccaccacccgccat

SEQ ID NO: 106091 - DNA, 290 bp, Zea Mays
ctaatttagttctcaatttcttgtgcagtgtccatgtactatcttgtgcggatttcgcgcaccatatcacctcctaccggatcttttcagctcttcatcaggttacactttttacccttgcttcagcttggctcatgctacttatgtttcagattttcatacagtcaccgggtgctgtttttggctgagttagaagccccgtctaggtcggcagagcctgcttatcttgctcattttcctgcactcacaaggtactatgcaatttcaccatggtttaaccatttgattaa

SEQ ID NO: 106092 - DNA, 470 bp, Zea Mays
gtggtcgccgtcctagcagcaggggaccgtaccgcggagaggcccaccaagctcgtgctctctgacgcctccaaaagcgtgagcttgattgtggcggcaatatgctacgcgtggatgctaccaagcaagggggatggccaggctgcagtgctggtggtgaacatgcgccggagcaggatggcttggtgcaggcaggcggcttggctcctgtatcacgttggggtcgatgcatcggcgctgctcttcaccgatgaggttgacatggatgggctaataatggaccagcgagttagcttgcttgtggtggggcaagatgttttgaaatcaaaagctgaggtggcttcagtttgtacaaccctgacccatacctattgtgaggatgcgtatagcttgcttcagaacttggacataaagaaacttcttctcgcaggtatcctgttagatacgagcaacctttcctagaagtgctc

SEQ ID NO: 106093 - DNA, 2166 bp, Zea Mays
atggcgtcctccgttcccgtggtcgacatcctcgacgacgacgacgacgacaacacctgcctcggcatcgcctcccctgcctcgtgcaagcggtccctcggatcctccggaacctcttcccgcgatttcctcgacgcgttctcgccgtccccgcccctgcgaaagcggcctcccctcgcggcggtggcccccatcaacctcgacgacaccccgtctccgcctaagcggcggcgctcctcggtctccatcaacctcgacgacaccccgtcaccgccaaagccgcggctctcctcggtgcccaagcagccggtcggggtggacgacgacgtggcgctctcacccactggtgatgttgttgccgacaggcccgattctatcttttactgggccgctttctccgagtcaccagagacggttgtgcccacttctgacggcctcggcagtcttgctgctgagactccgggcttcgcctccccggactcggttaggccacctgctgcccctgacatgtcaatgtcatctgctccgccggcacaaaaaggatctggagttacctctctgatatcacttgatagtgacaatgagtcagatgatgacatcatgaacatggagcctttgaccaatttgccaaacaataaggaagcgatgatgtgccaaaaggacggtaccgagcaggttcatgagaagcagaaaagacaaccggcagggaagaaactgacgaaggaggagaaagacaagctgatgcaagaaagaaaacaaaaacggcaggaagataaactactgaagcaagccttgaaagatgaactagctaagaagaagaaaatggaaaaagcaattcagaaatgggaatcaggaaaatttgctttagaatgtataactgttgagattgacaacagtgttatccaaaggggctctattggaggtcctcttctttcaagtttgacagagaatggtctttcctatgaacctaccaagaatagaatcagcggttcaattttatggaagttggatgttcctgatgatattgctcaggcgttttccgaccttaacaatagctgtgatatgaaccaaaatccattgtcacaagtgaaatatgtagcaattgtgcttgaagctgaggaattttgtaaccttataagcaatggatcgttctttgatcatgtccaaagagtttgtgatggatacccaggattcaccatttgctacatcattaataaattgatgaactacatcaacaaatgtgagcaaagtcaatacaagaacccttcaaatacttggagacgtccgccagtggaagaggttttatgcaaactggcaacacactatattaacgttcactcaaggcaatgcatagatgaagctgaagtagtagagcaccttgttggcctgacgtctagtcttgcaaaatgcaaattcaggaaaccactgacatggttatctgtgcaagctaacggtgcagttatcccgaaaggttttgttcataaggacctggcgaagaaagacacctggttaaaagctttaatagcgatccctgacatccagccaagatatgcttttgcaatctggaagaagtatccctgcatgagatcccttctaaatgaatatatggatggcagtaaaaccgttgccgagaaggaacttctgcttagcgacttgaagtgggaagatcgactgggtgacgaaggcaaaaggctggggaacaaatgctctagaagggtgtacagaatgctcatggcacagaatggagacctggatgcagatgaccccgaagctggcggtagatcttagtgcctaatcatctggaccttgggccatcaatatatgcatgcccgccctcttgctgaccggtttgtgtacatatcgtccttttgaccatgcttgcactgtcagtgtcatggtgaaagagtcgcgcattagctcgtgcgatgtttggtgccgaaagcatggcctgcaatgctacacacgatggcacatggtgtgtgtgttttatttattaggtacctgtgaaaagcatttggtcgaagtcgaatgctaggaaactgggcattcgttgtgcgtagctagcttactgcctctatagagccccccaacaggctactccaacttttgagaacctataatatattatactagtagttcagaaaggcacgaggaaatgtttgtatt

SEQ ID NO: 106094 - DNA, 1312 bp, Zea Mays
aattccccatctcgcctcggctaggcgaatccgcaaacacagctctgtctatggcgtcctccgttcccgtggtcgacatcctcgacgacgacgacgacgacaacacctgcctcggcatcgcctcccctgcctcgtgcaagcggtccctcggatcctccggaacctcttcccgcgatttcctcgacgcgttctcgccgtccccgcccctgcgaaagcggcctcccctcgcggcggtggcccccatcaacctcgacgacaccccgtctccgcctaagcggcggcgctcctcggtctccatcaacctcgacgacaccccgtcaccgccaaagccgcggctctcctcggtgcccaagcagccggtcggggtggacgacgacgtggcgctctcacccactggtgatgttgttgccgacaggcccgattctatcttttactgggccgctttctccgagtcaccagagacggttgtgcccacttctgacggcctcggcagtcttgctgctgagactccgggcttcgcctccccggactcggttaggccacctgctgcccctgacatgtcaatgtcatctgctccgccggcacaaaaaggatctggagttacctctctgatatcacttgatagtgacaatgagtcagatgatgacatcatgaacatggagcctttgaccaatttgccaaacaataaggaagcgatgatgtgccaaaaggacggtaccgagcaggttcatgagaagcagaaaagacaaccggcagggaagaaactgacgaaggaggagaaagacaagctgatgcaagaaagaaaacaaaaacggcaggaagataaactactgaagcaagccttgaaagatgaactagctaagaagaagaaaatggaaaaagcaattcagaaatgggaatcaggaaaatttgctttagaatgtataactgttgagattgacaacagtgttatccaaaggggctctattggaggtcctcttctttcaagtttgacagagaatggtctttcctatgaacctaccaagaatagaatcagcggttcaattttatggaagttggatgttcctgatgatattgctcaggcgttttccgaccttaacaatagctgtgatatggtgctacatgtttcctttattcctctctaaccttttagcatcatatcttctattttacagtaaccacacagtcctaaaattgtagcatgacatctttctacagaaccaaaatccattgtcacaagtgaaatatgtagcaattgtgcttgaagctgaggaattttgtaaccttataagcaatggatcgttctttgatc

SEQ ID NO: 106095 - DNA, 971 bp, Zea Mays
tcccgcaccgcgaccactccgcttggcgcccggcgccagccagccagccatgttcacggacggcatgtcgaggctggcggtggcggtgagcgtcacggtggcgctcagcctggccatcttcctcaccatcctggtgctcctcctcgcggacctcatctgcgcgcacctccggcgccggcggctccgcgccgacgcgtcccggtcgaagctgggcctcggcctgtcgctggcggcgtcgtccccggcgcgcgccgacgccgcgtcgtcgtcggccacgacggcgctcgccggcacgccgcccttctactacgcgcacggcgtcctgcacgcgccctgcaccaaggacctcctcctcgccatccccaggctggagggcgccgtgtggcggtggtcgccgccgacgccgtcgtcgggctcgtcggggggcggcgacgggttcatgtgcatctccaacccggtgtacgaccgggccgcggccgcccccggcggcggggacacgccgccgtcgccgctcgggatcacggaggaggcggacgcgtacgggtacggcgaggaggacgcccgcgggttctcgccgccgctgtcggcgatgaggaagctaccgccgctgggtgtcctggccgcgtaccccccaccgccgcggccgagcttcaccgatgccatgccgacaatggcagcaccggtgaccgacaccaaccgggcctcctcctcttcgtccgcctactttttctcttcgtggtcgtccaagtaagagatcacctgtgacgtacgcggattgtagtgagatggaggtggtcagcagcttcgatttcattcattattttggccgttttttcctcgttctgtcatatcattgtcatctacggagtacggagtagtaccatcgcctcggtcctgctagctcctcctgcacactccatgtcctacgactacgataaccgaagcttttgcttggtgttttatccaaataa

SEQ ID NO: 106096 - DNA, 2686 bp, Zea Mays
ggggatttatctgtcttctactaccgccttcaacacattgaaatggctctaaagtatgtcaaccgtgcgctatatctgcttcagttttcatgtgggctttcacacccaaattcagctgccacctacataaacgtagctatgatggaagaaggcatgggaaatgttcatgttgctcttcgatacttgcatgaagccctgaagtgcaataagaggttgctaggagctgatcacatccagactgctgcaagctaccatgctatagccatagccctttcaatgatggatgcgtactccctaagtgtgcaacatgaacaaacaaccatgcagatacttcaggagaaactaggggaagatgacctccgaactcaggatgctgctgcatggctagaatattttgagtcaaaagcattagaacaacaagaggctgcccgaagaggcatgccaaaacctgattcatctattgcaagtaaaggacatcttagtgtatcagatcttcttgacttcataagcccagtccaggaaagaaaagaaagcaatgtgcaaaggaagtgtcggcgtgcaaagaataataccagagctcatcatggtgaatcagttgaagaaaaggagaatttccagcatgactcaggatctcttggagcaagtaaagacggttttgaagaagaaaaacctgatgtgcatcctcctgctgtattagaagaaaattatgctgcccatgaagagcagaagcaatgtgatgttttatcaccagaagaatattctgatgaagggtggcaagcagctaatatgagaggaaggtccgcaaatgtaaggaagaaaagtagtcgcaggaaacccgctcttatgaaattaatggttgatcgtttcgaagatgatcatacaggttctgtgtataggactggtttacagcctcgaacaaaaggggagaaagatgattctgcaactgctcctagccagatttcatttggtagctttttaaaaactgacaagttgaatggggatcccagcattgctgaagataagtctttgaatggtactgctaaaccagaacaatttacaaatccaacaggaattaacaggccaaccagcattgcttccaagtttatatcatacaaagatgtggctgtttcgccccctggcacagtattgaaaccaattttggagaagaaggaagcaaaggagaagggtagtggacatgatatttatctaacactgtcatccgaggaagaagatccacagtttacagaaaatgagaaggaaaagccaagtgaggacagtagcaaagaggttctttcaagtcagcaagacttagagagtcatgtagaaacacctgacagcaacagtgatgaaaacccatctgcacctaagaaggcatctggaagcaaactgtcagcttcagcgcctccattcaatccaggatcactcttatcaatgtcccacccatacagcacggtggcaatatatgatgctagtgctgttattcaggcagtaccaaaccaagcaatggagattctccctcatgccattgacactagagtgcctcgtggccctcggtccaccttgtactatcgtactgggcattccttccaaaggaagcaaggttacacgcacagccagagcactattgtaaggggtagttactcccccacaaccatgaacccccatgctgctgaatttgtgcctggaaaaacttcgcagcaatctgatgtggctgacagagaacccagtcctgctaatcatgtggccaattctgatctggatgttgtatcacagaccacagatgaagtgaaggctgaaacacctgccactgaaaaggcaggtcaagttgagaaagtcgtttcaggtaaaggaaaggaaaacagagggaaagacatcgtgagaaactcatacaaaacagaacttgcaaggcaaattttgctcagtttcattgtgaagtcagtgcatgacagtttaggttccgcccaagctgaaccagagaggaagccaagtggatcagatgaagctagtaataaacagagcagcaacttagtcaagaatgcttctggtcgcaaagattcagataaacaagagaaatccatggaggttcccaagggcctgaaggatacagagggatttacagtcgtttcaaaacgtcgaaggcggccccagccattcatgaaccccataaacggcctctgttctcagccgtctatttgcacctctgtcagttaaggtctcattgcattttcaaagacctgcaatagtttggaagatggaccattgcttttgcttaggggttggtagaagaattttgccgtatccaagcgagcagcgagcatgtagtcaaactgtacaaaattttccaggataccctttgtaataataataaaaaaaaactgctgtaatctgcagtagctgtagcgctgaataaagtattcctttgtatgttagatatgacagaatcagaggaaatagcaagcagatgtttaggttaatccaatatcccagtagtgcttctcttatgccctagtgtttctgcagtttctcaagatgtcgtggggatttatcgttgcaatctgcaaatgctgtcagagcagaagaaactgaatctgctaggcgccaagagtttgttcatgaaggcatgtcttttattgcttctttcccctgtgcccagactgctcagtgtggtcattggatgccttgtcag

SEQ ID NO: 106097 - DNA, 2285 bp, Zea Mays
cgctctgcaccgcgcgcctccttctctgctgcggcaaccgggaactgcggctgcggcggcggcgacttaaaccctcgagctcgctccaaggccgtcgctggtcgatcgggcggaagaggcagaagccagccagccagccaatggcccccaaggccggccgtggcaagggcaggggcggcaaaggcgacaagaggaagaaggaagagaaagtggtgcccagcgtggtagacgtcacggtggtcacccccgacgagtcccaggtgacactcaaggggatatccacggaccgcgtgctggacgtgcggaagctgctggggtcgaacgtggaaacgtgtcacctgacaaactattcactctcccatgtggcgcgcgggcaccggctggaggacggcgcggaggtggtggcgctcaagccctgcgctctccggatcgtcgaagaggagtacgcgacggcggagcaggcggaggcgcacgtccgccggctgctggacatcctcgcctgcaccaccgcgttcgccaggccccgggacggcgccgccaagcacagggcgtccaggcacggccgccccgcgacaccgccctcctctcccacgcccgcctcgaccggggcccatggcgtcgccagcggcgaggccgcgccgccgatatcggaggcgcacgacatggccgccatccggccgccgcccaagctgggggagttctacgacttcttctccttcgcccatctcaccccgcccgtccactttatcaggaggaaggaggcgaatggcgcttctcaggaaggcgatcacttcgaaatcgaggtgaaggtttgcaacgggaagcttctgcacgttgttgcttcagtaaagggtttctacttgtcagggaagccacacaacgttagccactccctggtggacctgctgcaacagctcagcaatgcgtttgctaatgcatatgaggcgttgatgaaagctttcgtggatcacaacaagtttgggaatttgccttacggattccgtgcaaacacatggcttatccctccaatatatgttgactctgccacaaggtgcccagcactgccagtcgaggatgagaattggggtggaaatgggggtggctgtggacgtgatggaaagtatgatcgcagacggtggtcaaaagagttttctgttttggctagaatgccttgcaaaactgaggaagaacgggtgatcagagaccggaaagcttttcttttacacaatctgtttgtagatacagcaatttttagagctgcgtcaacaataaggcgactcattgatcagtctatgaactcagttggttcacatagtggtacacatggttcaaacgtatttgaggaacgtataggggacatgaatataactgtgaagaaggatggtgctgatgctagtttaaaggtggaggacaaggttgatggtgttgccttctgtcaaacgggtgctatggatattgcacaaaggaatcttctgaaaggtttaacctctgatgaaaatgttgttgctaaggattcttcaacactcggggtggtgattgtcaagcattgtggatatacggcaactgtgaaggtttctggacgtgcaaaggacagtaatgatgttaaacaaacaaatgacatctctggtaaatttgatggaatgctgaccattgatgtacatgaccatccagatggaggttctaatgccttgaatgttaacagtctaaggataccactcccgagagttatccatccagaaactgttgttggtaaccagcaccatagcccaaagtctcatgctagtaatcctgcaaagaaattggcacgtaaaatactcaaggacagcttggtaaagctggatagcatgcctagcataaattctagaattattagatgggaactggggtcctcctggctgcaacaattgcagaaaaaggatactccagcgtctgagaatggtaaggggaatgcgatgaagactgacaaagaaccagctgtcagaggtcttggaaagcattttgaacaattaaggaaacttaaaaagaaagaatgcaacaatgaaggttccagttctgagaaggaagaatgtagcaataactattcatcaatgaatggtacacaagtatcagatatgatagctgctgatgaagcaaataacggggctgatattagcaagttaatgtcagaggatgctttccttagcttaaagagtttgggagctggccttcatgaaaagtccctcgaagagctcacaaagatggcccataatttctatgatgatactgcactcccaaagctggtaagc

SEQ ID NO: 106098 - DNA, 2284 bp, Zea Mays
tccacttgtaatccagccgaccgtacccgctgccgtcgcgcgccggcatttgcccctgcccggcgccagctcgatagctctgctgcttcctcgccatctccgactccgcggcgagccgcgcgcccgtcggctagcggaggcgggagggcggcggtaccggtgaagtgtcgtccggaggaggaggaggaggaggagcgggatggggttctgggtagggctggtgttgggggttgcggcgggcctcgccctcatcgtcggcttcgtccgctgcgagaattctcgctccgcccgtcggcgacaactggctgctaccgttgctagtttctcaagaatgacgattgaagattcacgaaagttactccctgctgacctatacccttcttgggttgttttctcatcgcagcaaaagttaaaatggcttaatcaggagctgacaaagatttggccatttgtaaatgatgcggcgtcagaactgatcaaaacctctgtagagcctgttcttgaacaatataggccaataatcattgcgtccctgaagttctcaaaactcactcttggtactgttgcaccacagtttaccggtatttcgatcattgagaatactaaggaatcaggtattgtcatggagctagagatgaattgggatgccaatccaagtatcatacttgctgtaaaaactagacttggtgtcgcgcttccaatacaggtgaaggacattggctttacaggagttttccgcttaattttcaaaccactaattgaagagctaccttgctttggagctgtttgcttttctctacgacagaagaaaaagctggatttccgactgaaggtcattggcggcgaaatttctgctgtacctggaatttcagatgctcttgaggacactataaaaaatgctattgaggactcaataacatggccagtaaggaaagtcattcctattatacctggggactacagtgatctggaactgaagcctgttggtaccttggaggtcaagcttgtgcaggcaagagatttgacaaacaaagatctgataggaaaatcggatccttttgccattgtatatgtgcgaccattaccagacaaaatgaagagaagtaaaacaattaacaacgatctgaaccctatctggaatgaacactttgagtttactgttgaagatgctgatactcagagtgtaaccgtgaagatttatgatgatgatggcattcaagaatctgaattgattggctgtgctcaagtcaggctgaaggatctacagccaggcaaagtgaaggatgtctggttaaaacttgtaaaagatctggagattcaaagggacaggaaagatcggggtcaggtgcaccttgagctgctatactgtccatttgacatgaaggatgaggctccaaaccctttcagccaacatttttcgatgacttcattggagagaacattgacaaacatggaaaatggatcggggggctctagttttgataggctgtcttcaagaaagaaaagggaaattatcatacgaggagttctttcagtaacagtgatatctggggaggatctgcctgcgatggatatgaatggaaaatctgacccatatgtcatactttctctcaagaagacaaagacaaagtacaagacaagggttgtgaccgaaagcttgaacccagtatggaatcaaacttttgattttgtcgttgaagatggcttacatgacatgcttatgttggaagtatatgatcatgacactttccgtagagattacatggggcggtgcatcctgaccttgacaaaagttttgctggaggaagagtacaaggaaagcttcaacctggagggagcgaagagcgggaagctgaacttgcatctgaagtggtcgccacagccaatcatgcgtgattcgcgtgaagcgggcagcttaaggtcaagataaggccagtaagtgcgcacgcattggtgtacgtgtaattttttttggctgggtgtctcggcctcgagacctgcttggtcgagggtttgtaaattttgaggtgcattctttttgaaattcaacgcgtatgcggggacggtccaccaaaattttattccgaccaaggactccagttacgtgagctagcagaagtattcaggtgcaaaatgacccgttgcacatgtacatgaggctgttatatttcgatcggttaagctcgaggtatgttaatgtagtcggcgcatcgcaatggtttgtctgtatactccttgtaatatttaaagtatggaaaaaaaatgtgtagatcagaaagctagt

SEQ ID NO: 106099 - DNA, 1926 bp, Zea Mays
ttaacaaagccacggaaaaaccatccacgcacccaacagtcgacccaagctccaactccgactccgatcataccgatggcgtcagaaggggctcccacgccggcggcggagcgaattagggtggtcggcaagtgggccggcgccttggaggtggacctaggctcttggacggtgtcgatgctgcgggcggaggtggcgcggcgggttggggacggcgtggagcccgagtgtgttggcctcatcttcggcggccgcgtgctcaaggatgatccacccgcctcgttgcgggaggctggacttaaggccaacgccaaggtgctatcctccctcacctcccctgatcgcgctaaagaaatcgatgctcaggccgccaaagcgaaggctgaagaggagcacgctgcaaagcttgtcagactgtgggaagctgcaaaagcgttgtctcaaaggcacacggatggctcctaccttgcggaagaagactacaacttagatcttgaggatcaaagtggccaaaaagtgatgtttggatctgtagatgataaaaaggctttgacgatggctctaatgcttcaccaaaaagctaaaacccagatgaagaagggaatgtataaggaagcactagatgtgttaataatggctgaggaagctttctctctttgtgacccaaagcttattgagaaagttgataatgtgccaatgctccaattagatatagtatggtgttattttgtgcttcgtgatgtatcgtgcttagaggtcgcaggggcccgcctagaaaaagcacggttaggttttgagcgttctcatgggaaagattccacccgcttcagaatactccaggctggccggcaagctgatcttgctatttatgtaaggctggagcttttggaaggagtggtggcataccataatggtcatgttgaaaaggcgcgtgaatctctcacttctgcccatgctaaatacctgcagctccaagtgccagacgaagctatatcaatgttaatggatatgggctatgaagcacggtctgcaaaaagggcattgaagatgactggctatgatattcaatcatcagtcgaactgttatgtgaggagcgtgaaaagaaacttcgtagaagagaggaggatcgagtgagacaaagagagattttgaaacaaatggcatatggtaaaactcccatgaacaaggcagttgacatgcagaagctgaaaggcttgactgctatcggatttgagaagtatcttgctgcagaagcactgcgcataaatgaaaatgatgctgacaaagcattagaccttttgacaaatcctgaacaaaactgtatcctacaaagtaaaattcaggcaaggagaagccgggcatcttgtgggtttggtgcaggatcctcgcgttccagggcagctgttgccagggctgctccagcaatcaacaattctcagactcttgataatgctcctccacatcctgctgatggagatgcccctccacatgctgccgatggaggtgctcctccacatgctgcagatggagatgctcctccaatgaacaatgaagaaattgcaaaccaagatgaaattatgattggtgaagtagctgtagatgatgaagatgaagacgcaaactctcatccagttccagccagggatgcgtcgatggaaagtgagcttgccaatgaactgaagggggatgccttggatgactacgatattgatgtcagtaacgaaggacaggctatcgcagagtacttgagcttactggaggctgctcctagcagttcttagattgcaaagatctacagtgctcgataggtatctccgactttagaaggataaaatacaggtggtttcaatcgatttgtacataaataatgctacccttatggattatatatatgatgcttagaaatttcttaacgttgtgtcgaa

SEQ ID NO: 106100 - DNA, 913 bp, Zea Mays
agcgcagcgcagcgcactgcagatcgagcgcgcgcggcagaggcagaggcagagccaagcgaagcgaagcggtcggcgggcgggcatggactggcacgcgtggctgtcgggggcgcggctggagccggcgctggtgtacgagtacgcgctggtgttcgcgcgcaacgagctggaggccgacgacgtggccttcttggaccacgagttcctgcacagcatgggcatctcggtcgccaagcaccgcctggagatcctgaagctcgcctggcgcgaccgccggagccgcggccgcgcgggagccggccgccccgcggcggcgctggcccgcctcctcctcggccgcgtcgccaggtacgtgcgctcgctcgtgcgccgcgagggcgactgctcgtccacggcgctcgtgctggtgcccccgacgacccagccgcagcagcagcagcagcgccccggcgacggccgcagcccaccatgcgtcggcgtcggcggcgtctgtgtctcgaagcacagccagcagcgccgcggcggcaacaaggcgctgcggcgggccaggtcggagcccaagggcaccccgcccagagcctccgtcgtcggtgggagggccgccgcggccgtgcacgcggttggcgacgacgtggagggcgggagcggcagcgagatggtcaggtgggaccgcctgttccaggacctcaagcccaactgacacgccgccatcgagtgcatgacgctgggacgacggaggaagcatcagcgttcggagtgctatgtttagtaacggtttgtgcttatatatgtttcatatgagtggtgagtgtcgtcgttgctttacttttgtttcctgtcgatgttgtttgcatgtacatgcagtctacgttagtgagtgagtctatggctggaactggcgatcggccgg

SEQ ID NO: 106101 - DNA, 66 bp, Zea Mays
aaggtgaaaaaggcagcggcgcacgctgatgcagcagcgggagccaagcagcagcaggctatatag

SEQ ID NO: 106102 - DNA, 866 bp, Zea Mays
cttcgcctctcaagcctcttgccgattgctcccattccattccatcccaccgctcgatccagctactactactgtacttcgcattcagcagctagcactagcaggacagaccaccgcatctggttcttcgaccgacgaccgagttgtttgttggatcagcacagagccacacaggacgagatgaagatgaggactcctgctgtggccttcgctgctcttctgctgctgctgcttcagattacgacaagagcacatggaatcaggatggacaggcagttacacgaagcaatcaacagcaaaaagaagatgatggccgatcccaagagcggcggcggtggggaagcagcatccattgctgccgccggcgactcggtgaggaagcactgcgctcccgatgggcggcggcgttgctcaggtacaacgaagcagatgacccctactactgttgttggcagcaggtatagcgaagtggcgatgatcatcagcgcgcatgcggcgccgaggttccatgaggattactatgggccaagtggccatgagccgaatcaccactgaccaagctgtccgcgagcaaacccatttgcacatttttcttcatcccctagcgtactactagctgactacccggcccgtagtttttcttcttctcttcatgcttcttcttcgtcatctcttggcttggagaataatgtaaagggagaagctaagctagttagctagtttgtagcactgttattcatattatgttccgcacgaggccacaatatatataatatctctgttatgtatgagtacctgtaatctagttgattaaagcacattttagctctgcacacaataataagcttgtatttttcctgctccaa

SEQ ID NO: 106103 - DNA, 2017 bp, Zea Mays
ccggccagaggcaggccgagtcgcaagcgccgttgccatctctaacacgcggcactgtaggaatcggctacctccggctgctctgctttgtgagatgctcttcctcgtccggcggcaccgccgcctcgctctccccttctccagtctgcacgcacccgcgcccgcgcccgctcccacactgccctcctctctcgacgcctcggcggtgctcaagacgctgtccctctacgccaacgattggcgccgggcgctcgacttcttccactggtccgcctcccccgccggcgccaacttgcccccgaccgccgccaccctcgcccgagcggtcgacatactcggcaaacacttcgagttcccgctcgccacctccctcctcctttcccaccacgatcctggggaccccaccttcctccgccccgcgctccgcgccctcctcaaccgcctcgccgccgccaacctcatcgacgacgccctccacgcgttcgaatccaccgctgcctccatcggactctgcgatgaggtctccttccacatcctcgtcgacgcgctctgcgaccaccgccgcgtcgacgaggccgaccacctatgcttcggcaaggacccgccgccgttcccaccgggcacgaagacccacaacctgctcctccgtgggtgggctaaggcccacgcctgggcgcgtctccgccagctgtggttcgacatggaccgccgcggcgttgccaaggacctccattcctactcgatatacatggatgcccttgctaagtcaggcaagccgtggaaggctttcaaagttttcaaggagatgaagcagagaggcattcgaatcgatactgttgcttacaacactgcgatccatgctgttgggatggcacagggcgtcgactctgctgtaaggttgtacagacagatggttgatgccggttgcaaaccaaatattgccacttacaatgcgattatcaagttattctgcaaggagggtaggttcaaggaagggtatgcgtttgttcagcagatgcgcaagactggctgcaagcccgacgtgctcacataccattgctttttccagtatttgagccgtccacaagaggtcctcggactgtttgagaaaatgcttgagaggggttgccagccaaggatggacacatatgtcatgcttattaagaggtttggacgctgggggttccttcggccggtgttcattgtgtggaaggcaatggaagagcagggtcttagcccggatgcatttgcatacaatgcacttattgatgcattactgcaaaagggtatggtggatttggctaggaagtatgatgagaaaatgcttgcgaagggactctcacctaagcccaggaaagagctggggactaagttgccagaagcagaatctgatagtgataacacattagatggtgtgctttgatttctgtgagctagacagggatgtacattatcatgttctactacccattgttatcatcgaaacaattgtttgaatatgctcatgttcccaaatataggctgttttcattcaaggagatctaatatgatttcatggattttatatggaattcaaagcagacaatcatattgcattgccatcagttatcattaggttattatctgataaatctgtggaagaggtgggcctccagagcattatgtgttcctggaatcataggtggacatggtcacatgtgtaggaaaaagaattatcatatgctcatgggtctggtgccagttgacataagaagtggatgaaagaaccaagacgaatcagcaatgaagcaaaggccatgtagtttgtaaggtccctagtaagtcagcttcaacttgctaaacagctcatgacgagacctggagcaggaatactggtaagtcagcttcagcttgctaaacagtttcatggcgagacttggagcatgaatacttcaagtacttatcatgtcatatcagactcattttttggctcatttattactgaattaaattgggatgaaagtcgaaatgcaaaact

SEQ ID NO: 106104 - DNA, 856 bp, Zea Mays
ggtggttgctcttgctttgcctggtctttatttcatacagaacaagaagtgggtagtgtgtagagtagaggagatacacctccaggtttttgtacatacacgggccttgcttctgcatttctgccctgtagagatccagatttgttgctgaactagatcgcatagtgggcgatgtcgacgacgtcctcgggcctggtcggcggatgtgtcttgttcctcacgcgcagctgctggtactccttgtacaggaaccccctgtacagcggcgcctcgccgatattggccgtgaactccggcagcggttcgacccacctatctccgtgcgggttgaagaagaaggagaaggagtgcctgtgcgcgggcttcctcaccacccgttgtcgtgtgctgcctgtatggcgtcgccgatgttgacgatgatgctgccgtcgaggggctccgccgggacccagtggccgtccttgaggacctcgaggcccccgacatcgtcctgcaagatgagagtgatgcagctggcatcctcgtgctcgctgaagccgatgctcgtgctctcctccgccgccgccgggaagtagcgcctcaccgtcatgaggtcgaagctgcggtcatcgttgtagttcttgaggaagcccggtgggaggcccatgcacccgttcaggatctcttggatgagcaatcccagttcggtgaacttgctgtagcactcctccactgtctctctgaagatgaaagatggttgcgtcagttgtttcttgctagatcacagtatcaggtgtttcgttagttgtatgacgaaacatttagccctcgaatcttttgaaatttcttactagatcaaagccgctatttggagttt

SEQ ID NO: 106105 - DNA, 1852 bp, Zea Mays
cccttcttaaaaaacctctcgcctggaggcggagctttcgaagctcgcacactccccctcgcaaccatcaccgccgcggcctctatttctcccccatcccccctcgcatgccccgctcgccgccgctacctcctcccgcccctaggtgacggtgactcactgactccctacttccgtcgcccaaatttctatctcactatctccgccgcgagatctccggctgcccgcgccatggtcgccgcctccggcctcgcgctgccgcgggtgtccgcaccatgcccggtgcgcacgcgtggtggcctccgccccgccttcctccgagtcgcgcagcccgtgacgctgccaccgccccagctccggtgctgcgcgtccaccgtcgacgatggcgtggtgtccgctgcggcttccaagccccgcctccccagggtggttggtatgggttcaaagctcgttggatgtggatcagccatcccaacacttagcgtttcaaatgatgacctttcgaagatagttgaaacatcagatgaatggattgcggctcgaactgggattcgtaacaggcgagttctttcaggagatgaaacattgcggggactctcgatacaagcagctcaaagggcacttgagatggccggagtaaaagctgaagatgtcgacctcgttcttctttgtacatctactccagatgatctgtttggaggtgctgctcaggtgctgtccgaagtggggtgcacaaaagcttttggatttgatattacagctgcttgtagtgggtttttagtcggcttaatcacagctactcgctttatcaaaggcggaggttttcagaatgtcttagtaattggtgcagatgctctttcaaaatacgtggattggacagacagaggtacatgcattctttttggtgatgctgctggtgctgtgttggtacaggcatgcagtgctgatgaagatggcatgcttggtttttgtgttcaaagtgatggcaatggacaaaagcacctaagtgccatagcggctaatgacgagtctatcttgtccaataccaatggtgttccaggatttccgccaaagaaggcaacctactcatgcattcaaatgaacggaaaggaagtttttcgctttgctgtccgatgcgtgccacagtccattgagaaggcactccaagaagctggtttgcctgcctccagtatcgactggttgttgttacatcaagctaatcagcgtattattgatgctgctgccagtagattagatatcccatccgacaaggttatttcaaatcttgctaattacggcaataccagtgcggcatccatcccattagcattggatgaggctgttcgcagtggcaaggtgaagactggtgatattattgccgcatcaggttttggcgctggacttacctggggttcagctattgtcaaatggggctaattattctacgtgagccataacaacatcaatgagatcttcataggccttggggacctacatctatttggtctctccccccttccacccattttctgtgcaacatttttctatcgcatgtgtcggtcttccttgcacatgaaaatctagtgccattttaccgtattcctttggctcattacacaactgagagtagattggtggatgaaaatggttgaattttgcatcgaggatgattgtggtggtactaaagatgagattacactgtaaagttaatgagcctttttgtcagggaattttactgaataagcatgtacaaggagaggtgggccgtggacatatgctgtaggacaattcttagtaattttgttctgcttttattatacacctattgttagtatattttgttctattatgc

SEQ ID NO: 106106 - DNA, 1316 bp, Zea Mays
gaccagcggtcagccccctttcggcctttccctcccatatactcgccgtcggccagcggatctaatcggggcgggcgcgatggctgggcagaaccagcggctcaacgtcgtgccgacggtgacgatgctcggcgtcatgaaggctcggctcgtcggcgcgacccgcggccacgcgctgctgaagaagaagtccgacgcgctgacggtccagttccgcgccatcctcaagaagatcgtcgccgccaaggagtcgatgggcgagacgatgcgcgcctcctccttctccctcgccgaggccaagtacgtcgctggcgacggcgtccgccacgtcatcctccagtccgtccgcgcggcatccgtccgcgtccgctcccaccaggagaacgtggccggggtcaagctccccaagttcacccacttcgtcgaccccgccgcggcctccgggggcccctccaacgcgtccccgagcctcacgggcctggcccgcggcgggcagcaggtcgccgcctgccgctccgcgcacgtcaaggccatcgaggtgctcgtcgagctcgcatctctgcaaacctccttcctcactctcgacgaggccatcaagaccaccaaccgccgcgtcaacgcgctcgagaacgtcgtcaagcccaggatcgagaacaccatcagctacatcaagggggagctcgacgagctcgagcgcgaggacttcttcaggctcaagaagatccagggctacaagaagagggagatcgagcgccagatggccgccgccaggctatttgcggaggaacagcttgccgaggatctcgcgcttaagaggggtatctccgtgggggctgcggcaaacctgctggttgctggtggggagaaggacgacgacatcatcttctgaccactccttccatggccatccagtcattcaatcgattatcattttatcttaaaatgctgaagactggccattggaatttaattggcagaaacaataagttgatgctggagctccagaattgtatctgtttatagaatgatggagattttgattcagtaatctggagtctagccatccgagatcctcaataatctgtacctggaaaccaaacagtgccaagtaacttttacggagcgttatgtgcagctcgtgtagaaaattcaattgaaccgtatttcctgtcgtgtaccttccagtaccgtattatattatatatttattattcaattggacctgcactcagaagttgcagtctgggacgtatttgcttttgcattttataacccgattgctgtttcgaatatttcgtgtatgatcttgggaatgc

SEQ ID NO: 106107 - DNA, 1302 bp, Zea Mays
cccgaaattagcagccggcatacacgagagatacgaccagcggtcagccccctttcggcctttccctcccatatactcgccgtcggccagcggatctaatcggggcgggcgcgatggctgggcagaaccagcggctcaacgtcgtgccgacggtgacgatgctcggcgtcatgaaggctcggctcgtcggcgcgacccgcggccacgcgctgctgaagaagaagtccgacgcgctgacggtccagttccgcgccatcctcaagaagatcgtcgccgccaaggagtcgatgggcgagacgatgcgcgcctcctccttctccctcgccgaggccaagtacgtcgctggcgacggcgtccgccacgtcatcctccagtccgtccgcgcggcatccgtccgcgtccgctcccaccaggagaacgtggccggggtcaagctccccaagttcacccacttcgtcgaccccgccgcggcctccgggggcccctccaacgcgtccccgagcctcacgggcctggcccgcggcgggcagcaggtcgccgcctgccgctccgcgcacgtcaaggccatcgaggtgctcgtcgagctcgcatctctgcaaacctccttcctcactctcgacgaggccatcaagaccaccaaccgccgcgtcaacgcgctcgagaacgtcgtcaagcccaggatcgagaacaccatcagctacatcaagggggagctcgacgagctcgagcgcgaggacttcttcaggctcaagaagatccagggctacaagaagagggagatcgagcgccagatggccgccgccaggctatttgcggaggaacagcttgccgaggatctcgcgcttaagaggggtatctccgtgggggctgcggcaaacctgctggttgctggtggggagaaggacgacgacatcatcttctgaccactccttccatggccatccagtcattcaatcgtggcagaaacaataagttgatgctggagctccagaattgtatctgtttatagaatgatggagattttgattcagtaatctggagtctagccatccgagatcctcaataatctgtacctggaaaccaaacagtgccaagtaacttttacggagcgttatgtgcagctcgtgtagaaaattcaattgaaccgtatttcctgtcgtgtaccttccagtaccgtattatattatatatttattattcaattggacctgcactcagaagttgcagtctgggacgtatttgcttttgcattttataacccgattgctgtttcgaatatttcgtgtatgatcttgggaatgc

SEQ ID NO: 106108 - DNA, 1184 bp, Zea Mays
gaccagcggtcagccccctttcggcctttccctcccatatactcgccgtcggccagcggatctaatcggggcgggcgcgatggctgggcagaaccagcggctcaacgtcgtgccgacggtgacgatgctcggcgtcatgaaggctcggctcgtcggcgcgacccgcggccacgcgctgctgaagaagaagtccgacgcgctgacggtccagttccgcgccatcctcaagaagatcgtcgccgccaaggagtcgatgggcgagacgatgcgcgcctcctccttctccctcgccgaggccaagtacgtcgctggcgacggcgtccgccacgtcatcctccagtccgtccgcgcggcatccgtccgcgtccgctcccaccaggagaacgtggccggggtcaagctccccaagttcacccacttcgtcgaccccgccgcggcctccgggggcccctccaacgcgtccccgagcctcacgggcctggcccgcggcgggcagcaggtcgccgcctgccgctccgcgcacgtcaaggccatcgaggtgctcgtcgagctcgcatctctgcaaacctccttcctcactctcgacgaggccatcaagaccaccaaccgccgcgtcaacgcgctcgagaacgtcgtcaagcccaggatcgagaacaccatcagctacatcaagggggagctcgacgagctcgagcgcgaggacttcttcaggctcaagaagatccagggctacaagaagagggagatcgagcgccagatggccgccgccaggctatttgcggaggaacagcttgccgaggatctcgcgcttaagaggggtatctccgtgggggctgcggcaaacctgctggttgctggtggggagaaggacgacgacatcatcttctgaccactccttccatggccatccagtcattcaatcgattatcattttatcttaaaatgctgaagactggccattggaatttaatgtaagtgatagggtacttccaacaaattagtgatttatattaactgcaatacttacagcgtcgtgcagcagcacagttccagcatctagtgttcattggaaaaagttaaaaaaaatgcaatacctatatatgcattagttttttgttgaagaatgttatgtttacactgaacttttaagtttatcgaattgctgcaagtaacatctagagggt

SEQ ID NO: 106109 - DNA, 1156 bp, Zea Mays
gaccagcggtcagccccctttcggcctttccctcccatatactcgccgtcggccagcggatctaatcggggcgggcgcgatggctgggcagaaccagcggctcaacgtcgtgccgacggtgacgatgctcggcgtcatgaaggctcggctcgtcggcgcgacccgcggccacgcgctgctgaagaagaagtccgacgcgctgacggtccagttccgcgccatcctcaagaagatcgtcgccgccaaggagtcgatgggcgagacgatgcgcgcctcctccttctccctcgccgaggccaagtacgtcgctggcgacggcgtccgccacgtcatcctccagtccgtccgcgcggcatccgtccgcgtccgctcccaccaggagaacgtggccggggtcaagctccccaagttcacccacttcgtcgaccccgccgcggcctccgggggcccctccaacgcgtccccgagcctcacgggcctggcccgcggcgggcagcaggtcgccgcctgccgctccgcgcacgtcaaggccatcgaggtgctcgtcgagctcgcatctctgcaaacctccttcctcactctcgacgaggccatcaagaccaccaaccgccgcgtcaacgcgctcgagaacgtcgtcaagcccaggatcgagaacaccatcagctacatcaagggggagctcgacgagctcgagcgcgaggacttcttcaggctcaagaagatccagggctacaagaagagggagatcgagcgccagatggccgccgccaggctatttgcggaggaacagcttgccgaggatctcgcgcttaagaggggtatctccgtgggggctgcggcaaacctgctggttgctggtggggagaaggacgacgacatcatcttctgaccactccttccatggccatccagtcattcaatcggtgcgtagcatcattcatcaacacattgtcctcttattctggatctgggatcagaaaacttgcacgatatgtgtctggtgcgacggtttctttcgttccatacaatgcccctgtagttccttttgattcgctccgtgaataatgacgctgtagggtttcattgtacttgtaccagtatcattctgggcgttacgattaatactttttaccttcttattagatggatccaatgt

SEQ ID NO: 106110 - DNA, 1215 bp, Zea Mays
atgacagagccgcatgtagcagtattaagccaggtccaacagtttctcgatcgtcaacacggtctttatattgatggtcgtcctggccccgcacaaagtgaaaaacggttggcgatctttgatccggccaccgggcaagaaattgcgtctactgctgatgccaacgaagcggatgtagataacgcagtcatgtctgcctggcgggcctttgtctcgcgtcgctgggccgggcgattacccgcagagcgtgaacgtattctgctacgttttgctgatctggtggagcagcacagtgaggagctggcgcaactggaaaccctggagcaaggcaagtcaattgccatttcccgtgcttttgaagtgggctgtacgctgaactggatgcgttataccgccgggttaacgaccaaaatcgcgggtaaaacgctggacttgtcgattcccttaccccagggggcgcgttatcaggcctggacgcgtaaagagccggttggcgtagtggcgggaattgtgccatggaactttccgttgatgattggtatgtggaaggtgatgccagcactggcagcaggctgttcaatcgtgattaagccttcggaaaccacgccactgacgatgttgcgcgtggcggaactggccagcgaggctggtatccctgatggcgtttttaatgtcgtcaccgggtcaggtgctgtatgcggcgcggccctgacgtcacatcctcatgttgcgaaaatcagttttaccggttcaaccgcgacgggaaaaggtattgccagaactgctgctgatcacttaacgcgtgtaacgctggaactgggcggtaaaaacccggcaattgtattaaaagatgctgatccgcaatgggttattgaaggcttgatgaccggaagcttcctgaatcaagggcaagtatgcgccgccagttcgcgaatttatattgaagcgccgttgtttgacacgctggttagtggatttgagcaggcggtaaaatcgttgcaagtgggaccggggatgtcacctgttgcacagattaaccctttggtttctcgtgcgcactgcgacaaagtgtgttcattcctcgacgatgcgcaggcacagcaagcagagctgattcgcgggtcgaatggaccagcctcctcccattccacaccgtgtcagatccatggcggcgctcagcctccgccattagcagctgccagcagcaaatcatga

SEQ ID NO: 106111 - DNA, 1340 bp, Zea Mays
atgaatgccacctgggatgtcgcaggaaaaggtgagtggcatgacagcacgattacgctgaccgatctctccaccggtttcgaccagttacaatacggtacgatgacggtagaaaagccgcgattaattctcgacaagcccatcgtctgggtacgtgacgcacagcatccctcctttagcggcgcgctgtcactggacgccgggcaaacgctgttcactggcggcagtgtgttaccgccatcaaccttaaaatttagcgtcgatgggcgcgatcctacctatttcctctttaaaggcgatttacatgctggtgagattggcccggttcgggtaaatggtcgctgggacggtattcgtctgcgcggtaacgcctggtggcctaaacaatcactgaccgtattccagccgctggtgccacccgactggaagatgaacttacgcgatggtgaactgtatgctcaggttgcattttctgctgcgcctgaacaaggattccgcgcgggaggacacggcgtgttgaaaggcggtagtgcctggatgccagataatcaggttaacggtgtcgattttgtcctgcctttccgttttgccgatggagcctggcatctggggactcgcggccccgttacgttgcgaattgccgaagtgattaatctggtgacagcgaaaaatattacggctgatttgcaagggcgttatccgtggactgaagaagaacccttgctgttgactgatgttagcgtcgatgtgttaggcggtaacgtactgatgaaacaattacgtatgccgcaacatgacccggcgctgttgcggctgaataatctctcatccagcgaactggttagcgccgtcaatccgaaacaattcgccatgtccggggcatttagtggtgcactgccgttatggctgaacaatgaaaaatggattgtgaaagatggctggctggcgaatagcgggccgatgacattgcgactggataaagacactgcggatgcggtggtaaaagacaatatgactgcgggttcagcaattaactggttgcgctatatggaaattagccgttcatcgacaaaaattaatttagataatctcggtttattaaccatgcaggccaacattacaggtaccagtcgcgttgatggtaaaagcggtacggtaaaccttaattaccatcatgaagagaatatttttacgctgtggcgcagtttacgctttggcgataatctccaggcatggctggagcagaacgcacgtctgccgggaaatgactgtccgcaaggaaaagagtgtgaggaaaaacaatgaaaattttactggctgcgttgacgtcatcttttatg

SEQ ID NO: 106112 - DNA, 1144 bp, Zea Mays
agaagctccgtccaggataaacgatgctccataaattatgaagcagatgcccccgccacctaaggatttggagattgctatagtatcattgatccctttcatgtcatggtctattcaaaaggaaaatccacttctgagattaacagttgagaactgtgagttgtccagtattggtgtgattatacttctggactgcctcacaaatgcgaagcaactccttgatgtgctatctattgcagacaatcatctagggagtcctgtggcagctgcattggccagattcttgggttcacatgtacgagctttaaatgctacagatatcggcttgggaacagtaggcttccaaatacttgaggaaacattgccaacagaagtagctctttcccacatcaacatcaggaggattggcctgctggtggacaaggaggcccccgccctggtcctggtgctgctgctacagctccagcaccagcaccggttgctgctcgcccataggctttagcttttcgaccgtgttgaaagtcttctgcccacgcagtttcggagttgtcgcctatgggtgaaaaacaagaagatggaaaatacaagcactctgtggatctcccgaaaacaacatttgagctgagagcgaattctgtacagcgggagctagagctccaaaaattatgggacgataatcaggttctgaaaagggtttctgaggaacactgggtgatcttcacatgggccatgcgctcaataaaatcctcaaggattttataaatcgctacaagctgcttcagaatcataaagtgtcctttgttcctggttgggattgccacggccttctaatagaactaaaaggtggcttgtgcgaacgaggcgtggcaatcgatgagcagtggcaaacccaaaaatcttcaaaagcctaggcaaaagtagtaactaaagatacatcaccttgtccagtttttctgcttttacttcgactatatgtcattgtgccacaaaaaacttgtttcatcgacttatgatgagtcttctcaattgtttcttgaatatgcttttttagaaccaaattgaattttacaaggtgcaatattgattagaaaaaggtgtgatgctgactgggaaagcgctactcccttgtatgaattagctggtc

SEQ ID NO: 106113 - DNA, 1114 bp, Zea Mays
agaagctccgtccaggataaacgatgctccataaattatgaagcagatgcccccgccacctaaggatttggagattgctatagtatcattgatccctttcatgtcatggtctattcaaaaggaaaatccacttctgagattaacagttgagaactgtgagttgtccagtattggtgtgattatacttctggactgcctcacaaatgcgaagcaactccttgatgtgctatctattgcagacaatcatctagggagtcctgtggcagctgcattggccagattcttgggttcacatgtacgagctttaaatgctacagatatcggcttgggaacagtaggcttccaaatacttgaggaaacattgccaacagaagtagctctttcccacatcaacatcaggaggattggcctgctggtggacaaggaggcccccgccctggtcctggtgctgctgctacagctccagcaccagcaccggttgctgctcgcccataggctttagcttttcgaccgtgttgaaagtcttctgcccacgcagtttcggagttgtcgcctatgggtgaaaaacaagaagatggaaaatacaagcactctgtggatctcccgaaaacaacatttgagctgagagcgaattctgtacagcgggagctagagctccaaaaattatgggacgataatcaggttctgaaaagggtttctgaggaacactgggtgatcttcacatgggccatgcgctcaataaaatcctcaaggattttataaatcgctacaagctgcttcagaatcataaagtgtcctttgttcctggttgggattgccacggccttctaatagaactaaaaggcaagttcatttgtacaaaggtctatattctatttgttgcccaagtcttatctgcattactaaatgctattcacgtttgctattttaaaaattgaattttgagaatcttcatgtatttagaggttgtatttgtatatgatgctaatctccttattgtcgcacatgttcacgctggagaaggtggcttgtgcgaacgaggcgtggcaatcgatgagcagtggcaaacccaaaaatcttcaaaagcctaggcaaaagtagtaactaaagatac

SEQ ID NO: 106114 - DNA, 770 bp, Zea Mays
agaagctccgtccaggataaacgatgctccataaattatgaagcagatgcccccgccacctaaggatttggagattgctatagtatcattgatccctttcatgtcatggtctattcaaaaggaaaatccacttctgagattaacagttgagaactgtgagttgtccagtattggtgtgattatacttctggactgcctcacaaatgcgaagcaactccttgatgtgctatctattgcagacaatcatctagggagtcctgtggcagctgcattggccagattcttgggttcacatgtacgagctttaaatgctacagatatcggcttgggaacagtaggcttccaaatacttgaggaaacattgccaacagaagtagctctttcccacatcaacatcaggaggattggcctgctggtggacaaggaggcccccgccctggtcctggtgctgctgctacagctccagcaccagcaccggttgctgctcgcccataggctttagcttttcgaccgtgttgaaagtcttctgcccacgcagtttcggagttgtcgcctatgggtgaaaaacaagaagatggaaaatacaagcactctgtggatctcccgaaaacaacatttgagctgagagcgaattctgtacagcgggagctagagctccaaaaattatgggacgataatcaggttctgaaaagggtttctgaggaacactggggtgagttgatatattcaagtatgtaacttcaaatatttaatagacctgtgaatccgat

SEQ ID NO: 106115 - DNA, 1323 bp, Zea Mays
cccgtccgtccgcggttcctctccccattccccaacgttcctcgctccagagcgtttcaaacggtaaggaagccacccccgctgtgaggttacttaaggcacggtgacccgacgcgagcaaagctccaagacccgcacgcgaacgccctccctgccgctccgccgtttcgcgtgggagtcgtttcgaaaaagtctgtttcgcgagcggtgaggactgaggagtgtggaggcctaaaaccatggcggcgagcatcgggatcatggacggcgcctacttcgtcggcaggggcgagatcctgcactggatcaatgcgaccctccagctctccctcgccaaggcagcgtctggcgcagtgcagtgccagctcatggatatggttcaccctggagtggtgcccatgcataaggtcaatttcgatgcgaagacagaatatgacatgatccagaactacaaggttcttcaggacgtgttcaacaagctgcggataggcaagaatattgaggtcaacaagcttgttaaaggacggccattggacaacttggagttccttcagtggttgaaaagatattgtgattctgtgaatggtggaattatgaacgaaaactacaaccctgtagaaaggaggtcaaagggatgcaaagaacgtgtctcaaagggttccaataagccatctaaatcattgcaagccaataggctttctggtgctgatccaacagatggaggccatggagttgggaaagtatgtaacactttttctgaagagcattacatagaacagattcagaagttgtctgaaaagattgcagacctgaaagtttctgtcgatagtactgaaaaagaaagagacttctacttctcgaagttgcgtgatattgagatactgtgtcaacggcctgagttagagcatctaccgatgactaaggcggtccggaagatactttatgcagctgatgcaaaggattcaccgctacctgaggcgaatgatataatcacaaagtcaccaagcttgttctcaaatgaaaccgagtgagatgtgcggctacatgagctaattttggtgcttattttccatcattgatcgtcttagttttgagtctgtaaatgcgtaaaataacatttgacacaagtctttttgctgtcaaaaacagttttcctgtaagaacttgagtggggttaattagttattacgcattcatgcttgatgtgactgtccctgtatggttcctctggagaatatagggtctgttcacttgactaatctgtaccggcgtctactacttttacagtgtttttgtctcaatggattgcagttgcaacagtct

SEQ ID NO: 106116 - DNA, 1332 bp, Zea Mays
cccgtccgtccgcggttcctctccccattccccaacgttcctcgctccagagcgtttcaaacggtaaggaagccacccccgctgtgaggttacttaaggcacggtgacccgacgcgagcaaagctccaagacccgcacgcgaacgccctccctgccgctccgccgtttcgcgtgggagtcgtttcgaaaaagtctgtttcgcgagcggtgaggactgaggagtgtggaggcctaaaaccatggcggcgagcatcgggatcatggacggcgcctacttcgtcggcaggggcgagatcctgcactggatcaatgcgaccctccagctctccctcgccaaggtcgaggaggcagcgtctggcgcagtgcagtgccagctcatggatatggttcaccctggagtggtgcccatgcataaggtcaatttcgatgcgaagacagaatatgacatgatccagaactacaaggttcttcaggacgtgttcaacaagctgcggataggcaagaatattgaggtcaacaagcttgttaaaggacggccattggacaacttggagttccttcagtggttgaaaagatattgtgattctgtgaatggtggaattatgaacgaaaactacaaccctgtagaaaggaggtcaaagggatgcaaagaacgtgtctcaaagggttccaataagccatctaaatcattgcaagccaataggctttctggtgctgatccaacagatggaggccatggagttgggaaagtatgtaacactttttctgaagagcattacatagaacagattcagaagttgtctgaaaagattgcagacctgaaagtttctgtcgatagtactgaaaaagaaagagacttctacttctcgaagttgcgtgatattgagatactgtgtcaacggcctgagttagagcatctaccgatgactaaggcggtccggaagatactttatgcagctgatgcaaaggattcaccgctacctgaggcgaatgatataatcacaaagtcaccaagcttgttctcaaatgaaaccgagtgagatgtgcggctacatgagctaattttggtgcttattttccatcattgatcgtcttagttttgagtctgtaaatgcgtaaaataacatttgacacaagtctttttgctgtcaaaaacagttttcctgtaagaacttgagtggggttaattagttattacgcattcatgcttgatgtgactgtccctgtatggttcctctggagaatatagggtctgttcacttgactaatctgtaccggcgtctactacttttacagtgtttttgtctcaatggattgcagttgcaacagtct

SEQ ID NO: 106117 - DNA, 595 bp, Zea Mays
cccgtccgtccgcggttcctctccccattccccaacgttcctcgctccagagcgtttcaaacggtaaggaagccacccccgctgtgaggttacttaaggcacggtgacccgacgcgagcaaagctccaagacccgcacgcgaacgccctccctgccgctccgccgtttcgcgtgggagtcgtttcgaaaaagtctgtttcgcgagcggtgaggactgaggagtgtggaggcctaaaaccatggcggcgagcatcgggatcatggacggcgcctacttcgtcggcaggggcgagatcctgcactggatcaatgcgaccctccagctctccctcgccaaggtcgaggaggcagcgtctggcgcagtgcagtgccagctcatggatatggttcaccctggagtggtgcccatgcataaggttgattccgattcgttccaacttcgacttgattgatctgtagctgggtgcaggcccgtggtgctaacaggttgtctagtggattctaaccactgtcttctgtgcgggtttcccccaggtcaatttcgatgcgaagacagaatatgacatgatccagaactacaaggttcttcaggacg

SEQ ID NO: 106118 - DNA, 899 bp, Zea Mays
atgaccagtcaataccgactacagctagcacgagtggtaattaattatgacttcccaactgggatagaggactatgtgcatcgcatagggcgtacaggaagagatggcgctactggagtctcgtacacctttttctctgaacaagattggagtcatgctggtgatttggtgaaactcttgcaaggtgccaaccagcatgtccctccacagctgcgtgacatggctgcacacagtgcttctggaggtccaagaaacgaggctgctgggatgagtcgttgggatggacctggtggtagtcattttgaacctggtgttggtggctctgttggttatggtggtgttagggagggtcctggaggttttggtggtcgtgagggcccaggtggatttggtgtccgagaaagcccagccatgttatggtggtcacgcagcagaagccgcaacaggagctggagccgtaatcggagccgaagcagtagccggagtcgcagcagaagcaagagccgtgaccatggtgcagcaccagagcgcaggccttgggcaagatctggttttgatgtgctgcctcctgcaactggagctgctggacctgcacctgcgcccgtacctggaccagcagcaccacctgttcctgctctcgcagctcaacaatcattggctgatacatcttcaatgtcaccaatgtctcctggtggcatagtccagccagctgttgcgccgttgatatgcggtgggaatgacaacaactttggcggcataccgactggccaacctttgcaggggactgatgctgcattccccagttttcctgcaggcaaaaaatttccaggcgtagcagttcaacaggccgctcctgatgtataatgagttgaacaatatgtagtgcactgccccctttt

SEQ ID NO: 106119 - DNA, 1275 bp, Zea Mays
atggggtgcgcaacctccaccgaggcgcgccgcgacatggtgcggaccggcgccggcgcccccccgcgccggagcttctcgctaccctctgtcgaccgccagcggctgcggctgaagaccgtgtcgatgctcggcaacctcggcctcgccggcagcagcgcccgtcactccagctcgtgcaggcacgcgacgctgtcggtggaggatttgatgaagagcgacaacgaccatgccgcggacgcggtgctcctcggcgacgacgcggcgaagcggtccctgaagccccgcacgccgacgctgacgccgcccaacgagcccgaggtgatcaacgcatgggagctcatggcggggctcgaggacgacgcgccgacaccgcgcgccacgtacaggtgttcgctactcaatgagttgccgcaggagttgggcttggaggcgccgccgctgccggagtggatgcaggccgacatggacatgcccgtcgccttagacttcgaccctgaggtactgtccggattccgggatgctctagaggccacggcgccatcgccagagcatgttgtctcgtccgccgaagccgataccgagacgcccagggagcaggagcggaagggcgcggatgcatgtgacatgccaacgtcgccggccaccggcaacatgccggagctttccggccttgtccgtgcccgcatcatcgcgttccaagagaagatcgaacggaggggaagcaagggccgcgacgccaaggtgtcgtcccggtggccgccgggaggcgagcggaaggcggtggtgtactacacgagcctccgcggcgtgcgcaagacgttcgtggactgttgcgccgtgcgcagcatcctgcgcagctacggcgtgcgcctggacgagcgcgacgtctccatgcacgccgtcttcaaggccgagctcgcggagctcctcgggcccgggttcgcagccgccgcgctcccgcgcgtgttcgtcgacggccggtacctcggcggcgccgaagacgtgcacttcctgcacgaggcgggcgagctcgggcgagtgctggaggggtgcgaggccgcgccctcgcggaagctcgggtacatggaggcgtgcgccgcctgcggcgacgtccggttcgtgccgtgcgagacgtgctacggaagctgcaaggtcttcgtcgaggacgacgacgcggacgacatgtatcagtatcacgacgtcggcgagttccggcggtgtcccgattgtaatgaaaatggcctcgtaagatgccccgtttgttgctgctga

SEQ ID NO: 106120 - DNA, 774 bp, Zea Mays
ccccgcgccggccgagctggtccctgtcccagctctgctcgcccccagccaaggccttcccatggctctcggctagagctctgctcccccaactccgctgcgcttggatttctctctctgccgcgcgttgccgagtcgtctgcgcgtcctgagctcctccagtgccgcgccggcctggagctttcatggccgccgccctgccctgtcttccatggcgcgcggtggtggtgggttggtgttggtggcggtgactcactgacggcgacgcgccctgctcgtggaatccacgacttgcgctccctgcttgacagctgcgccgcttgcccagcccggccgaatcccctgcagactccatccatggcgcgctacctgctccagcccggtcgtccctcgctccactcggcacccctcggcttgcccccatggtgctggtcgtgtccctcggcgccggtcgcttcttcttgctattccatgccacggcaatcgccctgctgctccagtgcgctcagccgagcgattctctgctccatgcgcacggtatttctccagcgtgccgcacccagtccctgctccttgtttttctctgtgacgtggagtctcctcgccgtgcggatctctctccttcctaccctgctcggattgtgccacgcttgctgtcgcgttcggcctgctccggatccgaagttggtcgcctcggtgtgaaatcgccgtcgcgtccggggttttgacatgtctccctgctcgccgtcaaacttgggtttcctgctcagcctt

SEQ ID NO: 106121 - DNA, 1893 bp, Zea Mays
tcacccatggccaacaaggtcgccgtcgccagcgtcatcgccgcggtgggcatcgtggccgtgatcggcaccatcgccgcggtgaccagcgccaagaaagcgggcaacaaccacggcggcatgtccgccagcgtgaagctctccacggtgtgcgcctccacgctgtacccgcagaagtgcgagcagagcctcaagcccatcgtcaacgacacctccaatccggaggacgtcctccgggccgcgttcaaagtggcgctggacgaggtcgccgccgccttccagcggtcggtgcacatcggcaaggacgcccaggacaacctcaccaggaacgccatggacgagtgcaagaagctcctggacgacgccaccgaggacctgaggggcatggcgaggctcaagcccgcggacgtggtgcgccacgtcaaggacctccgggtctgggtctccggcgtcatgacctacgtctacacctgcgccgacgggttcgagaagcccgagctcaaggaggccatggacaagatgctgcagaactccaccgaactcagcagcaacgcgctcgccatcctcacacgcctcggcgagctcctgccgcaggaagccaaagctctgaacgccaccctgccgggtgcggggcacggccgccggcttcttggctggcagatgggcgaggccgaggaggtgaccagcggcggccgcgggcttccggccgtcaatgacaagttaggcgagatcgcggacgtagcgaacgcaaacctgaagctcctgtccgatcacgctgccctcagggggaggggggtactgaccacgggcctcgtcggcacgttcgacgagatccaatacgggcggagcggggtgccgcccagcgacttccccaagtggatgccggccagccagcggaggctcctgcagctgcccggctttcagaggcccaacaaggtggtcgcccaggacgggagcggcgacttcaagaccatcaccgaggccatcgccgccatgcccaagaccttcgaggggcgcttcgtcatctacgtgaaggccggcacgtacaaggagtacgtcaccgtgcccaaggacatggtcaacatcttcatgtacggcgacgggccgacgcggacggtggtcaccggcgacaagagcaacacaggcggcttcgccaccatcgccacacgcaccttctctgccgagggcaacggattcatctgcaagtcgatggggttcgccaacacggcggggccggaggggcaccaggcggtggcgatgcacgtgcagggcgacatgtcggtgttcttcaactgccggttcgaggggtaccaggacacgctgtacgtgcacgccaaccggcagttcttccgcaactgcgaggtgctgggcaccgtggacttcgtcttcggcaactcggcggcgctgctccagaactgcctcctgacggtgcgcaagcccggggaaagccagtccaacatggtgacggcgcaggggcggacggaccccaacatgcccacgggcatcgtgctccagggctgccgcatcgtgccggagcaggcgctcttccccgtccgcctccagatccctagctacctcggccggccgtggaaggagtacgcgaggacggtggtgatggagagcaccatcggcgacctcatcaggccggaagggtgggcggagtggatgggcgacctggggctcaagacgctctactacgccgagtacgccaacatcggcccgggcgccggcacaagcaagagagtcagctggccaggctaccgcgtcatcggacaggccgaggccacgcacttcaccgccggcgtcttcatcgacggcatgacgtggctacagagcaccggcacgccaaacgtcatgggcttcaccagatgatcggggtttttctttctgcag

SEQ ID NO: 106122 - DNA, 186 bp, Zea Mays
cgcgagcaccccctaagcatcaacaagacattgcccaacatgcccacaacatctttttccacctctatatgcttattatggtagatagagacgtacttggttagcgggtagatttattttttgtgaaagaaagttaatttaactatctaggaaagaagagaatggagaaaggatatatataagggc

SEQ ID NO: 106123 - DNA, 4940 bp, Zea Mays
gtgatacttgataggctataagctgctagtgcttgtggaatggaagagccacagaaggacagtgggcaaccatcaaaaagttctgattctgagctagaagctatggtattggatgataatggagcgggaaaatcccatagtatggaggaaaacagggattctcctatagatgtcgatggtgggcagtcatctatggatgtggatatcaagggaaaatcatccctcagtgatgatgttaatggaaagtcttcttccgagccatattccaatgctccaattgacatgagtgtcgaaagcctagagaagttttgcaaagaagcgtcaaggtccttctttgatgaagttggtctgattagccatcagataaattcctacaatgagtttgtctcgcatgggctccaggagctttttgattcgcttggggaagtgattgttgaacctggctatgatccttcgaagaaaggatcaggtggctggaagcatgccatcatcaagtttgggagagtgaagcttgaaaagcctgtgttttggactggcaaggatgaaggttctgttgattttaaaccttggcatgctcgtctccagaatatgacatatgcttcaagacttatagtagaagtgactattcaggtttattctttggagaaaagtgacaaatctaaaacagggaatgatggttttgttcaaaaaaggaacttcatgaatgaaactcattggatatttattggcctccttccggttatggtcaaatcaaacttatgtttgctgcatagcctcaacgaaagtgagtgcctgttcgacgcaggtggatactttttggtcaagggaatggagaaggtattcattgctcaagagcaaagatgtctaaggaggctttggattagtgaccgaccttgctggactatctcttttatgtctgaaatcaagcgtagacgtatatatattaaactagttgaatctacaaggagtgaagatttcagtgagagcaaaatcattaccatttcctttttgtatgcgacaatgccagtttggttgttgttctttgcacttggaatatcatcagataaggaagtgtttgatatgatagatatgcaagattgtgatgcttctgttatcaacacgatatctgcaactatcaaagaatctgataaactgtgtgaagacttccgtaaatcagataaagctcgtcaatatgttgatgagttggtaaaaagttcgagatttcctccagcggagtcctttgatgactatattgctaggtttctctttcctgatattagtggaaatagaaacaaagcacttttcttagggtacatggttaaatgtctgctaatggcttttactgggaagcgtaaatgtgataataaggatgatttcaggaacaaaaggctggacctacctggtgaattgcttggaagggaacttagggcacagcttaggctggcagagaaacgcatggttaaggccatccaaagagatttgaatagtgaccgtgagttacaagatcttgaacgttatatagatgcatcaattgttactaatggtctaaatcgtgccttttccactggttcttggtgccatccgtacaaaagagctgaacgatgctcaggaattgttgcgactctaaggagaactaatcctcttcaaatgatgtctgacttgaggaaaacccggcagcgggttgcttacgctgggaaagctggtgatgcaagatatccgaatccatcctattggggaaagctatgctttatgtccactccggatggtgaaaactgtggacttgtaaaaaatctagctgttactgctattgttagctcaagggtgatgcagcccttgattgagagcttcatttcttgtggaatgagtaagctgaatgacattcctactgaacacattcaaagaatggataagatctttttgaatggcaattgggtgggatcttgtgaaaattcagcttcatttgtatttcgattgaggtgcatgagacgcagcagtctgattgatcctcaggttgaaattaaaagggacaagcaccacaatgaggttcgcgtgtttactgatgcagggcgaatcctcagaccccttcttgtggttgagaatctgaataaaatcagaaaacctaaggggcgctcattctctttccatgaattaatgcaacaagaaataattgagttcattggtgttgaagaggaggaagatatacaatgtgcgtggggaatcaggcatttgtttgagagtgaaggtgcgatatctagttatactcactgtgaactggatccttcctttcttctgggattaagctgtggtatcattccttttgcaaaccacaattttgctcggagggtattgtaccaatctgaaaaacactcgcaacaagctattgggtactcaacgacaaatccacacatcagagttgatactctttctcatcaactatattatcctcagaggcctcttttcaaaacagttatagccgactgtcttggcagatcagattatgcttcttttggaagaaaaaatgatttcgcgagaccagaatattttaatggacaaaatgcaattgtagcagtcaatgttcatcaggggtttaaccaagaggattccctggttatgaatagggcttctcttgaacgaggtatgtttaggactgaacacctcaggagctataaggcagatgtagaaaacaaggatggaaccaaacgactgaaattgaaggaaaaaatagactttggaaaaacagaaagcaaaagaggacgtgttgacaatcttgatgatgatggcttaccttacgttggtgcaagtcttcagaccaatgacattgttattggcaaagtctcagaatctggagaagaccacagtattaagctgaagcatacagaaaagggaatggttcagaaagtattgctttcagcaaatgatgaagggaagaattttgctgtggttactctaagacaggttcggacaccttgccttggagataagttttccagcatgcatggccaaaaaggtgttgttggttttctagaatctcaagagaacttcccatttactcacgaaggtatagtcccggatattgtgataaatccacatgccttcccaacacgtcaaactcccggacagctgcttgaagctgctctggggaagggaatagcttgcaaaggtacaatgagatatgcaacaccattcaccacagcatcagttgacgttattgcagaacagttgcacagggctggttattcacgatggggatctgagaacgttctaaatgggcgaacaggtgaaagagtgcaatccttggttttcatgggccctaccttttaccagaggctgattcatatgtccgaagataaggtgaaattccgtaacactgggccggtgcaccccctcacgaggcagcctgttgccgacaggaaaaggtttggtggagttaagtttggagaaatggagcgtgactgcctcctcgcccatgggtcagctgccaacctgcatgaacgcctcttcctgcttagtgacttctcccagatgcacatctgccagacatgcgagcgcgtggctaatgttgtcatgaggtctgtccccggaggcaagaagatccgtggcccctactgcggcttctgcaagtcttcggagaacatagtgagaatcaatgtgccctatggcgcgaagctgctctaccaggaactcttcagcatggggatctgcctcaagtttgagacccaagtctgctagaacttgtagacctgcttgcatccagttattacatatgtacatacagctagcctatgaggatctccaagctggtgtgccggtgtgtgatgctggcatagtaaggatgggcgagctagaaaccctgttgtgtttatgtgctgttttctccctgctcatgtggtaaactatgctaaagtgaatgaacactcgtttcctgttccctctttgaatgcgctgtgttagcatgcccttttgtttgaagattgcgtcttttgtggagcaccttgtattgctccgtagggatcacaccccttaccgccggcgatggccgacgatttgagataagatataatatttctggtcgtccttgttaaagagttcatgcatatacagtacacaagaaatgtcgatcgaatatagctagtaaaacaacttcaagaaacatgtacatgcggttggatggatcctttctcatcgatgatttgtctgcattgattcatccaaatcaagatacaagaggcagcatgagatgatctgtctgtgtctgcattgatccaaatcaagacacaatagagggacagcatgaggacgaacagagacaaatccatcgccccgtgcttgagtttctccacgagctagtaagagatcagcaagatcctctctagctaactacctgagggaaacgaacagcaggggaggaccaagaagtgatgagtgggggaactccatgcgagccctctggcctctcctcccacaggctacatcttgaggacgaagaagaacagtcctcgatgcgtcttcacctagctgctgcttaatttacgagtgatgctcttcgatccaaaggtacttatactacaaatacccctccccctctctctctctgtctccatcgccccaatgcaaagccggtctttctatagctcatagctgctggaatttggacctggctttgaaacatgtcgtgcactcgcgttgggtttgaaagagatgacttgcgttgcagcgagcgagcgacacaggtcaggtcacactgcaggggggaagcgaagcacgagtgtacatgcattgaacctggacgccctctttagcttttgcgtttgggcatacagtatttttattttggccttctgggatttgggaatacgagtcatcgattccctcagtgtcgtcccgtcacagctttttttttccgttgcctttatgctgcatgcccattcagcagtcacgca

SEQ ID NO: 106124 - DNA, 4130 bp, Zea Mays
gtgatacttgataggctataagctgctagtgcttgtggaatggaagagccacagaaggacagtgggcaaccatcaaaaagttctgattctgagctagaagctatggtattggatgataatggagcgggaaaatcccatagtatggaggaaaacagggattctcctatagatgtcgatggtgggcagtcatctatggatgtggatatcaagggaaaatcatccctcagtgatgatgttaatggaaagtcttcttccgagccatattccaatgctccaattgacatgagtgtcgaaagcctagagaagttttgcaaagaagcgtcaaggtccttctttgatgaagttggtctgattagccatcagataaattcctacaatgagtttgtctcgcatgggctccaggagctttttgattcgcttggggaagtgattgttgaacctggctatgatccttcgaagaaaggatcaggtggctggaagcatgccatcatcaagtttgggagagtgaagcttgaaaagcctgtgttttggactggcaaggatgaaggttctgttgattttaaaccttggcatgctcgtctccagaatatgacatatgcttcaagacttatagtagaagtgactattcaggtttattctttggagaaaagtgacaaatctaaaacagggaatgatggttttgttcaaaaaaggaacttcatgaatgaaactcattggatatttattggcctccttccggttatggtcaaatcaaacttatgtttgctgcatagcctcaacgaaagtgagtgcctgttcgacgcaggtggatactttttggtcaagggaatggagaaggtattcattgctcaagagcaaagatgtctaaggaggctttggattagtgaccgaccttgctggactatctcttttatgtctgaaatcaagcgtagacgtatatatattaaactagttgaatctacaaggagtgaagatttcagtgagagcaaaatcattaccatttcctttttgtatgcgacaatgccagtttggttgttgttctttgcacttggaatatcatcagataaggaagtgtttgatatgatagatatgcaagattgtgatgcttctgttatcaacacgatatctgcaactatcaaagaatctgataaactgtgtgaagacttccgtaaatcagataaagctcgtcaatatgttgatgagttggtaaaaagttcgagatttcctccagcggagtcctttgatgactatattgctaggtttctctttcctgatattagtggaaatagaaacaaagcacttttcttagggtacatggttaaatgtctgctaatggcttttactgggaagcgtaaatgtgataataaggatgatttcaggaacaaaaggctggacctacctggtgaattgcttggaagggaacttagggcacagcttaggctggcagagaaacgcatggttaaggccatccaaagagatttgaatagtgaccgtgagttacaagatcttgaacgttatatagatgcatcaattgttactaatggtctaaatcgtgccttttccactggttcttggtgccatccgtacaaaagagctgaacgatgctcaggaattgttgcgactctaaggagaactaatcctcttcaaatgatgtctgacttgaggaaaacccggcagcgggttgcttacgctgggaaagctggtgatgcaagatatccgaatccatcctattggggaaagctatgctttatgtccactccggatggtgaaaactgtggacttgtaaaaaatctagctgttactgctattgttagctcaagggtgatgcagcccttgattgagagcttcatttcttgtggaatgagtaagctgaatgacattcctactgaacacattcaaagaatggataagatctttttgaatggcaattgggtgggatcttgtgaaaattcagcttcatttgtatttcgattgaggtgcatgagacgcagcagtctgattgatcctcaggttgaaattaaaagggacaagcaccacaatgaggttcgcgtgtttactgatgcagggcgaatcctcagaccccttcttgtggttgagaatctgaataaaatcagaaaacctaaggggcgctcattctctttccatgaattaatgcaacaagaaataattgagttcattggtgttgaagaggaggaagatatacaatgtgcgtggggaatcaggcatttgtttgagagtgaaggtgcgatatctagttatactcactgtgaactggatccttcctttcttctgggattaagctgtggtatcattccttttgcaaaccacaattttgctcggagggtattgtaccaatctgaaaaacactcgcaacaagctattgggtactcaacgacaaatccacacatcagagttgatactctttctcatcaactatattatcctcagaggcctcttttcaaaacagttatagccgactgtcttggcagatcagattatgcttcttttggaagaaaaaatgatttcgcgagaccagaatattttaatggacaaaatgcaattgtagcagtcaatgttcatcaggggtttaaccaagaggattccctggttatgaatagggcttctcttgaacgaggtatgtttaggactgaacacctcaggagctataaggcagatgtagaaaacaaggatggaaccaaacgactgaaattgaaggaaaaaatagactttggaaaaacagaaagcaaaagaggacgtgttgacaatcttgatgatgatggcttaccttacgttggtgcaagtcttcagaccaatgacattgttattggcaaagtctcagaatctggagaagaccacagtattaagctgaagcatacagaaaagggaatggttcagaaagtattgctttcagcaaatgatgaagggaagaattttgctgtggttactctaagacaggttcggacaccttgccttggagataagttttccagcatgcatggccaaaaaggtgttgttggttttctagaatctcaagagaacttcccatttactcacgaaggtatagtcccggatattgtgataaatccacatgccttcccaacacgtcaaactcccggacagctgcttgaagctgctctggggaagggaatagcttgcaaaggtacaatgagatatgcaacaccattcaccacagcatcagttgacgttattgcagaacagttgcacaggtaagtgtttcttctaacggatgaatagctgcttgccttaattcagtaacccaccccttgcacatgaaacgaagatctgagaccctttcaaagggttgggcattttttagcctcttctaggtgaactttgtaattgttaagcttattaatacatcttataagaaccttggacgtcattaatgcaccctatgctctcaagtcttaactctgttagtactttactgcttattacacatacagaagaagaaaagggaaaggtagggaaacaatgtacacagagagagagaacagaatggctggtggccatcctcatattttgtatatgagtaaacatgtatcagtaatttcacatgtatctttttgtcatattttgcaccaaaatggtggaaacacacgagtttccttcccgtttcccttttacttgtattactatcagttgctgcttatctaacggagacatccatattggtaccgctaaatataaaactgagtgcactcacacactactatgttctcagtgaggatcttacttcagataatcaagtgatgtatctgattttttttgtgtgtgtttagacttgttttcgtctgtgacttgtttagttaattttcaagattttatgtatcttgttgcattgcagggctggttattcacgatggggatctgagaacgttctaaatgggcgaacaggtgaaagagtgcaatccttggttttcatgggccctaccttttaccagaggctgattcatatgtccgaagataaggtgaaattccgtaacactgggccggtgcaccccctcacgaggcagcctgttgccgacaggaaaaggtttggtggagttaagtttggagaaatggagcgtgactgcctcctcgcccatgggtcagctgccaacctgcat

SEQ ID NO: 106125 - DNA, 1977 bp, Zea Mays
atggaccttaataggacaaatctttggtttcatggaaaggaacatatagctactgcttcattctcccaggcccaaccatctgccataaattgcaggaatgaagaactatctatgtcagccgtgaacttgggttacattaggagctcagaaatagcacagaactctagaaaatcatttcagcatggcgatcaaagtttgaccgctccagatgatagctgcaggctggcccttggacttgggccaacaccaaatctatattctgctgatagtcactcatttggtggaaacaaagcttatcaatcagcaactttgctcagtcaacattgtgccacaaccgatcctggtttaatgttgggtctttcaagatgtagctcaagaaatttgcaatctacaagggcgagtggcagcaagaattattcacctgcaaggaagactggtatcatcttaccacttattgatgagggatcaacttcagcaaaaaggaaaaaaggtggctatttgctaccacttctgtttgtgccaagatcagaagatctttgtcttaatggaacatctacagacaccgatgcccaacaacatattggaactgaatgtgatactgaaagcggtcataatagatctctgaatcttcacgagattcagcctagcgctgatctatccattacagctggttgttcttttgctgcaacttctgatgtagtagccgatacaagtgatgagcagaggagtcatcagcgccatccaaagaaatgcaggttcaatggttgctcgaaaggtgcaagggatgcatcaggactttgcatttctcatggcggtggccagaggtgccagaagcctggttgcaacaaaggtgctgagagtcgaacggctttctgcaaagctcatggaggagggagacgctgccaggagctaggctgcaccaaaagcgccgaagggaagacagagttctgtattgctcatggtggtgggcgccggtgtgggattgaggaatgcccaagagcggcaagggggaagtctggattctgcataaaacatggtggagggaaaaggtgcaggatagagggctgcactcgtagtgctgaaggccatcctgggttgtgcatctcacatggaggtggtcgccggtgccagtacccaaactgtgataagggggcccaaggaagcaccatcttttgcaagtcccatggtggaggcaagaggtgcatgtttgatggctgtaccagaggagcagagggcagcacgtccttctgcaaagggcatggtggcggtaagaggtgcctctttgagggaggtgggatgtgcccaaagagcgtccatggtggaaccagcttctgtgttgcgcatggagggggcaaacgctgctctgttcccgggtgcaccaagagtgcccgcggtcgctctgattgctgtgtgaagcacggtggtggcaagcgttgcaggttcgatgggtgtgacaagagcgcacaggggagcactgacttctgcaaggctcatggagggggcaagcgatgcgcttggagcaccggctgcgacaagttcgctaggggaaggagtggcctatgcgcagcgcatacgaccctgatggcttccaaggtagtgcaccatcctggacatgcacgaagcatggtcgggccttgccacttcagcggcggcgtctctggttcgtcagcagctgatagcaacatggatcatgccatctcgtcatccggccatggcgcatggtcagactgcgtcgactcgtcgagagacatgcagagcgccggcaggctcctaataccacgtcaggtgcttgtccctggttcactgaaggacgctccttcgtgtggtctagcaggcaacggccaggacgacggagggagccggaaccagagctgtgggctcgtggtgcctgagggaagggttcacggtggagggctgatgtccatgcttggagttggaggcaacctgggaagcaatcctgatggttcgaaagcctga

SEQ ID NO: 106126 - DNA, 561 bp, Zea Mays
cctgcagctctgctcatgccccccgcccgtgccgcccaattccaaaccttggctgctccccaccgctccgcgcacgtctctctgcgccgccggtccccggctgcgcccccctctgccgaggaagagcacgggcatggcggacgaggcgcatcttaggtctgccgtgccaggcccttgggcggcggattaccgggagaaggccgtccactactgcactacaccatcaatatcggtgattcggtggagtccctttatgtcttctgtgcgtacactcttcctggtcctagcttaggaactaggagccgagcttatgccatggaccttcttcagctaacccaccacgattatacattttacttgatgattcttctcacagcattggccaactggtgataatgtgatatgagcatcaagcccgagaccattcaatgcggcttatgcgggaccaagctttgccttgttgctcagagctgctgcccgtcctcgtgcggtggaaagcctcagagcggtcggggtgcagcggagacctagccagggccaactaagaaactattcctgatt

SEQ ID NO: 106127 - DNA, 400 bp, Zea Mays
ctgctcatgccccccgcccgtgccgcccaattccaaaccttggctgctccccaccgctccgcgcacgtctctctgcgccgccggtccccggctgcgcccccctctgccgaggaagagcacgggcatggcggacgaggcgcatcttaggtctgccgtgccaggcccttgggcggcggattaccgggagaaggccgtccactactgcactacaccatcaatatcggtgattcggtggagtccctttatgtcttctcattggccaactggtgataatgtgatatgagcatcaagcccgagaccattcaatgcggcttatgcgggaccaagctttgccttgttgctcaggtaccgtgggatcaaatatcagtgagttggttttggacaaagaaaccatggatgc

SEQ ID NO: 106128 - DNA, 435 bp, Zea Mays
cctgcagctctgctcatgccccccgcccgtgccgcccaattccaaaccttggctgctccccaccgctccgcgcacgtctctctgcgccgccggtccccggctgcgcccccctctgccgaggaagagcacgggcatggcggacgaggcgcatcttaggtctgccgtgccaggcccttgggcggcggattaccgggagaaggccgtccactactgcactacaccatcaatatcggtgattcggtggagtccctttatgtcttctgtgcgtacactcttcctggtcctagcttaggaactaggagccgagcttatgccatggaccttcttcagctaacccaccacgattatacattttacttgatgattcttctcacaggtgtgagattttttcccccctgaacggtcacaagcaactagtcatcagtaatcgaacgc

SEQ ID NO: 106129 - DNA, 213 bp, Zea Mays
atggccgcgggtgctgtctttcaggaggctcaagaccagggctttcgtctcgcgccggccccgctcgtcggtgctcgccagcaccatctcagacagccggagtcggaggaggcgaccctcctcagcagcgggctgactccggcgccgtccgtgcactggagacggcggaccgaggacacgatgcggcttcctgcgagaaagatctcactttga

SEQ ID NO: 106130 - DNA, 771 bp, Zea Mays
agtccactgggcacgtggccattgctcaataatcaagttaaagcatcagtctgcgccatggacgcctagctacaaatagggccgttcgtcggcgaaatgatcaccttcaaccggtcaccaccgctcatctatcaagctagccacgccgccaaaacaaactagctagtgctcagctcagctcaggcaccaccacactagcaccagaagcgtgaccagctagctacagctcgctctcccatggccagcttcactgctcagctcagggacaagttcctcggcgtcatcgaccacatcaccggctgggccagcggcgtcgccaaggatacgccgccagaggagtccaccaagttacagtcacgcaccgtgcagcagcccgttgaggtccgatcgagaggtgacgaggaacccattgtgcaaaagggggacgaagcaggggcgaactgataccacccttgtctagaaatgtggctctactacggcgtgcatgtttgctgatgccctcaactctcttaatgttgcatccaccgttttcatgttgttcttttccttctcgttgttgtaagctggagacgtgagtgccatatcttatattttaatatataatcatttgtaatgtatggaagctgcaatttgatctgcattcttctataatttgtctcctgtatatatatttttggtcattttatttttacgggcaatacctttagtttctaaaaatttctttcgttaagccaacaatgtaaggttaataactaagatcatctaaagttt

SEQ ID NO: 106131 - DNA, 1497 bp, Zea Mays
acgtgtctggtgcccgactcttctgaactctgaactatgttatccaataccgttggtggtgggccgcagaaccgcgcgcacgggggagccaatggcgatcgtggccattctcgtcgcgcccaccgccagctacgtcgggccgcgccgccggtggcgcgccgcggcagcctcgtcttcggcggcgtccggggtggacctcaaagcgctgcaggccgccatcgataagaaaagcagcgatgatgttaggcaggcgctggaccagctgagagagagcggatgggccaagcggtggggctcgcagccctatgtgtcgcgccggacgacatctctacgggagctcactacccttggaatcaagaatgctgagaatttagcaattccaagtgttagaaatgatgcggcattcttgtttacagttgtgggtaccactggattcttagccgtccttgcaggccagctccctggggattggggcttctttgtcccctacttgattggaagcatttcattgatcgtattggctgtcggaagcgtcgctccaggtcttctgcaagcagcaatcggagcgttctctacagtctttcctgactaccaggagaggattgctaggcatgaagctgctcatttcctagtcgcctatttgattggcctccctatccttggatattctttggacatcggaaaggagcatgttaatttgatagatgagcaattacaaaagctaatatacagtgggcagcttgatggaaaagaactagacaggttagctgtagtttcaatggcaggactggctgctgaaggtctagaatatgacaaagttgtaggtcaatcagcagatcttttcacccttcagaggttcataaacagaactaagccgcaactaagcaaagatcagcaacaaaaccttaccagatgggcagtcctgtttgctgcatcacttctgaagaacaacaaagcagcccatgaggcgcttatgtcagcgatgtcccaaaaggcaagcgtgttggggtgcattgaagcaattgagaatgcatcctgatcaaaatgtaacctgagtagtgtactagcatcactggactcgatattgtttcaccgcttctgattactactgctgttggttcgttgagcctgaggaatcgggtggaggagaggatcgaggcgtaggaaggagaaaccctaatcatcaccgtcgattcctgtacttctgtagacatcaaaaactcaggccacagggaagtcaagtgctcgaaactccaaagggaaggaaattcacacgatgacaaaaacaatagcctaatctgctgccatttactatcatacacgtgtgccccaatattactcatttactcccatcttttgttttcgtatataatgcgcgattgtcctctccaataccacactttgaccattaatatcttgtatgctgtaatattcatactatgaaagtggacattatataaataacgtttttttcaaatatgaatccaatcttttgtt

SEQ ID NO: 106132 - DNA, 1414 bp, Zea Mays
ctcctgaacacaccacccctcgtctccccacggaggccgtcctctcctctcctctgcgtccgccactgcccaccgctcgcccgcgcgcgctccattacctcggcgggcgatggccgacctatccaacaccggctccacctaacacgagcagcgcccccgcctaggcggcagctggctggtcggtcgtcgagcagctagcggcggcagcgcccggagggaggccgtctcactctcctcgtcggggcggcaggagatggaggccatcgtgggcgtccgcgcgccgccgcgtggccgtgcctgggccggcctcgagaagccgccgcgcgccgcttgccgcgccagagtcccgacggcgaggctcgcggtcgcggcggacaggccgcggaggctggtgctgctgggcgccgatacgcggagggccgcggatcctgccctccgttgcgccgcgcaatctgcaggtggaacaggaaaggtccactactctgctgatgacgctctcatactacagcaaaaagcccaggatgttctgccttacttggatggccgttgcgtttatcttgttggaatgatgggttcaggcaaaactacagttgggaagatactatccgaagtgttaggttattcgttcttcgacagtgataagttggtagagaaggctgttggtatttcatctgttgctgagatctttcagctccatagcgaaacattcttcagagataatgagagtgaggtcctgacggatctgtcatcaatgcatcggttggttgttgcaaccggaggtggtgcagtgatccgaccaatcaattggagttacatgaagaaagggctgaccgtatggttagatgtcccactggatgcacttgcaagaagaatcgctgctgtaggaaccgcgtctcgaccactcttgcatcaggaatccggtgatccttatgcaaaggcttatgcaaaacttacgtcactttttgagcaaagaatggactcgtatgctaatgctgatgccagagtttcacttgaacatattgcattaaaacaaggccataatgatgtcactatacttacacctagtaccatcgccattgaggcattgctaaagatggaaagttttcttaccgagaagaccatggtcagaaactgacctcttgaatgagagggaaaggatgctgacaacatgtggcccttgtttgtttaattgtacatatacctttgcattattgcctaaactctttctacagtgttgttggattattgtttgtgcagcatgaaagaggaccgtttgagtttgtatttatgcaaatgaataagtaaataactttcagttaaaacaatgacaattcgttatttatctcgatgaatggttgatggggacattagggcattagcatggtactgtcatttcaatattcactatgtcaga

SEQ ID NO: 106133 - DNA, 1411 bp, Zea Mays
ctcctgaacacaccacccctcgtctccccacggaggccgtcctctcctctcctctgcgtccgccactgcccaccgctcgcccgcgcgcgctccattacctcggcgggcgatggccgacctatccaacaccggctccacctaacacgagcagcgcccccgcctaggcggcagctggctggtcggtcgtcgagcagctagcggcggcagcgcccggagggaggccgtctcactctcctcgtcggggcggcaggagatggaggccatcgtgggcgtccgcgcgccgccgcgtggccgtgcctgggccggcctcgagaagccgccgcgcgccgcttgccgcgccagagtcccgacggcgaggctcgcggtcgcggcggacaggccgcggaggctggtgctgctgggcgccgatacgcggagggccgcggatcctgccctccgttgcgccgcgcaatctgcaggaacaggaaaggtccactactctgctgatgacgctctcatactacagcaaaaagcccaggatgttctgccttacttggatggccgttgcgtttatcttgttggaatgatgggttcaggcaaaactacagttgggaagatactatccgaagtgttaggttattcgttcttcgacagtgataagttggtagagaaggctgttggtatttcatctgttgctgagatctttcagctccatagcgaaacattcttcagagataatgagagtgaggtcctgacggatctgtcatcaatgcatcggttggttgttgcaaccggaggtggtgcagtgatccgaccaatcaattggagttacatgaagaaagggctgaccgtatggttagatgtcccactggatgcacttgcaagaagaatcgctgctgtaggaaccgcgtctcgaccactcttgcatcaggaatccggtgatccttatgcaaaggcttatgcaaaacttacgtcactttttgagcaaagaatggactcgtatgctaatgctgatgccagagtttcacttgaacatattgcattaaaacaaggccataatgatgtcactatacttacacctagtaccatcgccattgaggcattgctaaagatggaaagttttcttaccgagaagaccatggtcagaaactgacctcttgaatgagagggaaaggatgctgacaacatgtggcccttgtttgtttaattgtacatatacctttgcattattgcctaaactctttctacagtgttgttggattattgtttgtgcagcatgaaagaggaccgtttgagtttgtatttatgcaaatgaataagtaaataactttcagttaaaacaatgacaattcgttatttatctcgatgaatggttgatggggacattagggcattagcatggtactgtcatttcaatattcactatgtcaga

SEQ ID NO: 106134 - DNA, 1561 bp, Zea Mays
ctcctgaacacaccacccctcgtctccccacggaggccgtcctctcctctcctctgcgtccgccactgcccaccgctcgcccgcgcgcgctccattacctcggcgggcgatggccgacctatccaacaccggctccacctaacacgagcagcgcccccgcctaggcggcagctggctggtcggtcgtcgagcagctagcggcggcagcgcccggagggaggccgtctcactctcctcgtcggggcggcaggagatggaggccatcgtgggcgtccgcgcgccgccgcgtggccgtgcctgggccggcctcgagaagccgccgcgcgccgcttgccgcgccagagtcccgacggcgaggctcgcggtcgcggcggacaggccgcggaggctggtgctgctgggcgccgatacgcggagggccgcggatcctgccctccgttgcgccgcgcaatctgcaggtggaacaggaaaggtccactactctgctgatgacgctctcatactacaggttaggaaaatatgcaccaccccacccccacccaataggaactgatgaattgctaatttctttgtaaggagaaaatatatcaaacagctatagctatttatatgttggatatatattactaatatgacggacatgttaaaactccagcaaaaagcccaggatgttctgccttacttggatggccgttgcgtttatcttgttggaatgatgggttcaggcaaaactacagttgggaagatactatccgaagtgttaggttattcgttcttcgacagtgataagttggtagagaaggctgttggtatttcatctgttgctgagatctttcagctccatagcgaaacattcttcagagataatgagagtgaggtcctgacggatctgtcatcaatgcatcggttggttgttgcaaccggaggtggtgcagtgatccgaccaatcaattggagttacatgaagaaagggctgaccgtatggttagatgtcccactggatgcacttgcaagaagaatcgctgctgtaggaaccgcgtctcgaccactcttgcatcaggaatccggtgatccttatgcaaaggcttatgcaaaacttacgtcactttttgagcaaagaatggactcgtatgctaatgctgatgccagagtttcacttgaacatattgcattaaaacaaggccataatgatgtcactatacttacacctagtaccatcgccattgaggcattgctaaagatggaaagttttcttaccgagaagaccatggtcagaaactgacctcttgaatgagagggaaaggatgctgacaacatgtggcccttgtttgtttaattgtacatatacctttgcattattgcctaaactctttctacagtgttgttggattattgtttgtgcagcatgaaagaggaccgtttgagtttgtatttatgcaaatgaataagtaaataactttcagttaaaacaatgacaattcgttatttatctcgatgaatggttgatggggacattagggcattagcatggtactgtcatttcaatattcactatgtcaga

SEQ ID NO: 106135 - DNA, 818 bp, Zea Mays
ctcctgaacacaccacccctcgtctccccacggaggccgtcctctcctctcctctgcgtccgccactgcccaccgctcgcccgcgcgcgctccattacctcggcgggcgatggccgacctatccaacaccggctccacctaacacgagcagcgcccccgcctaggcggcagctggctggtcggtcgtcgagcagctagcggcggcagcgcccggagggaggccgtctcactctcctcgtcggggcggcaggagatggaggccatcgtgggcgtccgcgcgccgccgcgtggccgtgcctgggccggcctcgagaagccgccgcgcgccgcttgccgcgccagagtcccgacggcgaggctcgcggtcgcggcggacaggccgcggaggctggtgctgctgggcgccgatacgcggagggccgcggatcctgccctccgttgcgccgcgcaatctgcaggtggaacaggaaaggtccactactctgctgatgacgctctcatactacaggttaggaaaatatgcaccaccccacccccacccaataggaactgatgaattgctaatttctttgtaaggagaaaatatatcaaacagctatagctatttatatgttggatatatattactaatatgacggacatgttaaaactccagcaaaaagcccaggatgttctgccttacttggatggccgttgcgtttatcttgttggttagttcttggcttctagctccacatcaccagttcacctcaaaccctagcttcatcccatcatcgtagtacgatatttgtgtactttggtatgcaggaatgatgggt

SEQ ID NO: 106136 - DNA, 543 bp, Zea Mays
atgaagaggaaccctcaaaagaaaaggagggtacttttaagtagagaatcggtaggcgaacctgcacgagcgctgccagtaccaacgtcgacgccgaggaatacggaggcggcactgccgcgggacatggtggcaccgtggcagccacaggctggtgggacggcagcgacggccaagcagagcagggaagcgatcggagttcgcggccgaggtgaggtgccgacgtggttacgacggaagaaatacttgtcagaaagatattcagcggtgacgggacacctcggcggtaacggaaagaggcgagagattagagattgccagattgggagggaaaagaagaaagccagagggggggagcggtgcccatgcgtgacgcggagttgcgtccgatctggcctgccggccgcaggtggcgctcggggtctggggcaaagaaagaggacgaagagggagaggtgctcaccaggatcggaatcgcgtgccgcggcgtcaacgggcaaccggccaccggtggccctcggagtcggatgtggcgctcgctga

SEQ ID NO: 106137 - DNA, 622 bp, Zea Mays
atcgcgggcataaactaatccggccggctgcggctgcagctactcatcggcaaagctgcagtataaattcaggggagctccatcgacgagtgagctccctgggggaccaggctgggagagcccccccgtcaggccccctcctcctcctggtctcctctcttctatccgagctcggcattcagggctactacacctgcttacatccatcgttcatgcatggtgcatacaatggtatgcgcatatgcactgcattgttcgttcagaataaataagtagaccatgcaactgctacatacacagtggaaaggtttttgatcgagaggcaacgcaattgcaatggtgatcaggatacaagcagggtgtggtcgaggtcgatcgtgcatcatggccgcatgcatgcatgggagatgcagcaggcgttggcgtcgtctgtcgccacagcttggatagcggaaccaaaaaaaaaaaagggtcatgtggctagcagcttctgtttattttcactttcttcgttcatcgcatgctcttgttgttcactgttgtactatctagtagttctctttatctggtgcttgcaatctaattctccgcttccttgtcgtgacatttttttttctttcaa

SEQ ID NO: 106138 - DNA, 1762 bp, Zea Mays
cgcggtggcgcttttggcgccagtggctcctgaccacgctaacgagacggacagcaaaactcctcgccatgcccagatccaccacctccggctatccattgcgcccggagccggccgatcgggggagcgcagcaggcgggccgcgccggccgccgcaccaccgggtagcccaggccgcgcgcgcgcgccgtccagctcgtctgctgtcgctcctccgtgatggccgacgtcgacgtggacgccaacaacgaggccgagcaaaggacgcgctcggagccggggacctccatgtcgccgtcatcggaggccgacgacgacacggccagcagtacacccaacgagtccccggcgcgcgccttcgcggggcacacgctcgaggagccgcctcggcggcgggcgccgtcccggcggtcccgtcccgttcggatgctccagagcgtgtgccggtcgctcccgctgctgaacccgcggtgcgggcggccgatgatgcaggccggggcgtgccggatcgcggcgccgtcgtcgcggcccgccgccgccgccgccgcgccgtcgtcggactcatcgagctcgctgctgacgcagctcatcgcgtcgtcctccttcggcggggccgcgtcgtcgcgccgccgcctcaccggcacgctcttcggctaccgcgacggccgcgtgtcgctgtcgctgcagcagaacgcgcggtgccagcccacgctggtggtcgagctggcgctcccgacgcacgcgctgctccgcgagctcggcgcccacgcgggcgcgcgcatcgtgctggaggtcgagaagcgcgccgagcagggcaccgccgacggcaacgaggccatcgccaccaccgaccacgacgggtgggtgctggaggagctcatgtggaccatgttctgcaacggcaagagggtgggctacgcggtgcggcgggaccccaccgaggaggacatcgccgtgctggagacgctgtgggccgtctccatgggcggcggcgtgctccccggcaggtcggacatggacggccccgacggcgagatggcgtacatgcgcgggagcttcgagcacaccgtcgggtcccgggactcggagtcgctctacatggtcggaccgcccggcggcgactgcccggagctcgccatcttcttcgttaggctatgaattgaaccgagcgaaccatacgaatcgaacaatacagtgtacacgtcgcagtcgtggtgtctaatctctcgcctggtctcgttcgttgttcagcagcctcagctagcgtcagagatattattcatttgccccatcaaaagatttttcaagcaaaaggaaaaaaacaaaatccgaaaaagcctggacgttcgtccgtttgacaggtcacgtcgtcgatggacaaccggggccggccatctcggccgggtagcactagctgtcgcctgctcgctgctgcctgggtggctgggctccctgttgcagcgtggcatgcatgaaccgatccaaacgatgcacgcaagcagaggcacagtggcagtgcgcggacgaacgacggacgtgcacacctttggcagagacgagcactgtcagtgtcagtcacgagagcatagctttttaatagtttatgtcacgtggttccgtaaaacaatgcgcggctccccgacgagtaggggtgtaaacgggccgttacggacggatagtagcttatccggcctgtatcctaccctaatgtatttaaaacggattcgtgatgatctggtgccagttcaggctgcagatcctc

SEQ ID NO: 106139 - DNA, 2527 bp, Zea Mays
acgcttacactcttctttagttcttacctcttcaaaccctagcctccctgatccatccgcacctcgaaatttcggcagccgatgcctccgccatcgccgccgtggtcgcctagcacctcttctatctaggtttcgtcggtccctcttcttcctgcgccctcaagatctgcgcgacgacctgagctctccgtgctgtttagggcggccatgaacagcgcgttcagcgaggacatactcgctggcaagctcgccaagctcaacaacacgcagcaatgcatcgagacgttgtcgcattggtgcatttaccatagaaagaacgcagagcaaattgttcagacttgggacaagcagttccacagctttggcaaggagcagaagatccctttcctttatcttgctaatgacatcttacagaacagcaagcgcaacgggacagagtttgtagaagaattttggaaggttctccctggggcgcttaaagatgtaagtgagaacggtgatgaccgtgggaagaaggtggcatctaggctggttgacatatggcaagaaaggagagtttttggctcacgcgctgggggtatcaaggatgtgatgcttggggcagccccccttcctgttttagatatgaccaaaaaacggtctcgcagttcagcaataaggattgttaaaagagattctcgttctgtgaaactgagactaggcattggaggaactgcagagaggatcatatctgcattgcacactgttctcagtgaacaagcagatgaggatgatgacctggaaaaatgcaagacttctatgcgtcatgttggaaagatggagaaggacgttgacagtgcttgtagcaaagccgaagatcctcgtcgcgaggttctttgcacagaactaaaagatgaggaagctaacatgaaaaaatgcatcgaaaagctaaaagctgttgagaaaaatagagcagctattgtgtttgaactgaaggaggcactgcaggaacaggaatctgaactggagaaagtccgcactcagttacagctagctgaagcaatggtacatgaagcctcgaacatgcagcggagactcaagaatgagccaaccattccgctgcccagatcagcatcgttagtagagccaggaaaggtggtctccaatgggcaagtaaaggagcagcacaagacggctgctgctatccttgcagacaagattgcagcatcatcaaactctcagcagattctgcagtctgcactttcgaagtttgctgccgaagaagcaaagaattcatctgaaacacgctcagataagaggcaaaaggctgaacaactatcgcaggtaccaagcgtcgcaaatgccgctgcttttgttccaatgccacaagtggttgccacaacagctcagcagcagccccaggcaatcttagtgcaacaagcacctatgcagagccaagccactgcatctcagccccagtacaatatctaccaggccccgccccagcagtttgtccctcagcctggaggtgtaatgatgggcatgccttacaacatgagctccatgaccccaccgcctccaccgccgccccagatgatgagcctaggaaggccctcaccttcagctccacagccccagatggctgtcatgccgcagactcagcctccagcgccaccgatgcttcagcagcagatgccaatgaacctaggtcctcagatgcagttcacccttcaaccgcctggcgtgccgcctttcaggcccatgcagccacctcctgggatgcagtacttccatccccaatctcagtgacagttttggtagcccagccctgttaaacttttgacaggttctcaatttagcgttgactagtaagcaggatctgactgctgtagggtatactgtttgtgtggttcgtttcgacatatgttgttgtactgtacatgtaatgcgaggagaggtaaagagcgaggagagaaatgaagattaaagatttcacataggcctgcttcgttctcgtaaggtggtttggtgggttgaatctgcggctgcaagtgaggtgagttctcttttctcatttttgtgcatgcaggtaaagcttctgggtttcctaaaggggcagagtttatgggcctgattacatcagccgtttttttttggtaccataggcaacgaaatacagaaatattatttttgcatattacaatagcctggagcaaggtggagcttgctcctagtcacctagtgcctcaattagacaacttgccagcatcgcagttccaacctccaagggcagcaagttctgtatgaaaattgaggcagagatgtgctgctgtcttaccccatgcatctgggatgctcttatctaactcaaaacatgatgtaatctctctctagtatgcatgatcccaaccccaagaacatccttatatggaggaggaaacaaagtgtgatcttgcaggcaatagatagcctgcgggaacatgcattgactggatgttgcgaatttacctggtaaatatttatataggttacatctaattcagtacta

SEQ ID NO: 106140 - DNA, 898 bp, Zea Mays
agggtccctggctatcgagagaactcgacgagttcatctccatcgtttgtgagagtttcggttgggccagattgtcatactcagcgtcctgcctcggtctcaggcccaagtgtactgaaagccagctcttgcccgcatctacacggccccattttcagcttgcccctccagaaccgggtcctatctgtggtgtgccagacttcaagatgaggggaaagaagagtgatgagctcgaacctgtcgatgctggcgatgaagatgatgatggtggtgacgatggggacgaggatggtgactttggggaggagggtgaagaggacgtctcagaaggggagggatatgacaacccaaagggcaatgagaccaagaagcaaagaggtgatcctgaggaaaatggtgaggaagatgaggaagaaccagaagatcaggagggtggcggcgacgacgatgatgacgacgatgacgatgatgagaacggggatgacgaggacgacgacaatggggatgacgatgaggagggtgtagatgaagaagacgatgaccaggacgaggatgaggaggaagatgatgatgaagactcgctccagcccccaaagaagaggaagaagtgaagatcttctgccgctttagttaccgtgcgctgagttctgcctggcttttcgtcatatcctcgcatttcaactttcccatagagagttaagaaggatccacacgttcagcagcacgtgtgggcttgtaggagctttatgatttgaggcaattagggacaactcttatgtcattgttgcttgcttctgtggagtcgaacagatgtttcgctaacataattcgacttgagtgatgaaagcctccagattgaatatgccttctcttttatctcgtatggaatcattgatgc

SEQ ID NO: 106141 - DNA, 981 bp, Zea Mays
aagaagcgatttacgcatatgccccctccagccatcagtagccacgggctatcctgcgcccaccacctgccctcctgccttcgtcctgcccggcgcctctgccctcctccgggctccacagagtgaaaaagtctcctcttttcctcttcctctcccgttgccaggcatggggttggcctagttgtgcccgttgagcactagcagcctccttgaaacctccagatctgtgcctccaaggcccccgttcctcggcaacaagggtcctatctgtggtgtgccagacttcaagatgaggggaaagaagagtgatgagctcgaacctgtcgatgctggcgatgaagatgatgatggtggtgacgatggggacgaggatggtgactttggggaggagggtgaagaggacgtctcagaaggggagggatatgacaacccaaagggcaatgagaccaagaagcaaagaggtgatcctgaggaaaatggtgaggaagatgaggaagaaccagaagatcaggagggtggcggcgacgacgatgatgacgacgatgacgatgatgagaacggggatgacgaggacgacgacaatggggatgacgatgaggagggtgtagatgaagaagacgatgaccaggacgaggatgaggaggaagatgatgatgaagactcgctccagcccccaaagaagaggaagaagtgaagatcttctgccgctttagttaccgtgcgctgagttctgcctggcttttcgtcatatcctcgcatttcaactttcccatagagagttaagaaggatccacacgttcagcagcacgtgtgggcttgtaggagctttatgatttgaggcaattagggacaactcttatgtcattgttgcttgcttctgtggagtcgaacagatgtttcgctaacataattcgacttgagtgatgaaagcctccagattgaatatgccttctcttttatctcgtatggaatcattgatgc

SEQ ID NO: 106142 - DNA, 1070 bp, Zea Mays
aagaagcgatttacgcatatgccccctccagccatcagtagccacgggctatcctgcgcccaccacctgccctcctgccttcgtcctgcccggcgcctctgccctcctccgggctccacagagtgaaaaagtctcctcttttcctcttcctctcccgttgccaggcatggggttggcctagttgtgcccgttgagcactagcagcctccttgaaacctccagatctgtgcctccaaggcccccgttcctcggcaacaagccgtccagatggacaccgccgcgcccctgcaactgaaagcctgcgccggcgacgccgcggagaagctgctgctcgccgtcgcagccgagggtcctatctgtggtgtgccagacttcaagatgaggggaaagaagagtgatgagctcgaacctgtcgatgctggcgatgaagatgatgatggtggtgacgatggggacgaggatggtgactttggggaggagggtgaagaggacgtctcagaaggggagggatatgacaacccaaagggcaatgagaccaagaagcaaagaggtgatcctgaggaaaatggtgaggaagatgaggaagaaccagaagatcaggagggtggcggcgacgacgatgatgacgacgatgacgatgatgagaacggggatgacgaggacgacgacaatggggatgacgatgaggagggtgtagatgaagaagacgatgaccaggacgaggatgaggaggaagatgatgatgaagactcgctccagcccccaaagaagaggaagaagtgaagatcttctgccgctttagttaccgtgcgctgagttctgcctggcttttcgtcatatcctcgcatttcaactttcccatagagagttaagaaggatccacacgttcagcagcacgtgtgggcttgtaggagctttatgatttgaggcaattagggacaactcttatgtcattgttgcttgcttctgtggagtcgaacagatgtttcgctaacataattcgacttgagtgatgaaagcctccagattgaatatgccttctcttttatctcgtatggaatcattgatgc

SEQ ID NO: 106143 - DNA, 1123 bp, Zea Mays
aagaagcgatttacgcatatgccccctccagccatcagtagccacgggctatcctgcgcccaccacctgccctcctgccttcgtcctgcccggcgcctctgccctcctccgggctccacagagtgaaaaagtctcctcttttcctcttcctctcccgttgccaggcatggggttggcctagttgtgcccgttgagcactagcagcctccttgaaacctccagatctgtgcctccaaggcccccgttcctcggcaacaagtcccatctgacggaccttgttccctgtgcccgcccacgtggcctcctctgcagccgtccagatggacaccgccgcgcccctgcaactgaaagcctgcgccggcgacgccgcggagaagctgctgctcgccgtcgcagccgagggtcctatctgtggtgtgccagacttcaagatgaggggaaagaagagtgatgagctcgaacctgtcgatgctggcgatgaagatgatgatggtggtgacgatggggacgaggatggtgactttggggaggagggtgaagaggacgtctcagaaggggagggatatgacaacccaaagggcaatgagaccaagaagcaaagaggtgatcctgaggaaaatggtgaggaagatgaggaagaaccagaagatcaggagggtggcggcgacgacgatgatgacgacgatgacgatgatgagaacggggatgacgaggacgacgacaatggggatgacgatgaggagggtgtagatgaagaagacgatgaccaggacgaggatgaggaggaagatgatgatgaagactcgctccagcccccaaagaagaggaagaagtgaagatcttctgccgctttagttaccgtgcgctgagttctgcctggcttttcgtcatatcctcgcatttcaactttcccatagagagttaagaaggatccacacgttcagcagcacgtgtgggcttgtaggagctttatgatttgaggcaattagggacaactcttatgtcattgttgcttgcttctgtggagtcgaacagatgtttcgctaacataattcgacttgagtgatgaaagcctccagattgaatatgccttctcttttatctcgtatggaatcattgatgc

SEQ ID NO: 106144 - DNA, 1601 bp, Zea Mays
aagaagcgatttacgcatatgccccctccagccatcagtagccacgggctatcctgcgcccaccacctgccctcctgccttcgtcctgcccggcgcctctgccctcctccgggctccacagagtgaaaaagtctcctcttttcctcttcctctcccgttgccaggcatggggttggcctagttgtgcccgttgagcactagcagcctccttgaaacctccagatctgtgcctccaaggcccccgttcctcggcaacaaggtaacctccctgttcctgctccctttcctgactactggtgatgaggatgatcctatccggtgcctcctctgttaacgcctagtcctgtcgtttcaatcagctgtttcctgttagtttttcctctcctgcagtgtctacctttttcatatgcatgtttatgggataataatgtttcccttgcagcagaacagatacttgaccgaacattgcaggttctctcctcacgcgagaggagctgaaaaagtagtagcgccctcttgttcatcccatatttttgtttgtttgttttgcaccccaagttcccaagagcttttctttgcctgacagttgtacttgcgcccctgcggagcaaatctaagattgggtttttgctaaaattaggtaggggggcacagaaatctcactgtgcctgcctgcctgctttggccggccttgggaaagtgccagtttttaagttttcctcaacggtatgctgcagtcccatctgacggaccttgttccctgtgcccgcccacgtggcctcctctgcagccgtccagatggacaccgccgcgcccctgcaactgaaagcctgcgccggcgacgccgcggagaagctgctgctcgccgtcgcagccgagggtcctatctgtggtgtgccagacttcaagatgaggggaaagaagagtgatgagctcgaacctgtcgatgctggcgatgaagatgatgatggtggtgacgatggggacgaggatggtgactttggggaggagggtgaagaggacgtctcagaaggggagggatatgacaacccaaagggcaatgagaccaagaagcaaagaggtgatcctgaggaaaatggtgaggaagatgaggaagaaccagaagatcaggagggtggcggcgacgacgatgatgacgacgatgacgatgatgagaacggggatgacgaggacgacgacaatggggatgacgatgaggagggtgtagatgaagaagacgatgaccaggacgaggatgaggaggaagatgatgatgaagactcgctccagcccccaaagaagaggaagaagtgaagatcttctgccgctttagttaccgtgcgctgagttctgcctggcttttcgtcatatcctcgcatttcaactttcccatagagagttaagaaggatccacacgttcagcagcacgtgtgggcttgtaggagctttatgatttgaggcaattagggacaactcttatgtcattgttgcttgcttctgtggagtcgaacagatgtttcgctaacataattcgacttgagtgatgaaagcctccagattgaatatgccttctcttttatctcgtatggaatcattgatgc

SEQ ID NO: 106145 - DNA, 3385 bp, Zea Mays
atttattctacctctttccaatgtcccattttccttgtgaatcactagtgtcgcaaatcccaatctcccagcttgcgcctaaaccctagcttgcctatcgatggcgccgaagaagcgcaaggccgatcccgccgagtcccccgccgccgtggaggcagccaccaccaaccaccgccacgagccggcgtcctcggagcccaagccacgcggctccatctacttccccatcactgacgacccgcccgaacccaacgccgccgaagaggacgaggacgagggcgccggcgacgacgaggacgacgcggaggacattgtcaagctacttgagccgctgtcgcgggagcagctcgttgcgctgctccgcacggcggcggaggcgagccccgccacgatggcggccgtccgccgcgccgttgaggccgaccctgccagcaggaagctcttcgtccacggtctcggatggggtgccggcgccgaggacctccgctccgccttctcacgcttcggcgagctcgaggactgccgcgtcatctctgacaagcaatctggtagatccaagggctacgggttcgtcctcttccgctcccgccgctctgcgctccgcgccctcaaccgccctcagctccaaatcggtggtcgtcttgctttctgtcacctcgccgcctcaggccccgcacccccagctcagtctcagaaccctatctccaacgccaaccccaatgctaactctaactccacgagcaacgcttctggatcctcatcatcacaaactgacaatatacaacgcaagatatttgttggtaatgtgcatgctgatgtggacgtggaccgcctatatgagtattttgcacaatttggtgagattgaagagggcccgttgggctttgacaagaacactggcagaccaaagggatttgcattatttgtttacaagtctgtggagagtgctcgccgtgctttggaggagccaataaagaattttgatggaaagacactcaatgtgcagaaagccatagatgggaggaccaagggctcatctggaatgaatacaaatactaactccaatcccactactgcatctgtggtcgccgcccagatgactgctccttccagtgttgccatcagcccatatgatgcatcagcatatagtgctactgtggttcctgacatgagttttgcacagcaagctgctatgctgggattaggtgcacagcaacaggcattcactcaacccaatgcaatgcttgccatgatagcagcaatgcagaacccagctgcgctagggatgagtccagccatgcttgctgctatgaacccagccttcgccgctgctgcattgggtgcaggggggcagcaggcacacacagttggtcttacaggttttggagctcagggttttgggacaccgtcgtttggagcaggtgccgctttcccaaatgcagcaggtgttcaagcagcagcagctgcatatcaaggaagtggagctcctcctggctttcaagggccacctgggtttcaggttggccaggcaactacccagacaagcactgcagcggcagcggctgccgcagctgccactgctgctggttatcaggctggggcatctgggcagggccaggtgcctggttctcaggtcggaggcactggttttcagggtggatattgacagaactagtttggcatctgtggtccgtggttcgttcatgtggttttgcattcggatggcttttgagtctatattggtgccaaaatgtagcgaaaggcttcctgctgttgaattttacaactggatttgaaccagatgcctttgtagcagtatttgaaggaggaactttcttgaaggatcatatcgttttattgcctaatatgtagttttgctattgcggcttcattatgtactttgtggatgtgtactgggtttcatgtatcaaaatatctgtattttgactagttggctgttacctggtcttatcaaccgtgttaaatggttttgtgggcacaattggagacattttaactgcagttcctgggctgtttggagctatggggtatttatggcttttgccttaaacctggaaatttcttctctgcggatggtttcgacgaccactacatttaagatcttgaatgtgttgcagctttgttgcacttctaagtttatttttaaaattcccagtgtttaacagtagccgcgcaaaatagcttgaatgttaagtggttatacaatcccataagggctagtttggaaacacaaatccccttggggattgagagggaaattagttcatttccacctcaatcctctccaatccccaaggggatttgagtatacaaactagccctaaaagagatgatttgacctgacggatggtttgcatatggtatctctgggaatttagtgttcattctttgaaaatattttggagctctttcttttgccttactgtgacaatggtcatgtcttgacagttgacacttcataactgtattactgattactttagtgtctccattttctcaactaccccactttatgttgatttttttcatggattgcctatgtgaggatgtactgttcatatatgcacaataagaatttcaaaagaagactgttcttgctttgttcttattagacccaatatgcactaaatgttagattagtagatgttttttcttactgctggtagaatactaggttgctgaccattggagtgttaaatcgtcatgtgaaccatgaataggccaagatgaaactgtcaagtggatgaatatcaataaattttaatccttgtgcatgcaaccatgctgtctttttcttttcacgacatgaaagtagtattgtgaaatcattgtgtttatttcatcaacagaattagtattgctactgatgatcttacatcactcgcttgccattctgtcttggtctgttgtgcaatgcatgtctctggatattatagatagtgctgcctgctatatttcaagtaatacatttgacacttcgcacttcctaactaaccaaacatcacttgccaaatcacaatttataaaacacagtaccagttccacccactagagttgaaagcacacttggaggtaattagtgcgcagaggcggcatctggtcagcagtggcaggggagtcctgagccctgggttccttctgccttctaatgtgctggatggcccatgccagactaggctaccttctgtttcacatttctgttatttaattttcttattacgttcaaggactaatgataccctctctttcagaccatttgctatcacatccctcctcttgccttccccaatctagacaaatgccttgccatgatgcaaattgcatttgctgacaattctttatttggttcagtgcttaaaaatat

SEQ ID NO: 106146 - DNA, 2161 bp, Zea Mays
atttattctacctctttccaatgtcccattttccttgtgaatcactagtgtcgcaaatcccaatctcccagcttgcgcctaaaccctagcttgcctatcgatggcgccgaagaagcgcaaggccgatcccgccgagtcccccgccgccgtggaggcagccaccaccaaccaccgccacgagccggcgtcctcggagcccaagccacgcggctccatctacttccccatcactgacgacccgcccgaacccaacgccgccgaagaggacgaggacgagggcgccggcgacgacgaggacgacgcggaggacattgtcaagctacttgagccgctgtcgcgggagcagctcgttgcgctgctccgcacggcggcggaggcgagccccgccacgatggcggccgtccgccgcgccgttgaggccgaccctgccagcaggaagctcttcgtccacggtctcggatggggtgccggcgccgaggacctccgctccgccttctcacgcttcggcgagctcgaggactgccgcgtcatctctgacaagcaatctggtagatccaagggctacgggttcgtcctcttccgctcccgccgctctgcgctccgcgccctcaaccgccctcagctccaaatcggtggtcgtcttgctttctgtcacctcgccgcctcaggccccgcacccccagctcagtctcagaaccctatctccaacgccaaccccaatgctaactctaactccacgagcaacgcttctggatcctcatcatcacaaactgacaatatacaacgcaagatatttgttggtaatgtgcatgctgatgtggacgtggaccgcctatatgagtattttgcacaatttggtgagattgaagagggcccgttgggctttgacaagaacactggcagaccaaagggatttgcattatttgtttacaagtctgtggagagtgctcgccgtgctttggaggagccaataaagaattttgatggaaagacactcaatgtgcagaaagccatagatgggaggaccaagggctcatctggaatgaatacaaatactaactccaatcccactactgcatctgtggtcgccgcccagatgactgctccttccagtgttgccatcagcccatatgatgcatcagcatatagtgctactgtggttcctgacatgagttttgcacagcaagctgctatgctgggattaggtgcacagcaacaggcattcactcaacccaatgcaatgcttgccatgatagcagcaatgcagaacccagctgcgctagggatgagtccagccatgcttgctgctatgaacccagccttcgccgctgctgcattgggtgcaggggggcagcaggcacacacagttggtcttacaggttttggagctcagggttttgggacaccgtcgtttggagcaggtgccgctttcccaaatgcagcaggtgttcaagcagcagcagctgcatatcaaggaagtggagctcctcctggctttcaagggccacctgggtttcaggttggccaggcaactacccagacaagcactgcagcggcagcggctgccgcagctgccactgctgctggttatcaggctggggcatctgggcagggccaggtgcctggttctcaggtcggaggcactggttttcagggtggatattgacagaactagccatctgattattttccttgtatcttagtttggcatctgtggtccgtggttcgttcatgtggttttgcattcggatggcttttgagtctatattggtgccaaaatgtagcgaaaggcttcctgctgttgaattttacaactggatttgaaccagatgcctttgtagcagtatttgaaggaggaactttcttgaaggatcatatcgttttattgcctaatatgtagttttgctattgcggcttcattatgtactttgtggatgtgtactgggtttcatgtatcaaaatatctgtattttgactagttggctgttacctggtcttatcaaccgtgttaaatggttttgtgggcacaattggagacattttaactgcagttcctgggctgtttggagctatggggtatttatggcttttgccttaaacctggaaatttcttctctgcggatggtttcgacgaccactacatttaagatcttgaatgtgt

SEQ ID NO: 106147 - DNA, 2133 bp, Zea Mays
atttattctacctctttccaatgtcccattttccttgtgaatcactagtgtcgcaaatcccaatctcccagcttgcgcctaaaccctagcttgcctatcgatggcgccgaagaagcgcaaggccgatcccgccgagtcccccgccgccgtggaggcagccaccaccaaccaccgccacgagccggcgtcctcggagcccaagccacgcggctccatctacttccccatcactgacgacccgcccgaacccaacgccgccgaagaggacgaggacgagggcgccggcgacgacgaggacgacgcggaggacattgtcaagctacttgagccgctgtcgcgggagcagctcgttgcgctgctccgcacggcggcggaggcgagccccgccacgatggcggccgtccgccgcgccgttgaggccgaccctgccagcaggaagctcttcgtccacggtctcggatggggtgccggcgccgaggacctccgctccgccttctcacgcttcggcgagctcgaggactgccgcgtcatctctgacaagcaatctggtagatccaagggctacgggttcgtcctcttccgctcccgccgctctgcgctccgcgccctcaaccgccctcagctccaaatcggtggtcgtcttgctttctgtcacctcgccgcctcaggccccgcacccccagctcagtctcagaaccctatctccaacgccaaccccaatgctaactctaactccacgagcaacgcttctggatcctcatcatcacaaactgacaatatacaacgcaagatatttgttggtaatgtgcatgctgatgtggacgtggaccgcctatatgagtattttgcacaatttggtgagattgaagagggcccgttgggctttgacaagaacactggcagaccaaagggatttgcattatttgtttacaagtctgtggagagtgctcgccgtgctttggaggagccaataaagaattttgatggaaagacactcaatgtgcagaaagccatagatgggaggaccaagggctcatctggaatgaatacaaatactaactccaatcccactactgcatctgtggtcgccgcccagatgactgctccttccagtgttgccatcagcccatatgatgcatcagcatatagtgctactgtggttcctgacatgagttttgcacagcaagctgctatgctgggattaggtgcacagcaacaggcattcactcaacccaatgcaatgcttgccatgatagcagcaatgcagaacccagctgcgctagggatgagtccagccatgcttgctgctatgaacccagccttcgccgctgctgcattgggtgcaggggggcagcaggcacacacagttggtcttacaggttttggagctcagggttttgggacaccgtcgtttggagcaggtgccgctttcccaaatgcagcaggtgttcaagcagcagcagctgcatatcaaggaagtggagctcctcctggctttcaagggccacctgggtttcaggttggccaggcaactacccagacaagcactgcagcggcagcggctgccgcagctgccactgctgctggttatcaggctggggcatctgggcagggccaggtgcctggttctcaggtcggaggcactggttttcagggtggatattgacagaactagtttggcatctgtggtccgtggttcgttcatgtggttttgcattcggatggcttttgagtctatattggtgccaaaatgtagcgaaaggcttcctgctgttgaattttacaactggatttgaaccagatgcctttgtagcagtatttgaaggaggaactttcttgaaggatcatatcgttttattgcctaatatgtagttttgctattgcggcttcattatgtactttgtggatgtgtactgggtttcatgtatcaaaatatctgtattttgactagttggctgttacctggtcttatcaaccgtgttaaatggttttgtgggcacaattggagacattttaactgcagttcctgggctgtttggagctatggggtatttatggcttttgccttaaacctggaaatttcttctctgcggatggtttcgacgaccactacatttaagatcttgaatgtgt

SEQ ID NO: 106148 - DNA, 117 bp, Zea Mays
gccacgtccaagctttattaagaggaaaaagagaatacacttacagacacttaactagtcaaacagctccagaaaaagtcacccaagaactcaagaatgagaaaaaaagataaagaa

SEQ ID NO: 106149 - DNA, 432 bp, Zea Mays
atgaacaacagatttacaaagataagagagcaaggttcaaagggaaagaaaagcaacccactagcgcttgaagagcttttgtgggaaaatgagtgggttcaggagtctgaagaaggtgaggagctttggagtgcagtagatgaagttttaggtgcaactcaagctacccagggcagaaacttgcctagggcagcagctacacatggtgggaggacctactccgagacctatgttaggagtaggaagcgccaaaaagttacagtggctcaggacttgcagcaaggagatggcagtagcagtgacagtcacaacggaaatgatcatcgagagccaactcaaaatgaccaagatgctgcagaaaaagcgattgatgatgaagaagaatctggagctgctggtgatcaattcaagctggatgatgatctcatatag

SEQ ID NO: 106150 - DNA, 2331 bp, Zea Mays
ccgcaccccccgtcgcgcacgttctggctcctcaggtgatccggtgcgtgcgttgcgacttgcgacgtcctccgaactcccgcccgagtcacgtggcgccggacgcggcaggcgataatcgccggccggccgaccgagacgacaggctaggtttctcgtagcacacgcttacagttctcgcggattctcggtgtgcgcggcccggccgcacattggacggccatccagtctcgccgccgcgtggtttgatccatcgatcccggatcgatcgtccgtgggaagaagaagaaccgaacggctggttcatggcggcgccagcgaccagggtgatcggatccaagccagcggactgcttccagttccaagaccctaacacctggacctgcgtatcggagctcgcaagcgatgtggtcgtcgaagtaggagatacgtccttccacctacacaagattccgttgaccagccgtagcggcacgctgcagaagcttgtgaacgagtccaccggcgatggcagcaaaccgtgcaccgtgcgtctggacgacgtccccggcggggcggaggccttcctgctggccgccaggttctgctacgacgtccagacggagctgaacgcgggcaacgccgtgccgctgcggtgcgcggcggagcgcctcgccatgacggaggactacggcgaagggaacctcgtggagcaggcggagtcgttcctgtccgaggtgctggccggctggagcgacacggtgcgcgcgttgggcacgtgcgacgacgccgtgctccctgccgccgaggacctgctcatcgtgcagcggtgcatcgactcgctggcggacaaggcgtgcgccgacccgacgctctccgggtggccgatgctggagtacttcacggccaagagcctcgaggagacggcgatctggaccggcatcggcgccgccgggaggccgcggtcgcccggcgcgggctggtggtacgaccaggcgtcctcgttaccgctgccgctctacaagcggctcattgcggcggtgcggtccaggggcatgagccccgagaacgtcgccggctcgctgatgcactacgccaggcgccacctctccgggctcaggcgcctcggagacaacagcgacggcagcagccgcgggggggctgcggccgtgctctcgggcggcgaccagaggacactactggaggagattgtcgcgatgctcccagtcgagaagggcgtcgcaccgacgcggttcctgctcggtctgctccgcgtcgcgacggtcctgcacgccgccgcggcatgccgggacgcgctggagaggagggccggcgaccagctggaggaggccgcgctggaggacctgctgatacccaacaccggatactccgcggagacgctctacgacgtggacagcgtgcagcggatgctggagcagttcatgatgacaaccccgcctgcgttcgccgtgttaccggagaccacggacgagggacagctggtcgacgctccgccgggcgagctcatgccagtcagctcggtaggcaagctagtcgacgggtacctcgcggaggtcgggacggacgccaacctcaagccgtccaagttccagaccatcgcggcgctcgtcccagactacgcccgggcgatcgacgacggcctctaccgcgccattgatatctacctcaaggcgcacccgtggctgacggactcggagcgggagcagctgtgccggctgatgaactgccagaagttgtcgctcgaggcgtgcacgcacgcggcgcagaacgagcggctgccgctgcgggtggtggtacaggtgctcttcttcgagcagctgcggctgcgcaccacggtgtccgggtggttcttcgtgtcggacaacgccgaccagggctccagctccgataactgcgtactgccgcggaggcccgacgacgatctggacctggcagcccggtccgaggtgacgacggacgaggacggctccgcggcggcccagcacgagccgtcgccggcgatgagcgtcgcggagatccaccgcccggggaagcccaagagcaccctgagccggctgttagggaagctcgggctcggcgggaggtcgtcgtcgcggcagcgccagcagcaaccgccgctgccgggcgccagtgacaagaggcgcaggtccttcgatttcgggtgttaataataacaatggaagatttagacgtgcgttaattaatttgttcgagatgtagcaatacgatttgatgatggcattactcgtaggtacaaagctcatgggttcattcttttcggattgttttgctggaaaagtttctatttagaccgtttgtaatttttttaga

SEQ ID NO: 106151 - DNA, 255 bp, Zea Mays
atgtcggggagtggcgggcggatccggcggatggagggggccgatgagagctttttgaaacaaggatacctattttcagaagctcagtcttgtgatacattggttccaaaaaactcgaccgatgagacagaacgagggaggacagcggcgactgtacaattaattttacttcgccgggaagaaaaccacggcccatatgttgacatgggctacaatcctcgcatcgcatcgagaatggcaagacaggggccgtga

SEQ ID NO: 106152 - DNA, 975 bp, Zea Mays
tccccaagacgtacaagcacacggccaccgaaccaagcaagcagcatcggaccagcgggcgcatcgatcgagccagtactcctcgaccggcccggccatagaagcataataacactacagggggtgtggagcggagaggtagatggcgagcgggagcggcaaggcgaaggcgtcgtcgtgggcggcggcgatgagcgtcggcaccgtggaggcgctcaaggaccaggccggcctgtgccgctggaactacgcgttccggcaggcggcgcagcagcgcgccaggaggccagcggcaggcgcgagcggctcagtcggccccggcagcggcagcggcagcgcgcacgcgccgcctgcttctgctccctcgggctgcgccgcggcggcgaggaggagagccaggcagcagcaggaggaggagctccggacggtcatgtacctcagcaactggggtcccaacaactagcagctacgaactaccagtagctggtgatcgcgcgagcaggcgaagcgaagctggcagtggccgggcaacaatctgagatgcatgacccttcgtgactacccctactctgttgtacgaacgatacgatcggcaaggccagtgcttgtggggagacattggcaattttgccattatgatttgtgggcttcgctagtatgccatcgggcccacaaatcatagacacagatggtcccaccagtcatagacacgggatggcataataacagacaaccaaaattgagagtggcacaatcacaaatttctcgcttgtggggcagcggccgatgaaatgaatcgtcgtccagcaagtatatatgcgtggatgagcatgtgtacgccaacgccaggaagctgatggacacgatgtacaccaccatgcgcgcgcatggagcttaattttgcatgctggtttcattccattccatcaagtgtccgtggtttatagactttataaatgcgcatttcgtggcaga

SEQ ID NO: 106153 - DNA, 935 bp, Zea Mays
cccacacccaccacctcttctctgcacctcagcacaacactctccccagctcgagtaaccacagcgagaaccaatcgccaagcaaaaagcccgagaaagaaagaacaaacaggagacacagatggcggctgcagcgaaggcgtcgtggatggtggcgatgagcgtcggggccgtggaggcgctcaaggaccaggcgggcctgtgccgctggaactacgcgctgcgctccgtccaccgcgccgccaaggccaacgctcccagcttcgcgcaggccaggaagctggcgccgcccgccgcggacaaggccgccgcggaggaggggatgaggaccgtcatgtacctcagctgctggggccctaactagctagggcctctgctagtttcggcttcctgcaaccgtaccgagctcggcttcaaatctgatccatgactggttgccttgccgacccactgtaacataggagtatagcaccacgatgatgatgatgaaaagttctgccacttgatttcagttcctcaaaactctgaatccctacgctactgtgctggcatggaaataaaatgaagagtgcatttctgttcataagagcctgttgcgttcctacggaacggtggccctaaggattctagatcggattgtttgcctaattaatataagtatccataaattggaatggatcctggttgcattctgaaacaactgaacagctctaaggtcttattcgtttgtatcggattgcatctgtaatcgtttcaactaattaaagtttatataaattagagaatcaatccggttagaaatcgtttcgatttatcaatccggtacaaatgataaggcctaacatgtttttttctgggtggattggcgtgtgccactctgccagacacgtacgagtctggtacaaaccacaatagctctggaatgccttctttaa

SEQ ID NO: 106154 - DNA, 714 bp, Zea Mays
acctcaacacagcaccaccaaccaagcaacctcactcgctacaaacaagaaacaacaagcgaaagttttctctcgagagaggaggagaagaccaacaccgggaggagatggcagcagcagcagcgacgaaggcgtcgtcgtggatggtggccatgagcgtgggcgccgtggaagcgctcaaggaccagggaggcctctgccgctggaactacgcgctgcggtccgtctaccggaccgccaaggccaacgtgcgcagcggcagcagaagcttcgccgcgcagcgggacaaggacctggccccggcggcggagaaggggcggcaggacaaggccgccgcggaggagggcttgaggaccgtcatgtacctcagctgctggggacccaattaactagcctttcgtatcttagctggtctttggccttcttcagcgaccgcgagctcgcgagctgattattgtaaatatacgacgatgatcggatgatgatgatgatgaaaagttctgccacttccgttcgggcgttttggactgtgtacgatcgactgacttctgatcctgtacaatgtactggcgtgaaatctgagagctttgagtccacgattccaaattccaagtagacaggagggagggttcatcgcataccggcgttgcattccctgtccttttagatgaagtttatgctcaaaatacagtatcttataagtttggttcacaa

SEQ ID NO: 106155 - DNA, 771 bp, Zea Mays
aaacaggcaaacacacaacacaaccaaccacctcactcgatctctcatcactcgcaagtccagcgatcaccaaccagagctcggctccaagcctccaactccaacccaaggagacagatacgttcgcagatggcgggtgcagcgaaggcgtcgtggatggtggccatgagcgtgggcgccgtggaggcgctcaaggaccagggtggcctctgccgctggaactacgcgctgcggtccgtccaccgcaccgccaaggccaacgtccgcagcagcctcgccgcgcagcgggacaaggagctggccccggcggcggagtcgaagaggcggccgggcaaggccgccgcggaggaggggatgaggaccgtcatgtacctcagctgctggggacccaactaggaggactagctagggttcactgttcagttcattgctggtgctgggttcagttcagacctggctggccggttgcctcctgcgattgtaaaataggaatacggtcacgacgatgaatgatgatgacgatgaaaagttctgccactgtatgtttcaggcctgtgggctcaaaacaagaattcggtggtgcttgatggctgaaacatccatatccatgtgctggaacataacagtcggtgatgccaagcatgaaatggcaatctcactcaggtcgtgggatctgctctctaatgaccggtacaaccgagactgtgtttcagctcagttcctgctgatggttcgttcatcagaggtcaatttcagtccgctatgcgtgaa

SEQ ID NO: 106156 - DNA, 1070 bp, Zea Mays
gacaaggcagccgccgccgtccccattaacatcaccgagacctatcgccgcagaaccaccgaatccacggcatcggagagtgtagaggttagtactaggcggaggtcaagatggtgtgcatccggcaggcgactatcgacgacctgctggcgatgcaggcgtgcaacttgatgtgcctgccggagaactaccagatgaagtactacctctaccacatgctgtcttggccgcagctcctcttcgtcgccgaggactacggcggccgcatcgtcggctacgtgctcgccaagatggaggaggacccctccgagccctgccacggccacatcacctccctcgcggtgctccgctcccaccgcaagctcgggctcgccaccaagctcatgtccgccgcgcaggcagccatggaccaggtcttcggcgccgagtacgtctccctccacgtccgccgatccaaccgcgccgccttcaacctctacacctccactctcgggtaccagatccacgacatcgaggccaagtactacgccgatggagaggacgcgttcgacatgcgcaagcctctccggcagccgcaacctaagaagcaccaccatcaccaccaccacggccccggtgggtgctgctcccacgacgcacctacggcgacgactggttcttctcctcagtcttttagttcgccggataagaaggctaacacttgacggatgaagcatatctacagagaggagtcaccaagcccattggacttccgatacgcagctttttctaatagaatgggaaacgaattgtactgtaattgtttgtgtactttactttggctcaatcgtccgaccgtatctttgtaatcagtgagaatggcaagcaaatgtccttgacatctattgttattgtaaaaacatgtgttataacgctgattctcagattacatttgattattcgagctgacaatttcttcaggttttatacagcagaatgtaatgcgcaatattattgtcggatcactcaaattacggagaactccagtgccgagatttctgagtatcaatgctaattatttcaaaaacaaa

SEQ ID NO: 106157 - DNA, 799 bp, Zea Mays
tcattggtttgatgtttataccttttcttctgcctagtgatttaccatcaaaataaattactttgtgtgactgccagtgatgattagtctgcaaaatggatgtcctgtggaaacatggtacataatatgacatcatttgataacactgaggcattacagaagaaccctatttccgttcagtttttgcttcgtgctctgttcttttattctgaaagttgaactttatcataaagcttggttgaggcaatatcaaaatccaggcctcatctttcagtgatggttctgtctgcaatatggactatgtatccaaatccaagtcaccgcttcagggaaaacctccttggagaaacatcatctaatatgatatgaattctgatagacagatacagatatatctatgcattattgtatcattttttctagtttcaaggaatcataattattttctatttagaaatctttggtttgcatttgcccaatttaagctcaaattctggtttgtgcacttaataagttgcttctgaatcttgcagaagcatatctacagagaggagtcaccaagcccattggacttccgatacgcagctttttctaatagaatgggaaacgaattgtactgtaattgtttgtgtactttactttggctcaatcgtccgaccgtatctttgtaatcagtgagaatggcaagcaaatgtccttgacatctattgttattgtaaaaacatgtgttataacgctgattctcagattacatttgattattcgagctgacaatttcttcaggttttatacagcagaa

SEQ ID NO: 106158 - DNA, 753 bp, Zea Mays
attaacatcaccgagacctatcgccgcagaaccaccgaatccacggcatcggagagtgtagaggttagtactaggcggaggtcaagatggtgtgcatccggcaggcgactatcgacgacctgctggcgatgcaggcgtgcaacttgatgtgcctgccggagaactaccagatgaagtactacctctaccacatgctgtcttggccgcagctcctcttcgtcgccgaggactacggcggccgcatcgtcggctacgtgctcgccaagatggaggaggacccctccgagccctgccacggccacatcacctccctcgcggtgctccgctcccaccgcaagctcgggctcgccaccaagctcatgtccgccgcgcaggcagccatggaccaggtcttcggcgccgagtacgtctccctccacgtccgccgatccaaccgcgccgccttcaacctctacacctccactctcgggtaccagatccacgacatcgaggccaagtactacgccgatggagaggacgcgttcgacatgcgcaagcctctccggcagccgcaacctaagaagcaccaccatcaccaccaccacggccccggtgggtgctgctcccacgacgcacctacggcgacgactggttcttctcctcagtcttttagttcgccggataagaaggctaacacttgacggatggtaagatttacctcgcaagctctggatgttgcattatatactaatatattcctgatcactgcagagt

SEQ ID NO: 106159 - DNA, 705 bp, Zea Mays
cccttttccgcttgcggggaacactccgctcgtttggtagcgcgtgatgcgaggttgagcggtgccgtttgtttcacggtcaggctgggcgcaaggagaccgcactcgacctggcgaagttcgtcgacaagggcgtccaggtgaagctcaccggcggccgccaagtgacaggaactttaaagggatatgaccagctactcaacctagtgctagatgaagcagttgaatatgaaagagagcaagatgacccattgaagctatcagggaaaaccagacagcttggcctcattgtgtgcagaggcacggcagtcatgctggtctcaccgactgatggaactgatgagatcgccaacccttttcttgcggaaggagcataagcttgcagttggtcgattatttagaaccgtgctctcatgtcaccctcagaacgatgtgtcccagtgggaaaaagaactctattctcgtaccggttggtgatgaactctgtaatattcaccgtgcaagtgcaacttaaaacatctgtgatacgagctctttttttttattgtgtgcggttgtgcttcccttatttagaactcacaaatcagatctcacgagtacgatcatgcacgcacgcacggtatggccctttaattaggagtctgtttggatcccaagagctgaagagaagtgactaaactttaatcactttagaaactaactaaa

SEQ ID NO: 106160 - DNA, 827 bp, Zea Mays
caaaaaaaggaaggagagctgctagtgcttttcttctcggcgagtctttctctttccccaccttcacttggccgtcctcccgagctgcggcggccgcatcgattgctagggtgaaaatccgttctccggcgattttgggctctcgggaacagacaggaggatccgcgggaaggattcggctgcgtcctagtgtagtgtcgacatggctgggcgcaaggagaccgcactcgacctggcgaagttcgtcgacaagggcgtccaggtgaagctcaccggcggccgccaagtgacaggaactttaaagggatatgaccagctactcaacctagtgctagatgaagcagttgaatatgaaagagagcaagatgacccattgaagctatcagggaaaaccagacagcttggcctcattgtgtgcagaggcacggcagtcatgctggtctcaccgactgatggaactgatgagatcgccaacccttttcttgcggaaggagcataagcttgcagttggtcgattatttagaaccgtgctctcatgtcaccctcagaacgatgtgtcccagtgggaaaaagaactctattctcgtaccggttggtgatgaactctgtaatattcaccgtgcaagtgcaacttaaaacatctgtgatacgagctctttttttttattgtgtgcggttgtgcttcccttatttagaactcacaaatcagatctcacgagtacgatcatgcacgcacgcacggtatggccctttaattaggagtctgtttggatcccaagagctgaagagaagtgactaaactttaatcactttagaaactaactaaa

SEQ ID NO: 106161 - DNA, 3615 bp, Zea Mays
atggccgcctcgccgtcgctgcacgccgtggcgcaccgggggccctccctgaccgccctcctcttcctcgtcgccgcgatggtgctggttccccctgcggtggccgagatccgggagaccgcaatccgggccgacccgcggagcatcatcccgctggacgagttcggcttctcccactcgggcgtgctggagctcaacgtctccggcatcgccttcgacccgcaggcctccgcggagctggacctctcccagctcggcttcttcctctccacgctcgacgcctgggtccacgtcctccgccagctccaggacctcgacgtcacctgcgcgctccagtccgagctcgtcaagctcgccttctctttcgaccgcctccgcccgccctccaaccccaccgacgtcgaggtcgctcgctcctcctccttctccaccgccttccgcgtctccgagcccggccagtacacgctcgtcttcgccaactgcctcggcggcgggcgcgacaccctaaaagccaaattctacaggcgggcccgtttcgcgcgcggcccaacgcctcgctctcgagagttcccctccgagtcgacgaggcaggagctgaaccaaccgtacaacagtttctccccgattcctccgccgtctgttcccttcggaaactcaatggcgtcgcccgacgacgagtccgcgcagccaccatcgaagcggccccgacgcgatgccgaacctgaggtggacgccgctgagccatcaccgcgcgtggtgctcaacccagcggactgcgatctcgacttcgatgtaggcgggggcggtctccgggggagcgcgcttcacgagggcggcttcgcctactgctggtccggcgcgcgcgcgacggtgggcgccaggggcggcgggcggtactgcttcgggtgcagaatcgtcgctgagcagccggtggagatggatcccacgacctccggggagcgccacctctgccgcattggggtctcgagaggggatgatcccgtaggtgcgctcggggagtcccagcacagcttcgggttcgggggcacggggaagttctcccaccagcgcaggtttgtcaactacggcgtcaagttcggcgtcggcgacacggtcgtctgcgccgtggacctcgattccaagcccatggcgtcgatagggttcgcgagaaatggcgaatggcttggtattgcgaggcattttgatgcgggcgagaaagggcttggtctggttgacgctcctctgaggccgatgcgatggggatccgcactgtttccccatgtcctgctgaagaatgttatcgtggagatgcagttcagcagggaggatgggctgctgcctgttgatggttatgaaccctgggcctcagctttttctcaaaggaattcagtatttggcccttcgtttgagcaaaataaatgtgaggtcatgatgatggtcggtcttccggcctctggcaagtcaacatgggcagagaaatgggtcaaggagcatcaggagaaacgttatatccttctcggaactaaccttgtattggagcaaatgaaggtgccaggattattgcgtaagaataactatggtgagcgttttgaacgactgatggattatgctacatggattttcaacaaactgctgactagggctgcaaatacccctcgcaacttcattatcgatcaaacgaatgtttacaagaatgctcgcattcgcaagctgaggccatttgctaactaccgcaagactgctgtggtcatgttcccaactccaagtgaactgaaatccagggcagcgaagcgtttcaatgagatgggaaaggaaataccagctgaagcagttaacgaaatgacagccaattttgtcctaccactctcgaaggatatgcctcattcgaaggagccttttgacgaggtaatcttcacagagctttctagggatgaggctcagagaaccctagatgatatgcagcgtgtgttgccaagaaatgtgaccccaagctatggaaactctggcaaccaaaaacattatagttcaacatatgctgggactgctgctccacttgatcctagtgcaaggtcatcaatgccaggcttttatccaccaacggccaattcatatggagttggcgacctacgtagcagtgctgctactttcagcacaggtgtgcatactgaaggcaacacaacacatggacagacaccctgcagcgttcgaagtttccggagtccaacaggaaaccaacatggaatccattcaagctatccaagtgctccaaaccaatatcagatgccctcaagctacctgagtaactcaaaccaatatgaagtccgtgcaagctaccgaagtacaccacttccgggatatggacagagtacatatgcttcccgcaggaacccaagcccatacaattctgagatgcaccaaggtattcaggctcccatgagtagcaggaacctctaccgagcacctgggtcagccgaagcctatgtggcaccttgctatgcagctggaaatctgattgggaggccacatcaggtgttatcaccatcaacttttccagcacatggtccacaaccagctgctcagtgggtgccaaatcaaggtagttcccgctcatggagttctgacagttacaggccttactatggacaatagtctcatgatgtgcaccggccgtcgaatgctgctttggcaccacatcctagctatgctatcgtcacggttctgcaccaaactacatgaatcaatggcggagaccttggtagaattagctttgatggcagcttgtttattttctatataaataaggccatgtttggtttcaattagtcttaggactaaactttagtcctaggactaaactttagtccctacttgtttggttctagggactaaatagactcaaatgctcttggaatacactcatgtgggcttttagtctcttttagcacctatgtgaaggactaaagactaaatcattttagtccatattttagtcctagtgtttggcaaaaaagggactaaatgggactaaaaactagagactaatctttagtccctctaaccaaacaccccctaaaacgagaggtgtaaataacagtgctcaggttctactcgttctagggaaccttcgtgcgtctgttacgtacaaagctacgcatttagcaacacgtttgtgaattaccttcttcaaaagttctgattttggtggatatcattttgcattattgccctgaattccaacaggaatctagattcatgaatagttaattcgtaacattctcagaaatgtgattatttcgctgcatgttacgggtgccatgtatccagagttttgtatgataagatgctagcctgggttgtgtaattcagctttgacgaacaccgtggcttctcgaagttcatttgacagcaatcgctggaatttaagcagctacaaggatgtataaatcccaaaaatccgttacattcgggcgtgtacaaggtacagtcagttcacggcaacgcaaactggtcgacgtcaaggttgataaaaacacgtcggctcttccaactttacaagacaaaacacctagcctataactctcatgagcaagaactccttaaagggtcatctcctcc

SEQ ID NO: 106162 - DNA, 4404 bp, Zea Mays
agtctaaatatttaacaatatatagttgggtattaaaaatagcatgtatgcattccaaataaacctcgcaatgtaataatagaaagagacgttaaatgatttggtccgcccacctagtacattcaccatattttggttaaaataatttaacaccgcaacgacaaatgagtagggttacaacgagattgttcaacattacgtttgtttgggttgaaccaatcaatgtatgtttctcgctactgctagactgagatgagcatgtgcatcaccaccttgaagcaagaagacttggcgccacctagtgcctcgttacaccattcctaagcaagcttgcttctctttccagaaccgaagcaaccgaaaaggaaaccccagttccttcaagccgctgccacagcatttgccccattctgcagtaaacagcatcacaaaatccgcctgcaatgcaaagggtgccaatatataagagggtgcatgctcagaggtggagatggaatcatgcaaacatagatcaagaaaccacgcaatggggagcagcaagagagtgcccccgtaccttctgctggtgctgctggccgtcggagccgccgcggtgagcgtcggcatcctgcacaagatgagggagcgccgcgtccttgctgtcctcctccaggaacgcgaccagcagctcatctccttccaagtcctcctcgaggtaccgggtatgcatgactcgttttcatgcatccgccgcgttcgagaatttttttttttgcatgaaccacaattgtgcttctaataggtagagctgttgcttgactgaatacatgtttctctgtgcctgcactttttggccgactctgtcagtagataatggataccctgcttttgtcacccagagtcctggactattaactactccatccgttttttgctagatacataggctttgcgacgtacctagattcacaataaaattgatgtatttagaaaagttaaaatatcttaaagtttaagacagagagagtattaattaagtactctcaaacaatatgccaccacttcagtttactccctttattcaacgaatacaagcaagaaattaatgctcatagtatccatctgaagttctgaagaacatagttccacctgtatgaagacctacaggacacctaataaaccactctatacaaatacaacactgtcaaaaaaggaatcttgtcagagtgtcctacagataagatttctttagataaaaccgaatatatgacagaatgtagtgccctcaaagaaacaaggttctcagactacaagcattcaattaactccaaacacctccaggtctctagatggaatacatagggccattaaattaagcatagtgcactaaactgagcacaaaaaaaatgagttgatagaacaccacaacctcagttctctttgaaacgtttcatcatcaaatagattaaaaatgtgtttgcgcataatacttcaaaagtcgagatctatcaactgaatatagaggattgcctgtaatgcttaaattagggaattattgataccactagtaagtaaaatataagaaacagtacaatgtcatgcaaagtatgattctatttgcaatcggcattttcatgaaagaaccatcatattgccaatttagggtgtatttaagcacaaattttgcaggtgcttcaatggaaacatgataatttacaggagaaagattcccgcattataaatagggcctcagaagaaagatggattcaacaaaactacagtgttgcacatgcaaaatctttccatacccaaagcatgaagatactatcaaacatagaatcatgcagtcataaggtagtccacataataaatcgcccctgagaggacttcaatattgacactatttgcagacataaatttatctgtaggcaactaaggttgtctttggtgaatcgtataaaatagggaacacggaattgtagataacactgtttgacactgtttacagagtaaagtttgaaatagaggatgatatagaggatccgctggagatggcctaagtcgctatatttaattgaacatcctcttattctgcaagtaaatactgaaactattctgccagtaagtacagtccacttgatgatgtaaactgcaatagctgtagcactttagagcattctatctgccttttatttttattgtgttctatgaattatctatccagcatgttattcaaaaacacctcatcaaccaaatattactgtcttgtttttggcagaaagaaaaggaaattaacaaagagatgaggaggaaagtggacgaactggaagccaaaacatctgtcctaagtattgagagggcagaattgaaaaacaagctcatggattcagaaactaccacgacatatcttaccaacacgcagaaagaattggaagcagctcttgtggagaaagagagccatatcaaccaaataaaagagaatgcagttgcttcaaacccagatcagacgataactataaaggaactcctgcagcagaaagaagctgagcctgatcttgacaaatccgaaaattccagtgatcccattcctgctacagtagaagataattccaacaatactacaatatcagagagcagccacaatgatgagagcattgtagtgggagcaaacactgaaaatgcaacttctgaaaccgtggtagacaaatctgaaaactccaacgattccatgcctgctccagaaaaagaaaattcaagcaacactaatgcatcagatagcagccaccagaatgagaacattatagtggaagcaaaagaagataatgaaacttctgaccttgtggtactcgacaaatctgaaagcaccaatggttctgtacctgttactgcagaagaacaaaattcctacaacaccactgcatgggagagcaaccaacaagataacagttcctcacaagaacagttcttaaagttaacaaccaacatagaagatggccagtttcaacagaacaaaggtgatgccaatgagcaatcagatgatgcttcagagggaagccatttagatagatctgagcttcagcgggggaaccaaaaactgatagacaaccaggaagccagcaaagaagaaccggatggcacaagacaggtggaagatcctcaaggcgaggccagcaaccacggcagagaaagtaaagtgctcgagaaggaaaatgagaaagaaagaaatcctgagggcacgagctcagtggacaccttgagcgaagccaaccaaaacaaaacacaagcagtggaacctgttgtcgacccaacagatgtaaaccccagcacatccacaaataacgaggagagaagagaaacaaggaagagacgtagaaggagaaggtccagatctagaaggaataggaaggccgctgttgaggatgcaaacatacttgatgtgtttgtctccagggtgcggcaagcctacctcttttaccttgactatgcaaagttggctggttttagtgtcaggacaaagaggtgtaattgcaactgctggtgtggtgtgattgcaaccccgcattaggtgtgattgcaactgttgtataattctactcaaatatctgttaaaaaatgtaaacaaaatgattgcaactgctggtgtgttgtaattgaaactactggtgtggtgtggatgcaactgctgagttgctctgatgtgattgcaagtactgaataactctgggaaattttgttaaaaaatatgattgcaactgctggtctggtgtaattgcaactgctggtctggtgtgattgcaacttctatataactagatgcaactgctggtctggttcgaaaattgtagcattctgtcgggagcgtgcgggagggacgaagacgaaacgtcggttcggcctgggtggggcggttggctcggaccatggcgcgtaggttcggcctgggtgcattctctatattgaatgcacccaggtgtaatatataaatacagtatatatatatacccgcgggtacctgatacccgatgggtacgggcactggtacaattttttacccgcgggtacaattgctggcgggtatggctaatacccgcgggtacggtcgtgggcgggtatttattatacccgacccgaatccgacccgttgccatccagtcatacatagtctctcctgataaaatggatgcaaagacttccctcgtattaaatatagtatttatgaactttttcccacaagatatgtattttttatcacacaataaatgtatttgcaaataagctttactgtccttaaacaagatgtgaattgaacagtaagaaagacaacaaattcaggtagagctgcaaatgagatatgtgactttacttctcaacatgtataaataataaataaaataaacagaaaggcttagctgtcgtaagtcttca

SEQ ID NO: 106163 - DNA, 1520 bp, Zea Mays
gcatgttattcaaaaacacctcatcaaccaaatattactgtcttgtttttggcagaaagaaaaggaaattaacaaagagatgaggaggaaagtggacgaactggaagccaaaacatctgtcctaagtattgagagggcagaattgaaaaacaagctcatggattcagaaactaccacgacatatcttaccaacacgcagaaagaattggaagcagctcttgtggagaaagagagccatatcaaccaaataaaagagaatgcagttgcttcaaacccagatcagacgataactataaaggaactcctgcagcagaaagaagctgagcctgatcttgacaaatccgaaaattccagtgatcccattcctgctacagtagaagataattccaacaatactacaatatcagagagcagccacaatgatgagagcattgtagtgggagcaaacactgaaaatgcaacttctgaaaccgtggtagacaaatctgaaaactccaacgattccatgcctgctccagaaaaagaaaattcaagcaacactaatgcatcagatagcagccaccagaatgagaacattatagtggaagcaaaagaagataatgaaacttctgaccttgtggtactcgacaaatctgaaagcaccaatggttctgtacctgttactgcagaagaacaaaattcctacaacaccactgcatgggagagcaaccaacaagataacagttcctcacaagaacagttcttaaagttaacaaccaacatagaagatggccagtttcaacagaacaaaggtgatgccaatgagcaatcagatgatgcttcagagggaagccatttagatagatctgagcttcagcgggggaaccaaaaactgatagacaaccaggaagccagcaaagaagaaccggatggcacaagacaggtggaagatcctcaaggcgaggccagcaaccacggcagagaaagtaaagtgctcgagaaggaaaatgagaaagaaagaaatcctgagggcacgagctcagtggacaccttgagcgaagccaaccaaaacaaaacacaagcagtggaacctgttgtcgacccaacagatgtaaaccccagcacatccacaaataacgaggagagaagagaaacaaggaagagacgtagaaggagaaggtccagatctagaaggaataggaaggccgctgttgaggatgcaaacatacttgatgtgtttgtctccagggtgcggcaagcctacctcttttaccttgactatgcaaagttggctggttttagtgtcaggacaaagaggtgtaattgcaactgctggtgtggtgtgattgcaaccccgcattaggtgtgattgcaactgttgtataattctactcaaatatctgttaaaaaatgtaaacaaaatgattgcaactgctggtgtgttgtaattgaaactactggtgtggtgtggatgcaactgctgagttgctctgatgtgattgcaagtactgaataactctgggaaattttgttaaaaaata

SEQ ID NO: 106164 - DNA, 5168 bp, Zea Mays
atggtcgcgcaccaccagaagacggtgatcggcggcggcgcgctggagtcgccaccggacctcgtgaacttccttggcggcatcgacccgtgtgacggaagacagagcgggtcgagggaactgtggaacgacatccactgtcgcttggtggagcccgcggcatgggacgtgctggagaacttcgagcagaggtggaagaagcaggacaagggcgacaacctcctagtggcgctgaacagggcgtgggcggagctgccggagaacaatggttgggcgaatccacggtctggagaaggagggcgttggtggggacttgatggacagggcgacagaggtatggcttttccagtgctcgatgaaatgcctcacgatggcagtgaggcggtgattgttccattctctgaaggttttgattatccaatgttcgatgaaatgtctgctgaggaggtggtctgggatgcagaagtgctacttggttgtgattcacgtggcctatgtcagcggcttgctcatgaggtgggtgaccagatgcacagcgcttgcgagaaggatgttgtgcctgatgccccatggatgtttgttggaatgtcacagcaagcaagtacacacccagtgttcagggaaatgggtcctaaagttgcatgggatgaggagatgcaaactgaaagtcacatgcatgaaggtttactgaagcagcttgctcaaggtggagaagccttaaaagaatcagctaacaaggatgatgttggtgatgatgtgggggctctgagaggtgaagaagccctagtagaatcgaccaagaaggattctgatgttgaagatgaggccagcaggcctcacccaccgagggaggttatgccagatgattcacttctggtggatgagccggatgaaggtccagccaggtcatggatgcgcagtgggaggggagctatgccatggttgataggttgtttggatatgcatggaccagcagcatggggcctgagtgttggagcatctggttggggtcatcagggtggtatttctacttcactcatgcctaggatgcaaactactggaccaagttctaagggaggagctgacattcagcctatgcaggttgacgagaacgtgagctatataagtggactatcagagtacattgatgctttacaggaaatggtttttttcccattgctatatccaattttttttgcaaactatcacatcacttctccaagaggcgttctgctttgtggtccactaggcacaggaaagacgttggttgcccgtgcattagcttgtgttgcctccaaagctagccagaaggtcaattttgatatgcgcaaaggagctgttgttcttagcaaatgggtgggtgaggctgaaagacagctaaagctattttttgaggcatctcaaaaaaatcaactgtccattataatttttgatgaaatatatggcctggcaccggtgaggtctagcaagcaagagcagattcacaattcaattgtttcaacattgcttgttttaatggatggccttgcttctcgtgggcaagttgttttgattggagcaactaatagaattgaggtcatggatggggcattgcgtaaacctagctgttttgatcatgagttttattttcctttacctgactctgaggctcgagcagaaaaactggatattcatacaaaaaaatggaaggatcctccaccgaggaaactaaagatggaacttgctgctagctgtgtgggctattgcggagctgatttgaaggcattatgtacagaagcagctattagagtatttagaaagacgcattctcaggtttatgctagtgatgccaagttctcctatgaaaatttcaatggatcaactccaatactatacattgtgaaggatatgaatgagccatccatcttcaatggctctgaggtcctcatgccaaaggatgcaatgcactatggagatgttgaacatcgagaaatgcatactatacatgggtactactttcatatggctaccgtggctggacttctccagcgagcaagactgaagttaaggaagcagcagaaccatggcatcccgtttctggggacagggggacagtgagtctgaggaggaggaggtggaagaagttgagtcagaacagggcagtgatagtgatgatgatggaggtcgaggtggtgcgggacgcggtgcccaaaaccgatatttgaagaatcaagaagatgacagcgatgagtctgatacaggtcaccgtgtgatccgctccctgagggacaagcgcaacgaggagatgagatctattgttgatcagatgcgtaatgcaatgaagatcaatgactgggtgagcttgcaggagagttttgagaagcttaacaaacatcttgagaaggttgttcgtgtcaatgaatctactgaggtaccaaaaatgtatatcaaagctcttgtgttgctggaggacttccttgccgaagcccttgcaaacaaggaggccaggaagaagatgagcagcagcaattcgaaggcactcaatgcgatgaggcaaaaactcaagaagaacaacaagcagtatgaagagcagatccagaagtgcagggagcatccagagagttttgaagatgaagctgcagatgataaagatgtggatgatgacgatgctgatgaaagtgatgcagagattgaagatcctgataaaatagctatgtcagaatcagaagaggaacaagatgaagaggatgatgataaggatggttgggaacagaaaaggagtaagaaggataagctgatggataagcagttcttgaaagatccaagtgaaatcacatgggatattgtcgataagaaactcaaagagattatagcatctaggggaaagaaaggtactggaaggatcgagcgtgttgagcagttaacatttttgacccgtgtggccaaaacaccagctcagaagcttgaaatcctcttccatgtgatttctgcgcagtttgatgttaaccctagtctacttgggcatatgccagtcaatgtgtggaagaagtgtgtcaataatatgcttcttgtgcttgatatactccagcagtatcctaacattgtagtagacacctcatttgagcctgatgagaatgaaactcaaaagggtgcagactacaatggaacaatacatgttgtcggtgacctggttgcattccttgagagactggactctgaatttttgaagaccttacagtgcacagatccatacacaaaagattatgttcagaggctcagagaggaacccctgtttctggttgtcgcacagaacgtccaagattatcttgaaagggttggaaacttcaaagctgctgccaaggttgcactgcgccgtgttgaactagtttactacaagccccaagaagtgtacgatgcaatgagaaaactcgcagagcagcctgaggactgtgtggatgatgatgatgcagaggctggtgatgaacataaagcagtagatgacaatagaggaccatcaccatttgttgtgattccagaggctgtgcacaggaagcctacttttccagaaagcggtagaactttgatggatggattgatgttcttaatttacaagtatggggatgaaaggaccaaagcccgtgcaatgctgtgtgacatatatcaccatgcgatctctgatgagttttcagtggctcgcgacttgcttttaatgagtcatttgcaagatggtattcagctcatggacatatcatcgcagattttattcaacagagtcatggcccagttagggctgtgtgctttcagggctggtttgataaatgaagcccatggttgcttgactgagctctattctactgggagggtgaaagaattgcttgcacaaggtgtgcaacaaagccgataccatgaaaaaactcccgaacaggaaagacttgagaggagaaggcaaatgccttaccatatgcatataaacctggagcttttggaagccacacacttgatctgtgcgatgctgattgaagtccccaatatggctgccagcacctatgacaagcggagacctatgagcaaaacattccgaaggcttcttgaagtgagtgaaaggcagacatttgttgggccgcccgagaatgtgagggaccatgtaatggctgccacaagagccctcaacaagggtgatcaccaaaaggctttcagtgtcataaattcgttggagatttggaagcttttgaggaacagagagcatgttcttgagatgttggagcttaagatcaaggaggaagctcttagaacctatctcttttcatactcgtcttcgtacgagtccttaagccttaaccagctcactaccatgtttgatctcagcgagcagcatgcccacagcattgttagcaagatgatgatgcatgaagagcttcatgctagctgggaccagccaacaaagtgcatcgtattccatagtgtggaccaaactaggcttcaggggctactcttccagatggcagataagctctcggtcctggtggagatcaatgagagggcatacgaggcaagaactggtggtactctcgagggggtacctcccaggcgcaggggcgagggtcaggataatatgggaaagtggcaggataactttgtctcgtcacaggggcggcagggtggtggcaacaggtttggatactccggcagaggtgcaatatctggtcaaagtggtggtggacaccagagggacaggggcaatcagggttaccgcgggggctatggtggcgtttcaaggtttcaggatgcaaggggtcgcaaccagtctattccatcaggcagaggtggtgatggtggtgcacgcatggtgaacctgaacaggatgggtagagtttagaagtgataattttcagctcgagtaagcctgaaattctcctaaaagccaagttttgaatcactgctttttacatagtttcctgttctgggctgagccatccacctgtttcctacatttcgttgtagccttttaatttaaggggctaggaaattgaactaagagtttggtactgtttcgtgggagtgtgacttcactccaatatttgatatctatctgtgacacttgctataacctgtacttttcttgtttgtgttatgtggtttttatttggttatgaaaaataaaaaggcatgtcgcagatagaagatcgtta

SEQ ID NO: 106165 - DNA, 2826 bp, Zea Mays
atcagcgcctggaggcgtgcaagggctaaacccagaatccccaatcatcatggatacaatattcgtccaccttctcctcctctcgtttatgatacttcgtcccatagccatcgccgccgacgtacctgagtccgacacgctcggcaagggccgcaacatcaccgacggcgagacgctcgtctcagccgacgggacgttcaccttgggattcttctctcccggggcgtcgaccaagagatacctcggcatctggttctcggcgtccagtgtcgccgtctgctgggtggcgaacggtggccgccctgtgaatggcaactccggcgtgctggtcgtcagagacacgggaagccttctgcttctagacggctctggccagaccatatggtcgtcgaactccaccagctcatcgtcatcagcggaggcgcagctcctcaactccggcaacctcgtcgtccgcgacggaggcagcagcagcagcagcgacgccatcctgtggcaatcgttcgatcacccgtcgaacaccctgctgtccggcatgaagctgggcaagaacaagtggaccggcgccgagtggtacctcacgtcgtggcgctcggccgacgacccgtcgccgggggcctaccgccgcgcgctggacaccagcgggctgcccgagcttgtggtgtgggagggcaacgtcaggacctaccgcaccggcccgtggaacggccggtggttcagcggcgtcccggaggtgtcggcgtacaggaacttgatctggtaccaggtgacgacaagcccagcggaggtatcctacggctacacctccaaccccggtgccgcattgacccgtgtcgtgctgaccgacgccggcgtggccaagcgcctggtgtgggacgcgggcgcccggacgtggcagaccttcttccagggccccagggacgtctgcgacgcctacggcaagtgcggggcgttcgggctgtgcgacgccggcgcggcgtcgacgtggttctgcacctgcctcacggggttcagcccggcgtcgccgcccgcgtggtccttgagggacacctcaggcggatgcaagcggaacgtgaagctggactgtgccaataacgggagtgggacgacgacgacgacagacggtttcctgttggtccgcggagtgaagctaccggacacacacaacgcgacggtggacatgagcatcacggtggaggactgcgcggcgaggtgcctcgccaactgctcgtgcttggcctacgccgccgcagatatccgcggcggcgacgtccgtagcggctgcgtgatgtggacggatgacatcgtcgacctccgatacgtggacaaagggcaagatctctacctgaggctggccaggtccgagctgccggcggcggcggggccctcgccgcaacggccgtttcgtaccgcaccagttgttggtgcttccgcagctgccgtcgccgtggttcttattgttctgtcggtcgtgcttgtgattaggcggcgccggcgaccaataatcccagctgctcagagtgcctctccgagtgtcccttctactgaactgcgcagacctccgtcagtcccttctgttgacctgtctagtttgaggagggctacaaatgatttctctgcagacaatgtcattgggcgtggaggattcagcaccgtatttgagggcaatttagctgatggtaccaaggttgccgtgaagaggctcacacaatcttaccttaccgatggaggtggtgagactttcatgagagaagtggaagtgatgtcagagctcaagcacgagaacctcgctcgtctccttgcttactgcaaggacggaaatgagcggatactggtctacgagtacatggagaacaggagcttgaacctatgcatattcgcaagagacgccaaccaacgcgctgtgttgaactgggagcggaggctggagatcatcgtaggagtcgccagaggcgttgcttatctgcacggactaagcaaggtggtgatacacagggatctgaaaccgtccaacgtgctcttggacggaaactggagagcaaaaattgcagattttggcaccgccaaagtgttcgtcgatggccagacgaatccgacactggtacagacagagggatacagggctccagagtacacggcgcgagggccgagcctgacgctgaagtgcgacgtgtatagctttggagtcgtcctgatcgagatcgtcagtggccaaaggaacagcagcaaccagacgctcgtttccgatgcacgggagtcttggagccagaataagatcaaggagaaccttctggatccagccgtgggccagccggggccagagatcctccttcggctggagaggtgcgtgcaggtcggccttctctgcgtgcagcagtcgccagctgacaggccatccatggctgaagtagtcgcgatgctgacggtgaacggcaccagcagctcgcagatccgttcgcaccgcagtgccgctgccgctgccgccgccactcctctcgcgacgcaggacgcgtcgtctggagcacacggcgactccatctatctcacgtagacggcgaagcaaaagcccacgacgactccatctatcattctcacgtagacgacgacgaagcacgcggcgactccattcatctcgatttctgatcttggagttggatctgtcacggcggtattggttagtggtacacgattacacgagcattgcagttgcaggaagcagcagcaaaagtatatatactagcgaattcatgtatgttgctggaatattaccaaaaacttcatgttcatgggaacttttacaaaagagtagtgttgttgttgtatagc

SEQ ID NO: 106166 - DNA, 1845 bp, Zea Mays
ctcgagccaagattcggctatgagaagttcctgagcatggcggcatgggcatcgtggcgtgggagcgccgatggactgggccgctcgaaaggaagaggtccttcctggcccacctaatcggtgtcgttcaaagacttcagaagttcagcggtgcggaactgcggaggctgacagctgaggcggaggaaccgtaaccacgccgccaccgcccttcttccgtagtatcgctagacggacccttgacgcctcgcgccgccacagttcggcacccgtgtcccatggccgccgtcttcgccagatgaatatctgtgccaacattggagaaactgttcctctgctcaacaaatctgaacagcacaggatgaaacggtgcgtaccagggctggcaagccggaggtacagcttctcgccatagttgatgcttttccaggtgtcgacaagctccccggtccaaaccaagcaccttgactggtcttccatggcaccgctgctgctcaagttggcgtaagcataggcggtgcaggagcagttcttgctgcactcagccgcgcactgctcaaagcttctgttccggaggagcacgaacttgtcaggaactctcatcccgggcaaggccacgaagtgacttgccttgctgcactgcagaggctccgttctccggcatccttctgaagagttgagatcggcggcgacgggctcgaagccctcgaggcactggcacgccggggcagccccggtgaagtcgcagtaggcgttggggccacaggagccatagaggccgtagccaccggtggggcgctcggagatgagcgtccaggacgacgagttggtgtcccagctcaggagcttcatcgtgccggtgtggtcgagcatgatacggaagtacggcgagccgtcggagacggtgtacgtgaggtagaactcgtcgccggtgttgacgatggtctggtacacgatggagctaggtgagccggtgtacatgccgcctgacaccgacacgccgttccacacgctgatgcggcagtacggctcggccccgtgccagaccatcagctggaggttggagacggggtcgaggccgaacgagaaggctccggtggacgggtcggcggggcctctccaagagaccaggcgcgcggcggggcgagccccgtggatcatcaggaaccgcatgcctgggagaatggtgtcagtcgggtggtcgaagctctgccatatgaccgtaccgttgggcagctggagttgcaggttgcccgtgtcgagcagcacggccaggggagtgccgctgtcgtggacggccgcggcggcggcgttctgcgtcctccagagagtgcggccctgggagtccgaaagcacgaggtcaaagctgttgctgatggcgagcgtcggggacgacgatgtggtggctgggctgtcgcggttggcgacccacacgacggtgcggctgcgctcggggatgccgtggaaccagatcgcaacgtacaggctcgtgctggtgttggagccggacggggagaagaaaccgagggcaaagacgccgcctttggagatgagcaggtcgccgggtgaaagtggccttgcgcttgccagctggtcatcggatttgcagacacggatcatcaggaggagcaggaggatggaaatggtaaggctggtcatatccattctatggttatgctcatcactgacgagtatagatcagggaccacgaaaatggcaccaagatatagatcagagattgtacacatggacaaggtggagtcgtaagttcaccgggtgtagtctgacaaatttgatgaaaatgcaaaacgtcaatgccgtgtaatggtctaaaatatttaacaa

SEQ ID NO: 106167 - DNA, 944 bp, Zea Mays
ctcgagccaagattcggctatgagaagttcctgagcatggcggcatgggcatcgtggcgtgggagcgccgatggactgggccgctcgaaaggaagaggtccttcctggcccacctaatcggtgtcgttcaaagacttcagaagttcagcggtgcggaactgcggaggctgacagctgaggcggaggaaccgtaaccacgccgccaccgcccttcttccgtagtatcgctagacggacccttgacgcctcgcgccgccacagttcggcacccgtgtcccatggccgccgtcttcgccagaggagtgatccgaagcttttgcagaatgtgtgagctctgcctgtcagtggcgatttgctgaataacctaaatttcacttgcagctagtgttggagatgaatatctgtgccaacattggagaaactgttcctctgctcaacaaatctgaacagcacaggatgaaacggtgcgtaccagggctggcaagccggaggtacagcttctcgccatagttgatgcttttccaggtgtcgacaagctccccggtccaaaccaagcaccttgactggtcttccatggcaccgctgctgctcaagttggcgtaagcataggcggtgcaggagcagttcttgctgcactcagccgcgcactgctcaaagcttctgttccggaggagcacgaacttgtcaggaactctcatcccgggcaaggccacgaagtgacttgccttgctgcactgcagaggctccgttctccggcatccttctgaagagttgagatcggcggcgacgggctcgaagccctcgaggcactggcacgccggggcagccccggtgaagtcgcagtaggcgttggggccacaggagccatagaggccgtagccaccggtggggcgctcggagatgagcgtccaggacgacgagttggtgtcccagctcaggagctt

SEQ ID NO: 106168 - DNA, 234 bp, Zea Mays
tggggtgcgggcggtagcacgagcgcgtaccgcggcaagcgcaggaggtggtagcgcgagcacgcaggcagtacatggtgtgcaccgcgagcgcgcgagcgttcgtgcaaatattcctaacacgcgtagtgttgtcggtgtagtgttcctcgtgggcgcttcaaatactaggcgcacaaggtgttcgtgcaaatgtctaacaagggcgttgtaaacattttgactcatacacaa

SEQ ID NO: 106169 - DNA, 1589 bp, Zea Mays
ttagaaggtaaatgagtggagcactatttagaagagggctgtgttgaacctgttgataggctcagccctgaatagagggtttggtataccaccaactcagttattgtgacgtggttgttagcatccatgtcttcgtctgtaagtaagatggtcgaagccatgcgtgctgttgcacaaatttggaagaccttgaacaatatgtattcgagaaaggagaatgtgatgatgatgatggagatccgaagtaaggcagatgcagtgaaacatacagggagaccagtggaacaatatgctagtgaaattcagtacttgtggagagaactagatcactacgctcctctgcaaatggtttgccctcaggatgcacaggttgtccacaagtgggtagaggacaggagagtaactcactttctaaagaatttggacccggagtttgagagcaggagagatgccttttgtcaccaagaaagtcttcctaccatggatgaagctgtgtcagcaatgattaatgaggaaagcaggctccgggtaatgacatctaatgatcctgcgaaatcagcctacaccgcaaatgatgatagagactgctataattgtggtgagaagggacacttgagctacaattgtcctcatcctcgtggcagtggtgaacgaggtggtggaactcgtggagccacttgtagtacctatggaagaggtcgtggaggttatggaagggggcgtggtggccgtgccaggggcagaggtcgtggtggccctcatgtcaatgtagcggttactgaagacaccccctcaatcaccctgactagggaacaagctaaacggtgggaagaatggcataagggcaaagaatccgagtgtccaaccagcactcctcttggttctgtggcaactacatccacccagcacttcggtaactttgccaactacgcccattcgggcgtaggtactcaagcacaagcccttgcatcttcatgtagaagtcatagagattggataatagattcaggagcatctagacatgtcacaggactaattgattcttttaaaacatactctcattctattcatcctgaaactgtccaaattgctgatggtacctcccaactcattctggtgtagggtctatagagtctacaccatccattagtctatcattagttttgcatgtcccatcattccccgtcaatctcctttctgtcagctcaatcattgatcagtttaagtgtctagctatatttgatgaacaatcatgtgtttttcaggagaagagaactgggaagaggattgggactgaagtcaagcgtaatgggctatggttcatcaatcaagaggagcaagctttgtcagcaacaacagaaggaaataaaagggaaatcatgctgctacatcatcgattaggacatgtatcttttgagagcttgagtaaattgtaccctgattcctttaagggaatggagaaaggaactcttgtgtgtgatgcatgtgagcttgccaagcataccagatctacttaccctagtgttggacttcgtagcagtgattcatttatgttaatacattctgatgtttggggttcttgctcgatt

SEQ ID NO: 106170 - DNA, 3155 bp, Zea Mays
tacggcaggatctgcatacgcctttttcagtgaagaaccaagactgaaagaccgctgtcccgaccacccagcaatttgccagattctttcttgccccaaaacccccagagagaaaacagaaaagacccaatgttctgctaagctggagatgttcctagagccaggcagccatcttctcgcgtagcaaagctgctgtgaattagagtagagggccttttgagacaccaacaaccagatggcacacccagcctcgtcaggcatcctcggatgcgtcacactgctctgcatcttctcatccgccgctgcggttggcagcaacgccaccggctctggccagatacgcttggactgtggggcatcaagctcgacgagcacagacgctgatggccggagttgggacagcgacgccagctccaagttcgcgccttcactgaatggagtcgcagccactgcttcatcccaggacccttcgctgccatcccctacgccttacatgactgctcgcgtcttcacctcaaactacacctactcctttcctgttactcctggccgcatgttcgtgcgcctctacttctatcccaccatctatggcggtaaccatgctcctgcagatgcttacttcggcgtcacagcagccaacctgacccttttacagagcttcaacgcctcccaaacctctctatcacttggtgttgccttctttgtccgtgagtactccgtaaacgtcactgaaggcagcctagacctcactttctctccatccacacaccacaatggctcgtacgcgttcatcaacgggatcgagatcgtgcccacgcctgacctcttcacgacaccgacaccaacactatccaatgggggcaacccggatccgttccctattcttgctggaacggggttcgaaacaatgtaccggcttaacgttggaggccaggccatctcaccaggaggagatactggcttctatcgttcatgggttaatgacgtcccttacatatatgctgctggttttggggtggcttttgggaaagacgacaaccttaccatcagctacacacccactgtgccaaactacactgcaccggttgatgtctatgcaactgctcgctctatggggccaaatgcccagatcaacctgaactacaatctcacatggattctacccgttgatgccgggttctactacctcctgaggttccatttctgtgagatccagtatccgatcacaaaggtcaaccagaggtcgttcttcatctacatcaacaaccagacagcgcagcaggagatggatgtcatcgcgttcagcggaggaatcggcaggacggtgtacacggactacgtcaccgtcacggctggttctggtcagacgtacctatgggttgccctccacccggatcttacgacgaggcccgagtacttcgacgcaatactcaacggcctggaggtcttcaagctgcagaattacggaaacaacagtcttaatgggctcaaccctccccttccatctgttcagcctaacaacaacgggaatggggagcctagtgtgagaaggaaaggtgctgcgccggcaccggcagccattgctggagctgttggtggttttgctgtgctactcattgctgcctttggtgcgtgcatcgtctgcagaagaaaggaggtagcaaataaggagtctaggaaacccgatgacggccactggactcctctcactgactacagcaagtcacggtcgaacacctcagggaagacagcgaccacagggagccgtacatcaacgttgccatccaatctgtgccgccatttctcgtttggcgagatccaggcggccaccaagaacttcgaccaagcctctctcctcggtaaaggcggctttggaaacgtgtaccttggagagatagacagtggcacgatggtggcgatcaagcgcgggaacccgacgtctgagcagggcgtccacgagttccagacggagatcgagatgctgtcgaagctccggcaccggcacctcgtgtcgctgatcgggtactgcgacgacatgaatgagctgattctagtgtacgactacatggcgaacgggactctgagggagcacctgtacaacaccaagagggcggcgctgtcctggaagaagcggctggagatatgcatcggcgcggcgcgggggctgcactacctgcacacaggcgcgaagcacaccatcatacacagggacgtgaagaccaccaacatcctgctggacgacaagctggtggccaaggtttccgacttcgggctgtccaagacgggtcccaacaacgtcgacaacacccacgtgagcacggtcgtgaagggcagcttcgggtacctcgacccggagtacttccggcggcagcagctgacggagaagtcggacgtctactcgttcggggtcgtgctgttggaggtcctgtgcgcgcggcccgccctgagcccctcgctccccaaggagcaggtgagcctggccgactgggcgctgcactgccagaggaagggcgtgctcgggcagatcatcgacccgcacctgcaggggcaggtctccccgcagtgcttcctcaagttcgcggagaccgcggagaagtgcgtggcggaccgcagcgtcgacaggccgtccatggccgacgtgctctggaacctcgagttcgcgctgcagctgcaggggagcgcggaggacagcggcagcgtcgtcgtcgtcaccgacggaacgacgtcgtcgtcctcgaacaggtcgtcgccgcttatcgtctccgggcttcactcggacgagccgccgacggacagtacgaccaccaccaccaccacgtcgtcgacgacgactttgagcatgatgggacggagcctcgccagcgtggagtcggacgagctgaccccgagcagcgtcttctcgcagctcatgcatccaggtggcagatgaaaacggaaagtacaactggagtagatatcgtctgatcgatgtgctatatatatgtttctagttcatgctatatatatatatgtgggcaactagtatagttatgctccatacatattcatcatatagttcatcctatatattagtatgtattgtgctagagccctctgaattatatatcttaaacatgtacctgagctatgttctcacttcttcaaggccgatctgt

SEQ ID NO: 106171 - DNA, 1719 bp, Zea Mays
actagtcaatggcccaataagaaacagaaaggtaacagtttccggatctcgcgagcggggcaacgggatgtgtgtatatatatatatatctatctatccatcgatctcgccccgggctactccaaaatatccagctttttcctgcggcaaactacctggccgccatctcctccgatccctcggcatacgtctccatcggccgggcgaccgagatggcgacgccctccagcatgacgtcgacggagaaggagaaagccatcgacgactggctgcccatcacctcgtccaggaacgccaaatggtggtactccgccttccacaacgtcacggccatggtcggcgccggcgtcctcagcctgccctacgcaatgtccgagctcggctggggtcccggcgtggtcgccatggtcctgtcttgggtgatcaccctgtacacgctgtggcagatggtcgagatgcacgagtgcgtccccgggaagcgtttcgaccgctaccacgagctgggccagcacgcgttcggcgataagctgggcctctggatcgtcgtcccgcagcagctcatcgtcgagatcggcgtctgcatcgtctacatggtcaccggcggcaagtcgttcgagaagtgctacaccgtcgcctgcccggactgcaagccgctccgcaccagctcgtggatcatggtcttcgccgccatccacctgctgctctcgcagctgcccaacttcaactccatcacgctcgtctccctcgccgccgcagtcatgtcgctcacctactcgacgattgcatgggcggcgtcggcgcacaaggggcggcactcggccgtggactacagcatgaaggcgtcgacgacgacggggcagacgttcaacttcctgagcgcgctcggggacgtggcgttcgcgtacgcggggcacaacgtggtgctggagatccaggccaccatcccgtccacgccagacaagccgtccaagaagcccatgtggcagggcgtcgtcctcgcctacctcgtcgtcgccatctgctacctcccggtggcgttcgtcggctactacgtcttcggcaacgccgtcgacgacaacatcctcatcaccctcgagaagccacgctggctcatcgccgccgccaacatcttcgtcgtcgtgcacgtcatcggcagctaccagatctacgccatgcccgtgttcgacatgctcgagacgttcctggtgaagaaactccggttcaagccaggcatgcctctccgtttgatagcgcgctcgctctatgttgtgctgacagctctggttggcatcgccgtgccgttcttcggggggctgctagggttctttggtggcttcgcatttgcgccgacaacctactaccttccgtgcattctgtggttgaagattaagaagccaaagaagttcagcctctcttggttcatcaactggttctgcatcatagtcggcgtgctcctgacggtgcttgcgcccattggtggcctccggtcgatcgtcgtcaacgcctccacctacaagttcttctcgtgatcgggttatcccctcgcgccccatgcattgcggcgcccctagggatattagttagctagctagcaagataaacattagcaggtagctaggtttaaacttttttatgccatatatggtgtgtgtgagtgtgtttggaacttggtttaatttgtgctatcgctaagtcgtcgtcgttcactttctaaagaga

SEQ ID NO: 106172 - DNA, 112 bp, Zea Mays
gaaacatgtaaaaactagtgaactttacagtctcgagaatatattaatacaatccaccgatggtgtacaacatattcaatggaacattttatatgtacaaacctaaacggct

SEQ ID NO: 106173 - DNA, 289 bp, Zea Mays
agacctagtgtcctacagcccatacgaatggtgaagattaaattctgcacaaagaacgacacgatgaatgccttcattaccaaaaacagaagtttctgtctcaacggtcaagttagcatgcatattttttagtaactgagtagccaatcaaatattatgatgtttgtcccagctctatgaaacaaaaaacctttgaagtctcgatctgaagtctatccacaaatgttgccgcattttgtggttctgcgggttacattcaactggcagcttgctttagtttttcattcct

SEQ ID NO: 106174 - DNA, 216 bp, Zea Mays
tttcttcctctgtacttgttgatgaagcatatccatatttctgatttcttgatctatctcgtcctctggtggtgtcgggctaacagccttccttttctggcttcgggcctcccgaagggagactgtctcctgattgtggtccaacggttgcagagctgcggccgcagttgctgaagctttcttcggcgccataacgaaggtttatgatcgccgaag

SEQ ID NO: 106175 - DNA, 774 bp, Zea Mays
gcacagccccttctgcagtacttgttatgtacctatgcttgctcaactgtataaattattgtccctaatgatttctcgctggcaggaacggcattctttcctctgcagagctgcatgaaccattcatgccgtccaaatgctaaagcatttaagagagacgaggacaaggatggccatgcagtgataattgcccttaggcccatcagcaaggacgaagagattaccatcgcctacatcgatgaagaccttccttacgaggagaggcaggcgcagcttgcagattacgggttcacgtgtacatgcttgaaatgccaagaagagcgaccggtctgaaaggacaaatatgtttgaattttgcggcattcagcctatgtcactgggtagttttgaaagctcgcgagaagtgagtgcacaaaatgatgtttgttttcggctgtaacttgcaaaagttttgttgttgtccaatgaatatgaatagtgacgaacagacgatcagtcgtcgtaaccagcagcctcatgggactaacacaaccacaagagcgaatggcaatagcagcaggttgacacttgcaactattttggttatacttgtacattaacacaactggctgattcgccaagtatgctagtattacatttgtcatctccctgcatagattatgggggcactgcatatcgcacaacaacgtgtacatagcacaggcttttacacatggtacaggaaaaatgagttccatcactcgagccgagctgacgaaagaaggaaaaaaaaaa

SEQ ID NO: 106176 - DNA, 1214 bp, Zea Mays
tcttctggcctctaggttgcaatccaataacacttcttgattctcattcacaaacatccgcttttatatgtcaggctatcactttcaccttgttgagatataggaaactcaaaagacagcatgtgtctcatgaatcaagctcttcgctcctcttggaagcatggaaaccactttcaatgggcttcaaaaagagatggtgggagtgtgttgctttgcctgaagatgttgattccagtgaagaagaattgtttagacagcagataagggatctggcgtttacgtcactgcagcttctcaaggatgcaatctttgatcctgagtgtgcgcctttgttttcgcttgacatctatggccatataattggcatgtttgagctgaacaatcttgatttagttgtcgcatcaccagttgaagactatttcatatacattgacggtcttccagagagcgacaaggaggaagcagagaaggtgacagggccattcctagatgctttaggagaagactacttagttccgtgcgagggaacggcattctttcctctgcagagctgcatgaaccattcatgccgtccaaatgctaaagcatttaagagagacgaggacaaggatggccatgcagtgataattgcccttaggcccatcagcaaggacgaagagattaccatcgcctacatcgatgaagaccttccttacgaggagaggcaggcgcagcttgcagattacgggttcacgtgtacatgcttgaaatgccaagaagagcgaccggtctgaaaggacaaatatgtttgaattttgcggcattcagcctatgtcactgggtagttttgaaagctcgcgagaagtgagtgcacaaaatgatgtttgttttcggctgtaacttgcaaaagttttgttgttgtccaatgaatatgaatagtgacgaacagacgatcagtcgtcgtaaccagcagcctcatgggactaacacaaccacaagagcgaatggcaatagcagcaggttgacacttgcaactattttggttatacttgtacattaacacaactggctgattcgccaagtatgctagtattacatttgtcatctccctgcatagattatgggggcactgcatatcgcacaacaacgtgtacatagcacaggcttttacacatggtacaggaaaaatgagttccatcactcgagccgagctgacgaaagaaggaaaaaaaaaa

SEQ ID NO: 106177 - DNA, 2080 bp, Zea Mays
catgtggcggatgcgtactaccgtctccgcacgccagaaccccaaaaccccagcggccagcaaaagcagcggcggcgcggccagggaccgacgtacccgccgcgagaagctccggttggcaccccaacggcatggatgctagcagcgtcagcccgtgcgatctagacagggagtttgcgctccaaatcgctcagctcctcgccacgcctcctctccaatcagcccaggaatactatggtgaactcatacggtccaagaagcttgatggcattagagtgagctacagtggcaagcatgggaaaggtgtttatgcaaatagggactttggtgaagacgaccttgttctgaaggaccaaatgttggtcggtgctcaggacagccttaacaagattgactgtgttgtgtgtagttactgcttccacttcattggttctatagagtaccaaattgggcgtagattgtatttgcaaagccttggtggtagtggtgatggcactaccgagagacactgccatgggagtgatgttgggtcaagtactggctgttccggtgcatcaaatggaaatagcaatgctgtgccacaagaggtcctgttgtcacttatggatggtaatacgctgttgcctttaaccgatcagttctgtttgccaccagttgttgcttgccctggtggatgtgagggagaactctactgcagccaatcatgtgcggattccgattgggattcttatcactctttgctgtgtgctggatccaagactgaaccattgcggaaatctgcccttcagaaatttgtggggcatgctaatgaaaccaatgatatttttttggttgctgccaaggctatcactttcaccttgttgagatataggaaactcaaaagacagcatgtgtctcatgaatcaagctcttcgctcctcttggaagcatggaaaccactttcaatgggcttcaaaaagagatggtgggagtgtgttgctttgcctgaagatgttgattccagtgaagaagaattgtttagacagcagataagggatctggcgtttacgtcactgcagcttctcaaggatgcaatctttgatcctgagtgtgcgccttgtatccttttcagtagtccacagacttgttcgacatctataggtttacttgacattattttcttatccatttttgaagtttccttaacaatggtctagtgttttcgcttgacatctatggccatataattggcatgtttgagctgaacaatcttgatttagttgtcgcatcaccagttgaagactatttcatatacattgacggtcttccagagagcgacaaggaggaagcagagaaggtgacagggccattcctagatgctttaggagaagactacttagttccgtgcgagggaacggcattctttcctctgcagagctgcatgaaccattcatgccgtccaaatgctaaagcatttaagagagacgaggacaaggatggccatgcagtgataattgcccttaggcccatcagcaaggacgaagagattaccatcgcctacatcgatgaagaccttccttacgaggagaggcaggcgcagcttgcagattacgggttcacgtgtacatgcttgaaatgccaagaagagcgaccggtctgaaaggacaaatatgtttgaattttgcggcattcagcctatgtcactgggtagttttgaaagctcgcgagaagtgagtgcacaaaatgatgtttgttttcggctgtaacttgcaaaagttttgttgttgtccaatgaatatgaatagtgacgaacagacgatcagtcgtcgtaaccagcagcctcatgggactaacacaaccacaagagcgaatggcaatagcagcaggttgacacttgcaactattttggttatacttgtacattaacacaactggctgattcgccaagtatgctagtattacatttgtcatctccctgcatagattatgggggcactgcatatcgcacaacaacgtgtacatagcacaggcttttacacatggtacaggaaaaatgagttccatcactcgagccgagctgacgaaagaaggaaaaaaaaaa

SEQ ID NO: 106178 - DNA, 1982 bp, Zea Mays
catgtggcggatgcgtactaccgtctccgcacgccagaaccccaaaaccccagcggccagcaaaagcagcggcggcgcggccagggaccgacgtacccgccgcgagaagctccggttggcaccccaacggcatggatgctagcagcgtcagcccgtgcgatctagacagggagtttgcgctccaaatcgctcagctcctcgccacgcctcctctccaatcagcccaggaatactatggtgaactcatacggtccaagaagcttgatggcattagagtgagctacagtggcaagcatgggaaaggtgtttatgcaaatagggactttggtgaagacgaccttgttctgaaggaccaaatgttggtcggtgctcaggacagccttaacaagattgactgtgttgtgtgtagttactgcttccacttcattggttctatagagtaccaaattgggcgtagattgtatttgcaaagccttggtggtagtggtgatggcactaccgagagacactgccatgggagtgatgttgggtcaagtactggctgttccggtgcatcaaatggaaatagcaatgctgtgccacaagaggtcctgttgtcacttatggatggtaatacgctgttgcctttaaccgatcagttctgtttgccaccagttgttgcttgccctggtggatgtgagggagaactctactgcagccaatcatgtgcggattccgattgggattcttatcactctttgctgtgtgctggatccaagactgaaccattgcggaaatctgcccttcagaaatttgtggggcatgctaatgaaaccaatgatatttttttggttgctgccaaggctatcactttcaccttgttgagatataggaaactcaaaagacagcatgtgtctcatgaatcaagctcttcgctcctcttggaagcatggaaaccactttcaatgggcttcaaaaagagatggtgggagtgtgttgctttgcctgaagatgttgattccagtgaagaagaattgtttagacagcagataagggatctggcgtttacgtcactgcagcttctcaaggatgcaatctttgatcctgagtgtgcgcctttgttttcgcttgacatctatggccatataattggcatgtttgagctgaacaatcttgatttagttgtcgcatcaccagttgaagactatttcatatacattgacggtcttccagagagcgacaaggaggaagcagagaaggtgacagggccattcctagatgctttaggagaagactacttagttccgtgcgagggaacggcattctttcctctgcagagctgcatgaaccattcatgccgtccaaatgctaaagcatttaagagagacgaggacaaggatggccatgcagtgataattgcccttaggcccatcagcaaggacgaagagattaccatcgcctacatcgatgaagaccttccttacgaggagaggcaggcgcagcttgcagattacgggttcacgtgtacatgcttgaaatgccaagaagagcgaccggtctgaaaggacaaatatgtttgaattttgcggcattcagcctatgtcactgggtagttttgaaagctcgcgagaagtgagtgcacaaaatgatgtttgttttcggctgtaacttgcaaaagttttgttgttgtccaatgaatatgaatagtgacgaacagacgatcagtcgtcgtaaccagcagcctcatgggactaacacaaccacaagagcgaatggcaatagcagcaggttgacacttgcaactattttggttatacttgtacattaacacaactggctgattcgccaagtatgctagtattacatttgtcatctccctgcatagattatgggggcactgcatatcgcacaacaacgtgtacatagcacaggcttttacacatggtacaggaaaaatgagttccatcactcgagccgagctgacgaaagaaggaaaaaaaaaa

SEQ ID NO: 106179 - DNA, 1206 bp, Zea Mays
catgtggcggatgcgtactaccgtctccgcacgccagaaccccaaaaccccagcggccagcaaaagcagcggcggcgcggccagggaccgacgtacccgccgcgagaagctccggttggcaccccaacggcatggatgctagcagcgtcagcccgtgcgatctagacagggagtttgcgctccaaatcgctcagctcctcgccacgcctcctctccaatcagcccaggaatactatggtgaactcatacggtccaagaagcttgatggcattagagtgagctacagtggcaagcatgggaaaggtgtttatgcaaatagggactttggtgaagacgaccttgttctgaaggaccaaatgttggtcggtgctcaggacagccttaacaagattgactgtgttgtgtgtagttactgcttccacttcattggttctatagagtaccaaattgggcgtagattgtatttgcaaagccttggtggtagtggtgatggcactaccgagagacactgccatgggagtgatgttgggtcaagtactggctgttccggtgcatcaaatggaaatagcaatgctgtgccacaagaggtcctgttgtcacttatggatggtaatacgctgttgcctttaaccgatcagttctgtttgccaccagttgttgcttgccctggtggatgtgagggagaactctactgcagccaatcatgtgcggattccgattgggattcttatcactctttgctgtgtgctggatccaagactgaaccattgcggaaatctgcccttcagaaatttgtggggcatgctaatggtaagccagcactaaatatttatggtctgcatcattatggcacaatgtccagcttccacttttcatttaagttggaaacctattttctgatgatagttgttctttatttcagaaaccaatgatatttttttggttgctgccaaggtaagtggcagaagtatgcatactatatagtatgtttgcatccaaagatcagtctaatttactatatttgtttcgcatttctaatcttgttcaagtgatatcttctttttatattttaaaattgcagcttagtcttggtcaaatgcacatagaaatttgagcatcagacttaagagttgatatcagtcgccaatatttgtcaaaactgtgaacctgctatagaccaatgcaccaaaacagatcatttcatga

SEQ ID NO: 106180 - DNA, 380 bp, Zea Mays
cgagagtctaaggaggaactcatgcgggtgcgctaggagatcgtcgagttccacaacgagagggtgctacttgagaactacaacgccctcaactacacaggtctgccccacatctagctacacgtgctactccagagagaaatctgtcatagccagggaggatctgcttggtcagagtaaaaaggcagatgacatgagcagagttgctgggttagataaccaaggaattgttggccttcagaggcaaattatgaaagatattggtttattgtggtttgctcagtagtgtttgctcgatggaccttactaaaatggtgcgattaactgtttgcatggggtcatgtagcactatttcttcacatcatttccatttgcatttc

SEQ ID NO: 106181 - DNA, 2749 bp, Zea Mays
gcgccgggagatgggttacaacaaggcgacgccgcgccggaacgtgctatcggctctcaacaacgccgaggccaacggggggacgccgtccgtgccggcggatggcggcggcggcggcggcgcggcggaggcggcgcccgtgatcgagttcagtgggagggaggatgtggagcgcttgctcgccgagaaaatgaagggcaaaagcaagaacgatttcaaggggagagtcgatcagatgagcgactacatcaagaagctcagggcgtgcatccggtggtacatggagctggaggatggctatttggctgagcaggagaagctcctaggtgctatggattctgagaacacccgtcataccgagttggaggcccagctcagcactgctattgaagagctgaaagccactaacttggacttgacaaggcgttgtgagtctctagaggagagcttcaacaaggagaagtctgaaaaactgatcgctgtggagtcctacgagaaagaaaagcaggaaagggaatccgctgagagttcacgagatgtactaactgtggacctagaaagggtcactcatgatgctaagcggtttagcgagcagctaaaaatggtccaagacactaataaaaggcttcaagaatacaacaccagcctgcaacaatacaacagtaaccttcaggctgatgcctcgaagagtggtgagaccatctcaaaacttcagaaagagaagagtgccatgatggaaactatggctactctgagagagtgtaacagctcaatgggcaatcagcttgaatcttctagagtttctcaacaagaagctattagagtgaaggaagagctcaggaaagaagtggagtgccttagagttgagttgaagcaagttagagatgatcgtgatcattcagctattcaactgaacagtttgaacattgaacttggtaattacaaggaacagattggtaaaacttcaaaagaatgtgaaagattccgcaccaaagtatctgaacttgaggaaacatgcagtacacaacaagaacagattcggacatttcaaaagcagcttgcagttgcgactgagaagttgaagcttgctgatgtaactgcgatagaggcgatgactggttatgaagaacagaaggagaaaataaaataccttgaggagcgtttagcacaggcagagtctcaaattgttgaaggcgacgagttacggaaaaaactgcacaacactatattggaactgaaaggaaacattagggttttttgtagagttcgaccacttcttcgatttgagggtgattccaatggtccggaaggtgcctctatctcttttccaacatctgtagagtctactggacgtagcattgatttgataaaccaagggcaaaagctctccttctcatatgacaaggtttttgaccatggtgcgtcacaggaagatgtgtttgtggaaatatcgcaactagtccaaagtgcccttgatgggtacaaggtatgcatatttgcatatggtcaaactggatctggtaaaacttatacaatgatgggtaaaccaggaaatgatcaaaaagggataatacctcgttctttggagcaaattttcaagaccagtcggtttctagaatctcaaggatggaattattccatgcaagcatcaatgttggaaatatacaatgagaccattcgtgatttgttagcacctggtcggtctaacagttttgagtctagtaaacaatgcactataaagcatgaccctcatgggaatattgtgtcggaccttacaattattgatgtctttggtattgctgatgtgactagtctactagagaaagcatcccagagtaggtctgtgggtaagactcagatgaatgaacagtcgtccagaagtcattttgtattcacattaaagatatctggatctaacgagaacacaggccaaaatgtccaaggagtccttaacttgattgatttagctgggagtgagcgtcttgctaaaagtggctccacaggtgatcgcttgaaggaaactcagtcaatcaataaaagcttgtcggctttgagcgatgtaatcttcgcgatcgcaaaaggagatgaccacgttccgttcagaaattcaaaacttacatacctattgcagccttgccttggaggtgactcgaaagctctcatgtttgtcaacatttcaccggaggcatcctccgttggtgagacgatatgctcgttgaggtttgcttcaagggtgaatgcttgtgagattggaataccaagacgtcacacataagcccgtcccttcgttctaggctgaattatgggtgaaggtagctgtagggatcatggtaatgtgatatataatgtgttggtttgtgccgcatttggccacaaaggtgatgcccaacagaattcttgtaacttgtacagtgtaggtgatggtgttttgctgagagcagcatatgtacgagtgctgacatcttgtcatgctttccttactttttggtgtagcagacttgggtcatgttaattgtgatcgtgggttcgaatgtgaaactaccttttctctctctctctctgccaactagaattcatctgctggtttatggcaacaatgcaccaaattagttttgtactttgcaggttgtaacttaaatgttagtatgtgtagccacggaagcttgcattgagttgtgcagcctctgaaatgtttgtatttcttcatctctactccttagcacttatttgggccatgactggctgttct

SEQ ID NO: 106182 - DNA, 321 bp, Zea Mays
ttcatgaaggagaagacagccaccagcaggactgccggagaaagagagggagagagctccaacaatggcttgtagatgtactgcttcctcgtacgtattgcactaggtatagcagtcactgcacggctgaaacgctgaaaacatacgggacgagctatggcgtacgcgtactacacggagctcaaatataatgcacgggccaacaaaattactacgctctgactactagactttaatactcgccgtaagtcgtaagaccaactccagcagactccctctccgtatccgtatttagcacggccaacagtttctctctcctct

SEQ ID NO: 106183 - DNA, 970 bp, Zea Mays
gaacagaaatcatgcctttgtacagaggaatcaaatcataagcactgaacacagtggagtagcaaatctctgaaacggagcgcagcatcgttcttcgttcccataatccctcccattcacttgtttctacaagagacaccaccgccggttcacccacgcatgggtcgccaacaatgcgaccttcaataagcggaaacagagctacagacagacagacaccattgctgcagacgcacgaacacaaacccccacggtccagcgagagaaacaagcagttccatttccaccccgcccgacgagatccattgccatgccatgcacggatcgacgtaggtcggtcaggagctcagcggccggcgcactcgggcggctgcacggggaagcggtcggtgtcgacgcagtagtcgtagacgaggtggtgcgcgcgcgcccacacgagctggtggctctggtgcacgctcagctccgacatctccttctccttccaccagtagcggccctccttgccccacgaggactcgctgcaccggcgcgcctccgcggcgtcgccgtccgtggcgttgcccgcccaggcgcacccgtccacgcgcacctcccggaacgtggcctcgaacggcgcgtgcgaccagtccgtcttcacgcgcccgccctgcgtcgcccagtcgtccgcgttccagatggagctgtacacggccatcggctgcggcccggggaacggcgccggggcagcagccagcgtggtggtggtcgccgtcgtacaccacgtggtcgttggcccagctgggctgcaccacgtcgtcgaacttggtcgccgccgccaccccggcgcccagcagcgccgcgacggccgcagccaccagcacaaccgccgcgggacaggctccaccaccaccaccaccattccgcaacgccattgccacccccctccttccaactcactcacagtcccactcgcttcctcttatcctct

SEQ ID NO: 106184 - DNA, 1917 bp, Zea Mays
gaacagaaatcatgcctttgtacagaggaatcaaatcataagcactgaacacagtggagtagcaaatctctgaaacggagcgcagcatcgttcttcgttcccataatccctcccattcacttgtttctacaagagacaccaccgccggttcacccacgcatgggtcgccaacaatgcgaccttcaataagcggaaacagagctacagacagacagacaccattgctgcagacgcacgaacacaaacccccacggtccagcgagagaaacaagcagttccatttccaccccgcccgacgagatccattgccatgccatgcacggatcgacgtaggtcggtcaggagctcagcggccggcgcactcgggcggctgcacggggaagcggtcggtgtcgacgcagtagtcgtagacgaggtggtgcgcgcgcgcccacacgagctggtggctctggtgcacgctcagctccgacatctccttctccttccaccagtagcggccctccttgccccacgaggactcgctgcaccggcgcgcctccgcggcgtcgccgtccgtggcgttgcccgcccaggcgcacccgtccacgcgcacctcccggaacgtggcctcgaacggcgcgtgcgaccagtccgtcttcacgcgcccgccctgcgtcgcccagtcgtccgcgttccagatggagctgtacacggccatcggctgcggcccggggaacggcgccggggcagcagccagcgtggtggtggtggtgttggtgccgttggcctccgccgccgcgccgccgtgccggtggtggccgtggccgtggccttggtgcagcgtggcgttctcgtacacccggatgggcgtgtcgtccaccatgaacaccacctggctggggttccacagcacggcgtacgtgtggaagtcggccgtggggtcgaaccacaggtcgatgcgctgctcccggttgcccacgccgtcgatgtacaggttggtctgcaccaggtacggctcgccggtcacgttgcccaggaactcgaagtcgaactcgttgtgcttgtccccggccgacgacagctgcagccaagacgttgcaagtgttgttagtagcttcacttccacaccgcatgggttgaacgtgcaaatgtactactgcagacagtactcggtactacacttttaacatggactactgcattggtctggttgatatgtaaaaaataaaaaaagtggcatctttgctttaagaaagctagtaaagaaagggtactggtgcaattatatgtactcctctccctcttgccagcatcctctgcacttgttcacgtgctcgtgttctttgtaaattggttcttggcagcatcctctctgccagacagggcatgcatgcatgggcgctcgacagatagtagatttatctaatgatggggccagccagactcagagcaagacattttttttaccctccctgttttagacttttcagtctttttataaatgcgtgtcgttttgggtcttttacaaacaagtaaaatagaaatagaagccaaatctggaaatggaagcgacaagcaatgcctgcactcactcacatagaaagccgtgacgacgccggcggagtcccccggcacgagcttgaggtcggcgctggccttgccgtacaggaacttggtccttgacacgaaccctccgccggagctggagtcgaggcggagcttgaggaggtcgccgtcgtacaccacgtggtcgttggcccagctgggctgcaccacgtcgtcgaacttggtcgccgccgccaccccggcgcccagcagcgccgcgacggccgcagccaccagcacaaccgccgcgggacaggctccaccaccaccaccaccattccgcaacgccattgccacccccctccttccaactcactcacagtcccactcgct

SEQ ID NO: 106185 - DNA, 227 bp, Zea Mays
aaaaaaggagcctgtcagacaacctatgggccaccccgagtcaagcaagcctgacgggaacgatcctctacagcttaaggacaaagcatcagagccaatcctagccgttaatcacgctctggcccaaaggtcatgacacatcaaccaggcttaagtgcttgcctccttattaatcaaggatgcaacggtacgatcctatagaacagatcctgttcaagtaaggtcgt

SEQ ID NO: 106186 - DNA, 327 bp, Zea Mays
atgggaggagaagaaagagaagaaggatttccgccggcgacgagctctcggggatcgactcggaacttgctgggagagcgttgggagagtcgtggagcacagatgctactaatgcctgttttccatgacttgttagcacaaagagaacagaaaagactattggtgacagagaatgctgatatgttaatggtaactgcaaagctactggacagggtgttcaacatccttcacgagaacaacccatatgttgctggcaattggcctgggaccgttatcaccacaagttctcagacacacaaaattctgcttcggatgttccatcagtag

SEQ ID NO: 106187 - DNA, 226 bp, Zea Mays
aaaaaaggagcctgtcagacaacctatgggccaccccaagtcaagcaagcctgacgggaacgatcctctacagcttaaggacaaagcatcagagccaatcctagccgttagtcacgctctggcccacaggtcatgactcatcaaccaggcttaagtgcttgcctccttattaatcaaggatgcaacggtacgatcctatagaacagatcctgttcaagtaaggtcg

SEQ ID NO: 106188 - DNA, 542 bp, Zea Mays
aatagcaagagaatgttaaagaccattttagtcttcttatgagtcatttagtatattcttactatttttagcacttagaacaaacatgttagggactaaactttagtcccctaactaatctttagtccctagactaaagaaaccatacatggcctaatgttgagcgagaaaacaactgttgcgacaggaacagtttgatcaaattttcctttcaaaatgaaaacaaagcaaaaggaaaaaaaacttggtccattaattgcaaatggaatattttgatcaaatttctttgattgcaatatggtaaaaagcaaaatgaaaaccaaagtaggaaaaagggagcctatcagacaacctatgggccacccagactccgagacaagacaagcatggcctgaccaggaacgatcctctataacacaagacccagcgaacagagccaatcccagccgttaatcacgctctggcccacaggtcattgcctcaatcaatcaggcttaagtgcttgcctctttattagtcaagatgcaacggtacgatcctat

SEQ ID NO: 106189 - DNA, 902 bp, Zea Mays
aactttttcatcacctttctttgctcctctaatccaatggcggccgcaagaaccgaaaaggtagcatatgtatgtgcccctacactacaccaacacacgaagagaactacgtagcctacccagcatgtcttcctcgtgcttttcgttccctcagtgctcgtcaaagaatcaccatgcccatgtgaaagggaaaccgatcgaaaccgcaacagatatagctgctgacctgtcacgtaaacttgggcgacggttactcctcggatgccatgccagtgttcacgttcatgccacgcctacaaatcgaccgaccaaggtccaagctgcagctagcgcacgtacaccaccagcaccatgccgccggaggccgcctcgtcaacaggccacatcgtcgcccgcatccggcgtccgctgcccgcggagcggccgcacgtgaggcgatgcaccaggctgctgtgctcggcgttcctcaccgtgctcctcgtcgccggcgtggtcctctttgtcgtgtacctcgctgtccgcccgcatcggccgcggttccacgtgacggcattctccgcgtcgggcatcggcccgtcgtccggcgggaccgtgtcgctgtcggggcagctctccatccgcaacccgctccacgtcgcctggcgttctggggcaaccggcactggcacccgctccacgtcggctgcgaggtggccgtcggactcgacggccagttgctggccgagtacatgcagaaacgctgcagcatagacttcttctaggagaccaaaaacacctaaacgccaaaccagtaaaagcggcaaagtaactcagaatgcaacgtgggttctcaggccggtagcagtctcatttcttgaacgagcactttttcaaatgccaaaggacttaccgaatgttttggc

SEQ ID NO: 106190 - DNA, 241 bp, Zea Mays
aaaaaagggagcctgtcagacaacctatgggccacccagacttcgagacaagacaagcatggcctggccaggaaccatcctctataacacaagacccagcgaacagagccaatcccagccgttaatcacgctctggcccacaggtcattgcctcatcaatcaggcttaagtgcttgcctccttattagtcaaggatgcaacggtacgatcctatagaactgatcctgttcaagtaaggtcg

SEQ ID NO: 106191 - DNA, 432 bp, Zea Mays
atgccgtgcatgtcatgtagatcatgcacggcgacgctgcagtgccccgagacggagaacgcttccttttccctcacgcgacaacggcgacgggcggtcacctcacaccctcctgcacgccagaaccagaagcacagcagaccagactcggtgacgcgccatgcccgtaacagccaacaaacacccctggtcaacaaggcacacaccagcatctgcagaacagaaagctgccgtcctccaaccaatcgggaccccaatgacgcctttttggcctccagatttgtccgcaaatccagttcatcaatcagttgcttcgccccgcccgctctctccagatctccagtacacacacgcgcgcgccatctagatagaacctcagcacacctgaacgtgcttcgcaagatcgcctgcacgcccagtggcatgcagtga

SEQ ID NO: 106192 - DNA, 2223 bp, Zea Mays
catgcgaatactgctggagttggcctaacccaacgaccagacgcaacacgacggcgacggccatggcttcgccggacctcgccgccggcgacggcagctacgactttcaccttcgctctctctccgcggcctcacgggactccgctgcggcctccgaccccgcctctgaccccaacctcctccaatctgttaggagggtgtgcgagatgtgccgaacggcgaaggaagcgaaggacgagatggtggcgcgggcgttccccgtgatgggcaagctatttcagcgatgcgccgccgctcccacgcaggccgttgcctccaccggcgtgctgctcctcaccattttgcaattcttcttggattttggggaggctgttttgcatgatgctgatggtagcttgaaaaccttcttccgctcttgcttaaggagtttgcagatcctattgttgcagagcgcacagttgaattccttgtaacaaacaagacaaagatccttagctcctttcccaatttgattccacagttctatccattgttgttaaagcttattgcatcaaacggtgagagactggagaataagttttcggaagtacttccattaatgatgtcagcaggatcttttcttcccctcttcctatcccttatggatttgccaatgttggtggtggcactggaaaaggtggaaagaagttctggaactcttattggtagtagtatagctacaatccagaagagcgctgctcctgagatgcttcttgcactgatggacgaggcatatactggttctgccgtagaagaacctagtggtaattcaggttctgatgatagtggtcccctagaccttactgacccaatgttcttagaccttctaaaagatgagaatgatggcattgccgcaaaacattggatatcccctacgatatcttcaacgttacaagcagcatttaacagcccacagtcggacagattgaaacagtcactggaaatggcacctcgctttcttactttatattttgcaacagcattgcgagacgttaatgactcactgctgtgtgctcttattccagtagttatgtcaagatatgctgcaatgttcccagacaaagttttctctttcaaggtgagggaaaggctttcagacttcattttggctgcattccagcggtctcccaacatcattgcagtactgaagaaacctattactgacagacttggtgaggctcatgataatcttgccaaggcaagtatatctttcaaacagagttagcattgcacttgtgctgggccattggtgagcatggagctggaggggtgggtcacaaggatgtagctcgtgaactatttgaaaatttggagttattattgtatgaaaacctggcaactagccgtttgggattaagccaagagccaggatctgattccatgggtgcatcatctagaaagtcatcccaagccaggcttctctgctttgtggtgactgctattgcaaaattagcaacatgccacagtgagttgcttccgagggcacgcgtgtcattgggtaaggtcgctcgttcccgaacctcagacaggagggtctggcaacgggcctgtgactatttagggctcatgaatgaaccagccatctgtttatctgtactgggaccgtccaccgcccaaggaaatggtcctggtattgtgaattggagtgaaggaggaacaaagatggtagctcatgttcctttttaccttttagcccagcaaaaaggtccaccgtctcataatttttcatttgccgacctcctcccaacagaatgaagaaaatatctgcatgagtgcattggtgcaggcatgatttctctagcagaaggccatataacgattttgttttgaagatccaagttcctttttaaaaaaggggctggtctgaacattcaggcttatttctctagcataatactcataaagagtcctgtacttttaggtcttgttcggttattcctataatacatggattgatggaattaaaaaaaatttagaagaactttgacttgcttaggaattcaacacatctaatcccactcaatccatatggattgagagctaatcgaacaagtcttacatggttgactatgcactcgagttatggaatgtatggtattacatttctaagtggtggatcgtagtgtaaaaaatgtacacgtctgaatttgttcgaaatgacaagtatctgttttgtttgaaatg

SEQ ID NO: 106193 - DNA, 2228 bp, Zea Mays
catgcgaatactgctggagttggcctaacccaacgaccagacgcaacacgacggcgacggccatggcttcgccggacctcgccgccggcgacggcagctacgactttcaccttcgctctctctccgcggcctcacgggactccgctgcggcctccgaccccgcctctgaccccaacctcctccaatctgttaggagggtgtgcgagatgtgccgaacggcgaaggaagcgaaggacgagatggtggcgcgggcgttccccgtgatgggcaagctatttcagcgatgcgccgccgctcccacgcaggccgttgcctccaccggcgtgctgctcctcaccattttgcaattcttcttggattttggggaggctgttttgcatgatgctgatggtagcttgaaaaccttcttccgctcttgcttaaggagtttgcagatcctattgttgcagagcgcacagttgaattccttgtaacaaacaagacaaagatccttagctcctttcccaatttgattccacagttctatccattgttgttaaagcttattgcatcaaacggtgagagactggagaataagttttcggaagtacttccattaatgatgtcagcaggatcttttcttcccctcttcctatcccttatggatttgccaatgttggtggtggcactggaaaaggtggaaagaagttctggaactcttattggtagtagtatagctacaatccagaagagcgctgctcctgagatgcttcttgcactgatggacgaggcatatactggttctgccgtagaagaacctagtggtaattcaggttctgatgatagtggtcccctagaccttactgacccaatgttcttagaccttctaaaagatgagaatgatggcattgccgcaaaacattggatatcccctacgatatcttcaacgttacaagcagcatttaacagcccacagtcggacagattgaaacagtcactggaaatggcacctcgctttcttactttatattttgcaacagcattgcgagacgttaatgactcactgctgtgtgctcttattccagtagttatgtcaagatatgctgcaatgttcccagacaaagttttctctttcaaggtgagggaaaggctttcagacttcattttggctgcattccagcggtctcccaacatcattgcagtactgaagaaacctattactgacagacttggtgaggctcatgataatcttgccaaggcaagtatatctttcaatgcagacagagttagcattgcacttgtgctgggccattggtgagcatggagctggaggggtgggtcacaaggatgtagctcgtgaactatttgaaaatttggagttattattgtatgaaaacctggcaactagccgtttgggattaagccaagagccaggatctgattccatgggtgcatcatctagaaagtcatcccaagccaggcttctctgctttgtggtgactgctattgcaaaattagcaacatgccacagtgagttgcttccgagggcacgcgtgtcattgggtaaggtcgctcgttcccgaacctcagacaggagggtctggcaacgggcctgtgactatttagggctcatgaatgaaccagccatctgtttatctgtactgggaccgtccaccgcccaaggaaatggtcctggtattgtgaattggagtgaaggaggaacaaagatggtagctcatgttcctttttaccttttagcccagcaaaaaggtccaccgtctcataatttttcatttgccgacctcctcccaacagaatgaagaaaatatctgcatgagtgcattggtgcaggcatgatttctctagcagaaggccatataacgattttgttttgaagatccaagttcctttttaaaaaaggggctggtctgaacattcaggcttatttctctagcataatactcataaagagtcctgtacttttaggtcttgttcggttattcctataatacatggattgatggaattaaaaaaaatttagaagaactttgacttgcttaggaattcaacacatctaatcccactcaatccatatggattgagagctaatcgaacaagtcttacatggttgactatgcactcgagttatggaatgtatggtattacatttctaagtggtggatcgtagtgtaaaaaatgtacacgtctgaatttgttcgaaatgacaagtatctgttttgtttgaaatg

SEQ ID NO: 106194 - DNA, 2205 bp, Zea Mays
catgcgaatactgctggagttggcctaacccaacgaccagacgcaacacgacggcgacggccatggcttcgccggacctcgccgccggcgacggcagctacgactttcaccttcgctctctctccgcggcctcacgggactccgctgcggcctccgaccccgcctctgaccccaacctcctccaatctgttaggagggtgtgcgagatgtgccgaacggcgaaggaagcgaaggacgagatggtggcgcgggcgttccccgtgatgggcaagctatttcagcgatgcgccgccgctcccacgcaggccgttgcctccaccggcgtgctgctcctcaccattttgcaattcttcttggattttggggaggctgttttgcatgatgctgatggtagcttgaaaaccttcttccgctcttgcttaagtagggagtttgcagatcctattgttgcagagcgcacagttgaattccttgtaacaaacaagacaaagatccttagctcctttcccaatttgattccacagttctatccattgttgttaaagcttattgcatcaaacggtgagagactggagaataagttttcggaagtacttccattaatgatgtcagcaggatcttttcttcccctcttcctatcccttatggatttgccaatgttggtggtggcactggaaaaggtggaaagaagttctggaactcttattggtagtagtatagctacaatccagaagagcgctgctcctgagatgcttcttgcactgatggacgaggcatatactggttctgccgtagaagaacctagtggtaattcaggttctgatgatagtggtcccctagaccttactgacccaatgttcttagaccttctaaaagatgagaatgatggcattgccgcaaaacattggatatcccctacgatatcttcaacgttacaagcagcatttaacagcccacagtcggacagattgaaacagtcactggaaatggcacctcgctttcttactttatattttgcaacagcattgcgagacgttaatgactcactgctgtgtgctcttattccagtagttatgtcaagatatgctgcaatgttcccagacaaagttttctctttcaaggtgagggaaaggctttcagacttcattttggctgcattccagcggtctcccaacatcattgcagtactgaagaaacctattactgacagacttggtgaggctcatgataatcttgccaagacagagttagcattgcacttgtgctgggccattggtgagcatggagctggaggggtgggtcacaaggatgtagctcgtgaactatttgaaaatttggagttattattgtatgaaaacctggcaactagccgtttgggattaagccaagagccaggatctgattccatgggtgcatcatctagaaagtcatcccaagccaggcttctctgctttgtggtgactgctattgcaaaattagcaacatgccacagtgagttgcttccgagggcacgcgtgtcattgggtcgctcgttcccgaacctcagacaggagggtctggcaacgggcctgtgactatttagggctcatgaatgaaccagccatctgtttatctgtactgggaccgtccaccgcccaaggaaatggtcctggtattgtgaattggagtgaaggaggaacaaagatggtagctcatgttcctttttaccttttagcccagcaaaaaggtccaccgtctcataatttttcatttgccgacctcctcccaacagaatgaagaaaatatctgcatgagtgcattggtgcaggcatgatttctctagcagaaggccatataacgattttgttttgaagatccaagttcctttttaaaaaaggggctggtctgaacattcaggcttatttctctagcataatactcataaagagtcctgtacttttaggtcttgttcggttattcctataatacatggattgatggaattaaaaaaaatttagaagaactttgacttgcttaggaattcaacacatctaatcccactcaatccatatggattgagagctaatcgaacaagtcttacatggttgactatgcactcgagttatggaatgtatggtattacatttctaagtggtggatcgtagtgtaaaaaatgtacacgtctgaatttgttcgaaatgacaagtatctgttttgtttgaaatg

SEQ ID NO: 106195 - DNA, 869 bp, Zea Mays
catgcgaatactgctggagttggcctaacccaacgaccagacgcaacacgacggcgacggccatggcttcgccggacctcgccgccggcgacggcagctacgactttcaccttcgctctctctccgcggcctcacgggactccgctgcggcctccgaccccgcctctgaccccaacctcctccaatctgttaggagggtgtgcgagatgtgccgaacggcgaaggaagcgaaggacgagatggtggcgcgggcgttccccgtgatgggcaagctatttcagcgatgcgccgccgctcccacgcaggccgttgcctccaccggcgtgctgctcctcaccattttgcaattcttcttggattttggggaggctgttttgcatgatgctgatggtagcttgaaaaccttcttccgctcttgcttaagtagggagtttgcagatcctattgttgcagagcgcacagttgaattccttgtaacaaacaagacaaagatccttagctcctttcccaatttgattccacaggtgccaacacttgaaatatttacttacttggaattgacaattcccacatgtagctcctattattcatgctgttgcagatcattgctttgaaaaactgaaagatataaatccagcttccttctttgttttatagcatatttgtcaattttttatgtgaatggtgggggaggcccctacatgtatttcttcactaacagaagcaaagaaatatttacaatacaggaggctgtaggccaaaaaggtagagaaaaaacagaaaaaaccatatttgtatgataagctactcaaccaatcttttgtaagattctttatagaatatctctcttctcttcctattttccatat

SEQ ID NO: 106196 - DNA, 1584 bp, Zea Mays
ctttgattatcgttataaatctcgatccaaaatatcttcgaattctgataaacaaaaaaacaaagaaaaagaaaaagaaaataaaaaaagatctcagcctgcccttatcccaacgccgctcagccgcccttcccttttgccgtacgcagattttttcaagcaccagctttatctcctggaagcagccgcatcacctcttcatctccctctgtcgcggccgctgctggagcttctctgctgcacacggccccaatctccttcgctcctctccatggcgtgccctgcgctcgccggatctccttctgctcgcgcccagctgctccctgcgtgctcctcccgtgcagctcgccgagcgccctctgcctgctagcgccagcagccacgccgctgcttgctccccttccttctcccttctctgcttcccctgctcgccatggaactccctgcgtcgagctcggctcctgctccagattgctcggctgcttcgggcagatgctggggcgctcgattccccagcaaaagttatccgctgcatgcccctatttgccgagcacttcaggtgggggcgccaggaggatgcatacgagttcctccgctatgtcgtagatgcctgtcacactgctgacctccgcatgcacaagcggttacgtgcagcagctgctagtggaaactgtggtgaggatgtccgggggcagggggtttgtctgtttatgagggagacatttggcggggcattactgcgtcaagtgaagtgccttgagtgcaagggagaatctgacgagactgatgagataatggatatcagtctcgatctacctgggagcagttctgttgctgatgcccttgctcggctctgtcctatgctccagctcaccccctctgtttgttctcactactgggtcgggtctgcttggcgggcacaccaccatgcccgtggaattcctcggacctctctcctccgtgttggccgaagccatagaaattctttgctgcgcccagccgagtttgcccaggtcacaagcatctatgtcctcgcctcgtcgtgctcgctggtcgtgcatccttgcagttccttgcttgtgatcgcaagcgctcgaagtggaaaaacagagttgataaagaagaaagcaaaaccgtatagttcgtgcattcatttagtgtggaattggtgctatgaattttggggaaggaattccgagaaattagtggacggtgatgatgatgttcgtgcgatactcgtcagacgctcgaccaaaaagcctaattcgggagtggctactccgtcttcttcgtcatgtgggaatcgtcgtgctgacacgccaataccgtcgatcgtcatcccctgttcgatctcgtcgtcaaacttcgcctcagccctagtcgtcgtctttcacccaccagctcgtcatgagacctggtgtcgagctcctttcctaacaaatgccgaacctgcccctgctcctgcgttcgccaacagccttaactcgtcaatcacgctcgcgagatgttcaattgaggacttcagcggaaggccatcgtcgttcaggcaactaccaagtcaaattgcgacgtggtgagccgatt

SEQ ID NO: 106197 - DNA, 1565 bp, Zea Mays
ttataaatctcgatccaaaatatcttcgaattctgataaacaaaaaaacaaagaaaaagaaaaagaaaataaaaaaagatctcagcctgcccttatcccaacgccgctcagccgcccttcccttttgccgtacgcagattttttcaagcaccagctttatctcctggaagcagccgcatcacctcttcatctccctctgtcgcggccgctgctggagcttctctgctgcacacggccccaatctccttcgctcctctccatggcgtgccctgcgctcgccggatctccttctgctcgcgcccagctgctccctgcgtgctcctcccgtgcagctcgccgagcgccctctgcctgctagcgccagcagccacgccgctgcttgctccccttccttctcccttctctgcttcccctgctcgccatggaactccctgcgtcgagctcggctcctgctccagattgctcggctgcttcgggcagatgctggggcgctcgattccccagcaaaagttatccgctgcatgcccctatttgccgagcacttcaggtgggggcgccaggaggatgcatacgagttcctccgctatgtcgtagatgcctgtcacactgctgacctccgcatgcacaagcggttacgtgcagcagctgctagtggaaactgtggtgaggatgtccgggggcagggggtttgtctgtttatgagggagacatttggcggggcattactgcgtcaagtgaagtgccttgagtgcaagggagaatctgacgagactgatgagataatggatatcagtctcgatctacctgggagcagttctgttgctgatgcccttgctcggctctgtcctatgctccagctcaccccctctgtttgttctcactactgggtcgggtctgcttggcgggcacaccaccatgcccgtggaattcctcggacctctctcctccgtgttggccgaagccatagaaattctttgctgcgcccagccgagtttgcccaggtcacaagcatctatgtcctcgcctcgtcgtgctcgctggtcgtgcatccttgcagttccttgcttgtgatcgcaagcgctcgaagtggaaaaacagagttgataaagaagaaagcaaaaccgtatagttcgtgcattcatttagtgtggaattggtgctatgaattttggggaaggaattccgagaaattagtggacggtgatgatgatgttcgtgcgatactcgtcagacgctcgaccaaaaagcctaattcgggagtggctactccgtcttcttcgtcatgtgggaatcgtcgtgctgacacgccaataccgtcgatcgtcatcccctgttcgatctcgtcgtcaaacttcgcctcagccctagtcgtcgtctttcacccaccagctcgtcatgagacctggtgtcgagctcctttcctaacaaatgccgaacctgcccctgctcctgcgttcgccaacagccttaactcgtcaatcacgctcgcgagatgttcaattgaggacttcagcggaaggccatcgtcgttcaggcaactaccaagtcaaattgcgacgtggtga

SEQ ID NO: 106198 - DNA, 1443 bp, Zea Mays
aaaatttaacaggttttgaatcgaatcagaccgtgtcacaaatactatcgaccctttgattatcgctataaatctcgatccaaatatcttcgaattatgttaaacaaaaaacaaagaaaaagggaaagaaaataaaaaagatctcagcctgcccttatcccaacgccgctcagccgccctacccttttgccgtacgcagattttttcaagcaccagctttatctcctggaagcagccgcatcacctcttcatctccctctgtcgcggccgctgctggagcttctctgcttcacacggccccaatctccttcgctcctctccatggcgtgccctgcgctcgccggatctccttctgctagcgcccagctgctccctgcgtgctcctcccgtgcagctcgccgagcgccctctgcctgctagcgccagcagccacgccgctgcttgctccccttccttctcccttctctgcttcccctgctcgccatggaactccctgcgtcgagctcggctcctgctccagattgctcagctgcttcgggcagatgctggggcgctcgattccccagcaaaagttatccgctgcatgcccctatttgccgagcacttcaggtgggggcgccaggaggatgcacacgagttcctccgctatgtcgtagatgcctgtcacactgctgacctccgcatgcacaagcggttacgtgcagcagctgccagtggaaactgtggtgaggatgtccgggggcagggggtttgtctggttatgagggagacatttggcggggcattactgcgtcaagtgaagtgccttgagtgcaagggagaatctaacgagactgatgagataatggatatcagtctcgatctacctgggagcagttctgttgctgatgcccttgctcggctctgtcctatgctccagctcaccccctctgtttgttctcactactgggtcgggtctgcttggcgggcacaccaccatgcccgtggaattcctcggacctctctcctccgtgttggccgaagccatagaaattccttgctgcgcccagccgagttcgcccaggtcacaagcatctatgtcctcgcctcgtcgtgctcgctggtcgtgcatccttgcagttccttgcttgtgatcgcaagcgctcgaagtggaaaaacagagttgataaagaagaaagcaaaaccgtatagttcgtgcattcatttagtgtggaattggtgctatgaattttggggaaggaattccgagaaattagtggacggtgatgatgatgttcgtgcgatactcgtcagacgctcgaccaaaaagcctaattcgggagtggctactccgtctttttcgtcatgtgggaatcgtcgtgctgacacgtcaataccgtcgatcgtcatcccctgttcgatctcgtcgtcaagcttcgcctcagccctagtcgtcgtctttca

SEQ ID NO: 106199 - DNA, 1187 bp, Zea Mays
tttccactttagaccaagaagcagcagtgtcaaccattctttcaaattcagagcaatcaacctcagtgtcgaccattatttccaatttagaccaacatgcagcagtgtcaaccattctttccccaaggttctcttcttttcttttattaatcgtttgattactgtttgtttcagctatttacgtggcaacaaactcactagacatataacccaggactagggaacatgagtaaacttagctacttgtagctggatgactagatgggcaattagcaggagcagaaggatcccacatcgctaatcatcaattgctgatgctagaggctaagctatttttgggtgctttttcctcctatgatcggcatagagacatgcagatggatattgataatatgtcttatgaggcccagaacatctgcaatttagtttttgataagtcctccaagatttggcagtgctctttctgttagctctggatgtcagggcaatgaacaaacacgttgagtatgatagtgatgctaaaattactgcaatgggttgaagccctaccatgtggcaaccattgatccatgcccaaaatgtgcctgccactggtgttcctgtcccaacactcgatcaacatgcaagtaaaaaatgaagcatagagccaaacgatgcgagagaagtatggtctacacatgagccagttcacataaacccttcagacccaagcaggtaccagcagaatggcacgccagctaaagaaaggagtcaatgcactgtaatgcgaagaattcttcatgacatcctatgagataatggttttcttgaatgggctagctcaagttgtgcggtttggtgtcatggtgttgttcaaacttcgcagtggtgtgtgaaatagaagaatcccaattcccaagcatattatttgtcacgcttgtttgccggcaggtacaggggaaatacgacagcatcatcgtggaggtgaagagctactacatgtcgatgagcaggtacagggatgataaaaaaagaaaggtatatcttcacgtcgatgagcgggtacagggatgacaaaaaaagaaaggtatatcttcacatcatgtgctatacattctttaatggctttctattgtttctttttttgttggattcgatagcttggtcagttttttcttgtatattagattagatggtggtatatgcag

SEQ ID NO: 106200 - DNA, 1025 bp, Zea Mays
ttttagctttacactccagcaactgtgggtgttcttcacatgcgattgacctttgctgccaatcctgatgttgcaccaattattttacatatcaagttagtttgttaactggaatgaactgttttcttttggaatgttttttttttctgtcatggttgatctgttagcctgtttaatcttatctctggcaagtaaccaaccatgctccatagatatgaaatttagtctaaatgtaagttaacatatatttttcccttcctcctcttggctcatgtattcttggttcccattgaaggatccattgcatggaacaccctctggttttcaaggatggcctcgccctgtgcttttgaattcatatcaagctagcatgcagaagttccaaggcaacaccccggtgtatttggcccctccaatcatggcaactgggaacctgccattggtggtaccaagccctgcaccacttgtgcagccgttccaggccattcatcccatcatggttcctgctgcaagcagcgtggtcccaggaaaatacatgtgaacttgtcataccaatgacaatctccttctgttggaagagtcctggctttccagttacccctttggtttggggtatacgtctgaaaggactccgcgattttgcctggtctgttgattcacttgtcagttgctggtctgtgtccgtattttagttggaagggctttgcaacttcgtcattcttcatgctctgtgtgggttttcgaaatattctttttagaggggggaggcatggtgcagtaaaatgaaatagagagaaattgcagcaattctttgttatcttagcaacaccttttcttcttccgagagcactatgtacaaggtgacattataaaagattaagatagtgaaggccttattttcgcgaggctaatgtacattcatcttgcaagtgttgcaacttttttgaagtttgtttaagtaaaaaaagacatgaagtttgtttcgacagtattatttctcttatagatcgaaattgttttatggc

SEQ ID NO: 106201 - DNA, 1606 bp, Zea Mays
catggcccgccccaggaaggcgaaaccgccgccgccgccgcctagggcggcggcgccgtccatcgccgaggcgctgctgatggccacgatctgcatggtgggtctgcccgtggaggtgcgggtccgcgacggatccacctactccggcgtcctccacaccgcctgcgtcgatgccggttacggtgtcgtgctaaagaaagcaaagaagattgcaaacggaaagggagatgcgaatctgtcgctgggatcgtttgtggacactcttgttgttcatccagatgaccttgttcaagtgattgctaagggcctttcactccccgttaaaggtgtttgtaaacctcttgactccaacgtggtggcttccaatgggtccttgaagcgtcaaaattcacatgcaaatgaccccaaaatgtctaaacctgaaaatatatctccacttatgcaaactgagaaatgcacctctgtgggccaggggaaaaatacttctgttaagaaaaatggtcaaaatagtggtagcgctacaagtttaagttcttctaccggacttatggggccatgtttctccatgaatggggtttctggatcagcaactatggtgcctaaagttgatgctgctacaagttcagctatagctgcgcccttggtagcttcagatgttaaaccctctcagccggtcagtaattcagctaccaagatgattatgtcaagcaaatccactgctaaggaatttaaactcaatccttgtgcaagggttttctctccatcttttgcaagttctaggcaagtacttgcagctatggcccctgttgacacatactacatttcacactctgcccctgaagtaccaatgggcgtacctgtatatgagtcaaagtctgtgcctggcgtttcacctctaaccaacaaggttcattgtagtaacctgtctcctgcaaactatgccatttcacctcaatatgttcagtcagcaacaccccggtgtatttggcccctccaatcatggcaactgggaacctgccattggtggtaccaagccctgcaccacttgtgcagccgttccaggccattcatcccatcatggttcctgctgcaagcagcgtggtcccaggaaaatacatgtgaacttgtcataccaatgacaatctccttctgttggaagagtcctggctttccagttacccctttggtttggggtatacgtctgaaaggactccgcgattttgcctggtctgttgattcacttgtcagttgctggtctgtgtccgtattttagttggaagggctttgcaacttcgtcattcttcatgctctgtgtgggttttcgaaatattctttttagaggggggaggcatggtgcagtaaaatgaaatagagagaaattgcagcaattctttgttatcttagcaacaccttttcttcttccgagagcactatgtacaaggtgacattataaaagattaagatagtgaaggccttattttcgcgaggctaatgtacattcatcttgcaagtgttgcaacttttttgaagtttgtttaagtaaaaaaagacatgaagtttgtttcgacagtattatttctcttatagatcgaaattgttttatggc

SEQ ID NO: 106202 - DNA, 1965 bp, Zea Mays
cacgggagtacgggacacggctgcttgcctgcgccccttggtcctttccccgcttgcctttgcctttttcgggtgggctcctcccctccacccccctctctctctctctctctctcatggcccgccccaggaaggcgaaaccgccgccgccgccgcctagggcggcggcgccgtccatcgccgaggcgctgctgatggccacgatctgcatggtgggtctgcccgtggaggtgcgggtccgcgacggatccacctactccggcgtcctccacaccgcctgcgtcgatgccggttacggtgtcgtgctaaagaaagcaaagaagattgcaaacggaaagggagatgcgaatctgtcgctgggatcgtttgtggacactcttgttgttcatccagatgaccttgttcaagtgattgctaagggcctttcactccccgttaaaggtgtttgtaaacctcttgactccaacgtggtggcttccaatgggtccttgaagcgtcaaaattcacatgcaaatgaccccaaaatgtctaaacctgaaaatatatctccacttatgcaaactgagaaatgcacctctgtgggccaggggaaaaatacttctgttaagaaaaatggtcaaaatagtggtagcgctacaagtttaagttcttctaccggacttatggggccatgtttctccatgaatggggtttctggatcagcaactatggtgcctaaagttgatgctgctacaagttcagctatagctgcgcccttggtagcttcagatgttaaaccctctcagccggtcagtaattcagctaccaagatgattatgtcaagcaaatccactgctaaggaatttaaactcaatccttgtgcaagggttttctctccatcttttgcaagttctaggcaagtacttgcagctatggcccctgttgacacatactacatttcacactctgcccctgaagtaccaatgggcgtacctgtatatgagtcaaagtctgtgcctggcgtttcacctctaaccaacaaggttcattgtagtaacctgtctcctgcaaactatgccatttcacctcaatatgttcagtcaatcgtggggcataatacatccagactagacccagctagagtaggcacaccataccatcccatgcaggtgggggcaacctacactacccctagtcctcagcctgcaatgactgggaagttcagtcctgttgtttatgttcacccagttcctcaggatccattgcatggaacaccctctggttttcaaggatggcctcgccctgtgcttttgaattcatatcaagctagcatgcagaagttccaaggcaacaccccggtgtatttggcccctccaatcatggcaactgggaacctgccattggtggtaccaagccctgcaccacttgtgcagccgttccaggccattcatcccatcatggttcctgctgcaagcagcgtggtcccaggaaaatacatgtgaacttgtcataccaatgacaatctccttctgttggaagagtcctggctttccagttacccctttggtttggggtatacgtctgaaaggactccgcgattttgcctggtctgttgattcacttgtcagttgctggtctgtgtccgtattttagttggaagggctttgcaacttcgtcattcttcatgctctgtgtgggttttcgaaatattctttttagaggggggaggcatggtgcagtaaaatgaaatagagagaaattgcagcaattctttgttatcttagcaacaccttttcttcttccgagagcactatgtacaaggtgacattataaaagattaagatagtgaaggccttattttcgcgaggctaatgtacattcatcttgcaagtgttgcaacttttttgaagtttgtttaagtaaaaaaagacatgaagtttgtttcgacagtattatttctcttatagatcgaaattgttttatggc

SEQ ID NO: 106203 - DNA, 798 bp, Zea Mays
cgggagtacgggacacggctgcttgcctgcgccccttggtcctttccccgcttgcctttgcctttttcgggtgggctcctcccctccacccccctctctctctctctctctctcatggcccgccccaggaaggcgaaaccgccgccgccgccgcctagggcggcggcgccgtccatcgccgaggcgctgctgatggccacgatctgcatggtgggtctgcccgtggaggtgcgggtccgcgacggatccacctactccggcgtcctccacaccgcctgcgtcgatgccggttacggtgagctgtccgttcttccctctcctcccgccgcctctcttagaagctcgccctcgctggggttgccctgcggggattggagatcgcgggaatgccgttcgggacgtgatccaacagcgggtggagtcgggcggtgggtgctgccgggcttactggtgtccacagcccaccccgccccacgttttcctgcgcatccgtttgatctgctcgctggacgggtggctgtggtcgcttggagcccgcgggaatcaggatgtttgttttgtcggtgcgttgggatggatttggaggcgggtggtagagatcgcggggtttgctccatttttgtgttacagctattcgcggccaagatctcgcccgtttcgtcttggtcgaggtggttgattttgcggtgtcgtggaaaccactgattgggctcaaggtaaggtatgtattatggggatgacgcattgcggaattccgagatcataaggagggctcatagaaatttctacaatgtatgt

SEQ ID NO: 106204 - DNA, 2254 bp, Zea Mays
ccgaattttccttctccccgtctcctcgccgtcgctccttcggcccttcctctctcccatctcggctagggttaggtcgtctcgccaagtcgccatgatgcagcagcccccgccgcagcagccgcagccgggcatggcgccgcctccgcctccgcaggctgctggcgggcagccaccgcagtggggtgggatcccgccgccgatggcgcagcagtacggcgcaccgcctccgcagcagcctccggcgatgtggggccagcctccgccgcaggcgcactacgggcaggcaccaacccctcagcagtactacgccgcgccgccggtgccggtgcaggcgccagccgcccccgctgcggcggacgaggtcaggacgctctggatcggggacctgcaatactggatggacgagaactacgtcttcgggtgcttttcgaacactggggaggttcaaaatgtgaagctcatccgtgacaagaattcagggcagcttcagggttatggttttgttgagtttacaagccgtgcagctgcagaacgagttcttcagacatacaatggacaaatgatgccaaatgttgacttgacatttcggctgaattgggccagtgctggtgaaaagcgcgatgatactcctgaatatactatttttgttggggatttggctgcagatgttacagattacttgttacaagagacattcagggttcattatccctctgtcaagggtgcaaaagttgtgactgataaattgacaatgcgcacaaagggttatggatttgtgaaatttggtgatcctacagagcaagctcgtgcaatgactgaaatgaatggaatgccttgttcttccaggcctatgcgtattggtcctgcagcaagtaggaaaaatacaggaggtgttgttcaagagagagtaccaaattctcaaggagctcagtctgagaatgatcctaacaataccactatatttgttggtgggcttgaccccaatgtcactgaagataccctaaaacaagttttttctccttacggtgaagtcgtccatgttaagatccctgttgggaagagatgtggttttgttcagttcgttaccagaccttctgctgaacaagcgctgctaatgctgcaaggggccttgattggtgcacagaatgttcgactttcatggggtagaagcctgtcgaacaagcaggctcagcctcagcaggaatccaatcaatggggtgcggctgctggtgctggtggctactatgggggctatggacaaggttatgaggcttatggcagtgggtatgcacaaccccaggatcctaacatgtatggttatggcgcttatggcggttatcccaattaccaacagcaaccagctgcacagcagcaacagcaacaacagtgatgcctgtttgctcgggtaggtcattgggttgtcgcgacggaattaattaaatattatttcaggacactctcatattgcattcttgtcaattgaggtggttttgaaaggctcctgattttgatggccccatggcacggtttcatctatttattagtatatgacatatatgcgctgtgaacaagtggcgctctactgtgattgctgtgttgagacatgctttcttagtttctttccatgtttctcggatctgttgtgttacctttattactgtgtatttgcatatctactgtgatgctatatatgcactgtgccgtttgtttcctattccatttttttctcgttactttattatagcgttggattctttcttctatcacaacgaacagccgtgggcacatgggcatgcacgatgtcatgacagaatgtgtcgatggcaacatgggctccatcttttatctgtttcgagtccttgacatcaggataatgtaatgtgggttttgttgccgctgtgactgatatggaagcatgagctgccatcgttttcatggccgtccgagtctgaaaaatacatttacagtacgatgaatccttttcattcggtctattattcggtctattaggttaattcggtttggtttatttgggtttgtgaaattttgggttttgaaaaatgagaatcgaaattttcaaaattattttagaaaccgaatctgaatagactcacaattttagtttggtctatttagtccaccgaatagacccaaatagtagagagactaatatcttttgttaaaatatataataaataattaattgaaagtactattattaaaaaaattataaaaatatcatacaaagata

SEQ ID NO: 106205 - DNA, 732 bp, Zea Mays
acatagggaaactgcatacaaaggtatgcaatttgtctcaacgttgctacttgtttatgtctgtattatacatcatgatggatctcaccatagcctatcagatcaaacaataacaccaaagctaaagtgagatacagaagcagaaaaaggctccagatagacctcaaagaccagccctgtcctttttttttctagtccttgttgtacatgcaatacaggttactctaaaacatgaaaaacgaagcatctaggtactcctttacattattccttggattgaatgctaggtttacaatgtttcgccttctggttctggcctgcactagatcttctgcttgagcacctggcggagctggaccttatggctctccaaccgtgcctccatgagcttcgccttcaagctgtgcttctgggacatccgcgggtactctatacagcccttgaatccccggttgaattggacgttcatcgagtctggtgagctccactgctcaacacacggtggactgagccctatttcttggatgccactttcaacagtggaataggtcccgactgagagccgcacgtttgacgatcttgcatttaccgtttcaactgcgtctttcttgcatatctcgctgttctttgggcgggacgacttccagagctttgaaatggccgattctttcttcttgggctggttcatgtttgtcaggcaggcatcagctgactcatccttcagcttctcac

SEQ ID NO: 106206 - DNA, 839 bp, Zea Mays
ggatccaatagccgaaaaccaccatcctcgaagccctagcgccgccaccctattaatgctcgtctctctcgcgctgagcgctccaatttcctccacttcccaaaccctaccggcggcgcagcagcatcacaaccaccgcccgaagatggtgaagtttctcaagcccggcaaggccgtaatcctcctccagggcaggttcgccggccggaaggcggtgatcgtgcgcgtgttcgaggagggcacccgcgaccgtccctatgggcactgcctcgtcgccggcctggccaagtaccccaagaaggtgatccgcaaggactccgccaagaagacggccaagaagtcccgcgtcaagtgtttcatcaagctcgtcaatttcactcacctcatgcccacccgctacaccctcgacgtcgatttcaaagacgtcgcctcgggcgggcccgacgcgctctccacccgggacaagaaggtcgaagcctgcaaggccgccaaggcgcgcctcgaggagaggttcaagaccggcaagaacaggtggttctttaccaagctccgcttctaggcgccgggcaccccgcatagtgactactttagttgtcaatttgttgtatcggaaaccatttaagctatttctgttttggtattgcgcttgttatggatctcggagaagattttgttaaaaacatgtcgatgatgtgttaaatgatgcccaaaggaaacgtctcgttgaacttttgctgagaatcactgctcgtgacgtgttgttaatcttctgcgttgttagtattatattttgttgatgcatcactgaatgcttcttggtatacatgcgagtagtcttg

SEQ ID NO: 106207 - DNA, 822 bp, Zea Mays
ggatccaatagccgaaaaccaccatcctcgaagccctagcgccgccaccctattaatgctcgtctctctcgcgctgagcgctccaatttcctccacttcccaaaccctaccggcggcgcagcagcatcacaaccaccgcccgaagatggtgaagtttctcaagcccggcaaggccgtaatcctcctccagggcaggttcgccggccggaaggcggtgatcgtgcgcgtgttcgaggagggcacccgcgaccgtccctatgggcactgcctcgtcgccggcctggccaagtaccccaagaaggtgatccgcaaggactccgccaagaagacggccaagaagtcccgcgtcaagtgtttcatcaagctcgtcaatttcactcacctcatgcccacccgctacaccctcgacgtcgatttcaaagacgtcgcctcgggcgggcccgacgcgctctccacccgggacaagaaggtcgaagcctgcaaggccgccaaggcgcgcctcgaggagaggttcaagaccggcaagaacaggtggttctttaccaagctccgcttctaggcgccgggcaccccgcatagtgactactttagttgtcaatttgttgtatcggaaaccatttaagctatttctgttttggtattgcgcttgttatggatctcggagaagattttgttaaaaacatgtcgatgatgtgttaaatgatgcccaaaggaaacgtctcgttgaacttttgctgagaatcactgctcgtgacgtgttgttaatcttctgcgttgttagtattatattttgttgatgcatcactgaatgcttcttggtat

SEQ ID NO: 106208 - DNA, 402 bp, Zea Mays
atgtcaggcgcgctgaggaactcaataaccgcctcgatgggcagatcggtgctgggaggcggcggagcgaagagcaccacagacttggccgccgcgagcttcttccgctgcgggcaccggggcgcgagcagcctcgaggcgggcgtgaagtacggcacggccacgatgccctcgccgtctccagccgcaggaggaggcgatgagggggacgccggcgccggagccggcgatgagggagggggcaggcgggcggcgcgactcccacggcggagcctggcgtcgcggaggcgggcgagggcccctgggcggaggaagcggaggtggtcgccgctggtggcggcggacgaggcgtggagcttgcgggtggctgccatgtgggccccggatattggtgagggatga

SEQ ID NO: 106209 - DNA, 1636 bp, Zea Mays
cacccccacccgatcccgatctcaccgtctccaccccgaccccctcccaccagtctccaacagaccaacagcatctaatcaatcaagacagccccgtgctagctcacccgccggggctcgccacgatgagaggcctcctcgcgtgcgccaccctcgcccgccgcgccgccgcctcctccgcgcccgcgcgcgtccgccacctggcgggcgccgcggaggcggcggaggccgagctcaagaggacggcgctctacgacttccacgtcgcccacggcggcaagatggtgccgttcgccggctggagcatgcccatccagtacagggactccatcatggactccaccgtcaactgccgcgccaacggcagcctcttcgacgtcgcccacatgtgcggcctcagcctcaagggccgcggggccatccccttcctcgagtccctcgtcgtcgccgacgtcgccgcgctcagggacggcaccggcaccctcaccgtcttcaccaacgagcagggcggcgccatcgacgactccgtcatcgccaaggtcaccgaccaccacatctacctcgtcgtcaacgccggatgcagggacaaggacctcgcccacatcgaggcgcacatggaggccttcaacaagaagggcggggacgtcaagtggcacatccacgacgaccgatcgctgctcgcattgcagggtcctcttgctgcacctactctgcagttgctgacgaaagaagatttgagcaaaatgtacttcagtgacttcaagatgattgacatcaatggatatgcatgctttctgacgagaactgggtatcacttcgattctttatcgccattatttgagcagtattgtaaggattgtcttatttcttatttcagctacaccggcgaagatggttttgagatctctgttccgtcagagaatgcagtggatcttgcagaggccatcctagagagatcggaaggcaaggtgcggctgaccggcttgggcgcccgtgacagtctccgactggaggcaggcctgtgcctgtacggcaacgacatggagcagcacatcacgccggtggaagccggcctctcatgggcgatcggcaagaggaggagggcagagggcggtttcctgggcgcagacgtgatcctgaagcagctccaggaagggccaaagatcaggcgcgtgggcatggtcacgcaggggccgcccgcgcggagccacagcgagctggtgagcggctcgggggagaggatcggcgaggtgaccagcggagggttcagcccgtgcctgaagaagaacatcgctatgggctacgtgaagtcgggaatgcacaaggctgggacggagttgaaggtggtcgttcgcgggaagtcctacgacgccgtggtcaccaagatgccgttcgtgcccaccaagtactacaagccctcgtagattatattcttgtacagagggacgccttgcgtttctcttttgtcgttgcggcttgttcttggcagattggttaagcattgcaactgtaacttctgtgagattgtcttacggttcacatttcatgtatgcctgcctaataagccttcttttcccaaatacaaagcatgcatgtgcctatgtgaagaatcgaatcttgctggttggacaattca

SEQ ID NO: 106210 - DNA, 1561 bp, Zea Mays
cacccccacccgatcccgatctcaccgtctccaccccgaccccctcccaccagtctccaacagaccaacagcatctaatcaatcaagacagccccgtgctagctcacccgccggggctcgccacgatgagaggcctcctcgcgtgcgccaccctcgcccgccgcgccgccgcctcctccgcgcccgcgcgcgtccgccacctggcgggcgccgcggaggcggcggaggccgagctcaagaggacggcgctctacgacttccacgtcgcccacggcggcaagatggtgccgttcgccggctggagcatgcccatccagtacagggactccatcatggactccaccgtcaactgccgcgccaacggcagcctcttcgacgtcgcccacatgtgcggcctcagcctcaagggccgcggggccatccccttcctcgagtccctcgtcgtcgccgacgtcgccgcgctcagggacggcaccggcaccctcaccgtcttcaccaacgagcagggcggcgccatcgacgactccgtcatcgccaaggtcaccgaccaccacatctacctcgtcgtcaacgccggatgcagggacaaggacctcgcccacatcgaggcgcacatggaggccttcaacaagaagggcggggacgtcaagtggcacatccacgacgaccgatcgctgctcgcattgcagggtcctcttgctgcacctactctgcagttgctgacgaaagaagatttgagcaaaatgtacttcagtgacttcaagatgattgacatcaatggatatgcatgctttctgacgagaactggctacaccggcgaagatggttttgagatctctgttccgtcagagaatgcagtggatcttgcagaggccatcctagagagatcggaaggcaaggtgcggctgaccggcttgggcgcccgtgacagtctccgactggaggcaggcctgtgcctgtacggcaacgacatggagcagcacatcacgccggtggaagccggcctctcatgggcgatcggcaagaggaggagggcagagggcggtttcctgggcgcagacgtgatcctgaagcagctccaggaagggccaaagatcaggcgcgtgggcatggtcacgcaggggccgcccgcgcggagccacagcgagctggtgagcggctcgggggagaggatcggcgaggtgaccagcggagggttcagcccgtgcctgaagaagaacatcgctatgggctacgtgaagtcgggaatgcacaaggctgggacggagttgaaggtggtcgttcgcgggaagtcctacgacgccgtggtcaccaagatgccgttcgtgcccaccaagtactacaagccctcgtagattatattcttgtacagagggacgccttgcgtttctcttttgtcgttgcggcttgttcttggcagattggttaagcattgcaactgtaacttctgtgagattgtcttacggttcacatttcatgtatgcctgcctaataagccttcttttcccaaatacaaagcatgcatgtgcctatgtgaagaatcgaatcttgctggttggac

SEQ ID NO: 106211 - DNA, 115 bp, Zea Mays
tctatggtttcctttcttgatcttgttcactggttctgctgccaccaccatttcttattttctcaagtgcctgaaatctcaaattctataacaaaaaaataaaaaaataaacatc

SEQ ID NO: 106212 - DNA, 768 bp, Zea Mays
acccaaagcctgacctaagctattcggctatctgtaatcggacctgatctaatcgcagtgtggtccttcaaccagatcggttcctgagcgagctgacgagcatgtacgagcggagcacggagaagggctccgtctgggtcaccatgaagcgatcaactctcaagggcaaggcacagttgcggaagatggagaataaggggcaggaggtagagcacaggtgcctcgtccgcgcctccaatggcaagaagaacatctccacctcggtttctctaaaggagtacacaaagtttcaagcttcatacgcaacagttcttaaggcccatatgcatgctctgaagaaaagggagaggaaagacaagaagaagactgcagatgctgagaaggcaattgagaccgcacccaagaagcagaagaaagcatcttcaaagaaatcttcagggtccaagtcataaggcgctcacagaactcagtgtgtcttctcctttatgttgtttaccgccagactaattagagtgtcgtgaagttttacttatctggtttttattcgaattcgtgtctggaagatgaaagcctgtgaatacacctttatagagccgtgtcatcgatgctaacattttttgaagcagagttttgaggtgaatgtgaggcgctgtgctgccctgattggcattaacgaaaatgcacaagtttgaacttttattgcataaaggtaatggagtttgttagggaacatcttcgtcgctggaatgggaatagaatggattacta

SEQ ID NO: 106213 - DNA, 970 bp, Zea Mays
aaagaatacaaactaaaaagcatgaaagagataataaaaaaaatttgtaacgaattgtttgaaacagtgaacgggcccatatgcaggagaagaaggcccggttgtggtgcgctccctcgaccgaacagccccgactgggctatattcgttctcccggcgtgctccgtctctcctctcagcgcgacgattacggtaacgccgtcgccgccctacggctcagatcttcgtcgtcatcttctccggcaacgagcacccaaagatggtggtccttcaaccagatcggttcctgagcgagctgacgagcatgtacgagcggagcacggagaagggctccgtctgggtcaccatgaagcgatcaactctcaagggcaaggcacagttgcggaagatggagaataaggggcaggaggtagagcacaggtgcctcgtccgcgcctccaatggcaagaagaacatctccacctcggtttctctaaaggagtacacaaagtttcaagcttcatacgcaacagttcttaaggcccatatgcatgctctgaagaaaagggagaggaaagacaagaagaagactgcagatgctgagaaggcaattgagaccgcacccaagaagcagaagaaagcatcttcaaagaaatcttcagggtccaagtcataaggcgctcacagaactcagtgtgtcttctcctttatgttgtttaccgccagactaattagagtgtcgtgaagttttacttatctggtttttattcgaattcgtgtctggaagatgaaagcctgtgaatacacctttatagagccgtgtcatcgatgctaacattttttgaagcagagttttgaggtgaatgtgaggcgctgtgctgccctgattggcattaacgaaaatgcacaagtttgaacttttattgcataaaggtaatggagtttgttagggaacatcttcgtcgctggaatgggaatagaatggattact

SEQ ID NO: 106214 - DNA, 1450 bp, Zea Mays
cttgttgatccctcctgcaaagaactcgaaaactgctgttttgttagtgctatttctcctctcctcagtttgatggggagatggcgttgatcacgaatgtctctgactatgaggagcttgcaaagcagaagctgcctaagatggtttatgacttctatgccgggggtgcagaagaccagtggacactcaaggagaataaggaggcattctccaagattctgtttcgaccacgggtgctgattgatgtgtctcatattgacatgtctacaagtatattgggttacaaaatttccatgcctattatggtggctcccactgctttgcacaaactagcccaccaagaaggagaggttgcttctgcccaggcagcagctgctgcaggaactataatgacgttgtcttcatggtcatcttgcagcattgaggaagttagctcaattgcaccaggactccgtttcttccaactttcagtattcaaggatagggatatcgtgcaacagcttgtcagaagggctgaaaatgctggctataaggcaatcgccgtcactgtcgacgctccacgccttggtcgcagggaagccgatgtcaggaacagattcaggctgcctgaaaatgtggtgttgaagtgctttgaaggactggatctcagcaagatggacaagactaagggttcaggccttgctgcttacgccactagccagattgacagctctctttcttggaaggatatcaagtggctacagacgattaccgggctgcctatcttagtgaaaggagtcataacagcagaagatgctcgaattgctatcgaatgcggtgtcgccggcattatcgtgtccaaccacgggggccgccagctagactatcttcctgcaaccatcagctgcctggaagaggggaaacttcaggttgtgagagaagcgaagggccgccgtgtgcctgtgttcctcgacggcggcatccgccgtggcactgacgtgttcaaggccttggcgctgggagcctcaggagtgtttattggaaggcccgtactgttcgccctcgccgtggacggcagggcaggggtgaggaatgcgctgcggatgctgagggatgagctcgagatcaccatggcgctgagcggctgcgcgtcgctgaaagatatcacccgcgatcgcgttatcactgagcgcgacatgatccgtcgctctcggatataggcttcgattcgtttgctgttgtgttgtgcggggctgaaagtctgttgttgccctggcatgactgtcatattcgaaactgaccggaccatcagattggttttgacttttgacctattggctaacgatgtgctaggttttctcatttgtctgcgtctcagcctaattttgcccagctgtgattgataatatatgcttcaataagtcataaaatagcatatcaaacaggtcttacttgagtgttgacaccggcc

SEQ ID NO: 106215 - DNA, 1404 bp, Zea Mays
cttgttgatccctcctgcaaagaactcgaaaactgctgttttggagatggcgttgatcacgaatgtctctgactatgaggagcttgcaaagcagaagctgcctaagatggtttatgacttctatgccgggggtgcagaagaccagtggacactcaaggagaataaggaggcattctccaagattctgtttcgaccacgggtgctgattgatgtgtctcatattgacatgtctacaagtatattgggttacaaaatttccatgcctattatggtggctcccactgctttgcacaaactagcccaccaagaaggagaggttgcttctgcccaggcagcagctgctgcaggaactataatgacgttgtcttcatggtcatcttgcagcattgaggaagttagctcaattgcaccaggactccgtttcttccaactttcagtattcaaggatagggatatcgtgcaacagcttgtcagaagggctgaaaatgctggctataaggcaatcgccgtcactgtcgacgctccacgccttggtcgcagggaagccgatgtcaggaacagattcaggctgcctgaaaatgtggtgttgaagtgctttgaaggactggatctcagcaagatggacaagactaagggttcaggccttgctgcttacgccactagccagattgacagctctctttcttggaaggatatcaagtggctacagacgattaccgggctgcctatcttagtgaaaggagtcataacagcagaagatgctcgaattgctatcgaatgcggtgtcgccggcattatcgtgtccaaccacgggggccgccagctagactatcttcctgcaaccatcagctgcctggaagaggttgtgagagaagcgaagggccgccgtgtgcctgtgttcctcgacggcggcatccgccgtggcactgacgtgttcaaggccttggcgctgggagcctcaggagtgtttattggaaggcccgtactgttcgccctcgccgtggacggcagggcaggggtgaggaatgcgctgcggatgctgagggatgagctcgagatcaccatggcgctgagcggctgcgcgtcgctgaaagatatcacccgcgatcgcgttatcactgagcgcgacatgatccgtcgctctcggatataggcttcgattcgtttgctgttgtgttgtgcggggctgaaagtctgttgttgccctggcatgactgtcatattcgaaactgaccggaccatcagattggttttgacttttgacctattggctaacgatgtgctaggttttctcatttgtctgcgtctcagcctaattttgcccagctgtgattgataatatatgcttcaataagtcataaaatagcatatcaaacaggtcttacttgagtgttgacaccggcc

SEQ ID NO: 106216 - DNA, 1614 bp, Zea Mays
gacgaaattggttgagtggttacaaaaaaaccaaacactttccagcatatgcatgcaagggacgaaattagttaccagttaccaacactttcagcatatgcacgcaagggacgagattgattacccattaccaaaccaacagtttccagttcagcggtaggaacaggccgtcacggcgtcatccgccaaaggacaatccatttgctcacacaggcacaaacgctgagcgcctgagcctgctctcgcggtctaggagatggcgttgatcacgaatgtctctgactatgaggagcttgcaaagcagaagctgcctaagatggtttatgacttctatgccgggggtgcagaagaccagtggacactcaaggagaataaggaggcattctccaagattctgtttcgaccacgggtgctgattgatgtgtctcatattgacatgtctacaagtatattgggttacaaaatttccatgcctattatggtggctcccactgctttgcacaaactagcccaccaagaaggagaggttgcttctgcccaggcagcagctgctgcaggaactataatgacgttgtcttcatggtcatcttgcagcattgaggaagttagctcaattgcaccaggactccgtttcttccaactttcagtattcaaggatagggatatcgtgcaacagcttgtcagaagggctgaaaatgctggctataaggcaatcgccgtcactgtcgacgctccacgccttggtcgcagggaagccgatgtcaggaacagattcaggctgcctgaaaatgtggtgttgaagtgctttgaaggactggatctcagcaagatggacaagactaagggttcaggccttgctgcttacgccactagccagattgacagctctctttcttggaaggatatcaagtggctacagacgattaccgggctgcctatcttagtgaaaggagtcataacagcagaagatgctcgaattgctatcgaatgcggtgtcgccggcattatcgtgtccaaccacgggggccgccagctagactatcttcctgcaaccatcagctgcctggaagaggttgtgagagaagcgaagggccgccgtgtgcctgtgttcctcgacggcggcatccgccgtggcactgacgtgttcaaggccttggcgctgggagcctcaggagtgtttattggaaggcccgtactgttcgccctcgccgtggacggcagggcaggggtgaggaatgcgctgcggatgctgagggatgagctcgagatcaccatggcgctgagcggctgcgcgtcgctgaaagatatcacccgcgatcgcgttatcactgagcgcgacatgatccgtcgctctcggatataggcttcgattcgtttgctgttgtgttgtgcggggctgaaagtctgttgttgccctggcatgactgtcatattcgaaactgaccggaccatcagattggttttgacttttgacctattggctaacgatgtgctaggttttctcatttgtctgcgtctcagcctaattttgcccagctgtgattgataatatatgcttcaataagtcataaaatagcatatcaaacaggtcttacttgagtgttgacaccggcc

SEQ ID NO: 106217 - DNA, 1608 bp, Zea Mays
gacgaaattggttgagtggttacaaaaaaaccaaacactttccagcatatgcatgcaagggacgaaattagttaccagttaccaacactttcagcatatgcacgcaagggacgagattgattacccattaccaaaccaacagtttccagttcagcggtaggaacaggccgtcacggcgtcatccgccaaaggacaatccatttgctcacacaggcacaaacgctgagcgcctgagcctgctctcgcggtctaggagatggcgttgatcacgaatgtctctgactatgaggagcttgcaaagcagaagctgcctaagatggtttatgacttctatgccgggggtgcagaagaccagtggacactcaaggagaataaggaggcattctccaagattctgtttcgaccacgggtgctgattgatgtgtctcatattgacatgtctacaagtatattgggttacaaaatttccatgcctattatggtggctcccactgctttgcacaaactagcccaccaagaaggagaggttgcttctgcccaggcagcagctgctgcaggaactataatgacgttgtcttcatggtcatcttgcagcattgaggaagttagctcaattgcaccaggactccgtttcttccaactttcagtattcaaggatagggatatcgtgcaacagcttgtcagaagggctgaaaatgctggctataaggcaatcgccgtcactgtcgacgctccacgccttggtcgcagggaagccgatgtcaggaacaggctgcctgaaaatgtggtgttgaagtgctttgaaggactggatctcagcaagatggacaagactaagggttcaggccttgctgcttacgccactagccagattgacagctctctttcttggaaggatatcaagtggctacagacgattaccgggctgcctatcttagtgaaaggagtcataacagcagaagatgctcgaattgctatcgaatgcggtgtcgccggcattatcgtgtccaaccacgggggccgccagctagactatcttcctgcaaccatcagctgcctggaagaggttgtgagagaagcgaagggccgccgtgtgcctgtgttcctcgacggcggcatccgccgtggcactgacgtgttcaaggccttggcgctgggagcctcaggagtgtttattggaaggcccgtactgttcgccctcgccgtggacggcagggcaggggtgaggaatgcgctgcggatgctgagggatgagctcgagatcaccatggcgctgagcggctgcgcgtcgctgaaagatatcacccgcgatcgcgttatcactgagcgcgacatgatccgtcgctctcggatataggcttcgattcgtttgctgttgtgttgtgcggggctgaaagtctgttgttgccctggcatgactgtcatattcgaaactgaccggaccatcagattggttttgacttttgacctattggctaacgatgtgctaggttttctcatttgtctgcgtctcagcctaattttgcccagctgtgattgataatatatgcttcaataagtcataaaatagcatatcaaacaggtcttacttgagtgttgacaccggcc

SEQ ID NO: 106218 - DNA, 1710 bp, Zea Mays
gatttttcatatgcacgcagaagacgaaattggttgagtggttacaaaaaaaccaaacactttccagcatatgcatgcaagggacgaaattagttaccagttaccaacactttcagcatatgcacgcaagggacgagattgattacccattaccaaaccaacagtttccagttcagcggtaggaacaggccgtcacggcgtcatccgccaaaggacaatccatttgctcacacaggcacaaacgctgagcgcctgagcctgctctcgcggtctaggagatggcgttgatcacgaatgtctctgactatgaggagcttgcaaagcagaagctgcctaagatggtttatgacttctatgccgggggtgcagaagaccagtggacactcaaggagaataaggaggcattctccaagattctgtttcgaccacgggtgctgattgatgtgtctcatattgacatgtctacaagtatattgggttacaaaatttccatgcctattatggtggctcccactgctttgcacaaactagcccaccaagaaggagaggttgcttctgcccaggcagcagctgctgcaggaactataatggtttgcaagattgcacctttatatcggctaagtggtcgctcgcatatgaattcctttactggttgcattttcagacgttgtcttcatggtcatcttgcagcattgaggaagttagctcaattgcaccaggactccgtttcttccaactttcagtattcaaggatagggatatcgtgcaacagcttgtcagaagggctgaaaatgctggctataaggcaatcgccgtcactgtcgacgctccacgccttggtcgcagggaagccgatgtcaggaacagattcaggctgcctgaaaatgtggtgttgaagtgctttgaaggactggatctcagcaagatggacaagactaagggttcaggccttgctgcttacgccactagccagattgacagctctctttcttggaaggatatcaagtggctacagacgattaccgggctgcctatcttagtgaaaggagtcataacagcagaagatgctcgaattgctatcgaatgcggtgtcgccggcattatcgtgtccaaccacgggggccgccagctagactatcttcctgcaaccatcagctgcctggaagaggttgtgagagaagcgaagggccgccgtgtgcctgtgttcctcgacggcggcatccgccgtggcactgacgtgttcaaggccttggcgctgggagcctcaggagtgtttattggaaggcccgtactgttcgccctcgccgtggacggcagggcaggggtgaggaatgcgctgcggatgctgagggatgagctcgagatcaccatggcgctgagcggctgcgcgtcgctgaaagatatcacccgcgatcgcgttatcactgagcgcgacatgatccgtcgctctcggatataggcttcgattcgtttgctgttgtgttgtgcggggctgaaagtctgttgttgccctggcatgactgtcatattcgaaactgaccggaccatcagattggttttgacttttgacctattggctaacgatgtgctaggttttctcatttgtctgcgtctcagcctaattttgcccagctgtgattgataatatatgcttcaataagtcataaaatagcatatcaaacaggtcttacttgagtgttgacaccggcc

SEQ ID NO: 106219 - DNA, 1752 bp, Zea Mays
gaaacattttttttcttctgaatccctggtctgcttgttcattcctcattcctctacacgcatattcctacatgccatgcccacacgcaaatatgtcagatgctcagcgctcgacttagccctcgatcacgggcgcacaacaacacagcgacgctatctgaccgagtgttcaaataaatacccacacgggcacgccacgagacgatgagacccctctgctccaatccgccgctccactccaagtcacacggaggcagccatcgtagcctcgcccgactccgcttcccctgttctttgggcatggagctgatcacaaatgtcaccgagtacgagaagctcgcgaaggagaggctgccgaagatggtgtacgactactacgcctccggcgcagaagatcagtggacgctcaaggagaaccgggaggccttctccagaattctgtttaggccacgggtactgatcgacgtctcccgtatcgacatggccacaaacattctgggcttcagcatttccatgcctatcatgatcgctccttcagccatgcagaaaatggctcatcctgatggagagcttgccacggcaagagctgcagcttccgcaggaacaataatggtttgaaagatcacactgcctgtggtacctcaagtcatgacccaaacactaatccattgtgctgatcttatggtttttccagacattgtcctcatggtctacttccagcgttgaagaggtcaactcagttgggccgggcatacgtttcttccagctctatgtctacaaggacaggaatatcgtacggcaactcgtgaaaagggctgagatggctggcttcaaggccattgcactcacggtagacactccaatacttggccgcagggaagctgacattaagaacaggttcgccttacctccacatctggtgttgaaaaacttccaagcgctggatcttggcacgatggacaagacaaatgattccggccttgcttcctacgttgctggtcaagttgaccgcaccctttcctggaaggacgtcaagtggctgcagacaattacctcgttgccgatcctagtcaaagggatcgtgactgcagaagacactaggcttgcgatcgaatatggcgctgctgggatcatcgtgtccaaccacggcgcgcgccagctagattatgttcctgcgactatcagctgcctggaagaggtcgtcagggaagcgaaaggccggctaccggtgttcctcgacggcggcgtccgccgtggcacggacgtcttcaaggccctggcgttgggagcttcaggagtgttcatcggccggcccgtgctgttctcgctggcggtggacggcgaggccggcgtgcggaaggtgctgcagatgctgagggacgagctggagctcaccatggcgctcagcggctgcacgtcgctgagggagataacccgcgcacacgtcatcaccgacagcgaccggatcggccgctcgcggctgtagaatcattgtgcagttcacctcaggaatgatgttggtctcgactgaactgtcctgattcgggatctatttgtagctcttgtgctctcattttacgttaggcaaataaggaagctgcgtgcgtatgtgtgactgctgctgacgtttgtttgcgccgctgtcgtggttgcctggttggcacttggcagtgttgattggcgttagtggttggtttgggtgaaaggagtttatgagatctggtgccggtttctaagatactagcccatcaa

SEQ ID NO: 106220 - DNA, 1670 bp, Zea Mays
gaaacattttttttcttctgaatccctggtctgcttgttcattcctcattcctctacacgcatattcctacatgccatgcccacacgcaaatatgtcagatgctcagcgctcgacttagccctcgatcacgggcgcacaacaacacagcgacgctatctgaccgagtgttcaaataaatacccacacgggcacgccacgagacgatgagacccctctgctccaatccgccgctccactccaagtcacacggaggcagccatcgtagcctcgcccgactccgcttcccctgttctttgggcatggagctgatcacaaatgtcaccgagtacgagaagctcgcgaaggagaggctgccgaagatggtgtacgactactacgcctccggcgcagaagatcagtggacgctcaaggagaaccgggaggccttctccagaattctgtttaggccacgggtactgatcgacgtctcccgtatcgacatggccacaaacattctgggcttcagcatttccatgcctatcatgatcgctccttcagccatgcagaaaatggctcatcctgatggagagcttgccacggcaagagctgcagcttccgcaggaacaataatgacattgtcctcatggtctacttccagcgttgaagaggtcaactcagttgggccgggcatacgtttcttccagctctatgtctacaaggacaggaatatcgtacggcaactcgtgaaaagggctgagatggctggcttcaaggccattgcactcacggtagacactccaatacttggccgcagggaagctgacattaagaacaggttcgccttacctccacatctggtgttgaaaaacttccaagcgctggatcttggcacgatggacaagacaaatgattccggccttgcttcctacgttgctggtcaagttgaccgcaccctttcctggaaggacgtcaagtggctgcagacaattacctcgttgccgatcctagtcaaagggatcgtgactgcagaagacactaggcttgcgatcgaatatggcgctgctgggatcatcgtgtccaaccacggcgcgcgccagctagattatgttcctgcgactatcagctgcctggaagaggtcgtcagggaagcgaaaggccggctaccggtgttcctcgacggcggcgtccgccgtggcacggacgtcttcaaggccctggcgttgggagcttcaggagtgttcatcggccggcccgtgctgttctcgctggcggtggacggcgaggccggcgtgcggaaggtgctgcagatgctgagggacgagctggagctcaccatggcgctcagcggctgcacgtcgctgagggagataacccgcgcacacgtcatcaccgacagcgaccggatcggccgctcgcggctgtagaatcattgtgcagttcacctcaggaatgatgttggtctcgactgaactgtcctgattcgggatctatttgtagctcttgtgctctcattttacgttaggcaaataaggaagctgcgtgcgtatgtgtgactgctgctgacgtttgtttgcgccgctgtcgtggttgcctggttggcacttggcagtgttgattggcgttagtggttggtttgggtgaaaggagtttatgagatctggtgccggtttctaagatactagcccatcaa

SEQ ID NO: 106221 - DNA, 1681 bp, Zea Mays
atgtcacaatcactcaatactccaaacagttaagtcacatatatgtattatttattattactactactacaattgttgatcataatatcatatgtatatcatacatacatcatacatacggtatctttctctacgaagatgtcacgataactcgtgttacctgaacagtcacaaattcacagtatacatacataatagagggttcccacgcagaataagtttagggaaatatggcacttggcacgccacaagtaacgccaggcacatgcctcatgccgaggagaagcgaagcgaggggagcttcttcctccctgcttccctccggcaatcagtgggatgtcccagcctactctcaggtgccgatccatcccatacacaactactactcgtctgcttttagagccgagagatgagcagcgggacagacacagggctgtcctcgcccatggcagggtggcacatctccagcatgtcgagctccctgaaccgctccagaacccgcatcttgcactcctcggccgccatgacacccgtggagaaggcgccgtgcaccgtgcccgtgtacttgacgctcgtggcctctcccgcgaagaacaggttgtccacggggatgcgcagcttctcgtacaggtcacggggtttgttcaccccatcgaacgtgtacgaaccaagcgtgttctcgtccgagccccagcgcgacaccaggatcttcttcagctgagaaaaggcgaactgggcagcagcctcgtccgacgtcttctcgatgtcacgagcaaggcggccggcgggcatgtagacaaggactgggtggcctgttgccttgtgaaggttgaggaaatagctgcaaccgtaggtgctagaggaaacgacgccgaggaactccacgttaggccagaaaacctgcccgaagtgaagaacgatcttgttctcaactccaaccgtaagttctctgatcgcttcctctttccactctggcagcctcggctcgaatttaatggttttcgctttcaggacacccaacggaacagtgaccacagcagcatccgcaacaaacgtttggccgctgcttacggtaacctctaccctgttcctatggcgaacaatttccacaaccctgaagaacaaagaacaggatcagtgatctaggaatggctggtggaagtgaaaccacaactagtgattaccaaattaacaagaaaaggatagatatgcgtacttatggttgaggcgtatatctaagccttttgcgagagtatttataaccggacgatacccacgaaccatgaggccatggccacctggaagcagcacctcctacatcccgtcaacattatcatgtaataaggcacagtaatctcataatgcgcacgtatactggccagcgacaaaccaaaaaacccatacctgatcccaaccctgtagtgaaattgaatcagcgtcggtggcaaaccaaccctccatacggcacaaataccactgaagaacctcatgagcaatcccttcttgcctgtattgaacacgtagaaagcacagttaaaatgactggaacgtttgcgctgaccagcgcactaggcagaaatcagattagttcaaacctcaagtgcggatttctagccataacaattgcgatggcttttgcgatagacatatcttcattgatttcttccctcaatttgccagt

SEQ ID NO: 106222 - DNA, 2060 bp, Zea Mays
gacaaattcagataatgtatgcatattgtgtgcgttgtgtgcatgcatgcaggtggcaccttcgccctgtactcgctcctgcgccagcacgtcaacttcagcggcaagtcggtgccggtgccggtcacccggctggcgtcggatgtcaacctcaggttccacagcaggaagagtagccagcaaccgaggatgctcgccttcctggaaggcagctccatcgcgcaggcggtcatcacctacctcgtgctggttggaacttgtatggtgatgggtgacggtgccctcactccatccatctcagtcctatcagcggttcaagggatccagtcaagatcttctagcatcaaacaaggccacgttgtcctcctgtgcgtggttatcctagtcatccttttcctgttccaacagtacggcacaagtaaagttggcttcaccttttctcccatcatgctcgtctggttcgcgttgatcgcgtccactggactgtacaacatcatcaagcactatccaccgattctgaaagccatatcgccgcattacatataccttttcttcgcgaggaacaaaagggttggatgggagcaatttggaacagttgttctgtgcataacaggtgtcgaggctatgtttgctgacttgggtcatttcaacaagaaatcaatccaaatggcatactcgtgtctggtctatccatcactgatactcgcatacgctggccaggcagcatttctgatcaagaacccatcgaagctcagcacaacgttctacagcagcgtcccagagccactgttttggccaatgttcgtcgtggccactttggctgccatcgttgcgagccaggcactgatatctgccagcttctccatcgtcaggcagtcggttgctctaggttgctttcctagagttaccatgaagcatacctcaaagaagtacgagggccgagtgtactctccagagatcaactacttcttgatgattgcctgtgtattgatcactgttggcttcaagggtggaccagagattgggcaagcctatggtgttgccgtgatatgggttatgcttatcacaacccatctgatcacagtggtcatggtaataatatggcaggtccattatgcaatagccgggacattttatgccatcttcgctgccatcgaaggtcttatgacgatctcactcctgtataagatcgcacagggtggctgggttccgtttgcgataactgcattcttccttataattacactttcttggacctacgggcgaagcaagaagcacgagtacgaggtgagcaacctgatggacaggcaggatttcatcaagatagtgaatatgagcaatagagtacctggaatatgcatcttctgcacagacctgatgaacggcatcccgcccattgtgcggcactacgtccagcacatgggctgccttcgcgaactgatggtgttcgtcactgtgaggcacctacctgtgacgtctgtgctacctgaagagcgcttcctcttcgacaggctggagccttttggtgtctacaggtgcatagtccagtatggttacatggacacccagaacatggaggaccacgagtacgttgtatcgatcattgcatccctcaaggaaattgctcagagcggtgatgagatcctgatgatggattctgctctagcgaacgggacgacctttgtgcttggaagggtcatcttaaacatgagccctgagcgggggaactgcttcaagcgctttgttatcaacaacctttacaggttcctgcaaaagaacttcaggtccaacatttccaatctgaagatagctcctagcaaaaccttgcaggttggaatgcagtatgagatttgagtagaggggcgttgaaagatgggcatgagattctagaacatgcagatgtgggtcgatagttttgattttttttttttgcaactaatttaggtggcagaaatattatattgtataagcaagtaatttgtaaatagtgcaagtaatataattacataaaagatagaacaactgggtaaatatttgttggatcagttggaacaaaaaaa

SEQ ID NO: 106223 - DNA, 372 bp, Zea Mays
atgccttccatcgtgtctcggcgctcccatcatcctggatcacttgagctgctgcacgatccgttctcctttcgagtcagcacagcagcacagcgagcttcgattcagcagccacagaaggcccacttcttccgtttgggcggcgtgtactggttgccgtcgccgaagtcgggcctgtacccgccgtcgccgccgccgttcctgaaggccggcggaatgcctgcgcgcgcgttcccagccccagggccggtggtggtcttcttgtcgtcgcgggccttctggaatatgacggtgaagccctcggacgtggccggattcttcacgtcccactccccaaacttgggcagcggatgcccgtgccccttgttgtcc

SEQ ID NO: 106224 - DNA, 3079 bp, Zea Mays
ccctgcctctcctccatctcagcctcgcgatcgaaccctcgccctcttgcttcccttcccccacctccgcctccgcgccgttccgtcctcccactcctcatctcgcgattggcaaattctagggtttcgcggcggccacccggatccagctcggcttcgcgagcgcctctaaagcttcaggtcacgagagggcgctttgctctctccctgtcccgccctcaccgcggccgccgccacgacgacgacgacctgcggtgcgcctgtgcctgggttcggatcgtccggcgcctctccgttggccactggataccagctcatgatgtggaaatctcagctctaaatccgcttgggttgtgatatcgtgacagtgtgggtactgacataactggcactgtgcaagatgttttggcatgtgccgggactctccgctgcatcaccggttgatactattttggacaaggaaaattttaagttggaatgtcttcttgatgaggatgaaataattcaggagtgcaaagcactgaatacccgcttaatcaattttttgcgggacaaggttcaagtggaacaattactccgctacattgtagaggaggctcctgaagatgcagaaaagaaaaggatatttagatttccgtttatagcttgtgaaatatttacatgtgaagtggatgtcatcatgaagacattagtggaggatgaagatcttatgaatttacttttctccttcctgaaacctgaccacccccatgggacattgtcggctggttactttgccaaggtagtgatttgcttgatgatcaggaagacactcccactagttagttatgtgcagggccatcctgaaatagttagccaacttgtcgatcttattgggattacttctatcatggaggttttgattcgcttaatcggtgcagatgaaactatgtattcaagctatgcagattctatgcaatggttagatgacatacaagtccttgagatgattgttgacaagttcagcacatcagattctcctgaggttcatgcaaatgctgctgaaatcctttgtgcagtaactagatatgcccctccagcacttgctgcaaagatttccagtccaagctttgtggggagattatttcaacatgcttttgaagattcaaggccaaaatcggtgctggtccactcattatcagtgtgcatatcgttgttagatcctaagagacttgtatcggcttcctatcaggctttccgtagtcagttgagccatggaacacttgtcaccgcaagtccagagacagtaaatggcatgctggatagcctaggggatttattgaagctgctggatgtttcatctgctgaaaatgttctgccaacaacatacggtagcttacaacctccactcgggaaacatcgcttgaagattgttgagttcatctctgttcttctatcaattggtagtgcagctgccgaaacacgactgattcaactaggagcaatcaagcatgctatagatctattttttgagtacccgtttaacaacttcttgcaccaccatgtcgagaatatcatcggctcatgtttggagagtaagcaggatcgactgattggccatgtccttgatgactgtaaacttgttacaagaattctggaagcagagaagaactctgctctgtcgtcagatttaactaagcatactatgtcttcagagggaagatctcccccaaggataggaattgttggtcatatgacacggatagctaacaggctccttcagctggtcaacacaaacatcatggttcaatcacatttgcagcaaaattctgattggattgagtggcatgccagtaccctgacgaagcgtaatgcattagaaaatgtttaccagtgggcttgcggtcgaccaacatcactgcaggatcgtggtagggatagcgatgatgaagacttccgagatagggactacgatgtggctgcacttgctagcaatttaagccaagcatttaaatatggtatttacagtagtgaggatattgacgaggctcaagcatcacttgagcgggatgatgaggatgtatattttgatgatgaatctgcagaggttgtaatctcctcccttcgccttggagacgaccaagaaagtggttcgctctttacaaattccaattggtttgcatttgacgaggacaaggcactgaatgatggtttggttagctcagaagcatccccatctccaaattcggaaatatccgcactaaaagaggatgatgaacatgatgaagtcattcttggcgaaattatagatgaaataaaaggttctgaaccaactctaccagtcttcaacaaagatgcaaacaaagaatctggttccaccggcttggcaaatggtaccgttgacaaattcgaagatgatatcagaccaccaactccggatgtaaaagagagtcaacctgagtttgttgaatggaaggaggaagaagctgaacctggtgatattgccgagaaggataccgcagttcctgatattgaggttgaaaatgagaagcagctggattccatggatgatgttatgctttgcgatgcaaagttaggagaggaaaagaagagtgatgagcttggcatatgaagtgaatttcagaggagcagaatttcagaggaagcacttggaactggtcagaccattattgcacaagcagtctgaggatcatatgtgagttctctgttgtacacttgaaggtggtcccggaccgtgcatctgatggagcctcaaagattcaacttgtctgatggatagatgtgtaacatgatttggtggtggttattgttatgtgcctatagtctgggctacatcgagacgcaaaattctgaaagtagtcttccttgtcctttcggggttctagttgtgacccaggtaaataactgataggtgaataggtgatgctatttgtacgaaaattttggctcaaatgcagtcgattgttggcatatttagaacttgtttcaaatttgtgtaaactaaagaatatagtttctatttttttccaggtacttaatgcataattcatttgttataatataaacgacctttggtaca

SEQ ID NO: 106225 - DNA, 758 bp, Zea Mays
aacatgttcaactgcatgtctcgtttaagtctgatttgtaatcctgctatgctactttaacctctgctgtatttctattatgaaagtaatagaaatggggaacccccttataaaagaaatgatcattctcgtattgttcatttcaacatgtaacggagattgtatttcctcagattcaaaaaagaagaggtgaagattgaagcttgggagggtcgtcaaagagcaaaaattgaatatgaaatgagaagaatagaggaatttgctgagagaatgagaagtgaggccatggaaaagatggccgaaaagctagagatgacgcgccgcatagccgaagagaaacgagcttcggccaacgccaaaatgaaccagcaagcagctatagcggttcagaaggccgagaagattcgccaaacgggacgagtcccaggatcgagtatcctacgctgcggtggctgcttctgtggaccgtagtagatcatacataggattcgacagctagtatgttggtctgggatatatagtggtgggaaacctgaactccaccctctacaagtcagcattccttgattttagcatgaaaaaaggaatgtctctaaggtattcagatgcaaacgtgttcttgtttgtcatgtatgtaaattattccaatgattttaacttgggtcggtgtacaaggtaaccagctgttcgttggttaacgaagaagtcacgaatcgttcaaacattatgtttattattatgcctaaaattctaaccgt

SEQ ID NO: 106226 - DNA, 2039 bp, Zea Mays
ctgctatctggtcactggtattttgaccactggtgcccactgcccagacccggtgctcgccttctcccctcccctcaatctccagcctctctttctcgctcgctggccacccgccgcaccctccccatcaggccagcagcgaggaagaatggagtacgagaggattcatcagaaagcccagcctggtgctctttctccaacaaagctgaggatgaagatcctgggagcccacaatcgagttagagtcatcaccagcaactcgtcatcgcggacgtcgcctgcgaaaaccatcgaggcttcacaggcgcagaacaggctactagtttgtgatgttcttgaagaagacagcgcagatagcacaaaacacccgtcggcaactaacaaaaccgaagccgtagaaaaggttcaaaaggatccagcagtggacatcagtcaagtgcagaacgcttccaccagttcggctgctaagccagcgacaggcagctcgagtatgatacagatacacccactgagacccgcggaagaagacagcactaccgaatgcgacagtggtctcgacaacgccagcactagcagcttcgagttccacggagtggagaaggcggcggcgacgcagaatccagcagccgggtacttgtccaggcagacttccatttcctccaagtggaatgacgcagagaaatggatcgtgagccgccagaatgtcagtcagaagaacaacgtcgccaagggcgcgttgcagaaccagacagtaaaccagatgagctccgccgcagccaggggcgccgttgtgcccaaaatctctgctcgtcccgtgcagaaaatgaagagagtgaatccagctttgtctgctccgcgcagcatactggagaggttgtccttcgcttcgtatcagcctaagttggttaggcatgcagatgtctgtccagttagtaacgctggtgctaactcagagcatcacaaggcaactgatactggttcatcgattgaagtgaagccctgcaacgatacgaatgatattccaacagtccagtcgtcggtgtccgtgagagatgtgggcacagagatgactccaatacctagccaggaaccttcaagaactggaactccactagggtcaaggacaccaactcgaagccctaactgttcagtaccgtcaacacctgtaggggggaggtcaatagcatctcctcctggagaagactgcacagacgatggcccatttttccacaggaaatgcggcgtacatgcaaatgaattgtcagatactgagacgaggcttaaaacaaggcaagaaatcgctgcgcttggcatacagctaggaaagatgaacattgctacgtgggccagcaaagaggagctagagctagtctctgcggcaccgagcatcgctgatttggagcgcatcaggaaggaatatgctgctcgtgctgcatcgtatgaggaggcagaaaatactaaacatacagcaagattcaaaaaagaagaggtgaagattgaagcttgggagggtcgtcaaagagcaaaaattgaatatgaaatgagaagaatagaggaatttgctgagagaatgagaagtgaggccatggaaaagatggccgaaaagctagagatgacgcgccgcatagccgaagagaaacgagcttcggccaacgccaaaatgaaccagcaagcagctatagcggttcagaaggccgagaagattcgccaaacgggacgagtcccaggatcgagtatcctacgctgcggtggctgcttctgtggaccgtagtagatcatacataggattcgacagctagtatgttggtctgggatatatagtggtgggaaacctgaactccaccctctacaagtcagcattccttgattttagcatgaaaaaaggaatgtctctaaggtattcagatgcaaacgtgttcttgtttgtcatgtatgtaaattattccaatgattttaacttgggtcggtgtacaaggtaaccagctgttcgttggttaacgaagaagtcacgaatcgttcaaacattatgtttattatta

SEQ ID NO: 106227 - DNA, 2265 bp, Zea Mays
cctacttgtctagtagcaactagcagtaggcactaggcagtagactttagctctgatgatgaatggaggggtaaaaaaacgcgaggcaggcaggccatcgtgttgctagatctcagctgtaccagtgcctcttcctgctatctggtcactggtattttgaccactggtgcccactgcccagacccggtgctcgccttctcccctcccctcaatctccagcctctctttctcgctcgctggccacccgccgcaccctccccatcaggccagcagcgaggaagaatggagtacgagaggattcatcagaaagcccagcctggtgctctttctccaacaaagctgaggatgaagatcctgggagcccacaatcgagttagagtcatcaccagcaactcgtcatcgcggacgtcgcctgcgaaaaccatcgaggcttcacaggcgcagaacaggctactagtttgtgatgttcttgaagaagacagcgcagatagcacaaaacacccgtcggcaactaacaaaaccgaagccgtagaaaaggttcaaaaggatccagcagtggacatcagtcaagtgcagaacgcttccaccagttcggctgctaagccagcgacaggcagctcgagtatgatacagatacacccactgagacccgcggaagaagacagcactaccgaatgcgacagtggtctcgacaacgccagcactagcagcttcgagttccacggagtggagaaggcggcggcgacgcagaatccagcagccgggtacttgtccaggcagacttccatttcctccaagtggaatgacgcagagaaatggatcgtgagccgccagaatgtcagtcagaagaacaacgtcgccaagggcgcgttgcagaaccagacagtaaaccagatgagctccgccgcagccaggggcgccgttgtgcccaaaatctctgctcgtcccgtgcagaaaatgaagagagtgaatccagctttgtctgctccgcgcagcatactggagaggttgtccttcgcttcgtatcagcctaagttggttaggcatgcagatgtctgtccagttagtaacgctggtgctaactcagagcatcacaaggcaactgatactggttcatcgattgaagtgaagccctgcaacgatacgaatgatattccaacagtccagtcgtcggtgtccgtgagagatgtgggcacagagatgactccaatacctagccaggaaccttcaagaactggaactccactagggtcaaggacaccaactcgaagccctaactgttcagtaccgtcaacacctgtaggggggaggtcaatagcatctcctcctggagaagactgcacagacgatggcccatttttccacaggaaatgcggcgtacatgcaaatgaattgtcagatactgagacgaggcttaaaacaaggcaagaaatcgctgcgcttggcatacagctaggaaagatgaacattgctacgtgggccagcaaagaggagctagagctagtctctgcggcaccgagcatcgctgatttggagcgcatcaggaaggaatatgctgctcgtgctgcatcgtatgaggaggcagaaaatactaaacatacagcaaggtattattattctccgaaatatttgatcatttctgtttgttagtccaggccttctgaatcaggcctgcgtgcctggctggaaacactgtttgttagtccagtaggttgcgcaacatgttcaactgcatgtctcgtttaagtctgatttgtaatcctgctatgctactttaacctctgctgtatttctattatgaaagtaatagaaatggggaacccccttataaaagaaatgatcattctcgtattgttcatttcaacatgtaacggagattgtatttcctcagattcaaaaaagaagaggtgaagattgaagcttgggagggtcgtcaaagagcaaaaattgaatatgaaatgagaagaatagaggtacatacttggttggctctcctttttgaaaatgaactgaacctggcttttctctgcctgaaattcttaccaaatttcgaatgcaataatctttcataccatgttttgaatgcagcaataccgaatgctacgatatttagaatttaacaatttggacgtggcagtaatgtcgaaaaacactttgtggcaggaatttgctgagagaatgagaagtgaggccatggaaaagatggccgaaaagctagagatgacgcgccgcatagccgaagagaaacgagcttcggccaacgcc

SEQ ID NO: 106228 - DNA, 1293 bp, Zea Mays
agatagaacttgtgcaccagggatggtttctgcacccgatacgctgcaaacaaaacgagagcgaagcgaagaagcgcgtcttccacggttcgtctcgtccacttgcttgcctcctcctcccctctcccgcgggtctcctccatcctccgcctctcttccccacgccgccacagcttcccgcactccaaggcgcggcaccaaccaaccgcacccccgcgggagctggcgtgagcaggtctgcgtgcgtgtcgctatcttccccccatggcgtgggtgatgcaccggtcgagctcggacggcgggtcgagcagcgggtggtcggacgccgcggcggccgtggtggcggcggcggaggagcgggccgggtgggaggtgcggccgagcgggatggtcgtgcaggcgcgggacgacgcggcggggtccggcggcgccccgccgaggccgccgccgccgccggagatcaaggtgcgcgtcaagtacggcggcgcgcggcacgaggtgtccgtgtcccccattgccacgttcgggcagctgaagaagctgctggcgccgaggacggggctgcagccggcggaccagcagctgagctaccggggcagggcgcggggcaacgccgagtacctggacgcatgcggcgtcaagaacaagtccaaggtggcgctcgccgaggaccccgccagcgtcgagcgccgctacatcgagcgccagaggaacgccacggccgagagcgccaaccgcgccatcggcgccgtcgcgctcgaggtggacaagctcgccgatcaggtaactagcatcgagaaatcgatttccagagggaacaaggtgccggaggtgcagatcacgacgctgatcgagctgctgatgcggcacgcggtgaagctggagagcatacctgcggccggggactcctcttcgcagaagaacattcaggcgaagcgggtgcagaagtgcgtggagacgctggacgtgctcaaggtgtccaacgcgcggctgcaggcggtggtggtgacgaccaaatgggagacgttcgacgcggcggccaccacgacgaagtgggagctcttcgactgagatctgtgcagtgcagcagggcactgcagccaagaggatacgtgtatacgtgcatggtgttttatttccttgtctctcccggttttatttggtgcacattattgaattcgcgcgttgtaatcaatcatgtacggtgagacgacgacgctaggttagaacatgctataagggccgatcgaaacgaccccactgttaaccgtttgtaatcacagcaccactccc

SEQ ID NO: 106229 - DNA, 893 bp, Zea Mays
ttattgcttgctcagccgggccccgtttctaacagagatctttggcaacgaccgacagctcggagcgagtctcagaagcgatggcgtccaagaggctgctgctggcggcgctgtgcgtggtggcggcggcgctgctcgccgtgcggtcggaggcccacggcctggaggacttcgcaagcagcgacgcgacgccggagatgcagaccttcttcaagcccgaggccgcggcgctcccggaggccctggacgcgtcctccatgcccgccgccaccatggccgcgaagccggaggccacgtcgatcccgaccaccaccaccggcaccacggcggcggcggcgggcacctccgccgcggcaggcactactgctgcgtcgccgccgcgcaggtccgtgtccgtggccgccggcgtggcctgcggcgtggctgccgtggccgtggtcggcatcgcggccgccgtggcgtacgtggtgcgcggcaggcgcagcagggaggtgcagctcggctcctccccgtgagcacgcgcccagcgccccggcccgctttacagacaggccgtcatcgccattaggatctggttaagcgcgtcgtctagctctgcgatttgtgtggcttttgggttagtggttgaattctttttttcgcgtggggttgtcggtgaagatcacgctaccgggtacggaccagcagtggtgcatgtaacataaataacgctggtggtattagcgtcattgttgttgtggcctgtgtgtatggtgtctagacctttgctatatattttgatttcaggattttgttgttgtattgtatgttggcatgttgccgtgtgagctactagctagctccggacgcctgaactctgtaccttgcttggtggagcctacctaccatgaaca

SEQ ID NO: 106230 - DNA, 595 bp, Zea Mays
ccaggctccaccacgcacagacaacgagctctgcccccacaggccagcaggcagatagatcctcaccattttctctttcactcgcatcggatctgctctcccataatacactctcggggtctcggttgccaggaatcactggagccgagcgagcgtgtataaaaggccggcgcttggtcctccgaagcctgaaccttgaagcgccccgtagtgcagtgcagtgcagcagtgtgctacctcctcagtcctctcactccatcacaaacgctagtcttcctctaaaggtatgtgctagtgttatattactcaaagaaagcaacatttccgttggagctctagtcctaaaaccctttgtggaattgtgaactgggaactgaagctgggcaaagtttgctttttgcctaagcttctttcttaatcagatctagcatcgttgttgcatcggtaaaacctcggtctcgtttgacctgagagtccagttcttgccttacgattgggtgaagtgaaccatctggatcactctgtccgcagttctcgagctggtaatctttagtcaaatgcaagaaacttggagctctggatcttgacgaaagtg

SEQ ID NO: 106231 - DNA, 2135 bp, Zea Mays
ttttttaacgcaactggctggttttcgagataacagtgggggttaagcatggtaaccgaggtgacagtaaaagcgttagaaaaagggtaaaggtaacttgcgagccatttggcactcgagcaccaccccccgggcttatgcacatgggtctccctccctctcccgtccatatccacatatataaatacgccttcccccccccaccgctccaggcctcgcccccccgtgccctcccccgtcccactgacggtggcccccaccgcccggccccgctcgtcggcgagcgccccttccccacgctgcaccgctgtcctgggcttcctgcccaagagatccgcccgactccggtcgctcggaggccggcgagccgcgcgtgctgggcgccgggatgcaggcggccggcgccagccggtggcccggatctcgctggcggcgcgtctcggcgagaggagacctctgaactttctgacctcaagtcctcgattttgtcatagatcagacaaataatggaagagttacaagattgcaactcaagaagcctggttgcccttccgggctctttggttctgcgtctctttaggctgtttggccagcaggatcagagttcatggcagaagtacatactagcttactttctgttggtcaggaatgagtacttctctggggagtcgaagaaacactcagatgtgttctgtgatatttcagaattagatttctttctatatgctacagatttggatagtgaagaacttgaactgaaggagcagaaacccattacgaaggctcaatcaggaggtgattcaagtggcaacagatcgaatgattgctacttccccggccttcatgatgatctgtctcaagactgccttgcttgggcaagcagatcagactacccttccctttcttgtctgaacaaaagattcaatttgttaattaacagtggatatttgtacagactgcgaaggaaatatgacattgttgagcactgggtctatcttgcttgtagcttgatgccctgggaagcatttgatccttcacgaaagcgctggatgaggctaccgagaatgccatgcgacgagtgcttctcctgtgcagacaaggaatcacttgccgtcggaacacagctgcttgtcttcggccgtgaatatactggccttgctatttggatgtacaacttactgactcgcagttggtccccatgcactccaatgaatctgccccgctgcctttttgcctcgggaagctcaggtgagattgctattgttgctggtggatgtgataagaatggacaggtgctgaggtctgctgaattgtacaattcagagattgggcactgggagactatcccagacatgaacctgcccaggcggctctcttcaggtttcttcatggatggcaagttttatgtcattgggggcgtgtccagtcagagggattcattaacttgtggagaggaatataaccttgaaacaaggacctggagaagaatacttgatatgtaccctggtggaaccagtgcatctcaatcgcctcctcttgttgctgttgtgaataaccagctctacgccgctgaccagtcgacaaatgtggtcaagaagtatgacaaggcaaacaatgcctggaacatactgaagccattgcctgttagagctgactcatccaatggttggggtctagctttcaaagcttgtggcgatcgattgctggtaatcgggggccatagaggacctcgtggcgaggtaatattgctgcattcctggtgccctgaaggtggggaagatggtgctgactgggaggttctctcggtgaaggaacgtgcaggcgtcttcgtttacaactgtgcaataatggggtgctgagttacctttgcttcagtacatgccactggtttagcaagccaaccatttcttgctgccatttagctgccctttataatgacttgtaattcagaaatgacaccccctcccctcatttcgcggagctctcaattgattgaatgttttgtagagagcaaagagcattcagttcagtttacctggaactacttttttttcttcttctgttaaactcgttcagaattctttgttcttgtccagtacgaattttatgcagtattcgttattcatcatttttgc

SEQ ID NO: 106232 - DNA, 2083 bp, Zea Mays
ttttttaacgcaactggctggttttcgagataacagtgggggttaagcatggtaaccgaggtgacagtaaaagcgttagaaaaagggtaaaggtaacttgcgagccatttggcactcgagcaccaccccccgggcttatgcacatgggtctccctccctctcccgtccatatccacatatataaatacgccttcccccccccaccgctccaggcctcgcccccccgtgccctcccccgtcccactgacggtggcccccaccgcccggccccgctcgtcggcgagcgccccttccccacgctgcaccgctgtcctgggcttcctgcccaagagatccgcccgactccggtcgctcggaggccggcgagccgcgcgtgctgggcgccgggatgcaggcggccggcgccagccggtggcccggatctcgctggcggcgcgtctcggcgagacaaataatggaagagttacaagattgcaactcaagaagcctggttgcccttccgggctctttggttctgcgtctctttaggctgtttggccagcaggatcagagttcatggcagaagtacatactagcttactttctgttggtcaggaatgagtacttctctggggagtcgaagaaacactcagatgtgttctgtgatatttcagaattagatttctttctatatgctacagatttggatagtgaagaacttgaactgaaggagcagaaacccattacgaaggctcaatcaggaggtgattcaagtggcaacagatcgaatgattgctacttccccggccttcatgatgatctgtctcaagactgccttgcttgggcaagcagatcagactacccttccctttcttgtctgaacaaaagattcaatttgttaattaacagtggatatttgtacagactgcgaaggaaatatgacattgttgagcactgggtctatcttgcttgtagcttgatgccctgggaagcatttgatccttcacgaaagcgctggatgaggctaccgagaatgccatgcgacgagtgcttctcctgtgcagacaaggaatcacttgccgtcggaacacagctgcttgtcttcggccgtgaatatactggccttgctatttggatgtacaacttactgactcgcagttggtccccatgcactccaatgaatctgccccgctgcctttttgcctcgggaagctcaggtgagattgctattgttgctggtggatgtgataagaatggacaggtgctgaggtctgctgaattgtacaattcagagattgggcactgggagactatcccagacatgaacctgcccaggcggctctcttcaggtttcttcatggatggcaagttttatgtcattgggggcgtgtccagtcagagggattcattaacttgtggagaggaatataaccttgaaacaaggacctggagaagaatacttgatatgtaccctggtggaaccagtgcatctcaatcgcctcctcttgttgctgttgtgaataaccagctctacgccgctgaccagtcgacaaatgtggtcaagaagtatgacaaggcaaacaatgcctggaacatactgaagccattgcctgttagagctgactcatccaatggttggggtctagctttcaaagcttgtggcgatcgattgctggtaatcgggggccatagaggacctcgtggcgaggtaatattgctgcattcctggtgccctgaaggtggggaagatggtgctgactgggaggttctctcggtgaaggaacgtgcaggcgtcttcgtttacaactgtgcaataatggggtgctgagttacctttgcttcagtacatgccactggtttagcaagccaaccatttcttgctgccatttagctgccctttataatgacttgtaattcagaaatgacaccccctcccctcatttcgcggagctctcaattgattgaatgttttgtagagagcaaagagcattcagttcagtttacctggaactacttttttttcttcttctgttaaactcgttcagaattctttgttcttgtccagtacgaattttatgcagtattcgttattcatcatttttgc

SEQ ID NO: 106233 - DNA, 2016 bp, Zea Mays
gattgatatgatattttagctggctgaattaggagtctgccgtgcagcagtattcttgccgccttggcgatactggtatcaacaacgaaagaagagtagttttacctcaaacagaatttctacaagggagtatctttgagatttttagcactgtagtttatgattttagtagattctggatactgcaaagcttcagatcagcaatgaagatattccttagcaagagttcaaatatgaagttgaatgtctcactgtggtctagtatctgccatttgtgtgaaaattatcaaagaacatcatgcatttcctgatagtttgtcccttgattttttccagaggagacctctgaactttctgacctcaagtcctcgattttgtcatagatcagacaaataatggaagagttacaagattgcaactcaagaagcctggttgcccttccgggctctttggttctgcgtctctttaggctgtttggccagcaggatcagagttcatggcagaagtacatactagcttactttctgttggtcaggaatgagtacttctctggggagtcgaagaaacactcagatgtgttctgtgatatttcagaattagatttctttctatatgctacagatttggatagtgaagaacttgaactgaaggagcagaaacccattacgaaggctcaatcaggaggtgattcaagtggcaacagatcgaatgattgctacttccccggccttcatgatgatctgtctcaagactgccttgcttgggcaagcagatcagactacccttccctttcttgtctgaacaaaagattcaatttgttaattaacagtggatatttgtacagactgcgaaggaaatatgacattgttgagcactgggtctatcttgcttgtagcttgatgccctgggaagcatttgatccttcacgaaagcgctggatgaggctaccgagaatgccatgcgacgagtgcttctcctgtgcagacaaggaatcacttgccgtcggaacacagctgcttgtcttcggccgtgaatatactggccttgctatttggatgtacaacttactgactcgcagttggtccccatgcactccaatgaatctgccccgctgcctttttgcctcgggaagctcaggtgagattgctattgttgctggtggatgtgataagaatggacaggtgctgaggtctgctgaattgtacaattcagagattgggcactgggagactatcccagacatgaacctgcccaggcggctctcttcaggtttcttcatggatggcaagttttatgtcattgggggcgtgtccagtcagagggattcattaacttgtggagaggaatataaccttgaaacaaggacctggagaagaatacttgatatgtaccctggtggaaccagtgcatctcaatcgcctcctcttgttgctgttgtgaataaccagctctacgccgctgaccagtcgacaaatgtggtcaagaagtatgacaaggcaaacaatgcctggaacatactgaagccattgcctgttagagctgactcatccaatggttggggtctagctttcaaagcttgtggcgatcgattgctggtaatcgggggccatagaggacctcgtggcgaggtaatattgctgcattcctggtgccctgaaggtggggaagatggtgctgactgggaggttctctcggtgaaggaacgtgcaggcgtcttcgtttacaactgtgcaataatggggtgctgagttacctttgcttcagtacatgccactggtttagcaagccaaccatttcttgctgccatttagctgccctttataatgacttgtaattcagaaatgacaccccctcccctcatttcgcggagctctcaattgattgaatgttttgtagagagcaaagagcattcagttcagtttacctggaactacttttttttcttcttctgttaaactcgttcagaattctttgttcttgtccagtacgaattttatgcagtattcgttattcatc

SEQ ID NO: 106234 - DNA, 1986 bp, Zea Mays
ttttttaacgcaactggctggttttcgagataacagtgggggttaagcatggtaaccgaggtgacagtaaaagcgttagaaaaagggtaaaggtaacttgcgagccatttggcactcgagcaccaccccccgggcttatgcacatgggtctccctccctctcccgtccatatccacatatataaatacgccttcccccccccaccgctccaggcctcgcccccccgtgccctcccccgtcccactgacggtggcccccaccgcccggccccgctcgtcggcgagcgccccttccccacgctgcaccgctgtcctgggcttcctgcccaagagatccgcccgactccggtcgctcggaggccggcgagccgcgcgtgctgggcgccgggatgcaggcggccggcgccagccggtggcccggatctcgctggcggcgcgtctcggcgagatcagacaaataatggaagagttacaagattgcaactcaagaagcctggttgcccttccgggctctttggttctgcgtctctttaggctgtttggccagcaggatcagagttcatggcagaagtacatactagcttactttctgttggtcaggaatgagtacttctctggggagtcgaagaaacactcagatgtgttctgtgatatttcagaattagatttctttctatatgctacagatttggatagtgaagaacttgaactgaaggagcagaaacccattacgaaggctcaatcaggaggtgattcaagtggcaacagatcgaatgattgctacttccccggccttcatgatgatctgtctcaagactgccttgcttgggcaagcagatcagactacccttccctttcttgtctgaacaaaagattcaatttgttaattaacagtggatatttgtacagactgcgaaggaaatatgacattgttgagcactgggtctatcttgcttgtagcttgatgccctgggaagcatttgatccttcacgaaagcgctggatgaggctaccgagaatgccatgcgacgagtgcttctcctgtgcagacaaggaatcacttgccgtcggaacacagctgcttgtcttcggccgtgaatatactggccttgctatttggatgtacaacttactgactcgcagttggtccccatgcactccaatgaatctgccccgctgcctttttgcctcgggaagctcaggtgagattgctattgttgctggtggatgtgataagaatggacaggtgctgaggtctgctgaattgtacaattcagagattgggcactgggagactatcccagacatgaacctgcccaggcggctctcttcaggtttcttcatggatggcaagttttatgtcattgggggcgtgtccagtcagagggattcattaacttgtggagaggaatataaccttgaaacaaggacctggagaagaatacttgatatgtaccctggtggaaccagtgcatctcaatcgcctcctcttgttgctgttgtgaataaccagctctacgccgctgaccagtcgacaaatgtggtcaagaagtatgacaaggcaaacaatgcctggaacatactgaagccattgcctgttagagctgactcatccaatggttggggtctagctttcaaagcttgtggcgatcgattgctggtaatcgggggccatagaggacctcgtggcgaggtaatattgctgcattcctggtgccctgaaggtggggaagatggtgctgactgggaggttctctcggtgaaggaacgtgcaggcgtcttcgtttacaactgtgcaataatggggtgctgagttacctttgcttcagtacatgccactggtttagcaagccaaccatttcttgctgccatttagctgccctttataatgacttgtaattcagaaatgacaccccctcccctcatttcgcggagctctcaattgattgaatgttttgtagagagcaaagagcattcagttcagttt

SEQ ID NO: 106235 - DNA, 997 bp, Zea Mays
ttttttaacgcaactggctggttttcgagataacagtgggggttaagcatggtaaccgaggtgacagtaaaagcgttagaaaaagggtaaaggtaacttgcgagccatttggcactcgagcaccaccccccgggcttatgcacatgggtctccctccctctcccgtccatatccacatatataaatacgccttcccccccccaccgctccaggcctcgcccccccgtgccctcccccgtcccactgacggtggcccccaccgcccggccccgctcgtcggcgagcgccccttccccacgctgcaccgctgtcctgggcttcctgcccaagagatccgcccgactccggtcgctcggaggccggcgagccgcgcgtgctgggcgccgggatgcaggcggccggcgccagccggtggcccggatctcgctggcggcgcgtctcggcgaggtgaggcagctcaattctctcgtgctcacctcttccgtttccgttccaaagcggggtgctgtttttttttgttcttgtctgttattgttatcttttcccttttcactcatcggtttcagagtttgtgcaaaccgtagtggcgagctgccaaacaaactttacttttgctggtggcgtagttccatctggtggaggtctgggctctggagacaatggcagtgaattcgtcggggaaaggttcttgtttccttcctcctttgggaggtggagtgggttggagccagagagtccctgatttttttagtgcattttgttgcagagcagccacatggtatgcgctgttttctgctggctgatggcccgatttccagtttgaataggctggtatttttgccggcatctggtaattattcgctagtttactccctgttcgtagagtgaaggcttttggccttttgccttgcgtctgcaacaaataataatgaataatggaatcagcggggcatcatccgtacattttatatattttttcttctgttttgagataatg

SEQ ID NO: 106236 - DNA, 1425 bp, Zea Mays
catatcatgcgcaggggctgaaagcctgaaactgctcaagacgccaccgtcttcctccgcgatcttcagttctctgtctctccctctctctttcctctagctcccaaccaagccaagagtacgtcgtcaagcgcgccgcgcgtgtgtgtgtcagtaggctacagggctcggaggaacgccgtcatgagcttgatcagcatgatggaggcgcggctgccgccggggttccggttccacccgagggacgacgagctcgtgctcgactacctctgccgcaagctctccggcaaaggcggcggcggagcgtacggcggcatcgccatggtcgacgtcgacctcaacaagtgcgagccgtgggatcttccagacgaggcgtgcgtgggcggccgcgagtggtacttcttcagcctgcacgaccgcaagtacgccacggggcagcggaccaaccgcgccacgcgcaccgggtactggaaggccacgggcaaggaccgccccatctccgtctccggccgccgcggggccggcgacaccgccgcgctggtcgggatgcgcaagacgctggtgttctaccagggcagggcgccccgcgggagcaagaccgagtgggtcatgcacgagttccgcgtggacggcccgcccgttgccgaccgccccggctcacctctcctccagctccagctccaggaggattgggtcctgtgcagggtgttctacaagagccgaactgccagcacaagaccagcagcaggccccgacgaggccgggccgctgtccagccagctgatcggcggcctgccgatgccgcgaatggccgcccctgctgacgccgcctacctgtccttcgacgtcacacctgccgctggcggctactaccaccaccaagactccggccccgcggacgcgcgccaccacctgccgccgccgccggcgcagcctttcagcaggagtagcctgtccagcttgcgggacttgctcagcagcatggttgaaggcagcgacgccgccgccgccgttcgggagacggagctccacctgcagctggagggctggaccgaggcggcctacgcgcagcagcagggcggcgccatgccggcgcacccgcagcagacgtggagcccgtttctgagctcgggatgacggcacgcggctgggggctcacgtgtgcgtggcgccctggcgcctggcgggcatcgcgtgcgtagtgaatagtcaacaatttgcttgtctttcttgcaatgtaacgttgacttggttagtgcatgcgatctctgccgtttgttaggcgtagggtaaaaacccacgcagcggataggtggaatgccttggtgattattggtgcagtaacttttgtacagttgattgttgcagaaaattactctctctttgtctgccttctaccaaattttcagtagtccttggaattgt

SEQ ID NO: 106237 - DNA, 1160 bp, Zea Mays
cagagactcgggtacatggtatcgggttacagtccaaacaggaaattctaaggccgatggaagataaggatatgggtacagtcacccagtcctgccatgacgcgaaagcttatagaaatcaggtggcataaatactgtgcagggctaaaggttggtgggtcgaacggaccaggccatcaggttatctagaaagctctcatgctcttccatttctaggctagcctaggtctggaccagttagagtagacacgcaagtatcaatcgattcataagaggaggaggccattgagggagccaagtagaaggcagtcactgcaaacaacgtatcttgttgttagaaagctggtgagcaactttgtcaagcctcaagagctcatggaagatggcagtgctccaagacggtctactccacccacccgcagaagcagatctgccgagttccacaatttttcagaaaggaggagaagggataagatcaacgagaagctgaaagcattacaggagcttcttccaaactgcaacaagaccgacaaagtttcgatgctagacgaagcaatcgactacctaaaatcccttcagctacagcttcagatgctggtcatggggaagggaatgtcaccagtggttcctcttgagctgcagcaatacatgcattacatcacggctgaccctgcccagttgcctccattgcgcccatccggccagcagcaccggcaatttcagataactcaagccaacccccagcgacaatctaacgtcgagtcggatttcttgagccagatgcagaacttgcactcttctgagccgcctcagaactttctcaggccgccgaaattgcaactttatacaccggaacagaggggtggcctacccaacacgagccacaacactggatggatttctgggagttcctcgtataacttcatggagtgatgtgctcctaatgacaaaatttgacacggcaggcgtgcagccttgaactcggaagagatcgttcagtttgggacctgcagcatggttcacctgagagaattccatgaatgtgtagtactagttaactagctagctagttgtgttattaaataaaacgttgtgattgtgatgctgctcattttgctatctgaatcttaccgtccaattctcctccatgttcatgcaaa

SEQ ID NO: 106238 - DNA, 1146 bp, Zea Mays
cagagactcgggtacatggtatcgggttacagtccaaacaggaaattctaaggccgatggaagataaggatatgggtacagtcacccagtcctgccatgacgcgaaagcttatagaaatcaggtggcataaatactgtgcagggctaaaggttggtgggtcgaacggaccaggccatcaggttatctagaaagctctcatgctcttccatttctaggctagcctaggtctggaccagttagagtagacacgcaagtatcaatcgattcataagaggaggaggccattgagggagccaagtagaaggcagtcactgcaaacaacgaaagctggtgagcaactttgtcaagcctcaagagctcatggaagatggcagtgctccaagacggtctactccacccacccgcagaagcagatctgccgagttccacaatttttcagaaaggaggagaagggataagatcaacgagaagctgaaagcattacaggagcttcttccaaactgcaacaagaccgacaaagtttcgatgctagacgaagcaatcgactacctaaaatcccttcagctacagcttcagatgctggtcatggggaagggaatgtcaccagtggttcctcttgagctgcagcaatacatgcattacatcacggctgaccctgcccagttgcctccattgcgcccatccggccagcagcaccggcaatttcagataactcaagccaacccccagcgacaatctaacgtcgagtcggatttcttgagccagatgcagaacttgcactcttctgagccgcctcagaactttctcaggccgccgaaattgcaactttatacaccggaacagaggggtggcctacccaacacgagccacaacactggatggatttctgggagttcctcgtataacttcatggagtgatgtgctcctaatgacaaaatttgacacggcaggcgtgcagccttgaactcggaagagatcgttcagtttgggacctgcagcatggttcacctgagagaattccatgaatgtgtagtactagttaactagctagctagttgtgttattaaataaaacgttgtgattgtgatgctgctcattttgctatctgaatcttaccgtccaattctcctccatgttcatgcaaa

SEQ ID NO: 106239 - DNA, 1142 bp, Zea Mays
cagagactcgggtacatggtatcgggttacagtccaaacaggaaattctaaggccgatggaagataaggatatgggtacagtcacccagtcctgccatgacgcgaaagcttatagaaatcaggtggcataaatactgtgcagggctaaaggttggtgggtcgaacggaccaggccatcaggttatctagaaagctctcatgctcttccatttctaggctagcctaggtctggaccagttagagtagacacgcaagtatcaatcgattcataagaggaggaggccattgagggagccaagtagaaggcagtcactgcaaacaacgctggtgagcaactttgtcaagcctcaagagctcatggaagatggcagtgctccaagacggtctactccacccacccgcagaagcagatctgccgagttccacaatttttcagaaaggaggagaagggataagatcaacgagaagctgaaagcattacaggagcttcttccaaactgcaacaagaccgacaaagtttcgatgctagacgaagcaatcgactacctaaaatcccttcagctacagcttcagatgctggtcatggggaagggaatgtcaccagtggttcctcttgagctgcagcaatacatgcattacatcacggctgaccctgcccagttgcctccattgcgcccatccggccagcagcaccggcaatttcagataactcaagccaacccccagcgacaatctaacgtcgagtcggatttcttgagccagatgcagaacttgcactcttctgagccgcctcagaactttctcaggccgccgaaattgcaactttatacaccggaacagaggggtggcctacccaacacgagccacaacactggatggatttctgggagttcctcgtataacttcatggagtgatgtgctcctaatgacaaaatttgacacggcaggcgtgcagccttgaactcggaagagatcgttcagtttgggacctgcagcatggttcacctgagagaattccatgaatgtgtagtactagttaactagctagctagttgtgttattaaataaaacgttgtgattgtgatgctgctcattttgctatctgaatcttaccgtccaattctcctccatgttcatgcaaa

SEQ ID NO: 106240 - DNA, 459 bp, Zea Mays
atgtcccagtcccagatcgaggcgtacacacgccgggcgggggcggccgtggcgctcgccgcggcgtccgcgctcacgacgggcttccccgcgctcgaaccgcgcgcgcatgtcgtgctggccctgcacgccatcctgctgctcggctgcgctgcggtgctgctctccccggcgcacggagacggaggcccagaggctgcccgggggacgacggtgctgggatcgctgcggtggctcggcttcgccgggatggcgctcagcgcgctccacgtggacgcggaggaggcgccgcggggcacggtcagagatctcctcctcttcctcgtgttcttggcaggagtttggggagtctacctgtccatggtcaggggaaggggggaaggggtgccccggccccgcaaccgcggctggcggtggaagaagatgctaacggcgaggaggccaacgccatgcccatga

SEQ ID NO: 106241 - DNA, 1191 bp, Zea Mays
gcaaatgttgttcttcctagccaactgtatatactctgctaacactgctatgacaggtactaccacaacataacgtcaaacacattgacagttcttgaggcaatggcagcacataatgtaaatactctgatttactcgagtacgtgtgcaacctatggtgaacctgatacaatgccgattgtagaaacaactcctcagaatcctatcaatccatatggtaaggcaaagaagatggcggaggacatcatcttagattttacaaaatcaaagaagcaatcaaatatggctgtcatgatcttaagatacttcaacgtgattggatcagacccagagggacggctaggagaagctccaaggccagagctacgcgagcatggacggatatccggtgcttgctttgatgcagctttgggaatcattccagggctaaaggttcgtggaaccgattactccactgcagatggaacttgcgttagagactacatcgatgtcacagatcttgtagatgctcacgtaaaagctcttggtaaagctcagccaggcaaagttggaatctacaatgtcggaacaggccaaggtagatcagtgactgagtttgtagaagcttgcaagaaggcaacaggagcttctatcaaggtcgaatatcttgcacgtagacccggagattatgccgaggtatacagcgatccgtcgaaaatccacatggaactcaactggacagcccagtacactgatcttggccaaagcctcgcccaggcgtggaaatggcagaaagcgcacccgaacggatatggaccagcctgattcagagttcaaagattgagagagactcgtcacgcagatccaaagggtccatgtgcagtcatgtagccttcagacagttggttcttcatcaccatagaaagatagcaaagagcaacagaagagtcctgattcttttattgcagcgctcgaagaaggaaaaaatatcacagagaaccccctacctgctccttgattagtttcaaatatatatatataggtcctcgttgacattttaatataatttgatgtgtgctgaggcgctatataataacacaaacgaaattttgttgtagacagggtagatcgatctcgtgtatcaacttttgtggtggtagaatgaaaggatataaataagttgatgtaagtttttgtttccaaacttgtttg

SEQ ID NO: 106242 - DNA, 1932 bp, Zea Mays
cgcgccccacccggagacctgcacctgcacctgcctgcctccgtctcctcctccttcagttgttgccaccgcccttccctcccttcctctccgcgtcgctcgccgtcccatctttggcctggacacctggcctgcccccccttcgcggacgcgccgggtcgccggccgaatccgccctcccgccgctgccaacgtcgatctgcgcccgcccgcccgcccgccaagtgagattcaaaggtaggacgacgggggggtcgagttcttgtcggtttcattcctggccgccgacttcacatgtcaacaaccccaaggagcagaagccagggtagtaggaccactaggccgtggatcttgtcagggatggactttgctggttccagacggaagcctaatctcacggggaagattgccgtggctgctgccctcacggtcatgtgcataatcgtgttgaaacagtcccctagtttcagcggtaccagcgtgttctctcgccatgaaactggggtgacccatgtgttagtaacagggggtgctgggtatattggctcacatgctactcttcgtctccttagtgacaagtaccgagttaccattgtggataacctatccagagggaacattggagctgttagagttcttcaacggttatttccagaacccggaaggcttcaatttatttatgctgatttaggcgatgccaaagctgtgaacaaaatattttcggagaacgcatttgatgctgttatgcactttgctgctgttgcttatgttggtgagagcacaatggagccactcaggtactaccacaacataacgtcaaacacattgacagttcttgaggcaatggcagcacataatgtaaatactctgatttactcgagtacgtgtgcaacctatggtgaacctgatacaatgccgattgtagaaacaactcctcagaatcctatcaatccatatggtaaggcaaagaagatggcggaggacatcatcttagattttacaaaatcaaagaagcaatcaaatatggctgtcatgatcttaagatacttcaacgtgattggatcagacccagagggacggctaggagaagctccaaggccagagctacgcgagcatggacggatatccggtgcttgctttgatgcagctttgggaatcattccagggctaaaggttcgtggaaccgattactccactgcagatggaacttgcgttagagactacatcgatgtcacagatcttgtagatgctcacgtaaaagctcttggtaaagctcagccaggcaaagttggaatctacaatgtcggaacaggccaaggtagatcagtgactgagtttgtagaagcttgcaagaaggcaacaggagcttctatcaaggtcgaatatcttgcacgtagacccggagattatgccgaggtatacagcgatccgtcgaaaatccacatggaactcaactggacagcccagtacactgatcttggccaaagcctcgcccaggcgtggaaatggcagaaagcgcacccgaacggatatggaccagcctgattcagagttcaaagattgagagagactcgtcacgcagatccaaagggtccatgtgcagtcatgtagccttcagacagttggttcttcatcaccatagaaagatagcaaagagcaacagaagagtcctgattcttttattgcagcgctcgaagaaggaaaaaatatcacagagaaccccctacctgctccttgattagtttcaaatatatatatataggtcctcgttgacattttaatataatttgatgtgtgctgaggcgctatataataacacaaacgaaattttgttgtagacagggtagatcgatctcgtgtatcaacttttgtggtggtagaatgaaaggatataaataagttgatgtaagtttttgtttccaaacttgtttg

SEQ ID NO: 106243 - DNA, 872 bp, Zea Mays
cgcgccccacccggagacctgcacctgcacctgcctgcctccgtctcctcctccttcagttgttgccaccgcccttccctcccttcctctccgcgtcgctcgccgtcccatctttggcctggacacctggcctgcccccccttcgcggacgcgccgggtcgccggccgaatccgccctcccgccgctgccaacgtcgatctgcgcccgcccgcccgcccgccaagtgagattcaaaggtaggacgacgggggggtcgagttcttgtcggtttcattcctggccgccgacttcacatgtcaacaaccccaaggagcagaagccagggtagtaggaccactaggccgtggatcttgtcagggatggactttgctggttccagacggaagcctaatctcacggggaagattgccgtggctgctgccctcacggtcatgtgcataatcgtgttgaaacagtcccctagtttcagcggtaccagcgtggtacgtgcttgaatctctccacaacaactacccatgtcactgccgcttgctgttgagttggcacgacctgtcattattccttcttccagacgacttaagtactctgcttagtttccatggaacatcaacgcgacgctttaatgtttgctgttgtgacttactgctatgtttatgctgttgtgccaggttcatttctgatacatttacgctattatgccagggttattttactgatacatatatgcatcgttcgttcttgatagtcacaaactcacaattccggcacggttgtacagttccagcaatttcctggaagctgttcaaatcatttgcctgcagttctttattactagtttctttaattcttttcggctggaggcatttgttga

SEQ ID NO: 106244 - DNA, 113 bp, Zea Mays
tttgaaaatgcataaatcacgatggtctcatagggcacttgttttgttcacagtatataaaaatataaagtacaacgatattttgccaatattgttgcaatcatacacgattt

SEQ ID NO: 106245 - DNA, 1373 bp, Zea Mays
acaccacccaaggcccaatagagtccacgcgccctcatctcctccccaacccgttgtccactgcctccaggcaaaccggcagcgccgccgccggcgatgaccaccgcgcggctcgtctcaacatcccccgcccgcctaccctccacgtcggcttccccgattcccagaacctcgctgtgtgttgtcggtcgtgcccctgctttctccgctagggcgctcggcttctcgcttcgtctcaagccgtcgcctgccatggccgccgccggcccccctaccgcgcatggagactcaataggatcttctaggattggagaggttaagagggtgaccaaagagacaaatgtgcacgtgaagatcaaccttgatggcactggtgtcgccgagtgtagcacagggataccgttcttggatcacatgctcgatcagttggcatcacatggactctttgatgtctacgttaaagcaataggcgacacccatattgatgatcatcactcaaatgaggacattgctttggcaattggaacggcactacttgaagcacttggtgatcgaaagggaattaaccgatttggtcattttacagcaccgcttgatgaggcagcggttgaggttatactggatctgtctggtcgccctcatttaagctgtggcttagatattcctactcaaagagttggcacatatgatacacagctggttgagcacttcttccaatctgtggtgaacacatctgggatgactcttcacatccgtcagcttgctgggaaaaactcacaccatatcatcgaggcatctttcaaagcgtttgctcgggcccttcgacaggcaacagagtatgacctgcgccgtcaaggcactgtccccagctccaaaggtgtcttgtcgagatcatagcatcgcagtttggacgaacgcatatcttccactgcagcgcacatcaatgagaggaaaacctgcagagtagacagcttggtttttgctgctcacgttgggagcctgcgttagcctctgaacattgctaatgggataatcaagaaccatctagcaactagcaagcaccacttattatctgccttgtgacagtggcatagcgcgtctgctcgctactgcaactctattatctgctcgctggagttacaggatatctgaagattgaaggtctagacatgctgtgagcctgtgactttgtaagctacaccggtcaggaataatgctgcgtctggatcatccgcagaaacataggggtatgtaaattgtttggacattgaagggaatgcattgatctttgcgcgttcagtttctgccaacaaattaacgggagagctgagaaaatacgagccctccaattatctgggaaaagggatggataa

SEQ ID NO: 106246 - DNA, 1370 bp, Zea Mays
caaacctgcttctctacaccacccaaggcccaatagagtccacgcgccctcatctcctccccaacccgttgtccactgcctccaggcaaaccggcagcgccgccgccggcgatgaccaccgcgcggctcgtctcaacatcccccgcccgcctaccctccacgtcggcttccccgattcccagaacctcgctgtgtgttgtcggtcgtgcccctgctttctccgctagggcgctcggcttctcgcttcgtctcaagccgtcgcctgccatggccgccgccggcccccctaccgcgcatggagactcaataggatcttctaggattggagaggttaagagggtgaccaaagagacaaatgtgcacgtgaagatcaaccttgatggcactggtgtcgccgagtgtagcacagggataccgttcttggatcacatgctcgatttggcatcacatggactctttgatgtctacgttaaagcaataggcgacacccatattgatgatcatcactcaaatgaggacattgctttggcaattggaacggcactacttgaagcacttggtgatcgaaagggaattaaccgatttggtcattttacagcaccgcttgatgaggcagcggttgaggttatactggatctgtctggtcgccctcatttaagctgtggcttagatattcctactcaaagagttggcacatatgatacacagctggttgagcacttcttccaatctgtggtgaacacatctgggatgactcttcacatccgtcagcttgctgggaaaaactcacaccatatcatcgaggcatctttcaaagcgtttgctcgggcccttcgacaggcaacagagtatgacctgcgccgtcaaggcactgtccccagctccaaaggtgtcttgtcgagatcatagcatcgcagtttggacgaacgcatatcttccactgcagcgcacatcaatgagaggaaaacctgcagagtagacagcttggtttttgctgctcacgttgggagcctgcgttagcctctgaacattgctaatgggataatcaagaaccatctagcaactagcaagcaccacttattatctgccttgtgacagtggcatagcgcgtctgctcgctactgcaactctattatctgctcgctggagttacaggatatctgaagattgaaggtctagacatgctgtgagcctgtgactttgtaagctacaccggtcaggaataatgctgcgtctggatcatccgcagaaacataggggtatgtaaattgtttggacattgaagggaatgcattgatctttgcgcgttcagtttctgccaacaaattaacgggagagctgagaaaatacgagccctccaattatctggg

SEQ ID NO: 106247 - DNA, 1411 bp, Zea Mays
cagaaaatgaagcatcaaccagcccaactaataagcaaacctgcttctctacaccacccaaggcccaatagagtccacgcgccctcatctcctccccaacccgttgtccactgcctccaggcaaaccggcagcgccgccgccggcgatgaccaccgcgcggctcgtctcaacatcccccgcccgcctaccctccacgtcggcttccccgattcccagaacctcgctgtgtgttgtcggtcgtgcccctgctttctccgctagggcgctcggcttctcgcttcgtctcaagccgtcgcctgccatggccgccgccggcccccctaccgcgcatggagactcaataggtggatcttctaggattggagaggttaagagggtgaccaaagagacaaatgtgcacgtgaagatcaaccttgatggcactggtgtcgccgagtgtagcacagggataccgttcttggatcacatgctcgatcagttggcatcacatggactctttgatgtctacgttaaagcaataggcgacacccatattgatgatcatcactcaaatgaggacattgctttggcaattggaacggcactacttgaagcacttggtgatcgaaagggaattaaccgatttggtcattttacagcaccgcttgatgaggcagcggttgaggttatactggatctgtctggtcgccctcatttaagctgtggcttagatattcctactcaaagagttggcacatatgatacacagctggttgagcacttcttccaatctgtggtgaacacatctgggatgactcttcacatccgtcagcttgctgggaaaaactcacaccatatcatcgaggcatctttcaaagcgtttgctcgggcccttcgacaggcaacagagtatgacctgcgccgtcaaggcactgtccccagctccaaaggtgtcttgtcgagatcatagcatcgcagtttggacgaacgcatatcttccactgcagcgcacatcaatgagaggaaaacctgcagagtagacagcttggtttttgctgctcacgttgggagcctgcgttagcctctgaacattgctaatgggataatcaagaaccatctagcaactagcaagcaccacttattatctgccttgtgacagtggcatagcgcgtctgctcgctactgcaactctattatctgctcgctggagttacaggatatctgaagattgaaggtctagacatgctgtgagcctgtgactttgtaagctacaccggtcaggaataatgctgcgtctggatcatccgcagaaacataggggtatgtaaattgtttggacattgaagggaatgcattgatctttgcgcgttcagtttctgccaacaaattaacgggagagctgagaaaatacgagccctccaattatctggg

SEQ ID NO: 106248 - DNA, 303 bp, Zea Mays
atgctctggaagcggaagagctcggggcgaggcggctgcggcggggacgagatgcgggagcggctgatccccgccgcggggtgcgtgccgccgggctgcgtggcggtgctggtcggcgggggcgacgagccggagcgcgtggtggtggacgtgcgcgccctggcgcagccctgcgtgcgggcgctgctggaggcggcgcagcgggagttcgggttcgaccagaagggcgtgctccggatcccctgcgctgccgacgagttccgccgtgccgtcaccgccggaggccaccggtgcaggcggtag

SEQ ID NO: 106249 - DNA, 576 bp, Zea Mays
atggagaagagcacagtggtggtcagtgtccctgttgttgtcatggccgagactgctgagaccgactacagctcgagcttctcacttcttgtcgtggattcacatttgctacctggggatgcagagtcccagaaagatgttgggaagggtgataaatcaagggataagggaactgctgagaagtttgcaatatatcagaagcatcgttcttcgttggcagacactgttcaattcaggaggccagctgctccaacttccagtgtgaatgctgatattgtgggaacatccactctgcagtctgcatctctaccgaaacaagaaccctcaacagctacatccaagagctatactttcagagaaggtgatagggtgcgttatatgggtccagctcagttatcctcattgtcacaaaggaagagagtggctcttcactcccatcggattgacaaaaacacactcggacaaccagtgctggtattaatcgagatgtcgcatcaacaaacgctcatgcagagccagattctactcctacagtcctacgtctacacgagacgacacaagtgcatctataattga

SEQ ID NO: 106250 - DNA, 342 bp, Zea Mays
atgaattggaagcgcaagagctccggcagcaggtgcagggaagaagagcagagggagcggcttatccagcaggcggcggcggacccgccggacggtttgcgcagctgcaagggctgctgcgtgccgcggggctgcgtggcggtgctggtgggcgggggcgcggagccggaggagcgggtggtggtggacgtgcgcgcgctggggcagccctgcgtgcgggcgctgctggacatggcggcgcgggagctcgggtacgaccagaagggcgtgctgcggatcccctgcgccgccgccgagttccgacgcgccgtcgccgccgacggccaccggtgcatgcggtag

SEQ ID NO: 106251 - DNA, 381 bp, Zea Mays
ctgggcctttaggtttttctgcgtatgtgttggacacacgccaccctcctctctcctctcctccaacggctcagtcggccgccgccctcctctctcggtctctcctctcctccaacggctcagccggcgccaccgccctcctccctcctatcctccaacatctccggcgcgtctctcctcagccgcggaggcaaagccggccgccggccgtggaggcacagcagacctgcgccaccgctggccgcctaccccacagcagatctgcacccaagaccagcagccagccagccatcctctgcggctccactctgccaacgcccaagaccagcactagcagccagccatcctccacctccactgctctccatttgatcatttggt

SEQ ID NO: 106252 - DNA, 297 bp, Zea Mays
atgtatgaatttggattcctaatacaaatctacaatttaaattgtaggctaaatcctgggcgtgctgaggatttagttttcacacaccaaaacttgcgtcttctttctagaaaatctgatgaataccgctgtggtccatcagcaatgtgggatgttggagctgacacttttgaagctgattttgagggtggtgctgattttcttgagcaagctaatctatcactggatgagccagaacttgaagaaagattgtttgaagatcttgaggcattgggtttgaccgaagatgcagaatga

SEQ ID NO: 106253 - DNA, 115 bp, Zea Mays
gcttgtttctggcctccataaggagtgcttgtacctgggtcattatggccctttattttccctctactttaatatatgggtgcgcagtcctcctgcgctctttcgaaaaaaaaaa

SEQ ID NO: 106254 - DNA, 505 bp, Zea Mays
tatcaaccaatatatagttgttcattccaaataactcaactaataaagaggaataagtggcaccctagtcagtgggcatctattagactgtacacagaccacactctgaatctattgctaaccctgttcactttacagaccgcacaccaacacttctgactttaaacttgtactgtggcagctcatcttcctcatcgtcctcgtcttcacttgaatcctcttcaattttgtcccattttgagtagtcaaggcctgaatgactcttcggttttgggatggcttcccaaccctggggttttgaaggcgaagtggacggaaccacagcctttagaggttcagttgcaggttttctgtggagaattggtccagctgaaggtttgttctcgaggaccagtttggttgctggttggtcaggcttagcgatagaagaagtgtcggtcttctgaactcgtggaggaagttcttcgtcttcctcttcacgacaaagggactcctcttcgcactc

SEQ ID NO: 106255 - DNA, 2006 bp, Zea Mays
agatgcaatgtgattgcccgttccccataactcaacttaactgtgtgtgtgttgtgtgtgtatagtgtagtgtatacacactataagttctcttattcattcctaccttttttttctctcctgcaaatgcacaacaacgtaactcttttctaggaaagaaacaaaccgatcattaccttttcttttcaacagattatgcatgtttattattactagctactaattatcatttcatttacagaggagaaattgcacagcaatttgggatttccttggatgtacgaatgacagaagtcacgggtaggatccttcctccaccaaacctcaaacttggggcatccaatgggcagacctccaaattgagtatcgatcatggctgccagtggaatcttgtgaagaagagactagtagagggccgggttcttcagtgctggggcatcgtcgacttcagtgctgagccgtctggctctggcgcccgtcaggagcccctcgatacaaggatgtttgttgagaagattgtgaggaagtgctgtgagcttggtatccgtatgaaccctaatccatgcttcgtgcacataacaaggatggcagtgctcttcgatccacatggactacatgaagagctaaacaaagcaaaacaagctgcagtgagcaagaagcagaggttgcagctccttttctgcccgatgtccgagcagcattcggggtacaagacactgaagctgatttgtgacacacagctggggatcctgacccagtgtttactgagcgaccgcgcaaacaatcgaaagggacaggaccagtacatgacgaatcttgctctaaagatcaacggcaagcttgggggcagcaacgttcagctgtttgactcgctcccacgggtcggtggtggggtacctttcatgttcatcggtgctgacgttaaccacccgtcccccggtaacgtggagagcccatcgatcgcagccgtggtcgcctctgtcaactctggtgtcaacaagtatgtgaccagaatccgtgcccagccgcaccgctgcgaggtgatccagcagcttggtgagatctgccgggagctcattggagtctttgagaagcagaaccgcgtgaagccgcagaagatcatctacttccgtgatggcgtgagcgacgggcagttcgatatggtcctgaacgaggagctggctgacctggagaaggcgatcaaggtgaatggctatgcgccaaccatcaccgtggtcgtggccaagaagcggcaccacactcggctgttccccagggacgaacagcagccgcagacgaagaccgggaacgtgccgcctggcacggtggtggacacgggcgtggtggacccgtccgcgtacgacttctacctgtgcagccacactgggattctggggacgagcaggccgacgcactactacaccctggtggacgagcacggcttcggctccgacgacctgcagaagctgatctacaacctgtgcttcgtgttcgcgcggtgcaccaagccggtgtcgctggcgacgcccgtctactatgccgacctcgcggcctaccgtggcaggctctactacgaggctgccatgatggcgtcccaggcccagcgaggggggtcctttgacgtcactaacttcccgaggctgcacaaggatgtggaggacaacatgttcttcatctgacacaagtttttttttttttttgccggtgtcgtggcgcaagttcgggtcgattttgctgtgtggcaacgtcgcattgtttttatgctgttgcctttttttgcttgctggtcgtagtgccactgtgtgttgttgaagtcgctggtttgaaactgcagtcagttaactgtacgcgtcctgctttgtttttgtttgcgcgcgtgtgaaacagacaaacagtctgatgatttggtgtgttcagggttgtaaacaaactttattagattctcactggattatactgcatgactgtagttgaaggaaaagaagcaggtttgagttgtgaagata

SEQ ID NO: 106256 - DNA, 3495 bp, Zea Mays
tcaacaaaagctctcggcgcttattaagtcttgacgatttatcattccattacatccacacctgcgatggagtacgagcgcggtggcggaggcggccgcggccgcgggcggggccgtggaggcggcggaggaggagggcgcggaggtggcggcggatacgggcggcagcacggaggcggcggcgacgcccgcggaggccgagacgagtacggcggcggaggaggagggtacggatacgacgaaggagaaggctatggcgggggtcgtagaggcggcggcggagggtacgggtacgacgtagggggccgtagaggcggcggcggctaccaccaagggcctcgcggaggctatggcacgggcggcggcggctaccaccaagggcctcgcggaggctatggcacgggcggccgcggcggaaacgcgtgggcgccggctcctggcgcggggagaggtcgcggagttggcggtggcgcggccgagtacgcccccgtcagggggccagcgcccgcgcaggcgccggtggcgagtccgcttgcgcccaaggacaaggaggcgccgcgttcgtcgggatccgtcgaacgcatcgcatccagcgaaatggccagagtagaaccaataggatcaacactagctgccacatcttctgttaatacacgtgtgccaatgcagagacctgattctggaggttcattatctcaagcaacggttaaacttttggtgaatcactttattgtcagctaccgaaaggtgacaactatttttcattatgacataaacatcaagcttgatgaagcttcgtctaatgcttcgggcaaagagctatccaaggcagaatttctctctgtcaaggatgagctcttcagggaaagcagtttacggcgtctttcctcatgtgttgcttatgatggtggaagaaatctgtatacttctgctgaactgcctgcaggtttatttcgtgtgagagttcgatcaaagacctacattgtatcagtagatttgaagaagcagctgccattaagtcaactctcagatttacctgtgcctagagaggtcttgcagggccttgatgttgttgtgcgtgaggcctcaagatggaacaagattatccttggtagaggattttactcaccaagcagcagtatagacattgggcagggtgctgtagctatgaaaggaacccagcagtcccttaaatccactcagcaagggttgatcctgtgtgttgactattctgtcatgccgttttacaaagctggaccggtgatggatcttgttcagaaattagtgaggtaccttgattatcggacaactttgaacaagaggcaaatggaaaatctggttgatgagcttaaaggccgacgtgtaactgtgattcatcggaggactaatcagaagtacacagtgcaaggtttgacacccttacctgccagccagatgacctttgtggatgctgaatccggccaaacacggaggctcgtggattattatgctcagaaacatggcaaggtgattgagtatcagatgctgccatgcttggatttgagcaagagcaaggacaaaccgaatcatgttccaattgagctctgcactcttcttgaaggacagaggtttccaaaagcaaacttgaatcagaattctgagaggatactaaaaggaagtgctctaatccgtgcatctgaccggaggaaggagattcaaaacttggtgaatgcttcggatggaccgtgcagaggagaaattgcacagcaatttgggatttccttggatgtacgaatgacagaagtcacgggtaggatccttcctccaccaaacctcaaacttggggcatccaatgggcagacctccaaattgagtatcgatcatggctgccagtggaatcttgtgaagaagagactagtagagggccgggttcttcagtgctggggcatcgtcgacttcagtgctgagccgtctggctctggcgcccgtcaggagcccctcgatacaaggatgtttgttgagaagattgtgaggaagtgctgtgagcttggtatccgtatgaaccctaatccatgcttcgtgcacataacaaggatggcagtgctcttcgatccacatggactacatgaagagctaaacaaagcaaaacaagctgcagtgagcaagaagcagaggttgcagctccttttctgcccgatgtccgagcagcattcggggtacaagacactgaagctgatttgtgacacacagctggggatcctgacccagtgtttactgagcgaccgcgcaaacaatcgaaagggacaggaccagtacatgacgaatcttgctctaaagatcaacggcaagcttgggggcagcaacgttcagctgtttgactcgctcccacgggtcggtggtggggtacctttcatgttcatcggtgctgacgttaaccacccgtcccccggtaacgtggagagcccatcgatcgcagccgtggtcgcctctgtcaactctggtgtcaacaagtatgtgaccagaatccgtgcccagccgcaccgctgcgaggtgatccagcagcttggtgagatctgccgggagctcattggagtctttgagaagcagaaccgcgtgaagccgcagaagatcatctacttccgtgatggcgtgagcgacgggcagttcgatatggtcctgaacgaggagctggctgacctggagaaggcgatcaaggtgaatggctatgcgccaaccatcaccgtggtcgtggccaagaagcggcaccacactcggctgttccccagggacgaacagcagccgcagacgaagaccgggaacgtgccgcctggcacggtggtggacacgggcgtggtggacccgtccgcgtacgacttctacctgtgcagccacactgggattctggggacgagcaggccgacgcactactacaccctggtggacgagcacggcttcggctccgacgacctgcagaagctgatctacaacctgtgcttcgtgttcgcgcggtgcaccaagccggtgtcgctggcgacgcccgtctactatgccgacctcgcggcctaccgtggcaggctctactacgaggctgccatgatggcgtcccaggcccagcgaggggggtcctttgacgtcactaacttcccgaggctgcacaaggatgtggaggacaacatgttcttcatctgacacaagtttttttttttttttgccggtgtcgtggcgcaagttcgggtcgattttgctgtgtggcaacgtcgcattgtttttatgctgttgcctttttttgcttgctggtcgtagtgccactgtgtgttgttgaagtcgctggtttgaaactgcagtcagttaactgtacgcgtcctgctttgtttttgtttgcgcgcgtgtgaaacagacaaacagtctgatgatttggtgtgttcagggttgtaaacaaactttattagattctcactggattatactgcatgactgtagttgaaggaaaagaagcaggtttgagttgtgaagata

SEQ ID NO: 106257 - DNA, 879 bp, Zea Mays
atggctagggaagaagagctcaagaggattgacctgaaggtgaacgtgagctgctgcgacggctgcaggaggaaggtgatgaaggcgatgagcctcaaaggcgtgctgaggacggagatccagccgtcgcacgaccgggtgaccgtcgtgggcgacgtggacgtcaacgtcctggtgaagaagctggccaaggtgggcaagatcgccgaggcgctgcctcccgcgcctgctgagcagggcaagaagcagcgcgatgacggcgacagagcggtgccggcgcaggcgcaaccgcaggcggaggagaagtgcaagggcaaggacgacgccggtggcaaggcggcggctaaggcagcgccgggcaagcatgaggggtgcaagaagtgcgcgcgcgaggccgccgcgcgcgccgtgggcgacagtggcgaccactgcagcgggaagaaggcgccgtccaaaaaggacaacaacgccggcggcggctggggcggcgaggaaggcggcgacgccgacgccgacggactcgacgccgagcccttggcggtggcgccccaccaccactatgcgcaagcccagacgcagcagcactaccaccgcgcggagccggcgatggtggtgccggtgcacgtgccgccgacctactactacccgcctccggccgccgcggcgatgccgtactacggctactacggcatgcccccgcccccgccgccgacgatggcgatgacgatgggggtggcaccgccgtcccagcggcacccgcaggcccggccgcagccttcccgcttcgacgaggacttcttcgacgacgacaacacggtcggctgcagcgtcatgtgaaccgttgacggacggccgccgccacgcgccgtagccggccat

SEQ ID NO: 106258 - DNA, 2697 bp, Zea Mays
ttacttcttccttatcacctccatctctcaccccggtctctctcccctcgcgcggccggcgccccaactccctcccctccggttctcgctcgcctccacttcttcctcctcgcctctgggtcctgacgccttccaccgtcggccggagaagcacctccgccttgccaccgtcgggccctgctgtctccagccatcgccgctccacctccgccaccccaccaccgggtcccgtcggcatctggccactgttgccggtgcagcggcgtggcgaggaagcgcgggaggagccggtacggcgggacgcggagggccccgtcgcctggtccgcaacagcctgcatcccgggaggccacgagtaagataaggcggcagcccgactaaaggaacgcccgccgtcgccgtcgccgtcgccgacttcacctgcgcccctctattggaacacctgcttgctgttttttcttctctgttcacctcgtctggccgggccggactgccgcagccttactcccagctgcccaggtttctgttggacccttcgacggcaacgagcatccaccataccaggtaggtcgacctgcgccaatgcactgacaacacggacacgggggatacattcttcggtgaagaataatcttagctttggacctttttagtggactcgagctattgcaatggagattgtgaacagtgtttccttcagctcaattggagtcggaagaattgtaataaacaagacagtgaaggtaggatgccaaacacaccggattggctggaagctaacaaggacatgttgcgagtactctcctggtgcttctagaaagaagcaagagaagtatgagcaacaaccacagaacgtcgatcttccagaattacacccaaaaaacaaaaagaaacccttccctgttccgattaaaaagatgctgcaagcttctcggcgagagaagaggcttgcacaaatgcatatagagaagcctcttgaacccccaaagaacggtttgcttgtgccagagcttgttccagttgcacatgaagtccttgataactggaaagtgctaatcagagggctctctcaacttctgaatgttgtttcagtttatggttgcagaaagtgtcctcaagtccatgttggtccagttggccaccagatccaagactgttacggttccggaagccagcgtcggaacagtcatcactcttgggctagaggttccatcaatgatgttctcatcccaattgagtcttaccatctttttgacccatttggtcggagagtgaagcatgataccaggtttgattatgataggataccagcaattgttgagctatgcattcaggctggtgttgacttaccacaatacccctcgaggcgacggactgctcctgtccggatgataggcaagaaggtgattgaccgcggtgagtttgttgatgagcccaagccacaacgttcagaacactgtgtatctctgcttgctgagctcgacacattcagcaaccaacaagtccagtcaccttcaccatcaaatatgaaagagcttgccaagaggacactgaaagcataccttaatgtccggcgaggcgtcgagcagctgatgagcaagtacactgtgaaagcatgtgggtactgctctgaggtccatgttggtccgtggggccacaatgtgaagctctgcggggctttcaagcaccagtggcgggatggcaagcatgggtggcaggacgcggtggttgatgaggtcatcccgcccaactacgtgtggcatgtccctgaccccagtggctctcctctcagatcctctctcaggagtttctatggcaaagctccagctgtcgtagagctgtgtgtgcaggctggggctgaaatacctgacgagtatcgggccatgatgaggactgacattgtcatcccggactctgtggaagctcggatggctgcataacaacaatgatctgagcttctacgactactatcctgcagttcttgtccagagtacagattccaaccaaatgtgccgctttctgggcatgctgtgatggtgggtctcttagccctgtggtaattgctcagggagcagcagatgcatagtttgtataatataattagcatagctaaatcatgatcgtttgggatttaaagctgagttgaagatctgatttaagtactattcgttgaaaggtttaacgcatgaacctaggacgcgcaatgacaagcctgatagcctgaaagctaaaaggaatggtctctgcaccatttataaggtccatcccatcttgtttacaggccgcagatgctttattcctgcctatgctagactgtgaggcacctagaatgctcaggagtcgccatactgatggccttccactttctccatcggtacaattgcgagctaatgctttggattaaactaatcacggtggtttgttcggggtatttgtgcgcctggctgtagttaatcatggactaaaagcctgtgctgtgcacctgtgcccgcccccagatcgacactttgggggtatggctacatgtatagtcctaccagatcgtcggcatattgtgttcccctttttgctgtatactagtactttgtaacatgcaagcggaggctacttattcagcgccgttccctaattgtgcttatgaaatgttttgagctgtatatggaacggatggtgatgaatgatccatgggcgaaagat

SEQ ID NO: 106259 - DNA, 2700 bp, Zea Mays
ttacttcttccttatcacctccatctctcaccccggtctctctcccctcgcgcggccggcgccccaactccctcccctccggttctcgctcgcctccacttcttcctcctcgcctctgggtcctgacgccttccaccgtcggccggagaagcacctccgccttgccaccgtcgggccctgctgtctccagccatcgccgctccacctccgccaccccaccaccgggtcccgtcggcatctggccactgttgccggtgcagcggcgtggcgaggaagcgcgggaggagccggtacggcgggacgcggagggccccgtcgcctggtccgcaacagcctgcatcccgggaggccacgagtaagataaggcggcagcccgactaaaggaacgcccgccgtcgccgtcgccgtcgccgacttcacctgcgcccctctattggaacacctgcttgctgttttttcttctctgttcacctcgtctggccgggccggactgccgcagccttactcccagctgcccaggtttctgttggacccttcgacggcaacgagcatccaccataccagtaggtaggtcgacctgcgccaatgcactgacaacacggacacgggggatacattcttcggtgaagaataatcttagctttggacctttttagtggactcgagctattgcaatggagattgtgaacagtgtttccttcagctcaattggagtcggaagaattgtaataaacaagacagtgaaggtaggatgccaaacacaccggattggctggaagctaacaaggacatgttgcgagtactctcctggtgcttctagaaagaagcaagagaagtatgagcaacaaccacagaacgtcgatcttccagaattacacccaaaaaacaaaaagaaacccttccctgttccgattaaaaagatgctgcaagcttctcggcgagagaagaggcttgcacaaatgcatatagagaagcctcttgaacccccaaagaacggtttgcttgtgccagagcttgttccagttgcacatgaagtccttgataactggaaagtgctaatcagagggctctctcaacttctgaatgttgtttcagtttatggttgcagaaagtgtcctcaagtccatgttggtccagttggccaccagatccaagactgttacggttccggaagccagcgtcggaacagtcatcactcttgggctagaggttccatcaatgatgttctcatcccaattgagtcttaccatctttttgacccatttggtcggagagtgaagcatgataccaggtttgattatgataggataccagcaattgttgagctatgcattcaggctggtgttgacttaccacaatacccctcgaggcgacggactgctcctgtccggatgataggcaagaaggtgattgaccgcggtgagtttgttgatgagcccaagccacaacgttcagaacactgtgtatctctgcttgctgagctcgacacattcagcaaccaacaagtccagtcaccttcaccatcaaatatgaaagagcttgccaagaggacactgaaagcataccttaatgtccggcgaggcgtcgagcagctgatgagcaagtacactgtgaaagcatgtgggtactgctctgaggtccatgttggtccgtggggccacaatgtgaagctctgcggggctttcaagcaccagtggcgggatggcaagcatgggtggcaggacgcggtggttgatgaggtcatcccgcccaactacgtgtggcatgtccctgaccccagtggctctcctctcagatcctctctcaggagtttctatggcaaagctccagctgtcgtagagctgtgtgtgcaggctggggctgaaatacctgacgagtatcgggccatgatgaggactgacattgtcatcccggactctgtggaagctcggatggctgcataacaacaatgatctgagcttctacgactactatcctgcagttcttgtccagagtacagattccaaccaaatgtgccgctttctgggcatgctgtgatggtgggtctcttagccctgtggtaattgctcagggagcagcagatgcatagtttgtataatataattagcatagctaaatcatgatcgtttgggatttaaagctgagttgaagatctgatttaagtactattcgttgaaaggtttaacgcatgaacctaggacgcgcaatgacaagcctgatagcctgaaagctaaaaggaatggtctctgcaccatttataaggtccatcccatcttgtttacaggccgcagatgctttattcctgcctatgctagactgtgaggcacctagaatgctcaggagtcgccatactgatggccttccactttctccatcggtacaattgcgagctaatgctttggattaaactaatcacggtggtttgttcggggtatttgtgcgcctggctgtagttaatcatggactaaaagcctgtgctgtgcacctgtgcccgcccccagatcgacactttgggggtatggctacatgtatagtcctaccagatcgtcggcatattgtgttcccctttttgctgtatactagtactttgtaacatgcaagcggaggctacttattcagcgccgttccctaattgtgcttatgaaatgttttgagctgtatatggaacggatggtgatgaatgatccatgggcgaaagat

SEQ ID NO: 106260 - DNA, 2700 bp, Zea Mays
ttacttcttccttatcacctccatctctcaccccggtctctctcccctcgcgcggccggcgccccaactccctcccctccggttctcgctcgcctccacttcttcctcctcgcctctgggtcctgacgccttccaccgtcggccggagaagcacctccgccttgccaccgtcgggccctgctgtctccagccatcgccgctccacctccgccaccccaccaccgggtcccgtcggcatctggccactgttgccggttgtgcagcggcgtggcgaggaagcgcgggaggagccggtacggcgggacgcggagggccccgtcgcctggtccgcaacagcctgcatcccgggaggccacgagtaagataaggcggcagcccgactaaaggaacgcccgccgtcgccgtcgccgtcgccgacttcacctgcgcccctctattggaacacctgcttgctgttttttcttctctgttcacctcgtctggccgggccggactgccgcagccttactcccagctgcccaggtttctgttggacccttcgacggcaacgagcatccaccataccaggtaggtcgacctgcgccaatgcactgacaacacggacacgggggatacattcttcggtgaagaataatcttagctttggacctttttagtggactcgagctattgcaatggagattgtgaacagtgtttccttcagctcaattggagtcggaagaattgtaataaacaagacagtgaaggtaggatgccaaacacaccggattggctggaagctaacaaggacatgttgcgagtactctcctggtgcttctagaaagaagcaagagaagtatgagcaacaaccacagaacgtcgatcttccagaattacacccaaaaaacaaaaagaaacccttccctgttccgattaaaaagatgctgcaagcttctcggcgagagaagaggcttgcacaaatgcatatagagaagcctcttgaacccccaaagaacggtttgcttgtgccagagcttgttccagttgcacatgaagtccttgataactggaaagtgctaatcagagggctctctcaacttctgaatgttgtttcagtttatggttgcagaaagtgtcctcaagtccatgttggtccagttggccaccagatccaagactgttacggttccggaagccagcgtcggaacagtcatcactcttgggctagaggttccatcaatgatgttctcatcccaattgagtcttaccatctttttgacccatttggtcggagagtgaagcatgataccaggtttgattatgataggataccagcaattgttgagctatgcattcaggctggtgttgacttaccacaatacccctcgaggcgacggactgctcctgtccggatgataggcaagaaggtgattgaccgcggtgagtttgttgatgagcccaagccacaacgttcagaacactgtgtatctctgcttgctgagctcgacacattcagcaaccaacaagtccagtcaccttcaccatcaaatatgaaagagcttgccaagaggacactgaaagcataccttaatgtccggcgaggcgtcgagcagctgatgagcaagtacactgtgaaagcatgtgggtactgctctgaggtccatgttggtccgtggggccacaatgtgaagctctgcggggctttcaagcaccagtggcgggatggcaagcatgggtggcaggacgcggtggttgatgaggtcatcccgcccaactacgtgtggcatgtccctgaccccagtggctctcctctcagatcctctctcaggagtttctatggcaaagctccagctgtcgtagagctgtgtgtgcaggctggggctgaaatacctgacgagtatcgggccatgatgaggactgacattgtcatcccggactctgtggaagctcggatggctgcataacaacaatgatctgagcttctacgactactatcctgcagttcttgtccagagtacagattccaaccaaatgtgccgctttctgggcatgctgtgatggtgggtctcttagccctgtggtaattgctcagggagcagcagatgcatagtttgtataatataattagcatagctaaatcatgatcgtttgggatttaaagctgagttgaagatctgatttaagtactattcgttgaaaggtttaacgcatgaacctaggacgcgcaatgacaagcctgatagcctgaaagctaaaaggaatggtctctgcaccatttataaggtccatcccatcttgtttacaggccgcagatgctttattcctgcctatgctagactgtgaggcacctagaatgctcaggagtcgccatactgatggccttccactttctccatcggtacaattgcgagctaatgctttggattaaactaatcacggtggtttgttcggggtatttgtgcgcctggctgtagttaatcatggactaaaagcctgtgctgtgcacctgtgcccgcccccagatcgacactttgggggtatggctacatgtatagtcctaccagatcgtcggcatattgtgttcccctttttgctgtatactagtactttgtaacatgcaagcggaggctacttattcagcgccgttccctaattgtgcttatgaaatgttttgagctgtatatggaacggatggtgatgaatgatccatgggcgaaagat

SEQ ID NO: 106261 - DNA, 2770 bp, Zea Mays
ttacttcttccttatcacctccatctctcaccccggtctctctcccctcgcgcggccggcgccccaactccctcccctccggttctcgctcgcctccacttcttcctcctcgcctctgggtcctgacgccttccaccgtcggccggagaagcacctccgccttgccaccgtcgggccctgctgtctccagccatcgccgctccacctccgccaccccaccaccgggtcccgtcggcatctggccactgttgccggtgcagcggcgtggcgaggaagcgcgggaggagccggtacggcgggacgcggagggccccgtcgcctggtccgcaacagcctgcatcccgggaggccacgagtaagataaggctcgttgtttatccaagccttttacaacttcataagacacaatgcattcgggctgcaagcttttgttacaaggcggcagcccgactaaaggaacgcccgccgtcgccgtcgccgtcgccgacttcacctgcgcccctctattggaacacctgcttgctgttttttcttctctgttcacctcgtctggccgggccggactgccgcagccttactcccagctgcccaggtttctgttggacccttcgacggcaacgagcatccaccataccaggtaggtcgacctgcgccaatgcactgacaacacggacacgggggatacattcttcggtgaagaataatcttagctttggacctttttagtggactcgagctattgcaatggagattgtgaacagtgtttccttcagctcaattggagtcggaagaattgtaataaacaagacagtgaaggtaggatgccaaacacaccggattggctggaagctaacaaggacatgttgcgagtactctcctggtgcttctagaaagaagcaagagaagtatgagcaacaaccacagaacgtcgatcttccagaattacacccaaaaaacaaaaagaaacccttccctgttccgattaaaaagatgctgcaagcttctcggcgagagaagaggcttgcacaaatgcatatagagaagcctcttgaacccccaaagaacggtttgcttgtgccagagcttgttccagttgcacatgaagtccttgataactggaaagtgctaatcagagggctctctcaacttctgaatgttgtttcagtttatggttgcagaaagtgtcctcaagtccatgttggtccagttggccaccagatccaagactgttacggttccggaagccagcgtcggaacagtcatcactcttgggctagaggttccatcaatgatgttctcatcccaattgagtcttaccatctttttgacccatttggtcggagagtgaagcatgataccaggtttgattatgataggataccagcaattgttgagctatgcattcaggctggtgttgacttaccacaatacccctcgaggcgacggactgctcctgtccggatgataggcaagaaggtgattgaccgcggtgagtttgttgatgagcccaagccacaacgttcagaacactgtgtatctctgcttgctgagctcgacacattcagcaaccaacaagtccagtcaccttcaccatcaaatatgaaagagcttgccaagaggacactgaaagcataccttaatgtccggcgaggcgtcgagcagctgatgagcaagtacactgtgaaagcatgtgggtactgctctgaggtccatgttggtccgtggggccacaatgtgaagctctgcggggctttcaagcaccagtggcgggatggcaagcatgggtggcaggacgcggtggttgatgaggtcatcccgcccaactacgtgtggcatgtccctgaccccagtggctctcctctcagatcctctctcaggagtttctatggcaaagctccagctgtcgtagagctgtgtgtgcaggctggggctgaaatacctgacgagtatcgggccatgatgaggactgacattgtcatcccggactctgtggaagctcggatggctgcataacaacaatgatctgagcttctacgactactatcctgcagttcttgtccagagtacagattccaaccaaatgtgccgctttctgggcatgctgtgatggtgggtctcttagccctgtggtaattgctcagggagcagcagatgcatagtttgtataatataattagcatagctaaatcatgatcgtttgggatttaaagctgagttgaagatctgatttaagtactattcgttgaaaggtttaacgcatgaacctaggacgcgcaatgacaagcctgatagcctgaaagctaaaaggaatggtctctgcaccatttataaggtccatcccatcttgtttacaggccgcagatgctttattcctgcctatgctagactgtgaggcacctagaatgctcaggagtcgccatactgatggccttccactttctccatcggtacaattgcgagctaatgctttggattaaactaatcacggtggtttgttcggggtatttgtgcgcctggctgtagttaatcatggactaaaagcctgtgctgtgcacctgtgcccgcccccagatcgacactttgggggtatggctacatgtatagtcctaccagatcgtcggcatattgtgttcccctttttgctgtatactagtactttgtaacatgcaagcggaggctacttattcagcgccgttccctaattgtgcttatgaaatgttttgagctgtatatggaacggatggtgatgaatgatccatgggcgaaagat

SEQ ID NO: 106262 - DNA, 1582 bp, Zea Mays
cgcgacaggaatccacacgatccgcgggcggcgctgctcctgagatcattggcgatgacactgtgtactactatcatgacatgatagtggaaatgattaaatggggatatcaagaaggaaaaactctctttggatttggttatgatttccgtcaaagcaacaggctctcagagacacttgacagattttccaaaaagctggagtcagtgtacacagcttctggtggaaaaaagatcaatctcattactcattcaatggggggattacttgtgaagtgtttcatctctctgcacagtgatacatttgaaaaatatgtcaagagttggatcgcaattgctgcaccattccaaggtgcccctgggtacataactactagtctgctcaatggaatgtcttttgtcgaaggatgggaatcaagattctttatttccaaatggtgtatgcagcaattgctacttgagtgcccatcaatctatgagttgctggcaaaccctaacttccagtggaaagacatcccactgctacagatttggagagagaatttggataacagtggcaagaaaagtgccctgttagagtcgtatgagcctgaggaagcaataatgatgattaaagaggctctttccagtaatgagatcattgctgatggcatgcatattccggtgccccttaatttggatatattgaattgggcaaaggaaacttatgatcttttatgcagtacaaagcttccggaatcagtgaaattctacaacatttatgggattgattatgatactccacatactgtctgctatggcagtgaacagcatccggtttcaagtcttagtagcctcttatatgctcagggaaaatacgtctatgttgatggcgacggatctgttcccgcagaatcagcaaaggctgacggatttaatgcagtggcaagggttggggtggctgctgaccaccggggaatcgtgtgcagtcgccgcgtgttccggatcgttcagcactggctgcacgctggagaacctgacccgttctacgacccgctgagcgactatgtcatactcccaacactctacgaaatcgagaagcatcgtgagaaacacggggatgtcacgtccgtagcggaggactgggagatcatctccccgaatgacggcaagaccttgaggccaggcgagcttcctcctatggtcagcacactgaccacgagccgggaaggcaaggagggtgcactggaagaggcgcaggccactgtggtcgttcacccggagaagaaggggcggcagcatgtgcaagttagggctgtgggtgtcagccatggtggctaaagccgtaggagccaccactttggttgtctactctatctagcagtagcagctatacctgtaggtgcacgcactgtaaaattggatgtacatatatggctatgacctctgtagggactctggttttagaactataaatgggcaccctgcctgcttgtaaatgttcagaaccgaaaacacaggccctgttctttttttttccttttttaaaaaaataaaaagatggtaaaggattccattacttggaaggcacattacctatgtgg

SEQ ID NO: 106263 - DNA, 470 bp, Zea Mays
attgtcggcgcaagttggagcgcggcaagcgggtctgtcattgtcggcgccgccgtcagcagcccggcggcggcgggcgataccgcgctcgccgaaggcttccggctgggccacggcggcgtgtgaggttgatgatggggtcaactgcctatgcatacagtgcagcaccgacctctgggagtctgggtaggcgttgcagtttgcaaacaacaaatgcctgctgcaaaagtaaagaatctgaatcatcaaaagcactggattggtggaatctgtacaaggtcagaggtaaccgaagatattccgtagccatgtgccgtgtctatgcttgcctgttcgtcagacttggaataagctagctgcagcttctgctcaagtttgtccctctcttctgtcacctggagaactcggagaaattcaacacgagaaaaaacagctgggaaaactagcaaatgcatcatgcggttttaatc

SEQ ID NO: 106264 - DNA, 2117 bp, Zea Mays
gcggagcacggggactcggggagagagataataccgtggacaaaattgggcacgtcttcttctccgcgaacctcgcgtcctcctcgcctgcctgcctacaagtctcccccctcccctccccgtgcctccctcgggcctcgcttctcgcgctcttcctctcttgcctccgcctgcctccaggctccaacaacccgggagggcgccgtccgcccccgcctccgggagcgatgatgatcgcgcgacgcctgctccgatccaataatgcccccgcccaggcaaccagcttattgaagcatgtaactggcaccgcaagtttgcaaggcaatgcggatagcttgttggatggtacagtcagacattttggctcagcaccgtctgcccagcctgaagaaaatgggttcaagggccacggcatgctggcgccttttacagctggctggcagagcaatgatttgcaccctctgatcattgagagatctgagggttcctatgtctatgacattaatgggaacaagtatctggactctcttgcaggattatggtgcacagctttaggtggtagcgagcctcgcttagtcaaagcagcaactgagcaattaaacaaactacccttctaccattccttctggaaccgtacaacaaaaccttcgttggatcttgcacaggagatccttagcatgttcactgcaagggaaatggggaaagttttcttcacaaacagtggttcagaagcaaatgactctcaggtcaaactagtatggtattataacaatgcattggggaggccaaacaagaagaaatttattgcgcgatcaaaagcataccatggatctacattgatttcagcgagcctaactggtcttcctgccctacaccagaagtttgatctaccagcaccttttgttctgcacactgactgccctcactactggcgatatcatcttcctggcgagacagaagaagattttgcgactagacttgccaccaatttagagaacctcattctcaaagaaggaccagaaacaattgctgctttcattgctgaacctgtgatgggtgctggtggtgtcatccctcctccaaagacctattttgacaaggttcaagcaatcgtgaagaagtatgacattcttttcatagcagatgaggttatcactgcatttggaaggctgggaactatgtttggatgcgattactataacatcaagccagatctagtttcactggccaaggctctttcaaacgcctacgtacccatcggggcaactcttgttagcccagagatatcagatgtgatccattcccagagcaataagcttggttcatttgctcatggattcacgtactccggccatccggttgcctgtgctgtggccattgaagctctgaaactttatcgcgaaagggacattcccggccatgtcaagcaaatcgccccaaagttccaggacgggattagggcgctggcagacagtccgattatcggggagatacgtggcttggggatgattatggggaccgaattcacaaacaacaagtcaccgactgatctgttccctgccgaatggggggtcggtgccatcttcggcgaagagtgccagaagcgcggcatgctggtgagggtcgctggcgacgccatcatgatgtcgccgacgctgatcatgacgcccggcgaagtcgacgagttggtgcgcatctacggggaagccctcaaggccacggaggagagggtggcagccctgcagtccaagaagaactagccaaaagggcggcgacgacgataacgataaacgccgggcgacgacggaccatatttgatgtacaggtgaataaacagccaagttcgtggctgcgagatggcaatagcgcgccggtctatgttcttgctctgtcgccaagcaaatggtggctcaactttttaaacatgtcatagatgtttttttcttcccttcctttcccttaaggaatggcaatacatctcaaatgtttgctgccctgtagttcctgaagataatgggtttcgtgtatatcgtgagtattagtagtgttcggatacatagctttgtaaaggcaaagcaataataaagtgaaggaactgcagtttcgagtctgcaagc

SEQ ID NO: 106265 - DNA, 603 bp, Zea Mays
attgttgttcatgaactgctaaatagagttgaggcctacatcaaggacttgaattcttgctctaaatgcttattgtgtctcattctgtttcctatcaacaggttcaagcaatcgtgaagaagtatgacattcttttcatagcagatgaggtatttgtcactttctattaagtcaaaaaaattgcggaagatcatacaaaggggaaaaaatatatgtagcttttgtgcagatattgttgactgatgattcattctaggttatcactgcatttggaaggctgggaactatgtttggatgcgattactataacatcaagccagatctagtttcactggccaaggctctttcaaacgcctacgtacccatcggggcaactcttgttagcccagagatatcagatgtgatccattcccagagcaataagcttggttcatttgctcatggattcacgtactccggccatccggttgcctgtgctgtggccattgaagctctgaaactttatcggtatgtatgccgcgccgcgctttccagaacacgtattcgagtgttatttatctgtttgttcctgacgaatggtttgcaaaaaaaaataaaaaaaaa

SEQ ID NO: 106266 - DNA, 1932 bp, Zea Mays
gtgataccactcctccatgaaatctctctctctcacacacacacacacacatattctcattctgcaacttagcacaagaacattttgcgcaaatgttgtttgtttgattttatagacctgctcatgctttaatacatctgatcttcataaaagtttgattttttccgaaatacagtataagaactgcacagttctactagcatttgcttctgtatagataactttctgttgtatcctgcatatgtacctatttgtttccatctcttgtgactttattggcttgaagccatttgctatcatctcttggtcatacatataaaatcttttcgtcttctcgtgcttatgaaatattttcatcttctcaaccttttaaattcatttgatcttcatggaacttgaagcctgaagtcatttgcttctacctcctctcacacatatgaaatatttatttgtttcttatcatggttgtgctttggtgtcctgaatcatgactgtcaatgttcgcagcatatgttcttgtaggttgaatagaagagtggaagcaccaagctgtaccaatggggcgtggaaaagtagagctgaagaagattgagaatccaacaaaccgccaagttaccttctccaagaggcggatggggttgttcaagaaggcaaatgagctagccattctttgtgatgcgcaaatcggagtcatcatattctctggcagtggcaggatgtacgagtactccagccctccatggagaatagcaagcgtctttgacaggtacctgaaagcccctagcacccgtttcgaggagatggacatccagcagaaaatcgtccaggagatgactaggatgaaggatgagaggaacagactgaggatgatcatggcgcagtacatggcggaggacctggcatcgttctccgcgcaggatctgagcaaccttgagcagcaaatcgagttctcgctgtacaaagttcgcctcaggaagcaagagctactcgaccagcagctgctcgagatccaccaaagggagatgcatatgccagcagagcagggcggctacctgtgcctcatgaacccggctgcggctattgctagcgggcagcaccagcaggctggcgagatggtgggaattaacccgaggccgttcccgtggtgggacgtgggagccagtggcagtggcagtggcagccagagccagcagcagctgctgcacggccgggacgccgcggagtcgtcgatgacggcgctcgggctgtcgccgcagctgcatgggtacaggctccagccgcggcagcccaacctgcagcaggacgccgacatccatggctggctgtgatttgctttggtcgtgggtgtgcgtcctcaacgagacgagacgacgctgaacgtgcagctcctctgcttgcgacctgttcattctagagtctttgatcatgacctgcccccgtaatgaaaccgccagtagtcgtcaatatctccttctctaacctaagattggacctaagagggacataatgtggtcgcaaatccatataatagagtctatccgtcgcctcagccaacgtgccctgctgaaaataaactttactggagctggcttgttagtgctgggagctgggttgtcatcgcgttgcgcgtcgtttgtgttgaggttgtaaagtagaaactgtgcgagaatgaaatgagaacctctgtttctttattgaataaagcaatgtatttatacaagaggaggagacacaaaaggaggggtcaaaagccacgtccgtacgtgggggatgtgcaggggcacgtccctttggaagacgtcggttgccaccagagagcaactgattatattttataacactcccccttaagcagttgtccattatgtatatcctcccttgaaacctgtaagcaaaaggtggtttgcaataatatactgtgtaatacttcag

SEQ ID NO: 106267 - DNA, 1239 bp, Zea Mays
ctacctcagaagaagcagatacagcatatgttcttgtaggttgaatagaagagtggaagcaccaagctgtaccaatggggcgtggaaaagtagagctgaagaagattgagaatccaacaaaccgccaagttaccttctccaagaggcggatggggttgttcaagaaggcaaatgagctagccattctttgtgatgcgcaaatcggagtcatcatattctctggcagtggcaggatgtacgagtactccagccctccatggagaatagcaagcgtctttgacaggtacctgaaagcccctagcacccgtttcgaggagatggacatccagcagaaaatcgtccaggagatgactaggatgaaggatgagaggaacagactgaggatgatcatggcgcagtacatggcggaggacctggcatcgttctccgcgcaggatctgagcaaccttgagcagcaaatcgagttctcgctgtacaaagttcgcctcaggaagcaagagctactcgaccagcagctgctcgagatccaccaaagggagatgcatatgccagcagagcagggcggctacctgtgcctcatgaacccggctgcggctattgctagcgggcagcaccagcaggctggcgagatggtgggaattaacccgaggccgttcccgtggtgggacgtgggagccagtggcagtggcagtggcagccagagccagcagcagctgctgcacggccgggacgccgcggagtcgtcgatgacggcgctcgggctgtcgccgcagctgcatgggtacaggctccagccgcggcagcccaacctgcagcaggacgccgacatccatggctggctgtgatttgctttggtcgtgggtgtgcgtcctcaacgagacgagacgacgctgaacgtgcagctcctctgcttgcgacctgttcattctagagtctttgatcatgacctgcccccgtaatgaaaccgccagtagtcgtcaatatctccttctctaacctaagattggacctaagagggacataatgtggtcgcaaatccatataatagagtctatccgtcgcctcagccaacgtgccctgctgaaaataaactttactggagctggcttgttagtgctgggagctgggttgtcatcgcgttgcgcgtcgtttgtgttgaggttgtaaagtagaaactgtgcgagaatgaaatgagaacctctgtttctttattgaataaagcaatgtatttatacaaga

SEQ ID NO: 106268 - DNA, 1227 bp, Zea Mays
ctacctcagaagaagcagatacagcatatgttcttgtaggttgaatagaagagtggaagcaccaagctgtaccaatggggcgtggaaaagtagagctgaagaagattgagaatccaacaaaccgccaagttaccttctccaagaggcggatggggttgttcaagaaggcaaatgagctagccattctttgtgatgcgcaaatcggagtcatcatattctctggcagtggcaggatgtacgagtactccagccctccatggagaatagcaagcgtctttgacaggtacctgaaagcccctagcacccgtttcgaggagatggacatccagcaggagatgactaggatgaaggatgagaggaacagactgaggatgatcatggcgcagtacatggcggaggacctggcatcgttctccgcgcaggatctgagcaaccttgagcagcaaatcgagttctcgctgtacaaagttcgcctcaggaagcaagagctactcgaccagcagctgctcgagatccaccaaagggagatgcatatgccagcagagcagggcggctacctgtgcctcatgaacccggctgcggctattgctagcgggcagcaccagcaggctggcgagatggtgggaattaacccgaggccgttcccgtggtgggacgtgggagccagtggcagtggcagtggcagccagagccagcagcagctgctgcacggccgggacgccgcggagtcgtcgatgacggcgctcgggctgtcgccgcagctgcatgggtacaggctccagccgcggcagcccaacctgcagcaggacgccgacatccatggctggctgtgatttgctttggtcgtgggtgtgcgtcctcaacgagacgagacgacgctgaacgtgcagctcctctgcttgcgacctgttcattctagagtctttgatcatgacctgcccccgtaatgaaaccgccagtagtcgtcaatatctccttctctaacctaagattggacctaagagggacataatgtggtcgcaaatccatataatagagtctatccgtcgcctcagccaacgtgccctgctgaaaataaactttactggagctggcttgttagtgctgggagctgggttgtcatcgcgttgcgcgtcgtttgtgttgaggttgtaaagtagaaactgtgcgagaatgaaatgagaacctctgtttctttattgaataaagcaatgtatttatacaaga

SEQ ID NO: 106269 - DNA, 1663 bp, Zea Mays
ggacggcataatttctttacccaatcgcaatcggcccaccgagcatgagggggggcgacttcctcgaattttccttctcttctctgaccgactgatcttagcgatcttctccctcgaatcttagcgtagcggtagcgccgatcctgttcctgtgccgtgccggcttggattggaaaataggagggagaagatcaacgccgccgcggtgcggcctgtggagtattaaacaaagatgcgcagagcccggctgcgccggcagctagcagccaacgcgaaacttcagcttccgctccgccgtccccctcccggacccaaacaaacaaaccatcgtcacccaatagccaccggccaactgtcaagcactccttcggtgcttccccatctgcgccccccgatccctccggacccgcgagcgaggccgtcgccggcgcgcgcgagatttgagctgaggccatggagtcaccgttccgggccgacgtggtcaaggacaaggcggcgctggtcaccggcgggggatccggcatctgctttgagatcgccgcccagctcgcgcgccacggcgcgcaggtcgccatcatgggccgccgccgggaggtcctcgacaaggccgtcgccgcgctccggtcccagggcctccgggctgttggtttcgatggagatgtccgcaaccaggaggacgcggccagagtgcttgctgcaacagttgcacattttggcaagctcgacattcttgtgaacggtgcagctggcaacttccttgcttccccggaggatttgacgcccaagggattcagaactgttcttgagatcgacactttgggtacatacacaatgtgctatgaagccctcaagtatctgaaaaagggtgggccaggaaaaggcccgtccactggtggactaatcattaacataagtgcaacactgcattacagtgcttcttggtaccaaatccatgtctctgctgctaaggctggggttgatagcatcacaagatcactggctctggagtggggaacagattatgacattagagtcaacgggattgcacctggaccaattcaagacaccccggggctgaggaagcttgcacctgaagaaatgagcaaggggcttcgagaaatgatgccattgttcaaatttggggagaagcgggacatagcaatggctgcgctctaccttgcttctgatgcaggcaaatatgtaaatgggacaacactggtggtcgatggaggtctttggttaagtcaccctcgccatattcccaaggaggaagttagggagctgtcgaaggtggttgagaagaaggtgtgaacacaatggagatggagatcttcaagagaaagaaaacaagacgctgacaggcaagcaaagctgtgcgattctcctcctgtgtctcaactgccgcgtgagaaggagagaatcatttctttgccttataagtcactatgacggtgccgtgaactctttcggaggtatccagtttaagaaaaagctcttgtaccatctcgttctgctggtctttgatcatgactcgtggatgacgatctgaactctgacggtaccagttcacaagtttctttctgaaaaaaaaaattctcccattcgaactgtcttgtaaggctgagcaaaccatagtttctggactaactatgattgttacatg

SEQ ID NO: 106270 - DNA, 1594 bp, Zea Mays
gaaggacggcataatttctttacccaatcgcaatcggcccaccgagcatgagggggggcgacttcctcgaattttccttctcttctctgaccgactgatcttagcgatcttctccctcgaatcttagcgtagcggtagcgccgatcctgttcctgtgccgtgccggcttggattggaaaataggagggagaagatcaacgccgccgcggtgcggcctgtggagtattaaacaaagatgcgcagagcccggctgcgccggcagctagcagccaacgcgaaacttcagcttccgctccgccgtccccctcccggacccaaacaaacaaaccatcgtcacccaatagccaccggccaactgtcaagcactccttcggtgcttccccatctgcgccccccgatccctccggacccgcgagcgaggccgtcgccggcgcgcgcgagatttgagctgaggccatggagtcaccgttccgggccgacgtggtcaaggacaaggcggcgctggtcaccggcgggggatccggcatctgctttgagatcgccgcccagctcgcgcgccacggcgcgcaggtcgccatcatgggccgccgccgggaggtcctcgacaaggccgtcgccgcgctccggtcccagggcctccgggctgttggtttcgatggagatgtccgcaaccaggaggacgcggccagagtgcttgctgcaacagttgcacattttggcaagctcgacattcttgtgaacggtgcagctggcaacttccttgcttccccggaggatttgacgcccaagggattcagaactgttcttgagatcgacactttgggtacatacacaatgtgctatgaagccctcaagtatctgaaaaagggtgggccaggaaaaggcccgtccactggtggactaatcattaacataagtgcaacactgcattacagtgcttcttggtaccaaatccatgtctctgctgctaaggctggggttgatagcatcacaagatcactggctctggagtggggaacagattatgacattagagtcaacgggattgcacctggaccaattcaagacaccccggggctgaggaagcttgcacctgaagaaatgagcaaggggcttcgagaaatgatgccattgttcaaatttggggagaagcgggacatagcaatggctgcgctctaccttgcttctgatgcaggcaaatatgtaaatgggacaacactggtggtcgatggaggtctttggttaagtcaccctcgccatattcccaaggaggaagttagggagctgtcgaaggtggttgagaagaaggttagggcctctggtgttggtgtaacatctagcaaattgtgatttgcatttgtgtgatctgtagcatcgatcaatatgttattacagaactttattgtctgtgtggctcttgcaatctaattagcgagtttgtttagttgagtaacttggcatatttacagtacatttctttcttctaagttccatttgagacagttttgattgatatgtgatgccagccaagatgtttgtcgccaaacgttcacgttatgtgctgtgaacacaaaatacagcataattgtccctc

SEQ ID NO: 106271 - DNA, 387 bp, Zea Mays
atgcttgaagtgcctgacgccggtgaggacgagcgacacaccatacttgttgcagcacgcgacggcgtcctcgtccttcttactgcctcctggctgggcgatgatgccgatgccgttctggcacgcctcctcgacggcatcattccaggcaaaaggaaagaaggcgtcgctggccaatgcagctcccttggcctcctctcctgccttcctgaaggcgattcggacgctctctcgcctgttcggctgaccactgcccattcccagcatgcagttgttcttggctatcacaatcgcattgctcttgacatgttttgcgcaaagccaggcaaatttggcatcggcaagctcgttttcttgcggagacctctcagactttgtggtaaaggt

SEQ ID NO: 106272 - DNA, 213 bp, Zea Mays
atgtttctcctggtgcataggcgcacggctgattttgtgacagaaaaaagtaccaacctgaaagtccttaggttgggttcaattgtcactcgcggtacacccatcagcttattcgactccaggagaaacattaccttccccacgagctcacccagcaaagcctacgccttacagaaaccaaaatttgcagtttttgcactttgcagaaagcta

SEQ ID NO: 106273 - DNA, 1143 bp, Zea Mays
atgagagggcatacgaggcaagaactggtggtactctcgagggggtacctcccagacgcaggggcgagggtcaggataatatgggaaagtggcaggataactttgtcttgtcacaggggcggtagggtggtggcaacaggtttggatactctggtagaggtgcaatatctggtcaaagtggtggtagataccagagggacaggggcaatcagggttaccgcaggggctatgatagcatttcaaggtttcaggatgcaaggggtcgcaaccagtctattccatcaggcagaggtggatctagatgctgtggagcggtctgaggggtggcgtttcacggaccgccatgacgctgcgctccagctaaacctactccagctccacgacgccgaccagatgtgtgtcatcctcccatcaaatcgtggtagtgtggcgagaacaaaatggatggagttgttcccttcaatcatgtccaaggcaagaactattcaggtcataaccccctacgacaggggccatgagggctcatcttcgccactgcccctactcccaccttctgaacgaggtgcaccacaccacactgctagggagcgaacacaggtcttgcaggatgtagcttctgacccaaatcttcttagaaccaagattgtccgttgtaatctctatgggcatggagagactattttcttccagacactccaccaaatgtttgttgtgaacgctggcagtggatttaagcggatctggaacagcgtgaagggcttccttgacccaaaaacttcatccaagattcatgtgcttggttcgaactaccagagcaggcttcttgaagtaatagattcgagtgagctgccagaattccttgggggttcatgcacatggttgcttgactatggttgcttgactccagttcatgaggaagtaaagggcacagatcgtgtgacatacttaagctatgatgatcaaagccacctggatatggctcctgaatcttaccgtggagtgcgacgagctactggaatggagcaccacaaaccaatggctgatttcagccaatattctgctaatagaaggcatggtatattcttttcctaccattttggtcaaatgagtctgaacctacaattgcttgttaacatttcataa

SEQ ID NO: 106274 - DNA, 414 bp, Zea Mays
atggcgggtggcggccgccaaagccagaggccggacgtccaaacaatggcagagccgcaaagcgacgaagggagagcagaactgggcgggggcgcaaggcagtgtgcggtgagcgatgagcaacgctggaggttgctggcagcttggggctggatcctggtgagattctgccttgtctgcctttcagtggacttgcgtgaaccccagagccttcgagcgggttccagcagcgtgggtggaagtggaataccccaatggcggcccgattcctccatctgcagactctgtgaagatggccaggaaaaaggggggtacgagctccgttttatagtccgcaaaggcagagttcctcgtcaactgcagcgtgcgatgggtagggaggatgtaacaactcatggcggtatcggcgtttga

SEQ ID NO: 106275 - DNA, 865 bp, Zea Mays
gaaccaacccctctcgctccgctatttataggattgctccctagggtttccgccgcgccgccacttcccctccgagcctcagttcgcatccacgcgcgccgccgccgcctcgcagctcgacgctcaccgcgcagccatggcggaacagactgagaaggctttcctcaagcagccaaaggttttcctcagctcaaagaaatccggcaaaggtaagaagcctggcaagggcggcaaccgattctggaagagcattggccttggcttcaagactcccagggaagcaattgaagggacctacattgacaagaaatgcccattcactggaactgtttctatcagaggcagaattattgctgggacatgccacagtgctaagatgaacagaactatcattgttcgcaggaactacctccactttgtaaagaaataccagaggtatgagaagaggcactccaacattcctgctcacatctccccatgcttccgtgtgaaggaaggtgaccatgtcatcattggccagtgcaggcccctgtcaaaaactgtgaggttcaatgtcgttaaagtcattccagctggatccgcagctgctggaaagaaggccttcacagcagcctgagtttatagactatgttccatgagtagtctatagaatgtctttttaattcaaaagaaatctctcttctaggctggtgcttttcgactataatttggagattgttccatgtccgtgcaatcatctgaacatgttactacttattgtaccttgtcgtgcaaagttttgctaagatctctattgtttcatgtcttctgatatgtctgggctgtgttcctaatttcctatgcttttacgctatgttacctagga

SEQ ID NO: 106276 - DNA, 768 bp, Zea Mays
gaaccaacccctctcgctccgctatttataggattgctccctagggtttccgccgcgccgccacttcccctccgagcctcagttcgcatccacgcgcgccgccgccgcctcgcagctcgacgctcaccgcgcagccatggcggaacagactgagaaggctttcctcaagcagccaaaggttttcctcagctcaaagaaatccggcaaaggtaagaagcctggcaagggcggcaaccgattctggaagagcattggccttggcttcaagactcccagggaagcaattgaagggacctacattgacaagaaatgcccattcactggaactgtttctatcagaggcagaattattgctgggacatgccacagtgctaagatgaacagaactatcattgttcgcaggaactacctccactttgtaaagaaataccagagtgaacaggcccctgtcaaaaactgtgaggttcaatgtcgttaaagtcattccagctggatccgcagctgctggaaagaaggccttcacagcagcctgagtttatagactatgttccatgagtagtctatagaatgtctttttaattcaaaagaaatctctcttctaggctggtgcttttcgactataatttggagattgttccatgtccgtgcaatcatctgaacatgttactacttattgtaccttgtcgtgcaaagttttgctaagatctctattgtttcatgtcttctgatatgtctgggctgtgttcctaatttcctatgcttttacgc

SEQ ID NO: 106277 - DNA, 780 bp, Zea Mays
gaaccaacccctctcgctccgctatttataggattgctccctagggtttccgccgcgccgccacttcccctccgagcctcagttcgcatccacgcgcgccgccgccgcctcgcagctcgacgctcaccgcgcagccatggcggaacaggtaatgctgtttctcgctacttcctgcgtacgacgtccgcttcgtcgctcgccgtcggggcagtttgatatgcgatgcgaattcgcatagataagtttgcttgtccctcacctggtttggtcccgtgtggagatgcctgcggctgctagtgtgtgtgggtttgttgggatctatgtgctcgatcttatcgacagcttatctttgcatatttgtcagcgtgtgggggtttgcaaatgagtagaatccgattatggtagaatctagtgatgcatccttcgtcaatcgtttgtcggggatttatagttaagggcacaagaactcatcgagggtttaaatccgattatagtagaatctagtgctggcacttgccaatctcacttattcttctgtagggttgcggctctgctactcggtaattagagggacgtgattattgtggtacttggagttgtaatttgtgaccattaatgcataatatgagacttagttgtataaactttattaccgtagttccattgtatgccttttaagccttttaggactaggtttagtttgtacttttgatatgatgcgtttacagcagtattagtacgctctgattatttcagaacacagtacttactgcattagtc

SEQ ID NO: 106278 - DNA, 2027 bp, Zea Mays
caccacctatatatcctcctcctcctccatgactactctctgctgtgctgcgcaggtgcaagtgcgacccaacccagccgggaaaggaaagaggaaagggagggagggaggggaccgttgcagttgcagccattgatgcgccagcagtagcgccagcagagcggagcggagcggcaccggcctgcagctcagcgccaggctcaagagaccgatagggcaagggggttaagcatggagcctgcggcgggacggagagcgagatgtctgctgttgcctctacttgtgggggctctcgccctcgcattggccggcgctgcgactgcgaccgcgtggcctcaccctcacggcggcgccgccggtcttggacatggcgctggcgccgcagccgcgggtgcgggcaggccgggcggcgccgagcgctggtacagggatctcgcgctcaggaggatggagagcgtcagatcctccttcggggccagaagagatttggcgacggcttccgcgagcgcgcgggtgtaccacgtgacggactacggcgcggacccgaccggcgccgccgacgccacggcggcgatcagcaaggccatagctgacgcgttccgcccgcccaccaacgccaccatgaccggcggcatccccgacctcggcggcgccgaggtgcacctcgacggcggcacgtacctcatcaaggggcccctcacgctgccggcatccggcggcggcaacttcaagatccacagcgggtcgctgcgcgcgtccgacgacttcccgacggaccggtacctgatcgagctgtcggcggccaagagcggccggagctacgactacgagtacgccacgctgcgggacctgatgctggactgcagctaccgcggcggcggcgtggcggtggtggactcgctccgcgtcgccgtcgacaactgctacgtggcgcacttcgcgtccgacggcgtcgcggtgcgcggcggccacgagacgctcatccgcaacacctacctcggccagcacatgacggccgggggcgacccgggggagcgcggcttcacgggcacggccatccgcctcgacggcaacgacaactccgtgtccgacgtcgtcatcttctccgcggccacggggatcatggtcaccgcgccggccaactccatctccggcgtgcactgctacaacaaggccacgggcttcggcggcaccggcatccacctcaagatcccgggcctcacgcaggcgtggatcagcaactgctacatggactacaccagcatcgtcgccgaggaccccgtgctgctccacgtctccggatccttcttcctcggcgacgccaacgtcgtgctcaaggccgtcagcggcgtcgccaggggcgtccaggtcgtcggcaacatcttcagcggccgggacaagggcgtcgacatcgtgcagctggacggcgccttcgccaccgtggaccaggtgtacgtgcagcagaactccgccacggggatgaccgtcaggtccacctccgcgcgcgcatcgctcgagggcaacgggacctcctggacgctcgacttctcgccggtgctgctgttcccggaccgcatcggccacgtgcagtactcgctcgtcgccggcgacgagttcccgggccacacgctccggaacgtgtccgggaaccaggtcgtggtcgccaccgacaaggccgtctcggccacggtccacgtcttggtggaccagaacagcgactgagataagataagagacactcgagagtgcctgcgtgcacgcagtatgcgtgctgctgcctgctcgcgcggctgctgcggagcaaggcgttattccttcgtttctttcttctccaaaatttcagccattcatgtcgtcgggaagatgacaattgtttgatgcgacaaaatgctccagaatggatcattcttttgctgtatgaaatgaaatgattcagaagctccatcaatctgcgtaccaagacataaaacatgtgttgctgactagcaacataagcatgcaagtaattatgagaaaacgacaaaaaa

SEQ ID NO: 106279 - DNA, 1790 bp, Zea Mays
caccacctatatatcctcctcctcctccatgactactctctgctgtgctgcgcaggtgcaagtgcgacccaacccagccgggaaaggaaagaggaaagggagggagggaggggaccgttgcagttgcagccattgatgcgccagcagtagcgccagcagagcggagcggagcggcaccggcctgcagctcagcgccaggctcaagagaccgatagggcaagggggttaagcatggagcctgcggcgggacggagagcgagatgtctgctgttgcctctacttgtgggggctctcgccctcgcattggccggcgctgcgactgcgaccgcgtggcctcaccctcacggcggcgccgccggtcttggacatggcgctggcgccgcagccgcgggtgcgggcaggccgggcggcgccgagcgctggtacagggatctcgcgctcaggaggatggagagcgtcagatcctccttcggggccagaagagatttggcgacgatccacagcgggtcgctgcgcgcgtccgacgacttcccgacggaccggtacctgatcgagctgtcggcggccaagagcggccggagctacgactacgagtacgccacgctgcgggacctgatgctggactgcagctaccgcggcggcggcgtggcggtggtggactcgctccgcgtcgccgtcgacaactgctacgtggcgcacttcgcgtccgacggcgtcgcggtgcgcggcggccacgagacgctcatccgcaacacctacctcggccagcacatgacggccgggggcgacccgggggagcgcggcttcacgggcacggccatccgcctcgacggcaacgacaactccgtgtccgacgtcgtcatcttctccgcggccacggggatcatggtcaccgcgccggccaactccatctccggcgtgcactgctacaacaaggccacgggcttcggcggcaccggcatccacctcaagatcccgggcctcacgcaggcgtggatcagcaactgctacatggactacaccagcatcgtcgccgaggaccccgtgctgctccacgtctccggatccttcttcctcggcgacgccaacgtcgtgctcaaggccgtcagcggcgtcgccaggggcgtccaggtcgtcggcaacatcttcagcggccgggacaagggcgtcgacatcgtgcagctggacggcgccttcgccaccgtggaccaggtgtacgtgcagcagaactccgccacggggatgaccgtcaggtccacctccgcgcgcgcatcgctcgagggcaacgggacctcctggacgctcgacttctcgccggtgctgctgttcccggaccgcatcggccacgtgcagtactcgctcgtcgccggcgacgagttcccgggccacacgctccggaacgtgtccgggaaccaggtcgtggtcgccaccgacaaggccgtctcggccacggtccacgtcttggtggaccagaacagcgactgagataagataagagacactcgagagtgcctgcgtgcacgcagtatgcgtgctgctgcctgctcgcgcggctgctgcggagcaaggcgttattccttcgtttctttcttctccaaaatttcagccattcatgtcgtcgggaagatgacaattgtttgatgcgacaaaatgctccagaatggatcattcttttgctgtatgaaatgaaatgattcagaagctccatcaatctgcgtaccaagacataaaacatgtgttgctgactagcaacataagcatgcaagtaattatgagaaaacgacaaaaaa

SEQ ID NO: 106280 - DNA, 1717 bp, Zea Mays
gctgctcctgccagtacaatatctctcgcattttgcaagaaatgtcacggcgtttagcagtcaccaaccaaggttggagctttgcgattaaaagtaacaaacaaaaccaaccccccaccgtctcgttttccgccggccgtcactgtcgatgctcagaggatccaatcatccgagccttcctggagaaacatgctgaaaacgacgtcaggctcgtcgcctcgtcggtcagccaagccaaccaccaccaccacccataggccatagggcacgagtcaataggcgagccgtttcaccgccgttgcatcaggttcttgaccgcagcaaaactacccccgcctgcattttcgtcaaaccaaacttagtacggcattgcctcccagtttccccatcgccagcaccagggccagtgccacgccaaccaccgctacctgctccgcgccaaacgccagttgctttgcagctactcgtgcagccgtgcccgccgcacacggcttccgcgagcgcgcgggtgtaccacgtgacggactacggcgcggacccgaccggcgccgccgacgccacggcggcgatcagcaaggccatagctgacgcgttccgcccgcccaccaacgccaccatgaccggcggcatccccgacctcggcggcgccgaggtgcacctcgacggcggcacgtacctcatcaaggggcccctcacgctgccggcatccggcggcggcaacttcaagatccacagcgggtcgctgcgcgcgtccgacgacttcccgacggaccggtacctgatcgagctgtcggcggccaagagcggccggagctacgactacgagtacgccacgctgcgggacctgatgctggactgcagctaccgcggcggcggcgtggcggtggtggactcgctccgcgtcgccgtcgacaactgctacgtggcgcacttcgcgtccgacggcgtcgcggtgcgcggcggccacgagacgctcatccgcaacacctacctcggccagcacatgacggccgggggcgacccgggggagcgcggcttcacgggcacggccatccgcctcgacggcaacgacaactccgtgtccgacgtcgtcatcttctccgcggccacggggatcatggtcaccgcgccggccaactccatctccggcgtgcactgctacaacaaggccacgggcttcggcggcaccggcatccacctcaagatcccgggcctcacgcaggcgtggatcagcaactgctacatggactacaccagcatcgtcgccgaggaccccgtgctgctccacgtctccggatccttcttcctcggcgacgccaacgtcgtgctcaaggccgtcagcggcgtcgccaggggcgtccaggtcgtcggcaacatcttcagcggccgggacaagggcgtcgacatcgtgcagctggacggcgccttcgccaccgtggaccaggtgtacgtgcagcagaactccgccacggggatgaccgtcaggtccacctccgcgcgcgcatcgctcgagggcaacgggacctcctggacgctcgacttctcgccggtgctgctgttcccggaccgcatcggccacgtgcagtactcgctcgtcgccggcgacgagttcccgggccacacgctccggaacgtgtccgggaaccaggtcgtggtcgccaccgacaaggccgtctcggccacggtccacgtcttggtggaccagaacagcgactga

SEQ ID NO: 106281 - DNA, 3447 bp, Zea Mays
ttatcacctaggcatgccaagggatcttggaatggacaaggaccggacctccggagccgaacttggaaacatcacgttgagcctgtgcatcaagacgtcggccttggatggtatctcgttcaggaggaactgctggacaatcggcttcttaaaccactccagtaccgagtcgccgggtgcccgcaagacgactttgctcacctcaaacggcgactccagcgacgccagcacctgtgccaccaccatcttcagtgtcggcccagtcaccagcttgatgcgccgtggcacaaccccgtagtagagcatccgcttcctgaaccgatgcagtgtgtgcacggtagccacgagagctgcgcccacggataagctcctgacatccagggaccaggcgatgtgctggtcaaaaacgattgccttggcgaacagcttattctcgtaggcgaccttccaaacacagcgggcacggttcatctgccccatgagcaccaggtagttgagcaggacgttcacaaagtacctggctgcactctcctcgttgtcgtagtcgatgccctggaagaactcgcgcacgaaagagagcacgggctgcttccgctgctccggaccagtgaacagcccgcacatgaagtcatgtgctttgtgcttgctggtgcccaggatgtccatgattgtacgctcgctgctctcgtcctggcaccggaccaagtgcgcgaggatggatgtgtagagaatcaagtccaccttggctgccccagcgacataagcctcaagcaacgaccgcgctgagtcatacagccccgtcttcatgcaagactcaaacagctgcctaatgatgaagttgttggtccttatgccagccgaacccatgaaccgtagccaccggagtgcaaggtcagttgacccatccttgatgtagatcatcagcaggtcacttgcggtcacctctatcgggaaacctgacgccttcatctccaacagcacctttgcagccaaatccagcagactcttattcgccagcattgtgagcaacgctgtaaacgtgctaagccctggccttgtccctgaattcgccatggagtgatacaaccgcattgctgcatccacctgccctgcggaggcatgcatttccaccagacaggcatatgtggccggcgtagggaaaaagccagacttctccatgtcaccgaacaacttggcggccatgtccaaccttccagaccgtgcattggcctcgaccaccatcgtgtacaagccaaagcttggtcggagccctcccctcctcatctcctcccaaagctccatcccagcatccagcttcccagatctcaccagtgcctccaccatggcggtgctcactgctgtgcttacccgatgcccgaccaccaccatctctctgtacattcccatggccgcatcaagcctccctgccttggccagcacgtccaccatcaccgaatacacgcccaccggcgcccgcccaattccctccctttgcttcatttcatcgaacatcttgcgggcggcgtcgatcctcccggcgcgcgccagcgcaggcaccgcgagctggtatgtgccctcgtcgagggcgcagcccgaggtcgccatttcgtcgagcacttcgaaggccttgaatgcaagccccctggtgagcaacagagagaggagggcgttgtaggcgggcgtctcgaggcccctgaagctgacgtcgcggaggcgcttgaagcagtagaaggccggctcgagaaggccgtgggtggcgagcgcggagacgacggcgttgaaggtcttggggaaggtggcgaggtcggagagcccgagggtgtcgtcgaagagcgcgaggagttcggaggagtgagttgccggcgggagacgcgcggcgaggagcgaggagaggtcgtcggaggggacgaaccacggctggaggcgcgcccatgcgacaagggagatgagcgggacggggtcggaagccgggagcgaggcggccgcgaggaggagcagcgcggggtctggcggggagggcagtgcggagagcgcggcggagagagtcgcgcccgatcggtgccggagcgcgagcgccgcgaggcgggccgccgctgcggggcgcgggagcgggtgcgcggaggcgccggataggatggtggggtcggcgcccggcacggccggccgcgccccgcgcgccgaggagagcagcgcgcccgactcgtccaggtagtccaccgtgtccgtccactcggggtcgggccgggacgggggcactggtggcggcgactcgaaggagagatgccgcgctatggctaaggagagggagacgccgccaccgccgccgcgaaggcgggcgctgcgcgcgaggccaacgcggagcagcatctcttctccctgtctcactcggtggtttggtcgccgctgccatcaggtggaggtggacattcggcaacggcaagcgcgattcaacggtccagattgcaaaggatcctcccatcccatgaatgacagaatgagcgaggtagcccaaacagaaattttggcccattcgagacggcctactgttgtggtccagtgatccagtctgcgtctctttccccgtcgtggtgggttccgatccaatcgacgtcgacgactccgcagccaccgctcctctcctctcgtcgcttcttctatctctcggcgtcgaatctcatccggccagtgaccacactctactagccgcccggaaggagttcttccgggattcgagccgttgctgccctcacctctgcaggcccagcgtcgagcggagatccaatcggaaattgaactgacttcatcttttgtcgcatcccagtcaggagaagcaatgtcaggagtgatcacaaagttcgcggttacatccatggtgatgtggatggcccctgttgcgatcatgtatgggttttactaccaggtgtttccaggtgtgagtcagatgtcatcctcggcgcagacacttgccagtgggttcctggctgtcatatcagttaatctagtgatcggcttttacatattcatggcgatgaaggagactccacaccaagagccacagccagatcccaccttcctggagaaagccaaagcgagtatcaaccagccaacatcctctcgagtgagtgatgattccaaggggaagggaaaggtcgagtaagctgtagcatgttggcttaggtctcgtgtatgttaagtgcatgttatttaggaggaatagttatgccacaccatcacaaggaccgcaacctttcacaatttatgattttgctgtaaatcttgacagttatggctatggagcaatatgaagttgaaccttttgtacctatttgatttggaaactctgttcaatgttgttttagtcaggatactcatcagaactactgctggttgtattttggtcctttttggttttttggtactccctcctttcttttttatttgtcacgg

SEQ ID NO: 106282 - DNA, 1611 bp, Zea Mays
tcgcgcaataaagagagcagcaactcgcagccgttgcgccgcgttggccgccaatcgcagtatcggcaccgttcttccccgcttctccagtccagctcaccagccgccccccctccgctgctgacactgcgaagtgcgaatcaaagccaccaccgcgcacaaaccatggcaccggtggaggcggagcagcaccggcggagggcgttggcgctcgcggcgcacgacgcctccggcgccgtctcccccatccgcatctcgcgaagggacactggagatgacgatgttgccatacagatactgtactgcgggatatgccactctgacctgcacaccatcaagaacgagtggaagaacgccaactaccctgttgtccctgggcacgagatcgccgggctgatcaccgaggttggcaagaacgtgaagaggttcaacgtcggagacaaggttggcgtcgggtgcatggtcaacacatgccagtcctgcgagagctgcgagggagggcacgagaactactgctccaagatcatcttcacctacaactcccacgacagggacggcaccgtcacctacggtggctactctgacatggttgtcgtcaacgagcgcttcgtcatccggttccctgatggcatgcccctcgacagaggcgcgccgctgctctgtgcagggataaccgtgtacaaccccatgaagcaccacgggctaaacgaggcaggcaagcacatcggcgtggttggactcggggggcttgggcacgtcgccgtgaagttcgcgaaggcgttcgggatgagggtgaccgtgatcagcacgtccccggggaagagggaggaagctatggagacgcttggtgcagacgcctttgttgtcagcggtgatgctaaccagatgaaggctgcgaagggcacaatggatggcattatgaacacggcctctgcaagcatgtccatgtacgcttaccttgctctcctcaagccccagggcaagatgatcctgcttggcctgcctgagaagcctctgcagatctctgccttctctttggttactgggggcaagactctggccgggagctgcatggggagcatcagggacacgcaggagatgatggacttcgcagccaagcacgggttggcagcggacatcgaactgatcggcaccgaagaagttaatgaggccatggaacgcctcgccaagggcgaggtcaggtaccgcttcgtcatcgacatcggcaacaccctcaacgcggcatcactagggagctcgccggtcccagctctgtagctgcggcacttgttgatcaacaaatgctcacataaacatattgttgtttgtcgatatatcgtgcgataagcaagtatatttggaataaaaaggaactcaatttaaacgcaagtaatactgtttgtcttaggtcctatttgggctttggtttattgggtactgcatagttttgccttcgtctagtagtctagtactagtagtaacagatgaaacgatgtactgagagacaaaaccgggggcgtcagtaacgggagccgactcagaggatctcgtcgcgacaaaaccagtctgtgatgctgaattaaggacacaaatttaaaaatccctaaacaa

SEQ ID NO: 106283 - DNA, 2523 bp, Zea Mays
tcgcgcaataaagagagcagcaactcgcagccgttgcgccgcgttggccgccaatcgcagtatcggcaccgttcttccccgcttctccagtccagctcaccagccgccccccctccgctgctgacactgcgaagtgcgaatcaaagccaccaccgcgcacaaaccatggcaccggtggaggcggagcagcaccggcggagggcgttggcgctcgcggcgcacgacgcctccggcgccgtctcccccatccgcatctcgcgaaggtacgcctacgcgttcgcgcatgccgcatgcgggtggtgctggcagctggccgtagccagacgacgctgcccgctcgacctgtttctagcagccgcctagctagtgatgggttgctggcctcacccaattgcggtcggttgatgaaatgtgcatcggcgtggaatcgggtgcgtgcatgcagtgcaggattagcaaaccgacgcgcgggtggaaggaatctggcgtcgcgggttgctggatgttttcgcctcccgtctgaggaagtgtgcggctaatttggcttggtttggagttgaggtgcaatgtcggatttttgcaaggttatgagaggcgagcaggatctttgattagttgttgctagctgcgaaattgagattctgtggttcttgttagcgtgggcgtcgatctgcattctgcacctatagctagcgtatttcatgggatgtttagaggtaaaacctcaaatttattattattattagcagagggcaccaatttaaaaaaccctattttttactatctcaacgtttctagttgagttgagcatccgtatgcagtgttgcagtggaatgaaagtgtcataaaaatatactgtgtgcgagctagcttatatgcaaacaaacaaaaactgttagcaatcgcccgccggatgtctgctgtcgtacttacttcctcacggttccagtatctgttcaggttcagcccttccattgcagataaaccaccgtagaaacctctagtccagaacgattccatccagtcggcagtcgctgaagctcgctgaggcagctaggttccatacacagcagcaattactcctgacttgccagggaatggattagtgacagctcaaccgtagccgtaggcgtgccagatctgatcagatctcaacggcggcatcagtatacaagggacactggagatgacgatgttgccatacagatactgtactgcgggatatgccactctgacctgcacaccatcaagaacgagtggaagaacgccaactaccctgttgtccctgggcacgagatcgccgggctgatcaccgaggttggcaagaacgtgaagaggttcaacgtcggagacaaggttggcgtcgggtgcatggtcaacacatgccagtcctgcgagagctgcgagggagggcacgagaactactgctccaagatcatcttcacctacaactcccacgacagggacggcaccgtcacctacggtggctactctgacatggttgtcgtcaacgagcgcttcgtcatccggttccctgatggcatgcccctcgacagaggcgcgccgctgctctgtgcagggataaccgtgtacaaccccatgaagcaccacgggctaaacgaggcaggcaagcacatcggcgtggttggactcggggggcttgggcacgtcgccgtgaagttcgcgaaggcgttcgggatgagggtgaccgtgatcagcacgtccccggggaagagggaggaagctatggagacgcttggtgcagacgcctttgttgtcagcggtgatgctaaccagatgaaggctgcgaagggcacaatggatggcattatgaacacggcctctgcaagcatgtccatgtacgcttaccttgctctcctcaagccccagggcaagatgatcctgcttggcctgcctgagaagcctctgcagatctctgccttctctttggttactgggggcaagactctggccgggagctgcatggggagcatcagggacacgcaggagatgatggacttcgcagccaagcacgggttggcagcggacatcgaactgatcggcaccgaagaagttaatgaggccatggaacgcctcgccaagggcgaggtcaggtaccgcttcgtcatcgacatcggcaacaccctcaacgcggcatcactagggagctcgccggtcccagctctgtagctgcggcacttgttgatcaacaaatgctcacataaacatattgttgtttgtcgatatatcgtgcgataagcaagtatatttggaataaaaaggaactcaatttaaacgcaagtaatactgtttgtcttaggtcctatttgggctttggtttattgggtactgcatagttttgccttcgtctagtagtctagtactagtagtaacagatgaaacgatgtactgagagacaaaaccgggggcgtcagtaacgggagccgactcagaggatctcgtcgcgacaaaaccagtctgtgatgctgaattaaggacacaaatttaaaaatccctaaacaa

SEQ ID NO: 106284 - DNA, 1504 bp, Zea Mays
tcgcgcaataaagagagcagcaactcgcagccgttgcgccgcgttggccgccaatcgcagtatcggcaccgttcttccccgcttctccagtccagctcaccagccgccccccctccgctgctgacactgcgaagtgcgaatcaaagccaccaccgcgcacaaaccatggcaccggtggaggcggagcagcaccggcggagggcgttggcgctcgcggcgcacgacgcctccggcgccgtctcccccatccgcatctcgcgaagggacactggagatgacgatgttgccatacagatactgtactgcgggatatgccactctgacctgcacaccatcaagaacgagtggaagaacgccaactaccctgttgtccctgggcacgagatcgccgggctgatcaccgaggttggcaagaacgtgaagaggttcaacgtcggagacaaggttggcgtcgggtgcatggtcaacacatgccagtcctgcgagagctgcgagggagggcacgagaactactgctccaagatcatcttcacctacaactcccacgacagggacggcaccgtcacctacggtggctactctgacatggttgtcgtcaacgagcgcttcgtcatccggttccctgatggcatgcccctcgacagaggcgcgccgctgctctgtgcagggataaccgtgtacaaccccatgaagcaccacgggctaaacgaggcaggcaagcacatcggcgtggttggactcggggggcttgggcacgtcgccgtgaagttcgcgaaggcgttcgggatgagggtgaccgtgatcagcacgtccccggggaagagggaggaagctatggagacgcttggtgcagacgcctttgttgtcagcggtgatgctaaccagatgaaggctgcgaagggcacaatggatggcattatgaacacggcctctgcaagcatgtccatgtacgcttaccttgctctcctcaagccccagggcaagatgatcctgcttggcctgcctgagaagcctctgcagatctctgccttctctttggttactggatggcggcacccgtacatcttgcacaatgggggcaagactctggccgggagctgcatggggagcatcagggacacgcaggagatgatggacttcgcagccaagcacgggttggcagcggacatcgaactgatcggcaccgaagaagttaatgaggccatggaacgcctcgccaagggcgaggtcaggtaccgcttcgtcatcgacatcggcaacaccctcaacgcggcatcactagggagctcgccggtcccagctctgtagctgcggcacttgttgatcaacaaatgctcacataaacatattgttgtttgtcgatatatcgtgcgataagcaagtatatttggaataaaaaggaactcaatttaaacgcaagtaatactgtttgtcttaggtcctatttgggctttggtttattgggtactgcatagttttgccttcgtctagtagtctagtacta

SEQ ID NO: 106285 - DNA, 1110 bp, Zea Mays
caaactcgatcgacgccagccacacaaccttggcagccgagacagacgatgagacatggcagcagctcggccatttgccaatgccactccacacggcctcactcacatatacgcctatataaagcccgccccgcttcgttcaccactcgctcgcaccgcttaatcaacaacctgacaagttagctacccgcgcagcgccgcgcgccatggccacgatgaaccaccgcattgtgcccctcctgctggtcgcagccacactgctcgcgcaggccgcggcctgcccctactgcccgacgccgaagccgccgccgcctccgccgccgtcgtcgtcgtccacgccgtgccctcccccgccctactcgccgtcgccgtccacgccgacgggtaagtgccccgtgaacacgctcaagctgctcgcgtgcgtggacgcgctcaacggcctcgtgcacgccgtcatcgggaccaaggccagcgacacctgctgcccgctgctctccggcgtggccgacctcgacgccgcgctctgcctctgcaccaccatcaaggccaaggcgctcagcgtcagcctcgtgctccccgtcgccatctcggtgctcgttaacgagtgcggcaagcatgtgccctccagcttccagtgcccgtaatcacatcagctgcatatatgtgctactatgatgtatcaccaccactaatctatatccgcatgcatgcatcaatgcatgggtgattaagggtttatacgcggtcaaagttatacacgcatatatatgtagcttcatacatggagctgtgggttgtgcattcattttcaaatcatgtaccagtattatattgtagtatcataaaccagtgtgagagttgtggccttggtgggggtgcttgtaagtcatcattaagtaaaaccatgaataaaacgtgtgtaacatatatgatttttcctggtgtaaatgttgataaaaccagtcaactttccctagtatatacaaaccaaacatgtcaacattattttcccgtaatgtaacatgattagattaattagacttctgttaaatatccgctcatttgctcttgaaagcttcatgtgttcatatgtttctgtttctgcaacat

SEQ ID NO: 106286 - DNA, 3329 bp, Zea Mays
gggtgggcaccgattcgaacgctttctctcctccgccgctgatcccctctcgatttgttgtgcctccagcccccgattcctactgttgtggtccagtgatccaatcgacgtcgacgactccgcagccaccgctcctctcctctcgtcgcttctgccgtctctcggcgtcgaatctcatccggccagtgaccacactctactggccgcccggaaggagttcttccaggattcgagccgttgctgccgtcacctctgcaggcccagcgtcgagcggagatccaatcggaaattcaactgacttcgtcttttatcctccgattcgaacgctttatactccgccgttgatcccctctcgatttgttgtgcctccagcccccgattcctcctcattcgtcggcgatcgaacgcagccagccagttctcctcgacttcttccagtcccacccaccgaggttcttctctcctccgcccccgacagctgattgccttcttgctggtgactaaaacctactagctgcttgcttcgttcttcctttttatttctgggtgcgggcgacgagttctcagatcttcgggttcgcgtcgcgagtggtacatacattcctataataagcagtcccaaaaactcaaacttctcgatcaggttcctcttcttcttcggcgcgcccgtctcggtggacgccacaggaattggctcctgacttttttcaacgggtggtttcgctgggcccgatgcccgacgttatggccgcagccctaaccggcttctcgcctcgcggggtgattccgagcagaggcagagcatctcttcccggggtcgctagagcgtatgccgagaggcggttggttgcagaaaacacaagcctgccaaacatgcataaagaacaacttgagactataataaggaatcagctccggaagccccagttgccaccttcttcatacgacacagcgtgggtttctatggtgccagtgcggggctctcatcagactccccgcttcccacagtgtgttgagtggatactgcagaaccagcaggatgatggatcttggggtgtcagccaatctgactcatcggtcagcaaggatgttctcctatccacgttggcatgtgttcttgcgttgaagagatggaatgttggcagagagaacatttggagaggactgcatttcatcgggaggaatttctctgttgctatggacgagcagttcacttctcctataggtttcaacttcacctttcctggtttgcttagcctcggcattgatatgggtttagaatttcctgtaagacaaattgatgtctgtggcattcttcaccgccgggagatggaattgaaaaggctggctgtggatagttcttttggaagaaaagcatatatggcttttatcccagaaggattcggaaatatgctggactgggatcaagttatgaagtttcagaggaagaatggatcattgttcagcactccttccacaactgctgttgcattaatccacaaatacaacgaccaagcccttcaatacctaaatttgcttgtcaatgaatttggcagtgcagtaccagcaatgtatccttcaagggtacattgtcagctttcaatggtggacgcgcttgaaaaaatgggaatttctcagcgctttgtcagtgaaatagaaagcatcctggacatggcatacaattgctggttacagaatgatgaggaactcatgatggacatagcaacatttgcaatggcatttcgccttttgaggatgaatggttacgatgtttcctcagatgagctgtctcacgttgctggagcttccactttccatgattcactacaaggatatttaaatgatacaaaatccctactggaattgtacaagacctcaaaagtcaccttatcagaaaacgatctgatcttagatcgcataggatcctggtctggcaacttattgaaggataagatgtgctgtagtagggtgcaaaaagactcgatttttggagagatcgagtatgctgttaattttcccttgtattccacactggagcgtctagaacacaagagaaacatcgaacattttgatgcttggggttctctgatgctaacaacaaaatcctcatcttttcgtatcaatcaagaattcctagctttggcagtcgaagatttcagtttctctcaacgtgtttaccgggatgaacttcggcatcttgatagttgggtgaaggagaacaagctggaccagctacaatttgctcggcagaaactgacatattgctatctgtctgctgctgctaccgtattttcttctgaattgtctgacgctcgcatttcatgggccaaaaatggtgtcctcacaactgtggttgatgacttcttcgatgttggtggatcaaaagaagaattagaaaacctgatagcactagttgagaaatggcatgggcaccatgcagttgagttctattcggaacaggtgaaaatagtattttctgctatttatacaacagtgaaccatcttggagcaatggcttctgcagcacaaggccgtgatcttacaaaccacctagtagaaatatggctggatttgttaagatctatgatggtcgaggcagaatggcagagatgccaatatgtaccaacagttgaagaatacatgacaaatgctgttgtctcatttgcactgggcccaattgtgctcccagcattgtattttgtagggcaagagctattagagcatgctgtcaaagatgaagagtacgataaattatttaggctagtgagcacttgcgggaggctcctcaatgactaccaaagtttagagagggaaggcaaccaggggaagctgaatagtgtttctctacttgtgctccacagtggtggttctatgtccatagaagccgctaaaaaggcaatgcagaagtccatagacgtgtctaggagagacttgctaagattggttctcaggaaagaaagtgctgttcctaggccatgcaaggagctcttctggaagatgtgtaagatacttcacctgttttactctcagaatgatggatttagctccccaaaggaaatggtcagtgcagtgaatgctgttatcaacgagccactcaaagtccaaaacagtactacgtttttgtctagttcatcaaggtagcgaggatatcatgtaatttatcctgttcatatggatcagaagcaacagcagcaagcttaagatatttgtaagtttgtgactgggctgctgtggatctgtgaagctacaactttgctgtatgtggatcaaggtattaggaagatctggttcacatattgataacataatggataaaccataacgttaaa

SEQ ID NO: 106287 - DNA, 668 bp, Zea Mays
cctgtatacaaaaccaaagcaaggcaagtctagtcttgcttcgccgaattccaaaccctagcctcgcctgttgcggccgcggcggagatggcgaagtctctgcgatccaagcgcgagaagcggctgcggacattgcgccgggagatagcggagcccttctacgacaagaaggaggccgccaagctcaccgcgcaggccgccgcgcttgctgctcccccgctccaggtccgcgggcccccgccgtcccaggatgccggcagctcccgcggcgctagctcagcctcggctatggatgtggagatgtccgatgaaggaaacaacaggtctaaaaccttcttgaagccacttggcatcattagcaagaagaaggtacagcttcatttgaagatcaagaaagacaagagaaaagctaggaagaaggggaagttttcttttaaaaagtagacgcgtaaagcttgtagtcttataaatcatgtagttctgtttccagtttgaacaacaaatctaaaggcagtcatgcgcacctaagtccattcatggctagcttactatgtcgaaatgagtatggaaaagatggcgctgacctatcagttgtgttcatcttcacatggtatcgttgtgaactatttccttcacgccattttatgactgtatattcttgccttgca

SEQ ID NO: 106288 - DNA, 1728 bp, Zea Mays
ccattacccgcccgcccgccacaggccacatcgtttccggccctgctcggctatatatccgcgagcatctgcatatcgccatatccccgccccgggcaccgcgagctagctagctactgacacccggcgccggcgccgagtacaatacaaggaaagcagcatggtgttcgagcagcatgaggaggaggcggtggcgccgggcgcggtgcacgggcaccggctctccacggtggtgccgagctcggtgacgggggaggtggactacgcgctggcggacgcggacctggccttcaagctgcactacctgcgcggggtgtactactaccggtccggggacggcctcgccaccaaggtgctcaaggaccccatgttcccgtggctggacgaccacttccccgtggccggccgcgtccgccgcgccgaggcggagggggacggcgcgccgcgccggccctacatcaagtgcaacgactgcggcgtgcgcatcgtggaggccaggtgcgaccgcgacatggccgagtggatccgcgacgccgcgcccggcaggatcaggcagctctgctacgacaaggtgctcggccccgagctcttcttctcgccgctgctctacgtccagatcacaaacttcaaatgcggtgggctggcgctggggttcagctgggcgcacctcatcggcgacatcccgtcggccgccacctgcttcaacaagtgggcgcagatcctcagcggcaagaagccggaagccaccgtcctcaccccgccgaaccagccgctgcagggccagtcccccgcggcgccgcgctccgtcaagcaggtcgggcccatggaggacctctggctggtccccgcgggccgcgacatggcgtgctactccttccacgtcagcgacgcggtgctcaagaagctccaccagcagcagaatgggcgccaggacgcggccgctggcaccttcgagctcgtgtcggcgctggtgtggcaggcggtggccaagatcaggggcgacgtggacaccgtgaccgtggtcagggccgacgctgccgcgcggagcggcaagtcgctggccaacgagatgaaggtcgggtacgtggagtcggcggggtcgtcgccggcgaagacggacgtcgcggagctggcggcgctgctggccaagaacgtggtcgacgagaccgccgcggtggcggcgttccagggggacgtgctcgtgtacggcggcgccaacctgacgctcgtggacatggagcaggtggacctgtacgggctcgagatcaaggggcagcgcccggtctacgtggagtacggcatggacggcgtcggcgacgagggcgcggtgctggtgcagcccgacgccgacgggcgcggccgcctcgtcacggtggttttgcccggcgacgagatcgacagcctccgcgccgcgctcggtagcgcgctgcacgtcgcctgaaagctctagtacgtatcataatagtacgctgctgcctacgtgctcgttgcgtcgttcggtttcgcgatatcagagtaccacctcttgaagaaagtgtagtagcgtaatgaggcgtgactagtgatgtgatgtattgtactgtattgcaggatgttgcgctaatactgtggtcgatttgcgatgtttgttctgtatcggatgatgtttccttaataagctgctcgaatagatcatgctcaatgtaccattatttacactggagactagacaaaaacaatcgtttgata

SEQ ID NO: 106289 - DNA, 1318 bp, Zea Mays
ccattacccgcccgcccgccacaggccacatcgtttccggccctgctcggctatatatccgcgagcatctgcatatcgccatatccccgccccgggcaccgcgagctagctagctactgacacccggcgccggcgccgagtacaatacaaggaaagcagcatggtgttcgagcagcatgaggaggaggcggtggcgccgggcgcggtgcacgggcaccggctctccacggtggtgccgagctcggtgacgggggaggtggactacgcgctggcggacgcggacctggccttcaagctgcactacctgcgcggggtgtactactaccggtccggggacggcctcgccaccaaggtgctcaaggaccccatgttcccgtggctggacgaccacttccccgtggccggccgcgtccgccgcgccgaggcggagggggacggcgcgccgcgccggccctacatcaagtgcaacgactgcggcgtgcgcatcgtggaggccaggtgcgaccgcgacatggccgagtggatccgcgacgccgcgcccggcaggatcaggcagctctgctacgacaaggtgctcggccccgagctcgtgtcggcgctggtgtggcaggcggtggccaagatcaggggcgacgtggacaccgtgaccgtggtcagggccgacgctgccgcgcggagcggcaagtcgctggccaacgagatgaaggtcgggtacgtggagtcggcggggtcgtcgccggcgaagacggacgtcgcggagctggcggcgctgctggccaagaacgtggtcgacgagaccgccgcggtggcggcgttccagggggacgtgctcgtgtacggcggcgccaacctgacgctcgtggacatggagcaggtggacctgtacgggctcgagatcaaggggcagcgcccggtctacgtggagtacggcatggacggcgtcggcgacgagggcgcggtgctggtgcagcccgacgccgacgggcgcggccgcctcgtcacggtggttttgcccggcgacgagatcgacagcctccgcgccgcgctcggtagcgcgctgcacgtcgcctgaaagctctagtacgtatcataatagtacgctgctgcctacgtgctcgttgcgtcgttcggtttcgcgatatcagagtaccacctcttgaagaaagtgtagtagcgtaatgaggcgtgactagtgatgtgatgtattgtactgtattgcaggatgttgcgctaatactgtggtcgatttgcgatgtttgttctgtatcggatgatgtttccttaataagctgctcgaatagatcatgctcaatgtacc

SEQ ID NO: 106290 - DNA, 2848 bp, Zea Mays
gctccatgcataaggtctccgcccgccatgccgcaccgccgccgagcccttaacccgacgctgcccccgccacctcccgccgccaccgcgttccacctcggcggggacgaggcgcggctgccgctcctcgcggactacgcgctgctccaccagcccgccgcctccgccgtcgacgcgccggcgtcgtccgagtggagcgccgggagcgccttcaccgccacctccgacgcggccaccaccaccgcctcctccaccgccacggcgccgccgggctcctcccagtcccagctgctggccgccggcggtagggacagcgacacgtgggtccgccgcgccagggagggctactacctccagctgtccctcgccatccgcctcacctcgcaggccttcctcgccggcgctcctcccgcgcccgacctcctcttcggctgcagccccgtcgtcgtcgccgaccaccacgccgctgctggcgacggcgcggatgattcggaggccatctcctaccggctctgggtgaacgggtgcctgtcgtggggcgacaagatcgcgcacgggttctacaacatcctgggcatcgacccgcacctgtgggccatgtgcaacgtcgcggaggagggccgccggctgccgtcgctggcggcgctgcgggcggtgggcgccagcgagtcctcgctggaggtggtgctcgtcgacaagggcgccgactcggtgctcctcgacctcgagcgccgcgcgctcgacctcgtccgcagcctcgccgtcctcgtctccgaccacatgggaggtgcgttgcgatcggaggatggggacctgtacctgcggtggaaggcggtgagcaagaagctgaagaagaggcagaagtgcgtcgtcgtccccattggcggcctgtccataggcttctgccggcaccgtgccattcttttcaaggtacttgcagacttcatcggcctgccatgccggattgcgcaaggttgcaagtactgctctgcgcctcaccgatcatcttgccttgtcaaagttgacagtgagagaagatacgtaagggaatacgtcgtggaccttgtagttgagccggggagcatcagctgcccggactcatccatcaacggccagctgctgtccaccgtgccttcacctttcaagacttcgtccgcagtcggctcagggaactacacaacaccagtcgcagcctggaaccaatcaacagccggtgaacgtcgcaacatggtatcatcgaatccccagtgctcagttgctaggtgccgcgttgtggagaacagctctgctcaggtagccagaagcaaagaagacttggtgccgaagtgtggacagatcacacagaatggaaactgtaatggcgtatcagtgttacaagtgtcgatgcagttgaaggcaatggacatcggtgctgagaacggcaacaaggagaacgtccctggtgctgatcttccgaaacccatgagcattgagccgccttttgccgtagattggctggagatatcatgggaggagctcgagctcaaggaacgcgtgggcgccggttctttcggcacggtttatcgcgcagactggcatggttcagatgttgcagtaaaggtgcttacagaccaggatgttggcgaagcccagctgaaggaattcctaagagagattgctattatgaaacgagtccgccatccgaatgtggtattgttcatgggtgcggtgacaaaatgcccacaattgtcgatagtgacagagtatttgcccagagggagcctcttccgactcatcaacaaggcagctaatggagagatgctggatctcaagcgtcgtttgcgcatggcactagatgttgcaaaaggcatcaactatctccactgcctgaatcctcctattgtgcattgggatctcaagacaccaaacatgctggtcgaccggaactggtccgtgaaggttggtgcatctcccagatagatagcatagtatggtcctgatccactgttttcctcttgtttctttactttccttggtgatatgacttcaggtaggtgactttggcctgtccagatttaaggcaaacaccttcatatcatccaaatcagttgctggaacaccagaatggatggcgcctgagtttctgcgcggcgagccatcgaacgagaagtgcgatgtttacagcttcggcgtcatcttgtgggagctcctgacgatgcagcaaccatggagtggcctaggccctgcgcaggtagtaggagctgtagcgtttcagaacagaaggcttccgattccgaaagataccagtccagaacttgctgctctagtggaagcctgctgggatgacgatccaaggcagcggccttcgttttcgagcattgtggatacgctgaagaagttactgaaggctcttcttggaggttcatgaggactcttgctggatgtcttggctgccattgtgtcctccatttttctcttgttttctcattccttttctgtctttgtccatgctaaactacggaaaggaataaggctgtttgccttaggaatggagatgagatagccgaagcagcacaagtgcattgctgcctcgagtgggctaggtcacttatctttttatcctctcttgcctttgtacagcgattcctagtgctaatagaaattgctcgtttgcctcatgggagttggtgatctgaatatctgctatccctgaatgttctaattggtcctattattggttgtgcaataagactggatatatgtgctctggtctctaggagaaaggaaagacagttttgacgccaaattagaatagatcacgggatatagatagagtttctatacaggtctcgaacagaactcagttgag

SEQ ID NO: 106291 - DNA, 2757 bp, Zea Mays
gctccatgcataaggtctccgcccgccatgccgcaccgccgccgagcccttaacccgacgctgcccccgccacctcccgccgccaccgcgttccacctcggcggggacgaggcgcggctgccgctcctcgcggactacgcgctgctccaccagcccgccgcctccgccgtcgacgcgccggcgtcgtccgagtggagcgccgggagcgccttcaccgccacctccgacgcggccaccaccaccgcctcctccaccgccacggcgccgccgggctcctcccagtcccagctgctggccgccggcggtagggacagcgacacgtgggtccgccgcgccagggagggctactacctccagctgtccctcgccatccgcctcacctcgcaggccttcctcgccggcgctcctcccgcgcccgacctcctcttcggctgcagccccgtcgtcgtcgccgaccaccacgccgctgctggcgacggcgcggatgattcggaggccatctcctaccggctctgggtgaacgggtgcctgtcgtggggcgacaagatcgcgcacgggttctacaacatcctgggcatcgacccgcacctgtgggccatgtgcaacgtcgcggaggagggccgccggctgccgtcgctggcggcgctgcgggcggtgggcgccagcgagtcctcgctggaggtggtgctcgtcgacaagggcgccgactcggtgctcctcgacctcgagcgccgcgcgctcgacctcgtccgcagcctcgccgtcctcgtctccgaccacatgggaggtgcgttgcgatcggaggatggggacctgtacctgcggtggaaggcggtgagcaagaagctgaagaagaggcagaagtgcgtcgtcgtccccattggcggcctgtccataggcttctgccggcaccgtgccattcttttcaaggtacttgcagacttcatcggcctgccatgccggattgcgcaaggttgcaagtactgctctgcgcctcaccgatcatcttgccttgtcaaagttgacagtgagagaagatacgtaagggaatacgtcgtggaccttgtagttgagccggggagcatcagctgcccggactcatccatcaacggccagctgctgtccaccgtgccttcacctttcaagacttcgtccgcagtcggctcagggaactacacaacaccagtcgcagcctggaaccaatcaacagccggtgaacgtcgcaacatggtatcatcgaatccccagtgctcagttgctaggtgccgcgttgtggagaacagctctgctcaggtagccagaagcaaagaagacttggtgccgaagtgtggacagatcacacagaatggaaactgtaatggcgtatcagtgttacaagtgtcgatgcagttgaaggcaatggacatcggtgctgagaacggcaacaaggagaacgtccctggtgctgatcttccgaaacccatgagcattgagccgccttttgccgtagattggctggagatatcatgggaggagctcgagctcaaggaacgcgtgggcgccggttctttcggcacggtttatcgcgcagactggcatggttcagatgttgcagtaaaggtgcttacagaccaggatgttggcgaagcccagctgaaggaattcctaagagagattgctattatgaaacgagtccgccatccgaatgtggtattgttcatgggtgcggtgacaaaatgcccacaattgtcgatagtgacagagtatttgcccagagggagcctcttccgactcatcaacaaggcagctaatggagagatgctggatctcaagcgtcgtttgcgcatggcactagatgttgcaaaaggcatcaactatctccactgcctgaatcctcctattgtgcattgggatctcaagacaccaaacatgctggtcgaccggaactggtccgtgaaggtaggtgactttggcctgtccagatttaaggcaaacaccttcatatcatccaaatcagttgctggaacaccagaatggatggcgcctgagtttctgcgcggcgagccatcgaacgagaagtgcgatgtttacagcttcggcgtcatcttgtgggagctcctgacgatgcagcaaccatggagtggcctaggccctgcgcaggtagtaggagctgtagcgtttcagaacagaaggcttccgattccgaaagataccagtccagaacttgctgctctagtggaagcctgctgggatgacgatccaaggcagcggccttcgttttcgagcattgtggatacgctgaagaagttactgaaggctcttcttggaggttcatgaggactcttgctggatgtcttggctgccattgtgtcctccatttttctcttgttttctcattccttttctgtctttgtccatgctaaactacggaaaggaataaggctgtttgccttaggaatggagatgagatagccgaagcagcacaagtgcattgctgcctcgagtgggctaggtcacttatctttttatcctctcttgcctttgtacagcgattcctagtgctaatagaaattgctcgtttgcctcatgggagttggtgatctgaatatctgctatccctgaatgttctaattggtcctattattggttgtgcaataagactggatatatgtgctctggtctctaggagaaaggaaagacagttttgacgccaaattagaatagatcacgggatatagatagagtttctatacaggtctcgaacagaactcagttgag

SEQ ID NO: 106292 - DNA, 612 bp, Zea Mays
atggcgtccaacctcctctccgccccgtcccgaaccctagctccgtcgccggcgccggcccccgcgggcctccgcgggcgtgtgccggtgcaggcgcacctcccgcgcggcggcctcggcctcgccccccgccgcagcagccgcgcgctccgcgtgcgcgcgtcggtggcgatcgagaaggagacgccggagagcgagccgcccccgacgttcctccgcgaggacgggcacgggtccgggtccgtgcgggcgcggttcgaggccatgatccggcgggtgcagggggaggtctgcgccgcgctcgaggaggccgacggcggcggcgcgcgcttcgtcgaggacgtctggtcgcgccctggcgggggcggtggcatcagccgcgtcctgcaggacggccgcgtcttcgagaaggccggggtcaacgtctccgtcgtctacggggtcatgccgcccgacgcctaccgcgccgccaagggggaggccgccaagaacggggccgccgccgcggatggccacaagcctggccccgtgccattcttcgccgcggggattagttcggtaaatgtctttcctgctgcattgactagacgattgacgaacctgtacctgtag

SEQ ID NO: 106293 - DNA, 1148 bp, Zea Mays
attgatccctgaaacccatccacaattggtagctcgttgatccaaatccaagacctcacgtcaacgcactgtctcgcctgttaattagtcgtcgacgtcgtcgtctatgtccaggctgatggctgccatgctgctcggaggcgcgcgcgtcgccggcgccgcaaagctcaccggtaacggcaacgctgctggcatgcaggctcttcccatgccggcgtgcttccttccgccgcgcccgcaggcagcgacctggacccgcctctgcttgcaggctgcgccaagatcgtcccaggcatacgacaacgcgccggaagaccggagagaaataggggacaagtacaaggacgcggcggaggaggcgaaggacgccaccggggacgccaaggagcacgccaagaggatggccggggagacgaagagcagggcgcaggacaaggccggccgcgtggcggaccaggcgtcgggcatggccgagcgggccaaggaccaggcgaagggcgtggcggaggacgccgcggacacggcgtcccgggcgacggagcgagcgaagaacgagacgcgtgacgcggcgcgggaggccgcggacagggcggggcacgtgaaggagcgggccaaggaggcgggacacgaggccgcggaccgggcgcagggggcggcgaaggcggccaaggaccggaccggggaggcggcggggcgcgccatggacagggccggggaggccaaggaccgggccgtggaggggaccgcgtcgtacggggagaaggtggtggagatgaccaaggagggcgcggggaaggtggccgagacggcgcaggccatcggggacatggcgaagcaggcggcgcggagcacctgggacgcggccaaggacaccgcgcacggcgtcaaggagcgcgtggtccccgacgcggaggacgtggacgccgccgtgaaggagcgggaccggatcgcgcgggatgtggacagggtagagcgggagcggaacatgagggaggccagggagaagggctcgggcttgccgtaggcccagctccaattttccctctccagaagacgaattttactcaactagctagctgaataaatgtttggcgatacatcgtgcgcgcgccagtttggttgtgttgaataattagacaaattccaaa

SEQ ID NO: 106294 - DNA, 294 bp, Zea Mays
atggagtctgtcgggtttgatggccgactcggcctcaactcgttcatacaaacaggacaggtgtacacgtatgaaatacccatgggtaatcgggttcggattattgcttcccaaacccatacccgtttacccaatgggtggagattttgtcccatatctatacccatggggacaatttttgtctcatacccgtaccctaataggggaattccccatgggttcgcgggtatcgggtccccattgacatctctactcggggagccatcaaatcacaatctagctttggaaaactcc

SEQ ID NO: 106295 - DNA, 757 bp, Zea Mays
ctccagccctgcccagcgcaccaccaacacctggcaccgtcctcctccgccgtcgtcactcgctcgatcgctcctccatccatggcgcccaagaacgctctccccgccgccagcggcatgacgctggagccgaggtaccgcggcgtccggaagcgcccctggggacgctacgcggcggagatccgggacccggccaggaaggcccgcgtgtggctcggcaccttcgacaccgccgaggccgcggcgcgcgcctacgacgccgccgcgctccacttccgcgggcccaaggccaagaccaacttccccgtcgcgttcgccacggccacggccacggacacgcgcgcgctcccgctcccgctccggctcccgctgccgccgccgccgccgcccaagaagctggccgtgagccccagcggcagcaccgtggagtcgtcgtcccgggactcgcccgccgcgccggcccccgcgccgtcgctcgacctgagcctcggcatgccgcccatggtggccgcccagccgttcctgttcctggacccgaggctcgcggtgaccgtggccgtggcggcgcccgtgcctcgccggccgaccgctgctgccgcgggcgcgggcgccagcaagcaggcagcatactcctgctgccgtgaagacgagcagagcgacaccgggtcgtcgtcatccgtggtggacgcctccccggcggtcggcgtggggttcgacctcaacatgccgccgccgggcgaggtggcgtagctggacc

SEQ ID NO: 106296 - DNA, 1485 bp, Zea Mays
gtcgccacaaccagcacagctagggttaacggcgcctccgccacgacctacggctctcccacgtcaggccgcgaccacgtcatcatcttccctttcttggcgaagggccacacgctcccgctgctccacttcgccacggcactctcagcgcaacacgggaggctctgcgtgaccctagtcaccaccccgggcaacgtagccttcgtccggagccatctccccatgtcggtgggcctcgtcgcgctcctgttctcgtcgttctcgccgctaccggagggcatcgagtccaccgacgccctcccgtgcccgtcgctgcacctgacgttcatggaggcgatggggctcctgcgtgggccattcaccgagttcctggcgtcgctcccgtccctgccgctcgcgctcgtctccgacttcttcctcaggttcacgcgtcgcgtggcggccaacgccgacgtccaccgcatcgtgttcaacagcatgtcctgcttcgcctctgtgatctgcaaggcgctcgccgcgagcccaccggccagcttcgagcccgagaccatgatccaggtgcccaacatgccggtgcacgcggcggtcagggcggaggaggttcccaatggggtcaccaagagggccgaccccgacaacccgttcatgcgcttcttcatggatgagatcggtgattcggacgtgcgtagctggggagtccttagcaacagcctcgacgtgctcgatgcagcctacgtgtcggccttggagttgttctacgaggcgggcgcccgtgcctggctcgtgggcccgctgttcatggccgccggcgacatgctgaacggcgagaagaaggagcaagaccctgagggctgtctctcatggctcgacgagagggcggcgcatccggggtcggtggtgtacgtctcgtttgggacgcaggcccacatcacatacgcgcagctggatgagctagtgcacgggctggtgcagtccggccatcccttcctttgggtcgtccgatttgacacgtggtcgccgtcggtggacgtggggcccaacaaccggatcatccgtggatggttcccacagagaagtattctggcccacaaggcagttggtgggttcgtgaaccattgcgggtggaactttgtgatggagagtctcgccgccgtgaaacccatgctggcgtggccgatgatcacggagcaacacctgaacgcaaggcacgtggccaacatcttagacgccggcgtcagaatagccctaaaggctggcgttgacgtcgtcaggagcgtggaggtggaggagaaggtttgggagttgatggacgctgaatgcaaggcggcgaagcagatgcgggagagggtcgcatgggcacagcaagcagccaagtcagcggtgagccacggtggaacctcggccatggctttgctcaagcttgtggaagacctacatgagacctatgatgatggggtcgtaggcaaatgtgcgaatagtgtttag

SEQ ID NO: 106297 - DNA, 1436 bp, Zea Mays
atctcccgtagcagcatgttttagcagccgtccgattcatccaacggtagagagcagctgagtgcgtgctctaccttcaaagggcgaaggcagccgatctcaatcccgattccccatctcgccctgcccgccgaagagcgcgcaagcaccaccgtcccggcagcgcggagatcggtccactccatccacgcggcgtcaggcgagcggggcgcacggacgctgcgaccgatggatctcaaggatagcctctccaaatttaagcaacagcaggagagatgccagtcatcactggcgagcatagctgcttcgacctcaaagccaaagcacagggcccaaccagcgcatgctcctaacgtcccagcaagaccatcacaacctattaagttttcaaatgatacagaaaggctgcagcacatcaattcgattaggaaatctcctgttggagcacagatcaagcttgtcattgaacttctttacaagacaagacaagcttttactgcagagcagataaatgaagcaacttatgttgatattcacggtaataaagctgtctttgacagcttgagaaacaaccccaaagtaagctatgatgggaggcgtttctcttacaagtccaagcatgacctgaagggaaaagatcaactgcttgttttgattagaaagttcccagaaggtcttgctgttgtggaagtcaaggatgcatattcaaatgtattggaagatttgcaggctctgaaggctgctggtgaggtttggctgttatcaaacatggactcccaggaggacattgtatacccaaatgatccaaaagcaaagatcaaggttgatgatgacctgaagcaactcttccgtgaaatagagctgccacgtgacatggtcgacatagagaaggagctacagaaaaacggtttcaagcccatgacaaatactgccaaacgacgagcagctgcccagatcaatggcgtaaaacccaaggctaagcccaagaagaagcagcgtgagatcacaaaacggaccaagctcacgaatgcccatctgcctgagctgttccagaatcttaacacttaaacgtgctacagtatctgacgacggaagatggttcattttactcctatttattgctacgttgtgtgtatgtgttatgcagctatgctgtatggcttatggttatgagcgccacaaatttgtttgtcaagattctggatgatatacttatgcattctgacataataggaggcaaaacctcaagattttccttatttttattttatcaattacagcattttctgagtttgcggcattatgtttggttgattttgggtcaattaggttggtgtgaggacaagctgaacatattttgatggattgcttagcttgaaatgataccagaatttaaacctcataattacgagtactgcggatctgcaggtttagct

SEQ ID NO: 106298 - DNA, 1661 bp, Zea Mays
aagtaagtgagacagtgatcaatccataccaccgggtcacgacccacaaactcgggaaactgcatcttgggaagcgaaggtggtggtgggtcatgccgaagaccagttcttcctcttcttggtcgctgggggcgtcttggggaatttgaaaggtgaagactttctgtcctgggggtaaaagaagcatcttgatggtgcatccgacggtgatggggatgatggtcaccctgtgatccctgatcagagtcaagctgtgctgccagtcgctcgagccgcatctgcgctaccaccttgccggtctcttcaatctgccgagacatcaacaacctctctctggcggcttcttgtgcaactccagcggcaagatcagcttgtgccatgagttgctgctgaactccatccatcgttaacatccgttgttccaaagaatccaacttttgaaaaacccgatcccatcgcgtctcctccctctgcgaatccgatgccatagcgtgaaggatcagctgagtttggagcgagggtttacctggtggagccgtggcggatgatcgagggtggtctcgtcgtggccgtgacgagacgtggttgaagacgctgctgccgcggcgaaagcttgcaacttgagtcggggaaaaaaaattcccgccttcctgacgccgagtcgacgatccaacccggctgaggaagcccaggctcttgataccaactgtgacgacccgtggccacgacgcgcctacgccggacgtgagccgagcagtggatcgccggtgagcgtgtcggcgatggcgaggaagacgctggatcagccggagggctgccagatggatctcaaggatagcctctccaaatttaagcaacagcaggagagatgccagtcatcactggcgagcatagctgcttcgacctcaaagccaaagcacagggcccaaccagcgcatgctcctaacgtcccagcaagaccatcacaacctattaagttttcaaatgatacagaaaggctgcagcacatcaattcgattaggaaatctcctgttggagcacagatcaagcttgtcattgaacttctttacaagacaagacaagcttttactgcagagcagataaatgaagcaacttatgttgatattcacggtaataaagctgtctttgacagcttgagaaacaaccccaaagtaagctatgatgggaggcgtttctcttacaagtccaagcatgacctgaagggaaaagatcaactgcttgttttgattagaaagttcccagaaggtcttgctgttgtggaagtcaaggatgcatattcaaatgtattggaagatttgcaggctctgaaggctgctggtgaggtttggctgttatcaaacatggactcccaggaggacattgtatacccaaatgatccaaaagcaaagatcaaggttgatgatgacctgaagcaactcttccgtgaaatagagctgccacgtgacatggtcgacatagagaaggagctacagaaaaacggtttcaagcccatgacaaatactgccaaacgacgagcagctgcccagatcaatggcgtaaaacccaaggctaagcccaagaagaagcagcgtgagatcacaaaacggaccaagctcacgaatgcccatctgcctgagctgttccagaatcttaacacttaa

SEQ ID NO: 106299 - DNA, 222 bp, Zea Mays
atgtcgccaagctggacggcgagggtggacccggcggcccatgaggtggaggcggcagatggagagtcggggctacggggcatgaggccgacgaggtggagcacggagaaagccgatccacgacgcgatgcttctaggagcaatggacagcaggccggtgggttcttttcctcacccggttcgttcgccatctggaaccatcgaggctattccaggatttga

SEQ ID NO: 106300 - DNA, 1626 bp, Zea Mays
atggtcaagcaggaacgcgtctcgacggtgaccgtcgcggccgtctcgacggtggcaccggcgctgcccatgcaggagcaccgactgccgctgtcgaacctggacctcatcctgccgcccatcgacgtcggcgtcttcttctgctatgacgcggaccccgcgggcggccgcagccaccagccggtcgccgccgtcctcaaggcggcgctggccaagacgctggtggcgtactacccgctggccggggaggtggtggccaacgcggcgggcgagccggagctgctgtgcagcggccgcggcgtggacgtcgcggaggcggccgccgacggcaccgtgctgcgggacctgcgcctgggcctgccggacgagagcgtcgagccgctcgtgcccaagaagaaggccggcgtcatgtccgtgcaggtgaccaagttcaagtgcggcggcgccgtggttgggtgcaccttcgaccaccgcgtgtgcgacgcctactcgttcaacatgttcctcgtcgcgtgggccgcagccgccagcggcagctcagcgcctccggccccgtgcttccaccgctcgttcctcgcgccgcgtgaaccagctgcggcaccgctccgcaccgccggcagcctcgcggaccgcctcttcgtccccgtgagccgcgcgccggccttgccggacacagccaccgccaaccgcatctaccgcgtgtccgccgccgacgtcgcggcgcttcaagcctcggcgggggccgggcgcacgaagctggaggcgttcacggcccacctgtgggggctccacgccaaggccgcagcggcctcgcggcgccagcagccgcgttcgtgctgcatgggcgtggtggtggacgggcgcagtcgcctccgccgcgacggcgccatgggggcctacttcggcaacgtgctgaccatcccctacggcgtcatgggcaccggcgccctgggcgaaatggcgctcgcggacgtggccggcgacgtgcaccggtgggtggcggaggccgcgaccggcgagcacttccgcgagctcgtcgactgggtggaggcgcagcggccggagcccacggtggcgagagcgtacctgggccgcggccacggcggcgaggacgcgatggcctgcgtggtgtcgtcggggatgcggcttcccctcggcgaggtggacttcgggtggggccggccggcgttcgcgtcgtatcagttcccctggcccggcggcgccgggtacgtgatgccgatgccgagcgcgcgcggggacggtgactgggtggtgtacgtgcacgcggcgctggaggtggtggaggtgatggaggcggagccgacggtgttcagagcgctggagagtagctacgtgttcgatcgatcggttattgtgataaatgctaatttgattgaatattatgaattagaccgtccccctgaagactttgatcgtgctatcgatgacgtgccaactgttcctgatgctcaatctggccccaatttgatcccattaagtcagccaggagatggtctgcagacagatttagctgcgtgtatccctttggcacaaaccaattgcagtaagtcttattggcattacatcttcattttggaccatgagcactttgctcattccatttga

SEQ ID NO: 106301 - DNA, 2925 bp, Zea Mays
cctgcatcggctgggctctcgccaccgcagcaccgccccgccgctcgccgaccacgcctcccgccgccgcagagctccagctctcactcactgctctcgcaggcgtcctcttccttccgcttccgcttctgctggagacggtatccgtctggacctggaggactggactgggctctcctttcgctggtcatatggtgccatcggaaccacagactgtagttgagaacaagcattccacaagtgtgggtgccgaagagcttcttttgacaaaagatgaaagcacatctaccactgtcgtccaaggtgcaggctccttaatgtcaccaaaaggtgttcaagaggaagctagctttatgggtaagggtaaaggtggagaacaacagttgggctaccagcccaatgtgtatgtttctcagccacacacacccttttctggaggatactcgaaccatttggatcaatgggagggatacccatatgctgtgagtgcagagggacttgatgctgcataccctgtgacgtatggagcttattcccctttgtcagccattggagatagccatacatatttctctttgctctgccccttgtcaaggccttgctaccagccacctgcttctccaaacatgagatattcaagtcctggtactggaatatctcaattttatcctatgcaccagtattacagtcctgacgaagttcattactcagtgactcctagcttctatcagccttttggttcttttaacggagttccaatgcaaccgagtagttttcctggattttttgggcaaggaaacatacccctgacttctagaatgcatcaggagtccatgtctaattctggatcacacaaggcattccagcaaggtggtaaatttggaggcagtacacaaagttggagcactgctagttgcaaattcggtaccttcaaggatgagaagtgctctcctgactttctgaatgagcaatgccgtggcccaagggccaccaaaacaaggaaagaagtggggagctcttcaaccgaagacaaaaataagaatgtcttgccaatagctgattctgataaatacaaccaccctggttttgtgactgagtacaaggatgccagattttatgtaataaaatcctacactgaagatcacattcacaagagcataaagtataatgtttgggccagcactcccagagggaacagaaagttaaatgctggttatcatgaggcaaaagcgaaggaagatcattgtcctattttcttgtttttctcggttaatagcagcggtcatttctgcggtgtggctgagatgattggacctgtcaattttgacaagagtgttgattactggcagaatgaaagatggaatggccaattccctgtcaaatggcacattgttaaggatgtcccaaacaacattgtccggcacatcatcctagagaacaatgagaacaagcgagttacaaatagcagggacacgcaggaggtgaaactgaagcagggtctccagatgttagccatcttcaagaaccatgaagcccagacaaacatccttgaggacttcgacttctatgagcaacgagagaaagctatgctagatgacaggcaacaacagaagccagagtgttccgatactggcaagcaggtgcaggccagtgcaccggtggatattgtgactggtatgtcggacgcatttgcacaggcagttcaattggaaaaaaccaatgacaaagaaaataaaccaaggattgaagatgctgatgctgctgataatgctcccgctgctcctgtgaagatcgaagaggacatgctgaaaacagcggaagtgggaggcctcttgaaggaaagcgggtgattgctcgttctccattcatgactaatccagagcagcagctgggcccatttctgaagccatttcagggatgagagaataagagttatgcaaatatttgcagccacaggttcaaagcagcctctccgcatttgttgctcagacctcttatgtggagtctgacactgggcccttttgtacagcatggtaggctagagacataggctttgttttaccttcagttagctttgttttttaccttcagttaaacagactacagctagttacagagattcctaaattgtcaccgttttcctccgctcactgctttgttaactttttttccactgaccccctgaagaattgtgctcaatgtagccaattagccaggaaaaaaaagaaaaatactattttctattagtcccgaccaaattctacatgttagcttggactgacgctatcagaactattgccattggaacaattcattgtcaggaaattatacatgctatatgctcaagcaacgaagtatttgtgcatattccagtaggagggttataacatgaacagaccacctccagtaggaggcacattccagtagcaggatcacaagaacattacaagaataggaaccctgcatgatgtttcgacaggacatagactagccctaaaacatctcaagagtctgaaaacgcgaactaggtatatttctaagtgcaggaatatttcaaagacaacaaggcttacacctgagtatacacacatacagccataaactcaggtgtgctttctacttcagctgagcgaagtttggacacatgataaatacactcaattacgcttccatggagttcatttcaactctcttgtttgattcagtcggtagtcatcggttgggacatgcaacaccgaaatcgggccttgcggacagtgctcaggatctccatctcagcatgctccagcatcctcacaacttcagtgaatggcggacggacatcaggatttggatcccagcacctggtcatgatctcagcaagggtgggcaggcagtcctggggtatagctgggcggacacccttgttcaccacagcgaaagcag

SEQ ID NO: 106302 - DNA, 1130 bp, Zea Mays
ttggggacctctcaacaaacatccatggtttttaacttaccttccttgattcagccgattgacaatttgtcagaacttgagcaccccttctcttgtcatgagattgatcagatcattaaaagtctgccgtcaaataaatcgcccggtccagatggatttaatacggactttgtaaaaaagtgctggccggtgattgcccctgacttctatgaattatgcaataaattctttgaaggatctctctgcatgcgcagcattaatggttcatacgtgactctcatccccaaaaacagttctccagactcagttggtgactataggcctatctccctacttaacacaagtgttaaagtgttgacaaaaattttagccaatcgtttgcaacaggtgatcacaaagttagttcatcagaatcaatatggtttcatcaaggccaggtcgatccaggattgcttagcctgggcttttgaatatatttccctttgccacaagtccagaaaagaaatggtcattctaaagctagattttgaaaaggcttttgacaaattggaacatgcaactcttatagaggttttgagacacaaggtgttcggtgacaaatgaattcactgggtttctatgattcttgattccggcaccttagaagttcttttgaatggagttcctgggaaaagatttcactgcaaatgcggaatccttgcaaatacatttcactgcaaaattggatcaatgccattcacttacttagggcttcccttgggatcacaaagacccaacatgggtgcttttcttcctcttatccagaaaattgaaaaaagactggcgtcaacctctatcttcttatcacaggctgacatgcttcaaatggttaatgcaatcttctcctcacttccaacatactacatgtgcactctcaagctccccaaaacggtgatcaaacatattgacaaactcagacgacattgcctttggagaggtgcagatttaaatgccaagaaaccccaagttgcctggaaatcggcctgcaagccaaaatttcagggggattgggtgtcataaatttggccttacaaaataaatccctgctcatgaaaaatcttcataaattctataacagagccgacatccca

SEQ ID NO: 106303 - DNA, 513 bp, Zea Mays
aagaaaaacacacggacttcagcagttgcagtgccggctgcctccctctcgcgtgcgctcgccctgtgcctctcgcgtgcggaagctaggcaaaccgccggcgccctagctaggtgcccaggccatcgtcggtcccttcgccaagccatcgtcggggtctcggggattagcacccgcacccacaagatggccacaccgaacggtccttctgcttctccgatggtgtaccctgtctacctttctggggtatttccccagcaaggcggggatgatcaggctcaaggtccagggatatatgccatacaacagaaccagttagcagcggcgatgggaatgggttgctatgctccaaccacactcattcccctcacttacaatatcccaacagaaagcattggtgctcctgctggtgaagagaatgtacaggatgctaggcagcaaaatgtacctcaaagacaagttgttgtgaggaggtttcacttcgcttttcagcttgacttgaccctgatcttc

SEQ ID NO: 106304 - DNA, 2873 bp, Zea Mays
cgtctcgtttggaaactcaaggcccccagctaaactggagagctgtcatgtgcacatgcttttattcagaattttattcagaaggaaaaatctggtacaaacactattacattatgcgccacggttacgcgcaccatgtccaggtgctagcgcatcgggttctgccaaatacatacgattgaaccagcatcattttaccagctgtgagcacgccagccgaagatccttgtggggctccctagctgtctacatctacaatcatcagaggagcttcacagccccgagcagccctcttcggtaggagccccaggtgaagcagcatagaattagctttcatcatcatcgtcagtttgagtagcatcttcccttgatttcttcactggacgcagaaattttcctttgaaaaagattaactattttagactaaaaagtaacagatgagacaacagcagagcaagaagagcgaaatgttaaccaatcgaatatctagagtacgaaatatcatggccgtctcagtgcagaaccaaaggtcctgactcctgatagccaaactgaaagcaaaagaaggttttgttttatacagcttgagtaatcagcatacgtttagaagtttacactctacaaacaaacggatatagttcctttttaaaatcaaaacatgtatatatggttgacagacagccagatacgagacttgatactcgttagatacagtgaaacaattgtcaactgctaacaaacaaaaccatccgcaaactattaacccaacccaggccttttatgaaacatgaactcactacccaacctaattctgcatgcaacatgagtacatgaaacatggtttccactcaactcaccacacatactactgaaattgtgacctgccttaccatttctggccctggacactttggagcctaaggagaccaaaaactctgaccacctgtacatagttacatacttttgtgaaaacttgaccagccacaaaagaatcaacaaaattgctaaacttcgtttataaaaaatccaccatcaagcttgttaaatactcatttaaacacagcaaccagcaaaattctccaaacaaagagatttaaaccttgttaccagtaacatggcaaaccaaatacgaagatgaaagtttatgctagcagtttagcacagtatgaccagaatttttactgaatcaacaagtgctggaaggaatggtatgtgccttatttacaatcctttgaattcatgaaatgattctgctttaatagcacacctaaaggaatactatactgcataattgttttgcttcacataaatttgagtggaactgagggcatacataaactgattccgtacggaaagcacagccaactacatagtcatggtatcatttatacatatatagcaaagaagttttcagcttaacagggataggggagggaataattaaaagatgacacataagaaagggaataacatgcaaacacaacatgccaacatggtaagtgataagtagctgttgttgcgaaagggcctctagctgagttgcttaggtggtttgagtagcacttctcaggtcctgagttcgactcagcgtgggagcgaattttaggctgtggttaaaaaaatgtcctcgtcccacgccaaagcacatgtctaaggcctggtcccggtcgatgtcgtgttctcacatgggctacggtgacactgtgtatgggtttggcaggggttccggggttttctcgacctgcgtgagaaagtatttttcttaatataatgctcggggctgacttaccactgcaggtcgagttttttataagtagttgtttctgccttgctatatctcagaaactaggccatagacaacagaaaaaataagggcttttcaatctattagaactaaatgtcattaccaaataccttggggaatgtcatgtattctaagtgtatagatacataaccaatctccatgcagatttcttcaggattgatatgacaagcggcatggttataaaaatgcaagtccatctgatttcttgacctgcgtgaggtctttttcttaatataatgccccggggctgacttaaacccccctccctttataagtagcagctgtttctgccttgctatatctcagaaactaggccataaacaggaaaaaataatggcttttcaatctattagaactaaatgtcattaccaaataccttggggaacgtcatatattctatgtgaaatagatacataaccaatctccatgcagatttcttcaggattgatatgccaagcagcatggttttgcaattctattttttatgatcctatggtttgcaatcctaccatttgagttccaatgccattaaggatcaccatttttttgacaaacttatacgccaactacgatcatgacaattcatgaaagcattcacttgtatttgtatacactgagcctatgaagttgtgctcacatggttgcgagtcatcattcacaaaataatatatcaaaattctaagaacctgttatggaacacataaccctccaaccttcatagctacaactacaagagctagattgtgcaagggcacattgcagtacattggactcacattaagttatcaacaaacacaagtttcaccatcaggtgaagttaagacagaaaacatactcctttatagccctgatggtgaaacctgtgtttgttgagattctgggttggtttcaggttttacctttgaaggggatgggattctaggaaccttccttttttgtttttccttctagcgatgggacttatcaactgagaaaccgtgaaaaaccatcaacccagactggactgacccaaccatatatgttatgaaaccagctactaacctgtgca

SEQ ID NO: 106305 - DNA, 579 bp, Zea Mays
ggaaactcaaggcccccagctaaactggagagctgtcatgtgcacatgcttttattcagaattttattcagaaggaaaaatctggtacaaacactattacattatgcgccacggttacgcgcaccatgtccaggtgctagcgcatcgggttctgccaaatacatacgattgaaccagcatcattttaccagctgtgagcacgccagccgaagatccttgtggggctccctagctgtctacatctacaatcatcagaggagcttcacagccccgagcagccctcttcggtaggagccccaggtgaagcagcatagaattagctttcatcatcatcgtcagtttgagtagcatcttcccttgatttcttcactggacgcagaaattttcctttgaaaaagattaactattttagactaaaaagtaacagatgagacaacagcagagcaagaagagcgaaatgttaaccaatcgaatatctagagtacgaaatatcatggccgtctcagtgcagaaccaaaggtcctgactcctgatagccaaactgaaagcaaaagaaggttttgttttatacagcttgag

SEQ ID NO: 106306 - DNA, 2503 bp, Zea Mays
ctctctggctgttgacctccttgctccttgtgttccatccgaggcccgtccaaacgcaaaaccccacggcgacgtgttccatccatccggacaagctcgttgcacctcacgaccccgtcttaccacatggcctccagtccccgcttcataagggaaaaaggaaaactaattattactagtatactgttactgctactacaaggttcaactggtaggccctcctgcggtcctgccgatgaccacggccgatacagaagcacataaacacattcgacgaggtcacgactcacgaggggactcccgagcgcacgcgcgaatcgccgcggacctcgccggaggcggcgacgagctcggatcccggcgatctagtcgccggaggcggtcccgatggctcggcggtcgtcttcctcgtcgtcggggacctggcggtacctgaacccggcgtactacctcaagcggcccaagcgcctggcgctcctcttcttcgtcttcgtcgcggccaccttcgccttctgggaccgccagtcgctcgtcagcgagtacgagtctgagatttcccgattagaagatgatataaatcggttgcatgaccagctaagaaaggctggagttaatctggatgaaaatccagtagtaagcaataagaattccagaaaagatcttgtagtagaaattgatcctgtcaataatgaaagacgggaaaaagttaaagaggcaatgctccatgcttggaattcttatgttaagtatgcctggggaatggacgagcttcagccacaatcgaagaatggtatcaacagctttggtggtcttggagcaacccttgttgactcacttgataccctatacataatgggcctgaaagatgaatttcagaaagctagagactgggtggcggagtcattagactttgacaaggattatgatgcgagtgtttttgaaacgaccataagggttgttggaggtctgcttagttcatacgatctatctggtgataaagtatttcttgataaggctaaagatattacagatcgactcttacctgcttgggatacaacatctggcatcccttataatagaataaacctagctcatggacgagcccataatcctggatggactaacggtgatagtatccttgcagattctggtacggagcaacttgaattcatagctctgtcacagaggactggagatcccaaataccagcagaaggcggagaacgtcattaaacagcttcaaaagatatatccaagtgatggtttactgcctatttacataaatcctcattctgggacagcatcatactcaactatcacatttggtgctatgggagacagcttctacgaatatttgctcaaggtctggatccaggggaataaaactgagcatgtaaaacactacagacaaatgtgggagacatcaatggaaggtctattaagtttaaccaagaaaactacaccatctaattactactacatttgtgaaaagaatggtggctcgttgtctgacaagatggatgaacttgcttgctttgctcctggtatgctggccttaggagcctctggttacgggccagaaaaatcagagcaaattatgaatcttgcaaaagagcttgctaggacctgctataatttctaccaaaccactcccacgaagttggctggagaaaattattttttccatactggacaggacatgggtgtgggcacgtcgtggaacatcttgagaccggagactgttgaatcactgatgtacctgtggcgcttgacggggaataaaacataccaagattgggggtgggacatattccaggcatttgagaagaactcccgcatagaatctggatatgtgggactgagagatgtgaacactggtgaaaaagacaacatgatgcagagtttcttcctggcagagacgctgaagtacctgtacctacttttctcccctccatcagtcatatccttcgacgagtgggttttcaatactgaagctcacccattgagaattgttccagtaagtgataacaaaggcattggaacaccggtccgacaattcgggagaaaacagggaaagcctgagtaaccttggatatagagcagtggatttttgaatctgccgtctgattctgacctccctgttgatgtgttctgacacgagggaactttctgcctgaagcagtaagggttagaaattacggcgatagattgtttagagcaaaaatcataggtagaggatgatgttatatgcggggcagtgacctccgtgaggtcaagagccccatagaagcttttatctttggatttgcttacgcaccctgaggtgcattgttgatgtgtagcatacatctaactcactgtccatatgttgttgctttcctgggggctctgcgagctgtattgtcattatgtaccccctagttattacttcttttcagatatgattcatataaatataaaacgtaaagtatctatgttattagttgggttttcgtattaatatt

SEQ ID NO: 106307 - DNA, 1694 bp, Zea Mays
gtatggtaatactccttgggaatatttcagtgctttattctgattttatgctgtacacggaatctgattaatgcctatgtcatataacagctgggtggcggagtcattagactttgacaaggattatgatgcgagtgtttttgaaacgaccataaggttgcattataagggttgttggaggtctgcttagttcatacgatctatctggtgataaagtatttcttgataaggctaaagatattacagatcgactcttacctgcttgggatacaacatctggcatcccttataatagaataaacctagctcatggacgagcccataatcctggatggactaacggtgatagtatccttgcagattctggtacggagcaacttgaattcatagctctgtcacagaggactggagatcccaaataccagcagaaggcggagaacgtcattaaacagcttcaaaagatatatccaagtgatggtttactgcctatttacataaatcctcattctgggacagcatcatactcaactatcacatttggtgctatgggagacagcttctacgaatatttgctcaaggtctggatccaggggaataaaactgagcatgtaaaacactacagacaaatgtgggagacatcaatggaaggtctattaagtttaaccaagaaaactacaccatctaattactactacatttgtgaaaagaatggtggctcgttgtctgacaagatggatgaacttgcttgctttgctcctggtatgctggccttaggagcctctggttacgggccagaaaaatcagagcaaattatgaatcttgcaaaagagcttgctaggacctgctataatttctaccaaaccactcccacgaagttggctggagaaaattattttttccatactggacaggacatgggtgtgggcacgtcgtggaacatcttgagaccggagactgttgaatcactgatgtacctgtggcgcttgacggggaataaaacataccaagattgggggtgggacatattccaggcatttgagaagaactcccgcatagaatctggatatgtgggactgagagatgtgaacactggtgaaaaagacaacatgatgcagagtttcttcctggcagagacgctgaagtacctgtacctacttttctcccctccatcagtcatatccttcgacgagtgggttttcaatactgaagctcacccattgagaattgttccagtaagtgataacaaaggcattggaacaccggtccgacaattcgggagaaaacagggaaagcctgagtaaccttggatatagagcagtggatttttgaatctgccgtctgattctgacctccctgttgatgtgttctgacacgagggaactttctgcctgaagcagtaagggttagaaattacggcgatagattgtttagagcaaaaatcataggtagaggatgatgttatatgcggggcagtgacctccgtgaggtcaagagccccatagaagcttttatctttggatttgcttacgcaccctgaggtgcattgttgatgtgtagcatacatctaactcactgtccatatgttgttgctttcctgggggctctgcgagctgtattgtcattatgtaccccctagttattacttcttttcagatatgattcatataaatataaaacgtaaagtatctatgtta

SEQ ID NO: 106308 - DNA, 644 bp, Zea Mays
gattacatctctaagatggaagtagataacattgataatgaccgtggaccaccgccaggtgctcagcttttcacgttgggggagcaagaggtcaaaggtgtcaaattgaacaccgtggaggagaaacaagacagccctttccagagaacaaccgctgctgaagcgatgagtagcacgcctggtgagaagatagaacaaatggctgatccgttgcacgccatgcttctggatatgttgccactcctgggccagaaaaggacagaagatacaagcaaggcgcccttggcgaaagctgagaaggatccacctgcgataggaagctccacatccaattctgagattctgttgccagatgctggaacatccggggttccagccccagagccaagtgcagctccaccaaagaagaaaaaagtgagttacagagatgtcgttagtgaacttctgaaagattggtgagcgagcttggtcagtggggatagcctgcagtctatgttttactcccgtaatcgctatctttgtaaataggacagcgccatctaagtaaccatgtttgtagggtcaccttggctgcttgtcgtgccctgccctctggagctcacttgttttgcctgttgagaattttgactgttaagcctaacaac

SEQ ID NO: 106309 - DNA, 562 bp, Zea Mays
ccggtcgtccctctcgaactcgagcacgcagccggcagggaagagacaagcgccggagccagagaagcctgcggccaggccactaggccagggtactccggggaggcgagggagcgcttgagggcaacaggtaggagaagtgaggtgactgctatgaatcctatttattttccaaatattcatttgttttgacacctttcatttttttcctttctgaaaggaaattgcattttcgttttgaccttgggcccctgctgtcccaccgccggtaatggcggcgaaggtgcggttcggcctactggtggcgatgttccaggccatgtcgggcgacaagagttcggcgaagaagcgcggccgcctgcgcgcgttcctcgaccgcgcctacgtgccctgtggcggtagggatgactacttcagcgcgctccgcctcgtgctgccggggctcgaccgtgagcgcggctcctacggtctcaaggaggcggccctcgccgccgtgcttgtggacgcccttggcatcgccaaggactctaccgacgccgtccggctcaccaactggcgccgc

SEQ ID NO: 106310 - DNA, 222 bp, Zea Mays
tccgaagcagtagaaggaaatgtggaagtggaagagattgatgtttctgaggatgaagaccaggaaggtggtgttggttcaaagagaaagttgacttcagctgtttggaaagaattcaaaagggttaaagtaggggataaaattaaagcaaagtgcaactggtgcgcaaagaaacttggaggagagacaaaaaatggaaccaaacatctacacaactactta

SEQ ID NO: 106311 - DNA, 219 bp, Zea Mays
atggaggccgagcaggtgaagcggcgcgctggtacaggagaggcgcgtgcagaggacaggaagcagcagcgctggggcgagttcggagagagccaggggcacactcccgcggcaccggagagctcggccgccataggagcagggaacaagcgctggagagagagtgcggcagggaggaagaagcttggggagatggggaggagagaggtccgcaactag

SEQ ID NO: 106312 - DNA, 2179 bp, Zea Mays
cttcacacagccattttttctctctctctctcatgcatcgtctatctatattattttatctccccccgtctccacctccccctatattctctctctcccctcctctcctctccccagctacgccagtcctcctccctgtctgcttcggtgcttcgctcccgcactgcgcttggccgctttccctctccccgcaccttctccacctcccccattccgccaccgcacgagcagagctccctcaccaagaggaccaaaaaaaaaaaaaacgagggaggcaagccaggcgggacagcaacgcgacgcgcttgtcattcactcgaggagctcatgcaaggcgtaaatcttattgcaagaagggcagctgtgcatgttaagtctcaaatatagactcacttgataacactgcatgagaggttgaaaacttgaggtacagttgatattctggttcagagtatgggttcaaggtttgcatcacatcagctgagcaatggcctgtatgtttctggtcgacctgagcaacctaaggagaaggccccaaccatttgttccactgcgatgccatatactgggggtgacatcaagaagtctggagagcttgggaagatgtttgatctccatgttgagaaatcaagaaaatctggtcctctaggaaacgctccttcaaggaatacttcatttggaggcactgcttccaattctgggcctgtctccaatgctggtggtcggtccaactactctggttccctttcatcttcagttcctggtgctggtggatcagccagagcgaaatcaaactccggaccactcaataagcatggagagccaacaaagaggtcatctggtccccagtctggaggagtaaccccaatggcacgccagaattctggcccccttcctcctgtgcttccgacaactgggcttatcacatctgggcctatctcttcagggccacttaattcgtctggtgctccaaggaaagtatctgggccacttgattctgctgcatcgatgaaaatgcgggctacttcctttgctcacaatcaagctgttactaatctgaacactgaagatggttactcaattcagggaagctttccgaagccaatactctgggctgtgattttgctctttgtgatgggttttatagcaggtggcttcattttgggggctgttcacaatgcaattttgctgatagttgttgtggtcatatttggttttgttgctgcacttcttatctggaatgcttgctggggtagcagaggtggaattgggtttgttagtcgctaccctgatgctgatctcagaacggccaaagatggacaatatgtaaaggttacaggggttgttacttgtggaaatttccccctcgaatcctcgttccaaagggttccaagatgcgtatacacttctactggcttgtatgagtacaggggttgggattccaaagctgccaataccgaacatcggcgttttacatggggtttacgttcaatggagcgacatgcggttgatttctacatttcagattttcagtccgggcttcgagcattggtgaaaacaggatatggtgcacgtgtgaccccatacgttgatgaatctgttataattgacatcgatccagacaacaaggatatgtcccctgaatttttgagatggctaagagagagaaacctttcaagcgatgatcggacaatgcgcctaaaagaaggatacatcaaggaaggtagcactgtaagtgtgatgggggttgtccaaaggaacgacaacgttctgatgattgttcctccatcagagcccatctcaactggttgtcagtgggccaagtgcgttctcccgaccaaccttgacgggcttgttttaagatgcgaagatacttcgaacattgatgtggtgccagtttaattagcggtgaagagtcgttgccaaagaaagtgtctgttaaatatgagtctgaattgtttcatgcaatgttagttgacaaaaatgtgcaaatgttgggtgtgattatggcaggtggagggtggttcgttaagctggcttttggatgtatagtttctttttcttttagttgtgttttgtcatttctttttaattttcagctccgagatctgaaacttgtgtaaccagatgcctcttaatctaaatcagcgtggcatttagatcgatttgaaagcttaca

SEQ ID NO: 106313 - DNA, 1254 bp, Zea Mays
gctgctttctctgttcgctgcgcatttcgatctttggctaagaagttgcggtttggtttggccgtgctcgtgggtcgtgtagatgtcgtccgaggcggtgaaggtggcggtgccggagtcggtactccgcaagcggaagcgcgaggagcagtgggccgccgagaagaaggagaagtccctggccgagaggaagaagtccatcgagaaccggaagctcatcttcacccgcgccaagcagtacgccgaggagtacgatgcccaggagaaggaactggtacagcttaagcgtgaggcccgtttgaagggtggtttctatgtcagtcctgaggcaaagctgctatttgtgatccgcatccgtggtatcaatgccatgcatcctaagaccaggaagatattgcagcttctgcgtttgaggcagatattcaatggcgtgttcctgaaagtcaacaaggctaccattaacatgcttcgcagggttgagccttatgttgcatatgggtacccgaacttgaagagtgtcagggagttgatctacaagaggggctacggaaaactgaacaagcagaggatccctctgtctaacaaccaagtcatcgaggagggcttgggcaagcacaacatcatttgcattgaggatcttgttcatgagatcatgactgtcggcccacacttcaaggaggcgaacaacttcctttggccatttaagctgaaggcaccgctgggaggtctgaagaagaagaggaaccactatgtggagggtggtgatgccggtaaccgtgagaattacatcaacgagctcatcaaaaggatgaattaggttcacgatcaagctctattgtgttctaagaaactttctgtgctctcccaattttacattattaggaagcggatgaatatgcatgcagttttgttgtttggaactagatgtgtatggaagaaacatgatcttttttctcggaggtttaaaattatatatttagggttagtttgaaaacttcatttttccaagggatttctattttccctaggaaaaatgaactggtttcccaaaccagcccatgatgcatttcccgtcctgagtatcgggcctttttctctgtccaagacgctctttctgaagtacgatctgtatttaaatccatgatggatcttgatatattgtaaactggcttgaagcacttctggcttacaaacccaacaatcagccgctttcgaaaacactttcggccctggatttatggcgaagttcgtttt

SEQ ID NO: 106314 - DNA, 1265 bp, Zea Mays
acataacccgccattcccactcccctcgccgcctgcgtccacctccgccccccgccctccccgcgtcccccctctcctacgcagatcgtccagatgtcgtccgaggcggtgaaggtggcggtgccggagtcggtactccgcaagcggaagcgcgaggagcagtgggccgccgagaagaaggagaagtccctggccgagaggaagaagtccatcgagaaccggaagctcatcttcacccgcgccaagcagtacgccgaggagtacgatgcccaggagaaggaactggtacagcttaagcgtgaggcccgtttgaagggtggtttctatgtcagtcctgaggcaaagctgctatttgtgatccgcatccgtggtatcaatgccatgcatcctaagaccaggaagatattgcagcttctgcgtttgaggcagatattcaatggcgtgttcctgaaagtcaacaaggctaccattaacatgcttcgcagggttgagccttatgttgcatatgggtacccgaacttgaagagtgtcagggagttgatctacaagaggggctacggaaaactgaacaagcagaggatccctctgtctaacaaccaagtcatcgaggagggcttgggcaagcacaacatcatttgcattgaggatcttgttcatgagatcatgactgtcggcccacacttcaaggaggcgaacaacttcctttggccatttaagctgaaggcaccgctgggaggtctgaagaagaagaggaaccactatgtggagggtggtgatgccggtaaccgtgagaattacatcaacgagctcatcaaaaggatgaattaggttcacgatcaagctctattgtgttctaagaaactttctgtgctctcccaattttacattattaggaagcggatgaatatgcatgcagttttgttgtttggaactagatgtgtatggaagaaacatgatcttttttctcggaggtttaaaattatatatttagggttagtttgaaaacttcatttttccaagggatttctattttccctaggaaaaatgaactggtttcccaaaccagcccatgatgcatttcccgtcctgagtatcgggcctttttctctgtccaagacgctctttctgaagtacgatctgtatttaaatccatgatggatcttgatatattgtaaactggcttgaagcacttctggcttacaaacccaacaatcagccgctttcgaaaacactttcggccctggatttatggcgaagttcgtttt

SEQ ID NO: 106315 - DNA, 1270 bp, Zea Mays
acataacccgccattcccactcccctcgccgcctgcgtccacctccgccccccgccctccccgcgtcccccctctcctacgcagatcgtccaggtaagatgtcgtccgaggcggtgaaggtggcggtgccggagtcggtactccgcaagcggaagcgcgaggagcagtgggccgccgagaagaaggagaagtccctggccgagaggaagaagtccatcgagaaccggaagctcatcttcacccgcgccaagcagtacgccgaggagtacgatgcccaggagaaggaactggtacagcttaagcgtgaggcccgtttgaagggtggtttctatgtcagtcctgaggcaaagctgctatttgtgatccgcatccgtggtatcaatgccatgcatcctaagaccaggaagatattgcagcttctgcgtttgaggcagatattcaatggcgtgttcctgaaagtcaacaaggctaccattaacatgcttcgcagggttgagccttatgttgcatatgggtacccgaacttgaagagtgtcagggagttgatctacaagaggggctacggaaaactgaacaagcagaggatccctctgtctaacaaccaagtcatcgaggagggcttgggcaagcacaacatcatttgcattgaggatcttgttcatgagatcatgactgtcggcccacacttcaaggaggcgaacaacttcctttggccatttaagctgaaggcaccgctgggaggtctgaagaagaagaggaaccactatgtggagggtggtgatgccggtaaccgtgagaattacatcaacgagctcatcaaaaggatgaattaggttcacgatcaagctctattgtgttctaagaaactttctgtgctctcccaattttacattattaggaagcggatgaatatgcatgcagttttgttgtttggaactagatgtgtatggaagaaacatgatcttttttctcggaggtttaaaattatatatttagggttagtttgaaaacttcatttttccaagggatttctattttccctaggaaaaatgaactggtttcccaaaccagcccatgatgcatttcccgtcctgagtatcgggcctttttctctgtccaagacgctctttctgaagtacgatctgtatttaaatccatgatggatcttgatatattgtaaactggcttgaagcacttctggcttacaaacccaacaatcagccgctttcgaaaacactttcggccctggatttatggcgaagttcgtttt

SEQ ID NO: 106316 - DNA, 1363 bp, Zea Mays
acataacccgccattcccactcccctcgccgcctgcgtccacctccgccccccgccctccccgcgtcccccctctcctacgcagatcgtccaggtaagatgtcgtccgaggcggtgaaggtggcggtgccggagtcggtactccgcaagcggaagcgcgaggagcagtgggccgccgagaagaaggagaagtccctggccgagaggaagaagtccatcgagaaccggaagctcatcttcacccgcgccaagcagtacgccgaggagtacgatgcccaggagaaggaactggtacagcttaagcgtgaggcccgtttgaagggtggtttctatgtcagtcctgaggcaaagctgctatttgtgatccgcatccgtggtatcaatgccatgcatcctaagaccaggaagatattgcagcttctgcgtttgaggcagatattcaatggcgtgttcctgaaagtcaacaaggctaccattaacatgcttcgcagggttgagccttatgttgcatatgggtacccgaacttgaagagtgtcagggagttgatctacaagaggggctacggaaaactgaacaagcagaggatccctctgtctaacaaccaagtcatcgaggaggtttgcaatcttgagctctgcacctggatcctttgtgatctgcttgtatttgacaatttacatgatgatctccaccatttggtgttctatcagggcttgggcaagcacaacatcatttgcattgaggatcttgttcatgagatcatgactgtcggcccacacttcaaggaggcgaacaacttcctttggccatttaagctgaaggcaccgctgggaggtctgaagaagaagaggaaccactatgtggagggtggtgatgccggtaaccgtgagaattacatcaacgagctcatcaaaaggatgaattaggttcacgatcaagctctattgtgttctaagaaactttctgtgctctcccaattttacattattaggaagcggatgaatatgcatgcagttttgttgtttggaactagatgtgtatggaagaaacatgatcttttttctcggaggtttaaaattatatatttagggttagtttgaaaacttcatttttccaagggatttctattttccctaggaaaaatgaactggtttcccaaaccagcccatgatgcatttcccgtcctgagtatcgggcctttttctctgtccaagacgctctttctgaagtacgatctgtatttaaatccatgatggatcttgatatattgtaaactggcttgaagcacttctggcttacaaacccaacaatcagccgctttcgaaaacactttcggccctggatttatggcgaagttcgtttt

SEQ ID NO: 106317 - DNA, 99 bp, Zea Mays
atgccgactgctgtcgcgctacaggctttggttgtccaatatctcagatctagactcgtcatcgccaagataacctacgtggtaggcaccatcgtgtcc

SEQ ID NO: 106318 - DNA, 2723 bp, Zea Mays
ccggctcctacacctttgatacgaactaattcatcaataccaaaccaaccttcccaagaagaacctgttatagaatcagaaacattaggtgttgaggagggacaagcatcattagagacagaaggtagcaatgcaaatgaatcaatgggtttaagagatagcaatatcaataatgtcgatcaagttatagccgatcctggtcttcgcatgccaattgagcaaattgatgcaaacattagggatgctgtcagaagagcatatattgcgaagggtccatgccaaccaaaaggtcataagtatcctaaaagaatgataagcaatcgcaataggtcttttcatgatgaatggtatgtaaataatccatggttggagtatagcattgctaaggatgcggctttttgtttttattgctacctttttaaacaacaaagagctgaaaattatggtgttgatgccttcacggttgttgggtttcgtcgatggaaagatggacgtgaaaccattggagctcatggtaatggcatagatcacaataagtctagaaggtcctatgaggactacaaaaatcagaggcaaagtgtgtctcatgtgatgaatcgagggggtaaaaagatggaagaggaatataaaggtcgtttgcttgtcatattgggagttgtaagatttcttttattgcaagcacttgcttttcgtgggcatgatgaatcctctacctcaagcaataagggaaactttttagagttgctacattggtacaaagacaaggataaaaatgtagcaaatttgcttcgtactaatcagatgacttcacctgatatccaaaaagacatttgtagagcttgtgcagagcagaccaccaaagctattatttcagatattgggaatagaaacttttccattcttgttgatgaggctcgagatgtatcaaggagcaaatggcggttgttttgaggtatgtcaacgaacgaggtgaagtgattgagagatttattgggttacaagaggtacccgacactacatcatcagctctaaaaattgctttggatggtatgttttctttctatgggttgtcaatggatagactacgaggacaaggttatgatggggcatcaaacatgaggggtgaatttcatgggttgcaaagaagaatattagatgagagtccacatgctttttacatacattgctttgcacaccaattgcaattagtggttgtttcagttgctaagtgttgcgcttctgtatttgatttcttccaaacgtgcaacttgattgtgaatagtgttaatgcttcttgtaagagaagggatcaattggctcaacaacaccatgacaaacttgtgaacatgttggaaagaggggaaattttttcaggtagagggaaaaatcaagaaaccaacctagcacgacctggggatactcgatggggttcacatcataaaactttatgtcgtattgttctcatgtgggatgctattctagaggtattagagattgtggctgatgatggctctaatggggataagaaatacatggcttctggtttgttgaaacaaatggagagctttgaatttgtgcttattatgcatctcatgatgaggttattaggcaagactaatgatttgtcacaatgtttgcaaagaaaagatcagaatattgtccttgctgttggattgattggagccacattgcggaatattagtgaagtacgtgatagtggatgggaagaattgtttgaggaggtaaagaccttttgtaaccaacataacattattgtaccaaagatggatgacacaattactgttcgaggtcgctcaagggggcgtggaggtcaattagtgacttactatcatcatttcaaaaatgagatatttattgttgtgtatgatcaagttattgtggaattaaacaaccgtttcactgaaagatctactcaattattgagatgcatttcgtgtctagatccaagaaattcatttgccagctatgacaaagctcagctgatagaattggctaagatttattctgcagacttctctcaatatgacctcttgatccttagagaccaactcgatatatttattgttgatgtgaggggtaattctgattttgcaaattgtgaagaccttggtaatctggctattaagatggtgcaaaccgagagacacctagtttttgcattggtttatcgtctcattgaattagccttaattttgcctgttgcaactgccacggttgaaagagccttctcagctatgaaaatcatcaagacagaattgagaaataagatgggaaatgattggttaaatcatagaatggtatgctatatagaaagagatatctttgcaagaattcaaagtgatgatattttatatcattttcaagaattgaagagtcgtatgaaaaagctacctccacaaagttcaagtggtatatttttgtgctcacttatacatttttgcattcattagttatattgtcatgttgtatctctcattttatacaaatatttaacttgcaatgtgtaggttcaaattcacgtgctaatgttgatgaagttattagaggcggggaaggaccaaatcatctctaattaggtatttttaaatttttttaccaagtttattgtatttttagatgctgaattgaagtaaatactatcttagtctatgtttgtggtatattttgttttagcggtatatttagccgcacaatatattaga

SEQ ID NO: 106319 - DNA, 728 bp, Zea Mays
gatgtcacttaaaaggtcttacaatacccctttatacacctagcagtttcttgcaggactggatggttatccttcatgcttgggcaacaattgtggacaccaaaaaaaaaaattcacgagagactaaggcacattgaaatatcctactaacaattttgacttaactagcatcagtaacagcagtggttgtaagggcattcattgtatatgctcttttttttattgattgttgtttccattggaatcactctttttttcataaacaaataatttggtcctcttttatctgtatgcaggtaacactggaggtgaaaggagagacacagctgaataacctggctgagaagctggcagcagctggtgtccggcacaagctgtggatagagcagcctgagaacatcccaacatgcatagctacagcaccctgcccaaagtcgcaggtttcttctttcttcaagaagctcaagctttgcaaatgagcaaagaacaacagttgttcattgctccgtctgctactgtcattacggaggatcatcaaaactttcaaaactgcccatgtatgtttcatgacatgttctgctagcaacaagccatagataattagatatctcagtgatgtaatggagatatttgtgtcgttattcgccttgctgattttacatgattgtccattcacttactgtgtacctgtctcagcagttaattaatgcgaataaattgatgaagta

SEQ ID NO: 106320 - DNA, 874 bp, Zea Mays
ataggaaagaacagttgataggagtaggactataggagtacgaaacccaagttcagtcacagccacaggtatgctgacactcctgccccttcgcttgccattctcgctacctgtagccgccacactcccgaacgccgccttgctcctcccggcaagcaccagggtctccctccgccagatcacgcagggagccagcatgaacgctgccgccgcctcctccgctccggacgctgctgcggccgccactggcgaggagggcgcgaaggaggccgtggacgtgctggtccagtacgtggtcctgcggcgcgatctggcggacgcgtggccgctggggagcgtcgtggcgcagggctgccacgccgccgtggccgccgtgtgggcgcaccgggaccacccggacaccgccgcctactgcgcgcccgacaacctcgaccgaatgcacaaggtaacactggaggtgaaaggagagacacagctgaataacctggctgagaagctggcagcagctggtgtccggcacaagctgtggatagagcagcctgagaacatcccaacatgcatagctacagcaccctgcccaaagtcgcaggtttcttctttcttcaagaagctcaagctttgcaaatgagcaaagaacaacagttgttcattgctccgtctgctactgtcattacggaggatcatcaaaactttcaaaactgcccatgtatgtttcatgacatgttctgctagcaacaagccatagataattagatatctcagtgatgtaatggagatatttgtgtcgttattcgccttgctgattttacatgattgtccattcacttactgtgtacctgtctcagcagttaattaatgcgaataaattgatgaa

SEQ ID NO: 106321 - DNA, 1127 bp, Zea Mays
ccaagatccgcgcgaagcaagtcacccggcgaagcaccggctcccatggccgtggacctgatgggctgctacgccccgcgccgcgccaacgaccagctcgcctcctgtcgtccccggtcctgcccccctggcggccgtcagcgtggcgcagccgccgcagagcctgacgctggacttcacgaagccgaacctggccgtgtcggccgccacgtccgtcacctccacgtccttcttctcgtcggtcacggccggcgagggcagcgtctccaagggccggagcctcatgtcctccgggaagccgccgctgtccggccacaagcggaagccctgcgccggcgcccactccgaggccaccaccaacggcagccgttgccactgctccaagagaaggtataacgtcgatacccaaattaaaattaagggcctcctgaaataaataaaaaaaacaccacctgccgtctgtagtagtagcctgccttgtaactaactaacccacggtacttgttaatttcccttttacaggaagaaccgcgtgaagaggaccatcagagtgccggcgatcagctcgaaggtcgccgacatcccttcggacgagtactcgtggaggaagtacggccagaagcccatcaagggctccccttacccacggggctactacaagtgcagcactgtgcggggatgcccggcgaggaagcacgtggagcgggccaccgacgacccggccatgctggtggtgacgtacgagggcgagcaccgccacacgccgggcgcggtccaggggccgagccccctggcgaccgcgtcgccggtgcccgtcgccgtctccgccggcaacgggctcgttgtctagtctactaaaagctaggattagcttctcgtcttctttgttttttttttgtttgagctgatgtccgtgtaaaacaaggaagaaggttgtagaaagagggagaggaggacaccggaatttcgatgccgcaaaactcaaacctttgtgtcgtgtcctatctccgattggtgctcgctcaggctcccgttttgtgagtaaatactacaagctcagacgaaaatcgcgcccgctagcctgcacagaccccgagtcacctggggggctggtaccatccgacgca

SEQ ID NO: 106322 - DNA, 1224 bp, Zea Mays
aaacacctcccaacccaatctccccagagagagagagccccaagccaagatccgcgcgaagcaagtcacccggcgaagcaccggctcccatggccgtggacctgatgggctgctacgccccgcgccgcgccaacgaccagctcgccatccaggaggcggcggcggccgggctccgcaacctggagctgctggtgacgtccctgtccacgcaggccgccgcgccgcacagagccgctgatcagccgttcggcgagatcgccggccaggccgtctccaagttccgcaaggtcatctccatcctcgagccgccgccgccgacgccgccgccgcctcctgtcgtccccggtcctgcccccctggcggccgtcagcgtggcgcagccgccgcagagcctgacgctggacttcacgaagccgaacctggccgtgtcggccgccacgtccgtcacctccacgtccttcttctcgtcggtcacggccggcgagggcagcgtctccaagggccggagcctcatgtcctccgggaagccgccgctgtccggccacaagcggaagccctgcgccggcgcccactccgaggccaccaccaacggcagccgttgccactgctccaagagaaggaagaaccgcgtgaagaggaccatcagagtgccggcgatcagctcgaaggtcgccgacatcccttcggacgagtactcgtggaggaagtacggccagaagcccatcaagggctccccttacccacggggctactacaagtgcagcactgtgcggggatgcccggcgaggaagcacgtggagcgggccaccgacgacccggccatgctggtggtgacgtacgagggcgagcaccgccacacgccgggcgcggtccaggggccgagccccctggcgaccgcgtcgccggtgcccgtcgccgtctccgccggcaacgggctcgttgtctagtctactaaaagctaggattagcttctcgtcttctttgttttttttttgtttgagctgatgtccgtgtaaaacaaggaagaaggttgtagaaagagggagaggaggacaccggaatttcgatgccgcaaaactcaaacctttgtgtcgtgtcctatctccgattggtgctcgctcaggctcccgttttgtgagtaaatactacaagctcagacgaaaatcgcgcccgctagcctgcacagaccccgagtcacctggggggctggtaccatccgacgca

SEQ ID NO: 106323 - DNA, 1362 bp, Zea Mays
aaaaaactaatagaaaaattaaaaagaatccattgactcgcaggttcccctgctctcaccatttccacctataaagtcggccgcagcctcctgcgcgacaaacacctcccaacccaatctccccagagagagagagccccaagccaagatccgcgcgaagcaagtcacccggcgaagcaccggctcccatggccgtggacctgatgggctgctacgccccgcgccgcgccaacgaccagctcgccatccaggaggcggcggcggccgggctccgcaacctggagctgctggtgacgtccctgtccacgcaggccgccgcgccgcacagagccgctgatcagccgttcggcgagatcgccggccaggccgtctccaagttccgcaaggtcatctccatcctcgaccgcacggggcacgcccgcttccgccgcgggcccgtcgagccgccgccgccgacgccgccgccgcctcctgtcgtccccggtcctgcccccctggcggccgtcagcgtggcgcagccgccgcagagcctgacgctggacttcacgaagccgaacctggccgtgtcggccgccacgtccgtcacctccacgtccttcttctcgtcggtcacggccggcgagggcagcgtctccaagggccggagcctcatgtcctccgggaagccgccgctgtccggccacaagcggaagccctgcgccggcgcccactccgaggccaccaccaacggcagccgttgccactgctccaagagaaggaagaaccgcgtgaagaggaccatcagagtgccggcgatcagctcgaaggtcgccgacatcccttcggacgagtactcgtggaggaagtacggccagaagcccatcaagggctccccttacccacggggctactacaagtgcagcactgtgcggggatgcccggcgaggaagcacgtggagcgggccaccgacgacccggccatgctggtggtgacgtacgagggcgagcaccgccacacgccgggcgcggtccaggggccgagccccctggcgaccgcgtcgccggtgcccgtcgccgtctccgccggcaacgggctcgttgtctagtctactaaaagctaggattagcttctcgtcttctttgttttttttttgtttgagctgatgtccgtgtaaaacaaggaagaaggttgtagaaagagggagaggaggacaccggaatttcgatgccgcaaaactcaaacctttgtgtcgtgtcctatctccgattggtgctcgctcaggctcccgttttgtgagtaaatactacaagctcagacgaaaatcgcgcccgctagcctgcacagaccccgagtcacctggggggctggtaccatccgacgca

SEQ ID NO: 106324 - DNA, 1596 bp, Zea Mays
aaaaaactaatagaaaaattaaaaagaatccattgactcgcaggttcccctgctctcaccatttccacctataaagtcggccgcagcctcctgcgcgacaaacacctcccaacccaatctccccagagagagagagccccaagccaagatccgcgcgaagcaagtcacccggcgaagcaccggctcccatggccgtggacctgatgggctgctacgccccgcgccgcgccaacgaccagctcgccatccaggaggcggcggcggccgggctccgcaacctggagctgctggtgacgtccctgtccacgcaggccgccgcgccgcacagagccgctgatcagccgttcggcgagatcgccggccaggccgtctccaagttccgcaaggtcatctccatcctcgaccgcacggggcacgcccgcttccgccgcgggcccgtcgagccgccgccgccgacgccgccgccgcctcctgtcgtccccggtcctgcccccctggcggccgtcagcgtggcgcagccgccgcagagcctgacgctggacttcacgaagccgaacctggccgtgtcggccgccacgtccgtcacctccacgtccttcttctcgtcggtcacggccggcgagggcagcgtctccaagggccggagcctcatgtcctccgggaagccgccgctgtccggccacaagcggaagccctgcgccggcgcccactccgaggccaccaccaacggcagccgttgccactgctccaagagaaggtataacgtcgatacccaaattaaaattaagggcctcctgaaataaataaaaaaaacaccacctgccgtctgtagtagtagcctgccttgtaactaactaacccacggtacttgttaatttcccttttacaggaagaaccgcgtgaagaggaccatcagagtgccggcgatcagctcgaaggtcgccgacatcccttcggacgagtactcgtggaggaagtacggccagaagcccatcaagggctccccttacccacggtaaaaaaaaaaacctcctccgcagtccggagtccggacctagctcatctcgtctgtgttgtcgcgcaacgaatctgactgttctcttgtcacctggtccaggggctactacaagtgcagcactgtgcggggatgcccggcgaggaagcacgtggagcgggccaccgacgacccggccatgctggtggtgacgtacgagggcgagcaccgccacacgccgggcgcggtccaggggccgagccccctggcgaccgcgtcgccggtgcccgtcgccgtctccgccggcaacgggctcgttgtctagtctactaaaagctaggattagcttctcgtcttctttgttttttttttgtttgagctgatgtccgtgtaaaacaaggaagaaggttgtagaaagagggagaggaggacaccggaatttcgatgccgcaaaactcaaacctttgtgtcgtgtcctatctccgattggtgctcgctcaggctcccgttttgtgagtaaatactacaagctcagacgaaaatcgcgcccgctagcctgcacagaccccgagtcacctggggggctggtaccatccgacgca

SEQ ID NO: 106325 - DNA, 1593 bp, Zea Mays
attaagagcgaactgtagactgcccccgcctctacccaacgccgcatccccttccacccgcagataacgcgcacgcccgcaccacacccgccgcgattccctaacggccgcggatcacgcgctgcccccgccgccacgattcccctccccctcacgcccgccccccacgtcgagattccccaactgcccacggatcacgcgcacaaaccgccccatccgcgagccgaagcaaaccctagcgctgttggagtagtagcctacgaccgatggctgcgacggcgatcctgccggggctggggacgcaagtgcttatccggaccgtccatcctatgtaccctacccccgcgtgcgtcgcccccagatcccctggtcgtctggcggcgcgcggaggccccggggcgagagttgacggcgtcggcgacctcctgccactgcggccggcggaggctcccacggttgaggtcgaggtagcgcgagccccaggcgtcgacgagcgcggccgtctcgcccttgctccagcagtcctcccggtacggcaggttcgggttcggcggcaacttcccgtccttcgctcctcctcccagatctctccgcgtcacgacgacgcggcagagaaagccaggaactccaaaggtgaaaggtccgagttcgggttcggaagccaacccacaccatgaatatgttcgcaagttcagcacgcgacgcaactatcctctagagagagagaggaagcccgtcgttctggaagtttccacgctccgcgcctccgccccctggtctccgctccaatggtgccctcactcctcgccgccatgtccacctcgcccttcctagccagcagcggcagcagccgcaggccgctaggcgctgcccacacccgacgggctggactgcgcgtggccgcgcttaagtacgaccctgccaaggtggcgccgcagaacgaccgggttctcgtccgtcttgagcagatccctgagaaatctgctggcggtgtattgctaccaaaatctgctgttaagtttgagagatatctgatgggtgagattctatcgatcggtgctgaagtcagtgaagttgaggctgggaagaaggttctcttctcagacatcaatgcttatgaggtggagcttggtactgatgacgagaagcactgcttctgccgtgagtcagacttgttagctgtagttgaatgaattttaccatgaaaatttcggacttacctgggaatgctccaacggcatgaacttatcttgcccccactttgttgtatgccatttgaacgttcgttaattcagcttctagatgattgttagttaccgttgatttttggtcgccataaactggaattatgttaatgcccattttctttacagaggctcttgctcacgtttggaatacgaaactgtgctgaaccgaacttgaaatgtttacattgcccatctgatgtttctgcttctgaacattctttaggcaacatcctaattatttctatcagggtctccagattttgttgtgctgaccatagtctcattcgattggtttgaaatgtatgtgtgttctttttaatgtttctcgtcctcattgctcagccag

SEQ ID NO: 106326 - DNA, 1311 bp, Zea Mays
agtttccaagcaagctcgtaacctagctactagctagctagccatggctgcattgctttgcagccccaacaagctccggcgaagcgtacttctcgtcggcgtagcgctgatgctagggatgcacctgagcgcggcgaccatggacaaggacatcgagctcatctggggcgcaagccacacctacttcttcatggacggcgagaccgagtcgctggcgctgtccctggacgaccagcagggctcctgcttccggtccaaggacatgtacctctacggcaccatcagcatggagatcaagctcgtcgatggcaactccgccggcgtggtcgccacagcctacacgatctccgaaggcccctggtcgtatcacgacgagatcgacctggagttcctcggcaacgaaaccgggcagccaatcacgctccacaccaacatcttcgtcaacggcgtcggcggccgggagcagcagttctacctcccgttcgaccccgccgccgactaccacacctacaccatcgagtggaaccccaagtacatcctgatcaaagtggacgggaaggcgatccgcgcgttcaagaactacgaggagtacggcgtggcgttcccgacgtggcagcagcagcgggtgtacggcagcctgtgggacgcggacgagtgggcgacgcagggcgggcgcgtcaagaccgactggtcggaggcgcccttcgtcgcctactaccggaactacaccttcgcctggtgccagccgtcgcccggcgtgtcgtggtgcggcgccgagcccaaggactcggcgcgcttcgacctggaccagcggacgctggacgacctgcgggcggcgagcgaccagtacatggtctacgactactgctccgaccacaagaggttcaacgagtccgagttccccacagaatgctcgctgcaacgacaggggatatgatggatcgatcgatcgatcgcgcgcgtgcgcgtttgctttgttggtgaccagggccaattcatctgtttgacagcgagctcgattttccgctgatcgatcactactaggttttgtacatctgatgagcacaggaacgagtgtagtacagttttgattctttattagagatcggtgatgagttgctgttatgctcttctccgatccggcggctgcttcactagcttgcttctcgggtcagaattatcatggtcgtttctctgacagagtggtgcttttgttttagcattggttcgtcgtcatcatgtaataaaacccaatggatagcatccacattttattgttccgattccgagaaattaaactctattattgct

SEQ ID NO: 106327 - DNA, 726 bp, Zea Mays
atgaccgcgcgcacgggcgccgggatcctcgcggcggccagcctcgacgacgcgctcccctttgggttcccctggccgcctctgcttctgacggccgcacggttgctctgctctctggtggtgacaagagaaaacagaggcagagctgcgtctgttggttcgttacggcagttttattggcctgagcgccgccgacggctgctgctcagaatttcctgcgttctggatgggcgggcgggcgggctctgctttttatcccgtgcctttttgcgaggtcggcaggtgcaggcagtcttccgtcgccgtcgtcgtccgtctctgcctgcctgcctgcctgcgctgtccccaccaggcagaatgcagaatgcctcgtgcccgtggcggctcgccagtccaactcgaacacttgtgggcggcagggcgcgcacgcgtacaggtacaggagagtgcctctcggtctcggctccgacagggaaatttgaccccgagcgcgacccgcaccgcccatgccgcggttacgtaggcatgcccacacgagggctgggctgttgcccggccggcgacggcgacctaaccttcggccgcatgctggtgtcacggtccactctcgttccgtcagggttaggtatcctgctaaagttcgacttcgacacggaggctgtttccacggaccacggaccgtcaaattctgagcacgtatgtatccttcggcagtttcagatgtaa

SEQ ID NO: 106328 - DNA, 273 bp, Zea Mays
atgcagccgtcaccagcaagcgggtatcgcggtctagcgcaacggcatggcgacgggcctcgtcggcgcggcgtcgagccccatcgacgcgctggttgtacaagcaagcacgacatccacccacgcaggaacgatggcaggcgtctaaagcgcgatggcaggcgtcacaggctccacggcagccataacagccgcgatggtgggcgtccaatcttctcagacgattaccgcataggaggaattcacctctccatcggcggaagcggcgactga

SEQ ID NO: 106329 - DNA, 1525 bp, Zea Mays
aattgggccggccgggctgcatctcgttccaccgcccagcaaccccttccgctgcattattccacgtgcgttctgccggtctctctcgccgctgtctcgctctccggcgactggtgggccgccgccgccgccgccccgccaggtgcggaggttttcgttggtccttcgccagcgacgagcacccaccaggcttgttgtatatgtgctgcaatggcgtctctggggcgaagagccgggagctacatctgctcggagctgtgtggcacaactctgaaccagagacgctactccacttcgagggtggattggaagcagctgcggccaatgatccttaagaggattaagaaccggacaaaggaatacccaatcaagagcatgatcccagtcgcggaggaggtggtcagggctagggagattgtcaatgagggcgtctccagactgctcaaggttttgtcatgaagttcacattggaaccacgggtcatcagatgaaaacatgctatggtttcaagcgtatgatcaaggacagaccacatgaatgggaaccgggcaacttgaatgacatccttgttcctgttcaggctttccaccagaaaaatatgtttgagcatgagataaaacatgaccagcggttcgacttcactcgcgtcccagctgtacttgagctgtgccatcacgcaggtgcagacatacctgatgagattctatacagaagtggacaaatgtctactacactcaaaaccaacaatcagcaatctgctccaatcttgccagatgaactcagatatatcggtcagaaaacactggatgcatgggaaaacctgagattaggtgccacaaaacttctcttggtgtacccatccaaagtttgtaagcattgctctgaagtgcatatcgggcaatcagggcacaaggccagaatgtgtggagtattcaagtttgagggctggaaagggatgcacaagtggaacaaggctggagtggatgacctagttcctcagaacattgtgtggcatcggcggcctcatgatccacccgtccttgtggacggtgggagggattattatggccatgcgcctgctgtcgttgagctctgcatgcaagtgggtgcaatagtacccccgaaataccattgcatgatgaagacacacggcttagcaccacctgttggatgagaccacataccataagtcgactgcctgtatagatcagagaccaaaataatttgcttaaggatccaaaagactcttctggaagaagccatctattaactgtaatggctagctaaggagatacgctgttttgaagattattagtgttattagaatccagaaggtgagattgaaaagaaaagattttctgaagactagtagcggttgaaggccctcagacagtaggggaaattttgcattgtaaaagattataacagctttacttcattggcattcatttattcaacgttgtccttacattttcccccgcacttggattttaaccgtacgggcagttttgttgagctgccaaaa

SEQ ID NO: 106330 - DNA, 1502 bp, Zea Mays
aattgggccggccgggctgcatctcgttccaccgcccagcaaccccttccgctgcattattccacgtgcgttctgccggtctctctcgccgctgtctcgctctccggcgactggtgggccgccgccgccgccgccccgccaggtgcggaggttttcgttggtccttcgccagcgacgagcacccaccaggcttgttgtatatgtgctgcaatggcgtctctggggcgaagagccgggagctacatctgctcggagctgtgtggcacaactctgaaccagagacgctactccacttcgagggtggattggaagcagctgcggccaatgatccttaagaggattaagaaccggacaaaggaatacccaatcaagagcatgatcccagtcgcggaggaggtggtcagggctagggagattgtcaatgagggcgtctccagactgctcaaggttgttcctgttcagtcatgcaagttttgtcatgaagttcacattggaaccacgggtcatcagatgaaaacatgctatggtttcaagcgtatgatcaaggacagaccacatgaatgggaaccgggcaacttgaatgacatccttgttcctgttcaggctttccaccagaaaaatatgtttgagcatgagataaaacatgaccagcggttcgacttcactcgcgtcccagctgtacttgagctgtgccatcacgcaggtgcagacatacctgatgagattctatacagaagtggacaaatgtctactacactcaaaaccaacaatcagcaatctgctccaatcttgccagatgaactcagatatatcggtcagaaaacactggatgcatgggaaaacctgagattaggtgccacaaaacttctcttggtgtacccatccaaagtttgtaagcattgctctgaagtgcatatcgggcaatcagggcacaaggccagaatgtgtggagtattcaagtttgagggctggaaagggatgcacaagtggaacaaggctggagtggatgacctagttcctcagaacattgtgtggcatcggcggcctcatgatccacccgtccttgtggacggtgggagggattattatggccatgcgcctgctgtcgttgagctctgcatgcaagtgggtgcaatagtacccccgaaataccattgcatgatgaagacacacggcttagcaccacctgttggatgagaccacataccataagtcgactgcctgtatagatcagagaccaaaataatttgcttaaggatccaaaagactcttctggaagaagccatctattaactgtaatggctagctaaggagatacgctgttttgaagattattagtgttattagaatccagaaggtgagattgaaaagaaaagattttctgaagactagtagcggttgaaggccctcagacagtaggggaaattttgcattgtaaaagattataacagctttacttcattggcattcatttattcaacgttgtccttacattttccccc

SEQ ID NO: 106331 - DNA, 1672 bp, Zea Mays
aattgggccggccgggctgcatctcgttccaccgcccagcaaccccttccgctgcattattccacgtgcgttctgccggtctctctcgccgctgtctcgctctccggcgactggtgggccgccgccgccgccgccccgccaggtgcggaggttttcgttggtccttcgccagcgacgagcacccaccaggtacgcccaccccttttcaggaataatacaatctcttcttgcaccagcccctaccttcattcccttcatgccgtgcgaagctgagcaccgaaaccctaacctaaagctatttagctatttgatttgacaagcctcttaactttgaagtttttgcaaaaaaaaatgatgtacatgtgtacacccatgcccctttactggatccgcccccgatctcacgccaatgctcttttatgccttttattcaaattgtgaacttgtaggcttgttgtatatgtgctgcaatggcgtctctggggcgaagagccgggagctacatctgctcggagctgtgtggcacaactctgaaccagagacgctactccacttcgagggtggattggaagcagctgcggccaatgatccttaagaggattaagaaccggacaaaggaatacccaatcaagagcatgatcccagtcgcggaggaggtggtcagggctagggagattgtcaatgagggcgtctccagactgctcaaggttttgtcatgaagttcacattggaaccacgggtcatcagatgaaaacatgctatggtttcaagcgtatgatcaaggacagaccacatgaatgggaaccgggcaacttgaatgacatccttgttcctgttcaggctttccaccagaaaaatatgtttgagcatgagataaaacatgaccagcggttcgacttcactcgcgtcccagctgtacttgagctgtgccatcacgcaggtgcagacatacctgatgagattctatacagaagtggacaaatgtctactacactcaaaaccaacaatcagcaatctgctccaatcttgccagatgaactcagatatatcggtcagaaaacactggatgcatgggaaaacctgagattaggtgccacaaaacttctcttggtgtacccatccaaagtttgtaagcattgctctgaagtgcatatcgggcaatcagggcacaaggccagaatgtgtggagtattcaagtttgagggctggaaagggatgcacaagtggaacaaggctggagtggatgacctagttcctcagaacattgtgtggcatcggcggcctcatgatccacccgtccttgtggacggtgggagggattattatggccatgcgcctgctgtcgttgagctctgcatgcaagtgggtgcaatagtacccccgaaataccattgcatgatgaagacacacggcttagcaccacctgttggatgagaccacataccataagtcgactgcctgtatagatcagagaccaaaataatttgcttaaggatccaaaagactcttctggaagaagccatctattaactgtaatggctagctaaggagatacgctgttttgaagattattagtgttattagaatccagaaggtgagattgaaaagaaaagattttctgaagactagtagcggttgaaggccctcagacagtaggggaaattttgcattg

SEQ ID NO: 106332 - DNA, 2490 bp, Zea Mays
atgaggcaatgggcggaagctgcaagttgctatgccactgcgagaggaagaggagtcaccgccacgcgccagcgccaccgtctcatgtttcctgctccccgctgcgccgtttcgctctctcaggcccataccaatgcctccggtaccagcacctgcggcggggtcgggggcgggggcgggatgaaggcgctgcggcacccgacggcgtcgcaggtgaggcggctgtgcaaacagggtcgcctggacggcgcgcggctgctgctcctcgacgcgctcccgagcccgccgccgccgccgctctacaacgcgctcctcatcgcttacgtggcccgcgccctcccggaacacgcgctgcggctctacgctctcctcaaccacgccgcgcgccccacgccgcgctccgaccactacacgtactcctgcgcgctcaccgcatgtgcccgcacccgccgcctccgcctcggaaaatccgtccacgcgcacctcctccgccgcgcgcgctcgctgcccgacaccgcggtgctccgcaactcgctcctcaacgtctacgcctcctgcgtgcggtaccgtggcgacggcagcgtcgacgtcgtccggaggctgttcgacgcgatgcccaagcggaacgcggtttcctggaacacactgttcggttggtacgtcaaaaccggacgtccccaggaagctctggagatgtttgtgcgtatgctggaggatggcatcaagcctacgccagtcagcttcgtcaatgtcttccccgcagtggccaaggaagaccccagctggtccttcgtgctctacggcctccttgtgaagcatgggatggaatatgtcaatgatctcttcgttgtcagctcggccatcgtgatgttctctgaactcggggatgtgcagtcagcttggagggtgtttgagtatgctgccaagaagaacaccgaggtttggaacacgatgatcactgggtatgtgcagaacgggaaatttgctgaagctatgggtctcgttatccggttaatggtgtctaaagaggttccattggatgtcgtgaccttcttgtcagcactcacggcagcatcacagtcccaggatggcaggttgggtcagcaactgcatggctacttgatcaaaggaatgcacaccactttgccagtgatacttggtaatgcacttgttgtaatgtactcgagatgtggcaatgtccaaactgcctttgagctctttgatcggttacatgagaaggacattgtttcttggaacaccatgatcactgcttttgtgcagaacgattttgatctggaaggcctgttgctcgtttatcagatgcaaaaatcaggttttgcagctgatttagtgacattgactgcagttctctctgctgcgtcaaatacaggagaccttcatattggtaaacaagcccacagttatcttataaggcatggcattgagggtgagggattggagagctatctgatcgacatgtatgccaagtccggtcgcatagaaatagctcagagagtatttgatgactatggtaacgccaaaagagatgaagtcacctggaatgccatgatagcagggtacacacagactgggcatcctgaacaagcaatcttggcattccgggcaatgattgaggcatgtcttgaacctacttcagtgacacttgcctcggtgctccctgcatgtgatcctctaggaggaggtttgtgtgcggggaagcagatccattgttttgctttgcgccgctgtttggacaccaatgtcttcgtaggtactgctcttgttgacatgtactccaagtgcggtgagatttctactgcagaacatgtctttgctgatatgactgagaagagcactgtctcctatacaaccatgatttctggtcttggtcagcatggttttggcaaaagtgcattgtcccttttctactcaatgcaagagaaggggctaaaacctgatggtgtgaccttcttggcagcaatttcagcatgtaattactctgggctggttgatgaagggcttgctctgtacagatcaatggaaacttttggggtcgtagttactcctcagcaccgttgctgcattgtggacatgttagctaaagccggcagagtggaggaagcttatgaatttgtgcaggaactgggggaggagggtgacttcgtttctatttggggaacactgctcgcgtcctgcaaagcacaggacaagcaggaattggtgaatttggtgacagagagattgatctgcattgagaagaagtatggccatgctggttacagcgttttgttgtcacatatttttgctgctgagggcaactggagtagtgctgatagcctgaggaaggagatgaggttgagaggattgagcaagatggcaggttctagttggattaaagtccagcatgcagcattgcaaagctaccctaaaaatggccatgaacactcattactgcatgtagttgattacggtagagatgaaatcatctga

SEQ ID NO: 106333 - DNA, 1961 bp, Zea Mays
gcatgaccactgaattgctcgagtgcatatatgatcggatcctccagtgatctgattgatgctcaaagaatccatgcactatgcaggtaggtggatcgatagctgggaggcattaaagcggacgatgacgccttggcctcgctgcaatcttgcagattgctgctgcagcgcttctttaagagccaaccatccacatataccttgcttgacgccaagccaccggcattccactcccagcagcggtgggaacaaagagtgccagcgtctcacccctgaggccgcgcagagccactgcttgcgtctctgtctctctgtctgctcgtttttctccttctgcgactcgtaggagggtgaggtcttgcctcgcggaatggcggcgtccggggcatggctggcccgtgcgacggcgacggcggtgctgggtttcgtcctggcggtggcgtcagctgaggcggcatcgggggacgtggagatggtgttcctcaaggccgcggtggccaaaggcgcagtgtgcttggacggcagcccaccggtgtaccatttctctcccggctccggttctggcgccaataactgggtcgtccacatggagggaggagggtggtgcaggaatcctgatgagtgtgctgtccgcaagggcaacttcaggggctcctccaaatttatgaagccactctcgttttcagggatattaggcggcaaccaaaaatccaatcctgatttctacaactggaatagagtaaagatcagatactgtgatggttcatcatttactggtgacgttgaggctgtggacactgcgaaagatctccgttacagagggttcagagtctggcgtgccgtcatcgatgatctacttactgtgaggggaatgagcaaggcgcaaaatgctcttctttctggatgctcagccggaggtctagcagcaatactacactgtgacagattccatgatctgtttccagcgaaaacaaaggtcaagtgtttttctgatgctggatattttttcgatgggaaggatatctccgggaacttttacgctaggtcaatctataagagcgttgtgaatctacatggatcagccaaaaatttaccagcttcatgtacctcaaagccaaagcaatcacctgagctgtgtatgttcccacagtatgttgtcccgacaatgcgcacaccattgttcatacttaatgcagcctacgattcgtggcaggtcaagaacgtcctagcacctagtccagctgatccgaagaagacttgggcccaatgcaagcttgacatcaagagctgctccgccagccaactcacaaccttgcaaaatttcaggacagattttctggcagcactccctaaaacgcagtctgtaggcatgttcatcgactcatgcaatgctcactgccaatcaggatctcaagacacgtggctagccgatggttctcccacggttaacaagacgcaaattggcaaggcggtgggggactggtactacgatagggaggtccctcggcagattgattgcccgtatccctgcaacccaacttgcaagaaccgtgatgatgattgagcaattgtataagtagttcatgttatcgaaatgaaaacaataaaggatcacaacgcgcgcccgtagttgtagatgatgaattataaacacatatgactgagctcaaagttgtttaatcatcatctgttgcgaaatgaggaagacaattggtgtcttgaagctgtgttttcgactgtgtctaaagcgtaaatgtaacgtatattgtgtcttcgcctatgcttaagacattggactagttgattggtcaatttaatttattaaatgttttgattggtgtaatgaatataataagtcgtgcatgccgcatgactaggcttccagtcttccacttacaccggctaagcactgtctatatatatgtagtcactttggatcaatgaatcagctgtttttatca

SEQ ID NO: 106334 - DNA, 2383 bp, Zea Mays
tgccaaccaagcattactatggtagaatctcatctgacgggtacgaggagatgctaggctcacggctagccacagttgtgcattgctcgagtgcatgaccactgaattgctcgagtgcatatatgatcggatcctccagtgatctgattgatgctcaaagaatccatgcactatgcaggtaggtggatcgatagctgggaggcattaaagcggacgatgacgccttggcctcgctgcaatcttgcagattgctgctgcagcgcttctttaagagccaaccatccacatataccttgcttgacgccaagccaccggcattgtcggcaccgtgccctccgctccgctccccttcctcttggttttcggttccttcctccctcaaccagtcatctgctgctatttatgccacagccactcccagcagcggtgggaacaaagagtgccagcgtctcacccctgaggccgcgcagagccactgcttgcgtctctgtctctctgtctgctcgtttttctccttctgcgactcgtaggagggtgaggtcttgcctcgcggaatggcggcgtccggggcatggctggcccgtgcgacggcgacggcggtgctgggtttcgtcctggcggtggcgtcagctgaggcggcatcgggggacgtggagatggtgttcctcaaggccgcggtggccaaaggcgcagtgtgcttggacggcagcccaccggtgtaccatttctctcccggctccggttctggcgccaataactgggtcgtccacatggaggtttgtatatttgaattcgattaagctgacggtagtcaaaaaaaaaatcatactgctggcagtccaacgtttcaaatccgtttctgtctttggaagggaggagggtggtgcaggaatcctgatgagtgtgctgtccgcaagggcaacttcaggggctcctccaaatttatgaagccactctcgttttcagggatattaggcggcaaccaaaaatccaatcctgatttctacaactggaatagagtaaagatcagatactgtgatggttcatcatttactggtgacgttgaggctgtggacactgcgaaagatctccgttacagagggttcagagtctggcgtgccgtcatcgatgatctacttactgtgaggggaatgagcaaggcgcaaaatgctcttctttctggatgctcagccggaggtctagcagcaatactacactgtgacagattccatgatctgtttccagcgaaaacaaaggtcaagtgtttttctgatgctggatattttttcgatgggtaagttctgcactttcaagttgttgtcaaacttccagtacgcatcatactaggtaccatgttttgttttctcttggccattcttaaatatttgtcacccgagttcatttttgaactaaaatgtgatagacaaaaaaatcagtagaactgagaaccgttttttgtcattgcaggaaggatatctccgggaacttttacgctaggtcaatctataagagcgttgtgaatctacatggatcagccaaaaatttaccagcttcatgtacctcaaagccaaagcaatcacctgagctgtgtatgttcccacagtatgttgtcccgacaatgcgcacaccattgttcatacttaatgcagcctacgattcgtggcaggtcaagaacgtcctagcacctagtccagctgatccgaagaagacttgggcccaatgcaagcttgacatcaagagctgctccgccagccaactcacaaccttgcaaaatttcaggacagattttctggcagcactccctaaaacgcagtctgtaggcatgttcatcgactcatgcaatgctcactgccaatcaggatctcaagacacgtggctagccgatggttctcccacggttaacaagacgcaaattggcaaggcggtgggggactggtactacgatagggaggtccctcggcagattgattgcccgtatccctgcaacccaacttgcaagaaccgtgatgatgattgagcaattgtataagtagttcatgttatcgaaatgaaaacaataaaggatcacaacgcgcgcccgtagttgtagatgatgaattataaacacatatgactgagctcaaagttgtttaatcatcatctgttgcgaaatgaggaagacaattggtgtcttgaagctgtgttttcgactgtgtctaaagcgtaaatgtaacgtatattgtgtcttcgcctatgcttaagacattggactagttgattggtcaatttaatttattaaatgttttgattggtgtaatgaatataataagtcgtgcatgccgcatgactaggcttccagtcttccacttacaccggctaagcactgtctatatatatgtagtca

SEQ ID NO: 106335 - DNA, 2135 bp, Zea Mays
tgccaaccaagcattactatggtagaatctcatctgacgggtacgaggagatgctaggctcacggctagccacagttgtgcattgctcgagtgcatgaccactgaattgctcgagtgcatatatgatcggatcctccagtgatctgattgatgctcaaagaatccatgcactatgcaggtaggtggatcgatagctgggaggcattaaagcggacgatgacgccttggcctcgctgcaatcttgcagattgctgctgcagcgcttctttaagagccaaccatccacatataccttgcttgacgccaagccaccggcattgtcggcaccgtgccctccgctccgctccccttcctcttggttttcggttccttcctccctcaaccagtcatctgctgctatttatgccacagccactcccagcagcggtgggaacaaagagtgccagcgtctcacccctgaggccgcgcagagccactgcttgcgtctctgtctctctgtctgctcgtttttctccttctgcgactcgtaggagggtgaggtcttgcctcgcggaatggcggcgtccggggcatggctggcccgtgcgacggcgacggcggtgctgggtttcgtcctggcggtggcgtcagctgaggcggcatcgggggacgtggagatggtgttcctcaaggccgcggtggccaaaggcgcagtgtgcttggacggcagcccaccggtgtaccatttctctcccggctccggttctggcgccaataactgggtcgtccacatggaggtttgtatatttgaattcgattaagctgacggtagtcaaaaaaaaaatcatactgctggcagtccaacgtttcaaatccgtttctgtctttggaagggaggagggtggtgcaggaatcctgatgagtgtgctgtccgcaagggcaacttcaggggctcctccaaatttatgaagccactctcgttttcagggatattaggcggcaaccaaaaatccaatcctgatttctacaactggaatagagtaaagatcagatactgtgatggttcatcatttactggtgacgttgaggctgtggacactgcgaaagatctccgttacagagggttcagagtctggcgtgccgtcatcgatgatctacttactgtgaggggaatgagcaaggcgcaaaatgctcttctttctggatgctcagccggaggtctagcagcaatactacactgtgacagattccatgatctgtttccagcgaaaacaaaggtcaagtgtttttctgatgctggatattttttcgatgggaaggatatctccgggaacttttacgctaggtcaatctataagagcgttgtgaatctacatggatcagccaaaaatttaccagcttcatgtacctcaaagccaaagcaatcacctgagctgtgtatgttcccacagtatgttgtcccgacaatgcgcacaccattgttcatacttaatgcagcctacgattcgtggcaggtcaagaacgtcctagcacctagtccagctgatccgaagaagacttgggcccaatgcaagcttgacatcaagagctgctccgccagccaactcacaaccttgcaaaatttcaggacagattttctggcagcactccctaaaacgcagtctgtaggcatgttcatcgactcatgcaatgctcactgccaatcaggatctcaagacacgtggctagccgatggttctcccacggttaacaagacgcaaattggcaaggcggtgggggactggtactacgatagggaggtccctcggcagattgattgcccgtatccctgcaacccaacttgcaagaaccgtgatgatgattgagcaattgtataagtagttcatgttatcgaaatgaaaacaataaaggatcacaacgcgcgcccgtagttgtagatgatgaattataaacacatatgactgagctcaaagttgtttaatcatcatctgttgcgaaatgaggaagacaattggtgtcttgaagctgtgttttcgactgtgtctaaagcgtaaatgtaacgtatattgtgtcttcgcctatgcttaagacattggactagttgattggtcaatttaatttattaaatgttttgattggtgtaatgaatataataa

SEQ ID NO: 106336 - DNA, 1696 bp, Zea Mays
attgtcggcaccgtgccctccgctccgctccccttcctcttggttttcggttccttcctccctcaaccagtcatctgctgctatttatgccacagccactcccagcagcggtgggaacaaagagtgccagcgtctcacccctgaggccgcgcagagccactgcttgcgtctctgtctctctgtctgctcgtttttctccttctgcgactcgtaggagggtgaggtcttgcctcgcggaatggcggcgtccggggcatggctggcccgtgcgacggcgacggcggtgctgggtttcgtcctggcggtggcgtcagctgaggcggcatcgggggacgtggagatggtgttcctcaaggccgcggtggccaaaggcgcagtgtgcttggacggcagcccaccggtgtaccatttctctcccggctccggttctggcgccaataactgggtcgtccacatggagggaggagggtggtgcaggaatcctgatgagtgtgctgtccgcaagggcaacttcaggggctcctccaaatttatgaagccactctcgttttcagggatattaggcggcaaccaaaaatccaatcctgatttctacaactggaatagagtaaagatcagatactgtgatggttcatcatttactggtgacgttgaggctgtggacactgcgaaagatctccgttacagagggttcagagtctggcgtgccgtcatcgatgatctacttactgtgaggggaatgagcaaggcgcaaaatgctcttctttctggatgctcagccggaggtctagcagcaatactacactgtgacagattccatgatctgtttccagcgaaaacaaaggtcaagtgtttttctgatgctggatattttttcgatgggaaggatatctccgggaacttttacgctaggtcaatctataagagcgttgtgaatctacatggatcagccaaaaatttaccagcttcatgtacctcaaagccaaagcaatcacctgagctgtgtatgttcccacagtatgttgtcccgacaatgcgcacaccattgttcatacttaatgcagcctacgattcgtggcaggtcaagaacgtcctagcacctagtccagctgatccgaagaagacttgggcccaatgcaagcttgacatcaagagctgctccgccagccaactcacaaccttgcaaaatttcaggacagattttctggcagcactccctaaaacgcagtctgtaggcatgttcatcgactcatgcaatgctcactgccaatcaggatctcaagacacgtggctagccgatggttctcccacggttaacaagacgcaaattggcaaggcggtgggggactggtactacgatagggaggtccctcggcagattgattgcccgtatccctgcaacccaacttgcaagaaccgtgatgatgattgagcaattgtataagtagttcatgttatcgaaatgaaaacaataaaggatcacaacgcgcgcccgtagttgtagatgatgaattataaacacatatgactgagctcaaagttgtttaatcatcatctgttgcgaaatgaggaagacaattggtgtcttgaagctgtgttttcgactgtgtctaaagcgtaaatgtaacgtatattgtgtcttcgcctatgcttaagacattggactagttgattggtcaatttaatttattaaatg

SEQ ID NO: 106337 - DNA, 1776 bp, Zea Mays
gcatgaccactgaattgctcgagtgcatatatgatcggatcctccagtgatctgattgatgctcaaagaatccatgcactatgcaggtaggtggatcgatagctgggaggcattaaagcggacgatgacgccttggcctcgctgcaatcttgcagattgctgctgcagcgcttctttaagagccaaccatccacatataccttgcttgacgccaagccaccggcattgtcggcaccgtgccctccgctccgctccccttcctcttggttttcggttccttcctccctcaaccagtcatctgctgctatttatgccacagccactcccagcagcggtgggaacaaagagtgccagcgtctcacccctgaggccgcgcagagccactgcttgcgtctctgtctctctgtctgctcgtttttctccaatggcggcgtccggggcatggctggcccgtgcgacggcgacggcggtgctgggtttcgtcctggcggtggcgtcagctgaggcggcatcgggggacgtggagatggtgttcctcaaggccgcggtggccaaaggcgcagtgtgcttggacggcagcccaccggtgtaccatttctctcccggctccggttctggcgccaataactgggtcgtccacatggagggaggagggtggtgcaggaatcctgatgagtgtgctgtccgcaagggcaacttcaggggctcctccaaatttatgaagccactctcgttttcagggatattaggcggcaaccaaaaatccaatcctgatttctacaactggaatagagtaaagatcagatactgtgatggttcatcatttactggtgacgttgaggctgtggacactgcgaaagatctccgttacagagggttcagagtctggcgtgccgtcatcgatgatctacttactgtgaggggaatgagcaaggcgcaaaatgctcttctttctggatgctcagccggaggtctagcagcaatactacactgtgacagattccatgatctgtttccagcgaaaacaaaggtcaagtgtttttctgatgctggatattttttcgatgggaaggatatctccgggaacttttacgctaggtcaatctataagagcgttgtgaatctacatggatcagccaaaaatttaccagcttcatgtacctcaaagccaaagcaatcacctgagctgtgtatgttcccacagtatgttgtcccgacaatgcgcacaccattgttcatacttaatgcagcctacgattcgtggcaggtcaagaacgtcctagcacctagtccagctgatccgaagaagacttgggcccaatgcaagcttgacatcaagagctgctccgccagccaactcacaaccttgcaaaatttcaggacagattttctggcagcactccctaaaacgcagtctgtaggcatgttcatcgactcatgcaatgctcactgccaatcaggatctcaagacacgtggctagccgatggttctcccacggttaacaagacgcaaattggcaaggcggtgggggactggtactacgatagggaggtccctcggcagattgattgcccgtatccctgcaacccaacttgcaagaaccgtgatgatgattgagcaattgtataagtagttcatgttatcgaaatgaaaacaataaaggatcacaacgcgcgcccgtagttgtagatgatgaattataaacacatatgactgagctcaaagttgtttaatcatcatctgttgcgaaatgaggaagacaattggtgtcttga

SEQ ID NO: 106338 - DNA, 1464 bp, Zea Mays
gattgctgctgcagcgcttctttaagagccaaccatccacatataccttgcttgacgccaagccaccggcattgtcggcaccgtgccctccgctccgctccccttcctcttggttttcggttccttcctccctcaaccagtcatctgctgctatttatgccacagccactcccagcagcggtgggaacaaagagtgccagcgtctcacccctgaggccgcgcagagccactgcttgcgtctctgtctctctgtctgctcgtttttctccttctgcgactcgtaggagggtgaggtcttgcctcgcggaatggcggcgtccggggcatggctggcccgtgcgacggcgacggcggtgctgggtttcgtcctggcggtggcgtcagctgaggcggcatcgggggacgtggagatggtgttcctcaaggccgcggtggccaaaggcgcagtgtgcttggacggcagcccaccggtgtaccatttctctcccggctccggttctggcgccaataactgggtcgtccacatggagggaggagggtggtgcaggaatcctgatgagtgtgctgtccgcaagggcaacttcaggggctcctccaaatttatgaagccactctcgttttcagggatattaggcggcaaccaaaaatccaatcctgatttctacaactggaatagagtaaagatcagatactgtgatggttcatcatttactggtgacgttgaggctgtggacactgcgaaagatctccgttacagagggttcagagtctggcgtgccgtcatcgatgatctacttactgtgaggggaatgagcaaggcgcaaaatgctcttctttctggatgctcagccggaggtctagcagcaatactacactgtgacagattccatgatctgtttccagcgaaaacaaaggtcaagtgtttttctgatgctggatattttttcgatgggaaggatatctccgggaacttttacgctaggtcaatctataagagcgttgtgaatctacatggatcagccaaaaatttaccagcttcatgtacctcaaagccaaagcaatcacctgagctgtgtatgttcccacagtatgttgtcccgacaatgcgcacaccattgttcatacttaatgcagcctacgattcgtggcaggtcaagaacgtcctagcacctagtccagctgatccgaagaagacttgggcccaatgcaagcttgacatcaagagctgctccgccagccaactcacaaccttgcaaaatttcaggacagattttctggcagcactccctaaaacgcagtctgtaggcatgttcatcgactcatgcaatgctcactgccaatcaggatctcaagacacgtggctagccgatggttctcccacggttaacaagacggtaagtctaatgctgcatcagttatgacttatgagagaatcgagatactgaacggtttattctgttcttc

SEQ ID NO: 106339 - DNA, 2297 bp, Zea Mays
aggccttccaggggttctttttgtgcttcctgactcttacgttgatgctgagaacaaggattatggtgctgagttatttgtgaacggtgaaatcgttcagcgatctccagaaaggcagagaagggtggagccagtgcctcagagagctcaggatcgaccacggtacagtgaccggacccgctatgtgaagcggagggagaaccaatcttaccagagatgatgtttccgtctctgaagatgtaaaatgtcacggtttccacaagtgtccaaatgcggtactgaagatgcagcagcaactccccactactcatatgagaatggcatccgttctgtttgccgcgcattttaagctgtatatgcttattatgcatttgggcttgtacctcagtcgatatgaacgatgtatcctttgaactaacgcattataatttttgaaaccgttttagccagaaattaatcaactgttgatgattatcatatgatataccgcatgatcatctcggaaggggcccgtccgttcgatcgttcccctctcacaaactgctccagtactccaacccgttaaactgttgatggtgacatgatgccacattgccactggcagtcatatgcatgccgtcaccatcacattctggtagagataacggtgatgcaggcaaacgggacgcggagggtgcagcccgcgatctgtaacgtgtggcgcagcgggcgatctccgattcgctgccttatcctctgctactgccgcaccaaagcgtgagcaagcctgcctcccgcgagagcgctcaaccagccaagccggcgtcagaggcgagcagagaaatggcgggagcgaacttcctctccaccgcggcgctcgtcgcccgcggcgtcgctgcctgctcttctatttcaactccgacacggaggcacccgcaaatccgggtgtgctgccgggctgacgttgaggctatggaggcctatgcccatgaagagcgccttcgattccgtcggagagatttcatcggcacctgcgtcggcaccgctattggtttggaaatgatcgacggctctacgagtttctctggagtggctactgcagctgatctcattgagcgtagacaaaggtcggagttccaatcaaaaatcaaagacaccctttacgtagccataaaggctaagccagagctcgttccatcgttgttgaccatggcactgaatgatgccatgacatacgacaaggtctggtctctgaatggctttgtatcgttagcatttgggtccctccgttggtttagagagctggtttaattcttctgcagaccacaaaaactggaggcgcaaatggatctatcaggctagaaacaagcagacctgagaacagtgggctctcttccgcgttggatttgctgactgaagccaaaaaggagatcgattccttttccaagggaggtcccatttcgtttgcagatctgatccagtttgcagcacaatcagcactgaagagatcgtttcttgacgctgccattgccaaatgtggtggaaatgaagagaagggaagaacactgtactctgcatatggttcaaatgggcagtggggtctgttcgatagaacgttcgggagagcagacgcacaggaagcagatccagagggaagagtgcctgactggagcaaggcttctgtgcaggagatgaaggataggttcgtcgctgttgggttgggtcctcgccagcttgctgttatgtcagcgttccttggacctgaccaggctgctacggagggacgactgatagctgatccggattgccgtccatgggtggagaagtaccagcggagccgcgagaccgtctcccggactgactatgaggttgacctgataactacactcacaaagctgagctcccttggccagaagataaactacgaagcctacacataccctaagcagaagattgacctgggaaaactgaaactgtaagagatgattgccgggcacctgcatcggccgtatccaggaatcgggagctaattgtatggtaggctctgtctgctagagtgatttgattcggcgctgacgtccaagtattggctacttactggtcagctgtcagacattcttcccacggcaattaggatggtccctgtacatggttaaattggttctcccatttcgttttgtgtgaacttgaagaggcaaacgcttgtgagaagtgaggtgttgtgtcaatccccttacgtatacgagacgactgaagaattagtagaaaagaagtgcaagtgtcatgtcttgagtctgaagtctgagctcatgtttctg

SEQ ID NO: 106340 - DNA, 2249 bp, Zea Mays
tgcgctaactgtggtttgtgtttggataaaacaggccttccaggggttctttttgtgcttcctgactcttacgttgatgctgagaacaaggattatggtgctgagttatttgtgaacggtgaaatcgttcagcgatctccagaaaggcagagaagggtggagccagtgcctcagagagctcaggatcgaccacggtacagtgaccggacccgctatgtgaagcggagggagaaccaatcttaccagagatgatgtttccgtctctgaagatgtaaaatgtcacggtttccacaagtgtccaaatgcggtactgaagatgcagcagcaactccccactactcatatgagaatggcatccgttctgtttgccgcgcattttaagctgtatatgcttattatgcatttgggcttgtacctcagtcgatatgaacgatgtatcctttgaactaacgcattataatttttgaaaccgttttagccagaaattaatcaactgttgatgattatcatatgatataccgcatgatcatctcggaaggggcccgtccgttcgatcgttcccctctcacaaactgctccagtactccaacccgttaaactgttgatggtgacatgatgccacattgccactggcagtcatatgcatgccgtcaccatcacattctggtagagataacggtgatgcaggcaaacgggacgcggagggtgcagcccgcgatctgtaacgtgtggcgcagcgggcgatctccgattcgctgccttatcctctgctactgccgcaccaaagcgtgagcaagcctgcctcccgcgagagcgctcaaccagccaagccggcgtcagaggcgagcagagaaatggcgggagcgaacttcctctccaccgcggcgctcgtcgcccgcggcgtcgctgcctgctcttctatttcaactccgacacggaggcacccgcaaatccgggtgtgctgccgggctgacgttgaggctatggaggcctatgcccatgaagagcgccttcgattccgtcggagagatttcatcggcacctgcgtcggcaccgctattggtttggaaatgatcgacggctctacgagtttctctggagtggctactgcagctgatctcattgagcgtagacaaaggtcggagttccaatcaaaaatcaaagacaccctttacgtagccataaaggctaagccagagctcgttccatcgttgttgaccatggcactgaatgatgccatgacatacgacaagaccacaaaaactggaggcgcaaatggatctatcaggctagaaacaagcagacctgagaacagtgggctctcttccgcgttggatttgctgactgaagccaaaaaggagatcgattccttttccaagggaggtcccatttcgtttgcagatctgatccagtttgcagcacaatcagcactgaagagatcgtttcttgacgctgccattgccaaatgtggtggaaatgaagagaagggaagaacactgtactctgcatatggttcaaatgggcagtggggtctgttcgatagaacgttcgggagagcagacgcacaggaagcagatccagagggaagagtgcctgactggagcaaggcttctgtgcaggagatgaaggataggttcgtcgctgttgggttgggtcctcgccagcttgctgttatgtcagcgttccttggacctgaccaggctgctacggagggacgactgatagctgatccggattgccgtccatgggtggagaagtaccagcggagccgcgagaccgtctcccggactgactatgaggttgacctgataactacactcacaaagctgagctcccttggccagaagataaactacgaagcctacacataccctaagcagaagattgacctgggaaaactgaaactgtaagagatgattgccgggcacctgcatcggccgtatccaggaatcgggagctaattgtatggtaggctctgtctgctagagtgatttgattcggcgctgacgtccaagtattggctacttactggtcagctgtcagacattcttcccacggcaattaggatggtccctgtacatggttaaattggttctcccatttcgttttgtgtgaacttgaagaggcaaacgcttgtgagaagtgaggtgttgtgtcaatccccttacgtatacgagacgactgaagaattagtagaaaagaagtgcaagtgtcatgtcttgagtctgaagtctgagctcatgtttctg

SEQ ID NO: 106341 - DNA, 746 bp, Zea Mays
atctccgatcgtccgtgtccctcaccaaaagttcaaaaccccatccaattccaaatcccacttctcgccagttcacctccgcctccgctcctcccctccccctcccgtcctgccatggccaccgcagcacgcgccctcgtcgccgcacgcccggcacggccgctgctgccgtctcggcgcctcccgtcctcctcttccatccgtcccgcgcggcaacgtgctggcgtcgggtgcgtccgctgcatggctcggcggccggattccacctattccccgctgcgttcgggccagggcggtgaccgtgcaccgactgaaatggcgcctctgttccctggctgcgactacgagcactggctcatcgtcatggacaagcccgggggcgagggcgccaccaagcagcaaatgatagattgttacatccagacccttgcccaggtggtagggagtgaagaggaggcgaagaagaggatatataatgtgtcctgcgagcgctattttggattcggatgcgaaattgacgaggagacctccaacaaactcgaaggtgacttgtttggttccttgttcaagagtaaatacgtgcaatgtgatttcatcttctgtttcagttaatgtattttgcgttgcgctataatgttgatagttgcatagtgtgatggatggcatggaaaattaagatttctgcttgtgcagaatgcctagttatgttaaactgttacggttttgcagtctatttatgattcggt

SEQ ID NO: 106342 - DNA, 108 bp, Zea Mays
tttttttctgcgcgcggaacgaggagggcagaacggcagaacagcagactactcttaccttcttaataagtagtatagattgctacaaatagaatggacatcgttgtg

SEQ ID NO: 106343 - DNA, 129 bp, Zea Mays
ctgacattgacggattcaaatatatatatcaaggaacagctgtttggaaagctcttccagtgcctggacttctgcttctaggttttttatgtcttcaagatataactgggaatcaatgcttatcaccag

SEQ ID NO: 106344 - DNA, 1107 bp, Zea Mays
acgttacattcattctctcttcagcaagagctcgtctcactcgagcctaccactagccgtgtctttggccaccggatagctaggaagcggcgatcgccaggaaggaacgacgatgcaggggagctacggctacgacggggcggcgtcacgggaccccaagccgcggctgcgctggacgccggacctccaccagcgcttcgtcgacgccgtcaccaagctgggcggaccggacagagcaacacccaagtcggtgctcagattgatgggcatgaaagacctcactctttaccagttaaaaagccacctccagaagtatagactggggatacagggcaagaaaagcacaggcctggaacctgccagcggcggcgtacttcgctcacagggcttcggttcaaccacagcgcatcctcctccaggtgttcctgatcaagggaagaacacaagagaaatagcacttagcgatgcactaaggtatcaaattcaagtccaaaggaaactacaagaacaaactgaggtgcaaaagaagctgcagatgcgaattgaggcccaagggaagtacttaaagacaatactagagaaagctcagacaaatatttcctttcacacaaatgcatccaatggcatagaatcaaccagatcacagctcatggacttcaacctagatggtttcatgaacaatgcaactcaagtatgcaaagaacatagggagcaattggtgaaagctatgtccgatgaaaacgataaagatagtctaggccttcagctctaccatctaggaagtcaggaggctaaggaagtcaaatgcacaccaaaaactgaagactcgctcctactagacttaaatattaaaggaggatatgacctctcttctagaggaatgcaagcatgtgaactagaattgaaaataaatcagcagatagtataaatttgttcacaaagctgacagttttgggaagttcactctttgctattagattactatttttcccctgtggctcctgagcatgcttgtccaatgcccacaagctcacaagttttatttactatctgctcatgttatatttgctgaaagaagcttttgaataaatgtgggcattgttttaa

SEQ ID NO: 106345 - DNA, 2593 bp, Zea Mays
atcctctcctctccggaactcctctctgctcacgagtaaagcctgccgctagcccgcgctctggacgtcgcctcctcccccaccccaccggctgtcgccgcccccgccgacgttacctccttacccgccgcaccccccccccccctgcccccccgtccttgccttggcggatctgcctgcctgtgccgcctggcgctgcctcttatcccgccggccgccgctgcctcacgttagctcctcccccatcgtatccggacctccgcgccgcccccacgcctccctgacttggtggatctgtccaccattcaccggaaacagttggtcgctgcctaggtacccacctaccccctaggcgaggcggtaccccgtcgcccagcgcataagcgcgcccagcttgctgcagccactcctcgccggcgatggatttcatgaaggttttcgatcagactgtgcgtgaaataaagagggaggtcaatctgaaggtactcaaggtccccgagatcgagcagaaggtacttgatgcaacaagtgatgaaccgtggggcccccatggaagtgctctttcagaacttgcacacgctaccaagaagttcgctgagtgccagatggtaatgaatgtcctatggactaggttgtctgagagaggcgcgaattggcgtcatgtgtataaggcattaactattatcgagtactttatagccaatggttctgagagggcagttgatgacattcttgatcattattctaagatctcggttctttcaagttttgagtatgttgagcctaatggtaaagacgctggaataaatgtgaggaaaaaagtagaaaccattgtgggcatcataaatgacaaggagaaaataaaggccgtgagagataaagcagccagtaatcgtgataagtacattggactatcatccacaggcataacatataaatcaagctcagcctcatttggtagcaactgcagttcaggcgaacgttatgggagtatcagtggtacaaaggaagctgactcatacggtgatagttacagggacaaagaatctgttaaaacttccacaagcaatagcggcagtcggaaatttggcagcaagctgaggaaggatgcgaagcctgataggaggaatgaggattatagttcacccagctctttgagacccccatctaatacaaataacactgaggacgactttgatgacttcgatcctcgtggatcaaatggcaaaacaactgctaagtcaaatgaggtggatctgtttggcccaaacttgatggacgatttaattgatgcatctgcagcaactccagctacagacaatgctgcagaaccacaggttgatctgtttgctgatgcagattttcaatcggcaaccgcaagtacagagacagctgcaaatacagatgtcaaggtcaatgttgacctttttgcggaaaaggcatcttttcctgcagcatttccaccacaggctgggtttattccaccaccaagtgccgggacatcttctgaagtaaatacttccgtatccaagaaggcagctccggaaccttttgatccttttggcgctattcctttgaacaattttgatggacctgacccatttggtggcttcagctcaaatgctggatcatctaccgcagcagcacccacccacggttctactggaaatatcagcacatcgaaccagaaccttcatgctgcatccgactttgctgcctttgtatcaaacaacgagggagcagcgaaagacccatttgatctttcttcgagtgccaatgttggaaaaacacctttggcagctcccaagatcgacgcatctgatttcggtgcatttgtatctagcaccgaggaagcagccaaggaccctctcgatctttcttcgggtagcaaccttggaaagacaggccaagcacccgcggcagcctccaagcctagcgcaaagaaagacaattttcaggtcaagtccggcatatgggcagactcgctgagccggggattgattgatctgaacataactgcaccgaagaaggtgaacctagctgatattggcatcgtcggtggccttggcgatgggtccgatgagaaggccctgccctcttggaccatgggcgccggatccggcctaggaatgtctggtattccaccgtcaacacaacaagctggtggcatcgagagcttggccaactacaacaagcatcatttcggcttcaaataggcctcgatctttcatactggaaaatacccgtcatctgcggtttcctcctctgtcggcctgcttcttacacgtgctgccctattgatttaatcacttttttgtttttggttttggtgatcacattacatggtgtcgaccaatcttggccccgtcttgtcacacgtgtatgttatttgtcgggtttgtgggtaagcatgcaactacatacacatcacaccccctgtgttccagctcgatgataggtggtatgttggccatgcagtttgtgtaaattccgtggcctgccttttctacttgatacagtactctacgcagcgatttgcagtgcttgagtttatattcaataataagagaacctatgccctttatgtcttgaa

SEQ ID NO: 106346 - DNA, 2633 bp, Zea Mays
gtatcctctcctctccggaactcctctctgctcacgagtaaagcctgccgctagcccgcgctctggacgtcgcctcctcccccaccccaccggctgtcgccgcccccgccgacgttacctccttacccgccgcaccccccccccccctgcccccccgtccttgccttggcggatctgcctgcctgtgccgcctggcgctgcctcttatcccgccggccgccgctgcctcacgttagctcctcccccatcgtatccggacctccgcgccgcccccacgcctccctgacttggtggatctgtccaccattcaccggaaacagttggtcgctgcctaggtacccacctaccccctaggcgaggcggtaccccgtcgcccagcgcataagcgcgcccaggcgagcacggaatagctccttttcgaatacactcgggcgaagcttagatctgatctcaacgaacctgcagcttgctgcagccactcctcgccggcgatggatttcatgaaggttttcgatcagactgtgcgtgaaataaagagggaggtcaatctgaaggtactcaaggtccccgagatcgagcagaaggtacttgatgcaacaagtgatgaaccgtggggcccccatggaagtgctctttcagaacttgcacacgctaccaagaagttcgctgagtgccagatggtaatgaatgtcctatggactaggttgtctgagagaggcgcgaattggcgtcatgtgtataaggcattaactattatcgagtactttatagccaatggttctgagagggcagttgatgacattcttgatcattattctaagatctcggttctttcaagttttgagtatgttgagcctaatggtaaagacgctggaataaatgtgaggaaaaaagtagaaaccattgtgggcatcataaatgacaaggagaaaataaaggccgtgagagataaagcagccagtaatcgtgataagtacattggactatcatccacaggcataacatataaatcaagctcagcctcatttggtagcaactgcagttcaggcgaacgttatgggagtatcagtggtacaaaggaagctgactcatacggtgatagttacagggacaaagaatctgttaaaacttccacaagcaatagcggcagtcggaaatttggcagcaagctgaggaaggatgcgaagcctgataggaggaatgaggattatagttcacccagctctttgagacccccatctaatacaaataacactgaggacgactttgatgacttcgatcctcgtggatcaaatggcaaaacaactgctaagtcaaatgaggtggatctgtttggcccaaacttgatggacgatttaattgatgcatctgcagcaactccagctacagacaatgctgcagaaccacaggttgatctgtttgctgatgcagattttcaatcggcaaccgcaagtacagagacagctgcaaatacagatgtcaaggtcaatgttgacctttttgcggaaaaggcatcttttcctgcagcatttccaccacaggctgggtttattccaccaccaagtgccgggacatcttctgaagtaaatacttccgtatccaagaaggcagctccggaaccttttgatccttttggcgctattcctttgaacaattttgatggacctgacccatttggtggcttcagctcaaatgctggatcatctaccgcagcagcacccacccacggttctactggaaatatcagcacatcgaaccagaaccttcatgctgcatccgactttgctgcctttgtatcaaacaacgagggagcagcgaaagacccatttgatctttcttcgagtgccaatgttggaaaaacacctttggcagctcccaagatcgacgcatctgatttcggtgcatttgtatctagcaccgaggaagcagccaaggaccctctcgatctttcttcgggtagcaaccttggaaagacaggccaagcacccgcggcagcctccaagcctagcgcaaagaaagacaattttcaggtcaagtccggcatatgggcagactcgctgagccggggattgattgatctgaacataactgcaccgaagaaggtgaacctagctgatattggcatcgtcggtggccttggcgatgggtccgatgagaaggccctgccctcttggaccatgggcgccggatccggcctaggaatgtctggtattccaccgtcaacacaacaagctggtggcatcgagagcttggccaactacaacaagcatcatttcggcttcaaataggcctcgatctttcatactggaaaatacccgtcatctgcggtttcctcctctgtcggcctgcttcttacacgtgctgccctattgatttaatcacttttttgtttttggttttggtgatcacattacatggtgtcgaccaatcttggccccgtcttgtcacacgtgtatgttatttgtcgggtttgtgggtaagcatgcaactacatacacatcacaccccctgtgttccagctcgatgataggtggtatgttggccatgcagtttgtgtaaattccgtggcctgccttttctacttgatacagtactctacgcagcgatttgcagtgcttgagtttatattcaat

SEQ ID NO: 106347 - DNA, 7981 bp, Zea Mays
atgagggaggagatggatttgggtgacatcgtgctctcctggtcggtgcaggagatcacgaacgacgacctctacaagacgaaggtggagaggatccctttcagctttggttctcttgatgactacttgcgatcatatatgacacctctgatcgaagaaacaagatcatgcctaaactcgtgccttgagctcattgcagaagcaccgtcttcgaaaatactttcctttaaagttgcagggaaatcaggattgcattctatggatgttgacttttgggacaatggtgctggtttttctaccgagacctacaccgctaggaacggtgacatatttgttttgtctaacatgaagcctgaagctgcagatgacttcaaccgctatggtttaacatattgcttggcaatggttactgaagtttctatgaatgatgaatatcagaagggcttcaaagtgaaagtttcaaatagtactggtttagaaggagactttagtaaacttgtgcatgcaacatttcttgataatataatggctaacatgcgtatatggaaagcactttgctttgactcaagcatgaataataattttacaataatcaagtcacttttagcccccagaaatatgggtgaagatgtctgttctgtctgtgctaaaaaggatgactgtttaatgtcttctgcagagctaccaccagttaatctaaatcagtcacaattggatgccattgaatctatcatctctgctgtaagatgtagacatttgaacctcacaaaacttatatggggcccaccaggtactggaaagaccaagactgttagtgctctattgtgggctttggcttgtttgaaatgccgaactcttacatgcactcccacaaatgttgctgttgttggtgtctgtactcgattccttcaaaatttgaaggaattcagcaagcagattgacatatgtggtctacctctttctcttggagatgttttgttattagggaacagggacaatatggacatttctgaggagatccaggaagttttcttggattatcgtgtggatgagcttacagagtgcttttcattattgtcaggatggaggcacataattgtttcaatgatatcattttttgaggaatgtggttctcgatacgatatgcttcttgaatgtgatggcggcagtgattctgtatgctttttggatttcctgaaaaagcagtttgatgttgcagcaaaagctgtaaagaaatgcatgatgactttgtgggttcaccttccaaagaagtgcttttcacatgaaaatgtcagcaatatatctatggtgttacgtttactagaaaaaattaatgccttcttatgtgatggagatttaactgatgagagtgcgaaaaggggatttgattttcgatcaactgagaactctatttatgagccaatatcttacattgagaaggaattaggtgatgcaaggtctctatgccttaaattgctgaaagatcttcagagttcacttaatttacctgttgcctctagttcttatcggttgcataatgcagagattgctccgcttgatatgttgattgttgatgaagctgctcaagtgaaagaatgtgaattggtgattccactacgtttgtgttggttgaaacatgttgttttggtgggggatgactgccagttgaggccactggtatgcaaggaagctggatttggaatcagtctttttgagagattagtcatactgaattttgaaaagcatttgctgaatatacagtatcgcatgagcccttgtatcagcttatttccaaatgctaaattttatgacaaaaagattttagatggtcccaatgtccattcttcctacaacaaggattgcactggccttctttttggtagctatgctttcataaatatcactgacgggagggaacaaaaggaaggtgcaggaaacagttggcagaacttggttgaagttgctgttgttatgcacttgatccgaaccatctttaaatcttggagaaagagagaccaagggattagcattggtgtagtttcaccttacagttctcaagttgccgctatcaaagatagacttgggaaaaagtatgatacatctgacaactttcatgtcagggtcaagtcaattgatggtttccaaggagaagaggatgacattatcatactatcaacagttagatccaacgagaggggcaatgttggatttcttgctgacatccaacgaacaaatgttgctcttacaagagcaaggcattgtctctggattcttgggaatgctaatacactgtataaaagtgggacagtctggacagaccttgtttctgatgcgcagagacgtaaatgtatttccaatgccactactgaccctgaattgtgtaagttgattttgcatgtaaagaatgaacttgatgaactcgatgatctactttgttccagctcagcagttttcagcaataccagatggaaggttgttctgagcgacaactttagaaggtctttcatgaaactaaaatctccactcctaaagaaggaggtactccaaaagcttgttaaacttggtggtggttggcggataccaataaagaatcttgatgtgactgatgctttccagcttgcaaaagcatacaggatcagagatctgtatcttgtttggagtattgatctagaaaaaaacgaaagatacttccagatgataagagtatgggaccttttgtcacagcagcatgtcgctagaactgttcaacatctggaaaatctcttctccatgtatacagatgaataccttgaccactgcagaagtgtgcagacagaagggaagctggagtttcctatagtttgggatgctgaacatgatattgttcggtataagaaggactgcaaagttgatgatcaagtagatcatgatcacttggacttctcatgtgccttggagaacacaaaagttagtgaaagcttcttgctgatgaaattttactctttatcatctggtgtagcacatcatttgctgacagctactgatgggactgaaattgagatcccctttgaactaactgatgaagaggaggcgataattcgatttccactcactagtttcattcttgggaggtcaggcactgggaaaaccactgttttgacaatgaaactgtatcaaattgagcaacactcctttattgcatctcaagggatagagttggaagttgatttatctgtggttgatccaaaagataggttggcaatggatacaagaaaaggagaaagttttgtaaaacaagtccttatcaccgtaagccctaagctttgttcagctataaaaaatcacatttgcagacttaaaaggttttgctctggtgatgtttctgaccagcccaaccctcttcatatgtatgatgtaattgacgaccccgaagagtttacagatgtacctgataattttagtgatctacagcatgagcactatcctcttacaataacataccgtaaattcttgatgatgcttgatggaacaatgaagagttcattttttgatatgttctatggagatttcaatcctagcattgagagaggtcattccaaaactcgagctatgcaagcttttattgaatcaaaagaagttacatttgagaagtttgctgctttctattggccccatttcaatggagaactaacgaagaaacttgatgcatccactgtcttcactgaaataatttctcacataaagggtggatacagagctaacatgccgtgcagtggcaagcttgaaaggcttgattatgtgatgctctctgataaaagattttcatctctaaacagtaaaatgagagagaaaatttatgatgttttccttgattatgagagtatgaagcgcactgctagggaatttgatttgtcggattttgtcaacagtcttcacagaagtctagtttctgagggctacaatggggctttagtggatttcatttacatagacgaggtgcaggatcttaccatgtcacaaatagcacttctcaagtatgtctgcagaaactttaaggagggctttgtttttgctggtgacacggcacaaactatagcaaggggtgttgatttcaggtttgaagatgttcgctcactgttttatacctcatttatatcagaaagtgaagcatgcaaccaagtgattaaacatggaaatcatgctcatctcacggatatgttccaactaagtcagaattttcgcacacattgtggtgttcttcgtatggctcagagtataatgagccttctgtactactttttcccatcatgtgttgacaagcttaatccagaaactgggcttgtatacggtgaagcgcctgttctcttggagtctggtaacgatgagaatgcaattatgactatttttggagaaagtagaggtgaacatgctgaccagcatggttttggtgctgagcaagtcatattggttcgtgatgttgcaacgaagaaacaaattgttaacctcgttggtaaacaagctcttgtcttgactattgtcgaatgcaagggccttgaattccaggacgtgctactctacaacttttttagttcatcgccattacggaataaatggagggtagtatatgactacatgaaaacaagagatgttacgtcatcatctgaagttatatctcatcctggtttcgatagaaacaagcattatctactatgttcagaactgaagcagctgtatgtcgctatcacacgaactaggcaaagactctggatatgtgaaaatgctgatgactactgtcaaccaatgtttgactattggaagaaattgtgcattgtagaggttaggctacttgattcctcactgattcaagcaatgcagacagggagcagtactgatgattggaggttaagaggtaccaagttgtttaatgaggggcaatttgagatggcaacaatgtgctttgaaaaggctggtgatgcatatagagagaactgggcaagagcagctggactacttgcaactgctgaccgtgtcatctccacaaatttagaaaggggccaagctaacttgcagaaagcatcagagatttatgagtctattggcatgcatgagaaagctgccacttgctacatcaaactaggtgactacaaaagagcaggaatgatatatatggaaaaatttggaactaaaaggcttgaagatgctggagactgttttgctattactgaatgctggtcactggcagcagaagtttacttcagagctaggtgttatacaaagtgtttctcctgctgctcaaaaggtaaagcattgagtctgggccttcaattcctgcgacagttagaaaaggaacagtgtgagaattttagttcggactttgttgctgttagaaagacatatctcgaaagctgtgctctgcattattttaaatgtggagacataaagcacatgatgccatatgtcaaggctttcaacaatgtggatcacattcgtgcattcttgagttctaggaatcttttggatgaattgttgagtatagagatggaaatgggtaattttcttgaagctgcaggtatagcacagcgtaaaggtgatgtcttattggagtctcaaacctctagatataaccttgagttagagccagtatctgatcagctgtgctataatatgatggcttgtgatcagatgtcgttggaaacactgtcctgtatttggaaccagtggaaattgattttagtcaaagtgcttgctcatcttaatccttctgaggatattaaatctaatgattctgcagctgtgtgtgaagacctttgtgctaaattattcgggttgagaaaagacagtgacaaccgatatgtggtacttaatgtggactctggttggcttactaacacaggcagaagttctttggaacaagatggcaacagatgttggctgcatactgtgcattgtcagtcatgtgctcggacttttatggtaaatgagctttcttctgttggccttagtgtccttcgtaagttggaatctattattgaaacttctagggagatagcatcatctccatatgcccagtggagaagtattgttatcttatatgaaattgcaatgtttctaaaagagttctgtttggcaaattctttaagaaaaacggtcaatttctgtgaacagaaattttttgaattactttttcgggcctggggggatgaaacagcagagtgcttttccgacatacttgactcatctcctgcatatggtttgattgtggattctgttggctcatatactatggcagggaatcagaatttgactcatggtcatcttggaagaatagccatgtttcttctttacacagcaaaatatggtgatatgctgaatttaacacttgaacaatacctgaatcgtgacgctgagtgggcacaattttttcaatctttgaagagttttcttgacactggtgttggaagatgctcattggtccagacctttaaagtggctcttgaatttactaccaatgtaaaatggtggattgagaaggattatatgtctccaatatgctatatgaatttaatggaatgtcttggtttttttgcaatgtcctgttttatggttaatggctgtgcgctttgcacaaaatctctgttggttaagatgctaaagtgccgtacaagcaaggctttcttaggtaattgcctggtttctggtctgggtgaccaggatatggatctggactgtatgacattctcaccaggggtattcatatgccagtcaattaggtctattttgacaaacaagcatgctattcaagagtggattcgggaaatagctccagcaattagatacgttccagtccttctgagactagtaatcatgctttatctgctgactttaactcttcagttgggggactgctatgaggtcacagattttcttgctaagcacagaatttttgaggatttacctcctgatttctccaagaagattgtacctactctgaaatttagaaatggtacagtagcacacttcacaagagtatttggtgatgcacttgctgcaattggagacaccatggtcattcttggtttgcccaaaggcccgctaattagctcaggcttaaaagcttatagatttagctatactgatttgagtgatattagcaaagtaatggcattactttgtccagaagagcagaaattttccatgcaaaaagatacaaaagcttggaatgatacttgtggaaatttgtctattgctagaatacaagataatgagatggtcagtagaattgaaacgcatttgagtgatgagagtattaccttttgggagaagtttgagtcgtttcaagtctttatgcatgaccagaaggactcaagggttattattctattccttgaaagtcttctttcttggcttgagcgtcgagaccttccagaaaatatggatgttcaattattcgtagagatcaggcacatatgcagtcaatttcaagagaagtatcttagggataagaaagtttatctaactgtcgaagacctttactcgacgtgggatgatggggagaacaagctgcagaagatcatcagtttcctgcggtatgagaaaacttcgggaaaagaatctgtcaaaaggaaggacaaagcacctgctgcccagttccccacgcacatggctgatgaatggagtggatgctctgataatgatgaacctgacacagcagggatggacgcggtggaaccagccaaggaagaagatgtaacgtcttgttcgactgcgactgcaactgcaacaaagagaacgcagaacaagaagggcaagaagaaatcaaggaagcggggcggcaagaagtgagcttgcttttagcccgtagccctgctcagctctagaagcatttgatatgagactttttttaatgtactgaagaactactttggcttgaactattactgcttgttctagtctgttttgtactactttggcttgaacagcggtttttagtttcaagtaaccg

SEQ ID NO: 106348 - DNA, 2642 bp, Zea Mays
aaatcacgcaacaatacacgtccagcagagaccagagtccagactagcaaatgattccttagcagttccctgcatgccttctcgctcgccggcatgccggccgcgtggaagaaaccgccgatcagccgctgacgcggttgcacgaccactcgccctggcgctcattctcgtctctaccctgcctcgcgccgcgcactcgcaggatctggcgctgccaccagtccagccacgtggtgtgaggaggacgatgacgtgcgacaacatcccggagcccttcggcacaagatctagaggcgcgtcgcgtctacccggcttcgaggtgacgtgcgggccaaacagggaggccatgctgtccatcggcggcgatgcatacatgatcgatttcgtgtcggtgtcgggcagctacgtggtcgtcttcgcggagcccatcacgcaggtgtgctacgacggcaagggcaagccgacgccggacactggaaccggcgccaagagctcggaagggacgacgacgacgttcacttggagcttggaagggacgcccttcactttctccaagagtaacaagctggtcaacttcggctgcaaccgcacgctcatggctaacttcttcatcgtgcccggtgattccagcccgctatacaccagctgcaccaccacgtgcaacaccctccaaatcagcggctcttgccttggggaagcctgctgcgaggcccccatggaccaggtgaacggcgccaaggcgttcagcctgtcgttcgaaaggaccacggccaacggcaccggcgaggaggacggaacctgcagcgccgcgttcttcctggacaaagacgagacggtcttcacgttcagtggcgatgaggtacggccgctaaaaacagccttgctgccaccaggtgagcgcaggatggttttggattgggcgattgggagcaccagctgcgagcaaactcagagctacaccttcgagaaactgtgcaagtacggcacctgcgtcgacgcgcccaccggagcgggctatctctgcaaatgccctagcgggtacgacgggaatccgtacgtcagtgacggatgccaagatatcaacgaatgccggaattacaatagtaataattgcacctatcagaacctctgcaacaatactttgggaggctatacttgttcttgccccgagaataatattggtgacggttacaggacaggaacaggctgcaacaccactcttgcgacacctggtatcaacgtgtgtgatcacccggaaaagaacccttgtacatacattaagtattgcattgatttggaaggagttgtttcgtgcgcctgccctgaagggatgagtggcgatggcaggaaaaacggtagaggctgctgttttagctgtcaaaagcacttccctcttgacacagttttgggtgtaagtcttgtgcttatggttacaacgaccactgctgcgtcgtgctactgctgggcagtaaagaaaagagagctaggaagaaagagagcggaattattcaggaagaatggtggcttactcctgcagcagagattttcaacaatcacatctcaaggcgaggaccaatattcatcaaagatattcagtgcggaagagctcaaggctgctactgacaactatagcgagagtcgaatacttggccgaggtggacaaggcacagtgtacaagggcattcttccagatcaaactgtagtcgccataaaaaagtccaaggtgttcgatgagagccaagtggagcaatttgtcaatgagattgccatcttgtcacagattgatcacccaaatgttgtcaagcttttgggatgttgtttagagacacaggtaccattgctggtttatgagttcatatctaatggaacactcttccagcacatccacaacagaaatgcaactcgccctctaacatgggaagactgcttaaggatagctgcagagactgcagacgcacttgcctatctgcactccgcgtcttctatacctatcatacacagagacatcaaatcaagcaacattctgttggatgggaacttcgtggctaaaatagcagacttcggtgcatcaagatcagtcccatttgatcaaacccatataactactcttattcaggggactattgggtacctcgatcccgaatatttccaaagcagccaactcaccgagaagagtgacgtttacagtttcggagtcgttcttgcagaactgttgaccaggcaaaaacctatttctgcagcaaggccggaagattcatgtaacttggctatgcatctggtggttctatttaataaagggcgcctacttcaggagatagagccacacattttggccgaagcaggtgaagaccaatgttatgccgttgcagagctttcagtgagatgcttaaacgtgaagggagaagaacggcctgccatggtggtggtggcttctgttttacaagagctaagaaggtcattcaccatagaccaggctgtcggaataaaagatgaatcgatacaggaaaacagtgaacaagaagagaaacatctacatgagtccagatcaattcccagtttgcagtcatcagaagtaagcacacaatgtagcatggaggccaaaatgtcatctttttgttgacaaaataagcaaattttatatt

SEQ ID NO: 106349 - DNA, 1669 bp, Zea Mays
aagtccacgggcctcgcattgcattgcaaaaaaaaaaaaaaaaaacagttgccgctatataacaggatccagcgcacggcaaggcggcaggcaacagcaacacggagtcaaggagcacgagttaggttggcaaccctcgagagtcgagagcatggatcccaacgacgccttctcggcggcgcacccgttccggtgggacctgggcccgccggcgcccgccgcgcccgcgcctccgcccccaccgccgcccgcgccgcagctgctgccccacgcgccgctgctgagcgcgccgagggagctggaggacctggtggccggctacggcgtgcgcccgtccacggtggcgcggatctcggagctcgggttcacggccagcacgctcctcggcatgacggagcgcgagctcgacgacatgatggccgcgctcgcggggctgttccgctgggacgtgctcctcggcgagcgcttcggcctccgcgccgcgctgcgggccgagcgcgggcgtgtcatgtccctcggcggccgcttccacaccgggagcacattggacgccgcgtcacaagaagtgctgtccgacgagcgcgacgccgcggccagcggcggcttggcggaaggcgaggccggcaggaggatggtgacggccggcaagaagaagggcaagaaaggggttggcgcgaggaagggcaagaaggcgaggaggaagaaggagctgaggccgttggacgtgctggacgacgagaacgacggagacgaggacggcggcggcggcgggtcagactcgacggagtcttccgctggcggctccggcggcggggagaggcagcgggagcaccccttcgtggtcacagagcccggcgaggtggccagggccaagaagaacgggcttgactacctcttccatctgtacgagcagtgccgcgtcttcctgctgcaggtgcagtcccttgctaagctgggcggccacaagtcccctaccaaggtgaccaaccaggtgttccggtacgccaagaagtgcggcgcgagctacatcaacaagcccaagatgcggcactacgtgcactgctacgcgctgcactgcctggacgaggaggcctccaacgcgctgcgccgggcgtacaaggcccgtggcgagaacgtcggtgcctggaggcaggcctgctacgcgccgctcgtcgagatcgccgcgcgccacggcttcgacatcgacgccgtcttctccgcgcacccgcgcctcaccatctggtacgtgcccaccaggttgcgccagctctgccaccaggcacgggggagccacgcccacgccgccgccggcctccccccgcccccgatgttctagctgcgtcgtcgatgtgtgcctgcaccggcgcggcgccgtacgtctcacatcgcagttcaggctgttccatggcgccatcgaaaagtggaaggcggccttcgtctgcctctcatgttgtcgctttgttcgttgcgttgtggttagtcagaagtgggcttagatttagaatggggacgtcacttgttcggccgagcgggccgggaaacaatttactgtttcgatgggccacttgttagtttgttacctcgcggccttactaagttgtattgtatccctcgtgatagttgtcccccatcctccaaaaaaaaaacccgacggtgtaccgctcctgtg

SEQ ID NO: 106350 - DNA, 863 bp, Zea Mays
ccgccgccagccgaaaccctacggccgccgccagcatcaagctccttgctccccgaccaaaccctacctgtacccgccgccgccgccgcagcagccatgccgcccaaattggacccctctcaggtggtggaggtcttcgtccgcgtgacgggaggcgaggtcggcgcggcgtcgtcgctggcccccaagatcggcccgctcggtctctccccgaagaagatcggtgaggacatcgccaaggagaccgccaaggactggaagggcctccgcgtcaccgtcaagctcaccgtgcagaaccggcaggccaaggtctccgtcgtcccctccgccgcggcgctcgtcatcaaggcgctcaaggaacccgagagggacaggaagaaggtcaagaacatcaagcacagcggcaacatcagcctcgacgacgtcatcgagatcgccaagaccatgcggaacaggtccatggccaaggagttggccgggaccgtcaaggagatcctggggacctgcgtcagcgtcgggtgcaccgtcgatgggaaggaccccaaggacttgcagcaggagatcgatgatggtgaggtcgagatcccctcagcttaaaggctatacaactagaaatcatcggacactattaaagtggtgttttgctccaaatgcagttcctgcacctcaatcgcctattattgtctgctttagttccttcaagtcttgtgagagacctaatcagtaccttgtgccttataaaattacatcttccgattctctgtcttgtgatttggatggatgcgatcatcactggcgttcgtaccgtgtactcccttcgaacttatataattttagtaaggtttaaactgtccacaaaagaa

SEQ ID NO: 106351 - DNA, 2543 bp, Zea Mays
tgtgtaggaggtttcaagggctatttgggtggtgtggtgtgctcggcttgtaatgaccagagtttgagctctagatgccaagtgcaacaaggtaacaaacacatgcagaaaccattgacccaagtacttataacactgacgacaccggtacatcacaggcacacatcgcctgcttgttcttattacaggcacgagcatcacgttgctactatcacaaccagtcctgatgcacgccatgcctgatacgactgtattatagtagaaccagtattatactggtattagcacagccacacactgctatcaagcaccactactagtagtataatattgcagtgatataagcagggagcccagcccggccgagcacgagcagagtgcctgccactgccaggctctcccgccgccctttttatgagcgagcagcagtgtgggctggcctagcagcgccgcgcggctcacgcggcggggggcggcttctcgacgtcctcgagcgggcggaaccacaccttctggtccagcaccgtgcctcctgcagcatccgcgccggcgtccggcgcgccaccagcggccagcttggggtccaccgccgccgggccgaagacgccggtcttggggtgggggctccagtacttgtcggggctcccggcgctgccgatcacatcgtccggcacgaacgccgggcgcacctggtcctccaggttcttgtcgtacgccgaggcgtgcacggccctcctgcacacgggaaccagagagagagagagagagcgtgtgacgatcgctaggttcatcgcgttcatgacaagatgaaaaatcccaacacctaggctgaaacaatggcgccatggcatcagagctagcaaacgcatcacgatcggactcccacgcacggctgggctgcgcgcgcacatgggccgaatgggccatgggcgggcgcgcatgacttcgtacaagagcgaggcgaggccaggtggccctccatgatcccactcactcactcaccacagcaaaccgtaccacgcccggtactatgtaccatccaccacacgtccacaccaaacaccgtccgatgggcatgtcacctactgcgagaccccacggacggacggacggccccgatcggtcgtcggcccggcgtcccgcagcagctggcgcgatgggatcgaaacagaatcgtacggaccggatgccaaaggacggtaggtggggcccggcagacgcggatgcttctggtcccggtcgtaccgtggagagggttcctttctttcctttgagtgagaaccaaagcaagcgagccatggcagccaagatcggcaggtgggtaggagtgagtgactggccactgcactgcccactggtgagggtgagggtggagccgagcgacaactaccgcgcaccagacccacccatcaatccgcctttcggaaagcgatgcgatggaacacggaaggcaatcaggcgaggtcgcttgctgtttgctgcgcggcttgatgtgcacgtcctgcgcgcctccactgctcctcatcttctttgtgtgggtgcgcctgcagcctgctagtggcgtggcgtggcgtttggcttttccagttttcctagtggcagaggctgacagacagttttgcagatttgacagtctgaagtgggcagaaccgtagaacaacaaatacagtaatatctacggaggagggagagaaggactccgtggtactagtgtagtacaagcacatggatctggctttggttggggttcttctatcacttctacggagatggatggagttcttctatcacttatacggagatggtagtgtgcattcaagttgaagatacatactctccctcctagtcctagactcctagtatgtgttctattgttctcggacggacggccagaggattaaacaagctgggagatgttcagggttgccatatctacatactcgtgtgagaagataatcattctgttgtcgccaacttctagatatttctgctgaccaaaatcttggcaccagcagcacactgaaccaacacgaaacaagggctctctgcagaactagagttatagttatccacgaagctaagatcctcccaacaagtcccaagtcggaggggggcgaaataagcactatcgatccgagggaccggatcaccggacccagactcccagagcaaagctaagaacggccgtaaaaagaacagacagatcgctctgctacaagcctaaaactacggcgagatcttcgacgaactgatcaagaacaagcacgctcaaaaatagtaaaaaaaaaagcagaatcacagggcaaaccgaaacccgcgcgtgtggggtgagtgtggcccgtctgagtacctcggcgaggcggccttgccggcgaggacgcggctgacgaagcttccagcgatcgcccgccccttggagccagctgctgctgccatgcaaagatcgaccgttcgggagcggaggggagcggagcggagcggaggaagtcaccaagccaacagtggacaggcaggctgatgaaagggtgcggtgggttttcgat

SEQ ID NO: 106352 - DNA, 2643 bp, Zea Mays
atgccgccttgcgtatggaggtggcacaccggccgcggcctcccccacgcacctcgcccgtctgccgtgcccttgaaaaggtcagcctccatccgtccgtccgtcggtcaatcgaccggcgcaggaggacggagggccagcatatgttatgcatatgcatatgcatgcacgcacatcgatcgccagaagaaaacaatacaaaatccacacaacccatcactctcgccctcctgtccctctctcgacatgcctgtctatctctctctctctcatctctctgccctcacatacttctttattgtcctctcttggaagccaactcaagttacccatctctctctctctctctctctctctctctctctctctctctctctctctctctctctctctctctctctctgtgtgtgtctctcctcttcttgtgttttcgatccctcttctctcctgttgcttgcttggtgtggagaaaagatagctcactttccacagccccatctctcacatcctgcttcccctccaccctacctccttttctgccccccacaaaagctaaacaagcttgctggttcgcttgcctgcttggtattagctacccccaagcagatcgggccaacctgcaactacttcaagagatcgctgtccctgccctagcagccttctttctccttcgtgacaacacatgcatgcacccaggctgctgcttcctgtgctgtgcatcacacgggtcttggaaagctagcctcgttagcttcttggtgccagttgattggaaaggagcgagagaattattgagcggttggcatcagccgcttgcatccactatagaggcagcgagcgagagcgagagggatcggcaaagggcgccctaggggagctactactagctgccgcacgatactacagccatgtgcgactacttccttccgaggatggagggcgaccaggccggcggcggagacctcacggacatcgtccggtccggcggagccatccctggaaacgccgcggacacgccgtccacggccgccgcggacgagtggcagctccagggggacgcgacgatgctcttcccgccgcttccctcgtcgacgacagcatcggaagtaggctgcgccgccgtcttcggcaccgaccctttctccggcctcgtggacccgttcagtaccgactactcctcgggcgccgacttcctggacgccatgccggacgcgatggccaaggtcggcttcgacacgacggctatctgtggcggcagcggcagcggcagcggctgcagaggaggaggcggaggccaactcatagacatgagccggaagcagcagcctctcttgccgcgggggttgcagatgccggcggttggaggagtgctgacgccgagggtggtgctgccgtcgccgttgtcgccgagggagatacgaccgtacccggcgttagccggagacatggtcaagctcggaatcacggccgggcaggtggccgggtgcgccatcgacgccgccgttgtcgacatgcagatgtcttcgcctcgcgccgcgggcgggatcaagcgcaggaagaaccaagcaaggaaggtggtatgcatcccagcgccgacagcagcaggggggagaccaactggagaggtggttccttctgatctctgggcctggaggaagtacggccagaagcctatcaagggttctccttatccaagagggtactacagatgcagcagctcgaaaggatgctcggcgcggaagcaagtggaacgaagtcggaatgaccccaacatgctcgtcatcacctacacctccgagcacaaccatccatggccgactcagcgcaacgccctggccgggtcaactcggaaccaccacagcaagaacagcggcggcagctcaggttccaagaacgagaagcaacagcagcaatccaacaccgacgtcaaggaagagcccaacaaggatccagccaccaccacgacgacgacgacgaccactagcacgatcactacaatgacaaccagtgcttctccggcagcggtcgtgaaagaggagactctggcagctgggtcgtcagaggcgccgctggggcaagtcatggatacagcagcagcagcagtagaccacagtatcgagctcatggaccaggtgttcagctgtgagagctacaagccgatgatgatcccggaggccggcggccactcatctgacgacttcttctccgacctcgcggagctggagtcggatcccatgagcctaatcttctccagagagtacatggaagcgaagccaagcggtggcgatggtgaccatcgtgggcaccaggagaaagcgatgacgtccaaggacctggatccactgttcgacatgctggactggtctgccaattcctcgtcgtcagcagtgagctcgtcgtttgagcaacaaggaaacagagggtaatcgatcgtcgatccattggcatatgtacgtgcacacatacgtttgatcagagagaagctaataacaacaaacccagagaaactaagatcaccacaaggtcatgagttaaattaagacgagagagagttcctcctttttcttcactttcttttcctctttagttctttaatttggttcttatcatatcatttgtgtgagagagattggaattttttgt

SEQ ID NO: 106353 - DNA, 1767 bp, Zea Mays
atggctgaagccggcggcccgaattcatgttcaccaatggctatggcagcgctcgaactacagaagatactggagacagaggacactcacgatcacggctcacctaggcggttcggcggacggcgattggcggggcggctcggtctggagctgaagccttggatggaggggtcacaccggtggccgcctcttgtgggccttatgggtggtgttgggccttctaagtatacaagtgtatacaggctcggtgagaagctgcgaagcctgcgagcccgaccgcgaccgagcagatcgttccgtcgtgcattcgtgcttcggttcttcccgtgctcgtcttcttggccgggacgaaagaaaagggggactttggctgtcgatggcagcggcgttggagttcctggaggcgcagggcgcgacccagccggagctcgcggaatggtacgcggcgctcgccgacctgtaccagcgaaagctatggcaccagctcaccctcaagctggagcagttcctcgccctcgccgtcgtccaggcaggcgatgctctgattcatctttataatcatttcatctctgattttgagacaaagatcagtcttcttaaatttgctcacttcacagtcgtagtttcacaccagtatttggacaagaatgctggtataaattatcttgaaggcgtaatttcaaaactacgtgatacccgtgaatcgcgggttgaagagcccattctgtatgtaaagatgcagattgcaacatttcttcttgagaaagggaatcaaaaggattgtaagaatctgctagaagaaggcaaaaccactttggacagcatggttgatgttgatccttctgtacatggtacctattactgggtgtgttcacagtatcataaggcccgtcaagaatactcagaattctacaaaagctgtcttctttaccttgcgtacacgacagtgagcttgttgttacagtttttgataaacctggcacttgacctctcacttgctgctttattgggtgaaaacatttacaactttggggaactacttgcccatccgattatccatagccttttgggaactcaggctgagtggatatttcatatgttgcaagctttcaactctgggaatctatccttgtatcaagaaatctgcaaagctcatagcaacgctttgagtgcacagcttgcattggtacaaaatgagaggaatctacttgaaaagatcaacatgctttgcttgatggaaatcattttcagtcgatcatctgaaaaccgcacgatcccaatgcgggatatagcagaacagaccaagctccctgttgaagatgtggagtatctattaatgaagagcctctctgctcgtctaatagaaggcataattgatcaggttgatggagttgtccatgtttcacgggttaaaccaagggtgttgggcatagaccaagtgaaatgcttgcatgaccggttggatacatggattgggaaggtcgatacgatcttgctttctgttgaagcggagacgccagacttggtgtcttcgtgatgttctgctcctctcgaaggatcactgtgacataatctgatgtgaacgaagtcgttagatatttatcgtgttgtcagcctgtaatcattggtgtaaacccctgtaacgattgtggtaacactgtaacctcgttgctgcagttttagtagtgtacattcttgaggaatcgttgtttcaaacaattgttcagctgactctcagctcaagatgtgtatcctcaaatatgccct

SEQ ID NO: 106354 - DNA, 1907 bp, Zea Mays
atggctgaagccggcggcccgaattcatgttcaccaatggctatggcagcgctcgaactacagaagatactggagacagaggacactcacgatcacggctcacctaggcggttcggcggacggcgattggcggggcggctcggtctggagctgaagccttggatggaggggtcacaccggtggccgcctcttgtgggccttatgggtggtgttgggccttctaagtatacaagtgtatacaggctcggtgagaagctgcgaagcctgcgagcccgaccgcgaccgagcagatcgttccgtcgtgcattcgtgcttcggttcttcccgtgctcgtcttcttggccgggacgaaagaaaagggggactttggctgtcgatggcagcggcgttggagttcctggaggcgcagggcgcgacccagccggagctcgcggaatggtacgcggcgctcgccgacctgtaccagcgaaagctatggcaccagctcaccctgggctgatttggtgattagggatccctaggggatccatgggggaggaattcccttgcaattcaattttgaatagcaaaaggatttcttccgcttgggatccccggtcaccaaaccagccctcaagctggagcagttcctcgccctcgccgtcgtccaggcaggcgatgctctgattcatctttataatcatttcatctctgattttgagacaaagatcagtcttcttaaatttgctcacttcacagtcgtagtttcacaccagtatttggacaagaatgctggtataaattatcttgaaggcgtaatttcaaaactacgtgatacccgtgaatcgcgggttgaagagcccattctgtatgtaaagatgcagattgcaacatttcttcttgagaaagggaatcaaaaggattgtaagaatctgctagaagaaggcaaaaccactttggacagcatggttgatgttgatccttctgtacatggtacctattactgggtgtgttcacagtatcataaggcccgtcaagaatactcagaattctacaaaagctgtcttctttaccttgcgtacacgacagtgagcttgttgttacagtttttgataggatttgtatgagtttcagaacctggcacttgacctctcacttgctgctttattgggtgaaaacatttacaactttggggaactacttgcccatccgattatccatagccttttgggaactcaggctgagtggatatttcatatgttgcaagctttcaactctgggaatctatccttgtatcaagaaatctgcaaagctcatagcaacgctttgagtgcacagcttgcattggtacaaaatgagaggaatctacttgaaaagatcaacatgctttgcttgatggaaatcattttcagtcgatcatctgaaaaccgcacgatcccaatgcgggatatagcagaacagaccaagctccctgttgaagatgtggagtatctattaatgaagagcctctctgctcgtctaatagaaggcataattgatcaggttgatggagttgtccatgtttcacgggttaaaccaagggtgttgggcatagaccaagtgaaatgcttgcatgaccggttggatacatggattgggaaggtcgatacgatcttgctttctgttgaagcggagacgccagacttggtgtcttcgtgatgttctgctcctctcgaaggatcactgtgacataatctgatgtgaacgaagtcgttagatatttatcgtgttgtcagcctgtaatcattggtgtaaacccctgtaacgattgtggtaacactgtaacctcgttgctgcagttttagtagtgtacattcttgaggaatcgttgtttcaaacaattgttcagctgactctcagctcaagatgtgtatcctcaaatatgccct

SEQ ID NO: 106355 - DNA, 1903 bp, Zea Mays
atggctgaagccggcggcccgaattcatgttcaccaatggctatggcagcgctcgaactacagaagatactggagacagaggacactcacgatcacggctcacctaggcggttcggcggacggcgattggcggggcggctcggtctggagctgaagccttggatggaggggtcacaccggtggccgcctcttgtgggccttatgggtggtgttgggccttctaagtatacaagtgtatacaggctcggtgagaagctgcgaagcctgcgagcccgaccgcgaccgagcagatcgttccgtcgtgcattcgtgcttcggttcttcccgtgctcgtcttcttggccgggacgaaagaaaagggggactttggctgtcgatggcagcggcgttggagttcctggaggcgcagggcgcgacccagccggagctcgcggaatggtacgcggcgctcgccgacctgtaccagcgaaagctatggcaccagctcaccctgggctgatttggtgattagggatccctaggggatccatgggggaggaattcccttgcaattcaattttgaatagcaaaaggatttcttccgcttgggatccccggtcaccaaaccagccctcaagctggagcagttcctcgccctcgccgtcgtccaggcgatgctctgattcatctttataatcatttcatctctgattttgagacaaagatcagtcttcttaaatttgctcacttcacagtcgtagtttcacaccagtatttggacaagaatgctggtataaattatcttgaaggcgtaatttcaaaactacgtgatacccgtgaatcgcgggttgaagagcccattctgtatgtaaagatgcagattgcaacatttcttcttgagaaagggaatcaaaaggattgtaagaatctgctagaagaaggcaaaaccactttggacagcatggttgatgttgatccttctgtacatggtacctattactgggtgtgttcacagtatcataaggcccgtcaagaatactcagaattctacaaaagctgtcttctttaccttgcgtacacgacagtgagcttgttgttacagtttttgataggatttgtatgagtttcagaacctggcacttgacctctcacttgctgctttattgggtgaaaacatttacaactttggggaactacttgcccatccgattatccatagccttttgggaactcaggctgagtggatatttcatatgttgcaagctttcaactctgggaatctatccttgtatcaagaaatctgcaaagctcatagcaacgctttgagtgcacagcttgcattggtacaaaatgagaggaatctacttgaaaagatcaacatgctttgcttgatggaaatcattttcagtcgatcatctgaaaaccgcacgatcccaatgcgggatatagcagaacagaccaagctccctgttgaagatgtggagtatctattaatgaagagcctctctgctcgtctaatagaaggcataattgatcaggttgatggagttgtccatgtttcacgggttaaaccaagggtgttgggcatagaccaagtgaaatgcttgcatgaccggttggatacatggattgggaaggtcgatacgatcttgctttctgttgaagcggagacgccagacttggtgtcttcgtgatgttctgctcctctcgaaggatcactgtgacataatctgatgtgaacgaagtcgttagatatttatcgtgttgtcagcctgtaatcattggtgtaaacccctgtaacgattgtggtaacactgtaacctcgttgctgcagttttagtagtgtacattcttgaggaatcgttgtttcaaacaattgttcagctgactctcagctcaagatgtgtatcctcaaatatgccct

SEQ ID NO: 106356 - DNA, 447 bp, Zea Mays
atgaaccagatagggacaaagtggcaagaagaaatcgaaccaggcctggagcacgagcaggagcgtgaggggcagaagcctctcaggcccagccgcgtaccacagcaaggcgcccgcggcgcggcggacgagaacgggaggccgcgcgcctggcgcccgcacgccgtacatgaccagcagcaggccggcggacatgagcccgaacgccagggtgacttgccacgtggtgaagaggtcgagaggcgtgccgcagacggtgggcaggaggtacgacatggcggtggccacggcagcgagcccggtgccggcgaagtcggcgcgcccgtttcccgcgcggtccatgcgctcgacctacagtacttgtggtttccggcaaacagtgatgatgatgcgatgcacacctgcacaagttgcaggaaagtctctactgcaactgctgcagtctga

SEQ ID NO: 106357 - DNA, 1059 bp, Zea Mays
ttgcttttctaatttatataaactttgattagctggaacgattccgggtgcaattcgacacaaacaaacaaggcctaaatcgattcagatgcccgggtcgggtctttgtctggatttgtggttggactaaaccgccacatggtttaatggttagtaaacggtagtgccctgtttccgccacatggtttatgtgtactagccccgtgcccgcataaaaaacaatataaaaaaccgggctatggttgaaagacccgagcgactcaacgaaacgcgggtactccgtcccaatcaactggcatgcattccgaccgcttcgcacgttgacagctcgccaccgctatatatccgcaccccgatccttgatgagcccttgaccgagctgcttgcactactgcaggtgatgatcctgttacatgatgtaagcagttattactgtactagtcgcatgaaacgaatggtcatgggacgtgtcccttcgcacgttctccactttcacatctcttcgcatgtgtcttcgcatgcgcccatgactaacgtgaacaagctccaaggctttcatgcccgagccaaacacccacccacgctgggcacgacgccgatgaccctcttggcccggcaactcgatcccgaggcatcccctacgatagagctctaatcaaagatacaaggagtaccggtgactcaccacgccttcagtgctcgcgcaagatcagtcggaatcaacatggattggacggccagcggtggagctgtccacggctgcgttctgcggcgacgtggccctgttccgagcagcagaccccggtaaaattagggaactcacctcggtgagcatcactgccacgtaggcacctcagaacaagccttacttgggttgcaactgctccaactgcgctggccacagtgaggtgagacatctgcggctgtggtcatggacacatgaggacagcatacatagctttggaactgaccaactaagagactgaggagagggttagcatcaccatgagcacaagaatcaccacatcctcactgtggtcatcggttagagcttaaggc

SEQ ID NO: 106358 - DNA, 107 bp, Zea Mays
taaaatcccgctgctatacgtgcgggcggccccgactgacacaccatgtgtcggcggtccggttccaacactggcaggggttttgatggttcacacactgattatcc

SEQ ID NO: 106359 - DNA, 135 bp, Zea Mays
ttttcaattttaagaagttacaaaccagtttctagaaactggcttccaaacagccactccaatttttttagaaaccagtttttgaaaattgagataagaaaccagtttcttataaactaccacccttccaacctg

SEQ ID NO: 106360 - DNA, 563 bp, Zea Mays
tttttcttcaaagcaaatcatgctagcttgcatagatttattcaaaactaaaaacaaacaagatgggtcagacatccagccagccttgtggtatcaacggtcaacgactgcatcattgagtgttagcactactactacccaaagccaaactgcggccatggatgggagtatgggactgactgacctttcgtaaacctgaaccctgcagccctggagctgatggagaggcatgtggtggccgtggtggccccccagtcctcgggcatcgcgcacgtcgtctcccacgtcgccaaccagctgcgcgtcccgctgttgtccttcgccgccaccgaccaggcgctcgcctcctcgcagtacccctacttcgtccgcgccacgcacgacgaccgcttccagatggccgctgtcgccgacgtcgtcgcgcaccacggctggcgggaggtcatggcggtctacgtcgacaacgactacggccgcggcggcgtcgtcgcgctcggatgtcgtggagcaagagagatgacggcggcgagggagcacggcgactgcgagtgaacccgagagga

SEQ ID NO: 106361 - DNA, 665 bp, Zea Mays
atgaactggaagcgcaacaaggtcgccggcaggtgcaggaaagaagagacgcgggagcggctgattcagcaggcggcggcggcggatccggatggcgggggcagcgtgccgcggggctgcgtggcggtgctggtcggcggccgggaggacggcgcggagccggaggagcgggtggtggtggacgtgcgcgcgctgctggacatggcggcgcgggagttcgggtacggccagaagggcgtgctgcggatcccctgcgccgccgacgagctccgccgcgccgtcgccgccgacaggcaccggtggacgcgctaggcgatcgacagcgagcgaggctctggttatatagtggcgacacgtacgacgccgacagacaccgactgacaacggtggacggcgtgccagcaatgatcgattccacgctccttaatctacgcgtacggtacggatcgacctgccatgcacatgcatatatagagacggacgtagctagccacggtactacactacttaaaagttagaacatcagacgcaacggcatctccatgtgtgcgtgctcgaatttcttaggaagcatagagtagctaggttctgagcttgcaggtgttgcagtcttttttttcctcagagtttgcaagtgtacagattaactgggggacatttaggat

SEQ ID NO: 106362 - DNA, 768 bp, Zea Mays
ttcacgccctctaggtgctctcagttctccacggtgcccttaaatatatcctttcgtaggggtttggctcaacagttgatggtccattgggttcatttggtctcacttgtagcgcataccgagttgaattcaaacagggactcattcagatggaacttgaccaccaacgagatgtttacggttaagtctttgtatctagcatctttcaacaatgggatgggggtgcataataaggacctttggaaacttaggcttcctttgaaaattaagatttttatgtggtgcctcaaaagaggggtaacattaacaaaggataacttggctaggaggcattggtatggtaataagatatgttgcttttgtagcagaccagagacaataaagcacctgtttttcagttgtttgtatgcgtcattcatttggcggttgattcagataagcacggggttgagacctcctcgggatgtttatgatttgtttggggtttaggcgagtgggaggcttcccagagttcgcaacttactattaaccgttgcatcgacaatttgttgggctatttggttaagtaggaatgatgtggtgttcaataattcatctcctaaatcatgtgtacaggtaaccttcaaggcaacatattggtgccacttctggtctcagcttcagcctagaagggaggaccaagagttaataaagtcttcatgtcgtaatgtggagagggtgctactacagttcttcaacaattttggatgggggtctgcgttgcgttta

SEQ ID NO: 106363 - DNA, 2301 bp, Zea Mays
atgcctcggaagtcgcacaaggcgaggggcgcggccgcgcacgccgccgttggtctcacggccgggccgaggcctcccctgaaggccacggccccaaaccctagcgccgccgccgagcttccccaggtcgtcgttgccgaggcagagggcctcaaggtacctgacgccggggcgtccgccgccgctgacgccctggagcgcctccacgtcgcccctgctcccgacggtgatccgccgcctcccgagcccgtgcacgagcccgccgcgccgcctcagcccccgccggccgaggcgtcgtcttctgggaggtctgcggcgggcgggagttgggaggaggaggctgtaaggaagctgcgggagctggcggaggttagtcgggatgagacggagttgaccgaggaggaggtgcgcgccaatgatcagaggcaggaggacgagatctgtgccctcgaagcaatttttggagatgctgtagtgattttggacagaaagggaggccagcggtctttccaggttcttgtgcatattgaggttccagattatatagatgtatcaacaaagctcagttatggtgatggaacattaaattatgcggcaacacatgatgatgatgaccttttctacaagttcagagttgagcatttgcctccgatcctgctaacatgtctcctgcctacatcatacccaagtcaccgtcctccctttttcactatatccacatattggcttgataaaggcatgatttcaccattatgtcgcatgcttgacatgctttgggaagagcaacaagggatggaagtaacatatcaatgggtgcaatggctccagagttgttccctttctcacttagggtttactaatgaagtagttttgagaaagagttatgtaacatgttatgcagatggtgaagataagcgtgcttgtccagattatgcttcaccagatgttataattccaaggatgatgagatacaatgacaataagcatcatgaagctttcttacatgctatccatgattgcatgatttgtttaagcgagtgtcctggtgttgatttcatcaaacttccgtgtcaccatttcttttgctggaaatgcatgcaaacttactgcaaaatgaatgtcaaggaaggaaatgtagtgaagttgctatgtcctgatacaaaatgtgaaggtgctgttcctccgaatgtattgaaaaggctgcttggagaggatgaatatgaacgttgggagggattattgcttcagaaaacccttgatgccatgaaagatgttgtctactgtccaagatgtcaaactgcttgcttggaggacgtaggtaatgaagcagtatgttcaagttgtttgttcagcttttgcactctctgtagaaatcgccgccatattggagagcaatgtatgtctccagaagagagacttatgatcttggagaaacgccaagaatctgggaatgtgcaaggagatcagatgaaagttctacaggaactacgcagcctgaaggaaattatgaaggattcaaaacagtgcccaaaatgcaggatggccatatctaagacagaaggatgcaataagatgcattgtgagaactgtggggagtacttctgctatcaatgcaaccgtgcgatcactggatatgagcatttcaggggttcgtgtgtgcttttccctcaagaggaattggacagatgggaaatgcaaatgaatcaaagggtcggacgccaaattgttgcacatgctcatgctgcaatacatgggcagaatggtcaagctcatccttgccctacatgtcggcaaccgtctccaaagatcggaaacaacaaccacctcttctgttgggcatgccagaagcatttttgtgccctgtgccataaggctgtccaaaagcccgcacagcattatggccccaaaggatgcaagcaacatacggcagatccctgaatgaggttttcccatatgtgcatcaacaccgtggtgccagtgcagtttcgaagtgttctgtgcaagtacagataaatacttgtcctgggacgtacttcactcctggattccattattgttattattttttttgctgcaagcatgttttgaagtttccgtcgtcgttgtacctacagtaacagttgtgcagtttacattcgggaacatgaacaggaactgttcattcattcgttcagtaccagatggattgttgagaatactcgggtgttgaagttgagaatactcgcgtattaaagatgcgattgaacacaagtccaaaaccgatagaaccttgtaaaattctaaaagggaagattatttgtt

SEQ ID NO: 106364 - DNA, 747 bp, Zea Mays
atgtctacggagctcaaagctatggaagggagcatctgccatgagttcgagaccgggctcccagctgccgccgtgtgggaggtctatggaagcctcctcttcgggaaactgatgccccagctgctccctgaagtggtctcgaaggttgagcttgtggagggagacggtggcgctggaacggtcctgcttgttaccttccctccaggaactcctggatcagaaactttcagagagaagttcatcaaggtcgatgacgaaaactacatcaaggagacggtggtcactgaaggaggccttctggatcacggctttcggaagtacatggttcgaatcgagatcgtgggaagagaagagaagacatccatcgtaaggtcaacaattcaatacgaagtcgatcatgagcatgcaggttcacacgcaccccctgtgttcagtaccgatgggttagctaccattgccgaggccatcaccaagtatatcaaggagaagagaggctctgagtccgtaatctctcccaagtaattgaactctgggaattgaagaagaaagggccatagcgtgaagatatttatttctcttccgtacttgttcaaatcgtgcagataatcgtcggatgcgtggagtgagtttatagatggttgtttattactccctccgttctaatttataagtcgttgtgtaatctttagcagagattaggataaagtgtggactaaactttatcaaatgtggggtttggagaaaaaa

SEQ ID NO: 106365 - DNA, 498 bp, Zea Mays
atgagtacagtagtaaacgcagcaggtcttgttccaacttgtggccgccgacgcatagttactgaaactgcgtgcatcgtcgtcaccctcgtcagaaaaaccaaacgaaacgtacgagcagctggccggtgggccagaacagggggaaacaaaacccggcaagaacttgccagctatgcccacgagggaggcgccgcatccgtccgtccccgcgcacatgccgcggtccacgtcgcccgcactgttgccgccaaggaccagccagcgtcggtgcggtggaaggcgtcggagccggcggcacaaaggtgggggaaggcgttggatccggcgtcgttgatgtgggggaaggcgcagtacggcgcgacggaactgcgggcgatggggaggaggcgctgcggcagcggagatggtgaggctcggacggcgcgtacccgagggaggtgggagccgccgccgcagtcagtcttcgtcaggaatagagctggatgttgtgcttga

SEQ ID NO: 106366 - DNA, 2779 bp, Zea Mays
atggctgcccggtgtcccggccacttcgcctgcctccctccctccctcactctcttccgtcttcccaatgaaaacctgcgaggaaaatgtgaagacgggaccccacgcgaccaacagcagacccacagggatgctgatcggaggcggtgtcttctacttgtaggcgcaaccgcaggccgcagccccaccgctcccccgtccatcttctccaactagtggcagcgcggtcgcaaccgctcacccaccgctccctcccccaaatttctccgcaatcttagcactacccgttagggagcaacgccgacacagcaaaggcacaagaggaggccaggcaacagctgcagaaacgcaggcgccgcaatgcagggctccaataccaaatctagctccgccgaggcgaagagcaacagcaaaccggacaaggagaagaaggggggcggaggcggcacgccgccaacccccaaggacagcaagccgcgcaagccggccgtgcccaaggcaagcgccgccggccatggcacgccgcgggcggctgacaagtcccccggctcggggtcggccgaccgcaaggcgcccacgcccaaggccgccgcctctcgcctcgccacgcctcccgagaaggggaagcccgcaaagcggccgcaggagcagcaggcgcagcttgccgagatccgtgaagagctcgtgaaggccaaagagcagttgctggagaacgagaaggagaagtgcagagttcttgctgagctggagcgtgccaagaaggtggctgatgaggccaatgccaagctgcaagatgctcttgatgtgcaaaggagggctattgaggcgcaggaggcagacaaactccctgccggagagtcgaagcaggcaagcatccacgaccagcaggaggatgatgacgctgtgctgcggtcgacagtggagcagcttgagaaggctaggtacgagctggccgatgcagtcgatgccaagaatgaagccctcagccaggtagatgatgccgttagggcttctgaggtgaaggcccaggaagttgagcatctcattgcagaggttacacgcctcaaagggctggttgattccaaggtggatggcaacaggaagaagactgcagagaggattcagaatcttgaagaagagaactttgcattaaagcttgagcttcagaaaaaaaaggctgctgaagaaaaggcggttcgattggagcgcatgattgatgaacttgagagtgatgttgatgatgctaggaattttggttccaagtcaaagcagttagctgatgaatggcagaagaaggcacagcttctcgaggtcagattggaagaggctgatcagtctaatattttgaagggtgaatctttgaattcagcaatggaagaattggattcaacaagtagtttgcttcgtgacagagaatctgaagttgctgctcttcgtgacaaagtaaggttctttgaggatgagcagacaaagctcaagaatgatattgttgtgtccggccaacgggcagatgcagcagagaaagaggcggcggatctatggacagaggttgaagggcttaggctgaagctccatacagtggaagaagagaaaatggaggccctgaacagtgataagagtactaccttagaaactgagaccttgaatgaacagaagaaccagctgactgacaagcttgaggcaaacaaagatgagcttgagaaaactaagaaggcaatggagggtctggcctcagccttacaggaaatgtcagctgaatccagagaggcgcaagagaagtaccttctcaaacaagatgagattgagcgtgctcaggcacaggtagaggagcttagcttgagtctgaagaatactaaggagaactatgagctattgcttgatgaggcaaactatgagaaggtttgccttacgaaaacagttgaaagactgaaagcagaagcaaagagtgcacatgaggaatggcattccaaagagctaagttttgtcaattctattaagaattcagaggaagagatagttgctatcagagttcagatgatcaggaccttggaggttgttaaagagaaagaacgtgaaaacactgagttgcaggagaagctgcagcagcttgagtctcagctaatggaagcaaacagaatcagggaggaagccagcgctgaaactatccgatggaaggagaacatattagaccaagagaatgaattacagaacataaaacaggagaacgacgacctgcaggcaaaggaattagcagcttctgagaaggttaaggaactctctttccagcttgctaatgtaaaagatagcctgataaatggtaacaccaaggaaggagataatgagaaggggggtactgaagaggatgatgaacctgttgtggtagttgccaaaatgtgggagaacggcaagtttgctgactgtgattcatctaaggagaaggataatgatggtgactcgcaggttgatttggaatcaaacaagggggatgcaggtcttgacagcaatgggttgcactcaactaatgagagcagtggcagagcatcaactaaacagccgcaacagcataagaagcctttgctgaagagattcggtggtttgctgaagaagaaaagcgaaaagtagcataaaaccatctgatgatattctttgttctatcttttgacatatttctacatatttctttgattagctatctagttcctgagtcttcccccgatattatggtaaactgagtgatggatgcttcaaagaatacaaaatgtcgcctgtatttacatca

SEQ ID NO: 106367 - DNA, 2493 bp, Zea Mays
ggcagcggcggtggatcctcgccgtctgacggtggttccgtttcttggttggagcgcagatctggctccgccgaggcgaagagcaacggcaaaccggacaaggagaagaagggcggcggaggcggcacgccgccaacccccaaggacagcaagccgcgcaagccggccgagcagcacgcgcagcttgccgcgatccgagaagagctcgtgaaggccaaggagcagttggtggagaacgagaaggagaagtgcaaagtttttgctgagctggagcgtgccaagaaggtggctgatgaggccaatgccaagctgcaggatgcgcttgatgtgcaaaggagggctattgaggcgcaggaggcagacaaactccctgccagagagtcggagcaggcaagcatccatggccagcaggaggctgatgacgctgtgctgcggtcgacagtggagcagctggagaaggccaggtatgagctggccgacgcaatcgatgccaagaatgaagccctcagccaggtagatgatgccgttagggcttccgaggtgaaggcccaggaagttgagcatctcactgtagaggttacgcgcctcaaagggctggttgattccaaggtggatggcaacaggaagaagactgcagagaggattcagaatcttgaagaagagaactttgcattaaagcttgagcttgagaaaaaaaaggctgctgaagaaaaggcagttcgattggagcgcatgattgatgaacttaagagtgatgttgatgatgctaggaattttggttccaagtcaaagcagttagctgacgaatggcagaagaaggcacagcttctcgaggtcagattggaagaggctgatcagtctaatattttgaagggtgaatctttgaattcagcaatggaagaattggattcaacaagtagtttgcttcgtgacagagaatctgaagttgctgctcttcgtgacaaagtcaggttcttggaggatgagctgacaaagctcaagagtgatattgttgtgtccggccaacgggcagatgcagcagagaaagagacgacggatctatggacagagattgaagggcttaggctgaagctccatacagtggaagaagagaaaatggaggccttgaacagtgataagaatactagctcagaaattgagaccttgaatgaacagaagaaccagctggctgacgagcttgaggctagcaaagatgagcttgagaaaattaagaaggcaatggagggtctggcctcagccttacaggaaatgtcagctgaatccagagaggcgcaagaaaagtaccttctgaaacaagatgagatggagcgtgctcaggcacaggtagaggagcttaacttgagtctgaagaatattaaggagaactatgagctactgcttgatgaggcaaactatgagaaggtttgccttacgaaagcagttgaaagactggaagcagaagctaagagagcgcatgaggaatggcagtccaaagagctaagttttgtcagctctattaagaattcagaagaagagatagtcgctgtcagggttcaaatggacaggaccttggaggttgttaaggagaaagaaaatgaaaacacagagttgcaggagaagctgcagcagcttgaatctcagctaatggaagcgaacagaatcagagaggaaggcaacactgaaactatccgatggaaggagaacatattagaccaagagaatgaattacagaacataaaacaggagaatgacgacctgcaggcaaaggaatcagcagcttctgagaagattaaggaactctcttcccagcttactaatgcaaaagatggcacgataaatagtaacaccaaggatggagataatgagaaggggggcactgaagaggatgatgaacctgttgtagtagttgccaaaatgtgggagaacagcaagtttgctgactatgattcagctaaggaggagaatgatggcgactcacaggttgatttggaatcaaacaagggggatgcaggtcttgacagcaatgggttgcactcaactaaggagaacagtggcagggcatcaccaactaaacagcaccagcagtataagaagaagcctttgctgaagagattcggtggtctgctaaaaaagaaaagcgaaaattagcataaaaccggctgatgatattctttgttctatcatttgacatttctttgattagatatctagttcccgagtcttcccccatattatggtaaactaagtgatggatgcttcaaagaatacaaaatgtcgactttatttacataattgcctctcttgagttagggagtgttcgcagttcagttcagctgtctggtgtgagctgtctgctgtggaaaaactgttgtgagctaaactaaaagaaagtcgtttggttggagcttcggtgaaacattagatttttttatgatttatctgtattgcttctgagattgtttatatgcaaatgaccgtaatagaacgattttt

SEQ ID NO: 106368 - DNA, 2850 bp, Zea Mays
gcctccctccctccctcctcgaataaaaacttgcgaggaaaatgtgaagaccccacgcgacccaacagcagacccacagggagtcagagatactgatcggaggcggtgtcttctacttctagccgcaaccgcaggccgcacgcagccccaccgctccgcccgtccatcctctccaactagtggcagcgcggtggcaaccgctcacccaccactcctcccccaaatttccccacaatcatagctctgcacgttagggagcgacgccgacgcaccaaaggaacgaggggaggccagggaacagcagatacgcaagcgccggaatgctgggctccaagacgaaatctggctccgccgaggcgaagagcaacggcaaaccggacaaggagaagaagggcggcggaggcggcacgccgccaacccccaaggacagcaagccgcgcaagccggccgtgcccaaggcgagcgccgccggccatggcacgccgcgcgctgctgacaagtcccccggctcggggtcggccgaccgcaaggcgccaacgcccaaggccgccgcctctcgcctcgctacgactccagagaaggggaagcccgcgaagccgccgcaggagcagcacgcgcagcttgccgcgatccgagaagagctcgtgaaggccaaggagcagttggtggagaacgagaaggagaagtgcaaagtttttgctgagctggagcgtgccaagaaggtggctgatgaggccaatgccaagctgcaggatgcgcttgatgtgcaaaggagggctattgaggcgcaggaggcagacaaactccctgccagagagtcggagcaggcaagcatccatggccagcaggaggctgatgacgctgtgctgcggtcgacagtggagcagctggagaaggccaggtatgagctggccgacgcaatcgatgccaagaatgaagccctcagccaggtagatgatgccgttagggcttccgaggtgaaggcccaggaagttgagcatctcactgtagaggttacgcgcctcaaagggctggttgattccaaggtggatggcaacaggaagaagactgcagagaggattcagaatcttgaagaagagaactttgcattaaagcttgagcttgagaaaaaaaaggctgctgaagaaaaggcagttcgattggagcgcatgattgatgaacttaagagtgatgttgatgatgctaggaattttggttccaagtcaaagcagttagctgacgaatggcagaagaaggcacagcttctcgaggtcagattggaagaggctgatcagtctaatattttgaagggtgaatctttgaattcagcaatggaagaattggattcaacaagtagtttgcttcgtgacagagaatctgaagttgctgctcttcgtgacaaagtcaggttcttggaggatgagctgacaaagctcaagagtgatattgttgtgtccggccaacgggcagatgcagcagagaaagagacgacggatctatggacagagattgaagggcttaggctgaagctccatacagtggaagaagagaaaatggaggccttgaacagtgataagaatactagctcagaaattgagaccttgaatgaacagaagaaccagctggctgacgagcttgaggctagcaaagatgagcttgagaaaattaagaaggcaatggagggtctggcctcagccttacaggaaatgtcagctgaatccagagaggcgcaagaaaagtaccttctgaaacaagatgagatggagcgtgctcaggcacaggtagaggagcttaacttgagtctgaagaatattaaggagaactatgagctactgcttgatgaggcaaactatgagaaggtttgccttacgaaagcagttgaaagactggaagcagaagctaagagagcgcatgaggaatggcagtccaaagagctaagttttgtcagctctattaagaattcagaagaagagatagtcgctgtcagggttcaaatggacaggaccttggaggttgttaaggagaaagaaaatgaaaacacagagttgcaggagaagctgcagcagcttgaatctcagctaatggaagcgaacagaatcagagaggaaggcaacactgaaactatccgatggaaggagaacatattagaccaagagaatgaattacagaacataaaacaggagaatgacgacctgcaggcaaaggaatcagcagcttctgagaagattaaggaactctcttcccagcttactaatgcaaaagatggcacgataaatagtaacaccaaggatggagataatgagaaggggggcactgaagaggatgatgaacctgttgtagtagttgccaaaatgtgggagaacagcaagtttgctgactatgattcagctaaggaggagaatgatggcgactcacaggttgatttggaatcaaacaagggggatgcaggtcttgacagcaatgggttgcactcaactaaggagaacagtggcagggcatcaccaactaaacagcaccagcagtataagaagaagcctttgctgaagagattcggtggtctgctaaaaaagaaaagcgaaaattagcataaaaccggctgatgatattctttgttctatcatttgacatttctttgattagatatctagttcccgagtcttcccccatattatggtaaactaagtgatggatgcttcaaagaatacaaaatgtcgactttatttacataattgcctctcttgagttagggagtgttcgcagttcagttcagctgtctggtgtgagctgtctgctgtggaaaaactgttgtgagctaaactaaaagaaagtcgtttggttggagcttcggtg

SEQ ID NO: 106369 - DNA, 534 bp, Zea Mays
gcgatggacgagtggcgctgccggaggcacccgccctcggccggcggcggcgtgtgcccgcactgcctccgcgaccggctcctgcgcctgtgcccggactgcgcctgcccgcggccctgcgcctgctcctgcgcgtcgtcgtcgccttcgtcctcgtcctcgggcgccagcgcgctgggccgggtccacagcctcatcgagcgggagcgccgggtcgagcggtcgcgctccgtcgccgcgcacggagccgtcggcgaccagcggcgccccaggtccggcgtgtgggcctgggtgtccttccggaagccgccgccgccgccaccgccggccgcgggctgcagggacgtggagcaggagtacgacgaggcggtggcattggcgaggtcgaggtcggtgacaacgacggcgccggcctcggagcgccggcctcgatgggggaggctcatcgcaggaaagatcaaggcgctgcggagccggaagccccgccccggcggcgattggcgggacagcgtgaggccgtgaaggcgatcgcgg

SEQ ID NO: 106370 - DNA, 120 bp, Zea Mays
ctacaaactcaaatcccctccgaatttagaggcccctccaattccgaatggcaattgtcggagacgatggtgcggaaggcaggtgagacttgcagttgcagatatagaaaagaaaaaaaa

SEQ ID NO: 106371 - DNA, 273 bp, Zea Mays
atggcttccctacgtgaaggagaaaagaacgggcatggagaaaaggactacgttgggtatgggaaacccgttgggtacccgaaacccgcatgggtttgggcaaaattttatacccgtcatgggtatgggttttttagcgggcgtattttttcttcgcgggtggaggaagggtgcggcctggcgacggccgaggagatcgccgcggcggcgcaccacgtcctctgcatcatcgacgctgaggcggcggcgcagaggcagccgggcctcatctag

SEQ ID NO: 106372 - DNA, 844 bp, Zea Mays
cgcttggccatcccgtgacttttcttcttgtcaaatcacgcctacgtgtaccaccccagcagaccagcagttcctttgatttcgttatataaaagaagaaattttaatcatgtgtagagcgatcaggcgtccgtcatcagcggcgccatcgatttcgtgaaggagctcgagcagcagctgcaatccctacacggcgcaacgaacaccaggccgtgaccccgcgtccgccggcagcagtggcgcgggcgtgacagcggacgccgcggcgcgcagcgagggggcggcgcctcatgaggcgcggccgcctgcgttcgcgcggttcttccggtacccgcagtacgcgtggcgccacgcggcggcgcgggaggatggcgtcgtggccgtggaggacgaggcgagcggcgactgcgcggtggcggacgtggaggtgggcctggtggtggacgcgcacgccagcctccgcgtgatggcgccgcggcggcccgggcagctgctgaggctggtggccggggtgcaggcgctcggcctcgcggtggtgcacctcaacgtggccaccgcgcccgacgcgatggcgctctacacgctcagcctcagggtaaaaaaagatttgtatgcttcccttctctacccactggccgtcccttactatggctcccacatccgtttcaagggcgacagcaagcccatggcttcctcggtcgtcgacgtccacctccggctagtttcgagggactgcgagctcgcggcttcctccgtcgtcagcgtctacattcggccattgtcactttttcagtgcaaattatgctcagaagtagatgatgaagccgctcctatgctccattga

SEQ ID NO: 106373 - DNA, 1839 bp, Zea Mays
tagagaacaatttttgaagactacttattaaaaaacagattaaaattcaagacaaggttacatcacagatcaaatttcaagaggcacatgagaggagaaaaagaaaataaagaagagattgagaacacgaaatcagagagaccgaccgagcaaacatgcactacggagttgtacagagatcgagatagaaatagatagatatgatatccttgcaagctagcatacgtgcgctaaccttttgcaagccgcccttaaccatcgtgccgtccattgctttcttcttgatatcttcgtgttctctcaaacctgaattacaccaccggctcatcatggacttgtcagaacggcggccgtgcaccggcccaaccatggccgtcagcaccgggcgggagcggcgacccgccaccggacatgttgttgagcggcaggttgaagaacggcagcccggcagccgccgacggatcgggagggaacggcccaccgcccatgcctccagcgccatcgacaccaccgccgggtggctgcatctggaggcccggtggcgctgcctgagcctcttcctcctccagggggaggcgctcgtaggcgacgttggcgaaggacgcggcgatgacgatgacggggcctgcggcgtagagcgcaccgacgacgttcccaccgaccacctgcccctggccccccgcgaggaagatggtgaggctggtggcgccggggggagccggcggcgggaggaaagatcccgagagcgacaggatctcgaacctcccgtgcagcgtcaccacggcgcccgcgggcgccgacggctgccgtagcgtcacgttggtgacgacgccgctgccgctcagcacgcagacgccacgctgccgccggcgcgcatacgtggagacactctcgaacacgtcgcagccgctcgccacctccaggatgtgggcgcgcagcgtattggcgctctcccgcgtgatgatcaccggcggcttcggcttattcttcgagcccggtgggcgtccgcggggccggcggactaccatctccccgttaccgccgctgccaccgggggcatctccagctgggccggatgaggacgacccgccgtcgtgctcaccatacggtccgccgttgttgctgttgccgccgccgccgccattagggtcgtcctcggatggctccggctgcttggcgtagttgtgctgcagctggaggtcggggtggaggtggtggagctgatgaacgtagcgcgtcgcagcggtgccgaggtcgaggccggccatgcttttctgctagctcatgtactgatgtagctagcaagcaaaaattttaaaaccagaaaaagcagcaaaaaaaaaactccaattgcaacggagtggtgttttgtttttaggttaaaagaaagtgttggaaaaggaagcaatgatttttaaacaaggggattgtttatggttctgcctgttttaaaagcttttggatgcagaaagaagcaaacatggaagaaattaaaaacccgaaggagagaaagcttgcatggagaagagaaggaacaccgatagggctgcagggagctatgagcagggtagggaaggagaagagaaaggaagaaactatagaggagaaggtgaggcacgggaggcagacaagatgggaagagaagagttcgagttcgatgccttcttcaacccagtaggaggaggtatggagaaggacgtaaggctacaaatactgacacgtgggccacgatatttccgggcccacgagtcagtttcgcaggcgtcctacatgatagtgacagggccagggaggcatcggagaaagagagataggtcgaccgggcgggaggaactatga

SEQ ID NO: 106374 - DNA, 1117 bp, Zea Mays
cattactattagtgcgcgcgctatctagctagtgtggagccgtggcaacgagcagaggtgcctagctcatcgatcaacaagtgagtagcaccatggcagacaagaagaaggtggaggtcaaagagacgaaggtggaggtgaagacggccgtctacaaggtgtacgtccactgcggccagtgcgcgcgcgacatccagacgcagttcaccgagttccaaggggttgaagaggtgaaagtggacgccggggcagggaaggtgacagtgaagggcttcggctttgatgtcgagaagctgaggaagaaagtcgagaagggttgccggaagaaggtcgagctgattccgcccgcgcctcccaaggacgacatggtcgttgatgtcaagaccaaaaaggaggagctcaaggtcataactgtaaagctgccgttgcattgccccgattgtgcagtcagggtcaaggaggttttacttgagaacaagagtatctacgaggccaagacagatctcggcaagaacacgtgcaccatcgagggtgtcattgaggaggacaagctcgtcaagtacatctacgagaggatgcgcaagaagggcgttgtcgacaaggtcgagaagaaggtgatcatcaaggaggaaaaggtcttagtgaagaaggcggataaggagaaggagaagaaggagaaggagaaggagaaagaaaaggagaaggccaaggagaaggtgaaggaggctgtcgacaaggtcaaggaggtcatcgccccctacttcatcccctgcacgcacccgaacttcgtcgactactcgcacccctggcaccgcggcggcggcggctactgctcgtcgtacggcgacggttacggctacggctacggcgggggctgcggagggtacccaccgtacggtttcagctacacacactctgagctcaaaggctaccatgacacgtcgttcttgcactgcacacaccccaatgagttcatcagcgaggagaacccctacgcgtgcgctgtgatgtagccttctttttttgcgcttggattcaagtcgaataatttgaacactaagaacaacaccaacgtacggatggctcaaattttctcttgcttcggctcagatttgtt

SEQ ID NO: 106375 - DNA, 1647 bp, Zea Mays
gcgtccctctcaatgctacattgttttctgtataagcccgaaactaagaatcctgctcgagtcttgattggctgccattttgcagctgcttggatttgccacaaatagaggtcgaatctaggtgatggccatggaggaaccgcctcagctgttcttgtgccccatatccatggagctgatggaggaccccgtcacggtgttaaccggcgtcacctacgatcgcagcagcatcgagcggtggttcttcaagtacggcaaggcgacgtgcccggccaccatgcagcggctgaattccttcgacctcacgcccaaccacactctgaagcgcgtcatctccacctggcttgaccacgcctcctccccctcctcatcgtcgtcgagcacgccgctgtgtaataagctggagcgggaaaagctaccgtcggtgttcgcgagcattgaggccacgccgttcaaggtcaccgcgctcaaaaacctcaggcgctgcatggacggagacgtggcagcgcagaaggacttcgtcgcctacggcggcattcaggtgctcggccgcgtcatgacacaggcgctggcggagagctgcgccggtggagacttctcatcgttccggacgtgcgaggaggccggcgccgtcctcgccacgctccctctctccgacgacgcgtcggtggagctcgtgctcaaacccgagtgcatgaagcccgtggtcgcggtgctgcagcgcggcagcgccgagtctaggctgcacgctatggccatcctcgctaagatctccagggccatcggcgccgaccgtgactggacccctggtgtagacgtcgacgacctggtcaagtccctcctcgagctcctgtccgacggtgcctcagcgaagctgagctaccgcgcgctcgacgtgctcctcgacgtcacggcgcgctcccgcggcgcgcggcgcgccaaggccgtcgaagtgggcgcggtctgcgtgctcgtggagctccttcccgacgccgagcgccgcatcgccgagcgcgcgctcctcctactcaagcgcctgtgcaagtgccccgaaggccggctcgccttcgtggagcacgcgctggcggtgtcggccgtggcgcagacgctgctgcgcgtgtcgcgcctcgccagcgggctggccgtgagcgtgctgtggctggtggcgtgcgcggtgacgcctgcggagagggtgctggatgacatgctgatgagcggcggtgtggcgaagctgctggcactcctgcaggtggagaactccgcgtcgaccaaggagaaggcggcgaagcttctcagtgtgcacggcgcattctggaggcagtacccgtgcttccccactgacctcagggactacctgaaattcctcaactgatctcttcatgccactgcacatgcgcggagaaattctgagggttttgagcacgattatgcgcattatttgtacagttaaaatgctaaatttttggggtttgatccatccatgatttgtagttttgtgtgcagtgcagttgtatgtatgacattgacataatttcatgaggccaaaaggaattgaacttcgagcgtgcatttcctttaatttgcgttacatggagattcattcgcttgtaattttcggtcaggataccatttttaaaaaatctctta

SEQ ID NO: 106376 - DNA, 727 bp, Zea Mays
ggtgataatccacacgtattagatgatattgagccggcttaaatccataacaagtcaaaatccatcccaatcccacccaatacactctaatacacatgtaatatcaataatcgaacaaggcctaagtttttgtttgggtactctagtattgatcataatccacgtgtcttgaggtgtaaattagtttaagttacaccccaatccaccccaatacatgtggattaaactcaattctaaagtacctaaactaggcctaaccgaataagtctagggcatagtttgaggtggattgagggagattggaggcgattaaatctcctcatattcaaatttcaaatttatataggacgggatttaatcttcttcaatccttccctaaccaaacaagcccaattggcaacagaatttgttggaacatttgtgatttgactggtcaagcctaaactgtcatgatcagttccctcctgcaggttgcaatatgccaaggcgatgtttgaaaggaatcatgtaggtccaggtagctgtgccactttgtgaaaaccagttgataatttgataaactgtcatgagtcatcagatcagaattcttctactgtctgacactctgactcacgccttcttgaaaattttgcccacgtatattcttttagttggacgcaaattcaagcaacggtcgaatgctatgtgccgagtcccgatgtatgctctgaaacattccggaaacgtg

SEQ ID NO: 106377 - DNA, 1902 bp, Zea Mays
ctgtctccctcgtccgtctcccctgccgcccagcccaccgccgcccctccctcgagttcccccgaacgccgcccctcaggttcccgggacgccgcccctcagttttcctggacgccgaccctccctcgaggttctccgtgtagatccgccacctctcccttgcacgaactcgcgcccctccgtcgaggtcccctggacgccgcgcccacccctagcgcctatcttgccaaacaccatcaaaactccagaggagttgccccaccagggagttttggagcagagcagctctaggtggagcagagctatgccaaacacgcttgtcccaaacaggacctgagacgaaccctttggcctcggctctcgtcttgtgagtgtgtaatctcggatcgggaaactcgactgcggggtcggagaagatggcggcggcgggagaagttgccggcgcttcgtcggggacgaggacgaagcggcttaagattgccgtcatccacccggatctcggaatcggtggtgctgagagattgattgtcgatgcggcttgtcagcttgctgcccacgatcatgatgttcatgtcttcacatcacatcatgataaaaaacgttgctttgaggagactctttctggtttgtttccggttactgtacatggggatttcctgcctcgccatgtgttctaccgctttcatgctgtttgtgcttatcttcgctgcatttttgttgcgctctgtgtgctactcagatggcccttctttgatgtcatattggtagaccaggtttctgttgtgattccactacttaaactaatggcatcatcgaagataatattttactgtcatttccctgatctgttacttgcacaacatactactatgcttcggaggttatatcgcaagccaattgacatgattgaggaaagcactactggtatggctgatttgattcttgtcaatagcaagttcactgcagcaacttttgcaaggaccttttctggtttacatgctagaggaatcgagcctggtgttctttatccagctgtctctgttgagcagtttcacgaaccccatgcttataagttgaatttcctatcaatcaaccggtttgagaggaaaaagaatcttgatcttgccatttcagcatttgctttgctccgttctgctgcttggactctacctggtgatgctctacaagaagcaacattaacagtggcaggtggctatgataagcgtctcaaggaaaatgttgaataccttgaggaactcaaaagactcgcattgacggaaggggtttctggacaggttaattttgttacatcttgctcaacatctgaaagaaacgagcttctctccaactgcctctgcgttttatacactccaaaggatgaacatttcggtattgtacctcttgaagccatggccgcccataagccggtaattgcctgcaatagtggtggcccagtggaaacagttgtgaatgaagtaacagggtttctgtgtgatccctctcccgcagaattctccaaagccatgctgaaacttgtgaatgatcatgatcttgctgtcagattgggtgaacaagcacgtgaccatgtggtgcaaaaattctcgaccaagacatttggtgatctcctcaacagctacgtcttgaacatctaccatgagaggatggaatgatctataatattgggtcagccatgccatatgaaaacaatttgttcaatacaaggttttttttgcacctttacgtctaatctgattttgatggacacacataatgacaatgacattccattgaatccctttggcatactgtagtcactctatgatctgtatattgttttcaattataacatcaaatttggcttggtccatcctagaatctgaatggagctggagtagagatggc

SEQ ID NO: 106378 - DNA, 2076 bp, Zea Mays
ctgtctccctcgtccgtctcccctgccgcccagcccaccgccgcccctccctcgagttcccccgaacgccgcccctcaggttcccgggacgccgcccctcagttttcctggacgccgaccctccctcgaggttctccgtgtagatccgccacctctcccttgcacgaactcgcgcccctccgtcgaggtcccctggacgccgcgcccacccctagcgcctatcttgccaaacaccatcaaaactccagaggagttgccccaccagggagttttggagcagagcagctctaggtggagcagagctatgccaaacacgcttgtcccaaacaggacctgagacgaaccctttggcctcggctctcgtcttgtgagtgtgtaatctcggatcgggaaactcgactgcggggtcggagaagatggcggcggcgggagaagttgccggcgcttcgtcggggacgaggacgaagcggcttaagattgccgtcatccacccggatctcggaatcggtggtgctgagagattgattgtcgatgcggcttgtcagcttgctgcccacgatcatgatgttcatgtcttcacatcacatcatgataaaaaacgttgctttgaggagactctttctggtttgtttccggttactgtacatggggatttcctgcctcgccatgtgttctaccgctttcatgctgtttgtgcttatcttcgctgcatttttgttgcgctctgtgtgctactcagatggcccttctttgatgtcatattggtagaccaggtttctgttgtgattccactacttaaactaatggcatcatcgaaggtatcagtgtttgtttgcatgaagtgcttattgttctccaattgcagctccttgataacaatttatattttgtatctccagataatattttactgtcatttccctgatctgttacttgcacaacatactactatgcttcggaggttatatcgcaagccaattgacatgattgaggaaagcactactggtatggctgatttgattcttgtcaatagcaagttcactgcagcaacttttgcaaggaccttttctggtttacatgctagaggaatcgagcctggtgttctttatccagctgtctctgttgagcagtttcacgaaccccatgcttataagtaacttcatgcttgcatatctccttacatttaggtctaacttattcagtttatagactaaacagatctttttaccattatcatattaatatttagctaaagtagacaacaatcttttgtacaggttgaatttcctatcaatcaaccggtttgagaggaaaaagaatcttgatcttgccatttcagcatttgctttgctccgttctgctgcttggactctacctggtgatgctctacaagaagcaacattaacagtggcaggtggctatgataagcgtctcaaggaaaatgttgaataccttgaggaactcaaaagactcgcattgacggaaggggtttctggacaggttaattttgttacatcttgctcaacatctgaaagaaacgagcttctctccaactgcctctgcgttttatacactccaaaggatgaacatttcggtattgtacctcttgaagccatggccgcccataagccggtaattgcctgcaatagtggtggcccagtggaaacagttgtgaatgaagtaacagggtttctgtgtgatccctctcccgcagaattctccaaagccatgctgaaacttgtgaatgatcatgatcttgctgtcagattgggtgaacaagcacgtgaccatgtggtgcaaaaattctcgaccaagacatttggtgatctcctcaacagctacgtcttgaacatctaccatgagaggatggaatgatctataatattgggtcagccatgccatatgaaaacaatttgttcaatacaaggttttttttgcacctttacgtctaatctgattttgatggacacacataatgacaatgacattccattgaatccctttggcatactgtagtcactctatgatctgtatattgttttcaattataacatcaaatttggcttggtccatcct

SEQ ID NO: 106379 - DNA, 755 bp, Zea Mays
gtgtctgatgtggagccatgccatccggatagggatagcctcgcccatagcagctgcctgaaagttctctctgtttcctttgtcttctccagttgcccggcttcgtctccggtaacgcactcagtcgatggcctcacccacagccgcagcagcaccggcagagttcacgcagatggaagccgcgcgccagtccctcatcgcgatctcccagtcggtcccggaggtcggggcgcccgtcgtcagcccgcccagcggcggccgaggcatggatgagaatgggcacgaggacgtcgcggagcggaggtacagggcgaagcttatctccatctccaaccagtcgcccgacgcgcggcctacgacgtgccctcgcaacaacggcgccgcctaaagagccgcgtttgtgtattgtaacgtcgccgcatgtacgtgtacgtgtactggacacctaggtgtgtccgtgtgtgttctgcagttctgctaataatactcgtagcccaagaacaagaaccaggatatgggccttaataatcaccttgaactgccaaagggaacgcctgtgtggctgtgtgcaagcgtgctaaaggccacttagaaaagtctcattagcatctgagttgagttccagttccactcttatgttttcaacagtagacaatgttcctgttcgtgagttgtctgtgtgattttcttctaaatttttttatggactaaaaaaaggctacggtgattttagagagaatatttaatgctagact

SEQ ID NO: 106380 - DNA, 5150 bp, Zea Mays
atttcaaagaaatcattttcatctgcagaactactgatcgtgcacaaatccgcaatatattcagctggaagctagctagtatacgcacagaaataagaaaaaataacctgcaggagaataggacatactgctgccaatcataaataaaaaatgtagcagctgctatagcggtgttgtttttttccacaggtggtgccgccgtgccgggctcgttctgtgaaaactgaaagctgcatattcgggatctgcggccaccgtaccgcaccatgccacgccaaaagcgcaacaaacagggggtcatgcacctccagtctccacctccctcctattatatcatcgtcacttgtacaccgcccctcacagtctcacttccctccactccaattccctctctctggcgacacgatggagagggggggcctgcactactggcctgctctcgcggggattcttcccaacaagcaggtgcaacagctgttcatccaggggggcttcctcgatgacccgtcaggttctactatattgcatcatatgcaagaatggcaagacctatattcaccttgcttctggatggtcacttttgcactgatacaattgatgttcatcatgagtatattggctcaatttctgttcaagaaattcagatggtggagacagagactgaagggttcagctcctgaaagcaataaacaacatcaggaacacaagattacagatataaagctggacatctcatacaaagcatgcaaagcttgttgcctgcttatactaggaagtcatgttctgagggcagtatttctacagttacatgaaagaataagtgattgcaagtatccaccctttattatttgtgaaggtttgcaggtgctatcgtggataatattgtcactagcagtattcagttttcagaaagcaaaatctacaaaaattccaaaggtaattcggacatggtggatatttagctttctacaatcagttgccatcgttgtatttgatctcaggtcaattttggcaacccatgaagatataggatttgaagaatggatcgatatgtgcatgcttgttgtttgcacttatctgtttgcaatttcagtcagggggaaaacaggaatcagattcacagacagcagcgtaacagaggcactattgaatccatctgtgggacagcaggcagaagtcaaacggccatgcccatatggaagagcaaatattcttgaacttgtcaccttctcctggatgaaccccgtcttttctatcggatacaagaaacctctagagaagaatgaggtgccagatgttgatggcaaagacgctgctgagtttctttctgattcatttaaaaagatcataggtgatgttgaacacaggcatggtttaagtactttatcgatctatagagcaatgtttctatttataggacggaaagcaattatcaatgcaggatttgcaattttaagtgccagcgcatcctatgtcggaccctcactgattaatgatttggtgaaattccttggaggagagaggcaatatggactcaaaagaggttatattctcgctgttgtttttctaagtgccaaagttgtggagaccatagcacagaggcagtggatttttggagctcgacagcttgggatgcggctgcgagctgctttgatatcccacatctatcaaaagggccttcgcttatcctgcagttcaaggcagaagcatactagtggagagatcataaactacatgagtgtggatatacaaaggataactgatgttatatggtatacaaactatatctggatgctacccattcaactttctctagctgtttatgtgctccatacaaacttaggggtcggggcctgggctggtttagcagcgacattagcaataatggcttgcaatattccactaaccagaatgcaaaagaggttgcaagccaaaatcatggttgccaaagacaacagaatgaaggcaacaacggaagttcttagaagcatgaaaatactgaaacttcaagcgtgggatatgaagtaccttcagaagctagaaagtttacgaggcgaggagtacaactggctatggagatcggtgaggttgtcggctctaacaacgttcatattttgggggtcacctgcattcatttcctccataacatttggctcatgtatacttatggggattcctctgacagctggaactgttttgtcagctcttgcgacattccgcatgctacaagatccaattttcacacttcctgacttactttcagtgtttgctcagggaaaagtttcagctgacagagtggcaaaataccttgaggaagaagaattgaaatgtgatgcggttacacaagtaccaagaaatgacacagactatgatgtggagattgatcatggaatattcagctgggaacttgagacgacttctccaactctaacagatgtagagttaaaggtaaagagagggatgaaagtggctatctgtggaatcgttggttctggcaaatccagtctattatcatgcatactcggggagatgccaaagctagatgggactgtcagggtcagtggccgcaaagcatatgttcctcaaactgcctggatcctgtctgggaacataagggaaaacattctgtttggaaacacacatgacaaggaaaaatatgaaaacatcatacaagcatgtgcattgacaaaagattttgagttgtttgcaaatggtgatttgactgagattggtgaaagaggaattaacatgagtggtggacagaaacagcgaattcagattgcaaggtcagtgtatgaagatgcagatatttacctctttgatgatcctttcagtgcagtagatgcccatactggaagccagcttttcaaggattgtgtaatgggaattcttaaagataaaacagtgttgtatgtgacccaccaagtcgaattccttcctgccgcagaccttatattggtgatgcaagatggtaaaatcgtgcagaaagggaaattcgatgaacttcttcaacaaaacatagggtttgaaggcataacaaaacaagagtctgcacatgatgtctcacaagacatcagtgacaagggaaggttaacacaagaagaagaacgggaaaaaggaggcattggcaagaaggtttactggacttacctgagggcagttcatggtggagccttagtgccagtaacaatagctgcacaatcattctttcaaatcttccaggtagccagcaactattggatggcatgggcatcacctcctacaactgcaaccactccaaccgttggattaggcctcctcttctctgtatacatagcactatctatgggaagtgccctgtgtgtcttatttcggtccttgcttgtgtcactgattggtctactaacatcagaaaggttcttcaagaacatgctccactgcatcctgcgtgccccaatgtccttctttgattccacacctactggtagaattttgaacagggcctctaatgaccaaagtgttctagatctagaaatagcaaacaagctaggctggtgtgtgttttcaatcatacaaattctggggaccattggtgttatgtcacaagttgcatggccagtttttgctatctttgttccggtgacggtgatctgtttcctctgtcaacgctactacataccaacagcgagagagttggctcgtttatcacaaattcaaagggctccaatcctacaccattttgcagaatcgctggcaggagcatcaagtattagagcatatgcacagaaagatcgtttcagaaaagcaaaccttggtcttgttgacaaccactccaggccatggttccataacgtttccgcaatggagtggctttctttcaggctaaacatgctatccaactttgtctttgccttttctttgactctgctagtgagcctccctgaaggttttataaatccaagtattgctggacttgcagtgacttatgcattgaacctcaactcacagctggcatccataatttggaacatttgcaacacagaaaacaaaatgatatcagttgaaagaataatgcagtactcgaggatccctagtgaggctcctctcatagttgatcactaccgccctccaaacagctggccagatgctggaactatcaatataagatcattggaggttcgatatgcagagcatctcccatcagttttgagaaacatatcatgcacaattccaggaaggaagaaggtggggattgtaggacgtactggtagcggaaagtcaacttttatccaagcacttttcaggatcattgaaccaaggggaggaacgatccaaatcgacaatgttgacatcttgaaaatagggctgcatgatttaagaggaagactaagcatcattccacaggatccaacgatgtttgagggaacagttagagggaatctggatcccctgaatgagtaccctgatcatcgtgtgtgggagattttggacaaatgccagcttggtgatatagttcggcaaaacccaaagaaattggactccatagttgtagagaatggggaaaattggagtgttgggcagagacaactattttgcctcggaagggttctcctaaagcgaagcaatgttcttgttcttgatgaggcaactgcttcagttgactcctccactgatgcagttatccaaggaacgatacgcgaggaattcaggaaatgtacggtattgacaatagctcacagaatccacaccgtaattgacagtgatctcattcttgttttcagtgaaggaagaattatagaatatgacacaccctcaaaattactggagaacgagagctctgaattctccagactcataaaggagtactcacggcgatcccatggcttcagtggaacagcaaacaattgaatggcgacaagagaatgaatccaagatggtgaaagtagatacgaaagttgattaccccacaatattatatctatatatgacaagcaggaaccaaaacaacacggggcagggtttacaagggagggcgcttccgtaattaagatgattcagcaaattggagtaatgcaatgtactatatagtttatagcagattcgggacatgactgaaatggggaaaagataacttggtagctattccgtataaattgtgcactgaggtggat

SEQ ID NO: 106381 - DNA, 5037 bp, Zea Mays
atttcaaagaaatcattttcatctgcagaactactgatcgtgcacaaatccgcaatatattcagctggaagctagctagtatacgcacagaaataagaaaaaataacctgcaggagaataggacatactgctgccaatcataaataaaaaatgtagcagctgctatagcggtgttgtttttttccacaggtggtgccgccgtgccgggctcgttctgtgaaaactgaaagctgcatattcgggatctgcggccaccgtaccgcaccatgccacgccaaaagcgcaacaaacagggggtcatgcacctccagtctccacctccctcctattatatcatcgtcacttgtacaccgcccctcacagtctcacttccctccactccaattccctctctctggcgacacgatggagagggggggcctgcactactggcctgctctcgcggggattcttcccaacaagcaggtgcaacagctgttcatccaggggggcttcctcgatgacccgtcaggttctactatattgcatcatatgcaagaatggcaagacctatattcaccttgcttctggatggtcacttttgcactgatacaattgatgttcatcatgagtatattggctcaatttctgttcaagaaattcagatggtggagacagagactgaagggttcagctcctgaaagcaataaacaacatcaggaacacaagattacagatataaagctggacatctcatacaaagcatgcaaagcttgttgcctgcttatactaggaagtcatgttctgagggcagtatttctacagttacatgaaagaataagtgattgcaagtatccaccctttattatttgtgaaggtttgcaggtgctatcgtggataatattgtcactagcagtattcagttttcagaaagcaaaatctacaaaaattccaaaggtaattcggacatggtggatatttagctttctacaatcagttgccatcgttgtatttgatctcaggtcaattttggcaacccatgaagatataggatttgaagaatggatcgatatgtgcatgcttgttgtttgcacttatctgtttgcaatttcagtcagggggaaaacaggaatcagattcacagacagcagcgtaacagaggcactattgaatccatctgtgggacagcaggcagaagtcaaacggccatgcccatatggaagagcaaatattcttgaacttgtcaccttctcctggatgaaccccgtcttttctatcggatacaagaaacctctagagaagaatgaggtgccagatgttgatggcaaagacgctgctgagtttctttctgattcatttaaaaagatcataggtgatgttgaacacaggcatggtttaagtactttatcgatctatagagcaatgtttctatttataggacggaaagcaattatcaatgcaggatttgcaattttaagtgccagcgcatcctatgtcggaccctcactgattaatgatttggtgaaattccttggaggagagaggcaatatggactcaaaagaggttatattctcgctgttgtttttctaagtgccaaagttgtggagaccatagcacagaggcagtggatttttggagctcgacagcttgggatgcggctgcgagctgctttgatatcccacatctatcaaaagggccttcgcttatcctgcagttcaaggcagaagcatactagtggagagatcataaactacatgagtgtggatatacaaaggataactgatgttatatggtatacaaactatatctggatgctacccattcaactttctctagctgtttatgtgctccatacaaacttaggggtcggggcctgggctggtttagcagcgacattagcaataatggcttgcaatattccactaaccagaatgcaaaagaggttgcaagccaaaatcatggttgccaaagacaacagaatgaaggcaacaacggaagttcttagaagcatgaaaatactgaaacttcaagcgtgggatatgaagtaccttcagaagctagaaagtttacgaggcgaggagtacaactggctatggagatcggtgaggttgtcggctctaacaacgttcatattttgggggtcacctgcattcatttcctccataacatttggctcatgtatacttatggggattcctctgacagctggaactgttttgtcagctcttgcgacattccgcatgctacaagatccaattttcacacttcctgacttactttcagtgtttgctcagggaaaagtttcagctgacagagtggcaaaataccttgaggaagaagaattgaaatgtgatgcggttacacaagtaccaagaaatgacacagactatgatgtggagattgatcatggaatattcagctgggaacttgagacgacttctccaactctaacagatgtagagttaaaggtaaagagagggatgaaagtggctatctgtggaatcgttggttctggcaaatccagtctattatcatgcatactcggggagatgccaaagctagatgggactgtcagggtcagtggccgcaaagcatatgttcctcaaactgcctggatcctgtctgggaacataagggaaaacattctgtttggaaacacacatgacaaggaaaaatatgaaaacatcatacaagcatgtgcattgacaaaagattttgagttgtttgcaaatggtgatttgactgagattggtgaaagaggaattaacatgagtggtggacagaaacagcgaattcagattgcaaggtcagtgtatgaagatgcagatatttacctctttgatgatcctttcagtgcagtagatgcccatactggaagccagcttttcaaggattgtgtaatgggaattcttaaagataaaacagtgttgtatgtgacccaccaagtcgaattccttcctgccgcagaccttatattggtgatgcaagatggtaaaatcgtgcagaaagggaaattcgatgaacttcttcaacaaaacatagggtttgaagctatagtaggtgcacatagccaggctcttgaatctgttataaatgctgagagttccagcagaatacagtcaggcaaccaaaaatcagcagatagtgaggatgagttcgatacagaaaatgaaacggatgatcaacttcagggcataacaaaacaagagtctgcacatgatgtctcacaagacatcagtgacaagggaaggttaacacaagaagaagaacgggaaaaaggaggcattggcaagaaggtttactggacttacctgagggcagttcatggtggagccttagtgccagtaacaatagctgcacaatcattctttcaaatcttccaggtagccagcaactattggatggcatgggcatcacctcctacaactgcaaccactccaaccgttggattaggcctcctcttctctgtatacatagcactatctatgggaagtgccctgtgtgtcttatttcggtccttgcttgtgtcactgattggtctactaacatcagaaaggttcttcaagaacatgctccactgcatcctgcgtgccccaatgtccttctttgattccacacctactggtagaattttgaacagggcctctaatgaccaaagtgttctagatctagaaatagcaaacaagctaggctggtgtgtgttttcaatcatacaaattctggggaccattggtgttatgtcacaagttgcatggccagtttttgctatctttgttccggtgacggtgatctgtttcctctgtcaacgctactacataccaacagcgagagagttggctcgtttatcacaaattcaaagggctccaatcctacaccattttgcagaatcgctggcaggagcatcaagtattagagcatatgcacagaaagatcgtttcagaaaagcaaaccttggtcttgttgacaaccactccaggccatggttccataacgtttccgcaatggagtggctttctttcaggctaaacatgctatccaactttgtctttgccttttctttgactctgctagtgagcctccctgaaggttttataaatccaagtattgctggacttgcagtgacttatgcattgaacctcaactcacagctggcatccataatttggaacatttgcaacacagaaaacaaaatgatatcagttgaaagaataatgcagtactcgaggatccctagtgaggctcctctcatagttgatcactaccgccctccaaacagctggccagatgctggaactatcaatataagatcattggaggttcgatatgcagagcatctcccatcagttttgagaaacatatcatgcacaattccaggaaggaagaaggtggggattgtaggacgtactggtagcggaaagtcaacttttatccaagcacttttcaggatcattgaaccaaggggaggaacgatccaaatcgacaatgttgacatcttgaaaatagggctgcatgatttaagaggaagactaagcatcattccacaggatccaacgatgtttgagggaacagttagagggaatctggatcccctgaatgagtaccctgatcatcgtgtgtgggagattttggacaaatgccagcttggtgatatagttcggcaaaacccaaagaaattggactccatagttgtagagaatggggaaaattggagtgttgggcagagacaactattttgcctcggaagggttctcctaaagcgaagcaatgttcttgttcttgatgaggcaactgcttcagttgactcctccactgatgcagttatccaaggaacgatacgcgaggaattcaggaaatgtacggtattgacaatagctcacagaatccacaccgtaattgacagtgatctcattcttgttttcagtgaaggaagaattatagaatatgacacaccctcaaaattactggagaacgagagctctgaattctccagactcataaaggagtactcacggcgatcccatggcttcagtggaacagcaaacaattgaatggcgaca

SEQ ID NO: 106382 - DNA, 1679 bp, Zea Mays
atttataaacactgccaattagtccgcgccggacctccaacccgcccccacggcccacgccatcctccgcaccccccacgccggacaaccggggctcgccgcgccgctacgctcccaagccggaactccgaactcgccgcgccgttctcactgtggcaccagagctgctcgatctgccccgccctcgcccctcgcccctcgcccccttgccggaggggcgcgaactcgcaaaaattattgggtgtgcatttatacacccatgttctttgctgaccctgtctggtagcagattaaggtttggttgcggaaaatattggtgggttgtccaccatgacgagtccgccaagggtgagcatggagatcaccgacgacatgctcaagagcatggaggtcggcctagctttccgggactatctagcgacgatgaatcaatccgcctatacgacactcaaaatgcagtatgtttgaagactattaatagcaaaaaatatggggtcgaactagtgtgcttcactgataacccaaatattgtcttatattcatcaaaaaatggctgggatgaatctctgcgtctactctcactgaatgataatcggtttcttagatattttaaaggtcaccttgacagggttgtctgcatctcattttgctctgagaaagaaaattttctctctggttcacttgaccgtactgttctcttatgggatcaacgggctgaaaaatcacagggcttactgcgtgtgcaagggaggcctgcagtttcatatgacgatcagggcatggtatttgcagttgcctatggtggtcacataaggatgtttgatgctcgaaaatttgaaaaggggccttttgagatcttctctgttggtaataacgattcagaggcccatgtcataaagttcagcagtgatggcaggcggattctgttaaccactaaagctggacgtgtccatgtgctagattcattccatggcaatagcattgcgtcgtgcaatgtgaagccagtggtaaccaactcaacactggaggcgtcgttcagccctgatggaaaccatatcatatctggctccggtgacggtagtgtttatgcttggaatgttaggagtggaaaggtcgcgcgctggggaagcacagacgacgaaccgccgctggtaaggtgggctccaggatccttgatgttcgtgacaggatcatcagaactgtcatgctgggttccggacctgtctaagctgggatcctttaccattagcaagtaggtgaaaatgatgagaggtggactgcccttgcaaaccctgttcgtccctgtatggtatgtcgtgtggctggttgaagcgactcatcctttagccaggtggccgtggtaaacttgcaacctgttacaattgaatgacttgtatagagcatcggctgtggcgatctggcttctgaagccagcggctagacaatgaagatggatccatgctttagttctgtaaaccggagattgtagctgagtattgctgtatctctttgtttctggaaggcgtcttggctcgtaaagattctgcaactcagagcagatggctaatatatagagagagcaaagaaacaatggatagctgggctggttgttctgttttcagttggattccttgtactgacgtgtgattccgttgtgcatgcaccgattcatatttcag

SEQ ID NO: 106383 - DNA, 1728 bp, Zea Mays
atttataaacactgccaattagtccgcgccggacctccaacccgcccccacggcccacgccatcctccgcaccccccacgccggacaaccggggctcgccgcgccgctacgctcccaagccggaactccgaactcgccgcgccgttctcactgtggcaccagagctgctcgatctgccccgccctcgcccctcgcccctcgcccccttgccggaggggcgcgaactcgcaaaaattattgggtgtgcatttatacacccatgttctttgctgaccctgtctggtagcagattaaggtttggttgcggaaaatattggtgggttgtccaccatgacgagtccgccaagggtgagcatggagatcaccgacgacatgctcaagagcatggaggtcggcctagctttccgggactataatggtagaattagttctatggattttcacagcaaggctaccaactatcttgtgacagctagcgacgatgaatcaatccgcctatacgacactcaaaatgcagtatgtttgaagactattaatagcaaaaaatatggggtcgaactagtgtgcttcactgataacccaaatattgtcttatattcatcaaaaaatggctgggatgaatctctgcgtctactctcactgaatgataatcggtttcttagatattttaaaggtcaccttgacagggttgtctgcatctcattttgctctgagaaagaaaattttctctctggttcacttgaccgtactgttctcttatgggatcaacgggctgaaaaatcacagggcttactgcgtgtgcaagggaggcctgcagtttcatatgacgatcagggcatggtatttgcagttgcctatggtggtcacataaggatgtttgatgctcgaaaatttgaaaaggggccttttgagatcttctctgttggtaataacgattcagaggcccatgtcataaagttcagcagtgatggcaggcggattctgttaaccactaaagctggacgtgtccatgtgctagattcattccatggcaatagcattgcgtcgtgcaatgtgaagccagtggtaaccaactcaacactggaggcgtcgttcagccctgatggaaaccatatcatatctggctccggtgacggtagtgtttatgcttggaatgttaggagtggaaaggtcgcgcgctggggaagcacagacgacgaaccgccgctggtaaggtgggctccaggatccttgatgttcgtgacaggatcatcagaactgtcatgctgggttccggacctgtctaagctgggatcctttaccattagcaagtaggtgaaaatgatgagaggtggactgcccttgcaaaccctgttcgtccctgtatggtatgtcgtgtggctggttgaagcgactcatcctttagccaggtggccgtggtaaacttgcaacctgttacaattgaatgacttgtatagagcatcggctgtggcgatctggcttctgaagccagcggctagacaatgaagatggatccatgctttagttctgtaaaccggagattgtagctgagtattgctgtatctctttgtttctggaaggcgtcttggctcgtaaagattctgcaactcagagcagatggctaatatatagagagagcaaagaaacaatggatagctgggctggttgttctgttttcagttggattccttgtactgacgtgtgattccgttgtgcatgcaccgattc

SEQ ID NO: 106384 - DNA, 1620 bp, Zea Mays
atttataaacactgccaattagtccgcgccggacctccaacccgcccccacggcccacgccatcctccgcaccccccacgccggacaaccggggctcgccgcgccgctacgctcccaagccggaactccgaactcgccgcgccgttctcactgtggcaccagagctgctcgatctgccccgccctcgcccctcgcccctcgcccccttgccggaggggcgcgaactcgcaaaaattattgggtgtgcatttatacacccatgttctttgctgaccctgtctggtagcagattaaggtttggttgcggaaaatattggtgggttgtccaccatgacgagtccgccaagggtgagcatggagatcaccgacgacatgctcaagagcatggaggtcggcctagctttccgggactataatggtagaattagttctatggattttcacagcaaggctaccaactatcttgtgacagctagcgacgatgaatcaatccgcctatacgacactcaaaatgcagtatgtttgaagactattaatagcaaaaaatatggggtcgaactagtgtgcttcactgataacccaaatattgtcttatattcatcaaaaaatggctgggatgaatctctgcgtctactctcactgaatgataatcggtttcttagatattttaaaggtcaccttgacagggttgtctgcatctcattttgctctgagaaagaaaattttctctctggttcacttgaccgtactgttctcttatgggatcaacgggctgaaaaatcacagggcttactgcgtgtgcaagggaggcctgcagtttcatatgacgatcagggcatggtatttgcagttgcctatggtggtcacataaggatgtttgatgctcgaaaatttgaaaaggggccttttgagatcttctctgttggtaataacgattcagaggcccatgtcataaagttcagcagtgatggcaggcggattctgttaaccactaaagctggacgtgtccatgtgctagattcattccatggcaatagcattgcgtcgtgcaatgtgaagccagtggtaaccaactcaacactggaggcgtcgttcagccctgatggaaaccatatcatatctggctccggtgacggtagtgtttatgcttggaatgttaggagtggaaaggtgcagaaagatatatcatgtcgatattgaaatcacttcgtatgttatatctatttgacttgtatatggtaaaacactttgacatgcaggtcgcgcgctggggaagcacagacgacgaaccgccgctggtaaggtgggctccaggatccttgatgttcgtgacaggatcatcagaactgtcatgctgggttccggacctgtctaagctgggatcctttaccattagcaagtaggtgaaaatgatgagaggtggactgcccttgcaaaccctgttcgtccctgtatggtatgtcgtgtggctggttgaagcgactcatcctttagccaggtggccgtggtaaacttgcaacctgttacaattgaatgacttgtatagagcatcggctgtggcgatctggcttctgaagccagcggctagacaatgaagatggatccatgctttagttctgt

SEQ ID NO: 106385 - DNA, 4191 bp, Zea Mays
ccaggccattccgcaccgccaaaattgctccgcgcgggaattccaatttcctccccacctccgcccgcttcccagttcccagtgcacagccgattcgtctccattcctatcttctcccattccctccccagtccgacctccgaccccccatttcgtcgccgccgccgtactcgccgagaacccgccccaaatccataggcccatcccttacccattaacccccaatgcctccgaagaagcgcgccgccgccgccgcctcttcaaagaagccgcagccatcgcagccatcgcagcccgccaagttcggtatcctccacttcttcgagcgccagacccaggcctcccagaacgccaagcgccagaagcccgacccccctgcgcctccccctcctcctccgccgccgcccgagaaggagccctcggaggtctcgccggaggttaccaagacgctggcgccgaagcgtgtcagattttctcccggaatgttgattaagcagagccaggacgatggggtcgcggaggtggtgacttggaagatctcgccggtgaaccatcgccttggtacgacgaagtcgaagcaatttctggggatggcgccccatccgtactcaagcgagaaaaattcctcccttgatgctatgaagaagtggcattcatctccattgggcttgtcaaggtgtactactttgggaagtaattcaggagttcttggatctgctatagttggttgtgatggtgtgggggatactcagagtccatttcggaccccaccatcgctttcctatggctgcaacgagcagcaagtgagcagtggtgtaacttctgagggaggtgccgaaccatcgggagcagggcagcacaaaaaggcattacttgatcttctagaccaagtagaggatgcaatcatggaagaagaattgcctgctgatcctggaaataaaggagggcaaaccacgaatgaggatatcaccaacaatagccgttctcctgttgctgatactgacttaactatcccatccaagaaaactattcatgtcccacccttcaatagttttcttgtcttggaggtgtccgaaaaacataaagctgatgattcatcatgtgatcgctaccctgttaaggttctgcgtctgctgaatgaacactctggtacagaatgtgccgtgcatctgtgtgatgagtggttcgacagtattgttgggcctggtgatactgtaaatgtcattggagaatttagtaaccatggaaaatgtattgttgaccatgacaataatcttgttattgtccatccagagcaactcatttccgggacacgggctgcttctagcttccaatgtttaagaaggtctgttctcgatgagaggctaaaaagcaatgaatattctaccagcgcgttgactggtactctgcttcaccaagtctttcaggctggattactcaatgatgctccttcatggcagtttttggaacaacaggcaaaggaagtacttctgaaaaatattgaaactttatatgcatgtggagtcaatgaaagcaacatgtactctacgctcattgaagctatccccaaaatgttgaattggttcaagtgtttcttaaagggttcaaaatgttctgatgttgattttggacataacgaagtgagaaagactgttggagtgactgaggtcatggatattgaggaaatggcatgggcaccaagatatggtatgaaaggggttatcgatgcttctgttagatcaagagttgagtcacacaatggtggttcatatgatagaataatgccactagagttcaaaactggcaaagcaactagtggccaggcagctatggaacactcagctcaggtgatgttatacacactgttgatgacagagagatacttgaatgaggatattgacttgggccttctgtattatcttcacacagaccagacattgggcattaaagtaaagaggactgatttaattgggctaataatgcgccgaaacgagcttgctactgagatcctgaaggcatcgatgtcacagagttttcctccaatgttacaggcacacggaggcagtggtacaactagtgggcttggtgatctatttgacaaccttgtgaatcacttaacagtcacacatcataattttcttaaacattgggatagattgattgatcttgaagctagagcttctcaggtaaaaaagaacatcttgcagcctcataattcaaactatgggagtgggagttctgctgtaccttattttgttcttgacataaaaaatggacattcaatagattcttcaggaaaaagcaaaagatacatatataattttgttcagcaaaagatgcagcctgaaacagctgatcagttagatgctcaatttgacagcatagatttcagcctgaaagttggtgattttgtggtgcttagcactcagtctgggagaatagcagttgcaaatggatgtataagagaaataataagtcactctcacataacggtctctttgccacgccgtttgagaattccagatagcaattccttgtcagagcaagaggatctgacacgtgaaatttggcggatagacaaggatgaatttagttcttcatttggaataatgagactcaacattgtccaactatttgctcagaatccacaaaactctcacctgcgcaagttgattgttgatcttgaggcacccaggtttgatagcggaggtctgtttagccaagatcctgcactatcatacataaggtcactaccaaacttgaataatgaccaacaaaggtcactgcataaaattctaggagcaaaggattatgctcttattttaggaatgcctggaacaggcaaaacatacacaatggtgcatgctgtgaagtcattattgataagaggggaatctattttgctaacttcatatactaactcggctattgataccctgctcatgaagttgaagactgagggtgtagattttattcggattggaaggcctgaggctgtacatcctgatgtcagggcccactgcttgtcaacaactgaggcacaatcggttgatgccattaaagcaaggatggagcaagtacaggttgttggagttacttgcttgggaatgtatcatcctttattagcacataagaagtttgacacatgtatcatggatgaagctggacaaattacattgccggtttcactgggacctttgatgcttgcaacaaagtttgttctagtaggagaccattatcaacttcctccactggttcagagctctgaagcgcgagaaaatgggatgggcatcagcttattttggagattgtcagaagcacattcccaggcaatttcagcactgcgatgccagtaccgtatgtcatctggtatcatggagctctcaaattcgttgatttacggtaataggttgtgctgtggttcattggaaattgcaaatgccaaactcaagttttctggtagagaaccaatgcagttgaagttaaaagagatcttgaatcccgatagggctgtgatctttgccaacacagatcaaatacctgcacttgaggcaaaggaacacagaactgtgaacaatcctacagaagcacacattatttcatggatcatcaaagaattactaagaaggggtgtagctcaagatgctattggtatcataaccccatataacgctcaagtgaatatcattcagcaatacactgattgtttggttgaggttcatacgatcgataaataccagggtagagataaggagtgtataatagtatctttcgtgcgctccactgcaaactcaagggctagtggttcttctctgcttggtgattggcacaggatcaatgttctgttgacacgtgcaaagaagaagctcatcatggtgggatcacgtggaacgctttcaacaatacctttgctcaggcttcttgtcgacaaagtagctgagattggtggcctgttggatttgacaaataaggatgcacattctttttcgagaacttgaagttcttgtttgaatgcacaataggatgcacggtagatgaatctggaaggtttttataaggccaagctgtaaataagaatatgctgtaaattttgtttttggaaatgtatagtaaacctagccaagagccacacagctagaggttaggttttgtatattccttccgttagttataacttatttcaatttcatt

SEQ ID NO: 106386 - DNA, 1543 bp, Zea Mays
atggccgacaacaacggtggcaacagcaacagcggaggcacaaacgcgaacaccaccgccgaggttcagatacagatccctggaccaccgaaaaccgaagctccagcagctcaagaaggaccatcggagagttccaaagctaagaactggaaacggtggcttgtggtggcagcggatgcaatcttgctcatcgttggtcagacatcagcaacactgctggggagatactactacagtcaaggtggcaacagcaagtggctatcaacgttcgtgcagactgctggcttccctctattgttcttcggcctgttctttttcccttcgaagtccagcggaagtccggtcggaaaaactgccatgatatatgctgtcctggggcttatcataaccgcggacaacatgatgtattcccacggactgatgtttcttccagtctcgaccttttcgctcatctgcgctagtcagttggccttcaacgtctttttctcatacgtcttgaactctcagaagctcaccggtttgatcatgaactccgtggtgctgctcaccttggctgctttactccttggagccaaccatgaaactcatggacctattactggtggtgtctcaggaggaaagtaccttctgggtttcctgttgacagtaggagcatcaggcacctactcactcatcctttcccttatgcaacttacattcgagaaatgtgatcaagaaacagaccttctcggcagttttgaacatgcagatatatactgcacttgtggcaactttcgcttctcttgttggactatttgcaagtggagaatggatggatttaagagaggagatggataggttccaatcaggacagttctcctacctgatgacactggtgtgggcatccgtgtcttggcagctcgcttctgttggagtggtgggcttggtttttgaggtatcgtcgttgttctcgaatgtgatcagcacatttgctctacctattgtccctctttttggtgtgatggcctttcatgacaggatgaacggagtcaagatcatagccatgctaatttcgatatggggtttcctttcatatctctatcaaaactatctcgacgacaagaaggttaggaatgcttagggagattacttgggtctacaattttctttcatagatgtttagtttgtttcctgcgagatgatagatgttcattacttatgttaatttaagtacattttaccaggaggaaactatatcttttcagcatagctagaaaatttcccttagtttttttttttttttttttttttttttttgcatatgcggcatatgtgtaagggtgtgggacagggaaataaacatgatacatagatttatatgtgatttttctataaatcttctgttaaagttgtcattctttattcaaacactgttatctgttgcccgttcgaattttttttctcttaactgtgttgagaggggttatcatattcaatttgtttcctagaaactatcgaatgtttaaaattttgaccagatatttatcagccaccaagtattttt

SEQ ID NO: 106387 - DNA, 1596 bp, Zea Mays
cccacactatttactcccgcgccggcctctgtttccgcaccaccgcaccgtgccacgcactccaaagatccccgcgaataaaagccgcggcagcccgggtctcgcggtgagagtgagacccatcgtccctgtctatctaggcacctagcctcgctcgccagtcgccatgtcctcctcctcctcctcctccccgtctctacagccgcctcccgccggtgcaaccggcggcagctccccctactccgcgtcctcgtccttcctcccctcgttcatgatcatcgccgcgctgctcgcattcgtcttcctcgcctccgtctccatccacctcctgctccgcttcctctccgcccgctcttcctcctcctcctcctcctcctcctccccgccgttgtccggacatccgcgcccgcggacctaccgcgacgacgcgggctcggcggccgcatccgtggcgaggcggcctgccgccaccgcggctccagccgacgcagggaagaacgaggaggaggaggacgcgggcgacgagaagcagcggctgatcgactccctgccgctgttcaccatggcgtcggcgctcgcggcgctccccaagagctcgcccgactgcgccgtctgcctgtcgccgttcacgcccgacgccgacctgcgcctgcttcccgcgtgccgccacgcgttccacgccgcctgcgtcgacgcctggctgcgcaccacgccgtcctgcccgctctgccgcgctgccgtcgcgctcccgcacccctcgctctccggcatgctcgccgccgcgcaggcgagggccagggaccggcccggaccgggatcgagcttcctcgtcgagatgggcaccgtcagcaaccgcggctcgcccgcggcggccggtggcggccgggacagggacaggaacaggaacagccgcacctactcgctcggctccgccttcgactaccagatcgacgaggaggtggaagccgtggtgtcccgcgtcgcgcgcatcgccgccgcgagggaatccagcgccgtcaaggaggagaagccttcagccgagcagggatcggcgccagcggcagcgccagcgccgtcgccgtcttcgcaaccgccgcctcccggcgagacggtggccgaggcggcgggctcctcgcgcgggtggctgcgggagtacgtggaccggctggcgtcgtcggcctacacgctctcggagcggtggagctcgcgctggagccaggggcagagccagcagcaacggcaggaagagccgtggctgtgggacgcggaggccgcggagatgtcggcggcgccggggtccgacgacgacgaggaggagacggcgttcatggcgatgtaccgctggatcgccggggtctaaaacgtagtcgagtaaggttacagcttacagggggcttctgtgtcagaagtttctggttcaggagttgagttgaggtgatccaaatgttttggaaccttgtgttgattgtgacgactgtgatgcatggcatgggaggcgtaagcagcagcagtcacacagttcatggatatatcctcggagttcgcattttggaacacgaggagataagaagccaacaaagacggatacgagaatgc

SEQ ID NO: 106388 - DNA, 383 bp, Zea Mays
gtttcattccacgagaacgagagagcaagaactacagccaaaatacgagaggccgaaaacaagcgggggagagagacgccatcggtccatggcccacggctctccgatccggcagcatgcatggctctacagttctagccttggatcaggatactacgtgtatgtagtagcaaaaaaaacccgagccagctgtcgctcgcccgcgtacggtacttacgcacggcactagtgcatgcatgcaaccggtgctgctgcggcgggggcggggcgcggcgcgggggaagtgtgccgtgtgcgtgcggcgcgctaattcttttgctcagacgcgcagcgcgggcgccctgggcctggcgaacccggcgtcgacccacgggtggcgggtg

SEQ ID NO: 106389 - DNA, 285 bp, Zea Mays
ttactcctgctgcccaggctggagtgcaatggcgcaatctcagctcactgcaatcttcacctcccaggctcgagcaattctcctacctcagcctcccaagtagctggaactacaggtacacaccatcacacctgggtaatttatgtatttttttgtagaggcaggtttttgccatgtggcccaggctggtctcgaactcccgggctcaggcaatcctgccaccttggcctcccaaagtgctgggattacaggcgtgagcaccgcacccagccttgtgtaatattt

SEQ ID NO: 106390 - DNA, 408 bp, Zea Mays
atgcaaggggtgatcgcgagcaaggcaaccgctaagattgctagtcgcactcaaaaaatgcacctcaccatggaccgaatgcgccaagtgaaggcgaacacgctacaacgcaagttcgactcgcataggttcaacaacggttcagacacctcgggttctaggggcttagggaaatgtcagagggtgacatggtgtgcaaactactatcgaacaacgacgtcgaccagatctaagagagctgctaggccagaaagcaacgacgatgtttgttcccatcgaccacctaacactactcgagacctcgacgccaaccacgacgttaagtcgcctctccggttcaggacgctagaaaatgtgctcaagtcggtggaaattcttggcttggcagaacgagttcatggtggatga

SEQ ID NO: 106391 - DNA, 2404 bp, Zea Mays
gagagagttcgccggaaacagcagggagccatggcgtccccgtcccatactggcatcaggcggcgcttcgctctgctagcttctgcaacgcttgccatcctggtcctctgcggcacctgcagctgcctgcagttcagctaccccaccttcggcgccgccaatgaggccgatttcagcttcacccccggcgccggcatcgaagatggagccctgcagatcacgccgagcaccggagacctgcgccaccggtcggggcgagtctgctacgcgcgggaaaccctcaagctgtggaaccgcaggcggacggcgctgacgtcgttcaggacggagttcgtgctcaacatcgtcccgcggaacgggaccggagaaggtatggcattcatcctcacaaacaacccggagttgccccgcaacagcagcgggcagtggctgggactagtgaacggccagacggacgggtcgccggcgaaccggatcgtggccgtggagttcgacacgaggaagagtggcaagcacgaccacgacgacaaccatgtcggcctcgacgtcaacggcatcgagtctgccagtgcgtatcctgtcggcaatctctccatcgtgctgtcgagcggggctgatgtttgggtcaccatacagtacgacggtgcgacgctgagcatagtcgcggtacagacgtacagcttcatgtacgcctgggccggtgacctgtcgcagtatctcacggacgacatcaccgtcggctttgcagcttcaaccggcgacttcaccgagctgaatcagatcaagtcttggaatttcacaacactaggcgacgatgcagacggcagatggcgacacaggaagaagatgagattgcttctcgcctacctgatcccgttcgccatagccggatcgttcctggcgttctgcgtgtggagaaggctgacgcgtccgagaaggctagcctaccgcaacctcgagaagatgatcgacgcgcaaggcccggtcaaatttaagttcagggagctaagaaatgctacggccaacttcagctctgaccgtaagctcggcagaggcggcttcggcaccgtgtaccttggctacctgaagaggatgggcgtgaacgtggccgtgaagcgggtgatgacgagtggcaactccaatcgcggggagcaggagttcgtggcggaggtgaactcgatcagcaagctgtcgcaccgtaacctcgtgaagctcatgggatggtgccacgaaagaggcgagctgctgcttgtctacgagtacttccccatgggcagcctggacaggcacctgtacgccgatgccggagcaataagtaatgcgccggcgtcggcgtcggaggcgacgcctgagctgacatgggagcggcggtacaggatcgtctgcggtgtggcgtcggcgctggactacctgcaccacgggagcagcaagcggatcctccaccgggacgtgaaggccagcaacgtgatggtggacggcgagtacgaggcgcggctgggcgacttcggcctggcccgcgtcatacagcgtgacggcgcgacgcaccactcgacgcaggcggtggcgggcacccgcgggtacatggcgtacgaaagcttcttcaccggccgcgccagcctcgacacggacgtgttcgcgttcggggtgttcgtcctggaggtggtcagcgggaggcgaccgagcagccccgtgcagtgctcgtaccacgacaacgaggcgagcttcgagcgaggccggcaccggcagccgcccatgtacattgtggactgggcgtggcggctctacggcgaagggagggcgcaggacgccgccgacgcggcgctggtcggcgagtttgacccggcggaggtggaccgcgcggtgaggctggcactggcgtgctgccacccgaacccgagggagaggccgtccatgcggacgtcggtgcaggtgctggttggtggagccgaggcgccggaacccccgctcctgaagcctgcgttcgtttggcctcctttcggcgagcggcaggagatcgatctggcgcatgtcggggttctcttcaccggaggcggagggcactgcagtttctgttccctgtcctccacctccttcacgggaaggtgatgaatttgcgaggatctgcacatacgtacatactactcccaaattagtttcatctgtcaaaacggatcatgaattgtttatatattgttttttacgaaaaccgtcgggacgaaaagtcacagcgcctggttgggtttgagtggattgagatagataggaggggattaaattttctactatttaaattaaatttaaataggagataatttaatgtctcaatcaacccctgatcgaataaattataagtgatgtttcgtttatagatactatttttttcatcttattccatttctatccc

SEQ ID NO: 106392 - DNA, 125 bp, Zea Mays
atgcccgtcaaaaaactcatacccgctcgtagttataaaattgtacccgtactctcacgtgtatgggtaaaaaaactcatggtgtaacccacattcgattagacatccgctaaacacatattaaa

SEQ ID NO: 106393 - DNA, 1632 bp, Zea Mays
agttgacgttgacgtgtcgtactgtcttcctcgtctctcgttactcgcgccgtcgcgcgtggtctccggacgtctcattcggcagcgaggagaccaaggcgggggggacttccgatctggtgtagggtacactggtttggcgcgagaccatggagggatccctggaggcgcggcccggtgtcctactcgtcggcgccccgggcgtcggcaagcggaccatcctctcccagtttcttggagcagaaatacctgacgtgcatgacttatcatccggtgtgctttgtcaggggtggacaattgaaacaaagtattattcagctgatctttccatctggacagcaaatcttggtgaagaattttctcttgattccctccctcatttagaccgggtggctgccctcgttatggtcttcgatatgagtgatgaatccaccttgcttactctgcaaagctgggctgccagtgttgatatccagaggaggcgtatgcaaaatcttggggagtcaagttctgatccacaccctgattatttcaattttgggataaatgaaagtgagggttgtagcttgttatctgaggaagaaccatgcataaagatcagaaactcgactgcacagtggtgcattgagcagaacatagaatatattgaggcctgtgcttccaatgctgactttgataagtgtctatcagtggatggtgatagccaaggcttagagcgactccttggagctctttctgcacatatgtggcctggaatgattctgaaatctggaaacagaataactgtcccatccttggttgaaaaacaagaatccacagatgatgaatccaactatgattttgagtacgaggtcttgtctcatggatccgatgaccagtgggaatttattggagagacaagtacatccagaagatttgagagaccaaatgagcctgatggtgcacaggatcacacacatcaagttgtgaatgccggtactgactcttcagcatccaactctcccccgactaacacacccacagaaactgctgaagagaatactgtaactcagagcaacaaaaccgacaatagtgatcatgtggacaaaaccacagcatatagcactgaggatcatcaaagtgatcttcgagaggctaaccatctttttgaggacgagcattatggtctggatgacctggagaaaataatgtcggagattggcaacatgcgatcaaacttaagactcatgcctgacttccaaaggagggagatggctgcaaagctagccatgaaaatggcagccatgtttggtgatgatgatgaagaggcatttgatgatatctaaggcaattcatgtaactccaccttgctgattcccagacagggttgcagatgattgaaagatggctttgtacaagccgacgagcctcttgccacctagggcctttctcatgataatgtcttttttcttagtgaaaatttttgtggctgttgagcgttctatatgccttgtaagatgtattattatgaactttaactccttcaatcatccaggtggaaattttgtggaccatggtgcaattgaacaaaacggtgatattgtagaaccaaagacaaaaaaaaaaagataacaagtttgcatattatagtcc

SEQ ID NO: 106394 - DNA, 1706 bp, Zea Mays
aaagttgacgttgacgtgtcgtactgtcttcctcgtctctcgttactcgcgccgtcgcgcgtggtctccggacgtctcattcggcagcgaggagaccaaggcgggggggacttccgatctggtgtagggtacactggtttggcgcgagaccatggagggatccctggaggcgcggcccggtgtcctactcgtcggcgccccgggcgtcggcaagcggaccatcctctcccagtttcttggagcagaaatacctgacgtgcatgacttatcatccggtgtgctttgtcaggggtggacaattgaaacaaagtattattcagctgatctttccatctggacagcaaatcttggtgaagaattttctcttgattccctccctcatttagaccgggtggctgccctcgttatggtcttcgatatgagtgatgaatccaccttgcttactctgcaaagctgggctgccagtgttgatatccagaggtttgagatcttgttatgcgttggaaataaagcagatcttgtacctggtcatagcgtgcatgtagaatataggaggcgtatgcaaaatcttggggagtcaagttctgatccacaccctgattatttcaattttgggataaatgaaagtgagggttgtagcttgttatctgaggaagaaccatgcataaagatcagaaactcgactgcacagtggtgcattgagcagaacatagaatatattgaggcctgtgcttccaatgctgactttgataagtgtctatcagtggatggtgatagccaaggcttagagcgactccttggagctctttctgcacatatgtggcctggaatgattctgaaatctggaaacagaataactgtcccatccttggttgaaaaacaagaatccacagatgatgaatccaactatgattttgagtacgaggtcttgtctcatggatccgatgaccagtgggaatttattggagagacaagtacatccagaagatttgagagaccaaatgagcctgatggtgcacaggatcacacacatcaagttgtgaatgccggtactgactcttcagcatccaactctcccccgactaacacacccacagaaactgctgaagagaatactgtaactcagagcaacaaaaccgacaatagtgatcatgtggacaaaaccacagcatatagcactgaggatcatcaaagtgatcttcgagaggctaaccatctttttgaggacgagcattatggtctggatgacctggagaaaataatgtcggagattggcaacatgcgatcaaacttaagactcatgcctgacttccaaaggagggagatggctgcaaagctagccatgaaaatggcagccatgtttggtgatgatgatgaagaggcatttgatgatatctaaggcaattcatgtaactccaccttgctgattcccagacagggttgcagatgattgaaagatggctttgtacaagccgacgagcctcttgccacctagggcctttctcatgataatgtcttttttcttagtgaaaatttttgtggctgttgagcgttctatatgccttgtaagatgtattattatgaactttaactccttcaatcatccaggtggaaattttgtggaccatggtgcaattgaacaaaacggtgatattgtagaaccaaagacaaaaaaaaaaagataacaagtttgcatattatagtcc

SEQ ID NO: 106395 - DNA, 5208 bp, Zea Mays
caagctacagagagagaaaggacaagggaggagaagccgccatgaagcagcggcagcagcagcagcctcctagtcgtccccgttaaatccctgctcgcccccggtccgcgaccccgacccaacccgtttgtgtcgtaggcggtttgcactagcgtttccgtgaggtgggcgaaggcgtccgtgaccgaccgaccgaccggagcttcatgcgccaggggcggcggcttcaccccgtcgtttgatgggcaacgcatgcagcggcgcccttagatccaagtacctgcacagcttcaagcacgccgcgtcgcagcgccacgactccgagtacagcgccagcgccgacgactcgcccaggaagcccacaccgcccgccaccacggacgcccacgcgccggcgccgcccgccgccgccatgaggcgcggcgcggctggcgcgacgccggacctcgggtccgtgctcggccacccaacccccaacctccgcgacctctacgcgctcggcaggaagctcgggcaggggcagttcggcaccacctacctctgcaccgagctcgccacggggatcgactacgcctgcaagtccatctccaagcgcaagctcatcaccaaggaggacgtcgacgacgtgcgccgcgagatccagatcatgcaccacctatccggccacaagaacgtcgtcgctatcaagggcgcgtacgaggaccaggtctacgtccacatcgtcatggagctctgtgccgggggcgagctcttcgaccggatcatacagcgcggacactacagcgagcgcaaggccgccgcgctcacaaggatcatcgtcggggtcgtcgaggcctgccactcgctcggggtcatgcaccgggacctcaagcccgagaacttcctgctcgccaacagggacgatgacctctcgctcaaggccatcgatttcggtctctctgtcttcttcaagcctggtcaagttttcaccgatgtagttggtagcccatattatgtagctccagaagttctgttgaaaagttatggacccgcagctgatgtatggacagccggtgtcattctttacattctactgagtggtgtgcctccattttgggcagaaacacaacaaggaatatttgatgctgtattgaagggtgccattgattttgattctgatccgtggcctgtcatatctgatagtgcaaaagatcttatcagacgaatgctgaatcctcgctctgccgagcgcttaacagcacatgaagttctatgccatccatggattcgtgatcatggagtagctcctgaccgtccactggatccagctgtcttatctcgcattaagcaattctctgcaatgaataagttgaagaaaatggctttacgagtaatagctgagagcctatcagaagaggaaattgcggggttgaaggaaatgttccagatcatggacactgacaacagtggcgcaatcacttatgatgagctaaaagaaggattgagaaaatatggctccacactaaaggacactgagattcgtgatcttatggaagcagctgatattgacaacagtggaacaattgactacatagaattcattgctgcaactttgcatctcaataagctggagcgtgaggaacatctcgtggcagccttttcatatttcgacaaagatggtagtggctatatcacagtggacgaactacagcaagcttgcaaagagcataacatgccggatgcttttcttgatgatgtcatcaacgaagctgatcaggacaatgatggccgcattgactatggagaatttgttgccatgatgaccaagggcaatatgggagtcggtcgaagaacaatgagaaacagcttgaatatcagcatgagggacgcacctggtgcgttctgagacttaacacgatgtacagcttgttgcttggctacttcctgccttgctgccctacgaaaccttctgcattttttcaagatgttgtcaagtgtctgtgtggatgtgtttttctggggattctgattcaactctggtgattgattccatgaaatgcataacaagatgcccatgttacgcaagaagccagattgtaaatgctgctgcccctttgactctcagaaacactaatgctcagtgaaaagaaatcgctccctattgattgatggcatccgttcttggatgcacgctgtatctcaaagcaatgtgttgctccgtttggatgaacatgtactcaatatactgtttcctgatactacctccatttttttatttgacgtgagatagtacaaatttacactaacaaacatcaaattaaaaaaaatcggagggagtacttgccatgatgtaagcatgatctagcgatctggccgtctttatttaggctggagcgaatctatagattatggataaggaatgacgaaaaaagataacatcaagatattctatgatactctcctcaaccaatgtcaacgaaaagaactatgcaagaatccatggaccatggtcagtggtcaccactcaccagtaatccccgcaagagcaggaaccaccattgaagtggtggaatcgcacggcatctcgaatcacgaattctcggccagtcactgtggatatcagcttgatcacagtgtgacagtcgccgcaaatgcgcagattcttcatgatgtggatcggcatccaggtgggcaaggtcatgagcccgaatgctacagctagcttctcgctgtggtgaatctcggagcgcgtggagtctgtcctcacgtaccctaggcgcgcgatcttctccatgagctcatctagcttcttccgaatcgcgagaacttggggatggctcacgtcatccgctttgaagacgtggaccttgttgtcaacctccatccagctatagcccgggttcttttttattcccttgtccctcatcagcttccttatctgcgcagagtcatctgatttcccggcatcggcataaatcttcgccataagcatgtagctcccagaatcaggtgagtccagctcaaacacatgtttcgctgcaagttccgcgagctcattgttgccatgtatcttgcaggcgctaagaagagctccccaaacctcagcggttggtttcatgggcatatcgtcaatgagatccttggcttccgtcagatgcccggcacggccaagaaggtctaccatgcatgagaaatgctccaaacctggagatatgttatgggccctcttcatcatatcaaaataaaatttcccctcctgcacgagtccagagtggctgcagcctgacagaactgcaacatagcttatgtagtctggctttgcacctcttttaagtatgtcatcaaagatctctatggcttgttttcccattccgtgctgtgaataaccagtgatcatggcattccaagatacaatatccttcacgttcaggaagtcaaatacctttcgagcttctaaaatccttccgcacttggaatacattgttatgactgcattcgcaacagaggtgtctataatgagaccaacctttacagtgcgaccaataatctgatctccaagtttgtttgcacctaagtctgcacagcctttgaacaatgtgacataggtaacccagtcaggtctaacatactcctcacttagcatgaccttatacatcctgaggccatcttcctcagctccatgctgtatatatgctcccaacatagcattccatgtaatgacattcttttctgacatgccatcaaagaactcacgagcttttgcaacgtttcctacttgagaatatgcagttatcatgcttgtccatgatacaatgtccttttcattcataaatctgaatatagcttcagcactctggagattgtcgcactttgcatacatggagatgagagaattggagacgactacagcttgaatctgcccacttttcagacaaagtgaatgtagttgcctcccaaggcacaaatccatcctgctgcagcagccacttataagagtagccaaagcgaactgatcaagtgtcatcaactcagctctcatctggttgaacaattcaacagattcagtgaaacacccatactgcaagaatcctgagatgagaactgtccaagccacattgttacggtcatgtaaagagttgaagacccccttagcttccttgaaacagccagattttgcatacagttcaacaagagcacttgcaacatatggatcaatgtgcggtaggttccgaatcacctgagcatgaagttgcttaccccatcttaaagaagataatctagcacatgcagtaagcgaactagtgtatgttgttgaatcaagacgcacccctttgctttgcatgtctacaaccatatcaagggcttctctgactcggccactctgagacaatgctgataccatcatgttccacgaaacaacatcacgttcaggcatgctatcaaaaagctcaagagcatgatcgacaccatatgtcttgacatatcccgctagcatactgttccgacagaacatagtgggttctttaatgcgaacaaacaaccttgaagctaaatccacagctccacatctcacaaacatgtcgacaagggcagctgctacctcactatcatcctgagaatcgaacttctgaaccatcgcaagcagctgcagcgccaaactgtgccatccaagggcgccacaagacttcatggcacaagctaatgtgaatgcatttggccacgaatcaccacttcggtgcatggacagaaaggtttccaaagaaaccaagtactgtcggctctgaaagtatccggacatgagcgtgttccacgaagccacgtctcgcgcgggcattctaccgaacagctccacggcatcgctcagtcggccgagcttggcgtacccattcagcatgacgttgtgggtgatgacattaggatgggcgatgtccatcagaagcaagcgtcgggcgtcggagagggctccgcaggagaggtaggcatggaggagcgtgttctgtaggaagacggcggacgcgaggcccacggcgacgaggcgaccgtgcaacgcgcgggcgccggcgagcgcgccgcgcgcaccgcacgaacgcagcgcgtcggcaaacgcctgcgtcaccgccatgtgggaggcaaccgccggaggaggaggagacggcggtgacggccatggggacgccaccattcaaacggttgcagccttgcgctatgctatatgagtcctcccagaag

SEQ ID NO: 106396 - DNA, 2943 bp, Zea Mays
atggcgccgccgccgccgtccttactccgagagctcctcacagctgacggcttcaagaaccgtcgcaagccgctcgacagctccgccccgccgacctccagagccgcgagcatgccactacagcaccggcgcccgggcaagccgccctcgcggtcacagtcggacgtgctcacccgcagccgcctgaggcaggcgaacgccgacgcggacgatggcagcagggacgccgccggtgccgagcggcggcgggccgcgaccgcgacgcgagggttgtcggcgtcgctaacgagcgtgaggaaggtccacagcaacaagggagaaggcgacagcggctcgggcgccggtgccaggaggggtgcctcggcgtctgacccttccgcggtgccggcgctcgatgagtcggcgctcaccgcgctcatctccctcgccgcggggcctctgaagcggttcgccttggacgaggcgttccgcgcctcgctgcgcgccggctgcgcgtcttgcctcggcgactccagccaccgcgccgtgctggacctccgcgtgcaatcgcaaaccgtcgagcgggccgcgagagagggcctggacccgcgcgaactgaagcgcgcgtccctcaggctccacgaggtggcgtctctccaaggcaaggacgcggacgcggtgaccgcggcgggcgttccccacacgcgcctcgccgcgtgcgcgcacctatacatgtccgccgtctccaagctgcagaagcgggaccactccgccgcggtgcacgcgctggaggccttctgcctggcgccgcgcgaggcgcggacggtcctgctgcccgcgctctgggacaggctcttccgaccgggcctctcgcacctcaggacgtggcgcgaccgcgagtcggcgtcggcgagcgcggacgaaagggtggaggaggtggagaaggtgttcctgggcgtactggacgacgggacgcgcgcgctcgcgtgctactacagggactggctgctggggcggacagatgccatggctctcccggacgttcccgctcctccgagcacggtccatcccagcacgccgaggtgctcggcgtcgacgtcgtatgacatcagctcggaagtcatgttcggctccgggagttcgagtctggcgaagttcgcgtacgacgacataatgcgggcatccgaggaaatcgaggaggaggaagaagcggtgtaccccgaggccgccgcagaagcggtgaccgtgctccaccaggaccaggagcgcgatggagctggaggtgaggaaaggagctacactcccactccgttggcagaagaaaacgagcccgtgcctaacaatgtagacagagagacgttcgatccacacgtcgagcaagaaccgaacaagcaatcagatgcgcgagcaagtcacccgccgatctctgacaactctgctattgaccttcttacactcgagttctgtgcatacaatttcgtactgatgggtgtgatctcgtgtaagctcatcagtgaagcgccactccagagtgacacaaatggcaacgagctctccattttctccacggttcccagcgacttcctgtgtccactgacgcgccagatattcagcaatcccgtgacgatcgagacaggccagacgttcgagcggcacgccatagttcagtggctagacagaggcttcaggacgtgcccggtcacaggccaagatctctcgagctcgacggtgccggacacgaaccgtgtgctcaaacgcttggtcgatagctggaggtctgaacacttcaagcatctgacatccggaggcgctgggctcgatgtgaagctaaccgtatcagcaatagacaaggctcttggttcagctcgggacgtgtctgaaaaatttgacagggcaagacacctgatggcgatcggggggatagacttccttctgtgcaagtttcaggagggagggggagacgagcagccgcgggtggctgagcacttgctgtcttgcatcagggctgaaggcagctgcagggattacgtggctataaagatggatggctcgagtattctgcggctccttcagagtaaagtgctttcgacaaggagaactgcagtggatttgctcatggaactggtctgcttaagaaggagagaaatggttgaattgctcctccatggatcgagagcagagtcgatcgtggaggcaatggatgtgctgctggagtacctccggagcttgcccgcagaagaacaagccccgatcgctgctctactgatgcgtttggatgcattggtggagccgaacagaaacaacacgtacagagaagaggcgatcaaggccatcacacgttctctgagatgctgcctgtcagaggacactgtcgtgcccagcactcggagagctctgctgctgctgggagggcagttcaccttctcaggcgaccttcacgcagaggactggatgctggaacatgctggcttcgtcgacccctcacgggccaccactgccacttctgatgctgttgtacacgacaagaaagcggccgaaaacgatgcgtggctgagacacgtagcagcggcgctcctcggcagccgcagcgggatcaggagaccgttcctggaggcgctgtccaggtgcctgggctcccccaacgccggcctggtgggtgcgtgcctgacgacggcagcgtggctgagccgctcgctggcgtcgctggacgaggacggcgccacggacacgtccctcgccgcgttctcggcgctcgtcccgcggctgaagcagtgcctggcacccggcaggccggtccggcacagggttcttgcggccgtgtcgctgcacaactttagcagaatcccagactgcagggagctgctgatgctgctggctgacggcatgcgcgaccacctcgcggagctagcgcagctgacctggacggccggtcagctatccgccgaactccatagcaacgactga

SEQ ID NO: 106397 - DNA, 798 bp, Zea Mays
tccaacgctccaggctcacagtcccacggatcgaggccgaaatcacctcccgctcggcactgctcaaaacttccgcgttccctcccaaaccccaccgataaatactcctccaaccccgaatcttaaccatcgcacaaatcctcttcctcgagttctcctcaaccaaattcaaagtcacagcggcgaaactctcggcgatgtctggccgcggcaagggcgggaagggtctgggcaagggcggcgccaagcgccaccgcaaggtgctgcgtgacaacatccagggcatcaccaagccggcgatccgcaggttggcgaggaggggcggcgtcaagcgcatctccgggctcatctacgaggagacccgcggcgtgctcaagatcttcctcgagaacgtcatccgcgacgccgtcacctacaccgagcacgcccgccgcaagactgtgaccgccatggacgttgtctacgctctcaagcgccagggccgcaccctctacggtttcggcggttaggtcgcccctctcccggtggcgaattacgtggtggcggtggcggtcgtgttgtgttcttggtctagttagtctgtgttgtctttatcggtgctgttttctgtggtggttgtactgcatcgttctagtttctagtccatgtgctgtaatatctcgctgctgtaatcaatggaatgtcctcgtttcaagcctcatgacatatcgctcttttgtaaacctgcaagaattccgtgcactacgcatctgtttcgttgtgcaagagctcagatctgcttttgagacaactaatgac

SEQ ID NO: 106398 - DNA, 267 bp, Zea Mays
atgtctggccgcggcaagggcgggaagggtctgggcaagggcggcgccaagcgccaccgcaaggtgctgcgtgacaacatccagggcatcaccaagccggcgatccgcaggttggcgaggaggggcggcgtcaagcgcatctccgggctcatctacgaggagacccgcggcgtgctcaagatcttcctcgagaacactgtgaccgccatggacgttgtctacgctctcaagcgccagggccgcaccctctacggtttcggcggttag

SEQ ID NO: 106399 - DNA, 261 bp, Zea Mays
atgtctggccgcggcaagggcgggaagggtctgggcaagggcggcccggcgatccgcaggttggcgaggaggggcggcgtcaagcgcatctccgggctcatctacgaggagacccgcggcgtgctcaagatcttcctcgagaacgtcatccgcgacgccgtcacctacaccgagcacgcccgccgcaagactgtgaccgccatggacgttgtctacgctctcaagcgccagggccgcaccctctacggtttcggcggttag

SEQ ID NO: 106400 - DNA, 2026 bp, Zea Mays
accatacatacagcctttccttccatttcgccccttgcctccctcctctcctctcctctcttctcttctcccctgcgaaaccggcagcactcgcaagggtgttcaggagctggtggcttcgtctcggtggcgcacgctctcgcctcctcctgctgctgctgctgcttgattcgtgctcgtggtgaagagccgctatcagactcggtggctgtggttctgctggttcagaaatcctgagatggctcgtttccaggcgaggagcaatcaaaggccggctgcagatcacgtcggccacagagacttcatggatcatctgaagaacaccctgagctccggcgacatggacttgccaggaggagcacgggcccctaaggcacgcaagccatacacgatatccaagcagagggagaaatggaccgaggacgagcacaagctcttcttggaggccctgcagcagcacggccgtgcctggcgccgtatacaagagcacataggcagcaagactgccgtgcagatcaggagccacgcccagaagttcttctccaaggtctcgttgcctgcctttcgcacagaacgaaaaaaaaaaacacatcaaaacccccttctgcctgaaattccatggattgtgttgcttgcaaggtcatccgagaatcctctggggacaacagcaacaacagcgtaggtgctccaccgcaacttcagattccgccgccgaggccgaagaggaggccgacgcacccgtacccgcgcaagctgggtaattcagtaggcaaggatgcctctgctgcaatcaagcagcttcggaagccccagttgcaggcgcagtccctgtctgagcaggagaactgctccccaaaatctgtgttgaccacagcacagatgtgctctgaggccctgccagctgaaggcagtggatcaccggcttcctccgttcacatggaggacaaatgcctcacaccaaacacgtcagtcggggagtcaagtgtgcaagtggcactctccacggattccaacgacgcggcctgtgagatacccgaagccgaaggtccggttcttaggctatttggcaagagggttgtggttagtaatttagaccagcagccaagctccaatactgggagcctacaacacgcggcggacatggaactggatgatgcttcagccgagacaccaaccagtggaactgggaagctgtcttcccatgccgcagaagaagcggagacatggtgcccgtggctggtcggtagtacacagcagtttctgtactatctccctcggggagaggtgttctctatgcatcctggttgccagttcctaaactacggtaacggaagcatatcctacacagcgttggacgcacagacagttacctcaaacaagcagcggagccggccatggacggagtcgatcgaaacctccagcagcgtgcctggaacagctcagaattcagatcctgcagaatctacgaaagtaaacagaggtgaagacaaagtggctgtacccgttccaggttcaaggaaatgcgcgggcgcaattccagcctgccgtcgaggttttgtaccgtacaagaagtgcacagctcggagcaaggtgctgcagccggtggcacctggcgaggaggcagatagagagctgacaaggctgtgcctgtagaattctgggcccttgccacccacctctactctgtggataatttttgctgctactcgaacacatatgactagtacagtacagcagtgcagtactgatgttttgcaggaagaccattctggttctctgctgctacttatgagaggcggattggaactgaagcagccttccacaaatggaggcgactgtgggttcctgtctgccattgtatagttcgggactagtgtttccattttcatctcgagtgttgtaattttcccctagctgtgcaggttcagaggtcaatggttgtcatgtgctgtagcaagtaatgtaatagttgtagtagaagaccaccttgtatgagctatatataattatatatgtaaattatgaa

SEQ ID NO: 106401 - DNA, 1332 bp, Zea Mays
aaaggtacccaagctgaaagcatcacactcgcagttgcagagttccgcttcatcagtcccacactctccccttcctccccccagtcctgagcttcgccgaggcatacggacaataccggcaccggcagcgagcagtcgggagccatggctccgcggctcctgctcttcctcctcctcctcctcccgctcctcgccgccggacaccagcacccgtcctcctacggctcctccgcgctttccgagtggcgccccgccaaggcatcctactacgccgccgaccccgaagacgccatcggtggggcgtgcgggttcggggatctgggaaagcacgggtacgggatggcgacggtggggctgagcacggcgctgttcgagcgcggcgcggcgtgcggcggctgctacgaggtcaagtgcgtcgaggatctcaagtactgcctccccggcacctccatagtcgtcacggccaccaacttctgcgccccgaactacggccttcccgccgacgccggcggccactgcaacccgcccaaccatcatttcctcctccccatccagtcgtttgagaagattgcgctctggaaggccggcatcatgccaatccagtaccgccgtgttaagtgcctccgtgaaggtggtgtcaggttctctgtcaacggtcggcacttcttctttacagtcctaatcagcaacgttggtggcgcgggtgatgttagatctgtgaagatcaaaggaacagagttgggatggctcccgatgggccgcaactggggccaggtgtggcacatcaactgtgacatgaggggacaacctctatcgtttgagctcagctcgagcgatggcaaggcgctgaccagtttcaacgtcgtccctaaggattgggagtatggcaagacatacacggggaagcaatttcttctgtagagaatgagcgccacaagatcagcttacagtttctcattttttgttctgatcctacgagttgggctgtggtgtacattctctgcacttctgcagaacaagtaatatcattattaggagaaaattacttagtgcaaggcctcagatagttgctcttggtcataaatggttttccatgtccccttcatagttgtactaaagaggcttgatgtatcattcaaaatagaagcctccgttgtattacaatattttacctagcaagcaatgataatgtatttctgcatttctgtattagtaacaagggcagcaactagaactttgatttcctgtttctttttgtttaccaccaacaatgtcagcttatgctaaactctgacgctggtcttcagctgcaggatgtagaatacatgaaac

SEQ ID NO: 106402 - DNA, 1027 bp, Zea Mays
tacttggtacatccttttcagtaattcagtcctacaaacactatcatctatctgaaaatggctattcgtgttagacaacttcaggtgctgactaatctgacattttcagtgccagagccaaacagattacaaatatatttggcacatgcattcatagattagtcaagttctaatctgacattttcagtgccattgaaaaggtaattttatgaatttacttatatgtggtgtccaataccttcacaaatattctactaatgttcaaacatcattatgtgagtctaagttgacactctgcaatgaaagtgttaagtgcctccgtgaaggtggtgtcaggttctctgtcaacggtcggcacttcttctttacagtcctaatcagcaacgttggtggcgcgggtgatgttagatctgtgaagatcaaaggaacagagttgggatggctcccgatgggccgcaactggggccaggtgtggcacatcaactgtgacatgaggggacaacctctatcgtttgagctcagctcgagcgatggcaaggcgctgaccagtttcaacgtcgtccctaaggattgggagtatggcaagacatacacggggaagcaatttcttctgtagagaatgagcgccacaagatcagcttacagtttctcattttttgttctgatcctacgagttgggctgtggtgtacattctctgcacttctgcagaacaagtaatatcattattaggagaaaattacttagtgcaaggcctcagatagttgctcttggtcataaatggttttccatgtccccttcatagttgtactaaagaggcttgatgtatcattcaaaatagaagcctccgttgtattacaatattttacctagcaagcaatgataatgtatttctgcatttctgtattagtaacaagggcagcaactagaactttgatttcctgtttctttttgtttaccaccaacaatgtcagcttatgctaaactctgacgctggtcttcagctgcaggatgtagaatacatgaaac

SEQ ID NO: 106403 - DNA, 2347 bp, Zea Mays
ccacactctgcccatgcataacagaagtttcgaaccatgggatgtagagtggaatctcttccctcgcaggataaggtgcctcggccgtaaacagagtggttgttccgcttcgtcccagcctctagttcttcctttcctccagagtgatggccaaatgctactcagattggcccccgattccgcctttccatccatcgcgaagaacgccgccgcaatcccacgcctccccgatcacgatcaggcggcagctcgcgtccttcgtgctccactgctccagatcctgcgctcccctcctcgagcccaagaacctgcccgatgagttcgaggccgtaccggcgacgccgccgccgccgctgccggacgccgccccgaagctggggatttctaacaagttcatccgaggcctctgcggtgacccgcagaccgagcagctggccttcgagggctacaggagggcgctgctgcagcccgagttccggctggagaagaagacggccaacgcgctgaccctgcagctgatcagggagaagcagtggggctccctggagctgctggtcgaggacttcagggcccacggcgtgctcccggagaagcggacgtgcgcgcggctcgtcgcctgctgcatcagggcggggaggttcggcctcgccgacgcggtgctcggggtcgtcgaggcgaagaagggagcccccgctgccatggccttcagcgcggccatgcaggcgtacaacaggctgcacatgtaccggagaacggtgcttctgtacgggcaggcgagggtggcccgcctgccgctgaacgccgacgcctaccgtgccgcgatggcggcgtgcggcgcgctgggcgagccggacatggtggcttcgctgttcaagctgtacaggtcccacaagtggtacccctccgacagctgcgtggagacgtacggcgtcgtctgcgacgcgctgggaaaggctggcagagccctggacgctctgcggtccctgcgcgagatggaagcggatgggctctcgcccgacgccgccatctactcctccgtcatcggcgctctggcagacgctcgagagaaggcggcggccgaggacctgtaccacgaggcgtgggacaggaagatgcttggagaccccgacatgttcttgaagctgaccatcatgcacgccgaggctggtctggttgagtcaacgatagaggttgccaaggacatgaggcagatcggcctgagggtcacggactgcatcctctctaccatcgtcaacggcttcgtgaagagaagaggcctgaaaccggccatcagagcgtatgacaagctggtcctcatagggtgcgagcctggccaggtcacctacgcatcagtcatcaacgtgtactgccggctcgggcgcagcgacagagcagaggccatcttctccgagatgatcgagcgaggcttcgacaggtgcgtggtcgcctatggcaacatgatctcgatgtacggcaagatcaggagggcgtctgaggccacgaggctgctggccctgatgaagcagaaggggtgcgagcccaacgtgctggtgtacaactccctgctcgacatgcacggcaggctggggaactcgaagcaggccgagaagatctggaaggagatggtgcggcgcaaggtccggcccgaccggatcagctacacggccatcatcctggcgaacaaccgggcgggggagctggaccgctgcatggagctctaccaggagttcagggagaccggaaggaaggtggacatggtcatggctggcctcatggttggggtgctctccaagaccagccgcttcaacgagctcatcgagctgctcaaggaaatgaacgggacaaagctggaccggaggctgtacatgagtgtcctgagaagcctccgcgatgccgggctggaggttcatgtgaagtggctccagagtaacttcaccttcatggaagagaaaacttgatgccaggtgcaggtacttgttcctgtgcacgcatattcagcacccaagtatatcgggcgcctgaagaaaaccttgctctgtacatggaaaccgaaaaaaaaggtaaatatttgcttgcctcagtgctccattccgaagcttgtacgctattgctgcacaattccggcattcattggctcaagtgaatagcgatgtaaatgtattttaagggaagccaactttgtaccagtaacgatctgattccgaaattatcgaacagattgccaagttcagtaactctgcatgtaagatttgctgaaactgttgtaccatagccactaggggcaattgtaactttgtatctataatgaaaaaaaatcatattattttggtaccactcatatacaaca

SEQ ID NO: 106404 - DNA, 490 bp, Zea Mays
attctaaaatatatgctcatatattgcacacggcgctttatgaagcctagtcgaaacaggcctgaaaaatagaggtattatgtgacctgagtttttttttttttttttgatatcgtgtggtcaaaacagagttaaattccgtctgcttttggacatctttttggttagtaggtagccacaatattgccggacctactgacctgtggttctcaaaagaagttgcttttccttgaacaaaaatgcagcagccagcagcaccacggcccacgggtgatagctcggtacgagtacgaagacaaagctgttggttgctttctaacagtttagatattttgcccctgcttgctgtgtggcgtcaaaactcaaaaggtttatcattcatgctcaagctacgcggagtcgcggacaaaacgagcgtctccagaatccaaatgaggcaggcgatttttcaccgcatttcgcccaaaaacctttgctccttccacttgca

SEQ ID NO: 106405 - DNA, 1632 bp, Zea Mays
cctgtccccgcctctgccaacgctcctgccccgcacacccacccgccgctcccgcgttgtccgcccccgtcatgaattgccctcttccatgtgcaccacagaaatctcggcgcaagatccccccgaaacctcgccataccctactgcgaggcgtaccattcgacagcgaggccctccttggcgggaacggcgtggtagtcgtggaggctaagacgctccacctcgacgtgtgcgttgaaccacacgctgtgcttgtccttgcataacctggtgaggatttggccgcatcatcccgctgagcatcgcgtgcgacggcaggccctgctgctcccaggtgtcagtgcgagataggagagcgcgaacctggccgagctccatgtgaggcagtcccaaggcacacgggcctcgcggtggcccaaggacgtcgggcggaagtcgtgccgagctacttccctgcctacgccaaagacgcccaacgcagagaagaggatgcccaccagcgacgtcccgtgctgcgaccgccacgcgaagaaggctgacggcatgccccgctccgatatgcccaacagctgggaccgggaaaaagacatgggacaaatagaagacatctaaagctttccaaggcagatgcctccagaggatatctactctctggtcatatgatcaatgcatagatcacttcagacaatcaaataacagtagtatacatagaaatgcaacatgtaagtatttcctttctatgtctaacagtagtttacaaatatattccacatataaccatattagcttaattgatctatgtataaattatgattattagaataaattttaattccaaatatccaaacatggcctaaataaatactgaattggacattgtatttaaatagacaacagggaacatgagcatatcaccagacacacactagaactcataaaacagggatactatgctattagtctctcttaaatgcagtacatggaagcaaggtttatgatcagatttttgtataccagagaacactcaagtctcccaactgcccgcctgccgaggtgagctccgaatgcctgccctccacctctgatccgtgttgcggcttcgctcctgtgtggagcaagttaattttttttaacatgcatcaacatagatgtcgtccaattacgactgaagcaaaaaaatattgcaaggctaaacactcgggtcaattgctatgtctaggtaattagttttttgtttaagtttcatttagtctatatgtttgatttttccccttgcctacagaccagcctaggtattcatcacttgtgaaaaaaagaatatcagtgttgatggtaaaaaaagtatggatgcttaaaagtcttgctcatttcttggtaggttggatgtggctccaccagcactgcctccctacttcctctactgctgcggctactgctacatgatctatcgtgcctgtttttctaggaatcttaatggcatcaggctggcattttgtttaactcattaggtgcgtcaacactgaaattcactcttacggtcatgttttgttattgcattagagtttgcagcatgaatcagggacatccaatgttgttagatctattaatgcgatgttctctgtcttattttta

SEQ ID NO: 106406 - DNA, 1378 bp, Zea Mays
cctgtccccgcctctgccaacgctcctgccccgcacacccacccgccgctcccgcgttgtccgcccccgtcatgaattgccctcttccatgtgcaccacagaaatctcggcgcaagatccccccgaaacctcgccataccctactgcgaggcgtaccattcgacagcgaggccctccttggcgggaacggcgtggtagtcgtggaggctaagacgctccacctcgacgtgtgcgttgaaccacacgctgtgcttgtccttgcataacctggtgaggatttggccgcatcatcccgctgagcatcgcgtgcgacggcaggccctgctgctcccaggtgtcagtgcgagataggagagcgcgaacctggccgagctccatgtgaggcagtcccaaggcacacgggcctcgcggtggcccaaggacgtcgggcggaagtcgtgccgagctacttccctgcctacgccaaagacgcccaacgcagagaagaggatgcccaccagcgacgtcccgtgctgcgaccgccacgcgaagaaggctgacggcatgccccgctccgatatgcccaacagctgggaccgggaaaaagacatgggacaaatagaagacatctaaagctttccaaggcagatgcctccagaggatatctactctctggtcatatgatcaatgcatagatcacttcagacaatcaaataacagtagtatacatagaaatgcaacattacatggaagcaaggtttatgatcagatttttgtataccagagaacactcaagtctcccaactgcccgcctgccgaggtgagctccgaatgcctgccctccacctctgatccgtgttgcggcttcgctcctgtgtggagcaagttaattttttttaacatgcatcaacatagatgtcgtccaattacgactgaagcaaaaaaatattgcaaggctaaacactcgggtcaattgctatgtctaggtaattagttttttgtttaagtttcatttagtctatatgtttgatttttccccttgcctacagaccagcctaggtattcatcacttgtgaaaaaaagaatatcagtgttgatggtaaaaaaagtatggatgcttaaaagtcttgctcatttcttggtaggttggatgtggctccaccagcactgcctccctacttcctctactgctgcggctactgctacatgatctatcgtgcctgtttttctaggaatcttaatggcatcaggctggcattttgtttaactcattaggtgcgtcaacactgaaattcactcttacggtcatgttttgttattgcattagagtttgcagcatgaatcagggacatccaatgttgttagatctattaatgcgatgttctctgtcttattttta

SEQ ID NO: 106407 - DNA, 1337 bp, Zea Mays
cctgtccccgcctctgccaacgctcctgccccgcacacccacccgccgctcccgcgttgtccgcccccgtcatgaattgccctcttccatgtgcaccacagaaatctcggcgcaagatccccccgaaacctcgccataccctactgcgaggcgtaccattcgacagcgaggccctccttggcgggaacggcgtggtagtcgtggaggctaagacgctccacctcgacgtgtgcgttgaaccacacgctgtgcttgtccttgcataacctggtgaggatttggccgcatcatcccgctgagcatcgcgtgcgacggcaggccctgctgctcccaggtgtcagtgcgagataggagagcgcgaacctggccgagctccatgtgaggcagtcccaaggcacacgggcctcgcggtggcccaaggacgtcgggcggaagtcgtgccgagctacttccctgcctacgccaaagacgcccaacgcagagaagaggatgcccaccagcgacgtcccgtgctgcgaccgccacgcgaagaaggctgacggcatgccccgctccgatatgcccaacagctgggaccgggaaaaagacatgggacaaatagaagacatctaaagctttccaaggcagatgcctccagaggatatctactctctggtcatatgatcaatgcatagatcacttcagacaatcaaataacagtagtatacatagaaatgcaacatagaacactcaagtctcccaactgcccgcctgccgaggtgagctccgaatgcctgccctccacctctgatccgtgttgcggcttcgctcctgtgtggagcaagttaattttttttaacatgcatcaacatagatgtcgtccaattacgactgaagcaaaaaaatattgcaaggctaaacactcgggtcaattgctatgtctaggtaattagttttttgtttaagtttcatttagtctatatgtttgatttttccccttgcctacagaccagcctaggtattcatcacttgtgaaaaaaagaatatcagtgttgatggtaaaaaaagtatggatgcttaaaagtcttgctcatttcttggtaggttggatgtggctccaccagcactgcctccctacttcctctactgctgcggctactgctacatgatctatcgtgcctgtttttctaggaatcttaatggcatcaggctggcattttgtttaactcattaggtgcgtcaacactgaaattcactcttacggtcatgttttgttattgcattagagtttgcagcatgaatcagggacatccaatgttgttagatctattaatgcgatgttctctgtcttattttta

SEQ ID NO: 106408 - DNA, 245 bp, Zea Mays
aactatctcatgagcaagggctacaagatggtgactgatggaactgagaaccaccttgttctctgggatctccgcccccttggcttgactggaaacaaggttgaaaagctatgtgatctttgcctcatcacattgaacaagaatgctgtcttcagtgacagcagtgcattgtctccgggtggtgtccgcattggttagtatcatttatttattcatttcttctgttgtggtgcaagcttcaatga

SEQ ID NO: 106409 - DNA, 372 bp, Zea Mays
cgtcacacacatacactactagctatggccggaagaaagtgcagagcgattcccacggcaatagcgacggccgtcgtcgtcgtcgccgtcctgatggcggtggccgtcgcaggcgtcgcggcgaaggacgcgtcgggtgccccgagctccctcacgacgtggagtgcggccgggtgctcgggggatacgtcgatcgtcgggtcgtgcgggtgcaccgaccttgcgttctacgccgggcaggagttctactaccggggcgagacggccacgctctacaccgggactggctgcaccggcacgccgtaccaagttttcgaggacacccaggcgtgcggcgactttgggtggcgcagcatcaacatcgactgctga

SEQ ID NO: 106410 - DNA, 556 bp, Zea Mays
cacatccaaaattcccagtccgcgatacaagaccaatccaatcccagcggaagtggaagcagtttcatttccttccttgcagctagcagcgatgattcttgtggcgatagtggcggagctgctcgaggagtacaccgcgctggtggcgcgggtgctggagcagctgctcaacgacgcgccgttcccgcgccggatgcgcttcctcatgctgcggagcctccccttcgtgccgccgcctctgcccccgccgccgccgccgcacgccctccacgttaccacccgagtctgattattggctccatttttctcaggggtttcagcctactgcccgccatggccgcccacccactagcctgcgcttgaggcagctagtagtagatactgtaggttgaccagtgatccacggtgtgtttctcgctttccttttgtctgttgatttctattggctatactacacggtgctgtaaaggatcaattagttctgcctttgaggccctcatttggtgtaaatatttttgataacatggaccatggaaaaaactttcctttgacattt

SEQ ID NO: 106411 - DNA, 333 bp, Zea Mays
atgtggtgtgaagaagcagccagccaggcgccagcagcagatgcgggggcgtcaaaaaggcagggcgtcatcgtggttgcattgccaatgccaatgaatatttccaggcgcacggcggcgtgctacagggaagcggaggcggaggcggaggcggaccgctgggcaacgccgccgacacggagccgcggcgcctgggctctgcgcattcgaatttccacgcgcgggggcatgcaaaagcctgcggcgtggcgcccttgcgtggctgtggatggctatggccagacaggcagaggcgcgcccagctcaaaagcgagcggaaggcggaagcaatag

SEQ ID NO: 106412 - DNA, 110 bp, Zea Mays
ctgttgaggctatcccagaagttcccctatcacatttcttagactgtccgcagcggttccctctaaatttttctcctatattacttttttgcgtcacatcaacatttcat

SEQ ID NO: 106413 - DNA, 161 bp, Zea Mays
tattgtttactctacgctttccaaactatatttgaacattattaagtcgctcatacttgaattgtgctgcactttatatatatatatatatatatatatatatatatatatatatatatatatatatatatatatatttgtgactgtcatgtatcctcaag

SEQ ID NO: 106414 - DNA, 657 bp, Zea Mays
atggagagtcccgacaggaatggagatgttgagcataatgcgacagatgtaaattggtttgtcagcattgaagatgttgagcacttgcttattgagccaccagccttgcctgatgtagagcaaggtaattcggtagcggatggttttgagggaattttaccagatttgcgatggcaagaggagggacctcagcatgtacccaatgagagtgttatgtaccacaaacttggattagctgccgaggatgaacgagaaaataaagagagagaggatgcttgcaatcgtataggtgatggaaataatctagatcaacttggtggcgatggttccgcagctttgccttgtgttgattttttgcagcaagagaccagagttgtctatgactctaataatccagtgatggaggttggcagcttgtatgcatctatgactgaatttaggctggcaatgagacagtatgccatagacaaagagttcgagttaggtattgaggcaagtacaaagaagaaatatagaggctattgtcgtggaggcggctgtccttggagcataaatgcaagaattgagagggatggttcgccgaccataattgtatgttctttgtttatgtcaagaacttatcttatttatattgttgtggccttcgaagtaatataa

SEQ ID NO: 106415 - DNA, 630 bp, Zea Mays
gtacatcaatatttggttcttttaacttgtagatgcataactactatgctaaaaagccatgaagccttaagccttatcaagtaaataccgttagcctgcagaagtgcagaacttcatacagacgctacctagccgttttgttcttcaacgttttatgtcttcagaccatggacacccactaccaatactattctgttactgccgttttctttggaactaaggtcttgtttccttttgtggtcgtcccttttggttggtgcttggatccgtttctgggagcttctttgtctatgtatactggtgaacgtttgcaccgcgcccacgcctgccctgtggatgaaccctgagcgttttattggtcaattctgtgaaatattgggttttatcctcgaaattctagtgttttacgtagtactcgattaactagactaataggtgaccatcttgaagcaattcgtgtttgacactgaacattcctgaggacttggacttgcatgccccaggatagattccaccgctgttttaccatgctgaacgtaagagtactgacaggctgccatgatcagcatgtttctacaattctactgatctactttcaccttttctttaatcctcggtactccttttttt

SEQ ID NO: 106416 - DNA, 2340 bp, Zea Mays
gtctgtctccacgactccacgcatgcttcagcttcacggagacacggttcacgccgcgatccgggatcgctctctctttgggctaccggctccgccgccgctccgccgccctaagccaggtgctgaaggccttcgtcggtcttttcaccggcgacgacgacccactaggaaaagaattttcctggcatatttttgtttccagaaatattcgtgtcaagttggtatgtcagggatcacagcaatttggcgtcggtcatgtccattagctgctagtcagattctaatggagacatattttggcccatctgtatcttctggtgttctgaggtggttcagcagcggcactaagcactcaagaaaacctgaattttctgttgctaaccatatcagggtggtggatttgcattctgcttctgcagttaattatgtgtcaacgatcagaaggttgcccctttcatgccgtatggacactaattggttgattacttcaaagtccagacatggtgcattgccaggattcttaggtgtttcaagcttctatcgtggatactcctcagatactggaatcaagccagaagcttcgcagagtggtgtctctaatcttccttctacagaaagctctgaggttggcactgcaggtgctggtgggggttcatggattgaaatcttggacaatgctcgcaagtctactatagatgctaccactgatgcaggcaagaaagttaaggagctgactgatgcagttgcacctcatgtccagcagctatttgatacatatccaaatcttgaaaaggtagttgttccacttggcggaacaatatttggtacaatgatggcatggttggtcatgcctatcattctaaggaggcttcacaagtacgcatcacaaagtcctatatcagcacttctggggaactccaccaagaatgatgttttgtaccaaactagtctctggtgtgcattagaggatcctgcaaaatatctgatcacgttcatggcattttcagaaatggcaacacttattgcaccaagcgtatcaacttaccttccacaggcatggagaggtgcatttgttctgtcttttgtatggttccttcagaggtggaaaaccaacttcattgctaaagctatgaccaaactagatgcctcaagtgttgatcgcgacaggatatcggcatttgataaggtttcttcattgggactgattggactaggagtaatgggtcttgctgaagcttgtggtatagctgttcaatcaatattaactgttggtggtgtgggaggtgttgctactgcttttgctgctagagatgttcttggtaacattcttagtgggttctccttgcaattttctaagccattctcaggactcacttctacttcattgatcaatccagaaaagctccctgtcatagtacccaactctttgttctccagtcagatgatagttaacagatcacgagctaattggcgagctagtgtgacaaagattcctattcgaattgaggatattgagaaggttccttctgcatcagaggagataaagactatgttaaggtctaatcaaaatgtgtcctttgatagtgatgttccttactgctatctctcgagattggaaagttcatatggagagctcatcattggatgcaacctaaaaaacatgaggaaagatgagtggctatctgcccaacaagaaattcttttgggagctgctaggattatcaaatcacatggcattgaactgggaagcaccatgcagtgctgttaattcacgcttccggcacttttaagtaaataccgttagcctgcagaagtgcagaacttcatacagacgctacctagccgttttgttcttcaacgttttatgtcttcagaccatggacacccactaccaatactattctgttactgccgttttctttggaactaaggtcttgtttccttttgtggtcgtcccttttggttggtgcttggatccgtttctgggagcttctttgtctatgtatactggtgaacgtttgcaccgcgcccacgcctgccctgtggatgaaccctgagcgttttattggtcaattctgtgaaatattgggttttatcctcgaaattctagtgttttacgtagtactcgattaactagactaataggtgaccatcttgaagcaattcgtgtttgacactgaacattcctgaggacttggacttgcatgccccaggatagattccaccgctgttttaccatgctgaacgtaagagtactgacaggctgccatgatcagcatgtttctacaattctactgatctactttcaccttttctttaatcctcggtactccttttttt

SEQ ID NO: 106417 - DNA, 2007 bp, Zea Mays
gtctgtctccacgactccacgcatgcttcagcttcacggagacacggttcacgccgcgatccgggatcgctctctctttgggctaccggctccgccgccgctccgccgccctaagccaggtgctgaaggccttcgtcggtcttttcaccggcgacgacgacccactagaaatattcgtgtcaagttggtatgtcagggatcacagcaatttggcgtcggtcatgtccattagctgctagtcagattctaatggagacatattttggcccatctgtatcttctggtgttctgaggtggttcagcagcggcactaagcactcaagaaaacctgaattttctgttgctaaccatatcagggtggtggatttgcattctgcttctgcagttaattatgtgtcaacgatcagaaggttgcccctttcatgccgtatggacactaattggttgattacttcaaagtccagacatggtgcattgccaggattcttaggtgtttcaagcttctatcgtggatactcctcagatactggaatcaagccagaagcttcgcagagtggtgtctctaatcttccttctacagaaagctctgaggttggcactgcaggtgctggtgggggttcatggattgaaatcttggacaatgctcgcaagtctactatagatgctaccactgatgcaggcaagaaagttaaggagctgactgatgcagttgcacctcatgtccagcagctatttgatacatatccaaatcttgaaaaggtagttgttccacttggcggaacaatatttggtacaatgatggcatggttggtcatgcctatcattctaaggaggcttcacaagtacgcatcacaaagtcctatatcagcacttctggggaactccaccaagaatgatgttttgtaccaaactagtctctggtgtgcattagaggatcctgcaaaatatctgatcacgttcatggcattttcagaaatggcaacacttattgcaccaagcgtatcaacttaccttccacaggcatggagaggtgcatttgttctgtcttttgtatggttccttcagaggtggaaaaccaacttcattgctaaagctatgaccaaactagatgcctcaagtgttgatcgcgacaggatatcggcatttgataaggtttcttcattgggactgattggactaggagtaatgggtcttgctgaagcttgtggtatagctgttcaatcaatattaactgttggtggtgtgggaggtgttgctactgcttttgctgctagagatgttcttggtaacattcttagtgggttctccttgcaattttctaagccattctcagttaacgactacataaaggcggggtcaatagaaggcaaggtggttgaaataggactcacttctacttcattgatcaatccagaaaagctccctgtcatagtacccaactctttgttctccagtcagatgatagttaacagatcacgagctaattggcgagctagtgtgacaaagattcctattcgaattgaggatattgagaaggttccttctgcatcagaggagataaagactatgttaaggtctaatcaaaatgtgtcctttgatagtgatgttccttactgctatctctcgagattggaaagttcatatggagagctcatcattggatgcaacctaaaaaacatgaggaaagatgagtggctatctgcccaacaagaaattcttttgggagctgctaggattatcaaatcacatggcattgaactgggaagcaccatgcagtgctgttaattcacgcttccggcacttttaagtagggtaaataccgttagcctgcagaagtgcagaacttcatacagacgctacctagccgttttgttcttcaacgttttatgtcttcagaccatggacacccactaccaatactattctgttactgccgttttctttggaactaaggtcttgtttccttttgtggtcgtcccttttggttggtgcttggatccgtttctg

SEQ ID NO: 106418 - DNA, 1991 bp, Zea Mays
gtctgtctccacgactccacgcatgcttcagcttcacggagacacggttcacgccgcgatccgggatcgctctctctttgggctaccggctccgccgccgctccgccgccctaagccaggtgctgaaggccttcgtcggtcttttcaccggcgacgacgacccactaggaaaagaattttcctggcatatttttgtttccagaaatattcgtgtcaagttggtatgtcagggatcacagcaatttggcgtcggtcatgtccattagctgctagtcagattctaatggagacatattttggcccatctgtatcttctggtgttctgaggtggttcagcagcggcactaagcactcaagaaaacctgaattttctgttgctaaccatatcagggtggtggatttgcattctgcttctgcagttaattatgtgtcaacgatcagaaggttgcccctttcatgccgtatggacactaattggttgattacttcaaagtccagacatggtgcattgccaggattcttaggtgtttcaagcttctatcgtggatactcctcagatactggaatcaagccagaagcttcgcagagtggtgtctctaatcttccttctacagaaagctctgaggttggcactgcaggtgctggtgggggttcatggattgaaatcttggacaatgctcgcaagtctactatagatgctaccactgatgcaggcaagaaagttaaggagctgactgatgcagttgcacctcatgtccagcagctatttgatacatatccaaatcttgaaaaggtagttgttccacttggcggaacaatatttggtacaatgatggcatggttggtcatgcctatcattctaaggaggcttcacaagtacgcatcacaaagtcctatatcagcacttctggggaactccaccaagaatgatgttttgtaccaaactagtctctggtgtgcattagaggatcctgcaaaatatctgatcacgttcatggcattttcagaaatggcaacacttattgcaccaagcgtatcaacttaccttccacaggcatggagaggtgcatttgttctgtcttttgtatggttccttcagaggtggaaaaccaacttcattgctaaagctatgaccaaactagatgcctcaagtgttgatcgcgacaggatatcggcatttgataaggtttcttcattgggactgattggactaggagtaatgggtcttgctgaagcttgtggtatagctgttcaatcaatattaactgttggtggtgtgggaggtgttgctactgcttttgctgctagagatgttcttggtaacattcttagtgggttctccttgcaattttctaagccattctcagggactcacttctacttcattgatcaatccagaaaagctccctgtcatagtacccaactctttgttctccagtcagatgatagttaacagatcacgagctaattggcgagctagtgtgacaaagattcctattcgaattgaggatattgagaaggttccttctgcatcagaggagataaagactatgttaaggtctaatcaaaatgtgtcctttgatagtgatgttccttactgctatctctcgagattggaaagttcatatggagagctcatcattggatgcaacctaaaaaacatgaggaaagatgagtggctatctgcccaacaagaaattcttttgggagctgctaggattatcaaatcacatggcattgaactgggaagcaccatgcagtgctgttaattcacgcttccggcacttttaagtagggtaaataccgttagcctgcagaagtgcagaacttcatacagacgctacctagccgttttgttcttcaacgttttatgtcttcagaccatggacacccactaccaatactattctgttactgccgttttctttggaactaaggtcttgtttccttttgtggtcgtcccttttggttggtgcttggatccgtttctg

SEQ ID NO: 106419 - DNA, 749 bp, Zea Mays
ttgaactactatacaacacttcagaaagggagtcatttcagtgaagcatgggttttttatcatcaacattttgttcagtgttagtacttagttgaaattatgaacacagacctgacgcagtaatggcatccaggggtgacaaaatgcctgatctattttagaatttagaatctaaaacctgctaccaaaataaccaagtcaaggttgggtaagtacaactactatgccttctatcttccagtcaatagtgaaacgatcaatcatctacatgtttgacataacctttctggagattactctgccttttaggagacttcactttaatagcgccagcgccatctttggacttgcagtatccactcttctgacctctttgccgaccacctttctttttgtgctcatcgtcagcaacttcatcattggacttgcgacattgaccgtgttggatggattgcttccttcactgcttcgtgcagtcaggcaggcaaaggctgttaatgtgggcgacgccatgcaggaggaagccacatgtacatgttagcatgttaagcagcctgccgaggcctgagacggtgattactggctccacgagtgtgccatcgtcatttcgctttgtggtgagcagctacaggcgattcgaaagacaaaatcgacctgttggttttccgtgttcgacgcatttttaacaagcaggaggaacgactttcttctgtgagattatacacttctcattcttctaaaatgtcaca

SEQ ID NO: 106420 - DNA, 303 bp, Zea Mays
atgctgccacgtcactcctccctctccatcgccgccctcccccacctcgtcctcatcgcgtgtcatgcttccgggctccggccctccgcgaccctactccacctcccccggccggctttcgccgccgctgcagacgcttcgccaccaccgtcacacgctccgcctctcttccatgcacgtctccctcctgcttccactcctccggctacacccccgccttatggccttgctgctcgccgtagccccgcacctcaacctcgggaagatacggaccagagcgacgacattgaggaggaaaagtag

SEQ ID NO: 106421 - DNA, 978 bp, Zea Mays
atcccatcgactacaactcaacgacccgagaactttccagagcactcgccactcgcacatcgactacaactcaacgatccaagccaagcgacgcgtgtgttctcttcttctccgaggccatcatccttcgcgcgaattagccgctcagcgaccgggattcaagcttactggctgcagggttgcgatcagatgaggggcgcagcaaggcgtctggtgcagagcgcaaccaaaaccaggcaaatcaatcctgtcaatggactagcaaggatgccggcgatcactactcctcagaggcatgggaacgagaatacttccagtgaatctgtcgtcacgaaagacgaaaacgttgagccccttgtcgccttcagcaggccacctcctttgccgcctgttctgggtccgctcgtcgtgctctcggttttcgagatgtcgtccggtggcggcgacgaagacaccgaatgaggcagcaaatgggcacccatggaaattagcttttgtgttgtctgttaagtttgctccgttctacccctgtggacatgaggttcgcacgagggggctgatcttccctgagcagctccgaattaggccttgtagaactacagactacagactaagatgtactgttagctatcaactaggtggcgtttggataatgtgatgtgcaaggtgggatagggaagtggagggtggtagtacaaatgatttaccacgttgtggttggcggaatagataaggagatgagctggagtgaggaaagggaaccgtctgtctcactcgagaggtggatgcattatggcgtcggcgacgtactaatcgtgagtaaccaaggtagccgcagccgccaactcgcgcgtcgccactgcgcaccgggggtgcgagcctgggctgcattcgttgcttacctctcgcctaggcctccgctggaccgaattttttgtattttagcccttaaacagaagtaaatttacgtttagacct

SEQ ID NO: 106422 - DNA, 378 bp, Zea Mays
gtacgcattgtccgccgggacaacggtgcaaaggttgacattccggtgaccaatttggttgaagatgttaaagtgttattggatgagattcaaaaaaatctgttcaaaacagcccaagaaaggagagatgcatgtgttcaggtcgtcagctcttgggatgaattcacaactgctctgaataacaaaaggttgatcttggctccttggtgcgatgaggaggaagttgagaaagatgtgaaagctcggacaaaaggggaactcggagctgcgaaaacattgtgtactccatttgagcagccagaacttccagaaggtatcctgtgctttgcatctggaaagccagcaaagaagtggtcgttttggggccgcagctactga

SEQ ID NO: 106423 - DNA, 885 bp, Zea Mays
cagccgccggcgccggcctactccgctcgacgcccctcctcccccaccggcgacctccgcccgacgtacctttgtcccgcaccgccgcccaacgtccgggtcgcccccacgtatccatgccttaggtgccggctagcccctaggaaagacggtacccctccgcccagaggcgcgcccaggcgagcgcggaagagcgcctcgttgaacactgaccaggacaccccgcctcgctcgcgcctcatccttctccctgattcccggtacacagttgcgcgaccgaggaccgaatccgtgaaccatgtcgaccagcaagggcagcgcagccaagggaggcggagggaagaaggaggtgaagaaagaaacaaagctcgggatggcgtataggaaggacgacaacttcggggagtggtactctgaggttgttgttaacagtgaaatgattgagtactatgacatctctggttgttatatattgaggccatgggcaatggaaatctgggagctaatgaaagaattctttgatgcagaaattaaaaagctgaagctcaaaccatattatttccctttgtttgttaccgagaatgttctacagaaggaaaaggaccacattgagggctttgcacctgaggtagcttgggttactaagtcagggaaatctgacctggaagcacctattgcaatccgccccacaagtgagactgtcatgtatccatacttctccaaatggataagaagccacagagacttacccttgaggtgtaatcaatggtgtaatgttgttagatgggagtttagcaatcctactccattcataaggagccgtgaatttctgtggcaagaggggcatactgcttttgcgaataaagaagaggcagatgaagaggt

SEQ ID NO: 106424 - DNA, 888 bp, Zea Mays
cagccgccggcgccggcctactccgctcgacgcccctcctcccccaccggcgacctccgcccgacgtacctttgtcccgcaccgccgcccaacgtccgggtcgcccccacgtatccatgccttaggtgccggctagcccctaggaaagacggtacccctccgcccagaggcgcgcccaggcgagcgcggaagagcgcctcgttgaacactgaccaggacaccccgcctcgctcgcgcctcatccttctccctgattcccggtacacagttgcgcgaccgaggaccgaatccgtgaaccatgtcgaccagcaagggcagcgcagccaagggaggcggagggaagaagaaggaggtgaagaaagaaacaaagctcgggatggcgtataggaaggacgacaacttcggggagtggtactctgaggttgttgttaacagtgaaatgattgagtactatgacatctctggttgttatatattgaggccatgggcaatggaaatctgggagctaatgaaagaattctttgatgcagaaattaaaaagctgaagctcaaaccatattatttccctttgtttgttaccgagaatgttctacagaaggaaaaggaccacattgagggctttgcacctgaggtagcttgggttactaagtcagggaaatctgacctggaagcacctattgcaatccgccccacaagtgagactgtcatgtatccatacttctccaaatggataagaagccacagagacttacccttgaggtgtaatcaatggtgtaatgttgttagatgggagtttagcaatcctactccattcataaggagccgtgaatttctgtggcaagaggggcatactgcttttgcgaataaagaagaggcagatgaagaggt

SEQ ID NO: 106425 - DNA, 1584 bp, Zea Mays
cctggtctcctcttccttcccctcctgttctgtccatctctaccgttccattccaattccatccccggaaagcgcaagccgcgggagagcggccggcgtacgtaccacgaggaccgccagccgagggccatggccgccggtctgtccggcgccgcgatgaccagcttcgtcgccaagaacccgctgctggcggccgcggcgcgccgcagggcgctgcctcccctcgccgggcgcgccctgccgttctcgccgctcaccaccgccagggccccgcgccgccgcgggctcgggaccgtcacgtgcttcgtgccgcaggacacggagcacccggcggcggcggcaccggccccggtcgctcccgtgccggagacggcgctggacgaggaggccagggccgcggcggcgcggcgcgtcgcggagaggaaggcgcggaagcggtccgagcggcgtacctacctggtggccgccgtgatgtccagcctcggggtcacgtccatggccgtcgccgccgtgtactatcgcttcagctggcaaatggagggcggcgcggtcccggtgagcgagatgttcggcacgtttgcgctctccgtcggcgcggcggtcgggatggagttctgggcgcggtgggcgcaccgggcgctgtggcacgcctccctgtggcacatgcacgagtcgcaccaccggccgcgcgagggcccattcgagctcaacgacgtgttcgccatcgtcaacgccgtgccggccatctccctcctcgcctacggcttcttccaccgcggcctcgtgcccggcctatgcttcggcgcgggcctcgggattacgctgttcggcatggcctacatgttcgtccacgacggcctggtccaccgccgctttccggtcggccccatcgccaacgtgccctacttccgccgagtggctgccgctcacaagatacaccacatggacaagtttgagggcgtcccgtatgggctgttcctgggaccaaaggagctggaggaggtcggtggcctggacgagctggaaaaggagctcgcgcgaatcggccggaccatctgatggattcgtccggattccggcgcggcgatctccgctccgctccgtgattccggcgcagcctcatggttggggagccgacgaccagaacctccagaagggatttggtttggatgcgcgagcctagatcttgacctgcatttcggatggtctgtggaggcacagctcgtacctggagatgtctagtgccatggaattacttttcttttctttttttcctgacattttcacgccggcgtctttatttgtgaagacgtcgcacgttcgggcccctgtattactgttcttatggctaggattctgtatataacttgtagggacatgttatgaaccaccagctcaatgaagctaaaaattcggtggttggaaacagcgctgaaaaatcagaagctcctcctttcacattcagaggcgctggcgcaacgagggcacgacgaccaacgttacacaatagttccattagccttaacttaaagttgtagccacgtagagggagaagaaggcgatgcaaacagtccttaaaaaaaa

SEQ ID NO: 106426 - DNA, 801 bp, Zea Mays
acactagcagagagtggaggaccagaccacaagctcatcgcagcagcacctgcaagccacagactgatctgaagtctgaacaaagatgagtcgaggaggcagcagcggtggtggccgaagctctctcagctacctcttcgagccggaggaaaccgtcctgtatcgcactcgcacgagcaaccaggaaaccgagaaggctccggataccaacagcggatgcgtcaagcaggacgacgacgagaagaagacggtcggaaccgaagcagttcattctcctcccaagagggaggtctccaacccgatactctcgtctcacaaacctccctgcaacatctaccataccggccagttaagctccgggcttcttatcactgaccggccttcgacgagggtgcgctgtgcaccaggaggggcgtcgtcgctcgggtttctgttcggtgaggagcatgagaaataacagacggtctcagtctaaaatctagaagacggtttgccccgcatgcgtatgccaaaatgaacatcatggaatgactgcttgtgagacgagagtatcgggtttcatagagtgcctgtagagcatgtatatgctatgctatgctatgtctgcttgtgtttggacagtcagctgtgttctgctttttacaacgtgtgtatgtatatttatgcatcttcgtattttttttggccacgcaggattggaagggtgtttgcaaatgtttgatgtaaaattgttgctgtccacacataagtcatatttatatgggcaactgaatgggtatttataaaagctatactactctc

SEQ ID NO: 106427 - DNA, 2759 bp, Zea Mays
gctccggtcactccttgtccctgagtcctgttcaagaatcaagacaaactggcaacgagaaactagcggatttcctgaatcctgagttcctcaccggcgaggcgagcacggaaaaaatcgcatggccttgcagcacgcaggtccagctagctctacgctgaccaccggccgtcatggcaggagcgccgcagccgtcctccgtaggccaccgacgggttctagcagccgtttgagggcgcatgcgcagaaacccgtcgccggatcccgttcccgtggcgcgggagccgagaccgcgacgtccccctcatcctcccgctcggagaacgccgtcctcaaggccgcctggtacggctccgagctcctcggcatcgccgcgtcgcttctccggcccgcgccgtcgtcgcctcaggagggggatgctggcggtggcggtgacgcagagggcgaagcggcggcggtggcgggggccctggacctggaccacgcgggagtggccgaggccattaaggcggacttcgcgcggtcgtacttcgtcacagggaatctcacgctgagagcttacgaggaggactgcgagttcgccgacccggcgggctcgttcagaggcctgcggcggttcaaacggaactgcactaattttgggtctctgctcgagaaatcgaacatgaagctcactaaatgggaggacctggaggacaagtcgatcgggcactggcgtttcagctgtgtcatgtcgttcccctggaggcctattctgtcagcaaccgggtacacggaatactatttcgatgctgaatcggggaaggtgtgcaggcacgtcgaaaattggaacgttccaaagatggcgctccttcggcagattttcaggccgagccgatgggtctgggagaagcgttaaagcctgcagtggccgttgttttatgttccaaaccaaaatgcatgtgcgtgtacgtactagatatgtaaaagtacactcagaagaataactcgtatatatactagcagtatataaaatgtggatttacaaaaaaacaaaaaataagagttatcgtatacatatgtttctggcatcaatgagaagatcattcatataactgagcaatgcagacgtaactcgcaaaaaactaaaacagaaccaagttttttttggtgacggatatttacatgccttttgaatttaaatatttctagtttgcagtaaacaaacgaatgggtgtgctatccgttaaacgagcaatgctttatctgattgagctcgattgggttattgctgtatcttcacacccgctggttggcggcagcaggttggcattttggagttggagttctcatgtaggcggctaccaataactccgtgttgaatctgaatgtgtctgactcaatccatctgttgctctcgtttttcgtttatgttttctttttgttgtctgcatctgcgctggatgtgatgaaggaaagattggtccgtgtttctgattttaagtgactgacaaccatctctattttccttctgatcccaagcagtagttctcgtcttcagttgatttgtttcctcctcttcgattgccatgtgaggttttttcttcgccttcgttcagactgaatttgaatatttatatgctgtgcaatgcagatgtaactcgcaaaaaaaacgaaaacggatatttacatgttttagactgaatatgaatatttctagctagcactaaacaaacgaatggatgtgcaatcagttaacgagcaatgctttatctgattgagctcgatgaggtaattgcttgatcttcatacccgctggcataccgagtaaggttgcgtatgcgagttctcatgtgggcggctatcaatgtcaccgtggtgattggtgcggacaccgttgaacgataggctgtctgaaatcgtgcattctcaaatcaaagcagtctgatgtttgaaccagaccatcgacacatgacggtgggtcatccgcgcgagctttttgcgattatgatacgcccaacgcgtgacttcgccagtctggtatgccgaatcgcgtcctcaccagaatggtactgacatcgtcgttcgccttctgttttggtctccgtagcttcatcctcggattaaggcctagtaataactcgttgcggacacttgtgcccttgccgttgtgcctcgttctcctctcgagccttctcagcctgtagttcttagcgctgtcgccgtcgccgccatgactccgccaccgcatcccactttccacgtgacgagctcggcctgccatccggtccctggcgtcgcctcctccggtctgtattcatctgcatcaggctctgttccggcgatgtggtgcccggattcgtcgtcgccgcatcagctcttgagctccctgcttttggcctgaggtccatgtaagtagtagagttggaggatgaattagcggcggagtggccagaatctccacgtgaaccttgtccagaggacttcatttcccttgcagagcacatagaaaccttttggggcatcgagtacgactcagataatatgcctagtttctctgattagggggtagttcaggttatgtgatgagttatgtcatgaaccatgtttatgtatcagctatgaaccaagttatgtcatgaaccatgtttatgtctagtgtattagctgtgactagtttgtatcagcaaaactgagttcatgtatgtgcttgtgacatgagtaaaactgagtttgtatcagctgtgactgtgagcaaactgtgttgatgtatgtgctgt

SEQ ID NO: 106428 - DNA, 1374 bp, Zea Mays
cgagaaactagcggatttcctgaatcctgagttcctcaccggcgaggcgagcacggaaaaaatcgcatggccttgcagcacgcaggtccagctagctctacgctgaccaccggccgtcatggcaggagcgccgcagccgtcctccgtaggccaccgacgggttctagcagccgtttgagggcgcatgcgcagaaacccgtcgccggatcccgttcccgtggcgcgggagccgagaccgcgacgtccccctcatcctcccgctcggagaacgccgtcctcaaggccgcctggtacggctccgagctcctcggcatcgccgcgtcgcttctccggcccgcgccgtcgtcgcctcaggagggggatgctggcggtggcggtgacgcagagggcgaagcggcggcggtggcgggggccctggacctggaccacgcgggagtggccgaggccattaaggcggacttcgcgcggtcgtacttcgtcacagggaatctcacgctgagagcttacgaggaggactgcgagttcgccgacccggcgggctcgttcagaggcctgcggcggttcaaacggaactgcactaattttgggtctctgctcgagaaatcgaacatgaagctcactaaatgggaggacctggaggtacgtgcgaaccacactctccagcaacagaagtctataactttgtaatttgaaacaccgagatgtgtcaaccattggtggtaaaaacaaatgaacaaaaaccgactgatgtgtgtgccgctgctcgatgcatccggttgcaggacaagtcgatcgggcactggcgtttcagctgtgtcatgtcgttcccctggaggcctattctgtcaggtgattccagttttgttgaagtgagccaaaccagggcttgatccctgctggtccattcatgttgttgctcacctcagttcgccggctgttttatgcgtattttgctcgggccctgacacggtgtttactgtcgtcctgctgtttcagcaaccgggtacacggaatactatttcgatgctgaatcggggaaggtgtgcaggcacgtcgaaaattggaacgttccaaagatggcgctccttcggcagattttcaggccgagccgatgggtctgggagaagcgttaaagcctgcagtggccgttgttttatgttccaaaccaaaatgcatgtgcgtgtacgtactagatatgtaaaagtacactcagaagaataactcgtatatatactagcagtatataaaatgtggatttacaaaaaaacaaaaaataagagttatcgtatacatatgtttctggcatcaatgagaagatcattcatataactgagcaatgcagacgtaactcgcaaaaaactaaaacagaaccaa

SEQ ID NO: 106429 - DNA, 1139 bp, Zea Mays
gctccggtcactccttgtccctgagtcctgttcaagaatcaagacaaactggcaacgagaaactagcggatttcctgaatcctgagttcctcaccggcgaggcgagcacggaaaaaatcgcatggccttgcagcacgcaggtccagctagctctacgctgaccaccggccgtcatggcaggagcgccgcagccgtcctccgtaggccaccgacgggttctagcagccgtttgagggcgcatgcgcagaaacccgtcgccggatcccgttcccgtggcgcgggagccgagaccgcgacgtccccctcatcctcccgctcggagaacgccgtcctcaaggccgcctggtacggctccgagctcctcggcatcgccgcgtcgcttctccggcccgcgccgtcgtcgcctcaggagggggatgctggcggtggcggtgacgcagagggcgaagcggcggcggtggcgggggccctggacctggaccacgcgggagtggccgaggccattaaggcggacttcgcgcggtcgtacttcgtcacagggaatctcacgctgagagcttacgaggaggactgcgagttcgccgacccggcgggctcgttcagaggcctgcggcggttcaaacggaactgcactaattttgggtctctgctcgagaaatcgaacatgaagctcactaaatgggaggacctggaggacaagtcgatcgggcactggcgtttcagctgtgtcatgtcgttcccctggaggcctattctgtcagcaaccgggtacacggaatactatttcgatgctgaatcggggaaggtgtgcaggcacgtcgaaaattggaacgttccaaagatggcgctccttcggcagattttcaggccgagccgatgggtctgggagaagcgttaaagcctgcagtggccgttgttttatgttccaaaccaaaatgcatgtgcgtgtacgtactagatatgtaaaagtacactcagaagaataactcgtatatatactagcagtatataaaatgtggatttacaaaaaaacaaaaaataagagttatcgtatacatatgtttctggcatcaatgagaagatcattcatataactgagcaatgcagacgtaactcgcaaaaaactaaaacagaaccaa

SEQ ID NO: 106430 - DNA, 1061 bp, Zea Mays
accggcgaggcgagcacggaaaaaatcgcatggccttgcagcacgcaggtccagctagctctacgctgaccaccggccgtcatggcaggagcgccgcagccgtcctccgtaggccaccgacgggttctagcagccgtttgagggcgcatgcgcagaaacccgtcgccggatcccgttcccgtggcgcgggagccgagaccgcgacgtccccctcatcctcccgctcggagaacgccgtcctcaaggccgcctggtacggctccgagctcctcggcatcgccgcgtcgcttctccggcccgcgccgtcgtcgcctcaggagggggatgctggcggtggcggtgacgcagagggcgaagcggcggcggtggcgggggccctggacctggaccacgcgggagtggccgaggccattaaggcggacttcgcgcggtcgtacttcgtcacagggaatctcacgctgagagcttacgaggaggactgcgagttcgccgacccggcgggctcgttcagaggcctgcggcggttcaaacggaactgcactaattttgggtctctgctcgagaaatcgaacatgaagctcactaaatgggaggacctggaggacaagtcgatcgggcactggcgtttcagctgtgtcatgtcgttcccctggaggcctattctgtcagcaaccgggtacacggaatactatttcgatgctgaatcggggaaggtgtgcaggcacgtcgaaaattggaacgttccaaagatggcgctccttcggcagattttcaggccgagccgatgggtctgggagaagcgttaaagcctgcagtggccgttgttttatgttccaaaccaaaatgcatgtgcgtgtacgtactagatatgtaaaagtacactcagaagaataactcgtatatatactagcagtatataaaatgtggatttacaaaaaaacaaaaaataagagttatcgtatacatgcaaggcccaccgcggcccatattcaggaactttcggccgtatttcttcatgtgctcggccctttttacacagacaggggctcctagggtttctt

SEQ ID NO: 106431 - DNA, 1480 bp, Zea Mays
actacgaggcaaacgacccagcatataaggtccagacggccggtggccaccgtccaagactcctgtgagccgcgagcgcgacacgagcgcacacgtacactcttctacgccgcgagagtgctagggatgagccccggcgccggtactgccaagaagcgtctcggcgttggcgccgtcgccggcggggggttcgcgctcgggtgcggctgcagggacgccaaggccgtggcggtggcggtggcatcgtcgtccgtgtcaccctactctgccgccaccagcgccacggagacgacgacatcgacggcgacgaccgcgacgtggcgcagggcgaggacgacgacgcacccgtcgtcggcgtccgggtccacgggcacgctcaccgtgccctccgcgtcgtcgtcgtccttcccgtgggaggacatggacgccgagggcgatggcgaggaggtggactgcaagagggagagctcggcggccacgacgagcttctccggcctgctgcgccagctcaacgagctcgagcagagcgtcgtgtcgtgggggcggaagagcgccagcaaggattacttgtcgccgcctccgccgccgccgttaccagcgcggtcatcagcgaagcaacgagctgtgcacagcggtggcggcgacagcaaagaaggtcacggcaacttctctccgccgccgcaggcgctgcgtcctttccagttccagactacgcagcagcaccggaagtcaaagagcatggacaaggacaaagcagcaagacaagttgaagtggtccactccaagcaaccgccgccgccgccgccaccaccacctccatcattgtcagtaccgccggagcagctcaaggtgaagagcacggacgacaaaggctgcaagaaagaagccgccaacgtttccccggcaccgcaggccccgaaccaccggaaagcaagaagctgcgacgccggcgccggcactggccccggccccgcgaggctcgacgggagcgtggccgtggccgtggtgaagcagtccgacgacccgctgagcgacttccggcgctccatggtgaacatgatcgtggagaaccggatcgcgacgtgcgacgagctccgcgacctgctccgccacttcctcgcgctgaacgcgccgcaccaccacgacgccatcctccgggccttcaccgagatctgggacgaggcgttctccgccaagacggcccgcggccaccgagagcccgtcgtcgccaccaggacgacgactccgccgcggccgcggcccagggcaccgacgccgccgcgccgccggcacgccccgcctccgccggcatggcgctaacgcgtacgtgtggtcaccagtcaccacttgttactacagtacttactagcagcattacgaacagtgtagctggctcatgcatcggtttacttagccccgtaccgcgaatctacctcatgctgaaatgcagatgttctccagatttgtttgttcatgcttt

SEQ ID NO: 106432 - DNA, 804 bp, Zea Mays
cgggccaaacaaaattgaaacagaagtgagcaaaactgcaaaagcagtgcacgtatatatgcaggacgactcgacgaccagcggcatgcccgccgccggtgtaacgcgcggggccggctatatatgcacgcaatacacagcctggacccggccggccgcgtgtcggctctccactagcagccgctgcagctccaccatggaggccgcggggcctgcgaagccggaccaccaccccgcagccgcagccaaggagggggccggctgcccgcggcggtctgcgccgtggtcgtcgtggctgtccgccgcggccgcggggctcgtcgcggtggggctcggtggcgcggcgctgctggtgtggtgggcgctggcgttccacccggcgaacgcgcggctctggatggtgcccgcggggctcgtcctcctcggcacgcccgtcctggcctggctctccctcctcggctccggcccgtgcggccgccaggccgcgccaccgcccgatgctggcgtgtacgcgtcagcttagcttgctgctgcctgcccgtactgcttttttcgtgtgtgtgcgcgcgcgcgatcgatgttcaattcatgcccagctacttcggcgcttgcttgtacatacatgtttcatcagagcaccgcccgtagtttagtttcgttattgcttcttcacaattttgtaatcggatgaacatatatacaccctatgcttacatgtacatgcatgtttccttccgctggttaatctcttcggtacttggatcttataaagaaaaatataaatatgcgttcttgcaagtaaaa

SEQ ID NO: 106433 - DNA, 1753 bp, Zea Mays
aactacctgggccgccaccgccacagccccgccccgccccgcccccgcctcccgagctgagcgagcgactcagcaagcgcgcaacggaaccagccgccgcggcgcgccatggcgccgttccagatgcgtttcgggctccagatctctcccgcgcgctccgacgacgacgaggaggaggacgacgacgacgacaacgaggaggagtatgacgagatggcgagcgaggggacggcctcgccgccgatgatgctccggccagggaggggagggggagggctggtgagcgccgtcgtgggcgcgctgcggaggtcgctggtgatgtgcagcgctggcgccgtggatatcgacgacgacgacgacgaggaggagggcgggatcgagatcgggcggcccacggacgtgcaccacgtctcgcacgtcaccttcgaccgctttggtggcttcctcggcctccccgcggacctcgaacccgaagtgccgcggcgcacgccgagtgccagtgtaagcgtatttggggtttcacctacctctctgcaatgttcatatgatccaagaggaaacagtgtgcccacaatattgctaatgatgcagaggaagttatatgatcgcggaggacttaaggttgaagggatctttaggattaatgcagaaaatagccaggaagtctatgtgagggaccaattaaacagtggagtggttccaaatgaagttgacttgcactgccttgccgggttgataaaggcatggtttcgggagcttccttcaggtgtattggatgcactgacaccagaacaagtgatgcactgcaacacggaaggggggtgcgctctccttgcttctatgctaccaccagtggaagcagcattacttgactgggcaattaatctgatggccgatgttgtagagcaagaaaactacaacaagatgaacgcccggaacatcgcgatggtttttgcgcccaatatgactcagatggccgatccgttaactgccctgatacatgcggttcaggtgatgaatttcctcaagaccttaatcttgaagactctaaaggaacgaaacaaaaaggatgaggcacttgaggcgttgcaaccatgctccagctctccaaatgaccaagacgaacatcaggtgtccgagcatttggagaaaccttcagttctgccaaatcaaaaaggcttcggtttccacatgaatgatagtgccactcctgttcaagtccttggagctgagaaaactctccatcatcactcacaaatccgttctcacgagccaaaaaagtttggaaccgatatggaccacaagaaaagacagagtgatgcctcctctctcctcggcagcgattcgagcaaccgattcaacagttctgggagagaattcggtagcagaaatggcgcgtccgacagatttagttttaggaaaggggtggagaggctttgcaggcatcccgtgtttcagttgaataggtccatgaagaagtctacagatgccgtggtcttcgatgccccccgagaaacaagacaggcttgggtgtgatacaataacgacattgtatgtattatgtagttctgtttccacctgtgtttcagctgataagccgttcccactagtctgtgtgagtagaatcggttagcctcttaggtgttacaaaatcgaggttatttggagtgtacattatcgcagtttactcttccgacgaaagtgtcaggagaagtagtacacactgtacactagcacttggcttctgcggaac

SEQ ID NO: 106434 - DNA, 637 bp, Zea Mays
aactacctgggccgccaccgccacagccccgccccgccccgcccccgcctcccgagctgagcgagcgactcagcaagcgcgcaacggaaccagccgccgcggcgcgccatggcgccgttccagatgcgtttcgggctccagatctctcccgcgcgctccgacgacgacgaggaggaggacgacgacgacgacaacgaggaggagtatgacgagatggcgagcgaggggacggcctcgccgccgatgatgctccggccagggaggggagggggagggctggtgagcgccgtcgtgggcgcgctgcggaggtcgctggtgatgtgcagcgctggcgccgtggatatcgacgacgacgacgacgaggaggagggcgggatcgagatcgggcggcccacggacgtgcaccacgtctcgcacgtcaccttcgaccgctttggtggcttcctcggcctccccgcggacctcgaacccgaagtgccgcggcgcacgccgagtgccaggtgagctcgccagtcgccgctgccgctgccgtgcgggtgattacgcttcgattttcgcttcagctgtaactttgtgtgccttagtttttcccgactgcttccgtgacggaactgtagctttctgatgaagtgcccgt

SEQ ID NO: 106435 - DNA, 1703 bp, Zea Mays
ttcgtgctcgtgtcgagaacccaatccggtccactgagcccaaccataccggcggctctctgtttctcgaatacccgatcctatcgcatcgaatcgaaactgttccgctcccactccgatcggattcggtgggacggtggcatctatgcgcccgtcgcaccgtcgctcaaactgtataaacctgcgcccgaacacttcgagctcacccgcaacctcctccgggaagcgcgatcgccgtctcgaaggagctgaaatccaagattccaagctcttctgtcagttgagggaagttgaagcaaaagtctaagcaaaaatgttttacgggggatatgcttaccatggcaactcgtttgagcaaacataccgttgttatccagcatcgttttttgataagccacacctggaaggcggtgataaagtaataatgccaccttctgcccttgatcgtcttgcttccttgcacatcgagtaccctatgctatttgagctgcacaatgatgcaacccagcggatttcacactgtggtgttttggagtttgttgcagaagaaggcatgatcatcatgccctattggatgatgcaaaacatgctgcttcaagagggtgacactgtccatgtaaaaaatgcgactcttcccaagggcacatatgtgaaattgcaacctcacacaactgattttctggatatttcaaacccgaaagccatcttggaaaaaactttaagaaatttctcctgcttaaccacgggagacagcatcatggtagcctacaacaacaaacaatattatattgatattgttgaaacaaagcctgcttctgcggttagcattattgagacagactgtgaagtggactttgcgcctcctcttgattataaagaacctgagaaaccacgacaaccaacagttcctgcaagcaaggcacctgctgaagatggcaacactgcagtggaggatgaaccaaaattcaaaccatttactggttttggaaagcggttggatggaaaagcctcaaaactgcaagcatcagaggttccttccactgcactttctgcaccttcagattcaaacaaaagagcaaatcagcaaatctcagcacccgcagcttcaggagctagcaattacagtcgacagaaaactgggaaacttgtttttggttcaagtgcaagcaacaataaggaaccacaaaaggctcctgctaaagaggagcaacccgcaaagaaggacgacgagctgaggttccaagcgttcagcgggaagagctactcattgaaacgttagctgcttcagttaaccttcaaattcgccgctactctttcgtttcgtgcatggtgggtgttctggcacctggtcaccaccatgtagatatgaattgaagtatgtatatgcttatcttgatggaaacatgacagtctgtttatttaagcccaaaagtttaaaacagcgctattgttcttacccagtgtgtgttttggaatctgctcctgttaattttcgggccatggtttcggattagtagaccaaagcaggatactgaacgtgtcagcaatcattattagcggcagacgagatgtgatgatcgttgggccctgggagtttggtcatgtaccaatattatagaccgtactccaagtctccaatactgattgctgaatattgaacgaggagcaagtaaacaagctccttcaggtctcagttgccattc

SEQ ID NO: 106436 - DNA, 1785 bp, Zea Mays
gccctaggcaagatcattttagacccaagaatactgatcctggcctcatgggcccatggatgctccgtgcgatcgtgcattcgtgctcgtgtcgagaacccaatccggtccactgagcccaaccataccggcggctctctgtttctcgaatacccgatcctatcgcatcgaatcgaaactgttccgctcccactccgatcggattcggtgggacggtggcatctatgcgcccgtcgcaccgtcgctcaaactgtataaacctgcgcccgaacacttcgagctcacccgcaacctcctccgggaagcgcgatcgccgtctcgaaggagctgaaatccaagattccaagctcttctgtcacaggttgagggaagttgaagcaaaagtctaagcaaaaatgttttacgggggatatgcttaccatggcaactcgtttgagcaaacataccgttgttatccagcatcgttttttgataagccacacctggaaggcggtgataaagtaataatgccaccttctgcccttgatcgtcttgcttccttgcacatcgagtaccctatgctatttgagctgcacaatgatgcaacccagcggatttcacactgtggtgttttggagtttgttgcagaagaaggcatgatcatcatgccctattggatgatgcaaaacatgctgcttcaagagggtgacactgtccatgtaaaaaatgcgactcttcccaagggcacatatgtgaaattgcaacctcacacaactgattttctggatatttcaaacccgaaagccatcttggaaaaaactttaagaaatttctcctgcttaaccacgggagacagcatcatggtagcctacaacaacaaacaatattatattgatattgttgaaacaaagcctgcttctgcggttagcattattgagacagactgtgaagtggactttgcgcctcctcttgattataaagaacctgagaaaccacgacaaccaacagttcctgcaagcaaggcacctgctgaagatggcaacactgcagtggaggatgaaccaaaattcaaaccatttactggttttggaaagcggttggatggaaaagcctcaaaactgcaagcatcagaggttccttccactgcactttctgcaccttcagattcaaacaaaagagcaaatcagcaaatctcagcacccgcagcttcaggagctagcaattacagtcgacagaaaactgggaaacttgtttttggttcaagtgcaagcaacaataaggaaccacaaaaggctcctgctaaagaggagcaacccgcaaagaaggacgacgagctgaggttccaagcgttcagcgggaagagctactcattgaaacgttagctgcttcagttaaccttcaaattcgccgctactctttcgtttcgtgcatggtgggtgttctggcacctggtcaccaccatgtagatatgaattgaagtatgtatatgcttatcttgatggaaacatgacagtctgtttatttaagcccaaaagtttaaaacagcgctattgttcttacccagtgtgtgttttggaatctgctcctgttaattttcgggccatggtttcggattagtagaccaaagcaggatactgaacgtgtcagcaatcattattagcggcagacgagatgtgatgatcgttgggccctgggagtttggtcatgtaccaatattatagaccgtactccaagtctccaatactgattgctgaatattgaacgaggagcaagtaaacaagctccttcaggtctcagttgccattc

SEQ ID NO: 106437 - DNA, 4242 bp, Zea Mays
ccatctccatgagagcctaggcgccacagccgccaaagttgacaagacagggggagtaaaagaggcggctctcttctctccaccctctccttctcccggtcgcccgcgatgccgccgtcgcggtcgttgttcctgctgctcatgctggcgctggcgccgctcgcgtcgctgaccgcgccggcgccggcgccggtggcgaggacagccggggtgcaggcggagatcgacgcgctgctcgcgttccgccgcggcctgcgcgacccctacggcgccatgtccgggtgggacgcggcgtccccctccgcgccctgctcctggcgcggcgtcgcgtgcgcgcagggcggccgcgtcgtcgagctgcagctcccgcggctccgtctctcgggccccatctcgccagcgctcggctcgctgccgtacctcgagcggctcagcctccggtccaacgacctctccggcgccatcccgccgtcgctggcccgcgtcacctccctgcgcgccgtcttcctccagtccaactcgctctccggccccattccccagtccttcctcgccaacctcaccagcctcgacaccttcgacgtgtccggcaacctcctgtccggccccgtccccgtctcgcttcctcccagcttgaagtacctcgacctatcctccaacgccttctccggaaccatcccgtcgaacattagcgcctccaccgccagcctccagttcttgaacctgtccttcaaccgactccggggcaccgtcccggcgtcgctgggaaacttgcaggacctgcactacctctggctggacgggaaccttctcgaggggaccatcccggccgcgctggcaaactgctcggcgctgctccacctgagccttcaggggaactcgctccgcggcatcttgccgtctgcggtcgccgcgatacccacgctgcagattctctccgtgtcgcggaaccagctcaccggcgccatcccggcggcggcgtttggtcgtcaggggaactcgtccctgcgcattgtgcagctcggcggcaacgagttctctcaggtggacgtgccgggaggtctcgccgcggatcttcaggtggtggacctgggaggcaacaagctagctggtccattcccggcttggcttgctggggcggggggactgacgctgctcgacctctcgggcaatgcgttcaccggagagttgccgccagcgctcgggcagctcactgcgctgctggagctgcgcctcggcggtaatgctttcgctggcgccgtgcctgcggagattggcagatgcggcgcactccaggtacttgatctcgaggacaatcacttcaccggcgaggtgccgtcagctcttggcggtctcccgaggctcagggaggtctatcttggtgggaacactttctccggcgagattccggcgagcttggggaatctgtcgtggctagaggcattgtccataccgaggaacagactcactggtggcctttctggtgagctcttccagctggggaacctgacgttcctggacctatcagagaacaacctcgccggtgagatacctctggccatcggtaacctgttggctctccagagcttaaatttgagcggcaatgccttttctggtcacattcctacgaccattagcaacctccagaacctgcgagttcttgatctctctggtcagaagaacctctctggcaatgtcccggcggaactttttggcctaccgcagctgcagtatgtgtcattcgcagacaactccttctctggtgatgttcctgaaggattcagcagtctttggagtctgcgcgacctcaatctctccggcaattcattcactgggtcaataccggcgacatatgggtacttgccgtcacttcaagtgctctcggcctcacacaaccacatttctggggagctgccaccggagcttgccaattgttccaaccttactgtgcttgagctcagtggcaaccagctgaccggctccatcccgagtgacctctcgcgccttggtgaattggaagagctggacctcagttacaatcagttttcaggcaagataccaccagagatatccaattgctcatcactcacccttctcaagcttgatgacaatcgtattggcggagacataccagcctctattgccaacctctcaaagctgcagacgcttgacctgtcgtccaacaatcttaccggcagcatccctgcatcgttggctcagattcctggccttgtgtcattcaatgtgtcacacaacgagctttctggtgagataccggcaatgctcggctcccgctttggttctgcttcagcgtatgcttcaaacccagatttgtgtgggccgccattggagagtgagtgcggagagcagcggcggcggcagagacggcagaaggtgcagcgcctggctctgctaattggtgtggtggctgctgccgtgctgctccttgcgctgttgtgctgttgctgcgtgtttagcttgctgcgatggaggcgtcggttcattgagagccgtgatggtgtgaagaagaggagacgcagcccgggacgcggcagtgggtcgagtggcacaagcacggagaacggtgtcagccagccgaagctgattatgttcaactcaaggatcacttatgccgacactgttgaggcaacccgccagtttgacgaggagaacgtgctcagccgaggccgccatggcctcgtgttcaaggcttgttacagtgacggcaccgtgctggcgattctgcggctcccgtccacgtctgcggatggtgccgtggtgattgatgaagggtcgttcaggaaagaggccgagtctctcgggaaggtgaagcacaggaacctgactgtgctccgtggctactacgccggtcctccgccggatgtccggctgctggtctacgactacatgcccaacggcaacctcgccacgttgctgcaggaagcgtcgcaccaggacgggcacatcctcaactggccaatgaggcacctcatcgcgctgggcgtctcgcgcggccttgcgttcctgcatcagtccggcgtcgtgcacggcgacgtgaagccgcagaacatcctcttcgacgccgacttcgagccgcacctgtcggacttcggcctggagccgatggtggtgaccgcgggtgccgccgcggcagccgccgccgcgtcgacatcagctgcgacacccgtgggctcgctcgggtacgtcgcccccgacgcggccgcggccgggcaggccacgagggaaggcgacgtgtacagcttcggcatcgtgctgctggagctcctgacgggccggcgccccggcatcttcgccggggaggaggaggacatcgtgaagtgggtgaagcggcagctgcagcgcggcgccgtggcggagctgctggagccgggcctgctggagctggacccggagtcctccgagtgggaggagttcctgctgggcatcaaggtcgggctgctctgcaccgcgtcggacccgctggaccgcccggccatgggcgacgtggtgttcatgctggagggctgccgcgtcggcccggacatcccgtcctccgccgaccccacctcccagccgtcgccggcctgatctcccgtcggcccacggccggcactgccgcctgtcagattcaattcggtagcttgttccattttttttctctctttcgatgattgttttttccccttaattagttcagataattagtggtagtctcatctatgcctgccggcgtgcggccgtcgacggacgaactgatccgtgaggccgggaaccgtttcccgccaaggaaggaactagccgttgggcgtctcgtttggttagcggaggcgtacggcaccgggcatggggagggagcaaggaaccatgtggcgcactgctcagaggcgcttggcacggcctgatggcaggcccctgccatgccaagcccaaagcgtgtcgtggtgctgcgcatgtggggtttccctgcccaggcatcggcaacggctactgatgccggacatggctgtcgcctcctggccactgatctcggccgatctgtaccacgaccacgacccatgtactctctagaggggcctgcttggcttcctgggatcctgtcttttaatcttgtttcaccaaagcaacaacgacctctttgtgccatgtgctgtacaattgtctgtgtcttgttatcctgattggtgcagtgggggtgggtggatggatgatggtcatgaccgttagcttgttctgttctcttca

SEQ ID NO: 106438 - DNA, 2454 bp, Zea Mays
aatttcttcgccctccaccagtgagcacgccagccaccgcccctttcctgttgcccagcgcccccctgcagcgcgcccgcccgcccgcctccctaccctggccgcggcggccttcgctccatgcacctgctttaggttgcgccgccgtgcgccctcgctgtgccggccgacctcgccgcggcctgacccagtcatcgtccctgcttcatctccccgtcatgctcctccatgggcgtggtgatcacctatgccgtcgtagccatgccttgggcgccacaccggccgtcagcctcatctctctgctcgcctgtctccttgcctccctgtgctcaccacgccggacgccgctcccaaccctccacacttccctccccaggccgcggcggccttcgctccagctctgcctcgccatcgactgagtccccacgtccctgcgcggcgacgtgctcgcccaggccctgccaaggactcctgcgaactccaacctcatcgcctagccccgccaccgtttctaaagtggtgatccacaacttccctctgttgtcagtgaatacaatttttgctagtaccttgctgatgtatgtgtgtaccgtgtacgtgtgtgcaattggagcataggaatcccatgaatgtgtggagaagcaagccccaacacgacgcccgctagattttcgataaaatgagtgaactagggtttcgtcgttgttcttgcaaatatcgaatttagtcttggtgggctaattctctatttttgttcgttggttgattgatggactgataattctctaggagtgtgtaggttcatgatcattttttatttctgattctgaaaacaattggttcctagtaaagatattttacttgagtgggtgtggtcagattttgtattgtccaaaatccgtgatttctctgttagggcccatactaacgttagtctagttcttggttttcttctaattttaatttggcttactcgctcagtatgaccacattcattattaaattattagtcatattgtacagttgctttcagacatttattaggcattggatattattattagcaaaagcaacttgcttaccgtactccttttttgagctgtgatatgtgaaattgaagtgattgatctcgtggcactgttagtattgttggtcattagattgattgccaggaacgaatggaactcttcctctactgaatctgttatgctttagatctttaggttgatgtgaatgtagtttcatgaaattttatactatttaataatgtttatccgttagatcaaatggtatgttatcctaatcagctagtgtatgattccattaatgtagtgttggtttccaggcaagccccaatgcatacaaccctatggttgtgcttttaaatgttttttaatactcttaagtctagtgagttgtgcattaggtgaaaatgaaatagaatgtgctccctattcagagtccctttgtacacttattttttcctaaaattctcgggagtcctgatctatttggaattttggatggagggagtagtatcttgggctgatgaggatactctggttgttcgcgttccataaattttgttgcattgtggtgagagtttgagaatgttctatgtttgttctatcatttttgcttcaaattctcatgtgttctgcatgtgctccttgtgcggagttcgagaatttcctacattatgtacttacttattcatttcaagttgtctttattgaatatttgtttgtttgtgaaaatgttgtatcattgtggccataagttatttagggaataactctggttgcagatgatccattcagcatgtcctcgtgctcatcgcatggatcatatctgggctcacactggggctcgtcgctcggcctcgtcgagctagagatcctccaacatagcagcacagacgccaagaaggcttagctgtcatccttctagttgttcaaaagcagcactagcttcatgtcaccctattgttgtgtaatgttgctgccatggagcctttgcaggcacttcctatatttcttgataggatgtttcatcatgttcttgctgtaatattgtcagtgacatttgttcttgcctttggagagggatcatatctgagctcagactggggctcatgtcgctcggcctaatgtagcagcacagtcatttcaggagaccattgatagtatgatgaggtcgatgcaaaaaaaaataacaaccaccttcatcaactattaagcttcagtcgaggtcaagcgtgtccatctttaagtctgcttgaccactataggatctgtaaccttatggatgttatagtagctagtaacaatatgcttaatatttagtacttgagttgaagttataggattttctttggaattgaagttaaaggatttgtagatatatgttttgacgttatatgattctctaatggatgaaatattcgtgttcaac

SEQ ID NO: 106439 - DNA, 2268 bp, Zea Mays
aatttcttcgccctccaccagtgagcacgccagccaccgcccctttcctgttgcccagcgcccccctgcagcgcgcccgcccgcccgcctccctaccctggccgcggcggccttcgctccatgcacctgctttaggttgcgccgccgtgcgccctcgctgtgccggccgacctcgccgcggcctgacccagtcatcgtccctgcttcatctccccgtcatgctcctccatgggcgtggtgatcacctatgccgtcgtagccatgccttgggcgccacaccggccgtcagcctcatctctctgctcgcctgtctccttgcctccctgtgctcaccacgccggacgccgctcccaaccctccacacttccctccccaggccgcggcggccttcgctccagctctgcctcgccatcgactgagtccccacgtccctgcgcggcgacgtgctcgcccaggccctgccaaggactcctgcgaactccaacctcatcgcctagccccgccaccgtttctaaagtggtgatccacaacttccctctgttgtcagtgaatacaatttttgctagtaccttgctgatgtatgtgtgtaccgtgtacgtgtgtgcaattggagcataggaatcccatgaatgtgtggagaagcaagccccaacacgacgcccgctagattttcgataaaatgagtgaactagggtttcgtcgttgttcttgcaaatatcgaatttagtcttggtgggctaattctctatttttgttcgttggttgattgatggactgataattctctaggagtgtgtaggttcatgatcattttttatttctgattctgaaaacaattggttcctagtaaagatattttacttgagtgggtgtggtcagattttgtattgtccaaaatccgtgatttctctgttagggcccatactaacgttagtctagttcttggttttcttctaattttaatttggcttactcgctcagtatgaccacattcattattaaattattagtcatattgtacagttgctttcagacatttattaggcattggatattattattagcaaaagcaacttgcttaccgtactccttttttgagctgtgatatgtgaaattgaagtgattgatctcgtggcactgttagtattgttggtcattagattgattgccaggaacgaatggaactcttcctctactgaatctgttatgctttagatctttaggttgatgtgaatgtagtttcatgaaattttatactatttaataatgtttatccgttagatcaaatggtatgttatcctaatcagctagtgtatgattccattaatgtagtgttggtttccaggcaagccccaatgcatacaaccctatggttgtgcttttaaatgttttttaatactcttaagtctagtgagttgtgcattaggtgaaaatgaaatagaatgtgctccctattcagagtccctttgtacacttattttttcctaaaattctcgggagtcctgatctatttggaattttggatggagggagtagtatcttgggctgatgaggatactctggttgttcgcgttccataaattttgttgcattgtggtgagagtttgagaatgttctatgtttgttctatcatttttgcttcaaattctcatgtgttctgcatgtgctccttgtgcggagttcgagaatttcctacattatgtacttacttattcatttcaagttgtctttattgaatatttgtttgtttgtgaaaatgttgtatcattgtggccataagttatttagggaataactctggttgcagatgatccattcagcatgtcctcgtgctcatcgcatggatcatatctgggctcacactggggctcgtcgctcggcctcgtcgagctagagatcctccaacatagcagcacagacgccaagaaggcttaggttggtccaatctgaacccctacatattccctgttgttacctcgttgtgctcgatctggttactgccctatgtgtgggtttgttatattggtagtggagatctcactgtcgtggcttgttacattaggtaatagggatgagagcatcatatactctattggattctcaaattcctctgcaattttgaacattagagcgtctttagtgtatgtggtgaatttttttctcgcccctattagaagtctgctagattttgtaggtggtggtaatgatagtgaggatataatctgatggtaacaccaacattgacatattatttacatgtagaagtgt

SEQ ID NO: 106440 - DNA, 1295 bp, Zea Mays
tcactccaaccaccaaccagaacgcccgacggccgtgccggttccctgcctccgccgcgccgcgtcgccacctcgcgcgcactaatccttgccattgctctgcgtggcaacattcaaatggatacgggaagcgggcccggcctccagtaccttctgtgcctcgcctgggtcgcggccaccctccccatcgccgctgccgcgctgccgatccccagggccgccggcggccgtttcatccatggcctgctctgcgccttttcatcccgcgggaagacagtcaggccttcgtcctcgtcctcgtccaaggtcctgagacgcctatatgagactgaacatgtcttccactacagcccttcagctcgaatgcacatcataggatatctaacgggtattttctactatgtggctgcacctttatcgcttgctagttcttgtcttcctgaaacaatacagtatcttcggtatcaaatagctgagttcattgtgaagggtcgggcaaaaatgccagatctagcaattgtcccatcacatcttttgaagcctcttctaaagctggggtggtgccagtggattggtgctattattttcatctggggctcactccatcagatccactgccatgcaattcttggatcattgcgtgaacacaaagattctgatgaatatgtaattccttgcggcgactggtttagtcgtgtgtcgtgccctcattaccttgctgaactagtaatatatttttggcatgttgatagctagcggtggatcagacatttcggtgtggttcctatacctttttgtgataacaaacttgtcctttgcagcggtacaaacacataaatggtatcttcggaaatttgaagattaccctcgttctcgttacgcaatcattccatttgtatgctagacgtgtccagaaatgccaaaagcatctgttgctgttttcatccgcttgcacaagtccgacatgcaaacagatattcatgtaaatgtgactgtaccaattgaagcgctgcaatgtttaacttaagtagttctgatcattctgaatgtacttataatgttatgtttgtgtatgtagattgtaatagacaattagacagacatttgatgtacaataggattaattaacactttctagcattgaaaataaagtcctccaggactagagactgtactccctccaatctaaattgtaagacattctggcacttttagatacatggttttgctatgcatttagatatacacaatgtttggatctacgtatttagaaaagccacaatttggaacggagt

SEQ ID NO: 106441 - DNA, 1523 bp, Zea Mays
tcactccaaccaccaaccagaacgcccgacggccgtgccggttccctgcctccgccgcgccgcgtcgccacctcgcgcgcactaatccttgccattgctctgcgtggcaacattcaaatggatacgggaagcgggcccggcctccagtaccttctgtgcctcgcctgggtcgcggccaccctccccatcgccgctgccgcgctgccgatccccagggccgccggcggccgtttcatccatggcctgctctgcgccttttcatcccgcgggaagacagtcaggccttcgtcctcgtcctcgtccaaggcaaggttcaccgttccacaaaaattcttcttccatttttatgtggtcggtgtggttgtgacgactagcttgctacttgcaatatggttctatgcatacatgaaaatgacacctttgattccagaaccatcaagttattactccacaattgctagccatcttgttggtggttcaaattcattctctttgacaaatttctggttgtcacgccccatgaaacacaagtatcatgtctggcgtactgtatttgtactgatattgatggaaattcaggtcctgagacgcctatatgagactgaacatgtcttccactacagcccttcagctcgaatgcacatcataggatatctaacgggtattttctactatgtggctgcacctttatcgcttgctagttcttgtcttcctgaaacaatacagtatcttcggtatcaaatagctgagttcattgtgaagggtcgggcaaaaatgccagatctagcaattgtcccatcacatcttttgaagcctcttctaaagctggggtggtgccagtggattggtgctattattttcatctggggctcactccatcagatccactgccatgcaattcttggatcattgcgtgaacacaaagattctgatgaatatgtaattccttgcggcgactggtttagtcgtgtgtcgtgccctcattaccttgctgaactagtaatatatttttggcatgttgatagctagcggtggatcagacatttcggtgtggttcctatacctttttgtgataacaaacttgtcctttgcagcggtacaaacacataaatggtatcttcggaaatttgaagattaccctcgttctcgttacgcaatcattccatttgtatgctagacgtgtccagaaatgccaaaagcatctgttgctgttttcatccgcttgcacaagtccgacatgcaaacagatattcatgtaaatgtgactgtaccaattgaagcgctgcaatgtttaacttaagtagttctgatcattctgaatgtacttataatgttatgtttgtgtatgtagattgtaatagacaattagacagacatttgatgtacaataggattaattaacactttctagcattgaaaataaagtcctccaggactagagactgtactccctccaatctaaattgtaagacattctggcacttttagatacatggttttgctatgcatttagatatacacaa

SEQ ID NO: 106442 - DNA, 1520 bp, Zea Mays
tcactccaaccaccaaccagaacgcccgacggccgtgccggttccctgcctccgccgcgccgcgtcgccacctcgcgcgcactaatccttgccattgctctgcgtggcaacattcaaatggatacgggaagcgggcccggcctccagtaccttctgtgcctcgcctgggtcgcggccaccctccccatcgccgctgccgcgctgccgatccccagggccgccggcggccgtttcatccatggcctgctctgcgccttttcatcccgcgggaagacagtcaggccttcgtcctcgtcctcgtccaagaggttcaccgttccacaaaaattcttcttccatttttatgtggtcggtgtggttgtgacgactagcttgctacttgcaatatggttctatgcatacatgaaaatgacacctttgattccagaaccatcaagttattactccacaattgctagccatcttgttggtggttcaaattcattctctttgacaaatttctggttgtcacgccccatgaaacacaagtatcatgtctggcgtactgtatttgtactgatattgatggaaattcaggtcctgagacgcctatatgagactgaacatgtcttccactacagcccttcagctcgaatgcacatcataggatatctaacgggtattttctactatgtggctgcacctttatcgcttgctagttcttgtcttcctgaaacaatacagtatcttcggtatcaaatagctgagttcattgtgaagggtcgggcaaaaatgccagatctagcaattgtcccatcacatcttttgaagcctcttctaaagctggggtggtgccagtggattggtgctattattttcatctggggctcactccatcagatccactgccatgcaattcttggatcattgcgtgaacacaaagattctgatgaatatgtaattccttgcggcgactggtttagtcgtgtgtcgtgccctcattaccttgctgaactagtaatatatttttggcatgttgatagctagcggtggatcagacatttcggtgtggttcctatacctttttgtgataacaaacttgtcctttgcagcggtacaaacacataaatggtatcttcggaaatttgaagattaccctcgttctcgttacgcaatcattccatttgtatgctagacgtgtccagaaatgccaaaagcatctgttgctgttttcatccgcttgcacaagtccgacatgcaaacagatattcatgtaaatgtgactgtaccaattgaagcgctgcaatgtttaacttaagtagttctgatcattctgaatgtacttataatgttatgtttgtgtatgtagattgtaatagacaattagacagacatttgatgtacaataggattaattaacactttctagcattgaaaataaagtcctccaggactagagactgtactccctccaatctaaattgtaagacattctggcacttttagatacatggttttgctatgcatttagatatacacaa

SEQ ID NO: 106443 - DNA, 2197 bp, Zea Mays
tccacatctcgtgacttggccattggcttcttcctttggagcaaaaaggcatggccagcagcaatccatctcctccccatcgaccaaccacttggacagcaatggcctgcccttgccccggctttgtccacgtacgcactcggtggcgccggccggtgcacgtgaaagcaccggtcatgttgacatagtgccgccgccgagcatatattggcgccgccgcacgtaactcgaccggcacttctgctcgcgcctcgatcatcacttggctgcagaaatggcagccgatccttcgtcctcttccacggggcaacaaacggcggacatccgcgcggccccgcccgaggactcgaggcagatggcaatgagcgggccgctcaatgtccggggcgaccggaggccgccgccgatgcagagggccttcagccggcaggtctcgctcggcagcggcgtgacggtgctgggcatggacagagcggggaggagcggtggcgcaaggggccaacggaccctcccccgcagtggtaggagcctcggggtgctcaaccacagcggcggcttggtccaggccgccggcgacggcgccgcgcgcagggttggcgacttcagcatgttccggaccaagtcgacgctgagcaagcagaactcgatgctgccgacgaggatcagggagtccgacctcgaactgcccacgcacgtcgaagacccgcagtccgccagcagcaggccggcggaggacccgctcaacaagagcgtccccgccggccgctacttcgcggcgctccgtggccctgagctcgacgaagtccgcgatactgaggacatcctgttgcccaaggacgaggtgtggccgttcctgctgcggttcccgatcggctgcttcggtgtgtgcctgggcctcggcagccaggccatcctgtggggcgcgctggcggcgagcccggcgatgcgcttcctccacgtcacgcccatgatcaacgtcgcgctgtggctgctggcggtcgccgtgctcgtcgcgacgtccgtcacctacgcgctcaagtgcatcttctacttcgaggccatccgacgcgagtacttccacccggtccgcgtcaatttcttcttcgcgccgtggatcgcggccatgttcgtgaccatcggcctaccccgctcctacgcgcccgagcggccgcacccggccgtgtggtgcgccttcgtcctgccgctcttcgcgctcgagctcaagatatacgggcagtggctgtccggcggcaagcggcggctgtgcaaggtggccaacccgtcgtcccacctctcggtggtgggcaacttcgtcggggccatactggcggcgagggtcgggtggacggaggccggcaagctcctgtgggccatcggggtcgcgcactacatcgtcgtgttcgtcacgctgtaccagcggctgcccaccaacgaggcgctgcccaaggagctgcacccggtgtactccatgttcatcgccacgccgtcggccgccagcctcgcctgggccgcgatctacggcagcttcgacgccgtggcgcgcaccttcttcttcatggccatcttcttgtacctgtccctcgtcgtgcgcatcaacttcttccgggggttccggttctccctcgcgtggtggtcgtacacgttccccatgaccacggcgtcgctggccaccgtcaagtatgccgaggctgtgccgtgcttcgcgagcagggccctcgcgctgagcctctccctcatgtcgtcgaccatggtgtcgatgctgctcgtgtcgacgctcctgcacgcgctcgtctggcgatcgctctttcccaacgacctggccatcgccatcaccaaggaccggcaaaacggcgcggtgaagccgaatgacagggggaagagggccagcaagagagtgcacgacatcaagcgatgggccaagcaggcgcccctctccctcgtgtcctcaatcaccaagagccactcggcggacaaggaggaagaagagagaactgaataagaatggctcatatagatggattaggatatattattattattatatacattagccagaagaaatgtatttttcccataagtataggaagaacataataataataagtgatgctatacatctcttactttattccctaatgatatagggcagttccgcatatgaaatggccacctagatctacaggaaactgtaagcaaa

SEQ ID NO: 106444 - DNA, 2297 bp, Zea Mays
acaaaactcacgaaccgcacgccacccggaaggccggaacatcggatccacgctcccctttcgccgccaggttcctcctcctcctagatggcgccgctgccgctgccgctgccgccaccgtcagagaagaggccccctcgctcgctctttgaactcccctctgacttcttcgattcatccgttcttctccgggctcacccctccacggccccctccgcggtggaaccgtccgaaccctcccggccgccgccgactcagcagcagcaccaacaactttcagaggctgcggggtccaggtggacgtgcaacacatgtgcctccgagttcgagtcgctacaggagcagcgcgagcactttaagtctgacctgcaccgcctcaacgttaagttgagcatggctggtaaaactattataaaggaagaggacctagataaagcagattctgattctctgtttgatgatttggagatatctagtgtctctggttcagaggacgaacaagaaaatggacctgcatcagaacgtgtactctcggttaaaggcaaggaagaattcaggaagaaactttactttcgttgtgcatcgggtgaaatgatttctatctatagatgcatgctgttgaaagaacatgaagaaccattaattgattgtaagtctggtcagatggagaatgcatcttgtgtacaggaggaggagatgataaatagggtgaagtgtttggcttgtgaaccccgtgacacgtcacatttgagaattgttctactaacaagcggtgggcattttgctggatgtgtgtttgatggaaattctatcatagctcataaaacatttcataggtatgtcgtaagagcaaaggctggtaaaaggcaatctggaaaagatgctactggaaaagttgcacactcagcaggttcttctctacggcgctataatgaagcagcactgaaaaaggaagttcaagaattaattgtttcatggaagtcatactttgagacatgtgtttgtgccttcatttatgctccatctaggaaccgccagatgctcttcgacggggagaagactcagtcagtaattcagtcttgtgatgttcgtccagttccattgactgttcatcgccccaccatgaaggaagcgaaacgggtatattgtaacctaacacaactctactatgagatggaatgttcaaccacagatgaaacactacctgatgctggaagtgtgaaaaatgttgaacaaggtcaaggaaaaaagaatgaagtgactgcagaccctggggaatctatttctgacttgtctgcccgtttggaattgttgaataagaatgaagcagcaaccataccatcatcaaagaacgaaacaacacctcttcatgaggcagcaaagtgtggcaatgctcagctgaccctggagttacttgagcagggtttggatccttgcgtaaaagatgcaagaggaaagacatcttattcgctggcttcagataaggaagttaggaatacattcagaagatttatggcgctcaatcttgacaaatgggactggcatgctgcagatgtgcctagtgcactaacaaaagaaatggaagaatcacaagctgcaaaacaagcagacaaggacgccaaaaggaaagcacgtgcaaaggaattgaagaaattaaaaaaagaaagagaaaaggaagaaaaggagaaggagaaggagaaggctaaggctcaagcatcacaatcacaatctgatgttaaaggcacttcgagcggccaaatggccaacagaactgcaactgcgccaggccttgtaccaaagcatcagacgccacagcaaatacttatagcaaaggaggaggaacgacagagaaaacaagctgaagaaagagagaagagagcagctgcagcagagagaagacttgcggctctcgctgtccaatctgccggaacgagcgcatcaggtgcagcagcaacaaactgctccgcgaagagggcggcaccagatgacaattcgtgttcgtgctgtttcggttccttggtcggcaaggtgccattccaccgatacaactacaaatactgcagcactacatgtatgcatcttcattcagaaatgctgcaggatgattaaggaaaccgcatgatgcgtgattttgatgcaattttacctcatatacaatcaataacaggctttcttccttcccttgtgcctgctttccgtaattttgtcgtgcacatcttcataactttaaaggttcgaaatcacattcgttctggttcgtgctaatgtttttgcttcattttggaacacattttatt

SEQ ID NO: 106445 - DNA, 1703 bp, Zea Mays
atccgccacatgccacacatgtccaacatcgccagcctcatccgggagtcatgagcaacctcccactccccaccaacacgccttcgcctcaccccgtgatgcccgggatctgcaacagtcgccgcctccccctgagcggctgagatgcagctccacgcccgtccgcgtcccccgccgcaggagccacgttgtgcctgccgccagccccgacacctccagatgttgcctccatccatcctccgagcttgccgccccacccccgccgccaaaccctagacccctacaatcgcgaggaaggggagaacgaccgaggaggatgctccgcaaggaagggggggacggtcgaggaggacgttgttgctcgtcgctgagcatcttcgcgccctcattgctgccaaggagccctctctatccctgatggcgccccaaccgttggccgatcgtcggcgatgatgacccagcctccctctccacgtccctgctccccaactcatacaggtgttgtggcgccctcctctccactcccctatctatttggttgtttgatgtctactttcttcgcctctccggttgcggcatggaactacattgactccaaggaagatattctggtctatgctacaaagttgattaaagctgaaatgcctatttctttgagattgatggggttgcggatgtctcagctacatgatgagaaggacgatccatctacttcaacacaaaagacactagatatattctttcattcatcaaacagtaactcaaatggcaatggaaccaatgttcagagaaccactaattccccagggcaggataatgactctattagtctcacaagcaaggagtacttggcacctgatgctggaacaagtgtttccacaggccaacaggatttcttcctacatgatgagaactgttttattcccgaacaacaacggagtttagacaacgatactaaagaggctgtcctaagcgacccgttaggtggaacaaagtcagatgatgtgtcttacaggcaaagcccgaaggctgtgtcttcatcaagtaaacctgaccaacagtcatggattgatggctacatttgttccatctgtggatttgaactgcctctgggcttcgaggaggagaggctggaacattcagattttcacctggctgaaacactccagcaggaagaagcagtggacagcacaagacacatctcaaacgagaggtcggctgggtcgtcgagcccaatggcaccacctacctcaagatcaattttgctgccgatacatgatagcttaggtagcagatgtgatagatcactgcgagttttagttaacatgttggatatcattattcatagattaaataaatgccttccagtggatgggacatgcttgatcaagcaaccgggcgacacctatgacgacttcgccagctccaagcccgacagcgagtgccactacgtcgtcttcgacttggacttgaacaatttttatgcctgtgggagcagtggcgtcagtttgagtgcatttgcattcttgttctctgagttggttcagtacaaccagactcaagttgacaacattactgagctagaacggaggtatgagtctatcattgctacgctttgtgaaagtctggacactttagatgaaccagaggctaaggtcttagtcaatgcacataccttagtaatctattgtatttttgtttag

SEQ ID NO: 106446 - DNA, 1705 bp, Zea Mays
aacagtccgtcccccagcgcagcaccacgatctccatcccccaatcctgcgcctccgccttaccacgccgcacgttctggtccccgtaccgccggtgcgctcctgggccctggcacgcggatcgcctcaaccaaatcgacactcgcgctgacgcgcgatcccgctccctctagttaaactctggatcgactcgcccccgtcgccgccctcatggcactggttcgccccgagcatccaaatccggcagcccgtcgcccgcggctcgtcgtgctcctcctgctcgccttcttcgcccttcagctcctcgtcttcgtcgccttccgcgcagtgcgcccccctcccgccccaccctccgcctccgccgccgccgtgccggtgctggcgtcggtgccgacgcaccgagacgagaacgattcgcgctgcggtggcggcctcgtgtacgtttacgacctccccgaggccttcaacgaggacctgctcgggatgtgcgacgcgctggcgccgatgtactcgctgtgcccctatctcgccaacgacgggctcgggttccctgcgggcgggaccaacctgtcgtcgctcctgccgcggcagctgctcgggtcgtggtacgcgtccgaccagttcgcgctggagcacatcgtgcaccgccgcctgctctcccaccgctgccgcacgacggacccggggcgcgccgcggcgttcttcgtgccattctacgcggggctcgccgtgggccgccacctgtgggcggccaacgccaccggcgctgacagggacagggactgcgtcgcgctgctgtcgtggctacacgcgcagccgtggtaccggcggtcccacggctgggaccacttcatcgcgctcggccgcatcacgtgggacttccgccgcacgacggacgccgggtggggcggcagcttcctcaccatgcccggggtggccaacatcacccgcctcgtcatcgagcgcgacccctgggacggcatggatgtcggcattccgtacccgaccgggttccacccgcgcaccgccgccgacgtgcgcgcgtggcagcggtacgtcgcgcggcgcccgcgccccaggctcttcgccttcgccggcgcgccgcggtcggccatcaagggcgacttccgcgcgctgctgctggaggagtgccaggcggctggggcctgcggcgcgctggactgcgccgagggcaggtgcatcaagaacaacgcgctcgtcatggagctcttcatgggcgccaggttctgcctgcagccgcgcggggacagcttcacgcggcggtcgctgttcgactgcctggtggcgggcgccgtccccgtgctgttctggcggcggagcgcgtacctgcagtacgggtggtacctgcccgtggacgggcgcgagggggagtggtccgtgttcatcgaccgcgaccagctccgcgcggggaacctcacggtgcgcggcgtgctggcggatatcccggagtcgcgggtgcggctgatgcggaagcgcgtggtgaagatgatcccggggcttgtgtactccgcggcgggcgtggagggcatcggtggcggcatgaaggacgccgtggacgtcatggtcgatggcatgctgcggcgggtcgctgagcagcgcccgagatggcggacgacgtgattttagcttctgcaacagagcaaattgatcattcattttttactggggtttttccacaaaaaaa

SEQ ID NO: 106447 - DNA, 340 bp, Zea Mays
gtccttgcattgcctaatttcgctgaagtttttacagttgagactgatgctagtgatgttgggatgggtgcagtgcttatgcaaaaaggacagcctctagcatacttgagcaaggctttatctgagaagaacaaacatttgtccatctatgacaaagagtttttgaccttgattatggcagtagaaagatggagatcttatttgcagtaccaagagtttgttattcttactaatcatcaaagtttgtgttatctggaaagtcagtagctgcaatctgatcttcaaaggaaggctatgtataaactcatgggtttgcagttcagaattgtatatcgaaaag

SEQ ID NO: 106448 - DNA, 240 bp, Zea Mays
atggtcgttcaagtggcggtcaccgaggctacggtagacgccgtagcgggagaggaagaggccacaacgacaggaatcgggagacacatgagacatgcgggtcgtccagcaggaatggtgacggatgccacaactatggcgaacctaaagcattgggcccatgaatgtccaacccgtaggaaggaccatactcgccaaggcggggcaggcacacgtggtgcagcgcaggggctttattga

SEQ ID NO: 106449 - DNA, 1803 bp, Zea Mays
agaatcagaagttcagaaccaaaactggtagtatcaatagcagtatcaatagcaatctagcacttgtcaacctaaccgattcccatccaaccaaccccgcacaccgccgcgggaagcagaagagactggaagagcctacaaaagcttgggggcgcggcagcacaacgcaggatggtgggcttcctccgggccttcgccgccgcttccgctgtgcccgcagcagctgccgcagcctatgctctcttttcatcctccgccccttcctcctccaagctccgcttccctcttcctgactccttcctctccgccgccgcctcctcgacctccgggcgcgctcccaacgccgtgcccccgatggccaccgccgctgccacggctgatctctcggctgccgatgataagcagcgggactcggcgcttccggagctcacgacggaattcatggtggacatgaaatgtgagggatgtgtaacagctgtgaaaaacaagctgcaaactcttgaaggaataaaaaacattgaggtggacttgtctaaccaagtcgttagagttttggggtctcttccagtgaagacaatgttagatgcccttcatcaaacaggtcgagatgcacgactgattggccaagggaacccaaatgatttcttagtttctgctgctgtagctgagtttaaagggcctgttgtatttggtgttgttcgtctggcccaagtaaacatggagttggctagagttgaagccacgtttagtggtctatcacctggtaaacatggatggtcaataaatcagtttggggatttgacaagaggtgcagaaagcactggcaatgtctataatccgccagatcatttatctgataagccacttggtgacctgggaacactagaagctggagagaacggggaagcccatttctcaggaccgaaggagaaattgagagtggttgacttgatcggccgctctattgctttgtatgcaaccgaggacagatcagaccctggcattgccgcagccgtgattgcaagaagcgccggggtaggagagaactacaagaaactctgcacttgtgatggtgtcaccatttgggaatcaagctaaacctgctaccagcgaattttccatactatttacttccgtatgttgtacacacacattaacgtagaaacaatcaaagtggcaactgaacatttggaataagcttgaatacattgaggaataaaggctgttctcatgtggagcttggacagtattttttttgcgtcggttagtggacctgttctgcttctgccgctgcgacacaacagatctctggtttgattacccaaaggttcctgctccattgcttgcttggctaaacgcacagtacacaaacgaagttcacattggtggcagccatgtgaggacgagggggctccggacgacgtggacgccagccaggacgccgtggctccacctttgaactctgtaacctaaccttgacacggtaatggtagtatggtacgtcgaggacgacggacccgacgttcgtcacggtgcgacgcaccgtcagcgcagcagatggccggataattcaagtcaccaggcgagctgaaggtgtgcttgcatgtcttgctcgagttcttggtgaaggacctgagctgcaacggcgtcaggttctccacgcagaggaactgcaggtagtcgtcctggaccatatcgtagaccaggccagacttgagaacacgcagctagcgggcgtatgtggccagctccgtgatcgaacggcgtggacgccttgcagttgcaggtggccgcgtcgttcag

SEQ ID NO: 106450 - DNA, 108 bp, Zea Mays
gggtttttattggtataaaattggtctgctcaatcatgtacatggttcactttttcagtaatatcatgattcagtgtcaagatttaacatggttacctaatagttgcc

SEQ ID NO: 106451 - DNA, 2177 bp, Zea Mays
cacataaataacacacaaagttgtccgatcaaagcttgcgcgtttacaatgtctggacgatcaaggcacttcacaatgtccacccttctcgctacgagcttcttctttgtactcctatgcagctcgctacaagtacgtggcgtgaactacacgttcgtgaaggacgcggcgctggcgcccagcgtgtcgtactacgactacatcatcgtgggcggcggcacggccgggtgcccgctggccgccacgctgtcggagcgcttccgcgtgctgctgctggagcgcggcgcctcgccctacgacgacgaccgcatcggggacatggcccgcttcgcggacacgctgtcggacacctccccgggctcgcccgcgcagcgcttcgtgtcggaggacggcgtcatcaactcgcgcccgcgggtgctgggcggcggcagctgcatcaacgccggcttctacacgcgggccagcgacgactacgtgcggggcgtcgggtgggacctgggcgccgccggggcggcgtaccggtgggtggaggacgtggtggcgttccagccggagctggggccctggcaggccgcgctgcagggcggcctgctcgaggccggggtcgcgccggacaacggcttcacgttcgaccacttcgacgggaccaaggtcggcgggtccatcttcgacgccgacggccggcggcacacggccgcggacctgctgaggtacgcgcgcgccgaggggctcgacgtgctgctacgggccagagtggccaagatcctgttcttcaatgtcagagggaggagatcagggaggcggacagcggcacgcggcgtggtgttccacgactccgaggggcggatgcacaaggcgttcctcagcgcgggccgccggaacgagatcatcctctcggcaggcgccatgggcagcccgcagctactgatgctcagcggcgtcggcccagccgaccacctccgctcgttcggcatccccctcgtgcgcgaccaccccgcggtcggacaggggatgtccgacaaccccatgaacgccatctacgtgccgtcgccttccccggtcgaggtctcgctcatacaggtcgtcggcatcacccaggtcgggagctacatcgagggcgccagcggctccaactggggcgtccgccactctgcctccgggtccgggccagacggtgtccaccggccgcgcaacttcggtatgttctctccacagacggggcagctggccacggtgcccccgaagcagcgcacgccggaggccatcgcgcatgcagcggagtcgatgaggcagcttgacgactccgccttccgcggtggcttcatcctggagaaggtcctcggcccgctgtccacgggccacctcgagctgcgcaaccgcgaccccgacgacaacccgctggtgacgttcaactacttctcgcaccccgaggacctccgccgctgcgtggccggcttgtcggtcatcgagcgcgtcatccactcccaggccttcaagaacttcacctaccccgacttctccatggagacgctgctcaacatgtcgacggggttccccgtcaacctgctgccccggcacgacaacgactccacgtcgcttgagatgttctgcaaggacaccgtcatgaccatctggcactaccacggtggctgccaggtcggcagggtcgtcgacgctgagtaccgagtgctcggcatcgacgcgctgcgcgtcattgacggctccactttcaacgcctcgccaggaaccaacccgcaggcaaccgtcatgatgctcggcaggtatatgggagtcagaatcacaaacgaaaggttggcagctgaaggattagagggaacaaaaccgtgatgatcctataatccaagacagtaggcgaggcgtattaagaatctctattgaactacgtaatgctggattcaatattgttggtgtgattctgatattgataggttgcacatattgtcggagttgtatcatgttgtttgttactatgtggactattatgagtgaaatctgcatctaagcttcagatcatgtattcttaaccagaacagaaacattagtgaggcagcacagctaattttactgtgtggtcaaatagacaaatgctgtactagacaattgttttctcttaagaaaatggaaatcgccagcagtaagtgtggcagcatcactaa

SEQ ID NO: 106452 - DNA, 2649 bp, Zea Mays
ttctcgttcggtcgttttcgttcccctacctccagtccagtcccaggtccgagccggaccttgatcgccgccgtgcctcggcgcaaggaatggggccttcggtcttacccttgcacgcgccgccggcatcaggagacgtctctgtgtgcttcgccgtgccttcagccgtagccggcgccgcatcagcgtgctccagagaggaccgcagcttccagcacgtgtccctgacaccgccccacactggattgggaagggccgctgaccccacgcacctgcccgctggccagtgttggaagtttcagactcagttatttgaaacatcaagatggttaatttcggaaagaaattgatggctgatcaagtggacgaatggaaaggatactacatcaattacaagctgatgaagaaaatgttaaagcaatatgtccaacaaacccaacatgatgagaaagatcgcgaacaagttcttaaagacttttcaaggtttcttgatgaccagattgaaaggattgtgctttttctgctacaacaacaaggccatcttgccagtaggattgagaaattggcagaaaaacgcactgctcttctggaagagtatgacatatcacaagtttatcagctgcatgatgcatacagggaagtcgggcttgatctcataaagcttctccgctttgttgatgtgaatgctactggtatacgcaagatactaaagaaatttgataaacgctttggctacaagttcactgattattatgtcaccactcgtgcaaatcatccttattctcagcttcagcaagtatttaagcaagtgggaattgtagctgttgtaggtgcattatcgcgcaaccttgaatatctgcagcatcatgaaggaagctttgtatccatctatgatcgtccagcagttaccttgaaggaccctattatagaccaagtaaaccatgcagtacagaaactcacgcatgccacgaattttatgcaattcttgggacagcacgcgcttattgtccaggaagatgcagaaagcgagtcggaggatcttgttggtgatcagagctaccatttcatgtccctggtgcttaatctagtgaacacattcctttacatggtgaatacatatatcattgtgccgactgcagatgactatgcagtaagccttggggctgctgcaactgtatgtggtataattattggatcgatggcagtcgcccaagtattctcctcagtctacttcagtgcctggtcaaataagtcctacttcaaacctcttgtgttcagtagcattatgctgtttcttggaaacctactgtatgcattggcatatgatctgaattcactaatagttctcctgactggacgactgctatgtgggttaggttctgcaagagcagtgaaccgtcgctatatcagtgactgtgtgcctctcaagatgaggctacaagcctctgccgggttcgttagtgctagcgctcttggcatggcatgtggccctgctcttgctggttttctccagattaaattcaagatatactcgctcagttttaatcagagcacattgcctggatgggtcatgtgcatttcttggcttatttacttattgtggttgtggcttacattcaaggaaccagaacacttcactaaaactctggtcaatgaacagccgtcagaatctggccgccaaggaaattctaacttggaggcaggtctagctgaaccattgcttcaaggtatagaacgaaggcaggatgagaactcagaagttaatgatgatactgaagtagagtcagaaagctctcatgaaccagcaacatcaattgcttcagcatacagattgctaactccatctgtgaaggcccagctactgatatacttcatgctcaagtacgcaatggaaatactactatcagaatcgagcgttgtcaccacatactattttagctggtctacaagtgctgtggctatctttctagcgattcttggattaacggttcttccagtaaatgccattgttggaagctacgttacaaatttattcgaggataggcaaattttgttggcatctgaagtcatggttctcatcggtataatcatgagcttttgtttcacacctcactactccatcccgcaatatgttctttcagctttcatcacatttgtatttgctgaggtgcttgaaggagtgaatctgtccttgctctcacgagtaatgtcatcgaggctttcccgagggacctacaatggtggactcctttcgacagaggccgggacgttggcccgtgtagttgcagatgccacgattactgcagccggttatctcggcacggacctccttctgaatgtcactcttctcccatcccttgtgatttgcatagtctccatcgcagcagcactctacacttacaacaatctctattgaagctattgttgctgtacaagtgtacaacaatgttcctaagctaaaatgttcctgcccacaacgggtttgtatatctgttcaagcatggtttgtaaacattttgatcaagtttgtatgcaaaatttcttgtatttagtgcatttatgtaaagattcatcctgtaaagaattataaactatgagacgctattgccatttatgatcatttatgtttatctttttagccttatgtta

SEQ ID NO: 106453 - DNA, 464 bp, Zea Mays
ttctcgttcggtcgttttcgttcccctacctccagtccagtcccaggtccgagccggaccttgatcgccgccgtgcctcggcgcaaggaatggggccttcggtcttacccttgcacgcgccgccggcatcaggagacgtctctgtgtgcttcgccgtgccttcagccgtagccggcgccgcatcagcgtgctccagagaggaccgcagcttccagcacgtgtccctgacaccgccccacactggattgggaagggccgctgaccccacgcacctgcccgctggccagtgttggaagtttcagactcagttatttgaaacatcaagatggttaatttcggaaagaaattgatggctgatcaagtggacgaatggaaagggtatgacttttcttttggtacttatgaaatcatctatttttatcttatcagggcaaatgttctttattttcatatatgcccactcc

SEQ ID NO: 106454 - DNA, 357 bp, Zea Mays
tttaaaatctaagaagcaacaacaaaagatgattcaaaaaaatattcaaatttgaaggaccacaatgcgtgtgctactgctagctatgctaccattagagcatgccttcactgcattcttcttcttttgttacgagtgcttaatctcatggctcgctcccttaattcttgctaccattagagcatcttcaatactttctaaaaaaaaccacttgacaaactaatgaaatcagttggtaaactaataagtttcacgagtgactaaaaaaaagataggagctagcttctagtcctagataatgctcttatgagctttccttgtccagttgtcccaactcccaacgaacaaaaaaaaaaa

SEQ ID NO: 106455 - DNA, 1898 bp, Zea Mays
ccttcccaaactcggctgccgtctcctttgattccacggcctgccacgcagcagcagcaaaactcctagtcaacccttcaactcgcctactactcctactagctccttcttttcttcgatctccgcaatctacagctttgcttctcccggctcgagcggctagggtttcgggagtgcgcggtgagacggcatgacaacgcggggagctaagcgcgcggccacctccgaccccgccgcacccgatttaccaagtaagagagtaatggacggaccctcttttgatgttcacagggcggagtcttcccatcagcatgtgatggcaggacccgctagtttagatcctcggcgggcggaggctgctagcaaacatgtgagggcacttaatacccagtttgcaagctgggttcaattgcagctgcaaaatcatccagctgaactttgggaggacggccttaaggattacatatcacatgcttctgaaatcatggaaaaattcaaggatgttgtcaactggctaaggcaaaatcaagcaggttcaatagttgtttcatccccaagctcactgaaggatgataagtccaatctgccagcagcagatgatagcaagctcttagtacagccaagttcagataacaaacagaaggctccaattatggcttctagttcttcatcttttcagaactcaagcttaccgaaccttttttcatcgccttctcagcaaaaaacaccagattacagtggtatgtttgctgacaagaagaacacgtccagtgatagcagtaaaccagctttccagtttggtggaaataatgtcatatttggtggcaagaaggatgcacctgttgacagcagtaaacctttccagtttggtccgaataatggcatatttggtgacaagaaggatactcccagtgacagcagcaaacctttccattttggtgcaaacaagggcatatttggcgacaagaagacgacaagtgttgcccaaagttttaacccacagagtccacctctgttttcaatgaatcaacaatcagtcctcccaggaaaccaaaatacttctgaagcttcagctgacgcagatgaagatgctgaacctgagaagccaagcagcccttctgtaaagaaggcagaagagaagggggtagttgtcgttcatgaaaccaaatgcaaggtgtatgtcaagcatgatgatgccactaagggttggaaagacattggtgttggtcagctctctatcagaagtaaagaaggcacagagaaagcttccaaagaatccactcctaccattgttataagaaacgatgttggtaaaatcctcctgaatgctctgatctacaaggggataaaaatgaaccttcagaagaatacggttgcttcgatatttcatacttcagatgcacaatcaagtgaatcagctggtgacacagttgtagctcgaacatacctgttccgattgaaaaatgtagaggaggctacaaaactatcgacagcaatcaaggagaatgcgccctcagactagttcttacggcatggattatcatctcgaatctccgcttttggcacgagctgtaagatctgaaggggacaccaccgatggccactgcggcaggctaaaagatgccttgcagagtttctttatttttttttgttctcctagctgcatcaagatatcttgcttgtaacttgtaaggctgactggctggttatgtattagtactttcatgtaccatcttttgcattgacaagattattgagcatgcttgcagcccatcatgtcaccgcaggcagcaaagcaagtggcaatggttcaagtctgggatgcaaccgagtttccgtcttcggatatcctgtacagctttcaccacaagaactagaaatcgaggatctttcggcca

SEQ ID NO: 106456 - DNA, 1988 bp, Zea Mays
gccctacgccgccagcttcccacggagccaccaccctccacttctcaccactgccgtctccttcccaaactcggctgccgtctcctttgattccacggcctgccacgcagcagcagcaaaactcctagtcaacccttcaactcgcctactactcctactagctccttcttttcttcgatctccgcaatctacagctttgcttctcccggctcgagcggctagggtttcgggagtgcgcggtgagacggcatgacaacgcggggagctaagcgcgcggccacctccgaccccgccgcacccgatggcggagtcttcccatcagcatgtgatggcaggacccgctagtttagatcctcggcgggcggaggctgctagcaaacatgtgagggcacttaatacccagtttgcaagctgggttcaattgcagctgcaaaatcatccagctgaactttgggaggacggccttaaggattacatatcacatgcttctgaaatcatggaaaaattcaaggatgttgtcaactggctaaggcaaaatcaagcaggttcaatagttgtttcatccccaagctcactgaaggatgataagtccaatctgccagcagcagatgatagcaagctcttagtacagccaagttcagataacaaacagaaggctccaattatggcttctagttcttcatcttttcagaactcaagcttaccgaaccttttttcatcgccttctcagcaaaaaacaccagattacagtggtatgtttgctgacaagaagaacacgtccagtgatagcagtaaaccagctttccagtttggtggaaataatgtcatatttggtggcaagaaggatgcacctgttgacagcagtaaacctttccagtttggtccgaataatggcatatttggtgacaagaaggatactcccagtgacagcagcaaacctttccattttggtgcaaacaagggcatatttggcgacaagaagacgacaagtggtgacagcagtaatccttttcagtttggtgcaaataatggttttccaacatccaatgcaccatctattttttcttcagttgcccaaagttttaacccacagagtccacctctgttttcaatgaatcaacaatcagtcctcccaggaaaccaaaatacttctgaagcttcagctgacgcagatgaagatgctgaacctgagaagccaagcagcccttctgtaaagaaggcagaagagaagggggtagttgtcgttcatgaaaccaaatgcaaggtgtatgtcaagcatgatgatgccactaagggttggaaagacattggtgttggtcagctctctatcagaagtaaagaaggcacagagaaagcttccaaagaatccactcctaccattgttataagaaacgatgttggtaaaatcctcctgaatgctctgatctacaaggggataaaaatgaaccttcagaagaatacggttgcttcgatatttcatacttcagatgcacaatcaagtgaatcagctggtgacacagttgtagctcgaacatacctgttccgattgaaaaatgtagaggaggctacaaaactatcgacagcaatcaaggagaatgcgccctcagactagttcttacggcatggattatcatctcgaatctccgcttttggcacgagctgtaagatctgaaggggacaccaccgatggccactgcggcaggctaaaagatgccttgcagagtttctttatttttttttgttctcctagctgcatcaagatatcttgcttgtaacttgtaaggctgactggctggttatgtattagtactttcatgtaccatcttttgcattgacaagattattgagcatgcttgcagcccatcatgtcaccgcaggcagcaaagcaagtggcaatggttcaagtctgggatgcaaccgagtttccgtcttcggatatcctgtacagctttcaccacaagaactagaaatcgaggatctttcggcca

SEQ ID NO: 106457 - DNA, 1944 bp, Zea Mays
ccttcccaaactcggctgccgtctcctttgattccacggcctgccacgcagcagcagcaaaactcctagtcaacccttcaactcgcctactactcctactagctccttcttttcttcgatctccgcaatctacagctttgcttctcccggctcgagcggctagggtttcgggagtgcgcggtgagacggcatgacaacgcggggagctaagcgcgcggccacctccgaccccgccgcacccgatttaccaagtaagagagtaatggacggaccctcttttgatgttcacagggcggagtcttcccatcagcatgtgatggcaggacccgctagtttagatcctcggcgggcggaggctgctagcaaacatgtgagggcacttaatacccagtttgcaagctgggttcaattgcagctgcaaaatcatccagctgaactttgggaggacggccttaaggattacatatcacatgcttctgaaatcatggaaaaattcaaggatgttgtcaactggctaaggcaaaatcaagcaggttcaatagttgtttcatccccaagctcactgaaggatgataagtccaatctgccagcagcagatgatagcaagctcttagtacagccaagttcagataacaaacagaaggctccaattatggcttctagttcttcatcttttcagaactcaagcttaccgaaccttttttcatcgccttctcagcaaaaaacaccagattacagtggtatgtttgctgacaagaagaacacgtccagtgatagcagtaaaccagctttccagtttggtggaaataatgtcatatttggtggcaagaaggatgcacctgttgacagcagtaaacctttccagtttggtccgaataatggcatatttggtgacaagaaggatactcccagtgacagcagcaaacctttccattttggtgcaaacaagggcatatttggcgacaagaagacgacaagtggtgacagcagtaatccttttcagtttggtgcaaataatggttttccaacatccaatgcaccatctattttttcttcagttgcccaaagttttaacccacagagtccacctctgttttcaatgaatcaacaatcagtcctcccaggaaaccaaaatacttctgaagcttcagctgacgcagatgaagatgctgaacctgagaagccaagcagcccttctgtaaagaaggcagaagagaagggggtagttgtcgttcatgaaaccaaatgcaaggtgtatgtcaagcatgatgatgccactaagggttggaaagacattggtgttggtcagctctctatcagaagtaaagaaggcacagagaaagcttccaaagaatccactcctaccattgttataagaaacgatgttggtaaaatcctcctgaatgctctgatctacaaggggataaaaatgaaccttcagaagaatacggttgcttcgatatttcatacttcagatgcacaatcaagtgaatcagctggtgacacagttgtagctcgaacatacctgttccgattgaaaaatgtagaggaggctacaaaactatcgacagcaatcaaggagaatgcgccctcagactagttcttacggcatggattatcatctcgaatctccgcttttggcacgagctgtaagatctgaaggggacaccaccgatggccactgcggcaggctaaaagatgccttgcagagtttctttatttttttttgttctcctagctgcatcaagatatcttgcttgtaacttgtaaggctgactggctggttatgtattagtactttcatgtaccatcttttgcattgacaagattattgagcatgcttgcagcccatcatgtcaccgcaggcagcaaagcaagtggcaatggttcaagtctgggatgcaaccgagtttccgtcttcggatatcctgtacagctttcacc

SEQ ID NO: 106458 - DNA, 2006 bp, Zea Mays
gccctacgccgccagcttcccacggagccaccaccctccacttctcaccactgccgtctccttcccaaactcggctgccgtctcctttgattccacggcctgccacgcagcagcagcaaaactcctagtcaacccttcaactcgcctactactcctactagctccttcttttcttcgatctccgcaatctacagctttgcttctcccggctcgagcggctagggtttcgggagtgcgcggtgagacggcatgacaacgcggggagctaagcgcgcggccacctccgaccccgccgcacccgatttaccaagtaagagagtaatggacggaccctcttttgatgttcacagggcggagtcttcccatcagcatgtgatggcaggacccgctagtttagatcctcggcgggcggaggctgctagcaaacatgtgagggcacttaatacccagtttgcaagctgggttcaattgcagctgcaaaatcatccagctgaactttgggaggacggccttaaggattacatatcacatgcttctgaaatcatggaaaaattcaaggatgttgtcaactggctaaggcaaaatcaagcaggttcaatagttgtttcatccccaagctcactgaaggatgataagtccaatctgccagcagcagatgatagcaagctcttagtacagccaagttcagataacaaacagaaggctccaattatggcttctagttcttcatcttttcagaactcaagcttaccgaaccttttttcatcgccttctcagcaaaaaacaccagattacagtggtatgtttgctgacaagaagaacacgtccagtgatagcagtaaaccagctttccagtttggtggaaataatgtcatatttggtggcaagaaggatgcacctgttgacagcagtaaacctttccagtttggtccgaataatggcatatttggtgacaagaaggatactcccagtgacagcagcaaacctttccattttggtgcaaacaagggcatatttggcgacaagaagacgacaagtggtgacagcagtaatccttttcagtttggtgcaaataatggttttccaacatccaatgcaccatctattttttcttcagttgcccaaagttttaacccacagagtccacctctgttttcaatgaatcaacaatcagtcctcccaggaaaccaaaatacttctgaagcttcagctgacgcagatgaagatgctgaacctgagaagccaagcagcccttctgtaaagaaggcagaagagaagggggtagttgtcgttcatgaaaccaaatgcaaggtgtatgtcaagcatgatgatgccactaagggttggaaagacattggtgttggtcagctctctatcagaagtaaagaaggcacagagaaagcttccaaagaatccactcctaccattgttataagaaacgatcaggttggtaaaatcctcctgaatgctctgatctacaaggggataaaaatgaaccttcagaagaatacggttgcttcgatatttcatacttcagatgcacaatcaagtgaatcagctggtgacacagttgtagctcgaacatacctgttccgattgaaaaatgtagaggaggctacaaaactatcgacagcaatcaaggagaatgcgccctcagactagttcttacggcatggattatcatctcgaatctccgcttttggcacgagctgtaagatctgaaggggacaccaccgatggccactgcggcaggctaaaagatgccttgcagagtttctttatttttttttgttctcctagctgcatcaagatatcttgcttgtaacttgtaaggctgactggctggttatgtattagtactttcatgtaccatcttttgcattgacaagattattgagcatgcttgcagcccatcatgtcaccgcaggcagcaaagcaagtggcaatggttcaagtctgggatgcaaccgagtttccgtcttcggatatcctgtacagctttcacc

SEQ ID NO: 106459 - DNA, 1450 bp, Zea Mays
gtggcgttgtgcggccgtgcaagagaaaccgctgctctccatgggcaaggtggagctggagtggaggccgaggcagccgctgatgctaaaggagtggctggagctggagtacagtgcggagctctcccgcgacggcttgggctgctacccgcggcacctcgccaccgagccccggagcgccggctgcaggcggagccacgttatcgccagggtctcggctgcgctgagggccgcgctgtcccgcccgccgtcggcacgacaggtggaggcggttgcgctccccgggagcctcccggcgaggctgcgagtggtggggttctggaagaagcggaggggggagatggaggagacggacaggcaggtggcgagctgctccgctactgccgcgagctctggaaggagggatggagcgtgttcgctggcaacgtctccgcggcgcatgggtcaggagagtcgccaggccggtggcgatcgcgtaggtctcggcggcggccgtcggagccatgaaacagtgaagaacgagggatgcaactgcgaggcaacgtgccacctggacgaggagagggagcaggagcagcggctgagcccagtctcggtgatggatttccaaagccagcaggatggagacgacgattgcaacgacgacggccatagcgaggacgagggcacgtcgccgacgtttgagccaagcctggccaacatccaaagatcgagcagccaacaattgcttcagaggctccgacgattcgagcagttggcggagttggacacacccgacacgggcaacggagaactggactcggtgcaagacaacccagacgctgaacgtgggctcgtaccggaagcaggctcgccgtcgccgtgtcctgcccaccgcttcaagaagcttctggaagatttctttcgtgagggcctctccccctgccattctgctggggcttcggacgatccagagctcgagacgtcgttgctggagactgccaaggcgtggctggatgggcgacgttgcgcgctgatcaggtcggatcaagaggcggaggtggaggaggagatcgagcggctgggacggtggaggtgttttggagaagatgaccgtgagccgatgagctcagacgtggagtgtggtatattctgctgtcttgtggaagaattagttgaggatttgtgctgatggtggggattcgtgttgcgggtcttcgagacatcggttcagaggtaattccgaacatgagcacaattgcttgccgatctgctatcacacgcataaatgtaaccagaagatcaaccacagactcacagtccaggtttgttgggtatggataaaagtatgactcctttccaaacacactgtctgtcctgcgtccgaggagaggatgaagtaaaaaaaaagtgatgtaaacttattctcaaattaataaagtgtgtctgatagcttctctaaagaaaagaa

SEQ ID NO: 106460 - DNA, 1260 bp, Zea Mays
tccgatccttccgagccatataaatataaaccgtcgcccgccgcttccctcccaaattcgaacctgctgcaggccacacccacccacgcacacacacacaatccaaaacgctcctccttctccagtcgactgatcgatcgatggactgggcgtactacggcagtggctactcgacgccggcgagcggcggcggcggcggggacgaggacgcctacatgacggtgtcgtcggcgccgccgaagcggcgcgcggggcggaccaagttcaaggagacgaggcacccggtgtacaagggcgtgcgcagcaggaaccccgggcggtgggtctgcgaggtgcgggagccgcacggccggcagcggatctggctcggcaccttcgagaccgccgagatggcggcgcgcgcgcacgacgtggccgcgctggcgctgcgcggccgcgccgcctgcctcaacttcgccgactcgccgcgcaggctgcgcgtgcccgcgcagggcgccggccacgacgagatacgccgcgccgcggtggaggcggccgagctgttccgcccgcagcccggggagcgcaatgtgggaggttccgaggcggcggccgaggcggcggcggcggcgccctgcgcgatggggagcggcgacctcggcggcggcgaattcccttactacccggtggacgacgggctggagttcgagatgcgtgggtaccttgacatggcgcaggggatgctcatcgacccgccgcagccggccgctgggcagtcggcgtggatcgaggacgagtacgaatgcgaggtcagtctttggagctactgatcgagcgcgtctggtaccaacaaggaccctgtgtacatacagcttatggtgtgctgatgatgtctgtactgtttccctgctcttctgacgaatcgcaatcgcaatgcagtcagaaggagcagaggagtgtgcttaggttttgagcggctgtctctgcacatttggcgctaacacggccaaggtagccttggcgccagatatggcacttggtgcggacgccctcttataagttacgtaagataagaaccacatggtgtaataaacagcagagcctgctgagcgtttgaacctgcagcgatgtcaatcaagttgccgtgtgatgtttagtggaatttacctgaactgaaaacatatgtgctctatggatgaatgtccactgcaggagcaaaatatatggattggaaaaaagggaggcaaagacttgtttgtccctaccctgtatgttccaaca

SEQ ID NO: 106461 - DNA, 497 bp, Zea Mays
gcaggccacacccacccacgcacacacacacaatccaaaacgctcctccttctccagtcgactgatcgatcgatggactgggcgtactacggcagtggctactcgcagccggccgctgggcagtcggcgtggatcgaggacgagtacgaatgcgaggtcagtctttggagctactgatcgagcgcgtctggtaccaacaaggaccctgtgtacatacagcttatggtgtgctgatgatgtctgtactgtttccctgctcttctgacgaatcgcaatcgcaatgcagtcagaaggagcagaggagtgtgcttaggttttgagcggctgtctctgcacatttggcgctaacacggccaaggtagccttggcgccagatatggcacttggtgcggacgccctcttataagttacgtaagataagaaccacatggtgtaataaacagcagagcctgctgagcgtttgaacctgcagcgatgtcaatcaagttgccgtgtga

SEQ ID NO: 106462 - DNA, 1417 bp, Zea Mays
ggcaagtgacaacctgcatgcacggccgcagccactggtcgagccgccgcaaatctccgcacacgtgcagatagtagtgtacaggctatgtgcctagctagctagtagtgtgattgggtgtagctgctgatcggagtagagagagagagagagagctgcagccctaacgctgcccagcgtcaatgtctgaccgcggcgggccggcctcgccgcggtcggggaagcaccccttctaccgcggcatccggagccgcagcggcaagtgggtgtcggagatccgggagccgaggaagacgcgccgcatctggctcggcacgttcccgacggccgagatggccgccgtggcgtacgacgtggccgcgcgcgcgctgcgcgggcccgacgcggcgctcaacctcccgcacctggccgcgtcccgccccgcgccggcgtccacctccgcggacgacatccgcgccgcggccgcggaggccgccgcgtcgctgcagcagcccgatcaccagccgccggcccatggcagcgctgctgggcgcggcattgctgccgccgcggctggtgcaacgcagcagcagcaccagcaccagcagcaggccggcgggagcagcggcgcggcacagcatgaaggcggcggcggcggcgcggggaacccctacttcctggacgaggaggcgctgttcgagacgccgcagtacctgcgcaacatggccgcggggatgatgatgagccccccgaggttcggccgcaactcgtcggacgactcgccggaccacccgtcgtcgtcggatgccggcgacagcctctggaactaccgggacccgtagatcgaaccgggctgccggtaatggatcggaggtagtaacaccaataatggatgtggcgatgaaactaatgagctctactctactactactattggtgcctgcaggacgcaggctgctgctgctattgctacttctactgaacctggaagctgggagtgatatggggagataaaaaggagcgaggtacacatacacaggtgcccgtccgttggaggtgccatttttcctgtccaatccagccgccatatgtgcagtgggggatagcttctcggtcctccgccggaagatcaagtgtatctctcctccctccctctcctttcgcttgatgtgtgtgtgtgttttctgctgtgaagtcgtcacaaagctagctagtaataagcaggcctcccctttttatactttagatttcgcttggctctatatacctagctacctcactgcagtttggccgttgcagtacatatgaatctgcaagggcatataagtggatgttgctgtgtgtctgtaagctggtattgtgcaaattaatctgtattttggcggtggatcagctatatataagaaggatgtgggcgcagggcatcgttccaccttaa

SEQ ID NO: 106463 - DNA, 1271 bp, Zea Mays
tcagctcgcgagccacagtagcagccgccccttcagcctccatcatctggcgctcgtccgctcccttcctccgcacctcgccaccggccgctgccgcaccggtcgcccctttcttcgcggccccatcgcatcgcacccggttggcctcaaccggctagctccgcatcgtgccccaccaaatgggcgccccgggccgcgacctcaccgctctcctatctatccgcggcagcggcagcccgtctgttcaagcggtaggctatcgcctttcagtgtctggtaggtggtatcagtgattcagtgtgaggacggaggcggaggggaggtggggcaaactcggtgtgaagcacatcagcgggcatgtttgggtcggggctgaacctagtcagcgcggcgctcggcttcggcatgaccgcagccttcgcggcgttcgtctgtgtgaggttcatctgctgccgcgaacgccgtggtgacacccgtgcgccgccatcgccggatttcgccgcggaactcgatggcccgatagaacgcactcgtactgggttggaacctttggttattgctgcaattcctactatgaagtacaattgtgaggctttcaactctaaagacgatgtccagtgctcaatatgtttaggcgaatacagggagaaagagatactacgaatcataccaacatgccgccacagctttcaccttgcctgcttagatttatggttggaaaagcagacgacttgcccaatatgccgggtctcactggaagagctgcaggctgccatgccatcggtatgtagcatccagcaactcccgcccgagcccgaccccgaccccgacccagagaattctgataacccagcacctcagtgtttccaacctgctcgtcaacatcccagagatcaaaataatagccaggagacgcacgaatcagtagaagtgattattgaaattcgacgatgaatagaaacattgacatgaatgtagaaagctaagcgacggaggcaaatatggaacatttcctgcaaccaagcaccggcgttttctttagggctactgctaatcaattagtcatgtcgcccgcagcattgtctcggtatcatgacgtttcatctcccaattcctttgtagaggaaaaagaaaagtttatgtacgattcacgtagtaggtcatcatgttatattattgagaatctgaggcctttgagatcattttgatgttgtaaatatacattgtatcaatattgaataacataaagggtcagagctgcacaaatatct

SEQ ID NO: 106464 - DNA, 909 bp, Zea Mays
cctccatcatctggcgctcgtccgctcccttcctccgcacctcgccaccggccgctgccgcaccggtcgcccctttcttcgcggccccatcgcatcgcacccggttggcctcaaccggctagctccgcatcgtgccccaccaaatgggcgccccgggccgcgacctcaccgctctcctatctatccgcggcagcggcagcccgtctgttcaagcgatagaacgcactcgtactgggttggaacctttggttattgctgcaattcctactatgaagtacaattgtgaggctttcaactctaaagacgatgtccagtgctcaatatgtttaggcgaatacagggagaaagagatactacgaatcataccaacatgccgccacagctttcaccttgcctgcttagatttatggttggaaaagcagacgacttgcccaatatgccgggtctcactggaagagctgcaggctgccatgccatcggtatgtagcatccagcaactcccgcccgagcccgaccccgaccccgacccagagaattctgataacccagcacctcagtgtttccaacctgctcgtcaacatcccagagatcaaaataatagccaggagacgcacgaatcagtagaagtgattattgaaattcgacgatgaatagaaacattgacatgaatgtagaaagctaagcgacggaggcaaatatggaacatttcctgcaaccaagcaccggcgttttctttagggctactgctaatcaattagtcatgtcgcccgcagcattgtctcggtatcatgacgtttcatctcccaattcctttgtagaggaaaaagaaaagtttatgtacgattcacgtagtaggtcatcatgttatattattgagaatctgaggcctttgagatcattttgatgttg

SEQ ID NO: 106465 - DNA, 2170 bp, Zea Mays
cgcggctctcgactccaccaaccaagcaagcatcccagcttccaaaggggagacaacccgagaagcgcttccccatctccccccaacagaaactgcgtacgatctcgtaaattgcctgggagttaccaacgccgcaaaggtttttactcccttgcctggcgaaaccgcacgcgcgggcgggcaaccaggagagagagagagatagagagagagagagagagagcagggtatccctctgtttctccagcagccatgacgtcgtgctcgggaaacgccacggtggcatgccgggatgacgcgcagccgcacggggacgcgccctgcgtcatcgtctaccccttactcgccaagactggggaggtccacatcccggtggccggagacgaggcgccggccgtgcccgtgctcacgagcaagtcgcccgggcggcttgccaccgcggtgaaggaggccttgtccgtctccctgggagcggcgttcccgatgacgccgttggtgtcgtccagcgacgcgcatgcagaggcgcggtcgattctcggcctcgcgctcccgatgattctgacgggcctcctgctctacctccgctccatgatttcaatgctcttcctcggccgtctcggcggtctggccctcgctggcgggtcgctggccatcggctttgccaacatcacggggtattccgtgctctccggcctcgccatgggcatggagcccatatgcggccaggcattcggcgcgggcaacttctcgctcctcggaatcaccatgcagaggacggtgctgctgctcatcgcggcggccgtccccatcggtggcctgtggatgcacatgcggcctctcctcctcctctgcggccaggacgccggcatcgcggcggtcgccgagacctacattctggcctcgctcccggacctcgtcctccaggccttcatccaccctgtgcggatatacctccgggcgcagtccatcaacctgccgctcacggtctgcgccgcgctggccattgtcatccacctccccatcaactacgtcctcgtcaccgtcctcggcctcggcatcagaggggtggcattcgcctccgtgctggcgaacctgaaccttctcctcttcctcgtcgcctacatcctcttcaagagcgtgcacaagcgcaccggcggtttcttgctctcccgcgagagcttccgcggctggggcgagctcgtaagcctcgcgctgccgagctgcgtcagcgtctgcctcgagtggtggtggtacgagatcatgatcctgctgtgcggcctgctgctgaacccgcaggccacggtggcgtccatgggcatcctgatccagaccacgtcgctcatctacatcttcccatcctccctgagcttcggcgtgtccacccgcgtcagcaacgagctgggcgcgaaccggcccgaggaggcgagccgcgccgccgcggtggggctcatgctgggcttcgccttcggcggcctggcctcggcgttcgcgttcctggtgcggaacgtgtgggcgagcatgttcacggccgacccggcgatcatcgcgctcaccgcgtcggtgctgcccatccttgggctgtgcgagctgggcaactgcccgcagacgacgggctgcggcgtgctgcgcggcagcgccaggcccaaggacgcagccagcatcaacctccggtccttctacctcgtggggacgccggtggcgctcgtcctagccttctggctccactacgacttcaagggcctgtggttggggctcctggcggcgcaggccacctgcatggtgcgcatgctgctggtcatcgggcgcacggactgggcgtgcgaggccaagcgctcgaggcagctcaccggcggcctcgtggccgaggacagcgacgacaaggctggcggagacgagaagtcgcgcttgcttggcgacacggacatcgagcaagcgaatgctcactctgatcggtgttgatagctacagcgagagcccgcatgtgtgctctaatctactcttttccccctttcctatttccctcattttctgtggcgggggaggaggaatcagaggctgacagagtgacagttttgttcaccatttggtaattagcatgtaaagattttgctggttattatcaaagagattcaacatacagtatctagcgttgacacgaaagattcttttt

SEQ ID NO: 106466 - DNA, 1453 bp, Zea Mays
tgatccacccgaaaagcgcgctatttttatacggccaccaccaggtcagcaaggcagccggcgcctagttctctcctccatcgcaactcccacgacccttttccaagtctcgcctccacggctcgtcggctccatccctattcctctcgagtcgcctccgtcccctttgttcaccccagaccccacgcgtgtggctttgaaagagcaccctcatgcatggtctggccggttgaattgaaggagaactgggcgaccggcggttatccaactgtctctaaccggatagagaagaaagtgctccactctccagacaaggtaccgaactcccctcgcattgcgcgtgtcgaatttttgcaaactgcatgggggctggggcgtcgagcgtggtggcgccggacgggtacggccgggggtgggggcagacgtcgctgggcgacatgccggagagctgcatcgcggcggtgctgctctacctcggcccggctgagatctgccaggtggcctgcctcaaccggacgttccgggacgcggcctccgccgactgcatctgggccgccaagttgccctccaactacaggtacctcgccgcactcgcggccgcggccgacgacgactgcgcttgcgatgacgcggccgaaggcagtggcaggtgctgctcctctgcggcgatcaagaaggaggtatacgcgcgcctctgccggcccacccggttcgacggcggcaccaaggaattttggatcgacaagaacaagggaggtttctgcatgtccatctgctcaaaggctatgtcgatcacagggagagatgatcggaggtattggagccacctatccacagaggaatcaagatttcacggcgtcgcttatcttcagcagatttggtggcttgaggtcggcggggagattgacttctgctttcctgccggttcatacagcctattcttccggctacgtttgggccgaccgcacaagcggatgggccgccgatgccatggctccgagaatatccacggttgggacatcaaaccgacacggttccagctttcaacctcagatgaccagcacactacatctgagtctcacctagttaaccctggaagatggaccctttaccacgtcggtgatttcatcgtatcgagttcagacgaggtgacgggactcaagttctctatgatgcagatcgactgtacgcatacaaaaggcggcctgtgtgttgattcagtctgtatataccccaaagatctcggatatgaggactgcgtgttctgccagaaagttttgtaagagcgcttgagtttcttggctagacttttttttcttctttttcgggtcattcttgtccaaaatggtagtgcgcaaaaaaaaaaatccctgaggacccgtttgtttcgttggaattgaattccattttaataattataatttagacaaaactaattaagtttatatattta

SEQ ID NO: 106467 - DNA, 1016 bp, Zea Mays
gttcatccacactgttcaggaaatattgtatcatttaattcaaggaagtaatggtggtggttcatctagaactcattcgattccaagttctagctatggccatgatcggacatcaaatgcacaaaaattgtcaggagatgtaaactgtgagtgtgagttgcaactagcagttgatgaagctttagctagagagttgcatgaaatggagagcaaactagccaacacttcacttaatgacaataatggaagaaagacaacatcatcttcagcatttgatagaggcaataattctgcaagtagacctcctcaggtattggaggaggatgtgattgatccagataatatgacgtatgaggaactgcaacagctaggggaagccattggtacccaaagcaaagggctgcctgaaagtgtcatagcactcttgccaacttcaacttacaaaactgggatattctccagaaaggaaaaacatgatgaatgtgtgatctgttgtatggcatacaagaaccgagataggctgactaaattgccatgtggacatcactaccatcaagcttgtgttgctaaatggttacagatcaataaggtatgccctgtttgcaataaggaggttttcagctagcagtatcaaacagtgcagattcgtctgatggccaactccagcaaccgtctgtagtactgcatagatgtgcattatttgtataagcatgctgccctgttgctggcaggtaatgcgccgcattgctcaaggaccatatcacggccaaattagtgatatctccagcgaaagcaataagatctctgcttttgaactttttgacattcagagtttcagacttggtgccacactacagtcctttttatcatcgcctgtatactattcatttcagtatcttgtctccagtccattcagcatactttctggaatgttgcaacttggattgaaacagcgagaaatgttgaaatttaggcactggtatttttttaaagtagcagccattgtgtttagcaaa

SEQ ID NO: 106468 - DNA, 80 bp, Zea Mays
gctgctgggaggccggcggctgtggggaagcagcccggcggctgtgggtggagggaagagaaactggctctggtaccaag

SEQ ID NO: 106469 - DNA, 157 bp, Zea Mays
cgcttccgatctgcgcttcgatctccctcttcgcagaggtgatgtacctgtatgttatcgcaggataatcacatttagtgctagtcctttgggccccggattggaagaagggtctcaatctgcagtcagtagcttcagacgggttgcagttgtgcgc

SEQ ID NO: 106470 - DNA, 1268 bp, Zea Mays
actcaattgcttctcttcttctcgtccgttccttcgcatgcaccacctgcacggctgtgcaccaacgactgcagatgtacagagctgcaagccttggcgcagaaagaggaggagggacgccagcccagctgctgcaaaggaggtactcatgcagcggtgatgagcgaggaggccccaaggaggagttcctgtgctgcccaccaccaccacctctgaaaagggcccggatgggatacgagagcatgcagggaagccatggagtcagtgatgcgaggactactgctgggggagggggactgtactgcatcgatgattacatgcaagccatggccgtgggctggagaataaaggaggagggcctcatcagatggcagaggagagatgcggctgctgctacgccttccaatctccaagccatgggatgtttggtgcaagaatctggcccctttaagcaggtacgccgaccagaagcacaccgtcttggttctgcgctgaagcagcaggacggcgacgactccagcaaagaggacggaaacgacggacggccccagtccagcaatgcagcgacgaaggaggacgaggcatctgagcagtgctcgctctcgctgtccctcggtaatctggacgcaaaatgcgggcgtggcatggcggcagcggcctcctcgcgaagcggcgagagcagctgcatcctcacggcctcgccggcgaggaggagctccagcgactgctccggccactcaggctgcttcgtcgtcgggccgggtggtgttgttagcctggagctttccctgtccatctgtggatcttagctagaccactccggccacttctggacgacgattctgtacatcagtggcggcgttggtgatcgccgcgtttgtttttttggtgttcgtgggcacatcatgaccgtgttagaaagtttagtaaccttagaaccatagcatgttagttctagctaagctagtatgatgtttgttacctctacctgtagccctagctggtatgtgtaaggctggctccaacaaggtcccctaaagggttctctaccctaaatatagaggatcaaacggtcctttacgctctccagcaacgtcctctaaacggtcctttaaatttagaggacgctgctggattctctatatatagagtttctctaaacgatcctctattcatttgactacttttaaataaccggtttagtaaaactaaaatatgtacaatatatttgagagtatgataaacacgtatgtacaaaaaaaataaaa

SEQ ID NO: 106471 - DNA, 1816 bp, Zea Mays
cgaggagggagcgagagagagacagaaagagacacagtcacacagcgtagggcgctgcggcctgcggggaggaagggcaccagcttggtctttctcatccattcgcaaatcgcaacaaatcttgcatcttatcttaccctagaaaaacaaatcttgcatcttcagctgtctgtacgtgtgtgtgtgagagagagacactgcgtgccgcagcagcagctctggacaggcttacaggcaagtcagagagcgagggaggagccgggaagaggaggccggagggaacaaaaggggaagtttggttctttcctctaccacctggagcgtctccttgccagccagcgcccggtccggtgagctccataccatccaagtagtgtgaggaaccgtcgtcgttgctggcgatccaagagaccaggagatgggcagcggcaggaacggcgctgtggtgaggcggtacgtccggtccaaggagcccaggatgaggtggagcgccgacctccaccgcagcttcgtgcaggctatcgactcccttggcggccaacacaaggctacgccgaagctcattctccagttcatgggcgccagggggcttaccatatctcatgtcaagagccacctccagatgtacagagctgcaagccttggcgcagaaagaggaggagggacgccagcccagctgctgcaaaggaggtactcatgcagcggtgatgagcgaggaggccccaaggaggagttcctgtgctgcccaccaccaccacctctgaaaagggcccggatgggatacgagagcatgcagggaagccatggagtcagtgatgcgaggactactgctgggggagggggactgtactgcatcgatgattacatgcaagccatggccgtgggctggagaataaaggaggagggcctcatcagatggcagaggagagatgcggctgctgctacgccttccaatctccaagccatgggatgtttggtgcaagaatctggcccctttaagcaggtacgccgaccagaagcacaccgtcttggttctgcgctgaagcagcaggacggcgacgactccagcaaagaggacggaaacgacggacggccccagtccagcaatgcagcgacgaaggaggacgaggcatctgagcagtgctcgctctcgctgtccctcggtaatctggacgcaaaatgcgggcgtggcatggcggcagcggcctcctcgcgaagcggcgagagcagctgcatcctcacggcctcgccggcgaggaggagctccagcgactgctccggccactcaggctgcttcgtcgtcgggccgggtggtgttgttagcctggagctttccctgtccatctgtggatcttagctagaccactccggccacttctggacgacgattctgtacatcagtggcggcgttggtgatcgccgcgtttgtttttttggtgttcgtgggcacatcatgaccgtgttagaaagtttagtaaccttagaaccatagcatgttagttctagctaagctagtatgatgtttgttacctctacctgtagccctagctggtatgtgtaaggctggctccaacaaggtcccctaaagggttctctaccctaaatatagaggatcaaacggtcctttacgctctccagcaacgtcctctaaacggtcctttaaatttagaggacgctgctggattctctatatatagagtttctctaaacgatcctctattcatttgactacttttaaataaccggtttagtaaaactaaaatatgtacaatatatttgagagtatgataaacacgtatgtacaaaaaaaataaaa

SEQ ID NO: 106472 - DNA, 1197 bp, Zea Mays
atgggcagcggcaggaacggcgctgtggtgaggcgatgtacagagctgcaagccttggcgcagaaagaggaggagatagatttcgctaatggaaagccaaacacctttctttcatggcaccatcgatcagggacgccagcccagctgctgcaaaggaggtactcatgcagcggtgatgagcgaggaggccccaaggaggagttcctgtgctgcccaccaccaccacctctgaaaagggcccggatgggatacgagagcatgcagggaagccatggagtcagtgatgcgaggactactgctgggggagggggactgtactgcatcgatgattacatgcaagccatggccgtgggctggagaataaaggaggagggcctcatcagatggcagaggagagatgcggctgctgctacgccttccaatctccaagccatgggatgtttggtgcaagaatctggcccctttaagcaggtacgccgaccagaagcacaccgtcttggttctgcgctgaagcagcaggacggcgacgactccagcaaagaggacggaaacgacggacggccccagtccagcaatgcagcgacgaaggaggacgaggcatctgagcagtgctcgctctcgctgtccctcggtaatctggacgcaaaatgcgggcgtggcatggcggcagcggcctcctcgcgaagcggcgagagcagctgcatcctcacggcctcgccggcgaggaggagctccagcgactgctccggccactcaggctgcttcgtcgtcgggccgggtggtgttgttagcctggagctttccctgtccatctgtggatcttagctagaccactccggccacttctggacgacgattctgtacatcagtggcggcgttggtgatcgccgcgtttgtttttttggtgttcgtgggcacatcatgaccgtgttagaaagtttagtaaccttagaaccatagcatgttagttctagctaagctagtatgatgtttgttacctctacctgtagccctagctggtatgtgtaaggctggctccaacaaggtcccctaaagggttctctaccctaaatatagaggatcaaacggtcctttacgctctccagcaacgtcctctaaacggtcctttaaatttagaggacgctgctggattctctatatatagagtttctctaaacgatcctctattcatttgac

SEQ ID NO: 106473 - DNA, 1073 bp, Zea Mays
ctcatgtgtcatgagtggcaaagccttttttgttgggaacgctaagtgtaatgcactgcacactttagatagatttcgctaatggaaagccaaacacctttctttcatggcaccatcgatcagggacgccagcccagctgctgcaaaggaggtactcatgcagcggtgatgagcgaggaggccccaaggaggagttcctgtgctgcccaccaccaccacctctgaaaagggcccggatgggatacgagagcatgcagggaagccatggagtcagtgatgcgaggactactgctgggggagggggactgtactgcatcgatgattacatgcaagccatggccgtgggctggagaataaaggaggagggcctcatcagatggcagaggagagatgcggctgctgctacgccttccaatctccaagccatgggatgtttggtgcaagaatctggcccctttaaggtacgccgaccagaagcacaccgtcttggttctgcgctgaagcagcaggacggcgacgactccagcaaagaggacggaaacgacggacggccccagtccagcaatgcagcgacgaaggaggacgaggcatctgagcagtgctcgctctcgctgtccctcggtaatctggacgcaaaatgcgggcgtggcatggcggcagcggcctcctcgcgaagcggcgagagcagctgcatcctcacggcctcgccggcgaggaggagctccagcgactgctccggccactcaggctgcttcgtcgtcgggccgggtggtgttgttagcctggagctttccctgtccatctgtggatcttagctagaccactccggccacttctggacgacgattctgtacatcagtggcggcgttggtgatcgccgcgtttgtttttttggtgttcgtgggcacatcatgaccgtgttagaaagtttagtaaccttagaaccatagcatgttagttctagctaagctagtatgatgtttgttacctctacctgtagccctagctggtatgtgtaaggctggctccaacaaggtcccctaaagggttctctaccctaaatatagaggatc

SEQ ID NO: 106474 - DNA, 327 bp, Zea Mays
gaatcttgggtggagaccgcggtgagaagcgagccggcgtcgccgaacttggtccacgagcgctgcaggtgcgggtggtggtggcgaacttgaccttgttgcccctcgtcgtcgaagcggtactcgatcgatcatccttcggaggccgctcgcgtcgggcccgacgacaaccggcggctggaggaggccgaggtcgctggcgccgtcatcgtccgcgagctcgccccactggtactttccgctgctactgcttcgccaccgccggatctcccccgcacgcggcgtgcgttagagctttcggtggttgccgcggcggtgacaagagta

SEQ ID NO: 106475 - DNA, 1417 bp, Zea Mays
gaccgcgcacaagggagatagagcttcttctccccatcgagctcgagctcccggtggcgcgccgccgagcccctttcccacgctcgccctgtccgttcccccctccacgcctgcagggcgcttgcgtcggcactctctggtcctcgcgccgcctcctggagtcggtcatcgttcggctgccgcccagaagctctccaccgccggcgtcgtcgatgccctccacctcgggcgctcctcctgcaacagctgttatagaagaaagggagaaagaaggtagttttgagatggagtccttcttaattgatgatttccatggcattgatgatgagcctttagcaattgtagaagctcctattcgacatgatcagcaactagctgctattgattgggacacactacatatttttgatagtacagatgaagaaggaaggatagaaatagttgatggtaaccaaatgtatgtgctattggggctaagagatgaggatgacgctgccgagaagggtagtgaaacttctgaacaggcagatagtgcacgtgctgctagtggcaatgtctcctttgtcgacaatgacactcttggtgcagccatccctgttaatgatgacataccaggggaaagggtggtggtgcatgatccggataatccttgtatggatattggaactgtgtacccgagcatgcgtgaatttaggttggctatgagacagtttgctataaatgaagagtttgagttgcaaatcgtgaaaaccgacccgagtcgatttattggtgattgcaaaggggagctacaagtgcccattaaatggaacgaagaaaaggaagagaaagcctcgaaaaaacacaactaagtatggggagaatgccaaagtgccaacacaaaagaagtcaaaaggaggtgagggaggtactactgcccatggaagggaggaatgtgttgttgtccaagaaatggagattgttgctgttgttcaagtcatggagcaaggtgatgctgctgttgttcaaaacccaactaagcctacaatggaaacaattataaatgacagcccaattagggtcaccagaagtcgacttgcaatgctattggcagatggtacaacttcacaggaaggtctgccatcagcatcattctcaaacaagatgacacctcctaagaagttgacacctaggaaactgagatgctgatttgtgaaatcagctagtatttgttagtaccatgtatctgagatgtgaactcacctactattagtagcatgtatctgagaagtgaactcagcctttatgtatctgtgaaaatttgatatggctgctagcctttatgtacctgagaactccgcctttatgaacatcaacgttgtgctcaaattgagatggatgcttgccttgatgtgaattcagcctttatgtatctgag

SEQ ID NO: 106476 - DNA, 2699 bp, Zea Mays
acatacatatgagaaggtacagccatcactcccctcaggaatttcggggcctctcctcttccggtctttatctccttggttctgtcgggctcttcctcgatttgtctccggatcggaggaacggcaaaaatctttctcgtctcgcccccatggtcgccgctcgcatgctcgaagaaggggaaggacgaagaacactgccgaccctattcctagcaacgggccaaagcgaccagctgcaggaaggagaagcagtgttggcgcgttcgagctggtggtgccaggataaatcgggaggaagtgatggcatcgaattcatcggcggcgttctttggtgttagggatggggaccagcaagaccagattaagccgctgatatcaccgcagcaacagctggcagcggcgctgcccggtgtggcaggcggtgttcctgcggcgtccggccaaggcgcgccgccggcgcagccaccgcccaagaagaagaggactatgcctgaccccgacgctgaggtgatcgcgctgtcgcccaagacgcttatggcgaccaacaggttcgtgtgcgaggtgtgcaacaaggggttccagcgcgagcagaacctgcagctgcaccggcgcgggcacaacctgccgtggaagctgaagcagaagaacccgctacaggcgcagcggcggcgcgtgtacctgtgcccggagccgacgtgcgtgcaccacgacccggcccgcgccctcggcgacctgacggggatcaagaagcacttctgccgcaagcacggcgagaagaagtggaagtgcgacaagtgctccaagcgctacgccgtgcagtcggactggaaggcgcactccaagatctgcggcacccgtgagtaccgatgcgactgcggcacactcttctccaggagggacagcttcatcacacaccgggcgttctgcgatgcgctcgcgcaggaaagcgcgcgcctgccgccgacgagcctcagcagcctcaccagccacctctacggcgccaccagcacgggcaacatggcgctcagcctctcgcaggtgggctcccacctcacctccactctccaggatggccaccaccaccacccgtccgcggagctcctccgactcggcgccacggccggcggcggcagcagcatcgccgcgcgcctcgaccacctcctgtcgcccaacggtgcatccgccttccgcccgccgcagggtccgccgtcgtcggcttccttcttcctcaacgcgggggcttcggtggggccggactttggggacgacgtgggcaatggcccgcactcgttcctgcagggcaacaagcctttccatggactcatgcagctgcccgacctccaaggcaacggtgctggggggcccggcggctcaggccccagcctcttcaacctgagtttctttgctaacaatggcaacagctcggggtccagtcacgagcatgcaagccaggggctcatgaacaataatgaccacttcaacggcggagcaggtggaggcggcgggggttcggaagcttcggaggctgggattttcggcggaaacttcgttggtggtggagatcaagttccaccgcccgggctctacagcgatcaagcctccatgctgccgcagatgtcggcgacagctctgctccagaaggcggcgcagatgggcgcgacctcgagcgcgaacggcggcgctgcatccatgttccgaggcttcgtgggctcatcccctcacgtgcggccggcgacgccgcacatggaacagagcgacgcgaacctaaacgacctgatgaactcgctcgctggaggtggtgtcggcgccggaggaatgttcggcagcagcaacggcgccggaggcccggggatgtttgatccgaggcagctgtgtgacatggagcacgaggtgaagttcggccatggtggcggagacatgacgcgggacttccttggcgtcggcggaggaggcatcgtgcgcgggatatcgacacctagaggagaccaccaaagcagcagcgatatgagctccctggaggccgagatgaagtcggcctcgtccttcaacggaggcaggatgccatgaccgacccatcggtcgagcttataaacaaggcataagctcgcgcacagtaagcaagagacttgatcaagcagatgcagtgagagaagagtaaggtcatcgttatatagcgtagtagcaatcaatgcaagttatcaactgagtcgcatgagtgagttcatgcatggataaagctggctagcttcttagctagctttcatcatccgaagggaccttgggtgagagagaggcgtctttctctgactaatggagtaagctagagtgcgagttggacgcatgtgatgacccctttggtcgtggtgggggttggtgttcctgttggttttcccttgctttgtagttggataatctttgttggattaagtatagtttctggtgatagaaccaataaggatgtttgtagctagcttataatgagggcgtgaattgcagcttaatttgcttcactcccctcctattttttattaccttttctctttttgcaaagcaatattctccttacaatgtcattaatcgtgcaagctgaaattcatgatattttcttgtgtcaggatgcatgcatattgtatagtcaagtgctgtgtctgcactgattaacattttttcttatttattactaaagtccatttactagg

SEQ ID NO: 106477 - DNA, 2705 bp, Zea Mays
atatgagtctgcgggtgtgggtgtttgcgagcttttgttgttttgcttttttacttgttttgagtgcaactgtttgtttggatttccctgttctctttgttcttttgttaatctcggaagagtcctaagcggccgatgccttagcttggagtttttctcggctccttgtggatttgtttcttgtttcagatcagttccaagcacatacatatgagaagcgaagaaggggaaggacgaagaacactgccgaccctattcctagcaacgggccaaagcgaccagctgcaggaaggagaagcagtgttggcgcgttcgagctggtggtgccaggataaatcgggaggaagtgatggcatcgaattcatcggcggcgttctttggtgttagggatggggaccagcaagaccagattaagccgctgatatcaccgcagcaacagctggcagcggcgctgcccggtgtggcaggcggtgttcctgcggcgtccggccaaggcgcgccgccggcgcagccaccgcccaagaagaagaggactatgcctgaccccgacgctgaggtgatcgcgctgtcgcccaagacgcttatggcgaccaacaggttcgtgtgcgaggtgtgcaacaaggggttccagcgcgagcagaacctgcagctgcaccggcgcgggcacaacctgccgtggaagctgaagcagaagaacccgctacaggcgcagcggcggcgcgtgtacctgtgcccggagccgacgtgcgtgcaccacgacccggcccgcgccctcggcgacctgacggggatcaagaagcacttctgccgcaagcacggcgagaagaagtggaagtgcgacaagtgctccaagcgctacgccgtgcagtcggactggaaggcgcactccaagatctgcggcacccgtgagtaccgatgcgactgcggcacactcttctccaggagggacagcttcatcacacaccgggcgttctgcgatgcgctcgcgcaggaaagcgcgcgcctgccgccgacgagcctcagcagcctcaccagccacctctacggcgccaccagcacgggcaacatggcgctcagcctctcgcaggtgggctcccacctcacctccactctccaggatggccaccaccaccacccgtccgcggagctcctccgactcggcgccacggccggcggcggcagcagcatcgccgcgcgcctcgaccacctcctgtcgcccaacggtgcatccgccttccgcccgccgcagggtccgccgtcgtcggcttccttcttcctcaacgcgggggcttcggtggggccggactttggggacgacgtgggcaatggcccgcactcgttcctgcagggcaacaagcctttccatggactcatgcagctgcccgacctccaaggcaacggtgctggggggcccggcggctcaggccccagcctcttcaacctgagtttctttgctaacaatggcaacagctcggggtccagtcacgagcatgcaagccaggggctcatgaacaataatgaccacttcaacggcggagcaggtggaggcggcgggggttcggaagcttcggaggctgggattttcggcggaaacttcgttggtggtggagatcaagttccaccgcccgggctctacagcgatcaagcctccatgctgccgcagatgtcggcgacagctctgctccagaaggcggcgcagatgggcgcgacctcgagcgcgaacggcggcgctgcatccatgttccgaggcttcgtgggctcatcccctcacgtgcggccggcgacgccgcacatggaacagagcgacgcgaacctaaacgacctgatgaactcgctcgctggaggtggtgtcggcgccggaggaatgttcggcagcagcaacggcgccggaggcccggggatgtttgatccgaggcagctgtgtgacatggagcacgaggtgaagttcggccatggtggcggagacatgacgcgggacttccttggcgtcggcggaggaggcatcgtgcgcgggatatcgacacctagaggagaccaccaaagcagcagcgatatgagctccctggaggccgagatgaagtcggcctcgtccttcaacggaggcaggatgccatgaccgacccatcggtcgagcttataaacaaggcataagctcgcgcacagtaagcaagagacttgatcaagcagatgcagtgagagaagagtaaggtcatcgttatatagcgtagtagcaatcaatgcaagttatcaactgagtcgcatgagtgagttcatgcatggataaagctggctagcttcttagctagctttcatcatccgaagggaccttgggtgagagagaggcgtctttctctgactaatggagtaagctagagtgcgagttggacgcatgtgatgacccctttggtcgtggtgggggttggtgttcctgttggttttcccttgctttgtagttggataatctttgttggattaagtatagtttctggtgatagaaccaataaggatgtttgtagctagcttataatgagggcgtgaattgcagcttaatttgcttcactcccctcctattttttattaccttttctctttttgcaaagcaatattctccttacaatgtcattaatcgtgcaagctgaaattcatgatattttcttgtgtcaggatgcatgcatattgtatagtcaagtgctgtgtctgcactg

SEQ ID NO: 106478 - DNA, 2802 bp, Zea Mays
ctttctctctcctcctctctgtctcttgctccgagctgtatataaaaatactccctctcctgtatatttcccgtgtgcataggcgcaggggggaaaattccagaaattgatttatagtggggcatattagatgtgggagaggaaagcagcaggagagaagagagagaaggaaaagtatgacaaggaaatgagagaaatgggagaacagccttcttagcctctccctccatgcatcctctctccaccactgctatctctcagtagcaagagcaaagcaagaggagagcgagctagcggtaccagggagagagtgagcgaagaaggggaaggacgaagaacactgccgaccctattcctagcaacgggccaaagcgaccagctgcaggaaggagaagcagtgttggcgcgttcgagctggtggtgccaggataaatcgggaggaagtgatggcatcgaattcatcggcggcgttctttggtgttagggatggggaccagcaagaccagattaagccgctgatatcaccgcagcaacagctggcagcggcgctgcccggtgtggcaggcggtgttcctgcggcgtccggccaaggcgcgccgccggcgcagccaccgcccaagaagaagaggactatgcctgaccccgacgctgaggtgatcgcgctgtcgcccaagacgcttatggcgaccaacaggttcgtgtgcgaggtgtgcaacaaggggttccagcgcgagcagaacctgcagctgcaccggcgcgggcacaacctgccgtggaagctgaagcagaagaacccgctacaggcgcagcggcggcgcgtgtacctgtgcccggagccgacgtgcgtgcaccacgacccggcccgcgccctcggcgacctgacggggatcaagaagcacttctgccgcaagcacggcgagaagaagtggaagtgcgacaagtgctccaagcgctacgccgtgcagtcggactggaaggcgcactccaagatctgcggcacccgtgagtaccgatgcgactgcggcacactcttctccaggagggacagcttcatcacacaccgggcgttctgcgatgcgctcgcgcaggaaagcgcgcgcctgccgccgacgagcctcagcagcctcaccagccacctctacggcgccaccagcacgggcaacatggcgctcagcctctcgcaggtgggctcccacctcacctccactctccaggatggccaccaccaccacccgtccgcggagctcctccgactcggcgccacggccggcggcggcagcagcatcgccgcgcgcctcgaccacctcctgtcgcccaacggtgcatccgccttccgcccgccgcagggtccgccgtcgtcggcttccttcttcctcaacgcgggggcttcggtggggccggactttggggacgacgtgggcaatggcccgcactcgttcctgcagggcaacaagcctttccatggactcatgcagctgcccgacctccaaggcaacggtgctggggggcccggcggctcaggccccagcctcttcaacctgagtttctttgctaacaatggcaacagctcggggtccagtcacgagcatgcaagccaggggctcatgaacaataatgaccacttcaacggcggagcaggtggaggcggcgggggttcggaagcttcggaggctgggattttcggcggaaacttcgttggtggtggagatcaagttccaccgcccgggctctacagcgatcaagcctccatgctgccgcagatgtcggcgacagctctgctccagaaggcggcgcagatgggcgcgacctcgagcgcgaacggcggcgctgcatccatgttccgaggcttcgtgggctcatcccctcacgtgcggccggcgacgccgcacatggaacagagcgacgcgaacctaaacgacctgatgaactcgctcgctggaggtggtgtcggcgccggaggaatgttcggcagcagcaacggcgccggaggcccggggatgtttgatccgaggcagctgtgtgacatggagcacgaggtgaagttcggccatggtggcggagacatgacgcgggacttccttggcgtcggcggaggaggcatcgtgcgcgggatatcgacacctagaggagaccaccaaagcagcagcgatatgagctccctggaggccgagatgaagtcggcctcgtccttcaacggaggcaggatgccatgaccgacccatcggtcgagcttataaacaaggcataagctcgcgcacagtaagcaagagacttgatcaagcagatgcagtgagagaagagtaaggtcatcgttatatagcgtagtagcaatcaatgcaagttatcaactgagtcgcatgagtgagttcatgcatggataaagctggctagcttcttagctagctttcatcatccgaagggaccttgggtgagagagaggcgtctttctctgactaatggagtaagctagagtgcgagttggacgcatgtgatgacccctttggtcgtggtgggggttggtgttcctgttggttttcccttgctttgtagttggataatctttgttggattaagtatagtttctggtgatagaaccaataaggatgtttgtagctagcttataatgagggcgtgaattgcagcttaatttgcttcactcccctcctattttttattaccttttctctttttgcaaagcaatattctccttacaatgtcattaatcgtgcaagctgaaattcatgatattttcttgtgtcaggatgcatgcatattgtatagtcaagtgctgtgtctgcactg

SEQ ID NO: 106479 - DNA, 2921 bp, Zea Mays
gcctcgctgcgatgcaccgcgccttcgaggagatctccgacgaggagtggtctaatcacaccttcgagccctcgcgcgtcctcaagcgccctaatcagcggccctcgcagcctccgccgtcgatcgattcattcatctacaaccccaaggcttgctccgccgccggcaccagcactgcaactgtcgtcctctcggacgacgacagcgacttcgacctaggtgcggacgggggttcccgccgcgctgcgaagagccaacgcgtcctcaagcgcccgcataacggggccccatcgcggccttctctgccagttaaatcgtcccgccgcaatccccaaccatccaatgccgctgccgcctttgggttctccgatagtgaggacgatgacttcgatcttcctacgtcgcctttgaggacgtcaagccttcgccgcaaaggaaagaaccaacgccccctcaaggcccctcagctcaaacctcacttgcgggctcctccgccacccaactcttccagccataatccgaaacggtccaaatttgcctccgatgtgaagctttccaacagtgaggacgacgatttcgacctcacaaaaacgttaagcctcaacagcagcacaaataggcaacacatccagaagcgtccacagcacaagccccgtttgcagcatcgtcagtcctttggctcatcttgcggcaatcagaagcattccaaggctgttgccaccacacggctatctgacagtgatgatgatgacttcaacatcacggacaatgactttgaccttccagcttcgcattcaaggatatcacgcccacgccgcactactagttgccgccggttgacgagttttgctattgacatctctgaggaagacgaagaagaccttgctgatgatgacttcgactaccaagacccaaggcctccccagcaacgctcctctggccgccgctttgtggtcggggacgatgatgacagtgatgtgcctgtagctctggaggaggaggatggggtgaattggtcggagctggagaaggaggacgtagatgaggactacaatggggtgagaagtgtacatgtggaggagcccgagggagatgtagtgggaatggcattgcacaaatgttcacgcatctcgtcagatctgcgcaaagagctttttggttcatcagcgcagaattgtgaaagctactgtgagatagatgcttccacttgtggtattgttactcaggaagacgtaaatgctgcatgcacacgtgagaagtctgggtttgagcctgtgttgaagccttatcagcttgtgggagtcaatttccttctcctactgcatcggaaaagcattggtggagcaattttggctgatgaaatgggtctagggaagacagtgcaggctgtcacttatcttaatctattacagcatctatataatgacccaggtccacatctgatagtttgcccagcttccgtgttggagaattgggaaagagaactcaggaaatggtgcccttcgttttcgatcatcatgtttcatggagctgcaaggactacctactcaaaggaattaagctccttaggaaaggctggctgtccagctccatttaatgtcctccttgttggctactcactttttgaaaggcggagtgctcagcaaaaggatgatcgtagggccctcaaaagatggcgatggagctgtgttttgatggatgaagcacatgttttgaaagataagggtagcttccgatggagaaacctgatggctgttgcgcaacatgctcgccaaaggctaatgctgacaggaactcctctccaaaatgatttgcatgagctatggtcattgttggagttcatgatgcctgatatatttgctactggggatgttgatctgaagaagctgctgaatgcagaagatcgcgaactaatttcacagataaagtccattttagggccatttattcttagacgtttgaagtcagatgtaatgcagcagcttgttcctaaaatccaacatgttaagtttgttgtcatgggcacagagcagtctgaagcttacaaaaatgccataaatgagtaccgtgctgcttgccaggctcgtagtgccaagtcttcagatggcatttccaataatgttgctggattgattccaaagcgacaaatatcaaactattttacacagtttcgtaagattgcgaatcaccctttgcttataaggtgtatttatggtgacaaagatgttgatcgaattgcacggttgctgtaccctaaaggtgcatttggcttcgaatgctccttggagagagcaatacaagagctaaagaactacagtgatttcaatatccaccaactattattgtcatatggtgatgtgggcacaaagggcgctctaaaggatgagcatgtttttgcatcggcaaaatgtcaggccttaggggagcttttaccttctctggcaaatgatggtcacagagtactcatatttagtcagtggaccacaatgcttgacatccttgaatgggcattggaaattataggagttacatatagacgccttgatggagggaccgctgtgacagaaaggcagactatagtggacacgttcaacaacgatctttctatatttgcatgtttactttctacaagagctggaggccagggtctgaaccttgtaggagctgacacagtcattatacatgatatggattttaacccccagatggatcggcaagctgaggaccgttgccatcgcattggacaacagaaacctgtcactatctataggtgctactgaaatgagtccgcgagagagggtggaaaacaaatcgcaactaaatggagagtgtgacacgcggatttgttttaccgaggttcggttcttgcaaacctactccccgttgaggaagccacaaaggccgggtctctttcaaccctt

SEQ ID NO: 106480 - DNA, 2611 bp, Zea Mays
gcctcgctgcgatgcaccgcgccttcgaggagatctccgacgaggagtggtctaatcacaccttcgagccctcgcgcgtcctcaagcgccctaatcagcggccctcgcagcctccgccgtcgatcgattcattcatctacaaccccaaggcttgctccgccgccggcaccagcactgcaactgtcgtcctctcggacgacgacagcgacttcgacctaggtgcggacgggggttcccgccgcgctgcgaagagccaacgcgtcctcaagcgcccgcataacggggccccatcgcggccttctctgccagttaaatcgtcccgccgcaatccccaaccatccaatgccgctgccgcctttgggttctccgatagtgaggacgatgacttcgatcttcctacgtcgcctttgaggacgtcaagccttcgccgcaaaggaaagaaccaacgccccctcaaggcccctcagctcaaacctcacttgcgggctcctccgccacccaactcttccagccataatccgaaacggtccaaatttgcctccgatgtgaagctttccaacagtgaggacgacgatttcgacctcacaaaaacgttaagcctcaacagcagcacaaataggcaacacatccagaagcgtccacagcacaagccccgtttgcagcatcgtcagtcctttggctcatcttgcggcaatcagaagcattccaaggctgttgccaccacacggctatctgacagtgatgatgatgacttcaacatcacggacaatgactttgaccttccagcttcgcattcaaggatatcacgcccacgccgcactactagttgccgccggttgacgagttttgctattgacatctctgaggaagacgaagaagaccttgctgatgatgacttcgactaccaagacccaaggcctccccagcaacgctcctctggccgccgctttgtggtcggggacgatgatgacagtgatgtgcctgtagctctggaggaggaggatggggtgaattggtcggagctggagaaggaggacgtagatgaggactacaatggggtgagaagtgtacatgtggaggagcccgagggagatgtagtgggaatggcattgcacaaatgttcacgcatctcgtcagatctgcgcaaagagctttttggttcatcagcgcagaattgtgaaagctactgtgagatagatgcttccacttgtggtattgttactcaggaagacgtaaatgctgcatgcacacgtgagaagtctgggtttgagcctgtgttgaagccttatcagcttgtgggagtcaatttccttctcctactgcatcggaaaagcattggtggagcaattttggctgatgaaatgggtctagggaagacagtgcaggctgtcacttatcttaatctattacagcatctatataatgacccaggtccacatctgatagtttgcccagcttccgtgttggagaattgggaaagagaactcaggaaatggtgcccttcgttttcgatcatcatgtttcatggagctgcaaggactacctactcaaaggaattaagctccttaggaaaggctggctgtccagctccatttaatgtcctccttgttggctactcactttttgaaaggcggagtgctcagcaaaaggatgatcgtagggccctcaaaagatggcgatggagctgtgttttgatggatgaagcacatgttttgaaagataagggtagcttccgatggagaaacctgatggctgttgcgcaacatgctcgccaaaggctaatgctgacaggaactcctctccaaaatgatttgcatgagctatggtcattgttggagttcatgatgcctgatatatttgctactggggatgttgatctgaagaagctgctgaatgcagaagatcgcgaactaatttcacagataaagtccattttagggccatttattcttagacgtttgaagtcagatgtaatgcagcagcttgttcctaaaatccaacatgttaagtttgttgtcatgggcacagagcagtctgaagcttacaaaaatgccataaatgagtaccgtgctgcttgccaggctcgtagtgccaagtcttcagatggcatttccaataatgttgctggattgattccaaagcgacaaatatcaaactattttacacagtttcgtaagattgcgaatcaccctttgcttataaggtgtatttatggtgacaaagatgttgatcgaattgcacggttgctgtaccctaaaggtgcatttggcttcgaatgctccttggagagagcaatacaagagctaaagaactacagtgatttcaatatccaccaactattattgtcatatggtgatgtgggcacaaagggcgctctaaaggatgagcatgtttttgcatcggcaaaatgtcaggccttaggggagcttttaccttctctggcaaatgatggtcacagagtactcatatttagtcagtggaccacaatgcttgacatccttgaatgggcattggaaattataggagttacatatagacgccttgatggagggtatgttctttatttagttttgtaatcaaaatttactctgtttattagctattttgtatt

SEQ ID NO: 106481 - DNA, 420 bp, Zea Mays
gaagggggctgcgcaggggaggacgagaccgggccggccggggcgggcgcggccacaccgggcgcgcggggcacgaccacagccgccgaggagaggcgcgcgagcgcgggagcacgggaacgcgggcgccaccgccgaccgccgctgccgccgccgtcggggagggggaaaggggcgccgccggggaggggaaacggaggggggaggggtgccctcgccggaaaaagtaaggggagatttgtttttttttttttttttttttttttttttttttttttttttccctttttttttttagtatatttaccctactattttttttttttttttttttttttatttttttattttttttttttttttatattttacttttattttttttttattttcatttttcttttttttattttttttttt

SEQ ID NO: 106482 - DNA, 939 bp, Zea Mays
aaccagcccaaccttcacgcaccgcatttcccaagggaaccataccagagcggcagagccttcccctccgctccccagtcccacccgcaccctagccctcagcaaaccctaaccgctcgtcgccatgaaggacacctcgttcaaggccaccggcgccaagcgcaagaaggtcggcggcgccaagcgcgggctcacccccttcttcgcgtttttggctgagtttaggccgcagtacctggagaagcaccctgagctcaagggcgtaaaggaggtgagcaaggcggctggggagaagtggcgctctatgtcggatgaggagaaggcgaagtatggcggtagcaagaagcaggatggcaaagcaagcaagaaggagaacactagctccaagaaggccaaagctgatgttcgggagggagatgaagcagaaggttctaacaagtcaaaatctgaggttgaggatgatgagcaggatggacgaggatgagtaaatagtacgatggggaacagcagctttgcaattgagtgtttgctgctttacttatttttctatatgctgttccttttgatgttatatgctgtaaggaaaatctgtacatgatggtaccttagggtatggcatgctggagttcccctttaacccgaagagccggatacttttgccagcctcgtcagcatgtgtaaacagttgttttcttgttttatcgacttattgggtgactacccaagagttggtttgtagtcaatgaggtatgctgccccctgtggtgctacgcagctgcagcaacatcagatggtcaggctaaaatcatgttgtgggatctgattctaatgatgcttatttagtactattacaaatatctatcgttgcttatataaatttgttaaaccttgagatatttttaccaagttctatattcgtatttccctccattccattga

SEQ ID NO: 106483 - DNA, 994 bp, Zea Mays
aacatcatgtgacaggaactgaactttaaccaaacaccgccgaaggcaaccagcccaaccttcacgcaccgcatttcccaagggaaccataccagagcggcagagccttcccctccgctccccagtcccacccgcaccctagccctcagcaaaccctaaccgctcgtcgccatgaaggacacctcgttcaaggccaccggcgccaagcgcaagaaggtcggcggcgccaagcgcgggctcacccccttcttcgcgtttttggctgagtttaggccgcagtacctggagaagcaccctgagctcaagggcgtaaaggaggtgagcaaggcggctggggagaagtggcgctctatgtcggatgaggagaaggcgaagtatggcggtagcaagaagcaggatggcaaagcaagcaagaaggagaacactagctccaagaaggccaaagctgatgttcgggagggagatgaagcagaaggttctaacaagtcaaaatctgaggttgaggatgatgagcaggatggtaatgaggacgaggatgagtaaatagtacgatggggaacagcagctttgcaattgagtgtttgctgctttacttatttttctatatgctgttccttttgatgttatatgctgtaaggaaaatctgtacatgatggtaccttagggtatggcatgctggagttcccctttaacccgaagagccggatacttttgccagcctcgtcagcatgtgtaaacagttgttttcttgttttatcgacttattgggtgactacccaagagttggtttgtagtcaatgaggtatgctgccccctgtggtgctacgcagctgcagcaacatcagatggtcaggctaaaatcatgttgtgggatctgattctaatgatgcttatttagtactattacaaatatctatcgttgcttatataaatttgttaaaccttgagatatttttaccaagttctatattcgtatttccctccattccattga

SEQ ID NO: 106484 - DNA, 1084 bp, Zea Mays
aacatcatgtgacaggaactgaactttaaccaaacaccgccgaaggcaaccagcccaaccttcacgcaccgcatttcccaagggaaccataccagagcggcagagccttcccctccgctccccagtcccacccgcaccctagccctcagcaaaccctaaccgctcgtcgccatgaaggacacctcgttcaaggccaccggcgccaagcgcaagaaggtcggcggcgccaagcgcgggctcacccccttcttcgcgtttttggctgagtttaggccgcagtacctggagaagcaccctgagctcaagggcgtaaaggaggtaagttgcttcttctcaccctaggcatgtagctgggtttcgcttaggtggctggtatatgcctttgctcgtcggtgactttgcttataggtgagcaaggcggctggggagaagtggcgctctatgtcggatgaggagaaggcgaagtatggcggtagcaagaagcaggatggcaaagcaagcaagaaggagaacactagctccaagaaggccaaagctgatgttcgggagggagatgaagcagaaggttctaacaagtcaaaatctgaggttgaggatgatgagcaggatggtaatgaggacgaggatgagtaaatagtacgatggggaacagcagctttgcaattgagtgtttgctgctttacttatttttctatatgctgttccttttgatgttatatgctgtaaggaaaatctgtacatgatggtaccttagggtatggcatgctggagttcccctttaacccgaagagccggatacttttgccagcctcgtcagcatgtgtaaacagttgttttcttgttttatcgacttattgggtgactacccaagagttggtttgtagtcaatgaggtatgctgccccctgtggtgctacgcagctgcagcaacatcagatggtcaggctaaaatcatgttgtgggatctgattctaatgatgcttatttagtactattacaaatatctatcgttgcttatataaatttgttaaaccttgagatatttttaccaagttctatattcgtatttccctccattccattga

SEQ ID NO: 106485 - DNA, 171 bp, Zea Mays
aggtatcctgcacacataacccttctgcgtggaaatcatgaaagtaggcagttgatacaggtgtatggtttctatgatgagtgttagaggaagtatggcaacgccaatgcatggcggtattgcactgatgtttttgattaccttatctatcagcaatcattaatggtcaag

SEQ ID NO: 106486 - DNA, 549 bp, Zea Mays
tgtctccagtgtctctgtttccagtgctgccaggagtttcgtcaaggccttgtttctggtaatgatgccaaagttgatggtggaggcaagcaagattttctatcaggagttagtcatgataaaatcataagcaaaaggccatctgatggacagaatgacatgttgatagatagtgtagttcctggtgaaaacatcacttctagcttgagacagtggagtgtgaataaagatggaaccataccttgcccaccaaatgcatttgtggttgtgggagctctccttgaactgaagtgcttgtttaaagagaagtttattgctgaattactggagaaagctgattcagcgctcaataatgaaatggaggtgaagatagaaggatcaaaatgtccctgcttcactgaatccggtgacatggatgatggtatatcatggaaatcatcttgcagggagaattcctgtgataactacatatattgcccaaccgctacaaatgtccaaaatggaagtttagaccatttccaggagcattggttgaagggtgaacctgta

SEQ ID NO: 106487 - DNA, 106 bp, Zea Mays
gtggttttatacgttcccgttgcaacgcacgggcactctcctagtctgggattaattgtttatacatgggtatgccggtgcacattagaataggttggtgcatatc

SEQ ID NO: 106488 - DNA, 2624 bp, Zea Mays
tcggtccgcccgcgcgcgtgaccgcatcattgcgccatcagcccgccgagccgaaccgccccgtcgccgcgccggacgaccaagaccaaaggccaccgaacgccataatggcgggcaagtacgagtaggaaggaaggggttatacactccctgcctgctccacttcactccagagtccagacctctgagcgcacgtcgtacttgtaccgttcgttcgcgccagcagcagccagccaccagcgccggcgccaggcacgcgatggggtgcaaggggtccaagctcgacgaccaggaggccgtcgcgctctgccgtgcccgtgccgagctgctcgccgcggccgtccgccaccgttacgcgctcgcggacgcgcacgcggcactcgcggactccatcgactcggtcgccgcgccgctgcaccgcctcctccgcctgcaggccgagtcgccggggctcacactgccctccgcgcgcaagggcggcggcgcgcccgcggaccgtttgccgcggtccttccgcccgtcgtcctccgcgccgcagcctgcccacggccattcctcgcacctccagttcggcgcgtcgcccggatcggagccgccatcgccggcagaatcccctccgcgccgcgtacccgagcagctgcagcacccgcacccgcaccacgccgcgtacgggtacgagtacgactacgcgacgcagcctgcgtacgcgtacccgccgacgccggcgggctcgctgcagttctactacgctcgcagccgcccgccccccgcgtccgtcgccgtcacgcagcgcgttccggggccgccagagcgcgtagtgcgcttcggctcgttcgacgcagcgggcggctacccgcagcagtacgcctacagcgcccagcgggccccgatcccgcctcccgctccggccgcgctgcagcgggcggctccgcctgcgccgccgaaggcgagctcgtgggacttcctcaacgtgttcgagaactacgactcgtacgaatacgacacgtactactacgactccgccacggcagctactgcggccgcggcgccttacacgccgagccggagctcgcgggaggtgcgcgaggaggagggcatcccggacctcgaagatgacgacgacgaagacagcgtggtcgtgaacgaggtggccgggcagtactcagcacctgggagcggcggagcccgcagccggcgcagctcgctcggcggtgtcagtgccaccgccgagctcgaccaggcggagaatattatcgacgtcatcggtgagttacggcgaaggccaaccgcacatggtaatgtgtcggtgcacgctccaccacctcccacgcggagggccgtcgacaaggagaatgtagcttgtgaaatcaaggcacagcttgtccgcacggccgaggcggctaggcagctcgcgccaatgctcgaagtcgggaggccaagctaccaaggccgcacttcctcaaagatgatgtcggctatctccgtggctcatttggggtgcaaagacatggacgccgtggacgtcggagtggtagcgatggtggactcgcagagcctatcctcggcacttgagaaactctatttctgggagaggaagctgtatgctgaggtcaaggccgaggagaaaatgcgcctacttatttccaagaactccaagcgactgaaattattagatcaaaagggtgcagagcctcaaaagattgatgcaactcgaaatttgctgagaaagctttcaacaaagataaggatagctgtgcgcgttattgccaagatttcaagaaaaataaacaaattaagggatgaggaattgtggccgcaagttaacgctttgatccaagggtttgtattaatgtggcaagataaattggactcttaccatagacagtgtcaagtgatatcagaagccaaaaactgtacctcggttctgtcaggtgaaaatgggcaggatttggtgttggagcttgaggtagagctgatcaaatggatcatcagtttttcctcttgggtgaattcacaaaggaactttgtaaaggcactgaatggatggctagcactctgtcttaactacgagcctgaggataatactgctggagttccatcttattcaccgggaagcatgggtgctccattggtttttgttacctgcaacaaatggtcccaagccatggatcagatttctgagaaggatgtggttaacgccatgcaagctcttgtgtctagcgtgcggcacctgtgggaacaggagcatcttgagcaaagcgaacaaataatctcaatccgagaaagggaaaaatggatcaaatttttggagaggaagacccaggatattagtaaggaggctgatgaactaaacaagaagctggcattaataccaagtcggcatagactgcatgtgcctcggatcgtacaattgtacgaggcgcattgtgttgaggcaagtagcttgcacataaatctgaggctggttcttgaagccttagagaactttgctgccaattcgctgcaagctttcctgggtgtgtcaaaaagtgctgaagggacaaggctgcctagggataatgtgaggagagagcgccgtagttcgaatagaggttcaaactacaaaaccagctcctaagatgcag

SEQ ID NO: 106489 - DNA, 1177 bp, Zea Mays
gcaaaaggcagtggaacacaacacacccaggcacgatggccgggtaccgccgcaccatctcgttcccggccccgaagcccggagccgacgccctcgctctggcgaccgcgagcgacaagctggcggcgtaccgcatccggtcgtccagcctcccctgccgcttccacccgctgctgctgcagctggacgacgacgtggccgcgctgcgcctcgtgatcggccagtccccgccctgcccgtccgcgccgtcgccgtcggcgtcgtccgtgtccgcggcggcgtcgcaggtgtgccgggtgctcgtctcgctctcggagctgctgcgccacccgcaggtgcgggagccgctgcgccgcctgctgggccggtcccgcctcgcggagcggctcctggacgacctcctccgcctcgccgacgcgcacggcagcttccgccaggcgctggtcgcgctggccgcgctgcaggccgagacgcgcgccgcgctgcgccgcggcgaccccacgaggctggcgtccgcgtcgcgcgcgcagcggcgcgccgggcgcgacctcccgcgcctcgcggccgccgcgcgcgccgtggccgccagggcccccgcgccgctccccgagggcctcccgcccgacgccgcggcgctcgcggccgcggtcgccgacgcgaccgccgccgtggcctccggctccgccgccgtcttctccggcgtctcctcgctctccaacgccgccgcctccgcccgcgtcgaggtcgcctccacgccgtgctgggtcaccgcccccgcgagaccgtcggacgcgccggggaccagccgccaccacatatggtgggtggccgacctggtgcgctggatgtcgcgcgccaagcggcgctccgccgagaagcagaaaggcgtcgacgaggacgaggagtcttccaccgcgcagttccggcccgaggcacgcgtgaagcccgaggagagggcgcggaaggcggcgttcgagcgccacgagaacctggagcgctgcatcgccaacgtcgacggtagcggcgagaaggtgttccgagcactggtcgacaccagagtgtcattgctcaacatcctcagcccgggcttctgatgcccgaacgaaccagatcggcattgaaattccagaattttattctgggccgcatgctatgcttggacaaaacctgtaaatat

SEQ ID NO: 106490 - DNA, 590 bp, Zea Mays
gatccatatgaaaaacataaaaaagatccaattctaaataatacggagtaatgtcttgtctaacacgagtgcccgagaatttatcaaaacatgaaaaggctcacacgaagcaaacaatcttgttggttccggctgcggtcctcatcaccaaaaaacagaagtccaatacactgtccaatcaagaccctaaaccaccacaaaatcattcacttcccccaccaataaattcatgcaagacgccggtccacaggcgcagatttcgaatggaagtaaaactaataccgaacaaaaaagtatgactttcactgaagaatcatgcatcctcctccttttctaggcagttgcaggagctcacggagcaagagactatgattcctatcagcaatgcatcgcaggcatacacaaatacaattataggcaaacgctctctgcaagttccctaaatggagggcggctaggcaatctctcttggatcgaccacataccgctcgtgaagtaggccctgaactcagcgcgctcgacgaggcgtgcgctcagcgcgtcgtagcaggcgggcgcctggtgcgcaccaggcatctcaaggacccgtc

SEQ ID NO: 106491 - DNA, 1052 bp, Zea Mays
cgccgcttccgcatcggcgccgtccaaggttaccgaggccgagctcgtgcgcctccgcgaggaggagcggctccgcctcgagcgggaggcagaggccgccaagaagcgcgccgcgcgggtcgccgaggaggaggagtacgagcgcgtagtcctcgtcgaaaacactaacagggatgattccctcatcgaggccaggtcggttgaggaggctatcgcgcggatgtcggtcgtggatccgcaggcgtccctgcccgctgacaagcatcctgagcgtcgcctcaagtcgacctttaaggcatttgaagaggcagagctccctaagctgaaggaagaaaagccaggtctaacgctgcaccaatacaaagacatgatatggaaactgtggaagaagtccccagacaaccctcttaaccaggctgctgactgaattttgcaaccctactgaatcttatgtaaaggccaaccttcaaacagcactggattggtgaattgtgttggtacctttttcttggagtggatgcgcaccaaaccttgaatcagaaaggtgttccagtctcggctaataatttccaaatcactggagtgtatactgtgggaggtgctcttgtttagactcgactagtcgagtttcctttttgtgtttagtatgatggttgggcacgtgctggtaccgaacgtgcttcactcattatagtattttgattcttgaacaaattgtgtgttgggctaaaccatgatatatctatccattgagttacgaaggccgcctcattatttgcctcaatctctctcgtttttttactagattatataagctggattatagtgaaaatgtagaaggataaaatatcactgtagtatcacaaataagttgaaataagttaactaatgctagcttagtttatttgtagttgtagtatcacaaataagttgaaataagttaactaatgctagcttagtttatttgtagttctaaagtgatattttaccatcttaccttttataataatctaacggtttgtttttttgcttttaattcatatagattgagt

SEQ ID NO: 106492 - DNA, 1474 bp, Zea Mays
gtagagccgcagaggtcgaaggtggaaattgcattcagcaagcgagaacgtgtcatccgatttcagggccagacgcttacagaagaagtctctcgaacgcgtgccctacccggctaccccaccgctggccaatttctacagaaggacacctcgccgacctccattccccccgaaccgcaaagcggagtccggattgcagttgcttcggcccatccggccgtcacatcagccacacgccgccgcgccagtcgccgcacgagggggcccgtgatgccgaagaagatgggcgtgaactccaaggcggaggcggcccgcgaccgccgctccgccgcggaggccgaccgccgcgaccgccaggagcgcgccaaggaggagcagtactgggccgaggctgagggccccaagtcccgcgctgcgcgccgccgtgaggaggacgccgagaagcgcgccgaggccgcggctcgcaaggccgagaaccgccgcctcgccgaggcagaggccgccgccgtcgccgcttccgcatcggcgccgtccaaggccgccgcgcgcaaggcgtcccgcgttgccgctccgccccccaaggttaccgaggccgagctcgtgcgcctccgcgaggaggagcggctccgcctcgagcgggaggcagaggccgccaagaagcgcgccgcgcgggtcgccgaggaggaggagtacgagcgcgtagtcctcgtcgaaaacactaacagggatgattccctcatcgaggccaggtcggttgaggaggctatcgcgcggatgtcggtcgtggatccgcaggcgtccctgcccgctgacaagcatcctgagcgtcgcctcaagtcgacctttaaggcatttgaagaggcagagctccctaagctgaaggaagaaaagccaggtctaacgctgcaccaatacaaagacatgatatggaaactgtggaagaagtccccagacaaccctcttaaccaggctgctgactgaattttgcaaccctactgaatcttatgtaaaggcaagtattaaatctctaacttaataggttcattctacttatgtcggatttcatgagcaatagcataccattgttttatatgtgcaggccaaccttcaaacagcactggattggtgaattgtgttggtacctttttcttggagtggatgcgcaccaaaccttgaatcagaaaggtgttccagtctcggctaataatttccaaatcactggagtgtatactgtgggaggtgctcttgtttagactcgactagtcgagtttcctttttgtgtttagtatgatggttgggcacgtgctggtaccgaacgtgcttcactcattatagtattttgattcttgaacaaattgtgtgttgggctaaaccatgatatatctatccattgagttacgaaggccgcctcattatttgcctcaatctctctcgtttttttactagattatataagctggattatagtgaaaat

SEQ ID NO: 106493 - DNA, 1263 bp, Zea Mays
atatgtccttattgtaggcgtgcacacccgtgttctgcctctcgacgcctgtctgcccgcgccccccgcttgtgatgcccatctcgtctccccgctgtggcagccgccttcgcgtccgccgcgagatccctccgcgcacgggcgcgtcccccacaaaccgcgctccgtgaaatccgcactcccctcgccgcctccccagcccgcagcctctcctcaacctccctccccaaggagctggcggcggcgcgactgcgtcgggagaggacgcagaggacgccgcgcgggggctgcggcaggagctcgactccgagcaggcctccccggagatggcagccagatccggctattgagccccctaaccgagcggatccaagttgctctacacagcaagtctatgaggaaggagcaaaagaagttgctctttcagttgtcagcggaattaatttaactcaagcatacttgcctatggcaaacaagcagtggacttacacaatgatcgaaatgacagactgttcgtgctatcggtttggaaagaacatgtggaaagctaatctcggatcttgcttccttcagacccaaaggaccttgaacagcaaaatctaaggtttcaacattgcagacacacaagagtccagcatgcgccaacgctcctgcagttgatgcttcttccagtagtttgtgacagattgctcaaagaaaagcaagacagctcgccaatcctagaagtggaaaaaaacaacatagaataattagccagctacagggagtaaaccattaagagaagaaacatcgtaatgccatgtttccaaatgggcacaaagaaacttcaagcacctctagacggaagctgtctgcactgaagatcaggacacgaatatcgcgagctttatcaaggctcgccttgtgcggaaggtgtatttctgtgagatctccaagatgaagcattagggggtcaatcgccccagattttacatgtagctaacttagtagggcacccataatccataatttattctctgtagttgtagcagcgacctagaggtgttattctgtagcacattgtgtaacatgtaggagagagataaacacatatccccattctttctactgaaacaccagaaatagttgctcttgctccataattcattaatgtgaacttctgaagccatgccaaggtcttatattgatcctctgttgtcatattgataaaaatagggtatgtaaaaccttttctcataacagtttaacacatattttatatat

SEQ ID NO: 106494 - DNA, 1421 bp, Zea Mays
atatgtccttattgtaggcgtgcacacccgtgttctgcctctcgacgcctgtctgcccgcgccccccgcttgtgatgcccatctcgtctccccgctgtggcagccgccttcgcgtccgccgcgagatccctccgcgcacgggcgcgtcccccacaaaccgcgctccgtgaaatccgcactcccctcgccgcctccccagcccgcagcctctcctcaacctccctccccaaggagctggcggcggcgcgactgcgtcgggagaggacgcagaggacgccgcgcgggggctgcggcaggagctcgactccgagcaggcctccccggagatggcagccagatccggctattgagccccctaaccgagcggatccaagcaagcatacttgcctatggcaaacaagcagtggacttacacaatgatcgaaatgacagactgttcgtgctatcggtttggaaagaacatgtggaaagctaatctcggatcttgcttccttcagacccaaaggaccttgaacagcaaaatctaaggtttcaacattgcagacacacaagagtccagcatgcgccaacgctcctgcaggttagtccgagatggcccttcattttcctgtttcaatagataaaaaaactgaggtcgcattaaaaaactgaagtctattcaacaaatcaccaaccatgatttttctgaggcacatgggtacaatcagcacaaactccatttgccaagaaaaggttataatgcattcacaccaataaatgttcgtttcacaagacataagcaaagaacattgaggtcgcattatctaaccttttggtgattgcagttgatgcttcttccagtagtttgtgacagattgctcaaagaaaagcaagacagctcgccaatcctagaagtggaaaaaaacaacatagaataattagccagctacagggagtaaaccattaagagaagaaacatcgtaatgccatgtttccaaatgggcacaaagaaacttcaagcacctctagacggaagctgtctgcactgaagatcaggacacgaatatcgcgagctttatcaaggctcgccttgtgcggaaggtgtatttctgtgagatctccaagatgaagcattagggggtcaatcgccccagattttacatgtagctaacttagtagggcacccataatccataatttattctctgtagttgtagcagcgacctagaggtgttattctgtagcacattgtgtaacatgtaggagagagataaacacatatccccattctttctactgaaacaccagaaatagttgctcttgctccataattcattaatgtgaacttctgaagccatgccaaggtcttatattgatcctctgttgtcatattgataaaaatagggtatgtaaaaccttttctcataacagtttaacacata

SEQ ID NO: 106495 - DNA, 1180 bp, Zea Mays
atatgtccttattgtaggcgtgcacacccgtgttctgcctctcgacgcctgtctgcccgcgccccccgcttgtgatgcccatctcgtctccccgctgtggcagccgccttcgcgtccgccgcgagatccctccgcgcacgggcgcgtcccccacaaaccgcgctccgtgaaatccgcactcccctcgccgcctccccagcccgcagcctctcctcaacctccctccccaaggagctggcggcggcgcgactgcgtcgggagaggacgcagaggacgccgcgcgggggctgcggcaggagctcgactccgagcaggcctccccggagatggcagccagatccggctattgagccccctaaccgagcggatccaagcaagcatacttgcctatggcaaacaagcagtggacttacacaatgatcgaaatgacagactgttcgtgctatcggtttggaaagaacatgtggaaagctaatctcggatcttgcttccttcagaagacccaaaggaccttgaacagcaaaatctaaggtttcaacattgcagacacacaagagtccagcatgcgccaacgctcctgcagttgatgcttcttccagtagtttgtgacagattgctcaaagaaaagcaagacagctcgccaatcctagaagtggaaaaaaacaacatagaataattagccagctacagggagtaaaccattaagagaagaaacatcgtaatgccatgtttccaaatgggcacaaagaaacttcaagcacctctagacggaagctgtctgcactgaagatcaggacacgaatatcgcgagctttatcaaggctcgccttgtgcggaaggtgtatttctgtgagatctccaagatgaagcattagggggtcaatcgccccagattttacatgtagctaacttagtagggcacccataatccataatttattctctgtagttgtagcagcgacctagaggtgttattctgtagcacattgtgtaacatgtaggagagagataaacacatatccccattctttctactgaaacaccagaaatagttgctcttgctccataattcattaatgtgaacttctgaagccatgccaaggtcttatattgatcctctgttgtcatattgataaaaatagggtatgtaaaaccttttctcataacagtttaacacata

SEQ ID NO: 106496 - DNA, 1984 bp, Zea Mays
atatgtccttattgtaggcgtgcacacccgtgttctgcctctcgacgcctgtctgcccgcgccccccgcttgtgatgcccatctcgtctccccgctgtggcagccgccttcgcgtccgccgcgagatccctccgcgcacgggcgcgtcccccacaaaccgcgctccgtgaaatccgcactcccctcgccgcctccccagcccgcagcctctcctcaacctccctccccaaggagctggcggcggcgcgactgcgtcgggagaggacgcagaggacgccgcgcgggggctgcggcaggagctcgactccgagcaggcctccccggagatggcagccagatccggctattgagccccctaaccgagcggatccaagatagttttttttgtctccagttgctctacacagcaagtctatgaggaaggagcaaaagaagttgctctttcagttgtcagcggaattaatttaactcaagcatacttgcctatggcaaacaagcagtggacttacacaatgatcgaaatgacagactgttcgtgctatcggtttggaaagaacatgtggaaagctaatctcggatcttgcttccttcaggtacagacaacccttgtttttataggagttgtcagagaattgttttcgtgattaaacatgtgtgtttgtttagtggctggtattgttatcatatacccttgtttttagttctatacatattccttaagcatgagcaaattgggggcatttttagtgaagcaattactggtatgtacatgcaattactggtatgtacatggttaatcaaataatttgcatcatggatgttgttttagtgattaatcactcagaaccgatttcctgatgaactggatacactgtttagtgccagctattatttaagcacaagaagtagtcatatacccttgtttttatgtctgtacataccacctggaaatttacacatggggccattttttagtgaagcaattactaaacctgtatagttctggtggctgctataatttttcctgattaatcagagaattgttttagtgattaaccatgtgtgtttagtggctggtattgttgtcatataccttgtttttaggtctgtacatactacctgagcatgaccacatcagccttatgtttgaacaatttcacacatttacatttgtgaatgtgttgaccgtaagcatcatctttatttaaatcagaaacttggttttacaatgatgtctcattgaagttcttgcttttccttgtttgcaaatctgaaatacccttgtatgttctggcggaaagaagacccaaaggaccttgaacagcaaaatctaaggtttcaacattgcagacacacaagagtccagcatgcgccaacgctcctgcagttgatgcttcttccagtagtttgtgacagattgctcaaagaaaagcaagacagctcgccaatcctagaagtggaaaaaaacaacatagaataattagccagctacagggagtaaaccattaagagaagaaacatcgtaatgccatgtttccaaatgggcacaaagaaacttcaagcacctctagacggaagctgtctgcactgaagatcaggacacgaatatcgcgagctttatcaaggctcgccttgtgcggaaggtgtatttctgtgagatctccaagatgaagcattagggggtcaatcgccccagattttacatgtagctaacttagtagggcacccataatccataatttattctctgtagttgtagcagcgacctagaggtgttattctgtagcacattgtgtaacatgtaggagagagataaacacatatccccattctttctactgaaacaccagaaatagttgctcttgctccataattcattaatgtgaacttctgaagccatgccaaggtcttatattgatcctctgttgtcatattgataaaaatagggtatgtaaaaccttttctcataacagtttaacacata

SEQ ID NO: 106497 - DNA, 1500 bp, Zea Mays
atatgtccttattgtaggcgtgcacacccgtgttctgcctctcgacgcctgtctgcccgcgccccccgcttgtgatgcccatctcgtctccccgctgtggcagccgccttcgcgtccgccgcgagatccctccgcgcacgggcgcgtcccccacaaaccgcgctccgtgaaatccgcactcccctcgccgcctccccagcccgcagcctctcctcaacctccctccccaaggagctggcggcggcgcgactgcgtcgggagaggacgcagaggacgccgcgcgggggctgcggcaggagctcgactccgagcaggcctccccggagatggcagccagatccggctattgagccccctaaccgagcggatccaagttgctctacacagcaagtctatgaggaaggagcaaaagaagttgctctttcagttgtcagcggaattaatttaactcaagcatacttgcctatggcaaacaagcagtggacttacacaatgatcgaaatgacagactgttcgtgctatcggtttggaaagaacatgtggaaagctaatctcggatcttgcttccttcagaagacccaaaggaccttgaacagcaaaatctaaggtttcaacattgcagacacacaagagtccagcatgcgccaacgctcctgcaggttagtccgagatggcccttcattttcctgtttcaatagataaaaaaactgaggtcgcattaaaaaactgaagtctattcaacaaatcaccaaccatgatttttctgaggcacatgggtacaatcagcacaaactccatttgccaagaaaaggttataatgcattcacaccaataaatgttcgtttcacaagacataagcaaagaacattgaggtcgcattatctaaccttttggtgattgcagttgatgcttcttccagtagtttgtgacagattgctcaaagaaaagcaagacagctcgccaatcctagaagtggaaaaaaacaacatagaataattagccagctacagggagtaaaccattaagagaagaaacatcgtaatgccatgtttccaaatgggcacaaagaaacttcaagcacctctagacggaagctgtctgcactgaagatcaggacacgaatatcgcgagctttatcaaggctcgccttgtgcggaaggtgtatttctgtgagatctccaagatgaagcattagggggtcaatcgccccagattttacatgtagctaacttagtagggcacccataatccataatttattctctgtagttgtagcagcgacctagaggtgttattctgtagcacattgtgtaacatgtaggagagagataaacacatatccccattctttctactgaaacaccagaaatagttgctcttgctccataattcattaatgtgaacttctgaagccatgccaaggtcttatattgatcctctgttgtcatattgataaaaatagggtatgtaaaaccttttctcataacagtttaacacata

SEQ ID NO: 106498 - DNA, 1191 bp, Zea Mays
atatgtccttattgtaggcgtgcacacccgtgttctgcctctcgacgcctgtctgcccgcgccccccgcttgtgatgcccatctcgtctccccgctgtggcagccgccttcgcgtccgccgcgagatccctccgcgcacgggcgcgtcccccacaaaccgcgctccgtgaaatccgcactcccctcgccgcctccccagcccgcagcctctcctcaacctccctccccaaggagctggcggcggcgcgactgcgtcgggagaggacgcagaggacgccgcgcgggggctgcggcaggagctcgactccgagcaggcctccccggagatggcagccagatccggctattgagccccctaaccgagcggatccaagatagttttttttgtctccagttgctctacacagcaagtctatgaggaaggagcaaaagaagttgctctttcagttgtcagcggaattaatttaactcaagcatacttgcctatggcaaacaagcagtggacttacacaatgatcgaaatgacagactgttcgtgctatcggtttggaaagaacatgtggaaagctaatctcggatcttgcttccttcagaagacccaaaggaccttgaacagcaaaatctaaggtttcaacattgcagacacacaagagtccagcatgcgccaacgctcctgcagtttgtgacagattgctcaaagaaaagcaagacagctcgccaatcctagaagtggaaaaaaacaacatagaataattagccagctacagggagtaaaccattaagagaagaaacatcgtaatgccatgtttccaaatgggcacaaagaaacttcaagcacctctagacggaagctgtctgcactgaagatcaggacacgaatatcgcgagctttatcaaggctcgccttgtgcggaaggtgtatttctgtgagatctccaagatgaagcattagggggtcaatcgccccagattttacatgtagctaacttagtagggcacccataatccataatttattctctgtagttgtagcagcgacctagaggtgttattctgtagcacattgtgtaacatgtaggagagagataaacacatatccccattctttctactgaaacaccagaaatagttgctcttgctccataattcattaatgtgaacttctgaagccatgccaaggtcttatattga

SEQ ID NO: 106499 - DNA, 2509 bp, Zea Mays
tgtgttctgtcgctatgggctccctggccaccgcggacgggccgttgccgccgctcaagtaccctcaggctcgccgggacgaagacatcgtcgacgactaccacggcgtcctcgtgccggacccttacagatggatggagcaggtggattcgaaggaggtgaaggagttcgtggacgcgcaggcggccgtgaccagcgccgtgctgtccagctgcgaccaccgcgggcgcctgcgcgggcagctcaccgcgctcttcgaccacccgcgcttccgcgcgcccttcaagcgccggggcagctacttctacttccacaacccgggcctccgcccgcacagcgcgctctacgtgcagcacgggctgggcggcgagcccgacgtgctgctggaccccagcacgttcagcgaggacggcacggtgtcgctcggcgtggtcggcgtgagcgacgacggcgagcacctggcctacggcaccagcggcagcggcagcgactgggtcaccatcagggtcatgcgcgtgcgcgacaaggagcacctgcccgatacgctgtcctgggtgaaattctcgcgcatcgcgtggactcgtgacggccaagggttcttctactcgcgttttccggctccaagaaatggcaacagggatgcgctggattctgggatgaagactggcgtcaatctcaaccacgaagtctactatcatttccttggaacagagcagtcacaggacgtgttgtgctggagagaccctgatcatcccaagtacatatacatccctcaagtcacagaagacggcaagtacgtgatcctttcggtctcagaaacgtcagagccggtgaacaagctgtactactgcgacctgtcggctctcgctcacgggctgggcggcgtgaagagcgcccatggcaacggcatgctccccttcgtcaagctcgtggacaggttcgaggcctactacgggctcatcgctaacgacggcacccagttcacgttcctcacgaacaaagacgctccaaggtacaagctggcgagggtggacgtcgacgacgacgagcccgggtcgccgtggtggaccgacgtggttcccgaggacgaggacgggaaggcggtcctggagtcggcgtgcgccgtccacggccacaagctgctggtgagctacctgtcggatgtcaggtgcgtcctgcagatgaggagcctggtcactggggagctgcttcacgacatacccgtcgacatcggcactgtcagcgggatctccggcagacgatgcgacgccgaggtgttcgtcgagttcgcgagcttccttacccccgggatcatctacaggtgcgatgtcggctctgcggtcccggagatggacgtgtacagagagatctcggttccaggattcgatcgaaacgagtttgaagcgaagcaggtgttttatccgagtaaggatgggaccaagatcccaatgttcatcgtatccaagaaggagatcagcctggacggatcgcacccggcactactgttcggctacggcggcttcggcgtgagcgtgacgccgcagttcagcgtcgcccgcgtggtcctgatgaggaacctggggttcgtggcgtgcgtcgccaacctcaggggcggcggggagtacggcgagggctggcacagggccgggtcgctcgccaacaagcagaactgcttcgacgacttcgtcgccgccggcgagttcctcgtgtccgctggctacaccagcccggcgaggctgtgcgtcgagggcggcagcaacgggggcctcctggtagctgcctgcgtgaaccagcgccctgatctgtttggctgtgccctggcccatgtcggagtgatggacatgctacggttccacaagttcaccataggtcgtgcatggacatgcgacttcgggtgttcggagaacgaggaagagttccagtggcttatcaagtactcccccctgcacaacgtgcggcggccgtgggagaacaaacgggcggccgcagctgccaacggcgacgcaagctgccggggcttaggcggccagtaccctgcaaccatgctgctgacggcggaccacgacgaccgcgtggtgccgtcgcacacgctcaaattcctcgcgacgatgcagcacgtcctgcgccccggcgcggatggcagcccgcagacgaaccccgtcgtcgcccggatcgagcgcaagagcggccactgctgcggccgctccacgcagaagatcatcgacgaggctgcggatcggtacgcattcgccgcgaagatgatgggagtctcttggatggactgactgagtaacccaccaaatgagtactgcgcatttggctcaggctgttaggttacaatgtatcggtgctgtattgtaagcggccaggctggcaacttggcgtgacacatgtttggttctgcttctggtttggaaaattagaagctgaactaaaagggcttcttttctgcgactactttaaaaaaaacagcttttctttagtgtaaatttgagaccttgttattgat

SEQ ID NO: 106500 - DNA, 2419 bp, Zea Mays
gtcggtgtgcagtgtgttgtcatctccatctccagctccagcgccgccttgctctgtgtgcttccgcccgctctgtgttgctattgctaaactagtgtgttctgtcgctatgggctccctggccaccgcggacgggccgttgccgccgctcaagtaccctcaggctcgccgggacgaagacatcgtcgacgactaccacggcgtcctcgtgccggacccttacagatggatggagcaggtggattcgaaggaggtgaaggagttcgtggacgcgcaggcggccgtgaccagcgccgtgctgtccagctgcgaccaccgcgggcgcctgcgcgggcagctcaccgcgctcttcgaccacccgcgcttccgcgcgcccttcaagcgccggggcagctacttctacttccacaacccgggcctccgcccgcacagcgcgctctacgtgcagcacgggctgggcggcgagcccgacgtgctgctggaccccagcacgttcagcgaggacggcacggtgtcgctcggcgtggtcggcgtgagcgacgacggcgagcacctggcctacggcaccagcggcagcggcagcgactgggtcaccatcagggtcatgcgcgtgcgcgacaaggagcacctgcccgatacgctgtcctgggtgaaattctcgcgcatcgcgtggactcgtgacggccaagggttcttctactcgcgttttccggctccaagggatgcgctggattctgggatgaagactggcgtcaatctcaaccacgaagtctactatcatttccttggaacagagcagtcacaggacgtgttgtgctggagagaccctgatcatcccaagtacatatacatccctcaagtcacagaagacggcaagtacgtgatcctttcggtctcagaaacgtcagagccggtgaacaagctgtactactgcgacctgtcggctctcgctcacgggctgggcggcgtgaagagcgcccatggcaacggcatgctccccttcgtcaagctcgtggacaggttcgaggcctactacgggctcatcgctaacgacggcacccagttcacgttcctcacgaacaaagacgctccaaggtacaagctggcgagggtggacgtcgacgacgacgagcccgggtcgccgtggtggaccgacgtggttcccgaggacgaggacgggaaggcggtcctggagtcggcgtgcgccgtccacggccacaagctgctggtgagctacctgtcggatgtcaggtgcgtcctgcagatgaggagcctggtcactggggagctgcttcacgacatacccgtcgacatcggcactgtcagcgggatctccggcagacgatgcgacgccgaggtgttcgtcgagttcgcgagcttccttacccccgggatcatctacaggtgcgatgtcggctctgcggtcccggagatggacgtgtacagagagatctcggttccaggattcgatcgaaacgagtttgaagcgaagcaggtgttttatccgagtaaggatgggaccaagatcccaatgttcatcgtatccaagaaggagatcagcctggacggatcgcacccggcactactgttcggctacggcggcttcggcgtgagcgtgacgccgcagttcagcgtcgcccgcgtggtcctgatgaggaacctggggttcgtggcgtgcgtcgccaacctcaggggcggcggggagtacggcgagggctggcacagggccgggtcgctcgccaacaagcagaactgcttcgacgacttcgtcgccgccggcgagttcctcgtgtccgctggctacaccagcccggcgaggctgtgcgtcgagggcggcagcaacgggggcctcctggtagctgcctgcgtgaaccagcgccctgatctgtttggctgtgccctggcccatgtcggagtgatggacatgctacggttccacaagttcaccataggtcgtgcatggacatgcgacttcgggtgttcggagaacgaggaagagttccagtggcttatcaagtactcccccctgcacaacgtgcggcggccgtgggagaacaaacgggcggccgcagctgccaacggcgacgcaagctgccggggcttaggcggccagtaccctgcaaccatgctgctgacggcggaccacgacgaccgcgtggtgccgtcgcacacgctcaaattcctcgcgacgatgcagcacgtcctgcgccccggcgcggatggcagcccgcagacgaaccccgtcgtcgcccggatcgagcgcaagagcggccactgctgcggccgctccacgcagaagatcatcgacgaggctgcggatcggtacgcattcgccgcgaagatgatgggagtctcttggatggactgactgagtaacccaccaaatgagtactgcgcatttggctcaggctgttagacc

SEQ ID NO: 106501 - DNA, 2409 bp, Zea Mays
gtcggtgtgcagtgtgttgtcatctccatctccagctccagcgccgccttgctctgtgtgcttccgcccgctctgtgttgctattgctaaactagtgtgttctgtcgctatgggctccctggccaccgcggacgggccgttgccgccgctcaagtaccctcaggctcgccgggacgaagacatcgtcgacgactaccacggcgtcctcgtgccggacccttacagatggtggattcgaaggaggtgaaggagttcgtggacgcgcaggcggccgtgaccagcgccgtgctgtccagctgcgaccaccgcgggcgcctgcgcgggcagctcaccgcgctcttcgaccacccgcgcttccgcgcgcccttcaagcgccggggcagctacttctacttccacaacccgggcctccgcccgcacagcgcgctctacgtgcagcacgggctgggcggcgagcccgacgtgctgctggaccccagcacgttcagcgaggacggcacggtgtcgctcggcgtggtcggcgtgagcgacgacggcgagcacctggcctacggcaccagcggcagcggcagcgactgggtcaccatcagggtcatgcgcgtgcgcgacaaggagcacctgcccgatacgctgtcctgggtgaaattctcgcgcatcgcgtggactcgtgacggccaagggttcttctactcgcgttttccggctccaagggatgcgctggattctgggatgaagactggcgtcaatctcaaccacgaagtctactatcatttccttggaacagagcagtcacaggacgtgttgtgctggagagaccctgatcatcccaagtacatatacatccctcaagtcacagaagacggcaagtacgtgatcctttcggtctcagaaacgtcagagccggtgaacaagctgtactactgcgacctgtcggctctcgctcacgggctgggcggcgtgaagagcgcccatggcaacggcatgctccccttcgtcaagctcgtggacaggttcgaggcctactacgggctcatcgctaacgacggcacccagttcacgttcctcacgaacaaagacgctccaaggtacaagctggcgagggtggacgtcgacgacgacgagcccgggtcgccgtggtggaccgacgtggttcccgaggacgaggacgggaaggcggtcctggagtcggcgtgcgccgtccacggccacaagctgctggtgagctacctgtcggatgtcaggtgcgtcctgcagatgaggagcctggtcactggggagctgcttcacgacatacccgtcgacatcggcactgtcagcgggatctccggcagacgatgcgacgccgaggtgttcgtcgagttcgcgagcttccttacccccgggatcatctacaggtgcgatgtcggctctgcggtcccggagatggacgtgtacagagagatctcggttccaggattcgatcgaaacgagtttgaagcgaagcaggtgttttatccgagtaaggatgggaccaagatcccaatgttcatcgtatccaagaaggagatcagcctggacggatcgcacccggcactactgttcggctacggcggcttcggcgtgagcgtgacgccgcagttcagcgtcgcccgcgtggtcctgatgaggaacctggggttcgtggcgtgcgtcgccaacctcaggggcggcggggagtacggcgagggctggcacagggccgggtcgctcgccaacaagcagaactgcttcgacgacttcgtcgccgccggcgagttcctcgtgtccgctggctacaccagcccggcgaggctgtgcgtcgagggcggcagcaacgggggcctcctggtagctgcctgcgtgaaccagcgccctgatctgtttggctgtgccctggcccatgtcggagtgatggacatgctacggttccacaagttcaccataggtcgtgcatggacatgcgacttcgggtgttcggagaacgaggaagagttccagtggcttatcaagtactcccccctgcacaacgtgcggcggccgtgggagaacaaacgggcggccgcagctgccaacggcgacgcaagctgccggggcttaggcggccagtaccctgcaaccatgctgctgacggcggaccacgacgaccgcgtggtgccgtcgcacacgctcaaattcctcgcgacgatgcagcacgtcctgcgccccggcgcggatggcagcccgcagacgaaccccgtcgtcgcccggatcgagcgcaagagcggccactgctgcggccgctccacgcagaagatcatcgacgaggctgcggatcggtacgcattcgccgcgaagatgatgggagtctcttggatggactgactgagtaacccaccaaatgagtactgcgcatttggctcaggctgttagacc

SEQ ID NO: 106502 - DNA, 3120 bp, Zea Mays
ccagcgagacggcctgttcctgagcagctgattcgtcgtttgggttgcccactgccggggccatggatcagcagcggaggagcagcatcaggttgtacgggtccaacgcctcgtcccggtcggggtccttcgacttcgaacacgaccaggacaaggaacgcgctgaccagcccagcgacggcgaccgccgggaggtcgtcgtgaagatcgacgccgagccgcactcgccggtctccctccacgcggccggaggcatgtccgggcacagctccgcggtcagcacgccgcgggccggcggcgcggtgagcatgctcgcggcgtctgcgtccggctcgagcgcgtcgacctccagcgctgggggcgatgcgccccgctccggcgagtcgttcagtttcaagaaccgcacgccgcagtcttcggccggcggcggggagtccagcgaagatccgccgagccgcctcattggcagcttcctccggaagcaggcggccgctggcggcgagctgtccatcgaccccgacttcgaggtggacgagatgagaaggccgccacgcgcgccgacatctgtcaacgcctccagggagctgcgcgtctcgttccaggatccccggaaacggttctccccgtccacgtcgtcggcgtcctcctcctcctacgacgccagccacaaccggaaccagagcaccatcgacttggacactgccgaggtgctacgctgcacgtcgacgtccaccggttcctccctgctggcgcgcagcaagacgcgatctcggctaatggatcccccgccaccgtcgacgtcgagcgcccccgccagcgaggtggatccccgaaagtcatttgtctccaaggggctgccgcccaagtccggccagctccggtcgggtcttatcggcaagtcggggctcattggcaaatcagggcccatcggcaagtcaggtgccttcgaggatgaggacgacgacccgttcatggacgagggcatgacctcggacttcaagcgcgacaccatggactgccttctcatcatggagtgggtgagcctggtggtcatcgtgggcgcgctcatctgcagcgttaccatacccagcctgtccataaagaagctctcggggctccacctctggaagtgggagctcctcgtgttcgtgctcatctgcggccgcctcgtgtccggctgggtcatccgcatcgccgtcttcttcgtcgagcgcaacttccttctgcgaaagaaggtgctctacttcgtgtacggcgtgcggcgggccgtgcggaacgtgctctggctgggtgtcgcgctcgtgtcctggcacctcctgttcgacaaggccgccaagcgggagacgcacacgctggtgctgccctacgtcaccaaggtgctgtgctgcctcctcgtggccaccgtgatccgcctcatcaagacgttgctgctcaaggtgctcgcctcgtccttccacgtctccacctacttcgacaggatccaggaagcgctcttcaaccagtacgtcatcgagaccctctccggcccgccgctagtggacgagagccggatgatggctgaggtgcagaggctccagagcgcgggggcgtccatccccagtgagctcgaagcgacagcgatgccgggcaagtccgggcccactgcccaagagtgggcgcctcacgacggccacaaaacagagcgccatctggatgacggcatctcgattgaccagctccacaagctcagccagaagaacatctctgcgtggagcatgaagaggctgatgaagattgttcggtacggggcgctgacaacgatggacgagcagctcaagcatgcaacgggcgaggacgagctggccacggagatacacagcgagtacgaggccaaggttgctgccaagaggatcttccagaacgtcgccaagcctggatccaagcacatatacctgtcagacttgatgcgtttcatgagacaggaagaagctctgaaggcgatggatcttttcgaaggagcgcaggagcacaacagggaaacatgaaacaaaatcccgtggcgtccaatcgctgtcgtctggatactgtaggtaaacgcgttcagagagcgcaaagctctcgccctgacgctcaacgacaccaagaccgcagtgaacaagctgcaccagatggccaacgtcgtggtcgcgctcatcgttctcgcgctctggctcctcatcctggggatcgcgacgtccaagttcttcgtcctgctcagctcgcagctgctcgtggcggtgttcatgttcgggaacactctcaggaccatcttcgaggcgatcgtgttcctgttcgtgatgcatcctttcgatgtcggcgaccgatgcgaagttgatggaatgcaggtggtcgtggaggagatgaacatcatgacgacgatcttcctccgatatgacaacctcaaggtgtactatccaaacagtaagctagcccagctaccgatcatgaattactacaggagtcctgacatgggagattcggtggacttcactgttcatgtcgcaacgccggtggagaaactgtccctcatgaaggagagactgatgcattaccttgacaacaagaaggagcactggtaccctggctccatggtggtcctgcgcgacgtggacgacacgaacaagctgaaggcctccatctggtgtcgccagacgatcaacttccacgacatggggatgaggttcgagcggagagagctgctgctccaggagatgatcaaggtcctgagagacctcgagatcgagtaccggatgctgccgctcgacatcaacgtccggaacgcgcctgccatccagtcctcaaggatgccgtcgacatggacgtttagttattgagatgagatgagatttgtgctgctagaggtagtagttcctgagtgagttgagctgtgacagcgttctgacgagaggcggcaacaggttttgctgtcgctgcagccatcacttgagctttttcctgtagttattgtgttgttggtccaagtactccatagttatctttagtccatctcagatatctttagttcatctcagttatattacctgatgcttgtcattctattacagatggtattgaataattgatttcatcacttggtaatga

SEQ ID NO: 106503 - DNA, 2009 bp, Zea Mays
ctgactggcgttcgtgttccgtgttcgactcgacgcgctcgtgcgtggcatacagacgaacacctcacaaggacaaccagtcccctcactcaggaagcttcccggggaaagaatgtgcgggtgtgcggccctcgtcgccggagcccggccgccacggcccgtcctcccccgcaggctccgtcgccgtcgagggagctccgtccgagcagaggtctcaccaggcggtgagtcccagccgaagaaggtcaccgtcgcaggcgccggctgggccggctttgccgccgcgcaccacctcattaaacaggggtacgatgtcacgcttcttgctgcggagagtggcccaacggaggaggttggcctcagaggattctggcaaccgtatcgcaacatcttcgctttagtcgacgagctggggatctcgcctttcacgggctggaataaagcagcatactattctacggagggccttgctgtcgaatttcccatatttcataaccagccccgattaccagctccctttggagtctttgcatatccagaattccctaatcttcctttgagtgataggctgacatcaattcctgtcatagctgcagtcattgacttcgacaacactgacactgcttggaggaaatatgatgcaatgactgcaaaagagctttttaagatgtatggttgctctcaaaggctctacagggaaatttttgagctagttattcaggctgccctgtttgctcctggtgagcaatgtagtgcagctgcaacactggggatgctgtactattatgtgttgtctcatcaggaaaattctgacttcttgctgtgccgtggtgaagtagaagaaaaaattttctctccttggctgcaatcattggagcttaaaggcttaaaatttgtagaaaataaagttccaacaagtttgactacagatgtggatagcggatgcatctcttctattgtttgtggtgatgatgtgtacgaggcagatgcatttgttttagccatgggactctcttctctacaatccatcgtcaaaaacagtccattcctacggtctgatcgagaattcaggaatcttcttcacctatctacagtcgatgtgatctctgtaaaattatggtttgataaaaagatcataattccaaaggttgccaatgtgtgttctggttttgatgattcatctggctgggcattctttgaccttacctcagtatatgatgattattgtgaagaatcaataaccattgtggaggctgaattttataatgctagccatttggtactcttaagtgatgatgatattgtctatgaagcttcatcacatcttatcaaatgcatacaagattttgagggcgcaattgtgataagatattcaatcagaagatctcctaattctgtaatcaactttcttccaggctcgtataagtacacactgagaggatcaacttcctttccaaatttgtttattgctggtgattggattgtcaaccgacatgggtccttttctaaagaaaaagcatatgtgactggacttgaagctggtaatagggtagtagactattttgacattggggactttgccaaaataattgcagttgaaggagatgagccccatatagagacattgcgaagtctcaatagaagagccaatgaactgaagtcacaaattccattctcagaattctttctccaataattttgttgggatttttctgtgtttgttgagcattgccattgttgtaggcattgttattaagtcggtaaggtaaagcgtggcgacctagccctttgagtcgactagacgcttaaggcgcgcagcgaggtgtcgccatacagatgtcctaacctacaggagagcaatagaaacataccttgttgatgccaattttggagctccagtttcgcttgttccatgtagcgtgtatcccccttacagattgcaacatgaacatgttgtgaattataattaatgtaagaaacaatttataatgcaatgattgaatgaatca

SEQ ID NO: 106504 - DNA, 1654 bp, Zea Mays
ctgactggcgttcgtgttccgtgttcgactcgacgcgctcgtgcgtggcatacagacgaacacctcacaaggacaaccagtcccctcactcaggaagcttcccggggaaagaatgtgcgggtgtgcggccctcgtcgccggagcccggccgccacggcccgtcctcccccgcaggctccgtcgccgtcgagggagctccgtccgagcagaggtctcaccaggcggtgagtcccagccgaagaaggtcaccgtcgcaggcgccggctgggccggctttgccgccgcgcaccacctcattaaacaggggtacgatgtcacgcttcttgctgcggagagtggcccaacggaggaggttggcctcagaggattctggcaaccgtatcgcaacatcttcgctttagtcgacgagctggggatctcgcctttcacgggctggaataaagcagcatactattctacggagggccttgctgtcgaatttcccatatttcataaccagccccgattaccagctccctttggagtctttgcatatccagaattccctaatcttcctttgagtgataggctgacatcaattcctgtcatagctgcagtcattgacttcgacaacactgacactgcttggaggaaatatgatgcaagaaaattctgacttcttgctgtgccgtggtgaagtagaagaaaaaattttctctccttggctgcaatcattggagcttaaaggcttaaaatttgtagaaaataaagttccaacaagtttgactacagatgtggatagcggatgcatctcttctattgtttgtggtgatgatgtgtacgaggcagatgcatttgttttagccatgggactctcttctctacaatccatcgtcaaaaacagtccattcctacggtctgatcgagaattcaggaatcttcttcacctatctacagtcgatgtgatctctgtaaaattatggtttgataaaaagatcataattccaaaggttgccaatgtgtgttctggttttgatgattcatctggctgggcattctttgaccttacctcagtatatgatgattattgtgaagaatcaataaccattgtggaggctgaattttataatgctagccatttggtactcttaagtgatgatgatattgtctatgaagcttcatcacatcttatcaaatgcatacaagattttgagggcgcaattgtgataagatattcaatcagaagatctcctaattctgtaatcaactttcttccagttgaaggagatgagccccatatagagacattgcgaagtctcaatagaagagccaatgaactgaagtcacaaattccattctcagaattctttctccaataattttgttgggatttttctgtgtttgttgagcattgccattgttgtaggcattgttattaagtcggtaaggtaaagcgtggcgacctagccctttgagtcgactagacgcttaaggcgcgcagcgaggtgtcgccatacagatgtcctaacctacaggagagcaatagaaacataccttgttgatgccaattttggagctccagtttcgcttgttccatgtagcgtgtatcccccttacagattgcaacatgaacatgttgtgaattataattaatgtaagaaacaatttataatgc

SEQ ID NO: 106505 - DNA, 1012 bp, Zea Mays
aaaattctgggccttatggggcttctccctcatcgggtcatccctctccgccccgcatctccctcatcgccccgcgcggccgcgcctccctcggtccctccccgctacctcgaacctctcctcctcctcctccgccgccgccttccctccggccagcgcatcctcctcctccgcctccgccgtcctccggctggaggcacatcctctgcctcctctgcctcccctcatgtgacacagcgcacatcgcttccgaagtcccaagagccacgtcgctcgtgccaccggccgccgctgtacgtccatcctctgtctccagactccaacagtgtgcatccgtcccagttcctgattacttttccgcgaccgtgagctgggagtatggccgaggcagcgaacgaggaggacgccaagaggacaggactggaaggcactggcctgccgctgcaaggcggctcccacggcaaccttcgtagcgctggcagcgaccagcagttgaggcagatgctcgattcgctcaaatcctcaaagtccccggctgtgatcaactatggtgcctcatggtgccgtgtctgcagtcagattcttccatccttctgcaagtgcagtgataagttcaagaaacttactttcatctatgtggacattgacgagtgccctgaaacaacccaaaacatacgctacaccccgaccttccatttttacagagacggcgaaagggtcgatgagatgctcggcgcaggagaagagagactacatgatcggctatggttgcattcttgattgattggcctccacctccgttgtttcatgaaccatttatgttgaatgcaactatgttttttgtctctccaaatttctacttgtcaaactcaatgtttcagagaaccttgtctaccagcctttgtgttagtcataagagcaagtattataagtacacctcagcaggctgtaaggtgttccacgttatcagattcttacgtggaggggtgagaaaccaagaaagagaaagaaa

SEQ ID NO: 106506 - DNA, 567 bp, Zea Mays
atgaccagacaggcagacaccaccacgaccctggcagcgatcgcgacctcggacacacgacaacagatcgccataaaccgcaaggaccagcccagcggggggctggaccatggcctgaaacttgtgagcagccgagggcatgccagtaactgcccccgatgcaaggtaacagcccagggcagaaatttcctgacgaatgccatcacccagacagatcaacaaaatgcacctaagcagcagtgtactttagcagcgccaaaaactcagtgtcctagtgttcgtgttgagttttgtgagcatttgggtggatccaagggtcctcttcttcgtctccggcaagacacgccggcaagtagaaggctacaactggtcatcgccctcgaggtacatccagagatgaagggagatcacgagaaaggtgactgccaagatcacatggggcgctctcaagaaaacacacctatgcgtggatcgagtgcgccaattgaaggcgaacacgctacagtgcgagttcgactcgctcaggttcaagaactctttggcatgcgcatcaccaacctcaactaa

SEQ ID NO: 106507 - DNA, 1291 bp, Zea Mays
aaccatcccgctcctcctccctccgtcaggctgtcactgtccccctcaccgccgccgtcctcgtcaccacacctcacccgttgctcccactccttccagaaccacctcctcgccaccgtggctgcctgccctgcccgctataagactcttcactcccgctgcgacgcagtcctcacaagcaccagaccaattaactagcttcttctagctctagctaggctcgtctgctgcaagaaggtaacagcgcaggcatggaggggaaggaggaggacgtccgcctgggcgccaacaagttctcggagcgccagcccatcggcacggcggcgcagggcacggacgacaaggactacaaggagcccccgccggcgccgctcttcgagcccggggagctcaagtcctggtccttctaccgcgccggcatcgccgagttcgtcgccaccttcctcttcctctacatctccatcctcaccgtcatgggcgtctccaagtccacctccaagtgcgccaccgtcggcatccagggcatcgcctggtccttcggcggcatgatcttcgccctcgtctactgcaccgccggcatctccgtgcctgggcgccatctgcggcgcgggcgtcgtcaaggggttccagcaggggctgtacatgggcaacggcggcggcgccaacgtcgtggcgcccggctacaccaagggcgacggcctaggcgccgagatcgtcggcaccttcatcctcgtctacaccgtcttctccgccaccgacgccaagaggaacgccagggactcccatgtgccgatcctcgcccctcttccaatcgggtttgccgtgttcctcgtccacctggccaccatccctatcaccggcaccggcatcaaccccgcgcggagccttggcgccgccgtaatttacaaccagcaccatgcgtgggctgaccactggatcttctgggtcggccccttcatcggcgctgcgctggctgccatctaccaccaggtgatcatcagggcgatcccgttcaagagtaggtcttaaaggagccgatgctgctgcttcgagatgctgccggtcttgaaaggatggattcgtggctgtttcaaatgatcccctactatgttacgtggagttccattcctctttcaaagttcggagctgcttttatccgaacccagacttgtaattcatctgtaccaattgtgtaatatgccgcgcctctgttatgtgcaattcaaaattatgagacagcgagtcaagctttaagagttcatccattcagccgctgctaccctcctcctgc

SEQ ID NO: 106508 - DNA, 1388 bp, Zea Mays
ggctgcagcaaggcaacaagccaacaaccatcccgctcctcctccctccgtcaggctgtcactgtccccctcaccgccgccgtcctcgtcaccacacctcacccgttgctcccactccttccagaaccacctcctcgccaccgtggctgcctgccctgcccgctataagactcttcactcccgctgcgacgcagtcctcacaagcaccagaccaattaactagcttcttctagctctagctaggctcgtctgctgcaagaaggtaacagcgcaggcatggaggggaaggaggaggacgtccgcctgggcgccaacaagttctcggagcgccagcccatcggcacggcggcgcagggcacggacgacaaggactacaaggagcccccgccggcgccgctcttcgagcccggggagctcaagtcctggtccttctaccgcgccggcatcgccgagttcgtcgccaccttcctcttcctctacatctccatcctcaccgtcatgggcgtctccaagtccacctccaagtgcgccaccgtcggcatccagggcatcgcctggtccttcggcggcatgatcttcgccctcgtctactgcaccgccggcatctccggcgggcacatcaacccggcggtgaccttcgggctgttcctggcgaggaagttgtccctcaccagggcggtgttttacatcatcatgcagtgcctgggcgccatctgcggcgcgggcgtcgtcaaggggttccagcaggggctgtacatgggcaacggcggcggcgccaacgtcgtggcgcccggctacaccaagggcgacggcctaggcgccgagatcgtcggcaccttcatcctcgtctacaccgtcttctccgccaccgacgccaagaggaacgccagggactcccatgtgccgatcctcgcccctcttccaatcgggtttgccgtgttcctcgtccacctggccaccatccctatcaccggcaccggcatcaaccccgcgcggagccttggcgccgccgtaatttacaaccagcaccatgcgtgggctgaccactggatcttctgggtcggccccttcatcggcgctgcgctggctgccatctaccaccaggtgatcatcagggcgatcccgttcaagagtaggtcttaaaggagccgatgctgctgcttcgagatgctgccggtcttgaaaggatggattcgtggctgtttcaaatgatcccctactatgttacgtggagttccattcctctttcaaagttcggagctgcttttatccgaacccagacttgtaattcatctgtaccaattgtgtaatatgccgcgcctctgttatgtgcaattcaaaattatgagacagcgagtcaagctttaagagttcatccattcagccgc

SEQ ID NO: 106509 - DNA, 1357 bp, Zea Mays
ggctgcagcaaggcaacaagccaacaaccatcccgctcctcctccctccgtcaggctgtcactgtccccctcaccgccgccgtcctcgtcaccacacctcacccgttgctcccactccttccagaaccacctcctcgccaccgtggctgcctgccctgcccgctataagactcttcactcccgctgcgacgcagtcctcacaagcaccagaccaattaactagcttcttctagctctagctaggctcgtctgctgcaagaaggtaacagcgcaggcatggaggggaaggaggaggacgtccgcctgggcgccaacaagttctcggagcgccagcccatcggcacggcggcgcagggcacggacgacaaggactacaaggagcccccgccggcgccgctcttcgagcccggggagctcaagtcctggtccttctaccgcgccggcatcgccgagttcgtcgccaccttcctcttcctctacatctccatcctcaccgtcatgggcgtctccaagtccacctccaagtgcgccaccgtcggcatccagggcatcgcctggtccttcggcggcatgatcttcgccctcgtctactgcaccgccggcatctccggtaccgtacacgccgcccgcccggccgcctctttggcttcgtcctctgtttctttcttcctctgcttgccttgcctcgtcgtttgtgcaaactggtttgctgatgtttctctctctctctctctctctctctctctctctctctctctctctctctctctcttctcgcaactgcaggcgggcacatcaacccggcggtgaccttcgggctgttcctggcgaggaagttgtccctcaccagggcggtgttttacatcatcatgcagtgcctgggcgccatctgcggcgcgggcgtcgtcaaggggttccagcaggggctgtacatgggcaacggcggcggcgccaacgtcgtggcgcccggctacaccaagggcgacggcctaggcgccgagatcgtcggcaccttcatcctcgtctacaccgtcttctccgccaccgacgccaagaggaacgccagggactcccatgtgccggtgagtacagtatcagccttgccttcctgcttattcgcctcgtccgtccgtgcaagctcgacttatcgatggtttctttgtggacgaatgaacagatcctcgcccctcttccaatcgggtttgccgtgttcctcgtccacctggccaccatccctatcaccggcaccggcatcaaccccgcgcggagccttggcgccgccgtaatttacaaccagcaccatgcgtgggctgaccacgtgagtggaaaacaactttcttctaccttcgtgttgtta

SEQ ID NO: 106510 - DNA, 920 bp, Zea Mays
cttttgcatatgtgaaaaataataaataagaggtagtatgagacacatattggcaactgaccaaatgacttcagatatttggggtctcatcgatgttcaaacagagaatgcacaaagtagtcagaaatggtaattatgttgtcattgctgctgctggtagtgatgttacttgttctactatcacggaggagaaatttgatccaattgatgctttttaattgtcaaacttattttggttgtcttattttcaggattaaatgatctctggtaactgaggagaatgttgcagatgttgattttccttttaggaaggtgaagtcctctaatgtggtagggggaatggaaaatgtgcatatatgctgctgattgcagtgagattggcctcgtccaagttaggtgatctgccatgaactagacaagattagaagtttaaagaggccttacatcaagagagtacaagatcgacataaggaagtacaagtatttgaggaaagtgaccttatgagaagcttgagaaaatcaacttgtgtgtgagaagttctgtctacttgtgataattagtcatatgatattttaagccatgaactagacaagatcagaagtttaaagaggttttacatcgagtacaagatcgccataaggaagtacaagtctttgaggaaagtggccttatgaaaagtttgagcaaatcaacttgtgtgcgagaagttttgtctacttgtgctgatcagtcataccttggaatattgctgaactgttgcctttgttgctcattggcttcaatacttcatacaccatcaaatgagtcatgtgtaaaattcttcgaatcatcagttcttgctctagaagaacttcatcaggtgattactcttttgttttcctttattgaataattagcacatgtgcgttcaaataaattg

SEQ ID NO: 106511 - DNA, 2712 bp, Zea Mays
atggctaacgccgggacagggaggggaggacagacaccggagagcacgcaccagcacaccttaagaacggcggtgagcaacaccagggaggccgcggagagcccgcctttggctgtcgacgacaagattttcgttgctgtccccgaagaactcaagcacggcaagagcaacttgctgtgggcgctgcacaacttggccagggacgcctccagctcccggattgccattgctcatgtccacgttcctgcccagatgataaccaccaactgctcaactgtgcccgaagagattaacctgtctgattataggcaaattaatattttatgcacgaaattttgtcatgaggttaattgcgacatagtagctattcaaaatgacgacatagctaatggggtcatcaatcttatttctttacatgggatcaaaaagcttgtcgtgggagccgcatcagataaaaaatattcaaagacaatgaaagcaccaacgtccaatacagcattgaagataatggaaggagcagcttcaccatgcaagatatggtttacttgcaaaggatctctaattgttgtcaagggcggcaatgcagatacacctacagtaccatcatcacaaaacacagcaccattaccagtattcaacatttctagccaaatgagatcaatgatgatccacaattcaaaggacaaagcatcaagctcaaatttaagtatggcgaacgatatgggagaatcaagaacagatgtaccttgctctctatatgaaaatgctggtgatacactgcttcaatcatttgaagatgttgagtccactttcaaaggcaagccaaggagactacggagtttagaggacttcactgttgactcaggcagatcgcagacgcagaactctgattccagttgtccaccaaatgatggggcagccagtatctctagaacagcagtggttgataacgataacataagtgaagttgcatcaaatatgcatctttcaactaacaattcatacgaccatatttcaccaacaccacatgacctggacaaacttaaggaaactctcactaaaatacagcttctagaaaaagaagtgcaagaagaatgcaataaacagcaaaatgctgaaagagaactgcaatcagctcttcaaaagagcaaagaattagaaaaatcgtatatgaacgaattaaggcagcagaaggcactcaaggaaatgcttgaaaaacagaggcaggagattgatgtgatgagaagacagcaagaagaagcatatgctgcgctatacaatgcaaatgagcagaaggtcacactagaacaacgaataagtgagattgagctatatgttaaagataaggaagatgagctagcaagaaacaaacaccaactggaagcgctccaagcagattgtgacaggatacaacaagaaagagatgctgccataagggaagctactgaactgcatgaaaagaatcggctgggagtttttgcaccatctgaagccctaaacaccaagttctctcttattgagctgcaacaagcaacacaagacttcaatccaatgttcaaggttggtgaaggtggtttcggaagtgtctataaaggtttcctccgcaatacaacagtagctataaagttgctacatccagaaagcatgcagagacaatcagaattccatcaagaggcttctgttctcagcacagtaaggcatccaaaccttgtcacgctgattggtacatgcccagaagcttttggtctagtatacgagttctttccaaatggaagccttgaagattgcttgggatgcaagaacaacacgcgaccactaacatggcagacccgcactcgaataattggagagatgtgttctgctctcatttttcttcattcaaacaaacctcaccctgtggtacacggtgatctaaagccagaccacattcttcttgatgccaattattctagcaaattaggagattttggaatttctcgattgttgatacagacaaacacctgcagcacaaatctttaccgaacaacaaacccaagaggaaccttctcttatatggatcctgaatttctgaccactggtgaactcacaccacggtctgatgtgtactcctttggcattatcatcctgcgactactgacagggaaacaacctcaaaggattgccgaaatagtggaagatgccattgagaaagaaaatttgcattccatcatcgatagcactgctggaagttggcctttcatacaggccaaccaacttgcgcatattgccttgagatgtgctgagttaagtaggagacgaaggccagatctaacagtggatgtgtggaaagtggttgagccactaatgaaggcagcttcaatgacagcacgaccactttcatgcacagctccatcagatgagacttgcatcccatcgtacttcatatgtccaattttgcaggagatcatgagagacccttacgttgcagcggatggattcacttatgagggtgaagctattaggggctggcttgacagcgggcatagcacatcacccatgacgaatctcgacctcgagcgcagccttctcgtgccgaacagggcccttcgttcggcaatactcgagtggaaccagcaggagaggcagtgacgacgacgaacgacccatgcatggatgcagatgatgctgttttgccatcgtgtgactgtaagttacaaagttgcatgcgcagag

SEQ ID NO: 106512 - DNA, 2089 bp, Zea Mays
ccgctcgccagtcggtcgccactcgccaccgcaactatttctgctggctgctgccgctgccgctgctcattccattccctgcgctaacccggcgcccgctcgccctgcctgccactcccgccgcgtgctgcctaccagcaggccaggccaggcacccctgccctgtccgccaccagcacaaccgcgtgcgccggtctggtcggtacatgccaggatggagaccccttcgtcgacgtgcgacgagggctccgagctcgacgcgcgctcgcagtccgactacgccgacttcgacgacctggacctcccgccgcggggccgccaccgccgggacccgtcctccgacgcgtcctccgagtgcagcggggagcccgggagcccgtacgcctcctcgccgtacccgcgctggccggtgtgcacgcttcctgcgagggtgccgccgccggccgcgccgctgctcaagaggctcggcacgacgcggcgcggcgcccgtgtcggcgcgtgtgacgggaaggccggcgacggcgagctgcagctgatcaaggagaggttctccaagcttctcttgggcgaggacatgtcggggagcggcaagggggtctcgacctccgtggccatctccaacgccatcaccaacctctacgcgactgtctttgggagctgccacaggctgaagcccctgccgccggagaagaagtccatgtggcggcgggagatggactgcctcctctccgtctgcgactacatcgttgagttcttcccttccaaggagatcttgcccgacggcagcatacgagaggtgatggcgacccgaccgcgatccgacatctacgtcaacctccccgccctcgagaagctggacgacatgttgctcgagattctgtacagctttcagaagactgaattctggtacgtcaacgacaaagggcagaaagacgattccgtcgcgacgccgtgccgtccggtgagccaccgcggcgaggagaagtggtggctgcccgtgccgtgcgtcgccaagcccgggctgacggagacggcgcggcgagacctgcagcagaagcgcgactgcgcgagccagatccacaaggcggccatggccatcaacaatgccgttcttgcggagatacggatccccgacctgtacaaggaagcactacccaagtgcgggcgggccagcgtgggggatctgatctatcggcacatgtcgttcccgggcaagttctctccggagtacctgctggactgcctggagatctcgtcggagcacgaggccctggaggcggcggaccgcgtggaggcggcgatgcacgtgtggcggcggaaggcgagccagaggtcaccctggagcgcggtcaaggacctgatggagtccgacaagaacgtgatgctggcgagacgcgccgaggacgtgctgctctgcctcaagcagcggttccccggcctctcgcagaccacgctcgacgccagcaagatccagtacaacaaggatgttgggcaagcaatactagagagctattcgagggtgctggagagcctggcgtacaacatcgtaacatgtgtagatgacgttctcttcgcagatgaagccgccagaaagatagcatgagtgatcatttgttcatccttcctgcctggtccgggaaaccaaaaaataaggggtccatgtccatgatccatccacagaatgtacattatgccataacttgtagcagtagtaccatctaccaatggatgatagcacgagcagttaactctcctaggcagccatgtcttggttttcatcacaatggtccctcagtgcctttgcatcctcttttctctttcatcaccaattcaccatatggatgtcagttgtcacagctgtgtgattggctggaggtatcagctgaactgaagtagtagtgacttgtgaatcttttgatacaggacatgggcaacgcctgacagagtgaccggcacaagttcacagctgatatattcacaaaatgtttcaagtaattcttgaaacacagaagcaatagagtatctcataaagtaacggaaacaatattatgttcacaatgaaaatttaccataaatactggggtacttt

SEQ ID NO: 106513 - DNA, 1687 bp, Zea Mays
attccattccctgcgctaacccggcgcccgctcgccctgcctgccactcccgccgcgtgctgcctaccagcaggccaggccaggcacccctgccctgtccgccaccagcacaaccgcgtgcgccggtctggtcggtacatgccaggatggagaccccttcgtcgacgtgcgacgagggctccgagctcgacgcgcgctcgcagtccgactacgccgacttcgacgacctggacctcccgccgcggggccgccaccgccgggacccgtcctccgacgcgtcctccgagtgcagcggggagcccgggagcccgtacgcctcctcgccgtacccgcgctggccggtgtgcacgcttcctgcgagggtgccgccgccggccgcgccgctgctcaagaggctcggcacgacgcggcgcggcgcccgtgtcggcgcgtgtgacgggaaggccggcgacggcgagctgcagctgatcaaggagaggttctccaagcttctcttgggcgaggacatgtcggggagcggcaagggggtctcgacctccgtggccatctccaacgccatcaccaacctctacggctgaagcccctgccgccggagaagaagtccatgtggcggcgggagatggactgcctcctctccgtctgcgactacatcgttgagttcttcccttccaaggagatcttgcccgacggcagcatacgagaggtgatggcgacccgaccgcgatccgacatctacgtcaacctccccgccctcgagaagctggacgacatgttgctcgagattctgtacagctttcagaagactgaattctggtacgtcaacgacaaagggcagaaagacgattccgtcgcgacgccgtgccgtccggtgagccaccgcggcgaggagaagtggtggctgcccgtgccgtgcgtcgccaagcccgggctgacggagacggcgcggcgagacctgcagcagaagcgcgactgcgcgagccagatccacaaggcggccatggccatcaacaatgccgttcttgcggagatacggatccccgacctgtacaaggaagcactacccaagtgcgggcgggccagcgtgggggatctgatctatcggcacatgtcgttcccgggcaagttctctccggagtacctgctggactgcctggagatctcgtcggagcacgaggccctggaggcggcggaccgcgtggaggcggcgatgcacgtgtggcggcggaaggcgagccagaggtcaccctggagcgcggtcaaggacctgatggagtccgacaagaacgtgatgctggcgagacgcgccgaggacgtgctgctctgcctcaagcagcggttccccggcctctcgcagaccacgctcgacgccagcaagatccagtacaacaaggatgttgggcaagcaatactagagagctattcgagggtgctggagagcctggcgtacaacatcgtaacatgtgtagatgacgttctcttcgcagatgaagccgccagaaagatagcatgagtgatcatttgttcatccttcctgcctggtccgggaaaccaaaaaataaggggtccatgtccatgatccatccacagaatgtacattatgccataacttgtagcagtagtaccatctaccaatggatgatagcacgagcagttaactctcctaggcagccatgtcttggttttcatc

SEQ ID NO: 106514 - DNA, 816 bp, Zea Mays
attccattccctgcgctaacccggcgcccgctcgccctgcctgccactcccgccgcgtgctgcctaccagcaggccaggccaggcacccctgccctgtccgccaccagcacaaccgcgtgcgccggtctggtcggtacatgccaggatggagaccccttcgtcgacgtgcgacgagggctccgagctcgacgcgcgctcgcagtccgactacgccgacttcgacgacctggacctcccgccgcggggccgccaccgccgggacccgtcctccgacgcgtcctccgagtgcagcggggagcccgggagcccgtacgcctcctcgccgtacccgcgctggccggtgtgcacgcttcctgcgagggtgccgccgccggccgcgccgctgctcaagaggctcggcacgacgcggcgcggcgcccgtgtcggcgcgtgtgacgggaaggccggcgacggcgagctgcagctgatcaaggagaggttctccaagcttctcttgggcgaggacatgtcggggagcggcaagggggtctcgacctccgtggccatctccaacgccatcaccaacctctacgcgactgtctttgggagctgccacaggctgaagcccctgccgccggagaagaagtccatgtggcggcgggagatggactgcctcctctccgtctgcgactacatcgttgagttcttcccttccaaggagatcttgcccgacggcagcatacgagaggtgaaaacaggttaaaggggttgattgcctgaagaggaaatttccgcggggcgggccattcagtcactgacgcgttttgattctgtca

SEQ ID NO: 106515 - DNA, 492 bp, Zea Mays
atgtccttggccaaacaatggttcaccaaattttttggtgaatatgcaaaaaatgttcaaaaagatactacagtctcacctattgttgctacaaatactagtactttgggctcaccgattcttggaaaaagaaggttggataaagaattttctcagtggtcccaaacaagaggaagacgtcttgcaaagtctgagcttaacgcatacttagaagaagaatttgtgagaacagatgaaagatttgaaattctaagttggtggaggacaaatgcaaacaaatacccagtgctttcagctatggcgtgtgatttattagcaatacctttgagcattgttccttcggagtctgcttttagcgccggtggtcgcattcttgctgataatcgaagctcaatgacaccagaaacacttgaatgccttgtatgctgcaaggattggttgtatgaatacccaaatattcaagtttatccagttgtgtttggacccagctag

SEQ ID NO: 106516 - DNA, 246 bp, Zea Mays
ttaaatcaagatatttgctgtttgtttatgttatctccttcatccatattttgcaccaaaaatccaagggaacatctaatctagcctagctagataccatggacacccatggcgtggagcaaactcaaatgcttcttcatggcttcacttcctctgcggctgtgggtgcgagagctatttcctcctcccccttgctctcttctatattaccaccttatccacctgtattttatccccaaaacaaga

SEQ ID NO: 106517 - DNA, 599 bp, Zea Mays
gatgtcaagtacatgacatttatccctggtataagaaaaagccaagagtttgacaataaggaaagacataataatcaaagcaggttaagcaaaagtaacaaccattcaccaagcagtggcaacaggaaagaggcgctatcgatcaagaggttgcttcctgtgatccactttgagatcgaccggacaaaagcccttgatgtgattgatagagttgacgatctgagagtacaatgatgaacctagattaatcaatgacaaagtctgaaaaatgcaccctcggtctatgacccagaaaatcaagattgcttgaaggataccagtaatcgctgagataaattggcatgctgtaagagtgtcagtactgcagcaaggtgcctgcttgagataaccggcatcatggtgctagtttgatggcaccattagggttagagatggtggccatgggcgcatgtcctggccaactttgtatgatatatggcagggtgaataggaaagtaaatttgtattgtaaaaagggatttcttctgcttgttagctcatgtacaaggaatgcaagttttgagcgagggggcatcaaagatctggctgtgcttccaact

SEQ ID NO: 106518 - DNA, 101 bp, Zea Mays
ctgaatcatgcatagcactcatattgctttcgatctttttagaaaaataacatcttggatgtgggatgaaaaattaaaagtcacttcaaaagtagatattc

SEQ ID NO: 106519 - DNA, 1870 bp, Zea Mays
ttttataatccgactacatttaatactcggaacggaggttcaaacattcgataggacatgggctaaattttagcggggtgtaaccaaacaccccctaggatttggatccttgataatccagtgcgataacttcgatggctactggctggcagcgcaagttgcctttggatggttactggaagcacaagttgccctgggatggcttcctcaaaaagctgtgtacaaaaggcctactacgcggctggaagaccgggaggagtacgctcacgttgtcactcatacacacccgagctgagctaactaatggcggttgacacgatggagtcggttgccgtcgtggccgtgccgttcccggcgcagggccatctgaaccagctgctccacctgtcgctgctgctggcgtcgcgggggctgtccgtgcactacgcggcgcccccgccgcacgtccgccaggcgcgcgcgcgcgtgcacggctgggaccccagggcgctcggctccatccgcttccacgacctcgacgtcccaccgtacgactcccccgcgccggacctggccgcgccgtcgccgttcccgaaccacctcatgcccatgttcgaggccttcgccgccgcggcgcgcgccccgctcgcggccctcctccagcgcctgtccaccagctaccgccgcgtggccgtcgtcttcgaccgcctcaaccccttcgccgccacggaggcggcgcggctggccaacgccgacgcgttcggcctgcagtgcgtcgccatctcgtacaacgttgggtggctggacccgggccaccgcctcctcagcgactacggcctccagttcctgccccccgacgcctgcatgtccagggagttcgtggacctcgtcttccggatggaggaggaggagcagggcgcgcccgtcgccggcttggtcatgaacacgtgccgcgcgctggagggcgagttcctcgacgtggtcgccgcgcagccgccgttccaaggccagaggttcttcgcggtcggcccgctcaacccgctcctgctcgatgcggacgccccgacgacgccgccggggcaggcgcggcacgagtgcctggagtggctcgacaggcagccgccggagtcggtgctctacgtctcgttcggcacgacttcgtgcctccacgccgaccaagtcgccgagctcgccgcggcgctcaagggcagcaagcagcgtttcgtctgggtgctgcgcgacgccgaccgcgccgacatatacgccgagtccggcgagagccggcacgccatgttcctgtccgagttcaccagggagaccgagggcacggggctggtcatcaccgggtgggcgccgcagctggagatcctggcgcacggcgccacggcggccttcatgagccactgcggctggaactcgaccatcgagagcctgagccacgggaagccggtgcttgcctggcccatgcactccgaccagccgtgggactcggagcttctgtgcaagtacttcaaggcagggctcctggtcaggccctgggagaaacacgctgaaatcgtaccggcgcaggccatccaaaaggtgatcgaggaggcaatgctatccgacagcgggatggcggtgcggcagcgggccaaggagctcggggaggcggttcgcgcctccgtggctgacggcgggaactcgcgtaaggatctcgacgatttcattggctacatcacaaggtgaaagtatgacgacgcatgggggatatagaaaatcatctgctgctttcagcggttaatcggataactttgaatcgtccacagaaaataaaaatattactgtcgaaattttcaaatgatacgctgtgtcagagagatacacctactatactagttcattattgaat

SEQ ID NO: 106520 - DNA, 2704 bp, Zea Mays
cggtgcgcggtgcgcccgcttcaacccctgccccctctccctggctcctgtgctccccatttccagttttccacccgacgagaggcaaaagcctcgcgccccacgccggtccggcggcgacccccgccgtttcccgcagcgaccaagacgcgggctgtggtcgcctccgccccgtgcctacccggccgcgggcgtagcagcctcctggaccgcagcgccctcccccctcctttctcccgagcgacttctgatccagccgcgtcgcaacaactggtcgttcgagtctgatctccgccaccgcggcggaacgaggcgtctccggtccccgaggcgattcggtgaattcgaagctcgtacgacgggatcctgttgagttttgacaatgcggggctacgggtacgagaccaatggtaaccaccaggaagtggaagatgagtacggagatgagtactatgatcaagatgagtatgatgaggaaggttcgggtgctggggatgagtattttgaggaggaagagcctacagagggacaaaaggagatcctagaattgagagaacgattaaaagagcagattaggcgaaaggcaaaggctgctgcttcctgcacagctggcagatcgtcttctttacaaatacctcaagccagggacaaatttggctctttctttgggccatccaagccggtgatttctcgtcgagtgattgaagaaagaaaatcattgaaagaactgcatagcacagttgcaagggagccaaggccttcgggagtacataaggacattccgtcgtcctctaaagtgcaaagtaaagtaaatggacatcagcataaacagaaaattgttaatcaggtaaagaagaaggccgaggcacttaaggataaccgggattattcatttctactctcggatgatgctgacctgtcatcctctccaaaggagaagcctgctgctagatcttccttgactcaaagggctgatcgtgaggtgatgcgaacaacagtgaagagcaaggcaccaacaagtcaacctgcacgggtgtcaaatggatatggatctaagaacaaaatgtcaactcaaaggcatgccgaaggtagggtagataccatgagaaaggaggctttcttgaacagagaaagggttgtctcacgtgacaatgaaaggatgcatgaaagggttgtttcacgtggcaatgagaggatgcatggtagtgcaataaatgggtccaaccaggcaagtactagcaaaaccacaatccaaaagcttacaagcagaggttccattgctaataagcaagcttccacggatctgaatgatgctgctctgaggaagagcagtgtagccccaaagcaccatttctcagaggttgacagatcaaaatccttgcaaagccagaagatgcagtcagctggtcagagactgcagcattcttcccatggtcagaggccacatcaatccatgcagcataggccgcagcagtcattgcagagtcggaggccacagcaaatgactcaggatcagaagccacaacagtctttgcagagtcaaaggactcaacagtccttgcagaataaaaggcaacagcagtcctcacatattcagaaattgcagtcctcacatactcagaaatcgcagtcctcacaagcacacagaccacagtcgctaagtaacaggtcccaggagttacgaggacaaaggcctctttcttcacagggacaatacttggagcaaagaagagtacaggcaaatgatagagtcaaacaagctgaaaggcacattcggcctccctcgaagtccatgccatctcgaccagtctcctctaatggaattcgcgatgatcatgcaaagagaaagcaagtggtaaaaagaagatttgatgacgacgacgatgaggacgaccccttggcaatgatcagaaatatgttcgggtatgatcctagtagatatgcagggagagatgaggatgtcagtgacatggaagcagattttgctactatagaaatggaagagaaaagaagtgcgaggatagctaggcaggaggacgaagagcaacttcgcttgattgaggaagaagagagacgcgagcaggagaggaagaggcgaaagatggcacgaggccgatagtccaacacgcgtcatatttgggtgttataattgcacagacctgattgcctgaagacgaggcccatggtcgatcatacgggcgcgttgcagacaacaggaaaacttgccacgtggattatatggcggcaaatcaaggaaaacggcaggtgggcaacgctgggcacctgtaacaagcagaatgttaggcgcagtggtttagttgacgaagctgacatagacccatatataagctctcatcagattgtttggatcacacaaggctcccaacgttgcagcgcttcatcagattattctaaattctagccacatgctgattctttctgttaagcctatataaggatgcctaatccaagtagctcctttgttcatttttgtttgggtgtagtgttgtactccctccattttttttatctgacggttgttagtttaaatttgaactgtccggcgccaaataaaaaaatagaggtagcaacaaacaatgtgtttgatttttttggtacaattttgaccttcgtcagacgatcactgcacagcagatttcgagtttctatgcctgtgatcacatgaagtctattccgctcgcaa

SEQ ID NO: 106521 - DNA, 965 bp, Zea Mays
aattgcattcgtacaaccgcagccgagacggttgaccaacgctgccacgattccgtccacacgccgacgcggcgggctcctggccgacgagcactcccctccgaacgccgcgttggccggccccgccccacgaggccacgatgcagtagcagcgttcacaccatctgtctgtctcaagtgtcacggcgtccgtcattcgattcaacccccaaccccccatgggcctggccgtataaatcaaccgccggtgaagtctagtcgtctcgtcgctcggtccaccacctcagctccgccgcttgcccgcttttgctctctccctcccggctctcggcttcttctacacgctaccgtctcacagccgtaaacgcccctcccggatcccgctagttcgccaccgccgcccgcccgcccgccgttcgcctcatcatggccgcctcgtcgaccgccacctccgtccacgacttcatcgtcaaggatgcgagcggcaaagacgttgacctcagcacctacaaggggaaggttcttctcattgttaacgtcgcatcccagtgtggcttaaccaactccaactacactgagctggcccagctctatgagaagtacaaggaccaaggctttgaaatcctggctttcccatgcaaccagtttggtgggcaggagcctggtaccaatgaggagattgtccagtttgcctgcacacgcttcaaggctgagtaccccatcttcgacaaggttgatgtcaacggtagcaatgctgcgcccatctacaagttcttgaaatctagcaaaggtggccttttcggcgacagcatcaagtggaacttttccaagttcttggttgacaaggagggacgtgttgtggatcgctatgcttcaatcctcccgggatccccttgtcaccaaatcagccctcgaatgaattccaatgctgtatcagtttgctaccccattttcgtgtgactaat

SEQ ID NO: 106522 - DNA, 1182 bp, Zea Mays
aattgcattcgtacaaccgcagccgagacggttgaccaacgctgccacgattccgtccacacgccgacgcggcgggctcctggccgacgagcactcccctccgaacgccgcgttggccggccccgccccacgaggccacgatgcagtagcagcgttcacaccatctgtctgtctcaagtgtcacggcgtccgtcattcgattcaacccccaaccccccatgggcctggccgtataaatcaaccgccggtgaagtctagtcgtctcgtcgctcggtccaccacctcagctccgccgcttgcccgcttttgctctctccctcccggctctcggcttcttctacacgctaccgtctcacagccgtaaacgcccctcccggatcccgctagttcgccaccgccgcccgcccgcccgccgttcgcctcatcatggccgcctcgtcgaccgccacctccgtccacgacttcatcgtcaaggatgcgagcggcaaagacgttgacctcagcacctacaaggggaaggttcttctcattgttaacgtcgcatcccagtgtggcttaaccaactccaactacactgagctggcccagctctatgagaagtacaaggaccaaggctttgaaatcctggctttcccatgcaaccagtttggtgggcaggagcctggtaccaatgaggagattgtccagtttgcctgcacacgcttcaaggctgagtaccccatcttcgacaaggttgatgtcaacggtagcaatgctgcgcccatctacaagttcttgaaatctagcaaaggtggccttttcggcgacagcatcaagtggaacttttccaagttcttggttgacaaggagggacgtgttgtggatcgctatgctccaaccacttcacccctgagcattgagaaggatatcaagaagctgcttgggagctcttaatcagtatctgggtgcaaagctgtagaaaaacatgtatcaacaatgccctgagcgataaaatatatgataagttgtattaataaagtattgtcgtacttgagaggttgcagtatctgctctatttcccttgcatacactccgtacttgtatatccccttcaatcctcccgggatccccttgtcaccaaatcagccctcgaatgaattccaatgctgtatcagtttgctaccccattttcgtgtgactaat

SEQ ID NO: 106523 - DNA, 1250 bp, Zea Mays
aattgcattcgtacaaccgcagccgagacggttgaccaacgctgccacgattccgtccacacgccgacgcggcgggctcctggccgacgagcactcccctccgaacgccgcgttggccggccccgccccacgaggccacgatgcagtagcagcgttcacaccatctgtctgtctcaagtgtcacggcgtccgtcattcgattcaacccccaaccccccatgggcctggccgtataaatcaaccgccggtgaagtctagtcgtctcgtcgctcggtccaccacctcagctccgccgcttgcccgcttttgctctctccctcccggctctcggcttcttctacacgctaccgtctcacagccgtaaacgcccctcccggatcccgctagttcgccaccgccgcccgcccgcccgccgttcgcctcatcatggccgcctcgtcgaccgccacctccgtccacgacttcatcgtcaaggatgcgagcggcaaagacgttgacctcagcacctacaaggggaaggttcttctcattgttaacgtcgcatcccagtgtggcttaaccaactccaactacactgagctggcccagctctatgagaagtacaaggaccaaggctttgaaatcctggctttcccatgcaaccagtttggtgggcaggagcctggtaccaatgaggagattgtccagtttgcctgcacacgcttcaaggctgagtaccccatcttcgacaaggttgatgtcaacggtagcaatgctgcgcccatctacaagttcttgaaatctagcaaaggtggccttttcggcgacagcatcaagtggaacttttccaagttcttggttgacaaggagggacgtgttgtggatcgctatgctccaaccacttcacccctgagcattgagaaggatatcaagaagctgcttgggagctcttaatcagtatctgggtgcaaagctgtagaaaaacatgtatcaacaatgccctgagcgataaaatatatgataagttgtattaataaagtattgtcgtacttgagaggttgcagtatctgctctatttcccttgcatacactccgtacttgtatatccccttcggagctgatttggtgacccgggatcccaggaggatcggaggggattgagaaggaaattagttgatttcccccttaatccccttcaatcctcccgggatccccttgtcaccaaatcagccctcgaatgaattccaatgctgtatcagtttgctacccca

SEQ ID NO: 106524 - DNA, 3350 bp, Zea Mays
atccccagccacccccagcgcgcttgctacgagggaggggagtggtcggctggttgcaccgcacagcaatggtggcgactactcgtcgagctctgttcctctcctgcttccacggcggctcagagatgagcccccgcctctccctgcgcccgcggtacccgtcaatgccgcggcggccgaagggagtggcggctgctggcggcggaggaaacggcgacctggaggccgcagtcggtacgggggacgacgaggaggagaaggtggcggtgttctccgtgtcggggatgacctgcgctgcgtgcgcggggtcggtggagaaggccgtgaagcggctccccggcatccacgacgccgccgtcgacgtcctctggggccgcgcgcaggtcgtcttctacccagccttcgtctcggagaacaaaattaccgaagccattgaggatgttggttttgaagcaaaattgattgatgaggaggtcaaggaaaagaacattctactatgcaggctacatataaaaggaatggcctgcaagtattgcacaagcacagttgaatttgccttgcaagcttctcctggggttcaaagagcttcagttgcattggctactgaagaggctgagatccgttacgatcgcaggataatttctgctagccagctaatccaagcagtggaagaaactggctttgaagctttactagtgaccgcaggagaagaccagagcaggatagacctcaaaatggatggtgttctcgatgagaggttgataatgatcttgaaaagctctatacaggcccttcctggtgtggaaaacgttaaattcaactctgaactacacaaggtcaccgtctcatacaatcctgaccacacaggcccccgggacctcattgaagtcatcaaggcagccacatttggtcatgtcaatgcatcaatatatctggaagcagatggaagggaccagcataggtatggggaaataaaacaatacagacagtcgttcttgtggagcttaatattcaccattccagtttttctcacctccatggtgttcatgtatatcccttggctgaaggatgggctggaaaaaaaagttgtcaacatgatgagcattggtgaactacttcggtggattttgtcaacaccggtccaatttgttatcggtcgcaaattttatactggtgcttacaaggcaatgtgccgtggctcaccaaacatggatgtccttattgctctagggacaaacacggcttacttgtactcggtttactcagttcttcgagcagctacctccgggaattacatgtcaactgatttttttgagactagttccatgctcatttcatttattcttcttggaaagtaccttgagatcttggcaaaaggaaaaacatctgaggctattgccaagctgatggatcttgcgccagaaactgcaacactgttagtgtatgactatgaaggaaatgtggtaggagaaaaggagattgacagcaggctgattcagaaaaatgatgtgatcaaagtagtcccgggtggaaaagttgcttccgatggatttgttatttggggccagagccatgtgaatgaaagcatgattactggcgaatcacagccagtagcaaagagaaagggtgacactgtaattggaggtacagtgaatgagaatggtgtgcttcatgttcgggctacatttgtgggatcagagagtgcattggcgcagattgtaaggctagttgagtcggcgcaaatggcaaaggctcctgtccagaagttcgctgaccatatatctagagtctttgttcccctggtgattctgctttcaatggttacttggctcgcatggtttgtcgcggggaggctccatagctaccctcagtcatggataccacgattcatggatagcttccagctcgctcttcagtttgggatatcagttatggtgattgcctgtccttgcgccctagggctggctaccccaactgctgtgatggttgcgactggagttggtgcctcacatggtgttctgatcaagggtgggcaagctctggagagtgcacagaaggtcgactgcatcgtttttgacaagacagggacgctaactattgggaagcctgtcgttgttgacacaaggcttctcaaaaatatggtcttgcgtgaattctatgactatgctgctgctgcagaagtcaacagtgagcaccccctggcaaaagcgatagtggagcatgccaaaaagttgcgtccagaaggaaaccacatgtggccggaagcaagggaatttatttcagtaaccgggcaaggcgtcaaggcggaggttagtggcaagagtgtcatcgtggggaacaaaggcctcatgctgtcctctggcattggtatccccttggaagcttcagaaatcctcgtggaagaggaggggaaggcaaggacagggattatcgtggcagtggaccgagaagtggcgggcgtaatctctgtatccgatccgacaaaaccaaacgccctccaagtgatatcgtacctcaagtccatgaacgtggagagcataatggtgaccggcgacaactgggggacggctaatgctatcggccgagaggttggcatcgagaagataatcgctgaagcgaaaccggagcagaaggccgagagggtgaaggaactccagctgtctggaaggaccgtggcgatggttggcgacgggatcaacgactcccccgcgctcgtctcggccgacgtggggctggcgataggcgcggggacggacgtcgccatcgaggctgcggacatcgtgctcatgaagagcaacctggaggacgtggtgaccgccatcgacctgtccaggaaggccttcttccgcatacggatgaactacgtctgggcgctcgggtacaacgtcgtcggcatcccgatcgctgcgggggtgctcttcccgtccaccgggttccgcctgccgccgtgggtcgccggcgctgcgatggcggcctcgtccgtcagcgtcgtctgctggtccctgctgctgaggtactacaaggctccgaagattgccggcacagctaaagaaattggaattactaccctgtaggcaggtatcactggcactgctgctggaacgggaaggttgtggctggctgctaagtgctaacaatcgctgaaacagaagtctaaaaagaatcgctggaacaagcaagctgtacatatgtgttacaagtatatatacggcgatgctaagtgaagtggtggtgtaacgtaagtactgctactgatctgccatcgttgcatggatgtataccgttttcttttcctctcgaaatgaaaagtggtcctatggcacactactgctatgatggggcctgaataa

SEQ ID NO: 106525 - DNA, 285 bp, Zea Mays
atgacgacgcacgaggcaacgcgaggcaatggcggcgtcaatggacagagagggacggaggcggccgcgtctacagagggcgaccgagcgatgcgccgtggatctggcccatccgctcccaccatctccgccgtctcggtaggatggagcaccaaaggaagaggaaaagttggctacacgtggggtccacaaaagacgcgtcacatgtgggcgaagcaggccacgaagacttggctgcacgtggggtccacgtatgacgcgtgcgttcacatatgggcgaagtag

SEQ ID NO: 106526 - DNA, 3169 bp, Zea Mays
aaacttcaaacagaagcaatcaaaactcggtggagccactgctacggcggcgaaatggcggcgagcactcgagccctctttctctcctgtttccacggcggcggcggcgccgaggtgagccgccacctcgcgctgcggccgcggtacccgtccaatccgcggcgccctaggtcggccgtggtagccggcgaaggaggtgaaggcggaggaagcggtggtgatctggaggccgcgaaagggacggcggatagggacgaggaggagaaagtgtcggtgttcgcggtgacgggaatgacgtgtgccgcctgcgcggggtcggtggagaaggccgtgaagcggctcccgggcatccatgacgccgccgtcgacgtcctcgggggacgcgcgcaggtcgtcttctatcccgccttcgtgtcggagggaaaaattagggaagcgatcgaggatgttggttttgaagctaagctgattaacgaggaggtcagagcaaaaaacattctagtatgcaggtttcatataaaagggatgacctgcacgtcctgcacaaacacagtagaatctgccttgcaagcttttcctggtgttcaaagagcttcagttgcgttggctactgaagaggcagagatccattatgatcgcaggattgttactgccagccaactcatccatgcagtggaagaaactggctttgaagcaatactaattactacaggagaagatcggagcaggatagacctcaaactagatggcgttttgagcgagaggctaacaatgatactgaaaagctctatccaagctcttcctggcgtggaagacataaagatcgatactgaactccacaaggtcaccgtctcgtacaagcctgaccagacaggtcccagggacctcattgaagtcatcgagtcagccacttctggtggtgttactgcatcaatatatgcagaagcaggaggaagggagcatcacaggtatggagaaatcaaacgatacaggcaatctttcttgtggagcttaatattcactattccagtgtttctcacttccatggtgttcatgtacatccctgggctgaaggatgggctcgaaaaaaaggttatcaatatgatgagcattggcgaactattgcggtggattttatcaacaccagtgcaatttgtaattggtcgaaagttttatactggtgcttacaaggcaatatgccatggctcaccaaatatggatgtccttattgctctagggacgaacacggcttacttctactcagtttactcagttcttcgggcagctacttctgagaattacatgtcaactgatttttttgagactagctccatgctcatttcgtttatccttcttggaaagtaccttgagatcttggcaaaaggaaaaacctccgaggctattgccaagctgatggatcttgcaccggaaactgcaacactgttaatgtatgactatgaaggaaatgtggtaggagaaaaggagattgacagcaggctaattcagaaaaatgatgtgatcaaagtagtcccaggtggaaaagttgcttctgatggatttgttatttggggccagagccatgtgaatgaaagcatgattactggagaatcacggccagtagcgaagaggaagggcgatactgtaattggaggaacagtgaatgagaatggtgtgctgcatgtccgggcaacatttgtcggatcagagactgcactggcacagatcgtaagactagttgagtccgcacaaatggcaaaagctcctgtccagaagttcgctgatcagatatctagagtctttgtcccactggttatcgttctctctttgcttacttggcttgtgtggttcttagctgggagattccatggttacccatactcatggataccatcttccatggatagctttcagcttgctcttcagtttggaatatcagttatggtgattgcctgtccttgtgccttagggctggcaactccaactgccgtgatggttgcaactggagttggtgcgtcacaaggcgttctgatcaagggtggacaagctcttgagagtgcacaaaaggtaaactgcatcgtctttgataagacaggaacgctgactgtcgggaagccagtcgttgtcaacaccaggcttctcaaaaacatggtcttgcgtgaattctttgattatgttgcagctgcagaggacaacagtgagcacccactggcaaaggcgatagtggaacatgcaaagaagttctactcagaagaaaaccacatctggccagaagcaagagatttcatttcggtccccggacatggtgtgagggccaaggtttgcgataggagtgtcattgttgggaacaagagcttcatgctgtcatcaagcattgatatcccagtggaagcttcagaaattctcatggaagaagaggaaaaggcgcaaacaggcattattgtggctatggatcaagaagttgtgggcataatttctgtatctgacccgataaaaccaaacgcccgtgaagttatatcttacctcaagtccatgaatgtggagagcattatggtgactggggacaactgggggactgctaacgccattggcaaagaggttggaatagaaaagatcatcgccgaagcaaaacccgagcagaaggctgaaaaggtgaaggaacttcagctgttaggaaaaactgtggcgatggttggtgacggaataaacgactccccggcactagtttcagctaatgtaggcctggccattggcgctggaacagatgtcgccattgaagcagccgacatcgtcctcatgaagagcaacttggaggatgtgatcactgctatcgatctctccaggaaaacgtttttccgcatacggatgaactacgtgtgggcgctcggctacaacgtcattggcataccaattgctgcaggggtgctcttcccatcgacccggtttcgcttgccaccatgggttgccggcgccgcgatggcagcttcgtccgtcagtgttgtctgttggtccctcctcttgaggtactacaagagtccaaagaagtttgacaactgatgacaccgcccggaccggagcgaccaaagcagtgttattaaggtaataaaagaagctaatattttaatgggtaaaactatttggtgagcgacaggtgaacattctggagttgaca

SEQ ID NO: 106527 - DNA, 447 bp, Zea Mays
agtaccattccacaggctcacatgggaagaagctggtcttgttgttggaaaaggtttgatagacaatgttttgagtgactacttgtgggtgaaagcgatccttctcacaacaaccatggtcgctacagctggcctcacaatccaagttctgattgctgccattgtggacacgctcacctgtcatgcttctcatctactgaactacgtcggagccgctgccgtcctagttggtttcgctggaatcaacataccagctggagagtctccacaggatgttcagcaggagcaggaaactccgattgttagcatggtcgatgacgacccggttcatttgcccagcagtaccaatgctattgatgttgtctcagaccctggggccatgtgatttatcaacaatgtatagagctaattatcaattttggcctctctcagtgtttctacgttttt

SEQ ID NO: 106528 - DNA, 348 bp, Zea Mays
atgtttacaacgaactattccaagtttacaaacgacttgtctaaaactatcacgtttgaaattcaagggcaatatcatcggtcctactctctccaatcagtgtttgtacatagactgccagagagtgccaaggtcaacattccctccagaaacaattatccctatcttgctgctctcgtgccaagcagagctttgcttaaactcgtcggacagtgctgcggccaggccaattgcgccactgggctcaacagccaccttcaggatctcatagcacattttcatggcgtccacaatggcagtgtcatccacaacgataacatcgtccaccaagtcacgcaccacaggcct

SEQ ID NO: 106529 - DNA, 2658 bp, Zea Mays
atgggtgtgttagcgctaattattactctggccatgttccagccatgcctgctcgccaacgcctccagctccactggaggtgtgcatctagggtcccagcaagcggccctcctccagtggaagtccaccctacggagcagctcagcgtcgctggattcatggcgggccgggaccagcccgtgcagcagcaactggacgggcgttgtttgcggcgccgtggcgcaccgtggtcgccgcgccacgcctcaggcggtggtccgcatcgacctgccgaacgccggtgtcgacgggcgcctcggtgcgctcaacttctcggcgctcccgttcctccgatacatcgacctcagctacaacagccttcgcggtgagatccctcggtccatcgcctcattaccggagctctcccaccttgacctcaccggcaacaggctccatgggcacgtaccacgggagatgggcagcatgggaagcctgaccgtgctgttgctctccctgaacaacctcacaggaaccatccctgcgtccattggcaacctaactaggctagttcagcttaccatccacaaaacctcgctcatagggtccatcccggaggagctcagcaagctcaccagcctagagtatttgcagctaagtggcgacttactgagcggccggataccggaaagccttggcaacctgaccaagctaagcctcctgcgcctttacgacaaccagctatcaggtcccattccgtccactctcggcaaccttgttgagctgcagagtctccagctcagtaggaaccagctcgtaggccgtatcccaccgagcctggggaaccttagcgcactctacgaaatctggatgtacgagaacgagctggcaggctcagtcccagctgaaattggcgctttggcgggcctgcagacgctgcatttagccgagaatctcatttcaggtccagtccctgaaactctcaccggcctcacgaatctgaacatgctccagatcttcagcaacaagctctccggtcctctgcctctagggttttcaaaccttagcaagctggaagtgctcgatcttgccaataactctttctcgggagacttgccctctgggttctgcaatcaggggaacctcatacagttcactgtctccttgaacatgttcaccggccctattcccagagacatcgagacatgcaggagcctgcatatacttgacgtggcttccaaccaactctcaggagacgtatcaggtctggggccatacccgcaccttttctttgcgaacctggagagaaacagcctccatggacgcctgtcagcagagagctgggcctcgagcatcaacctgaccatcttcgacgtggccagcaacatggtgaccggaagcttgccgcctgagctatcaaggctagtgaagctggaggaactgcttctccacgacaacaacatgaccggcagcataccgccagagttaagcaatctgaccaacctgtactcgctcagcttgtcacagaaccaattctcaggcaacatcccgcctgaattcggtcggatgagcagcttacagtaccttgatatacagctgaacagccttagtgggccgataccgcaggagcttggcagctgcactcagctgctgttcttgcggatcaatggcaacaggttgaccgggcatctgccggtaacccttggaagcctgtggaagctgcagattgtgttggatgtcagcagcaacgaactcacgggtgagctaccgccgcagcttgggaacctggtgatgttggagctcttaaacctctcccacaacaacttcagtggcagcataccttcctccttctccagcatggctagcttgtcaacccttgacgtcacatacaacgacttggaaggccctcttccaacggggcggctgttttcaaatgcctcgtcaccagtaacatggttcctccacaacaatggcctctgcggaaatctcaccgggcttccagcatgctcttcacctccaacaatagggtaccaccacaacagtcgaaggaggaggactcgcatcttggttgcaacgaccatttctgttcccttgtgcatgctcaccgttctttttggaatcattgtgatcatccgcagaagcgataaaccacacaagcaggcaacaacgacgaccacagctggtagaggtgatgtgttttcggtgtggaattttgatggaagactagcatttgaggacatcgttcgggcgacagaaaacttcagcgagaggtacgttgttgggtcaggcgggtgtggaaccgtctacagagttcagctacaagggggcagactggttgcagtgaaaaagctccatgaaactggagaaggttgtgttgtcagtgatgaggagagattcacgggtgaaatcgatgtgctgacaaggatcaggcaccgaagcattgtcaagctatatgggttttgctcccacccaaggtacagatttttagtgtacgattatgtcgatagagggagccttcgcgcgtccttggaaaacgtggagatcgcaggggagctgggctgggagagacgagtcgccattgcaagggacgttgctcaagctctgtattacttacaccacgagtcttgcttgacacagaatttaaggcttacgtttcagacttcggcatatcaaagatcgtaa

SEQ ID NO: 106530 - DNA, 1976 bp, Zea Mays
cctttccactgctccatcttcctcgcagcgccggcgatccatcctccgctccctcccttactcgcgctcggcacgcaggcgacgccggcggtggtcaggctcgggctctaagcgacggcgctgagctgattgtcccattcaataaagaaagcgaagggcatagataccagaagcaacactgagcccatcttgcttggaattctatctgctgttggaacaacttacaccaatatcatggcaaaccttgctgattcttttctagcggatcttgatgaactgtcagacaatgaaggctatcctgaagaagacaatgctgaggcagcgggtagggatgacgacgaagatgatgatatgcctgaccttgagtctcttaattatgatgaccttgatagtgtctcaaagttgcaaaagacacaacgctataatgatataatgcaaaaagttgaaaatgcacttcagaaaggtactgatttctctaatcaaggttccatcctggaggaggatccagagtaccagcttattgttgactgcaatgctttatcagtagatattgagaatgaaataatcataatccataatttcatacgggacaagtataggttgaagtttcctgaactggagtcccttgttcatcacccaatcgattatgcccgtgttgtcaagaagattggaaacgagatggatttaacactagtagatctggaaggacttttaccttctgcaattataatggttgtctcagtgacagcatcaacaacaagtgggaagcctctttctgaagacaatttggaaaaaaccactgaagcatgtgacagagcccttacccttgatgcgtcaaagaagaaagtgcttgattttgtagagagcagaatggggtacattgcaccaaacctttctgcaattgttggcagtgctgttgcttccaaactgatgggtactgcaggtggtctgggagcacttgcaaaaatgcctgcttgtaatgttcagttactcggtgcaaagaggaaaaatcttgctggattttctactgccacttctcagtttcgtgttggctatcttgaacaaactgaagtatttcagagcacccctccacctttaaggactcgcgcctgcagacttattgctgcaaaatcaactctggcagcaaggattgattcaattagaggtgatccaactggaaaagctggacggaacttgttagaagaaattcgtaagaagattgagaagtggcaagaaccgcctcctgcgaagcttccaaagccactcccagttccggactctgagcctaaaaagaagagagggggccgtcgtcttcgaaagatgaaagaaagatatgcgcagactgatatgatgaagcttgcaaatcgaatgcagtttgggattccggaggagagctcactaggtgatggcttgggggaaggttatggcatgcttggacaagcagggagtggcaagctacgtgtctcagctggacaaagcaaacttgctgctaaagtggcgaaaaagttcaaggagaagagctatggtagcagtggtgcaacatcaggattgacatccagtttggcatttacaccagttcagggaatagagttgtcaaatccacaggtccaaggaaaccttctcggaggcggaactcaaagtacttacttttccgagaccggcacattttcaaagatcaggaggacgcaatagaatcctctttgcaaccatcacatctcatttgcactgcatttgttgatatccttgggatgcactgtagaaaattcaaaagtcaatcttgcaatgttccagagactttagaatggcaattcacagttaacagtgatgcttcgagcacttaatcccaggatatttgcgaccgaacctgacttttgagaattctgatgtccatagtctatattgcctcgtgtacaagttcaagcgaacaatttttatctcatggttactactagatgagattggttcacgggtctggc

SEQ ID NO: 106531 - DNA, 2079 bp, Zea Mays
ccacacgtttctttaccctaacctttccactgctccatcttcctcgcagcgccggcgatccatcctccgctccctcccttactcgcgctcggcacgcaggcgacgccggcggtggtcaggctcgggctctaagcgacggcgtcagtgtcttcccctcccacctctcggcagtcgcctcgcgccctcgcctccggtcctccacgcaccagccggctactctgcgctgagctgattgtcccattcaataaagaaagcgaagggcatagataccagaagcaacactgagcccatcttgcttggaattctatctgctgttggaacaacttacaccaatatcatggcaaaccttgctgattcttttctagcggatcttgatgaactgtcagacaatgaaggctatcctgaagaagacaatgctgaggcagcgggtagggatgacgacgaagatgatgatatgcctgaccttgagtctcttaattatgatgaccttgatagtgtctcaaagttgcaaaagacacaacgctataatgatataatgcaaaaagttgaaaatgcacttcagaaaggtactgatttctctaatcaaggttccatcctggaggaggatccagagtaccagcttattgttgactgcaatgctttatcagtagatattgagaatgaaataatcataatccataatttcatacgggacaagtataggttgaagtttcctgaactggagtcccttgttcatcacccaatcgattatgcccgtgttgtcaagaagattggaaacgagatggatttaacactagtagatctggaaggacttttaccttctgcaattataatggttgtctcagtgacagcatcaacaacaagtgggaagcctctttctgaagacaatttggaaaaaaccactgaagcatgtgacagagcccttacccttgatgcgtcaaagaagaaagtgcttgattttgtagagagcagaatggggtacattgcaccaaacctttctgcaattgttggcagtgctgttgcttccaaactgatgggtactgcaggtggtctgggagcacttgcaaaaatgcctgcttgtaatgttcagttactcggtgcaaagaggaaaaatcttgctggattttctactgccacttctcagtttcgtgttggctatcttgaacaaactgaagtatttcagagcacccctccacctttaaggactcgcgcctgcagacttattgctgcaaaatcaactctggcagcaaggattgattcaattagaggtgatccaactggaaaagctggacggaacttgttagaagaaattcgtaagaagattgagaagtggcaagaaccgcctcctgcgaagcttccaaagccactcccagttccggactctgagcctaaaaagaagagagggggccgtcgtcttcgaaagatgaaagaaagatatgcgcagactgatatgatgaagcttgcaaatcgaatgcagtttgggattccggaggagagctcactaggtgatggcttgggggaaggttatggcatgcttggacaagcagggagtggcaagctacgtgtctcagctggacaaagcaaacttgctgctaaagtggcgaaaaagttcaaggagaagagctatggtagcagtggtgcaacatcaggattgacatccagtttggcatttacaccagttcagggaatagagttgtcaaatccacaggtccaaggaaaccttctcggaggcggaactcaaagtacttacttttccgagaccggcacattttcaaagatcaggaggacgcaatagaatcctctttgcaaccatcacatctcatttgcactgcatttgttgatatccttgggatgcactgtagaaaattcaaaagtcaatcttgcaatgttccagagactttagaatggcaattcacagttaacagtgatgcttcgagcacttaatcccaggatatttgcgaccgaacctgacttttgagaattctgatgtccatagtctatattgcctcgtgtacaagttcaagcgaacaatttttatctcatggttactactagatgagattggttcacgggtctggc

SEQ ID NO: 106532 - DNA, 1936 bp, Zea Mays
aagaaagaaagggaaggcggggggaggccggccaaggcaccaccacaccaccacccgacgaattcaagcatgaggccgccgccgccgccggcggccacgaccatgcgtttccacgacggtgccgacataaagcccccgcttctgggagtcccgtcggcaggtctacttcatcaacaccagacgctgccggcggcctccttcttcatgccgctcccctccttccccgaccatcagcaccagccacatctcccgcccccgccgaagcgccaccactctatgcccgacaacctgttcctcctccaaaaccagctccagccgccgccgtcgcagggtctaccattcccgccactgcataccaccacgcccttccagctccagccaccactgcaaccgccgcggggagcgatgaaaacaaccccggcggcgcagcaacatcaacagctcctggacgagcttgctgcggcggcaatggcggctgaggtcggcaactccatcggcgcgcgagagatattggcgcggctcaatcagcagcttcccccaatcgggaagcctttactccgctccgcttcctacctcagggaggccctcctcctcgcgctcaccgacggccaccaaggctccactcgcgtaacctccccgctcgacgtcgccctcaagctcggtgcatacaagtctttctccgacctctcgcctgtgctccagttcgccaattttacggccacacaggcgcttcttgacgagatcgcctcaacaacttcgtcttgtatccgcatcattgatttcgaccttggtgttggcggccagtgggcttccttcttgcaggagctcgcataccgccgtggaactgggaacggtcccctgccaatgttgaagctcacagccttcgtgtcaagtgcttcccaccacccgcttgagctgcatcttactcgggagaacctgtcgcaatttgctgtggaccttggcattccatttgagttcactgccatcaatctcgatgcgtttgatcccgcagagctcattgctcctagcgccgatgaggttgtcgctgtttgcctccccgttggttgctctgcacgcacgccaccgctcccgatgttgcttcagttggtgaaacagcttgctcctaagattgttgtggctattgaccacggcagtgaccggggtgacctcccgttttcgcagcacttcatgaattgcttccagtcctgtatgttccttctcgactcactcgatgctgctggcaccaatgcggatgctgccagtaagatcgagaggtttctgatccaaccgagagtagaggatgcagtgcttggccgtcggaaggctgaaaaggcaatggcttggcgggcagtttttacatcggctgggtttgctccagtgccactcagcaaccttgcagaggcacaagctgactgcctcttgaagcgggtgcaggtccgaggattccatgtggagaagtgtggaatgggtctagcactgtactggcagcggggcgagctcgtgtctgtctcggcgtggcggtgctgatcatagcaacctcatccgtcaaccatcgtcgtcgtcgcgcctacactattcgcaggcatgtttaactccggtaatatgcgttttatcttgcaaacattgcaaagaaactattgtcatggttgttccacgcctctgattgctttactgctgtttttggagtattagctaggcctaatgaatgttgcaatcttggtgtgggtgtccccctacaatgtaacatgttggtactagggtctcaacgctgttcgtgctctcttcttggttagccggaggctactttggcgtatttgtggcaatggtgttcgttattttactaggtaaatcagatgaagactgacatatgaactgaaatggttgggcattttttttctttcttggcttcatatccatggttgatgtatggatttct

SEQ ID NO: 106533 - DNA, 2889 bp, Zea Mays
atggcagtggtagagagagaaagaaagaaagggaaggcggggggaggccggccaaggcaccaccacaccaccacccgacgaattcaagcatgaggccgcagagcgcagagcagggctgccgccgctgccgctgaggagcggctacagagtgctatacctattacacagcggcaacaggcaggcaggtgcgtgcaggcacaccgctcctcgctgttccgcgcccacccgcacaagcaagcgccgccaccgccaccaccgagaaggaaccgcctcgcgccccagatctcgccgccaggggtcgcgcgagtaggtacatgagggcggcgcccttcagtgccgacgggaacggggcggggaccatagaggcgctgctttggccgcacgggaagggcggcggcggagggcacctgctgttggagccgacgtcggtgctggactgcagacggagcccgagcccgccgtactcgacatcgacgctgtcttcgtccctgggcggcgccgcgggggactccttttccggcgtggcggcggtttcggagaacagcgccgccgccgccgccgaagccaccaaatgggcggcgccaggcgagcacggcagcggcggcggcggcggcggaagcggtggggggaggaaggaggagtggcccggcggtgacctaccgcccataccgggggccctggacatcggtttcgtcggggaggagggctgggatgccatgctcggcgacgccgcggcggcggccgggcaggaccagacattcctcaactggatcatggccgcgccgggcgacatggagccgccgccgccgccgccgccgctcctcggtaatgccgccggcttcgggttcccggcaccggacccgctcgggttctccctgcagcatcaccccggtggcggcggcgcctcggccggggcgctggcctccgacctgtcgtccccaggcgcaaggtcgctcagcggcagcagcggtagcggcagcaaggccacttccactttcggcctcctaccaaccgaggcggtgcttcagccgccgccgccgccggcggccacgaccatgcgtttccacgacggtgccgacataaagcccccgcttctgggagtcccgtcggcaggtctacttcatcaacaccagacgctgccggcggcctccttcttcatgccgctcccctccttccccgaccatcagcaccagccacatctcccgcccccgccgaagcgccaccactctatgcccgacaacctgttcctcctccaaaaccagctccagccgccgccgtcgcagggtctaccattcccgccactgcataccaccacgcccttccagctccagccaccactgcaaccgccgcggggagcgatgaaaacaaccccggcggcgcagcaacatcaacagctcctggacgagcttgctgcggcggcaatggcggctgaggtcggcaactccatcggcgcgcgagagatattggcgcggctcaatcagcagcttcccccaatcgggaagcctttactccgctccgcttcctacctcagggaggccctcctcctcgcgctcaccgacggccaccaaggctccactcgcgtaacctccccgctcgacgtcgccctcaagctcggtgcatacaagtctttctccgacctctcgcctgtgctccagttcgccaattttacggccacacaggcgcttcttgacgagatcgcctcaacaacttcgtcttgtatccgcatcattgatttcgaccttggtgttggcggccagtgggcttccttcttgcaggagctcgcataccgccgtggaactgggaacggtcccctgccaatgttgaagctcacagccttcgtgtcaagtgcttcccaccacccgcttgagctgcatcttactcgggagaacctgtcgcaatttgctgtggaccttggcattccatttgagttcactgccatcaatctcgatgcgtttgatcccgcagagctcattgctcctagcgccgatgaggttgtcgctgtttgcctccccgttggttgctctgcacgcacgccaccgctcccgatgttgcttcagttggtgaaacagcttgctcctaagattgttgtggctattgaccacggcagtgaccggggtgacctcccgttttcgcagcacttcatgaattgcttccagtcctgtatgttccttctcgactcactcgatgctgctggcaccaatgcggatgctgccagtaagatcgagaggtttctgatccaaccgagagtagaggatgcagtgcttggccgtcggaaggctgaaaaggcaatggcttggcgggcagtttttacatcggctgggtttgctccagtgccactcagcaaccttgcagaggcacaagctgactgcctcttgaagcgggtgcaggtccgaggattccatgtggagaagtgtggaatgggtctagcactgtactggcagcggggcgagctcgtgtctgtctcggcgtggcggtgctgatcatagcaacctcatccgtcaaccatcgtcgtcgtcgcgcctacactattcgcaggcatgtttaactccggtaatatgcgttttatcttgcaaacattgcaaagaaactattgtcatggttgttccacgcctctgattgctttactgctgtttttggagtattagctaggcctaatgaatgttgcaatcttggtgtgggtgtccccctacaatgtaacatgttggtactagggtctcaacgctgttcgtgctctcttcttggttagccggaggctactttggcgtatttgtggcaatggtgttcgttattttactaggtaaatcagatgaagactgacatatgaactgaaatggttgggcattttttttctttcttggcttcatatccatggttgatgtatggatttct

SEQ ID NO: 106534 - DNA, 1062 bp, Zea Mays
gagagatggagtttgtcagatttaccttattataagggggctatgtggtagctaaatgaacagaaaaggagagctagacaaggtctcatgttccttctattaatacccatacttctcctccccaaaccatcccatctccactcgctagcactagcatagccgtctctttcttttctgcttccagacattgtccacgagctggtgcactggtgtcgctcgcaaccaaattaaggactgagccatggcatccaagggcgtcctcttcttggctctcaacctcctgttcttcacagtggccaacgcctgcggcagctgcccgaccccaacgcccccggtcgagccaccgccgccgcctcctgctaccccacccccttcatcctccagtgggaagtgcccgctgaacgcgctcaagttcggcgtgtgcgtcaatgcgctcggcctcgtcaaaggcgaggctggcaaggtaccagctgagccatgctgcaacctcatcaaaggccttgcagacttcgaggccgccgtctgcctctgcacggccatcaagggcaacgtcctcggcgtcgtcttcgatgtccctatcaagttcaatgccctcgtcaactactgtggcaagtgcgtgcccaagggctacatgtgtgcgtaagctccgcgcggttacacgctcgtagccgttcgcgtgcgtaattaagcatgcacctgcatggcacacatgtattgtgcgcctgctgatctctcctgtctcatttgtgcaccttaggttctacagtcctagaaccatattccaggcaaattcttgtcagttcacatgtattgtctcttgttgaatttctatttttttgttttattttgtatttgaacatttgtttataagagtttgccatcttcttctccaagaaaaagaggagtgctgcttctagtttttatatctacgagtcatgcatgtaatctgttgagagtcatgtgtttgtgtatgtaaaaccaagcacttgaatttaatatatacttattcgatttgtgctaagggttcctgtcttttggaggaaggatcaaggcatttggtta

SEQ ID NO: 106535 - DNA, 109 bp, Zea Mays
gtgaagaaactcacatcctttgttttcttctcaagaatgtttccatcataaaaataaattattattattatacaataatatactactctattaagagtctagtgtcagc

SEQ ID NO: 106536 - DNA, 687 bp, Zea Mays
atgtgtctcctgactctcgcgcgtgtgtttgtgtgtttttcagacatcaggtgtgagccagtggtatccgttgacgaagctcttgccgaggaaagggcgggcggcgaagtagtcgagctctcgcgcccaggagacgccgtgcacggcgtcgacgccggggccccagttcctgtacatcccgaagaacgccgtcatgctcttgttgctggtgtggtcccagtcatcccagccgcctggcgcgatgacgctgtcgaagtaggtgtaggcgtagacgatgcgcgagtactgccccatggcccgccccacgtagagccgccccgtgccggtcacccggcagttgacgaaggcgaagccggtgcgctcgcacgggtcgcgccgcccgtgcgccgccaccgagccgaaccgctgcgccgtcgagtgcagctcgcagtccttgtagagggagcgggcgttgccgaagacgaagtcgatggagccctcgatgtagcagtcgcggaagtagtgccggccggcgtcgtcgcacagcgtgtcctgcgcgccgtagaacccgcagccgaagaagaaggccttgtcgccggagatgcggaacgccaccgcctgccctccttgcgtgccgggcatcggcgccggagctgtgttctgcgtgtcaagacgagacattggaaagggaaaaggtgcgtcagttag

SEQ ID NO: 106537 - DNA, 87 bp, Zea Mays
gaaaattatagcaagaccttgatatcagcgctccctgcaagcatgctcatgtgcacgacaagaagcagcatacctgcaatgaacccg

SEQ ID NO: 106538 - DNA, 1487 bp, Zea Mays
aaaccgttcgccgtttccccatctggccatctctttccccacccccacccacacgcactccagtcaccgccggcgccaagccgatctccgaccaccgcagccatgtctttcgccgccgcgctccacctacgccccacctccgccacgacgcacccgcgcctccaccaatccacccgcaaatcgtacttcctccgcttacagccgtctcgccgccgcctacccgtcccgcgcctgtccctcacgcccaccaccgccagcaatagcaacagctctcctcccccaccgtccccttcgcccgcccccgccgccccgggttccctgctcgccaactggtccccgccgcgcgcgatctggcgggggctgtcggcgctgctcctcgcgggccaggtcttccaccgcgtcctcacgggccgcgtccaccgccgcaacctcctggcgcagctccgtagggtgggtcccgggagcgcgggggtcgcgctcctcaccgctgccttcgtgggcatggccttcaccatccagttcgtgcgcgagttcacccgcctcggcctccaccgctccgtcggcggcgtcctcgcgctcgcgctcgcgcgcgagctctcgccggtcgtcacggccgtcgtcgccgcgggccgcgtcggctccgcgttcgccgccgagctcggcaccatgcaggtgtcggagcagaccgacaccttacgcgtcctcggtgcccaccccgtcgactacctcgtggtccctcgcgtgctcgcctgcgtgctcgcgctcccggtcttgacattgatcagcttcgcgctcggcctcgcgtcctcggcgttcctggccgattctgtgtttggcgtcagcgtcagcatcattttggagtcggcgcgcagggcgctgcggccatgggacttgatcagctctttgctcaaatctcaagtgtttggtgccattatcgcggtggtgagctgtgcctggggagttacaacccatggaggagccaagggtgttggcgagtctacaacatctgccgtagttgtttccttggttggaatcttcattgcagactttgctctctcgtgcctgttcttccagggtgctggtgattcgctcaagtatgcaatgggttgaggtgggtcagtgcagaggaagttttttcctttctaggaggatagcatagtcttgtacattaaaaagagtggtgcactggattctagtaggtgaacattgcaacttctgccacagtccaggtgacatgcatagttgtttccccttgatacctacgaaaatcattacctttgttgtactgaactgctgctcaattatttgccagtgattcatgtataaccttattcatgaaagtattggtcggattgaatcagtgtaacccatgcatatccttgaaaattatgtaaaatcatttgtaaccccacgagtgactgattgtttgtttaagccccatgtggactgtaaccctgcctaccccagcctttcccctcatccccacc

SEQ ID NO: 106539 - DNA, 1394 bp, Zea Mays
ataatctactactaccgcccccatggaggccggggggcagttttctctctcgctcgctctcgtctcgtctcctccaaaagctcgtatttttagctctccctagctctctctctctctctctcacgaccaagctctcgccatggccaaaagcacatgcaagctatgctcccgccgcttcgccagcccccgcgccctcgccggccacatgcgcgcccactccatggcctccgcaaagtcgcagatctcatcggcctcgtcggcttcgacatccatcacggctagcggcatcgacgccgacaagaagcgcggccccgtccgggggcacgcgctgcgggagaatcccaagcgccgcggccgcctcgacgactcggatcgcgagagcgagacgacggactactactctccgtcgccggacgccaagcgctcgcacgccggatcgggggacgcggagccggtgagctcggtctccgacgcggccacgccggaggaggacgtcgcgctgtccctgatgatgctgtcccgcgactcctggcccgcgccgccgccgtactcgtaccgcctcgactcggacgacgacgacgagagcgacgcccgcccggcggtggtcgccgcgacagcgcagaagcggacgcggtacgagtgccccgcctgcaagaaggtcttccgatcctaccaggccctggggggtcaccgggccagcaacgtgcgcggtggcaggggcggctgctgcgcgccccctctcagcactccgccccccgccccgctgcagccattgccagaatgcgagggcagcgaggaggactccaaggcgcagccgcacgagtgcccctactgcttccgcgtgttcccgtccgggcaagctcttggcggccacaagcggtctcacctctgctcggcagcggcagcggcggcggccgccgcccccgtcacatcaggcgctgatccgtcgatcacaatgaggagcctgggtttcattgatctgaacctccccgcgcccttcgacgacgtggaggtctccgccatgtctgaccccttcctctcgtccaagccagcaggttcttgaaagctagcagagcaggcaagccggccgctttacctcgctcgcgatatggctggttccagtggcgacgattcgaggtaaggatcagagacggagagaaagacctgctgattaacgaagcagtaaggaaggcatagaatagcctatatatgattaaaaaaaagaactggagacgtctttgcttgggttgggtggttcatttttcttagtatatgtgtttgtttgcattgattcagtcagctacaatatctctctagtcctccatttcgttgtgtctttttgtctgtttgaagccatggaacggagtagattggggcagctaacagagctagct

SEQ ID NO: 106540 - DNA, 636 bp, Zea Mays
acattcagattccgacttcctggttcctgcagcaggatgcgttcgtgactccctacaccccagcgccgcttccgcgtgggatgatcgagctctcagcgccgccacacgcttcgcggtccccagcgccacgtgggatgaccagacgctcagcgccgccacacggtcgggctccccagcgccgcgtgggagtgggacgaccgtacgctcggcctgacgctcgacgctccctgccagatccgacttggcgctcctcgtctcgggtgactcgggtccggtgccgctcctccctctccgcctgtctcaacactccgcccgctcggctcctactatccttcactgtcgtggcaccgccgtgactagtcatctcagatggaattttcactgaaggcagggttttgatccttgaataatttatgcattgttcgatgggctcctgatactgccaggagtgacccttccactgctgctaacttcgagcttgatcaaaaggtctttctactcatatgcaaggtgtaagactatcgagttatgtggtatattggtgttgatcattcatgtaatcactttgaggctatgggtgtttgccttgctcatacttatttaatttgcttccatctatgagattagaaaaaaaaa

SEQ ID NO: 106541 - DNA, 537 bp, Zea Mays
acattcagattccgacttcctggttcctgcagcaggatgcgttcgtgactccctacaccccagcgccgcttccgcgtgggatgatcgagctctcagcgccgccacacgcttcgcggtccccagcgccacgtgggatgaccagacgctcagcgccgccacacggtcgggctccccagcgccgcgtgggagtgggacgaccgtacgctcggcctgacgctcgacgctccctgccagatccgacttggcgctcctcgtctcgggtgactcgggtccggtgccgctcctccctctccgcctgtctcaacactccgcccgctcggctcctactatccttcactgtcgtggcaccgccgtgactagtcagtaagtgctctcctttttcttggcagcaggggatgatttttttggcaggttggtctatagttaaaaaggaaattgtgatggtaagggagcaatcttgttatagtgttatatatgcaaatgcaccagacccgtgactgcatctcatgggcaatacaaaccctttcatttgctcca

SEQ ID NO: 106542 - DNA, 2141 bp, Zea Mays
tatagctcggaagacatcgttgtagcgggcattgaatctgtcgcacggcaatgtgtgaatctctaacgtccctggtatgtgatgtgcatgcaaacttcttctcctgctagctatagctctccatatatatcaatcacattagttacttaattaatttgatctttcccctcaccactacatacatgttaccatttaattccccagatgccaccgtctccgccgccatcaccgccagagtacaagcacttctgtcgagtatgcaacaaggggttcacgtgtggcagtgcgctcggtgggcatatgagagcccacggccctgctagcgacgtcgacgggttcggcgtcgtcgacgacgacgatggctcgctcgatgaagagggggtcacgcgatgccccggagcagatgagtgggacgacgcggttgggacgtcggcgacgcatgcgtatgcgctccgggcgaatccgaataggttgatcaggagctgtcagctgtgcaaaaactgcgggaaggagtttacgtcattggaacttttccttcagcatgcgagatgcagcagatcagaggatgagggaggaggaggagaagaagagcaggtgggtagtccggtaccttcgtcatcatctccccctacgaacgctgatggtggtggtgacgaggatccgatactagcaaccccatggtcgaagggaaagagatcacgtcgcgttgggacgaccgaggaggatccttccaccagcaccgtgggagaggaggaagacctcgcgaaatgtctcgttatgctatcgtcttccaaatccaacattaatgaccaggaggcgaacgttatcgcgacgattacaaaagacgatcatcatcatcagaagcaaccgattccttttttcacacaatcacaagagtcagtcgtagccgcactgccttcttcgccactcgttgtgcctcaatacatctcacccgcaccacgtggaggagttttcgagtgcaaggcgtgcaaaaaggtattcacttcacaccaggctcttggaggccaccgggctagccacaagaaagtcaaagggtgtttcgctgccaagttcgagacgagcaatgccactgaatcaacacgccatcatcaagtggtggccgttaatatcgccaaagatggaagaaataatgacaatggcaaagctcctgctgtcgacgaaatcatcaatgcaggtgcgagtgcgagtgcgagtgcacatgtcccaggaggttttgctaccactatcgtcgacaccaacatagggacaagttccgacacgccacgatcactgtattcttccatggcgcttgcgcccatcgtcgaacacaatccattagttgagaccacgctcgccgttgcagcggcacagttcaagaaaagcaccaaaatgcatgagtgttcggtatgccaccggctgttcacctctggccaagcactcggtggtcataagagatgccactggcttacctcaaacacatcagacccttgtaacacggtgaccgccagcatgatcccgtcgctaacggaagatttcgttggcggcgtagtcaaacagcagttcaacctccagccccaaccaatggtcgtggacgtgcctccgccagtgctcgacctcacaatcgcgccaaacgcaaccgtagcgcacttgcagccactagctgtcgcagcaccaagcaatgttaatcaccagaagaaggatgccacaagaaaaaaatatgccatcgatgcggtgatggaggaggaagaggcagacagcacaccagcgaagagagctaaaattagcgacctcaaagacatggtgagcatggatggtgagcccacaaagccctggctacaagttgggattggttcctcgtcggcaccaggagatgacagttgacaaggcctgatgagaatataactattcattaatcgactttgaagtattatggtacatattatagtattaactacttactaactttattaacttagagcgtgaatgtacaatttgtggagtatgctatacattgtttgattttttttcttcttcttctttttttattatctagatcttccactgttattgtaagactgaaatatactgctgctaaacactaattaaaagtaacaatatgaaagacaacatttttctcttgt

SEQ ID NO: 106543 - DNA, 1262 bp, Zea Mays
tttaactacgagtgcctttgcttccgggctccttcctcgtgtcaacttcactccaccggcccagccccaccattgtttatcaggagctccgccgacgccccgcgtgtataagtagccacggttcaccgagctcgcagttctgtgtaggcgtgtgtggtcgagaggcgcgagcgaacctttgccagtcaatagatagcacaggtccccgtgagtcgattgtgtctgtgctggtgaccgccgaccgacaagtcaagaaatggcaacgagcgagctgccgtcggagtcggacgcgttcgccttcccgtgcggggacgacggaacgacgtcaccggcgctgtcgccgccggtcgtgatctcagtgctcgcgtccatcctggagcggcacatcgccctcaacgagcgggccatggcggccgcgagcggcctcgaccagtcggcaccgggagacaaagacgacgacgacgactcggacccggcggccgcggctgcgaggaagcgggcgcgggcgttcgacggcggcacggtgctggacatgagcctgcacgcgttcctggagcgcttctcccgctacgcgcacgtgtcgccgcaggtgtacgtggtggcgtacgcgtacctggaccggctccgccgcggcgccggcgtgcgcgtcgtgcgcgccaacgcgcagcgcctgctgaccacggccatcctcgtcgcgtccaagttcgtggaggaccgcaactacaggaactcctacttcgcggcggtgggcgggctggcggcggcggagctgagcgccctggagctggacttcctgttcctgatgcagttcaggctcaacgtgtgcgccggcgtgttccggagctactgccgccacctggagcgggaggtgagccacggcggctggtaccgcgtcgacaggcggctcggcaggccgctcgtctgcgccggagaagcgcgggcgcagcagcggcaggcggcggcagtctagtaaagccagctgcgttatcgcctagcagtagcagcgactggggtccgaaagctgcggcctcgccactgccacgctgttacctggtagagaaggtgtcggtgcccaaagggcacacggaatgtacataaatagcataatgagtactcatggcttacactatgagtttaaacttgcaagcatcgtactccaacatggcaagtagcaagtgtttcttattacctcgatcaaacaggaaaagtaaaaaagaaaaagaaagaaagacccgagagaagaacaacactttttttttaac

SEQ ID NO: 106544 - DNA, 216 bp, Zea Mays
gtcacaagcaaaaataatcgtgagcagtaaccaaagtaggatggcacataacttggacaattctcattaatgtgcaaaaaccttgcctgaaggacaactgatgttcacgatcaagcatttcaaaaaatattattcaatccaacatcgggcctgtttggatcggcttctggccgtcagaatcggtttctggccaccaaacgcttcgcttctcagccc

SEQ ID NO: 106545 - DNA, 1424 bp, Zea Mays
cgtccaactcgcatccaacgcccctgccgcatcccgcgtccctcccgcactcgtctctgccgcaccgtacgcgcaggcccgcccgcccgctcccattccccacccccacctatggcggcgctctccgcgcccctccgcgccatcgccgccggatcccgcgtcgccgcgtccgaccccgtcaaggtctcgtgcgtgaggagcactggctcagctcacttcggctgcgcctccatcgatctgccctcgcgttctatgggtccggcggcgaagggaaggcaagatgtacaccgcgaggaagaagatccagaaggagaagggccttgagccctccgagttcgaggactccgttgcccaggagctcaagagcgacctcaaggacctgtacatcaacaatgctatccagatggatgttaccgggagcaggaaggctgttgtcatccacgtcccataccgcctgcgcaaggcctttaggaagatccatgtcagactcgtcagggagctggagaagaaattcagcggcaagctcctttctatcaagaggtttgacatggtagatctgccattatcagaacaagatgaattaatggacatgctttggaatatctcttgattgaaacaccccagtatgcagaaaatggctctcttgatgatattttgtttacaccagctagaagatctagggctttcaagatcgcagcgatgagatgccctcttccccgaccaccagatcacagcgatggagctggatccggtcgccgctggggcatcctcctcgccagccagtcgcagatgtccctgatggcaagcttcagcaatcgtcaagtacaaagacatcctcccgtgcaaaattcaatttgcccaatcctaatctcttctatatagcctcacagatcgcagcgatggagccggatctggtcgccgctggggcatcctcctcgccgccgccttcaccggtgtcggccacgtccccgccgtggcaaatgcgagttgaacaagtggagcttatcaagagtttcagaattcgggtatgccagggtgcatgccacaagaggtgatatgctggttcagtttgtaagctcaagtacgatggaggttttggaccaatttagaattgtgaagcctgatccggcaaggaggctatggaacaagccagtttaaccatagctgtagtgcatgcaaaagatggagctggagctacttccttatattattgttatgctatataaaagatggcgttgaattacacatcagcgtgttgtctaagttctatacttatctgtgtggtgtatggttctttatgacatttccacatgatagttctttctccctctgtaaaatatattgatcgacaagtgtcattttatagttgtagctaacatcctaacaagggctcctgaacttgagttataatttacagttttgtc

SEQ ID NO: 106546 - DNA, 849 bp, Zea Mays
cgtccaactcgcatccaacgcccctgccgcatcccgcgtccctcccgcactcgtctctgccgcaccgtacgcgcaggcccgcccgcccgctcccattccccacccccacctatggcggcgctctccgcgcccctccgcgccatcgccgccggatcccgcgtcgccgcgtccgaccccgtcaaggtctcgtgcgtgaggagcactggctcagctcacttcggctgcgcctccatcgatctgccctcgcgttctatgggtccggcggcgaagggaaggcaagatgtacaccgcgaggaagaagatccagaaggagaagggccttgagccctccgagttcgaggactccgttgcccaggtgagcatagcgccaacccacctcctctctcctccttttactgcgtttattttccttgaactgctgctctgtttgtttgtggttcccaatgtgtcggggttgtgatgtgctttttggcttgttgtacctgcatgctttatttgatctggagaacgggaaccaggagctcaagagcgacctcaaggacctgtacatcaacaatgctatccagatggatgttaccgggagcaggaaggctgttgtcatccacgtcccataccgcctgcgcaaggcctttaggaagatccatgtcagactcgtcagggagctggagaagaaattcagcggcaagctcctttctatcaagaggtttgacatggtagatctgccattatcagaacaagatgaattaatggacatgctttggaatatctcttgattgaaacaccccagtatgcagaaaatggctctcttgatgatattttgtttacaccagctagaagatctagggcttt

SEQ ID NO: 106547 - DNA, 192 bp, Zea Mays
atggttgtgacatttggtgaggatgtttgttgtgactttgcagccagatggatgttaccgggagcaggaaggctgttgtcatccacgtcccataccgcctgcgcaaggcctttaggaagatccatgtcagactcgtcagggagctggagaagaaattcagcggcaaggtttatatgctaattgtagctacta

SEQ ID NO: 106548 - DNA, 159 bp, Zea Mays
actgggtgacggcaacacgaaaacaaaggcaagcgtcgatagccggcttggagactcggcacggctgagaaggggctcggcgagctcgacgaatggacgaggagtgaggggacgccgacgaggtgactccgcggtggggcgaagcacagatgctaggag

SEQ ID NO: 106549 - DNA, 1116 bp, Zea Mays
atttaaattatcattcttgtggtgatcattgcacgccgcccatagtattgtactgcacatctgaggcaaggtaccaggccattagcggcttatgatgtgtatttaagcagactaagctgataggctatggccatcttctctagccggaggaccgaaacaccgtcagagaaaagatggtgaagcctgcatttggaagcttcggcgactctttcagcgccgcgtccctcaaggcctatgcggccgagttcattgccacgctcctcttcgtgttcgccggcgtcgggtccgccattgcctactcgcaactgacaaagggtggcgctctggaccccgccggcctggtggccatcgccatcgcccatgcgttcgcgctcttcgtcggtgtctccatggccgccaacatctccggcggccacctgaaccccgccgtcaccttcggcctcgccgtcggcggccacatcaccatcctcaccggcgttttctactgggtcgcccagctgctcggcgcctccgtggcgtgccttctcctgcagttcgtcacccacggacaggctatcccgacacacggcgtctccggtatcagcgagatcgagggcgtggtgatggagatcgtgatcaccttcgcgctcgtgtacaccgtgtacgccaccgcggccgacccgaagaaggggtccctcggcaccatcgcgcccatcgccatcggcttcatcgtcggcgccaacatcctggccgccggccccttcagcggcggctccatgaacccggcccgctcgttcggccccgccgtggcggccggcaacttcgccggcaactgggtctactgggtcggccccctcatcggcggcggcctggccgggctcgtctacggcgacgtgttcatcgcctcctaccagccggtcggccagcaggagtacccatgaaagtcgatccggacccgacccgacccgtcgtgttgatctcaccatcgtcgtcatgtcatcgccttgtgcttgtgaagttgtgattatgtttgatcttatttgcatttcccttctggttttcattcattcagcaacggtgccaagatgctgtaagcgagaggaccgtcgttcgatctatatttatgtatataaatct

SEQ ID NO: 106550 - DNA, 1787 bp, Zea Mays
acctctaccgacacgtgggtctacccgccaacctgtccgtttccgccgcctctgacacgcgggcacaggcacgggcctcctccaaaaaaccccccccctccccagcttgtctgcccctctctccatttcgcggaggaagaaaaaggggaccaaaaaacggaaaaggggataggaggaacggatcagcggtggaagcttccagccctagcgcagcaatggcgggttggtgcgagcaggcggtggcgctgctacagcgccccgcggtggcggagatggccgtcgacgtgctgctctgcgcggtgccgatctgggccgccgtcatgatcggcctcgtcgtcggctggtcctggcgcccgcgctggacgggactgctcttcctcggcctccggagccgcctccgcatcctctgggtgccgccaggcctcggggcccggcggctctggttcgcctgcaccgcgctctccgcctgctccgtcgcgaccaagctcatctcctccgcattccgccgctgcagaggcaagcaccaggacagggcctcccccgacgatgatgccgctgcgaccagagacggcggatgtcgcgccgacggcagaacaaattttgagggtgagcatgatacagtcactgagaaggacctagaacatctcctgcaacttttagataataaggaaagcggggatacagcttggcagaatttgatggagcgtagaacctccaacatgacatacaatgcctggcggcgtgagcctgaggagggacctataatgtactgcagccgcactatttttgaggatgctactcctgaactggttagagatttcttctgggatggtgattttcgtctaaagtgggatcccatgcttgcatattgcaaatctttggatgagttccctcagaatggagcaacaattgtccactggataaaaaagttcccgttcttttgcagtgaccgtgaatacatctttggaggacgcatatgggaatctgggaagacttactattgtgttactaagggtgttccatatccatcattgcccaagaaagaaaaaccgaggcgtgtggagctgtacttctcaagttggcgtattagagctgttcaatcgcctaaacatgtgggtcagcaatctgcgtgtgaagtaactttggttcactatgaggacatgggtataccaaaagatgtagcccgggttgctgttcgtcatggcatgtggggtgctgttaagaaacttcagtctggattcagagcataccagcaaatgagacacacagaaactaccctgtcacacagcgtcatcatggctcgaatgaccaccaagatatccatcacagcttcaaatgatcccttggaccatgacctctcggttgccgataaaatcagtgacgagaatgacagctccaatgcagttcaacatggttttgattggaagtggttggtggttgggggtgcagtggctgcggtttgtgtgctcaacaccggtctggtaggcaaggccgtcttgcttggagcagcgagaaggcaagcaaagaagtgatatgaggagcagccttccagccagacattcatcagattgtagctacgatcgtacaggcaaaaaaatgttgagaaaataggtggggttcaacagagataactgctgtttgaggcgtatgcaatgggtctatcggatctagtttcacagtatagtctattttatttagagataaaaatcgcttgtttaagaataagtaaagctctttatttaagaagaggtgtttgagaattaagacggaatgaccgttttcttcct

SEQ ID NO: 106551 - DNA, 1916 bp, Zea Mays
acctctaccgacacgtgggtctacccgccaacctgtccgtttccgccgcctctgacacgcgggcacaggcacgggcctcctccaaaaaaccccccccctccccagcttgtctgcccctctctccatttcgcggaggaagaaaaaggggaccaaaaaacggaaaaggggataggaggaacggatcagcggtggaagcttccagccctagcgcagcaatggcgggttggtgcgagcaggcggtggcgctgctacagcgccccgcggtggcggagatggccgtcgacgtgctgctctgcgcggtgccgatctgggccgccgtcatgatcggcctcgtcgtcggctggtcctggcgcccgcgctggacgggactgctcttcctcggcctccggagccgcctccgcatcctctgggtgccgccaggcctcggggcccggcggctctggttcgcctgcaccgcgctctccgcctgctccgtcgcgaccaagctcatctcctccgcattccgccgctgcagaggcaagcaccaggacagggcctcccccgacgatgatgccgctgcgaccagagacggcggatgtcgcgccgacggcaggctatataggttttgatgattgattagctccgttcgcattgcaccatggaaggattcgcaacataaacttgcctgctgctggggtttcatcgtggctgtggtttatttcttcctcttttgatggttttaaacaaattttgagggtgagcatgatacagtcactgagaaggacctagaacatctcctgcaacttttagataataaggaaagcggggatacagcttggcagaatttgatggagcgtagaacctccaacatgacatacaatgcctggcggcgtgagcctgaggagggacctataatgtactgcagccgcactatttttgaggatgctactcctgaactggttagagatttcttctgggatggtgattttcgtctaaagtgggatcccatgcttgcatattgcaaatctttggatgagttccctcagaatggagcaacaattgtccactggataaaaaagttcccgttcttttgcagtgaccgtgaatacatctttggaggacgcatatgggaatctgggaagacttactattgtgttactaagggtgttccatatccatcattgcccaagaaagaaaaaccgaggcgtgtggagctgtacttctcaagttggcgtattagagctgttcaatcgcctaaacatgtgggtcagcaatctgcgtgtgaagtaactttggttcactatgaggacatgggtataccaaaagatgtagcccgggttgctgttcgtcatggcatgtggggtgctgttaagaaacttcagtctggattcagagcataccagcaaatgagacacacagaaactaccctgtcacacagcgtcatcatggctcgaatgaccaccaagatatccatcacagcttcaaatgatcccttggaccatgacctctcggttgccgataaaatcagtgacgagaatgacagctccaatgcagttcaacatggttttgattggaagtggttggtggttgggggtgcagtggctgcggtttgtgtgctcaacaccggtctggtaggcaaggccgtcttgcttggagcagcgagaaggcaagcaaagaagtgatatgaggagcagccttccagccagacattcatcagattgtagctacgatcgtacaggcaaaaaaatgttgagaaaataggtggggttcaacagagataactgctgtttgaggcgtatgcaatgggtctatcggatctagtttcacagtatagtctattttatttagagataaaaatcgcttgtttaagaataagtaaagctctttatttaagaagaggtgtttgagaattaagacggaatgaccgttttcttcct

SEQ ID NO: 106552 - DNA, 1705 bp, Zea Mays
acctctaccgacacgtgggtctacccgccaacctgtccgtttccgccgcctctgacacgcgggcacaggcacgggcctcctccaaaaaaccccccccctccccagcttgtctgcccctctctccatttcgcggaggaagaaaaaggggaccaaaaaacggaaaaggggataggaggaacggatcagcggtggaagcttccagccctagcgcagcaatggcgggttggtgcgagcaggcggtggcgctgctacagcgccccgcggtggcggagatggccgtcgacgtgctgctctgcgcggtgccgatctgggccgccgtcatgatcggcctcgtcgtcggctggtcctggcgcccgcgctggacgggactgctcttcctcggcctccggagccgcctccgcatcctctgggtgccgccaggcctcggggcccggcggctctggttcgcctgcaccgcgctctccgcctgctccgtcgcgaccaagctcatctcctccgcattccgccgctgcagaggcaagcaccaggacagggcctcccccgacgatgatgccgctgcgaccagagacggcggatgtcgcgccgacggcagaacaaattttgagggtgagcatgatacagtcactgagaaggacctagaacatctcctgcaacttttagataataaggaaagcggggatacagcttggcagaatttgatggagcgtagaacctccaacatgacatacaatgcctggcggcgtgagcctgaggagggacctataatgtactgcagccgcactatttttgaggatgctactcctgaactggttagagatttcttctgggatggtgattttcgtctaaagtgggatcccatgcttgcatattgcaaatctttggatgagttccctcagaatggagcaacaattgtccactggataaaaaagttcccgttcttttgcagtgaccgtgaatacatctttggaggacgcatatgggaatctgggaagacttactattgtgttactaagttcaatcgcctaaacatgtgggtcagcaatctgcgtgtgaagtaactttggttcactatgaggacatgggtataccaaaagatgtagcccgggttgctgttcgtcatggcatgtggggtgctgttaagaaacttcagtctggattcagagcataccagcaaatgagacacacagaaactaccctgtcacacagcgtcatcatggctcgaatgaccaccaagatatccatcacagcttcaaatgatcccttggaccatgacctctcggttgccgataaaatcagtgacgagaatgacagctccaatgcagttcaacatggttttgattggaagtggttggtggttgggggtgcagtggctgcggtttgtgtgctcaacaccggtctggtaggcaaggccgtcttgcttggagcagcgagaaggcaagcaaagaagtgatatgaggagcagccttccagccagacattcatcagattgtagctacgatcgtacaggcaaaaaaatgttgagaaaataggtggggttcaacagagataactgctgtttgaggcgtatgcaatgggtctatcggatctagtttcacagtatagtctattttatttagagataaaaatcgcttgtttaagaataagtaaagctctttatttaagaagaggtgtttgagaattaagacggaatgaccgttttcttcct

SEQ ID NO: 106553 - DNA, 1046 bp, Zea Mays
ccaagtaacggagcttcctgattcgaagtttagtattgttggctttgcccagaattcctcgctcatagttttcctcaccgcagctgctctcacatggataagaaaaaaaaaaggaaagaaagaggagaaagatgaacagtgggtttccggtgacgaacacgcctgtgtattcatcagcctgagtgcctgactgcctgagcacaaattcctgctatgtgtagacagtagaccacgtaccatgtcctcgcctcctccgtgctcgactgagccgtccccgttcaccgcgcaagcaacccccggcaacgacgccgatcagcgccgctcccaccgccccctccgcgctcggcctacggcgccaccgcctctatccgtctcccgcattcgagccgcaacggccgacaccgcgccccgccggccctccttcccgagactgccgccgcgtccccctcatcgagtcatcggcagcaactcacggcctacggcggcgcatctggggcttggagcggcagtcgcgtggatgaccctgcccctcgaggcagcgcagtccgccccggctgcaaccggcgctcagccatcgccgctacgttccccacttcctcgcgcatcaagagtcttattcccagccattggagacctcctccgctccgccattggagaaacgtgcaagatcgtcccctttgtttctgatgggcatttctacgagcaactggtggtccgcaggtgtcgctggcctggggttcctggagactggctacctcacttacctcaagctcacgggctccgagatattctgcccacggcaactactccgtagactttgctcaacgcagcagatttcattcaactgcagctcggcgcagcagatttcatcagtaaatagatgttgcaggatggagcatagaaatgtacatttcagtattagttgaaccccaagaggttggtaaacatctaatacattcctattccattattggtgaacttctgttgctatgtattacataaacaaatctcagaatcgaggtaaaaatttgttgtccaaacttggg

SEQ ID NO: 106554 - DNA, 2128 bp, Zea Mays
cgcggagccgcggacacaccttcctcctcctcccgtcgccatggacgtctgctcctccacgatctagcctgtggctattggttagcacgccggcgccggcgccggcgaccctaaagggagcgttgacgttgtatcccgagattttatgctctaagctttcgagccgcgtcatgggaaggaagcctgacgcggtagccaaatcgtatcattccggtggcggcggcgctgccgcctcctcgccgagggcagcgaggaaggcgtcgccttctccggtgttcctgggaaccgcgctgttcgttctagggtttgtgtccctctttacgggacacgtggtcaccgacgctgactgggcgcggatccgcagtcgatggcgacctaaacagcatagaaactacgaacctatcgatatttgggaatccaagtattccagcatgtactacggatgcagcgagagaagcacgggtttcagatctgctgtgccagagaacagttccactggttacttgttgattgctactagtgggggcctgaatcagcagcgcatagggataacagatgctgttgtagttgcctggattttgaatgccacacttgttgtacctgagttagaccaccactcgttctggaaagacgacagtgacttctctgacatttttgacgtggagtggttcatttcccacctatcgaaggatgtaactattgtcaaaaggatcccttatgaagtaatgttgtcaatggataaactaccatggactatgcgcgcacctaggaaatcggtgcctgagttttatattgatgaagttctgccaatactcatgcgaaggcgagctttgcaattaacaaagtttgattataggctcactagcgatcttgatgaagatttgcaaaagttacgttgccgagtaaattttcatgctttaaaatttacgagttctatacacgccatgggtcagaaacttgttcaaaagctgagactaatgaacacacgatatgtcgccattcatttgaggtttgaacctgacatgcttgcattttctggctgttactacggtggcggtgaaaaagaaagaaaggaattgggtgaaattaggaaacgatgggatacattacctgagttgagtgctgaagatgaacgcagcagaggaaaatgtccactgactcctcatgaagtcgggttaatgctccgagctcttggttttggcaacgatacacttctgtatgttgcttctggagaaatatatggtggagatagtactctccaacctcttaggggactcttcccaaatttctatactaaggagaagcttgctggggatgatttaaatcccttccttcctttttcttcacggctggctgcaattgacttcattgtttgtgatgagagtgatgtctttgttacgaataataatgggaacatggccaaagttttagctggacggaggcgatacatgggccacaagagaactattcgcccaaatgcaaagaaactcaatgtactatttcaaacacggaatcaattgagctgggataccttttcacggaaggtacagagagttcagaggggtcttatgggggagccggacgatatcagaccaaaacaggatgacttccatgaatttccatcatcttgcatctgctcaagaaaacctgggaacatatcggccacaacatgaaaaccaaccggacagggcaaatgcagcgaggatgctgctagttgggcacttactttgacagtagggaaacatatgcttacgttgaaagaaacacggtagaattaacaaggcaaggagggatgcatagtgcatatatgtcatggctcggtaagatgccacgtcaaggagagttgccaactggtgatgtcatgcctgtaaattattgttcgtacatgattaattctttaaacatgttgtccgctcgctgttcctcatccgctttcagactacgtcttggctatgcaccatcattgggcttaggtgggtctttgtagatcaagtagcttgaatcggctcgttagtgatagtgaattagtgatgggaggatagggtttagaggtttctcggtcggaaccgttgtcatgaccttttattaatgaaataaatattgcagggtggtctttggccgagttttt

SEQ ID NO: 106555 - DNA, 2154 bp, Zea Mays
gaccccggtcccgttcccacgcggagccgcggacacaccttcctcctcctcccgtcgccatggacgtctgctcctccacgatctagcctgtggctattggttagcacgccggcgccggcgccggcgaccctaaagggagcgttgacgttgtatcccgagattttatgctctaagctttcgagccgcgtcatgggaaggaagcctgacgcggtagccaaatcgtatcattccggtggcggcggcgctgccgcctcctcgccgagggcagcgaggaaggcgtcgccttctccggtgttcctgggaaccgcgctgttcgttctagggtttgtgtccctctttacgggacacgtggtcaccgacgctgactgggcgcggatccgcagtcgatggcgacctaaacagcatagaaactacgaacctatcgatatttgggaatccaagtattccagcatgtactacggatgcagcgagagaagcacgggtttcagatctgctgtgccagagaacagttccactggttacttgttgattgctactagtgggggcctgaatcagcagcgcatagggcttgcagataacagatgctgttgtagttgcctggattttgaatgccacacttgttgtacctgagttagaccaccactcgttctggaaagacgacagtgacttctctgacatttttgacgtggagtggttcatttcccacctatcgaaggatgtaactattgtcaaaaggatcccttatgaagtaatgttgtcaatggataaactaccatggactatgcgcgcacctaggaaatcggtgcctgagttttatattgatgaagttctgccaatactcatgcgaaggcgagctttgcaattaacaaagtttgattataggctcactagcgatcttgatgaagatttgcaaaagttacgttgccgagtaaattttcatgctttaaaatttacgagttctatacacgccatgggtcagaaacttgttcaaaagctgagactaatgaacacacgatatgtcgccattcatttgaggtttgaacctgacatgcttgcattttctggctgttactacggtggcggtgaaaaagaaagaaaggaattgggtgaaattaggaaacgatgggatacattacctgagttgagtgctgaagatgaacgcagcagaggaaaatgtccactgactcctcatgaagtcgggttaatgctccgagctcttggttttggcaacgatacacttctgtatgttgcttctggagaaatatatggtggagatagtactctccaacctcttaggggactcttcccaaatttctatactaaggagaagcttgctggggatgatttaaatcccttccttcctttttcttcacggctggctgcaattgacttcattgtttgtgatgagagtgatgtctttgttacgaataataatgggaacatggccaaagttttagctggacggaggcgatacatgggccacaagagaactattcgcccaaatgcaaagaaactcaatgtactatttcaaacacggaatcaattgagctgggataccttttcacggaaggtacagagagttcagaggggtcttatgggggagccggacgatatcagaccaaaacaggatgacttccatgaatttccatcatcttgcatctgctcaagaaaacctgggaacatatcggccacaacatgaaaaccaaccggacagggcaaatgcagcgaggatgctgctagttgggcacttactttgacagtagggaaacatatgcttacgttgaaagaaacacggtagaattaacaaggcaaggagggatgcatagtgcatatatgtcatggctcggtaagatgccacgtcaaggagagttgccaactggtgatgtcatgcctgtaaattattgttcgtacatgattaattctttaaacatgttgtccgctcgctgttcctcatccgctttcagactacgtcttggctatgcaccatcattgggcttaggtgggtctttgtagatcaagtagcttgaatcggctcgttagtgatagtgaattagtgatgggaggatagggtttagaggtttctcggtcggaaccgttgtcatgaccttttattaatgaaataaatattgcagggtggtctttggccgagttttt

SEQ ID NO: 106556 - DNA, 2128 bp, Zea Mays
gaccccggtcccgttcccacgcggagccgcggacacaccttcctcctcctcccgtcgccatggacgtctgctcctccacgatctagcctgtggctattggttagcacgccggcgccggcgccggcgaccctaaagggagcgttgacgttgtatcccgagattttatgctctaagctttcgagccgcgtcatgggaaggaagcctgacgcggtagccaaatcgtatcattccggtggcggcggcgctgccgcctcctcgccgagggcagcgaggaaggcgtcgccttctccggtgttcctgggaaccgcgctgttcgttctagggtttgtgtccctctttacgggacacgtggtcaccgacgctgactgggcgcggatccgcagtcgatggcgacctaaacagcatagaaactacgaacctatcgatatttgggaatccaagtattccagcatgtactacggatgcagcgagagaagcacgggtttcagatctgctgtgccagagaacagttccactggttacttgttgattgctactagtgggggcctgaatcagcagcgcatagggttgcctggattttgaatgccacacttgttgtacctgagttagaccaccactcgttctggaaagacgacagtgacttctctgacatttttgacgtggagtggttcatttcccacctatcgaaggatgtaactattgtcaaaaggatcccttatgaagtaatgttgtcaatggataaactaccatggactatgcgcgcacctaggaaatcggtgcctgagttttatattgatgaagttctgccaatactcatgcgaaggcgagctttgcaattaacaaagtttgattataggctcactagcgatcttgatgaagatttgcaaaagttacgttgccgagtaaattttcatgctttaaaatttacgagttctatacacgccatgggtcagaaacttgttcaaaagctgagactaatgaacacacgatatgtcgccattcatttgaggtttgaacctgacatgcttgcattttctggctgttactacggtggcggtgaaaaagaaagaaaggaattgggtgaaattaggaaacgatgggatacattacctgagttgagtgctgaagatgaacgcagcagaggaaaatgtccactgactcctcatgaagtcgggttaatgctccgagctcttggttttggcaacgatacacttctgtatgttgcttctggagaaatatatggtggagatagtactctccaacctcttaggggactcttcccaaatttctatactaaggagaagcttgctggggatgatttaaatcccttccttcctttttcttcacggctggctgcaattgacttcattgtttgtgatgagagtgatgtctttgttacgaataataatgggaacatggccaaagttttagctggacggaggcgatacatgggccacaagagaactattcgcccaaatgcaaagaaactcaatgtactatttcaaacacggaatcaattgagctgggataccttttcacggaaggtacagagagttcagaggggtcttatgggggagccggacgatatcagaccaaaacaggatgacttccatgaatttccatcatcttgcatctgctcaagaaaacctgggaacatatcggccacaacatgaaaaccaaccggacagggcaaatgcagcgaggatgctgctagttgggcacttactttgacagtagggaaacatatgcttacgttgaaagaaacacggtagaattaacaaggcaaggagggatgcatagtgcatatatgtcatggctcggtaagatgccacgtcaaggagagttgccaactggtgatgtcatgcctgtaaattattgttcgtacatgattaattctttaaacatgttgtccgctcgctgttcctcatccgctttcagactacgtcttggctatgcaccatcattgggcttaggtgggtctttgtagatcaagtagcttgaatcggctcgttagtgatagtgaattagtgatgggaggatagggtttagaggtttctcggtcggaaccgttgtcatgaccttttattaatgaaataaatattgcagggtggtctttggccgagttttt

SEQ ID NO: 106557 - DNA, 1158 bp, Zea Mays
gttatgccttaaatgttctctatactgtttttgagacttcgaatctgaatattatctcgtcttggttgataattaccgactggccatttacaatcttgaaaatgtgcagcatagaaactacgaacctatcgatatttgggaatccaagtattccagcatgtactacggatgcagcgagagaagcacgggtttcagatctgctgtgccagagaacagttccactggttacttgttgattgctactagtgggggcctgaatcagcagcgcatagggataacagatgctgttgtagttgcctggattttgaatgccacacttgttgtacctgagttagaccaccactcgttctggaaagacgacagtgacttctctgacatttttgacgtggagtggttcatttcccacctatcgaaggatgtaactattgtcaaaaggatcccttatgaagtaatgttgtcaatggataaactaccatggactatgcgcgcacctaggaaatcggtgcctgagttttatattgatgaagttctgccaatactcatgcgaaggcgagtaagtaacctgcaaaacctgtgtaatggcctggaacttatcttgcatattgtttgattacaatattttggctggctgggtgttaagatgagcagtagataatagtttatcttttgcatggttcaaaaaactcgacctgcggggtaatacaacctcggacattatattaagaaaaagatctcacgcagattgagaaaatcccgaacccttgtctcacccatgcacaatggcaccgtaggccatgtaagaacgaccgcgaccgggaaccgggtcttagacctgtgctttgatgtgggatatacaaggggatttttttacctctagcctaaaattcgctctcacggagagtcgaactcaggacgtgaggagtgctactcagaccacctaaccaactcaggctagaggccctttggccttttgcatggtttagttatggccctttgtgttcaaaacatgagcatatgttataatttcctttggaaggtatttgctatgtgtattaatcataaataaatatatcaggtgtcaagtgactgtagacaaatgcaaagtagacatacttccctattgactgaacagtcttaatctttgcaggctttgcaatt

SEQ ID NO: 106558 - DNA, 467 bp, Zea Mays
tgccctcctcattcagattcagtcattcagccacattctcacccaccactatcctctcgtctctcgctggccacgtctctgtccatcatggccggcaccgccgccgccacaaccacggtctgctccatgtgcggcgacgtcggcttccccgagaagctctttcggtgcgcgcgctgccgccaccgcttccagcactcgtactgcaccaactactacggcgacagcgcacccgcctcggccgactccgacatgtgcgactggtgcctcagcgtcgtggccggtaaggcgaggtctcccgccgggaagcagaacgccaccgggagccaggagtcgtccaccaccacgggctccggaggcagcggcaggggcgccgccggcaaggccgaggctgggcggcgagcgaccaccaggccggccggccgcaggtacaagctgctcaaggacgtctagctagtgtgatgagtagt

SEQ ID NO: 106559 - DNA, 180 bp, Zea Mays
gtaaatgcagctacttccgctcctctgtttcgtgctctggattactctgctgtttcttctctttatgccagatttaggtgccgcgcttgtataaagttagttcctttttttccctccttctcttgcttgatttggaagacaagaatatgtataaccataagaagcatcttatcttgtgtc

SEQ ID NO: 106560 - DNA, 858 bp, Zea Mays
tcgctctgtcctccgcggcacaccataaaaaccagaccccgcaatgctcccatctccagtccaggtctctagtctccactccgctgtcgctccggcccagcagctcgaccaccaccgctccgcaggcaggaagccgccaaggacatggacgacgctcaggagcctccctcccctccctccccctcgcagtcatcctcctcctcttcctcgtcgtcctccgtggccccgaacccgaagaagcgggcgcgcaaggacggcagccggcacccgacgtaccgcggcgtgcgcatgcggagctggggcaagtgggtgtcggagatcagggagccccgcaagaagtctcgcatctggctgggcaccttcgccaccgcggagatggcggcgcgcgcgcacgacgtggccgcgctcgccatcaagggcgcgcgcgacgcgcacctcaacttcccgggcctcgcgcacctgctcccgcgcccggccaccgcggcgcccaaggacgtgcaggccgcggccgcgctcgccgcggccgccgacttccctctgccgccgtcccccggcggcgccaatgccaagagccccgagagcagcagctccggctccgcctccgcctccgcctccgacgacgccagcgccgcctcgccggcggcgccgcaggacgccgagcccaacccggacgacgcgctgttcgacctcccggacctgcttctggacctgagatgctgcgggccgtcgtcgtgggccgtcgacgacgacgtggccggcggcggcgcgttccggatcatcgaggagccgctgctgtgggagtactgaactgatcaatgccaccgcgccagtcctgtccttgagcggttggcagtgatc

SEQ ID NO: 106561 - DNA, 408 bp, Zea Mays
atctgttcgatctatggcttctcggcgctctcccaggtaattttctcgtctcttcattcgaactcatagcagtatcacacaagtttttcttgattagaggtatactcagaccagtggtatatttagaacaagtttttcctgattagtgttatactcagatcagcgcttaaaagtataacatacttaaatcacattgcagagaattatattcagatcagcacttaaaagtatcacagacttaaatcacaatgcagagagttaaaccctaatgtctctttatttttatttttgtatgcttgattatttattctcttggtgtaattttcttttttgtttgccttcatctgtagtgagacatgtggcctgcagtgagttatattcactgcatcactagatttttacatgcag

SEQ ID NO: 106562 - DNA, 96 bp, Zea Mays
atggcgcatgcagatgcagggggtcaccggcggagccacgaaaatggcagtgtgacaaggcggcggcaggtccaggaaaattcgtgccacagttga

SEQ ID NO: 106563 - DNA, 925 bp, Zea Mays
cacgcgtcgtcgtcgccgtcgatggagcacgagcaggtgtcgcctcaggtgtccgacggctgcacctgcacctgcacctacagcagcagcagcaacgccaccagcggctccctcaacggctcgtcgtcgccgacctccagcgacgactccggcggcaagggcacgaataagcggccgcgcagggacctgaagcacccgacgtaccgcggcgtgcgcatgcgggcctggggcaagtgggtgtccgagatccgggagccgcgcaagaagtcgcgcatctggctcggcacgttcgacaacccggagatggccgcgcgggcgcacgacgccgccgccgtcgccatcaagggccgcgccgcgcacctcaacttccccgacctggcgcacgacctgccccgcgccgcgtccgcggctcccaaggacgtgcaggccgccgccgcgctcgccgcggccactgtgccggctccgtcacccgtcgtcgccccgtcctgcggccacggccacggcctcgacgacgatgccgacaccgagacggaggaggacctgccgcctcagcaggcaatgccggaatgcgagagcgggaaccagcaggctcagcttcagctggcctgtgccgacattggagttggactgggctatacgttcttggacgtgccagacggccttctggacttcggctacatgttgtcgccgctgccgctgccggcttactgtggctcgccgtgggacgacatcgccgatgacctctgcttcgaggagcccttgctgctttgggaacattgaccatccaggactagccaacttcgtccatatcgtccacgagattctttgtttctcttggtcaacacattactgaccggggagtactagctaaccttgtcgtcgctgtgatgcgagctaactatttttgcaaaaatcatttgtactt

SEQ ID NO: 106564 - DNA, 1131 bp, Zea Mays
aaatacatgatctaataatttgattttattgttgaaggtgttctgtacagacgtgccctgtgatcataaaaaaggcttaaactcagaattaaccgaggccccaccagcccacagagcgaaaggcaataggctaccgctatttatagccgggggcgctctactccttctcccccacttgggacttggcactcccctctcctagccatccatggacgctacagcccaacgagccatggcagtagacacaagcaatgcaccaaccacatcttgctcttcttcgtcttgtacatcctcgtcctcgctcgtcaatgaggcgccgcaagaggctccctgcaagaagtccaaaggcacgaacaagcggaagagggcgtcttcgccggactcccaagaagtagaagccaacaacaacggcagcgccaataacagtaatggccagcaaggcgaggagagcagcagctgctgcagcacggaggacaacgaggcgtcggcgagtgtcggcgaaaaggccgaggcggcggcggccgccaccgccaccggcgcggcgtcgagagccggagcgggtacaagcacccgtcgtaccgcggcgtgcggcggcggagctggggcaagtgggtgtcggagatccgggagccccgcaagaagtcgcgcatctggctgggcaccttccccacggccgagatggcggcgcgcgcgcacgacgtggcggcgctggccatcaagggccgcgccgcgcacctcaacttcccggagcgcgcgcacgagctgccgcggccggcgtccacctcccctgcggacgtccaggccgcggcggcccaggcggccgcggccgcggacgtgcagtgcgacgcgccgccgtcgccgtcgccgtcgccgtcccccgaagcggccgccgcgtcaccggacgacgctgcctgctgcctcgaggcggcgacgacgacgacggtgcacagcggcggcgacggtgggcagggccaggagaacgcgctgttcgacctgccggacctcctcctcgacctgagggacgggctgtggtggccgccggtgtggcccgcggcggcaataatggccgccgaggagtacgacggctgcgacgtcgtcgggatgcacgagccgctcttgtgggccgagtag

SEQ ID NO: 106565 - DNA, 591 bp, Zea Mays
atggcataccggatggctgctataaagaggcaccctgacaactggagacctagaaaagctgaaatcctaagtgaaagggataggcgcccaagccgcagaggcagcaatgttgttcaggagaaggttcttgaggtttatattgagaaaggaatgcagtatggccaaaagattgtgttccaagaggctttatgtggattccagttcattctgacccatcttgatggtaggcagcttccaatcaagtccaatcctggtgaaattattaagcctgggcactcaagtatcagacatgaggtggatcagtgcgaggagaccgtcatgcatgatgtgaacatcggagagatgaggcgcatgaagcaccaaaggcggcaggaggcgtatgacaaagacgaggagtcaaggaggatgctggtccaaggccaagggtacggtgtgcacagcacagcagtaagaagtgagaccgtgtttcacgcatgctttcatgacttgagaaatctggtttgtgaaaacttagcattggtgctatctttgtttcaacaaaatgctggcggcatggtgctgggacttggcatggcagcatttgagatgtaa

SEQ ID NO: 106566 - DNA, 1020 bp, Zea Mays
atggctcgaccacctggcggcgcccgccggcggggcggaggcagcggcaggagggacgcggcgggcgggtgcgaggcggtgcggaaggggcactggacagcggaggaggacggtgtgctgctggagcacgtgcgcgtgcacggcccccgggactggagcttcattcgatccaaaggattgctgccgcgcaccggcaagtcctgccgcctccgctgggtgaacaagctcaggccagacctcaagaccggctgcaagttctctgcagaggaggagcgggtggtgctggagctgcaggcgcagttcgggaacaagtgggcgaggatcgctacctacttgccgggcaggacggacaacgacgtcaagaacttctggagcacccgccagaagcggctcgccaggctgctgggaacgcctatccgccgccgccagtccagcaggagcaggagcgccaaggcgcctgttgcctcctctctgaagtcgcgacccgccaccgtggttccctgcctggatcaagttccattggagggcagctccaccggtgtccacccatgcagcgcaggcgcagcaacaccattcatggacgcgcacagtatcagtgctgcactagccccgtatgattgggcaggctccgggcttgccagttccgacggagcactgccgctggcctccgacatacacgcctgctcgtcatcaaacgctgccgcactgccaccactgctgccgttcgaccagcctccgtgcactgagcttggcttcccagggctaccggctggctggaacatggctcctgggttcgacaacgtcggcactatggatcatctcgcctaccaggagctgctcccggtgacgcaacccgctccaatgatgctcccgttcttcggcacggagtacctgcacggtggcgccaaggccgagcttcctgacgcggggcccgactacttcttcgacgacctgccgccggacatgttcgactcccttgatcagccgcctcggccactgtcaccgcctgcgacgagctag

SEQ ID NO: 106567 - DNA, 633 bp, Zea Mays
atggcggctccgtcgagggggaagaaacgcctggtggtcgacgtcgatgtcgagttggacagtgaggccgaagtagcttcagctttcagtcgtctgtctgtgtcgatcgttgccaagccttcaggcgagtacgttcgcgccaaggagcactcctccccgagcgtgaactgcgcggccacatcaggtactgggtacacccagcagcagaccccttctgtcgcgaaacagtgctctgaaccacgttcagtgtcggggtcaagtggccaccatcaccaacagaagtgctggcgcctaacaatagccttggtggcgttaatcgcccaacatctactgcctgaaactcttcctgcagaatcacttgtgtctgactgctgggttcagttcttccggtgtcatctgaggagggcgcgggatgcagaggacggctgcgcgggatgcagaagggggcgcgggcaccagcaccttcctcaaacggcgcgggcacgagctccttgctcacgcgggttgcagatggcggacattgcagacggcggcgcagattctccggcactcgtctccggcggcgcgggcgagtctgaagagcggatgagtgtgcagtcagcaaggagactctgcgccgtaggggtactttag

SEQ ID NO: 106568 - DNA, 1229 bp, Zea Mays
ttcactggactatcggccccacgcttgggaaaccccacacgacagtggcttcaacacgttacaacgccagcgcctaacggaaaatatctcgagaggtcggggtggtcggtatcatgctagttgtttcgttcgctggttaatgagtcgagctctttcccttctcgcttcaaaccaaaccaaaatcggagcggcggagcaaaacgatccgtagcctcgcttaccttcgattcagctcgaccagggcactaaccgggaagccaatgccgcgcgagtcgcgagatctgtagcgccaatcggcttcaccggcggcggggtgggcatggaagcgcagaacggctcctgcggaggggcgcccgtggtgctcaacgtgtacgacctgacgcccatgaacaactacctctactggttcggcctcggtattttccactctggaatcgaagttcatggtatggagtacggatttggagcacaccagtttccggcaagtggagtattcgaggtggaaccgaaaagctgtcctggtttcatctacagaagatctgtgtggatgggcacaactgacttgtctagagcagagttccgctcgttcattgaaaatcttgcaggaaagtacaacggcaacacgtatcatttgatttcgaagaactgcaaccattttacagatgatgtctgtaagagcttgaccaagaaatcaatccctgggtgggtgaataggctagcaagagtgggttcattttttaattgtcttctaccagaaagcatccaagtttccacagtaagacacgttcctactcaatctgcattttctgatgatgatatggattcggtatcttcatcggttcttggagacagtgatctgggagagttagaccaacaccttctgccatcgtcaactgctgacgtccattctatagacgtgccaccaaatctagccaaggatcttctctgaattatccaaccctttggattccacgtagcaggatagcttaaattgctgcagttgatgtccacttagtgcctctccaggtggcataggaatgcaggagtgtagatgaatgctgctgattgtgttgattctttgccactgaatttgttacatacgcacacacagctctcgacagaaatgacgtgctttctaattattttcctgttatgacttgtgacttcatcgtagatttgtaggtacctttgtgttcgagtaatactgtacgcactgctgcactagagtc

SEQ ID NO: 106569 - DNA, 1421 bp, Zea Mays
ttcactggactatcggccccacgcttgggaaaccccacacgacagtggcttcaacacgttacaacgccagcgcctaacggaaaatatctcgagaggtcggggtggtcggtatcatgctagttgtttcgttcgctggttaatgagtcgagctctttcccttctcgcttcaaaccaaaccaaaatcggagcggcggagcaaaacgatccgtagcctcgcttaccttcgattcagctcgaccagggcactaaccgggaagccaatgccgcgcgagtcgcgagatctgtagcgccaatcggcttcaccggcggcggggtgggcatggaagcgcagaacggctcctgcggaggggcgcccgtggtgctcaacgtgtacgacctgacgcccatgaacaactacctctactggttcggcctcggtattttccactctggaatcgaagttcatggtatggagtacggatttggagcacaccagtttccggcaagtggagtattcgaggtggaaccgaaaagctgtcctggtttcatctacagaagatctgtgtggatgggcacaactgacttgtctagagcagagttccgctcgttcattgaaaatcttgcaggaaagtacaacggcaacacgtatcatttgatttcgaagaactgcaaccattttacagatgatgtctgtaagagcttgaccaagaaatcaatccctgggtgggtgaataggctagcaagagtgggttcattttttaattgtcttctaccagaaagcatccaagtttccacagtaagacacgttcctactcaatctgcattttctgattctaactgagacttcaaacaagggcggatctacacccgggccacccggtccagggcccggggcttgatccatataactgagccttagacccgtgctctggcgtgggatagacgaggagatttttttaaccacggcctggaattcgctcccacggggagtcgaactcagtaactgagtgctactcataccacctaaccaactcagatgatgatatggattcggtatcttcatcggttcttggagacagtgatctgggagagttagaccaacaccttctgccatcgtcaactgctgacgtccattctatagacgtgccaccaaatctagccaaggatcttctctgaattatccaaccctttggattccacgtagcaggatagcttaaattgctgcagttgatgtccacttagtgcctctccaggtggcataggaatgcaggagtgtagatgaatgctgctgattgtgttgattctttgccactgaatttgttacatacgcacacacagctctcgacagaaatgacgtgctttctaattattttcctgttatgacttgtgacttcatcgtagatttgtaggtacctttgtgttcgagtaatactgtacgcact

SEQ ID NO: 106570 - DNA, 2859 bp, Zea Mays
ttcactggactatcggccccacgcttgggaaaccccacacgacagtggcttcaacacgttacaacgccagcgcctaacggaaaatatctcgagaggtcggggtggtcggtatcatgctagttgtttcgttcgctggttaatgagtcgagctctttcccttctcgcttcaaaccaaaccaaaatcggagcggcggagcaaaacgatccgtagcctcgcttaccttcgattcagctcgaccagggcactaaccgggaagccaatgccgcgcgagtcgcgagatctgtagcgccaatcggcttcaccggcggcggggtgggcatggaagcgcagaacggctcctgcggaggggcgcccgtggtgctcaacgtgtacgacctgacgcccatgaacaactacctctactggttcggcctcggtattttccactctggaatcgaaggtacctatgtttctactaccttttgtcctgttgaagttgtacacattctcgtgctcgtgcaatacctgtttggaggggataaggtttcagctgtaactagtagttacccaaaaccgtagtctagtgattgaagaggggaacaacgatagtttacagttgaagagaagggggcggaatattgcgatagggtttttttgaattccctggatgttacgatcttctgctgctgtccgtaagcaagaaaaggaattcgaataatctgggcacggaagaaaactgctaaatcggggttcaattttttacattctctgtttctgacaggctgatggttacgcagctattttcctgttgaaggctgtagtaagggtggcataggggatggaccctaaatatgccagttgaacggtgggtcggtggcgtagggatggacacttgacaagttttgagtagtaaggatgaacattgtctttacgagctggtttgaccagagaattgaaggagatccaatagagaggaaatccactgctattcaaattatatagcaggagatttcctccttcatggattttctccaattcacttgtcgccaaactagtcctacatgttatgcaattgtcaattgcttgattagttcgcaatgttggtagacgtgtgttttaaggcttatttgctgttcgagacgaacactgaagaatctgtacttcacttttcagtggtacacttgtttgtaatctttacagtatttattcataaggtgtaccattgcttctcggtaaaaaatagttgtacaactcgtagttgtcaatttgtcattacttcttgacttgcatttggtagcttgcattctgctagataaatgattttatgagcataaactcaaacactggtgtatggtttactcaaataaacagttcatggtatggagtacggatttggagcacaccagtttccggcaagtggagtattcgaggtggaaccgaaaagctgtcctggtttcatctacagaagatctgtgtggatgggcacaactgacttgtctagagcagagttccgctcgttcattgaaaatcttgcaggaaagtacaacggcaacacgtatcatttgatttcgaagaactgcaaccattttacagatgatgtctgtaagagcttgaccaagaaatcaatccctgggtgggtgaataggctagcaagagtgggttggtatcaccagtttaacctgtctttgtcctgtcatgcttcagagtttaggtatctgatttctttccccccaatgtttaggttcattttttaattgtcttctaccagaaagcatccaagtttccacagtaagacacgttcctactcaatctgcattttctggtgagtttgtgcctggaaattcttcttattaggatttgtgcagttgacctgtttttttttaataaaaactgttacgtaggcggtagacgcctagaccttgttgtgaaactttacatttttaactgtcctataaacatcaacaaattgaacctccgttggactggtattccttggtgtaatgagtggctgaccatcctgaatactttactagcaagtaatctggtagacttttggccatattcgaaataaccacccagcctagtaaaaaagaggtaatgataatgtatagctagtaagttagataggactgagttatcaacactaagattattagtttctcagaattcattttcttcagctcaatatcttgtgaccttctataagccactccagattctaactgagacttcaaacaagggcggatctacacccgggccacccggtccagggcccggggcttgatccatataactgagccttagacccgtgctctggcgtgggatagacgaggagatttttttaaccacggcctggaattcgctcccacggggagtcgaactcagtaactgagtgctactcataccacctaaccaactcaggtagagaccctttcgtacttcaaacaatagtagatactttatatatggtgtgtcatcttgttcatttgctagctatcttctattttggtgacaatttagctatcctttattttctcactttctagatgatgatatggattcggtatcttcatcggttcttggagacagtgatctgggagagttagaccaacaccttctgccatcgtcaactgctgacgtccattctatagacgtgccaccaaatctagccaaggatcttctctgaattatccaaccctttggattccacgtagcaggatagcttaaattgctgcagttgatgtccacttagtgcctctccaggtggcataggaatgcaggagtgtagatgaatgctgctgattgtgttgattctttgccactgaatttgttacatacgcacacacagctctcgacagaaatgacgtgctttctaatta

SEQ ID NO: 106571 - DNA, 1506 bp, Zea Mays
tcagctattcgcgggaccgtatccgagcaggacagcaggttgttcagcgatcactcgagcggtcgagccctcgcgccgcggagagtgtctccagtctcaagtacagcggaggatggagagcggcttgcttgacaccgccgcggctgccggtctctgcccggtggcggccgggcgccgccgcgtcgggagcacgggcacggcgaggtgcttcctcagctgctcctgcgcttccagagactgcagggtgagcgcgtcctactcccactccatcagccggatgctgagcggggtgcggtcggcggcgcgcaagaggctcttcaggagcgacccggccgagctgctgggcgtcgccaactggtcggagacgggcggcggcggcgccgggggccaccagcactggtggacggcgctggagaacaacttcgtgctggaggccaccgacgacgagtacggcggggtcgtcgtcgacgccgatcggctgccggccgacagggccgccttcgcgcgctccctcgcggcgtcgctctcctactggaagtccgtggggaagaaaggggtgtggttgaaattaccggtggatctagccgagttcgtccctttagcagtgaaggaaggcttcaagtaccaccacgcggaggaagcgtatttgatgatgacgtactggatccccgatgaaccgaatatgctcccagcaaatgcttctcatcaggttggggttgggggttttgtgatcaacgaccaaatggaggttctagtggtgcaagagaagtaccgcggatcgtcgctggatggcgtatggaaactccccacaggcttcattcttgcgtctgaggaaatctacacgggggccagcagagaggtgaaggaggaaaccggggtcgacaccgagttcgttgacgtcgttgctttcaggcatgcccacaacgtggcgtttcacaagtccgacctcttcttcatctgcatgctgaggcctgtgtcgagtgagatcaagattgacgagacagagattcaggcagcgaagtggatggcgctggaggagttcgtgaagcagcccttcatccaggaagaccacatgttccagaagatcatggacatctgcatccagcgcctccgcaagtgctactgtgggctgacgccgcaccacgtcgtctccaagttcgacgacagaacgtccacgctctactacaatgtcgccgagcccgaggacgtgaactgcagcgccgcctgatgtaatatgatgtgagggggagggggagccaccccagcatctactagtctaatttttgctgcgcagaagtttcatgatgcagcagtgttagtcgtgcgattactgagagtgaaatactagtggcagactgcgcgaggcaatagagttgccgagcctgtacatatacgtgtagggcatatgcataaccagagagctgtatatcccggggcggatccccgggcaggaggaaaattttcattgccgccgtaaattacaatttaactttagctcgccctaaa

SEQ ID NO: 106572 - DNA, 1654 bp, Zea Mays
tcagctattcgcgggaccgtatccgagcaggacagcaggttgttcagcgatcactcgagcggtcgagccctcgcgccgcggagagtgtctccagtctcaagtacagcggaggatggagagcggcttgcttgacaccgccgcggctgccggtctctgcccggtggcggccgggcgccgccgcgtcgggagcacgggcacggcgaggtgcttcctcagctgctcctgcgcttccagaggtacctgcaccgtttgtttccggattggtctctggcttcagctttcgccaatcgttcctggctctccctccagactgcagggtgagcgcgtcctactcccactccatcagccggatgctgagcggggtgcggtcggcggcgcgcaagaggctcttcaggagcgacccggccgagctgctgggcgtcgccaactggtcggagacgggcggcggcggcgccgggggccaccagcactggtggacggcgctggagaacaacttcgtgctggaggccaccgacgacgagtacggcggggtcgtcgtcgacgccgatcggctgccggccgacagggccgccttcgcgcgctccctcgcggcgtcgctctcctactggaagtccgtggggaagaaaggggtgtggttgaaattaccggtggatctagccgagttcgtccctttagcagtgaaggaaggcttcaagtaccaccacgcggaggaagcgtatttgatgatgacgtactggatccccgatgaaccgaatatgctcccagcaaatgcttctcatcaggttggggttgggggttttgtgatcaacgaccaaatggaggttctagtggtgcaagagaagtaccgcggatcgtcgctggatggcgtatggaaactccccacaggcttcattcttgcgtctgaggaaatctacacgggggccagcagagaggtgaaggaggaaaccggggtcgacaccgagttcgttgacgtcgttgctttcaggcatgcccacaacgtggcgtttcacaagtccgacctcttcttcatctgcatgctgaggcctgtgtcgagtgagatcaagattgacgagacagagattcaggcagcgaagataatgaatgaagttcgggacagtgatcgatcgataagcttgcgctaacccaccgagagagacgtttattttcagtggatggcgctggaggagttcgtgaagcagcccttcatccaggaagaccacatgttccagaagatcatggacatctgcatccagcgcctccgcaagtgctactgtgggctgacgccgcaccacgtcgtctccaagttcgacgacagaacgtccacgctctactacaatgtcgccgagcccgaggacgtgaactgcagcgccgcctgatgtaatatgatgtgagggggagggggagccaccccagcatctactagtctaatttttgctgcgcagaagtttcatgatgcagcagtgttagtcgtgcgattactgagagtgaaatactagtggcagactgcgcgaggcaatagagttgccgagcctgtacatatacgtgtagggcatatgcataaccagagagctgtatatcccggggcggatccccgggcaggaggaaaattttcattgccgccgtaaattacaatttaactttagctcgccctaaa

SEQ ID NO: 106573 - DNA, 741 bp, Zea Mays
tcagctattcgcgggaccgtatccgagcaggacagcaggttgttcagcgatcactcgagcggtcgagccctcgcgccgcggagagtgtctccagtctcaagtacagcggaggatggagagcggcttgcttgacaccgccgcggctgccggtctctgcccggtggcggccgggcgccgccgcgtcgggagcacgggcacggcgaggtgcttcctcagctgctcctgcgcttccagaggtacctgcaccgtttgtttccggattggtctctggcttcagctttcgccaatcgttcctggctctccctccagactgcagggtgagcgcgtcctactcccactccatcagccggatgctgagcggggtgcggtcggcggcgcgcaagaggctcttcaggagcgacccggccgagctgctgggcgtcgccaactggtcggagacgggcggcggcggcgccgggggccaccagcactggtggacggcgctggagaacaacttcgtgctggaggccaccgacgacgagtacggcggggtcgtcgtcgacgccgatcggctgccggccgacagggccgccttcgcgcgctccctcgcggcgtcgctctcctactggaagtccgtggtacggctgggccccccgtttctgatctctctcccgtccatccgatcggcacaccttgggaaggtttgagttcggtgctgaaggacggccgtgccgtttgctgatttgtttttgctacggtgtt

SEQ ID NO: 106574 - DNA, 1224 bp, Zea Mays
cacgcacacacaaaaacagatagacacgggacaacctccgccgctgagagttttcgtgcgcttgtgccatcctcttcctccgctgcgtacagtggtacgggcgtacggctctatcgacagacgaacatggacatggacttcaatggagacgccgacagcttcgccctcgacttcatccgcgacctcatgctcggcggcgacagcagcatccccgtgcccagccctgtcgccgcttcttccgacgacgtcacctgccccgtcctgccacctcaactggagttccagtccgtttcgttcttaccgcaccaacagcgtcaaggctacatagacctgacgacgtccgagtgcgtgggagctgctccggccgccgcaactgtcgttggcgaggcggtgttccgggcgcaggagccggcgccaccagtgatgataaagtttgggaccgagccgtcgtcgcccttggccaccacgaggcagccgctcaccatctccgtgcccccgagctcgtacgcctgggccgccgtcgaggactaccgcaagtaccgcggcgtccgtcagcggccatggggcaagtacgcggcggagatccgcgatccgaagcgccgcggctcgcgcgcgtggctcggcacgtacgacacccccgtggaggccgcgcgcgcctacgaccgcgccgcgttccgcatgcgcggcgccaaggccatcctcaacttccccaacgaggtcggcacccgcggcgctgacctctgggcggccccgacggcgaacaagcggaagcggcagcagatggtggagggcgaggacgaccccgagcccgaggtcgaggtggtcccgatggtgaacaaagcggtcaagaccgaggcgcagtcgtcgatgacgacccaggcgtcctccccctcgccgtcgtcgacggtggcgtcgactacaactgggacaaccggaggtgccgggtggctccctgtgacaccgtcgagcgggagctcggagcagtactgggagacgttgctccgaggtctgccgccgctctcgccgctgtcaccgcacccagccttggggtttccgctgctcagcgtaaactaaaccgcccgagactgcctgctaatgctagcgttaccgcagactgacggcacgcgcgggtgttctcaagactgtaaatttgcaaggggctggaccaccaagtttgtttttagataaagaaagcttatattgaagatatcaagtcattacatt

SEQ ID NO: 106575 - DNA, 230 bp, Zea Mays
cgggaggtggagcccgtcgtggcgtggtggcactcgggatcgtgcctcgtgcgtgcgtgccgcggcgctgttggcccgtgccctgccaccgctcggtgcttttctagatggtccatcgcctgaccagacctgccctggtccgcctcggcttctcgatctggtcagttcacacggcgatcccgtgacggcgaagaaggcagaaggaatactctacgtttttccatggcctc

SEQ ID NO: 106576 - DNA, 681 bp, Zea Mays
tactccaggaaaccgtagcatctcacctgaacactgcattttattcctcatcataaacatgacatccaaactagacatatcgagcatgctgtacatccgcctctccgatcaaagagagacgcatacagcatatagtactgcactgcactgcatgcccccagacacaagcatgcacacacaaagcacaacacataaacgactagctagagctatcgcggcgaccgagactctacggcagcgtacgtagcagcagccaccgcctttaagggccatatgccgccgcgccggcagtggttcaaggaggtcgcgcgcgcggtccgctcgagtgtggttcttctctcaagacccctgcgcctggtcgcggccgtcgcggccttgagcgccgtcatcatggcgccctgcttctgctgctgctgcgcctcgccgtgcatgccgcccccgcgctggaggtcgccgtagcccccgccacctcccgtcgcaccccggtggtgatcagccatggtaggctagcagagcgagctaggtaccccacgtgcgcacgctgcccagagctcctgccgctgatgcttgagctacgactacgagtgcgatagatgagggcgagggagagagctgggtgtttatagagggcgtggcaacgcgcggaggcgggatctggcgcggccgcgtgggacgcatgcg

SEQ ID NO: 106577 - DNA, 627 bp, Zea Mays
tactccaggaaaccgtagcatctcacctgaacactgcattttattcctcatcataaacatgacatccaaactagacatatcgagcatgctgtacatccgcctctccgatcaaagagagacgcatacagcatatagtactgcactgcactgcatgcccccagacacaagcatgcacacacaaagcacaacacataaacgactagctagagctatcgcggcgaccgagactctacggcagcgtacgtagcagcagccaccgcctttaagggccatatgccgccgcgccggcagtggttcaaggaggtcgcggccgtcgcggccttgagcgccgtcatcatggcgccctgcttctgctgctgctgcgcctcgccgtgcatgccgcccccgcgctggaggtcgccgtagcccccgccacctcccgtcgcaccccggtggtgatcagccatggtaggctagcagagcgagctaggtaccccacgtgcgcacgctgcccagagctcctgccgctgatgcttgagctacgactacgagtgcgatagatgagggcgagggagagagctgggtgtttatagagggcgtggcaacgcgcggaggcgggatctggcgcggccgcgtgggacgcatgcg

SEQ ID NO: 106578 - DNA, 1650 bp, Zea Mays
atgccctcccgctcccctcccattgcccgtctcctgcatctacgccgcctgtccaagtccgctcgacattacctacttcgcttcgccgccatcgcgaaggaacactccgaccagcccccgcccccgcctctcccgtcgcgaccacggtccccgcacccctacgactacaaccgtctcatgtccgcgctcgccgcttcagtcgacggtgacggtcaccacccaggcgccggtgccgagcgggccctccacctgctcgacgaaatgcggagcctcatggggcgccgccccgatgccgcctgcttcaccacggccgccgcggcgttctcatcggcgtctcagccgggagccgcgctcgccgtgctaaacgccatggccaccgatggcgtcatgcccgacgctgctgcttgcactgtgctcgtcggggtgtacgcctgccgcctgcattggttcgacgcggcctatgaggtcgtcaggtggatgacggcgaacggcgtggccctggacgtagtcacctactcgacgctgatatctgggctgtgcagcgccgggcgggtggctgaggcgcttggcgtgctggacctgatgctggaggaagggtgccagcccaatgctcacacatatacgcccatcctgcacgcctactgcacgagcgggatgatacatgaggccaaggaactcttggaaacgatgattgcagctggttttgcaccgagcacagccacttacaatgtcctggttgaagctctatgcaaggcttgtgctttcaatgaagtagatgcgcttcttgaggagagcagtgcaaaagggtggacaccggatacaatcacatacagtacttacatggatggactatgcaaagatggcagagtacataagagctttgcattggtagataagatgttgtctgttggtctgcggcccaatgagattactctgaatatcctccttgatggggtttgccgcaggtcaactgcttgggctgccaagtgcctgttggagtgcagtgcagagattggatggcatgtcaatgttgtcaactacaacactgtgatgaggaggctttgcgatgagcggagatggttgtctgttgtcaagctctttgtcgatatagtcaagaagggaattgctccaaatagctggactttaagcattgtgatccacagtctctgtaaacttgggaggcttcatgaagcactttgcttgattggaagtgaagagtttgtcgctgatgttgtgacatacaatactttgatccgttatctcaacttcctggggaaagcttatgaggcctatctactgcttcatcacatgatcgagaaaggtattgctcccaatgacaccacctacagtcttttgattgactgtctctgtaaagaggggaaattcttggttgcacttggctgtttgaaccgatgtatggaaggtgggctctctaaagctgtagtatcaagtattttacgaggtctcatcgctggtggtaagcttcgtgaattgcaagcactaatcggatggattcttggacaaggtttcgtattagatgtgtatatataccaggaattaatcatttctttttgtaagaaaggatactgtcgaggtcttgaaatgtacatagtgtgtcatatattggaaagaatgatcaggctgagatga

SEQ ID NO: 106579 - DNA, 647 bp, Zea Mays
ttactcacttggagtagggagcatggtgatcgccgggcggacgtgcaggatccggaagaggaccctcccttcggggacgaacttgtcgagggcccacttgagcgcgtgcctgctactcctgcccccgctgaccgccaccgccaccgtgctgaccgcggggggctccatttctccaatctcgccgccgccggcttcctccactttcatcctctcctcgcttcgcatcacacgcactggcgcacgcctactgttcctagctgctactgattggacatgtgggataaaaccagtgtcttcctgcgccgcacccgattcctctcccaaccggaaagcaaacccagaacaaaatgcgcgtagaactccgggaaaaaatcctaggaaaacgaggacacctccgaggcgaagactgaagaggacgacctgtgcggtaacggaacgggaaccaagaaacagaggctcggtcggggcacacaaaaaggcggcggctttgcgcttgcggcgaacttggttgcctcggatttagtactacactaaaagagaggatgttgaggccaaggaggggagagattcggaggcatggcgagggaaacctgcggcgggcggagtcagtcaagaggaggcggcgtggaccaggagactgacggatg

SEQ ID NO: 106580 - DNA, 1390 bp, Zea Mays
gtatccgcccgttttcacccctaaggagaaccgagtttgggagggagcggatggcaatggctctgcttccgctattgctctcggtcctcatcgtctcctgcgtcgcgcagtcgccggcctcgtcgccgtccgcgtcgaatgctcctccggtcagcgcctcggctccgcggggctctgtcgcgccaccgacaacggcggtctcggcgccgcagggctctgtcgcagcaccgacgacagctgcggcctcggcgccgaaggcctctgtcgcggcaccgacaacggcagcctcggcgccgcaggcctctgcagcgccaccgacgacaacggcggcctcggcgccaacggtctctgtcgctgcgccgcaggcctctgcacagccgccagcaccagttttcgcgtcggcgccccaggcgtcggccgcggcaccaacgaaagcagccgccgcccctcaggtctcagccgcggcgccggcaacagcagccttgccgccaactacatcagcctccgcgccccaggcctcggccgcggcaccaacaaaagcagccttgccgccacaggcctttgctgcggcgccaactacatcagccgcggcgccgcaggcctctgccaccgcacctcctaccggcgccgccgcgccaccgaccgcagctgcttctccgcagctggctgccacgttgcctccggtttcctccccgccactggccgctacgccacctgtctctgctacccctccagccacgctacctcccgtcgcatcgcctaccgtcgccgtcgctgcgccagccccggcgactccggctccagtcgcctccccgcccgtagcaatgccaccggcggcgcttgccccggccacgctccctccagtgatggctccgacaccacttctcgctgcccccgtcatgcctcccatcgcgccacctgtcacggctccccgcaccggctcccgtttctccggctccaagtccaagcgtcgccccgaccccgtctccgacagaagctcccaccccgtcgcccacagaggccccgaccccgtctcccacgcaggcgcctacactcgcgccgttgagctcggtgtcggtgagcccgtcgctggcgccggggcccgcgctcgctcaggaggacgagtcggcggcgccgagctcgcgcactggcgtcgtcgcggccctggtggccgccgggctcgtcgtcggcttgttttaagaagtagagctgcggcgtttattaccgctatacgtccgtaccgttcctcgcacgggtctcttgttctcctgttggtgttctcatggattgatgcacgcacgaaccattcttgctgtacaacacattgataatttattttccatttattatgtatggatgacggactgcctgctgctttcttttgattata

SEQ ID NO: 106581 - DNA, 1380 bp, Zea Mays
atgggctgccttcgcctcttcaacggcaggttcaagaccaagcgctccaagaggcggccgttggcgacggcccccgcgccggcgcctgccgcctccgctgaggcgcggtccatggcgtccgcggcagccgccagctgcgcctcgttcgcgtcgtcggcgaacgtctcggagacctcggcctccggctcgggctccgcttcgtcggcgcggagcatcccggagctgtacgaggagaggggcgccctgcgggagttcggcctccgggagctccgcgtcgcgacgcgcgacttcagcccactgctcatggtcggcgagggcggcttcgggtgcgtctacaggggtgtcctccggctccccggcagcacgccggtcgccgtcaagaggctcaacctcaacggacgtcagggccacaaggagtggctcgccgaggtccatttcctgggcgtcgttgagcaccggaacctcgtcaagctcatcgggtactgcgcctcgcagacggaccgaggcccgcagcggctgctggtgtacgagttcatgcccaacaagacgctggacgaccacctgttcaaccgggcgtaccctgtcctcccatgggaagtcaggctgcagatcgcactgggcgcagccgagggattgctgtatctccatgagggactggaacttcagatcatataccgcgatttcaaagcgtcaaacgtactgctggacgaggagttcagacccaagctatcagactttgggttggcaagggaggggccatcagaaggacagactcacgtgtccacagcggtcatgggcaccttcggttacgcagcgccggactacgtccggaccgggcacctcaccaccaagagcgacgtctggagcttcggcgtggtgctgtacgagatcctcaccgcgcggcgctccatcgagcggaaccggcccaagaacgagcagaagctcctggactgggtgcggcggcacccgcccgagagcgaccagctcggccagatcatggacccgaggctccaggggcggtaccctacgcgaggcgccgcggaggtggccaggctcgccaacggctgcctcgcgaagctcggcagcaaccgccccacgatgagggaggtggtcgaggggctgaggcgggcgatgcggcacacggagatggacggctttgtcgtcgtcgccggtgcggcaacggagtaccagggctcgcctcctcgtgcggaggaggaggcgccggggacgccgggcgcagaggatgccagtgccgtggcgatggcagccgaggcgaggaagaggcggatgcttcatcttgctgctctagggaatgccgctgacgctcacgcgaggaggcggctcatgctcatgacggctgccgccgctgctccgacgtga

SEQ ID NO: 106582 - DNA, 1408 bp, Zea Mays
ctagtctacaagattcaccgtgaaccttagcagcacaaagggcaacggccgcctgccgctccaaagcagcccgtggttacgtcagcgcccgcgtactgctcccttcttcctcgttgctccgcccccttttgtcgtcgcgtcctcctctcgaggcctcggcagtcggcacgaggacgcgcgatcccgtcaccgctcacctccttctccaaacactgactccgcttcccgtccccatcccgctgcgcaagatcgggaggggacgaagagaggtcgaccgggaggagatgcaccgagaccgaggcgtctctgcggcagcgatacccggtgaccggaagcggatcggcgagcctatggacagatcgtctccatctacgtcgtgggggttctccggagggcgcgagaaggagcggatcggcgtgggcaagcagccggagatgcctcgctccggcggcggatccaccgccatgtccaagagcaagctctctgacgaatcagaaactgacagcgaagaatcagatgtgagtggttctgatggggaagatacttcgtggatttcatggttctgtagcttaaagggcaatgaatttttctgtgaggttgatgatgactacatacaagatgatttcaacctctgtgggctaagcaaccaagttccatattatgactatgcacttgatctgatattagatgttgaatcttcccatggtgatatgttgacagaagagcaaaatgaacttattgaatcagctgctgagatgctctatggattgattcatgttcggtatattattacaagtaaagggctgtccgcaatgctggataagtacaggaacgttgagttcggcagatgccctcgagtgaattgcagcggccaaccatgccttcctgttgggcaatcggatgttcctcgttcaagtacggtgaagatttactgccctagatgtgaagacatctacactccaagatccaaatatctaagcaacatcgacgggacttactttgggacaacattcccccacttgttcctgatgacatacccgcatttgaagccccagaagccgctgcagcaatacgttcccagggtatttgggttcaaaatccgtaagccatgacaaatttgaaggttgaatgtataaaaggttcaaatagcgccctgttatctgctggccccgcagtgttcacacgacacgtcatcggaatacacctgacccgcggctgacctccctagtctggtttcttgctctggcctgaaattctgattgatgcttgtggtttgtttagcctagtgaatcaatccatatttttttacgatcatacgtattatggctttaatggtttaacaaccatctatatttttgttggcacggttcatattcgttttttactctgattgtttactcgttcgctt

SEQ ID NO: 106583 - DNA, 1411 bp, Zea Mays
ctagtctacaagattcaccgtgaaccttagcagcacaaagggcaacggccgcctgccgctccaaagcagcccgtggttacgtcagcgcccgcgtactgctcccttcttcctcgttgctccgcccccttttgtcgtcgcgtcctcctctcgaggcctcggcagtcggcacgaggacgcgcgatcccgtcaccgctcacctccttctccaaacactgactccgcttcccgtccccatcccgctgcgcaagatcgggaggggacgaagagaggtcgaccgggaggagatgcaccgagaccgaggcgtctctgcggcagcgatacccggtgaccggaagcggatcggcgagcctatggacagatcgtctccatctacgtcgtgggggttctccggagggcgcgagaaggagcggatcggcgtgggcaagcagccggagatgcctcgctccggcggcggatccaccgccatgtccaagagcaagctctctgacgcagaatcagaaactgacagcgaagaatcagatgtgagtggttctgatggggaagatacttcgtggatttcatggttctgtagcttaaagggcaatgaatttttctgtgaggttgatgatgactacatacaagatgatttcaacctctgtgggctaagcaaccaagttccatattatgactatgcacttgatctgatattagatgttgaatcttcccatggtgatatgttgacagaagagcaaaatgaacttattgaatcagctgctgagatgctctatggattgattcatgttcggtatattattacaagtaaagggctgtccgcaatgctggataagtacaggaacgttgagttcggcagatgccctcgagtgaattgcagcggccaaccatgccttcctgttgggcaatcggatgttcctcgttcaagtacggtgaagatttactgccctagatgtgaagacatctacactccaagatccaaatatctaagcaacatcgacgggacttactttgggacaacattcccccacttgttcctgatgacatacccgcatttgaagccccagaagccgctgcagcaatacgttcccagggtatttgggttcaaaatccgtaagccatgacaaatttgaaggttgaatgtataaaaggttcaaatagcgccctgttatctgctggccccgcagtgttcacacgacacgtcatcggaatacacctgacccgcggctgacctccctagtctggtttcttgctctggcctgaaattctgattgatgcttgtggtttgtttagcctagtgaatcaatccatatttttttacgatcatacgtattatggctttaatggtttaacaaccatctatatttttgttggcacggttcatattcgttttttactctgattgtttactcgttcgctt

SEQ ID NO: 106584 - DNA, 405 bp, Zea Mays
atctatcaaaatattatactatacaaatgtcaagtatatccatataaatatcattacaaaattttctagcatcattcaaccatctattcaacacaccaaagataattggataaagtagtaacactaggatagtactacatagcacattacatgttccattacatggttattaaattgtcgttaaaccttctatgacattatggtctaaaagtttgttaaatagtaaaaaagatggatgactaaagttcaagttcatgcttgggctaagtttatattgggtattttatacccacgggttaacgggtatgggtgaaggcggaacgttctaatacccgtttacccattgggtgaagatttttgcccaataacagacccacgagtataatatttagcccacatatatac

SEQ ID NO: 106585 - DNA, 739 bp, Zea Mays
aaccaaacaacagaattcagaaaagtttattccaattaccaattccatgctccaaattcaagcagggtattagataagttgtggctccttagacgggaaatcaaaccggccctaaaactaccatattcatatgcacgtgactaacgtctccatatgatattccatataagcacttccacgcctgcagtgtgctttacaagctcaaacggggaacagattcagacgcgcgtgacaaacgtcagcatactctgtttttgtacatttggttcctttcatccctacagtgttctttacaagctcaaattggtaaactagagagcaatacaacatcacaattcacacatgacgagttcacaaatctggttgcttttgacagcaagcaagataccggtttgaatctccatgcacgtctttggagaggcatgctggtggctacaattctcaaagtgctcaaaaacaacgatagtattgaagccatgttagcatgaaaaccaagtaacagcatcaaaacagcaacgctatcatgttagggaggatacaaaaggtaaggatcaacgactgctttgataataacattactaaaaacatatgaataaaagaccaaaaaatggaaatcatgcactaatgatgatcacattgatatggactaatggtgcagccttacagttccgaaacaagatgtatttgtcagcttactgtgattctgaagtatctttatgttgaatacttgactagatag

SEQ ID NO: 106586 - DNA, 743 bp, Zea Mays
atgcaaccaaacaacagaattcagaaaagtttattccaattaccaattccatgctccaaattcaagcagggtattagataagttgtggctccttagacgggaaatcaaaccggccctaaaactaccatattcatatgcacgtgactaacgtctccatatgatattccatataagcacttccacgcctgcagtgtgctttacaagctcaaacggggaacagattcagacgcgcgtgacaaacgtcagcatactctgtttttgtacatttggttcctttcatccctacagtgttctttacaagctcaaattggtaaactagagagcaatacaacatcacaattcacacatgacgagttcacaaatctggttgcttttgacagcaagcaagataccggtttgaatctccatgcacgtctttggagaggcatgctggtggctacaattctcaaagtgctcaaaaacaacgatagtattgaagccatgttagcatgaaaaccaagtaacagcatcaaaacagcaacgctatcatgttagggaggatacaaaaggtaaggatcaacgactgctttgataataacattactaaaaacatatgaataaaagaccaaaaaatggaaatcatgcactaatgatgatcacattgatatggactaatggtgcagccttacagttccgaaacaagatgtatttgtcagcttactgtgattctgaagtatctttatgttgaatacttgactagatag

SEQ ID NO: 106587 - DNA, 1862 bp, Zea Mays
aaaagggcagtatggtaaaataaagtcgggtctcctaggccagtcatacatacaaacaccatcaaacggcagcccatcggccgtagtatcttgctcctcgccctccatccgaacaacagcaggagcccgagcccgaacccgatattccgcattcctacccagcaatggtggcccttgtctaggtggacgcggtgcaagaggcgaagcgggggccgatggatgaggaggggcagcgaacgccgcagccgatggtggtcgcgcggaagcgccgccaagccacgccggatcacccaccctactgctggatgatcggcgaggcaaccgacgcgctggccgaggacggcggctcggaggaggactccatctctgcctttatccgcgccaggcaccccggcgtgccccccgcgcacgacaggctcctccggcactacctcggcaagcacgtcgccgagggcttcttcgtgcgaactgccacggggcggttcgagcgcagcccccaggagaacgctgatgaggaggagctcccggtggagcaggctgatcaggccggctcgtgcaagccggcgtccgttgggtcttcggtggtactggtagaggccaagcccaagcgtggccgaggcaggccgcggaaggatggctctccttcgacactggccgttgctgcaatgtcatcggttgctgttgccggcaaggacgaaatccatgcaccgtccttgaagcccaagcgccgtggccggcctcgcaggcaggcaggggcggaccacagggacaaggagcatgagcctccgcgtgagctggcactggtgatcctcggtgatagctctgccgcaccgatcatggacaagccatgcacaaccttggtccctccaaccacgccgcctgtggacggtggccagcctatcgacctggctctggcgaccaccacagaggtgcctgtgcctgaacctgcggcaacgcccgccatggacaaggacggtgccgatgccgatgcttcttcaatcgaatgacagcatttgcacagcgcccacttcgccagagcctggcagctgggcttgcaagctggcactcgtgcctgctgctaatggtttttgattgctgacaagaaggatggccttacggaggctccatctctgcaacctacaaggatgttcatcagcatcacaaggccggcactgctccaacactcaactctggcggcaagccggcaagggccgcaaatcagcggtggtggctagtggtgaccgtaattgactttagtgtgtcctcttctactgaattattaggtggcttagcgcttacgagaaactcagtcacaacatcgatttaaactgtggatgataactggcttatttgaatctcttctgcaacttttgcggataatttacatctggaatcttcaaacatcaaaccccggaccagaatctcattaagaacgaaaagatacatgaactctgtcgaaaccaaataaactttctaaatattataaaatggctaaatacaattttaataatcaccaccaagaactgtataaccaaccattggtaacctaggatcaacaaacgcaccactcagaatgttatttcaaccggactccttccaagccgtccctttctgatgaattttattgtatcaaaacactggtcctccaacactgttgaacatgaattacagctgaagaatctgtgatgtgcggtcaatggtctcacgcctcccagcctctgaagagggtggcgcgggcaaccctattaactcggtgaacgcccccatccagagacttgcacatggccttgatgtgctgaaaagcactgctcatgtacttctctagttcattgttcactttctgcttgtcccagattttggat

SEQ ID NO: 106588 - DNA, 3224 bp, Zea Mays
ttctgccagctccgccaattccggaaggaaatcctccacaacccccatcccggaaccgttccgccgcaccgcgggccgcttccatctccaggtaagcatcggggagacctccggtctaccggctcgcccgcttgttcggtcccgaatattcaccttggaactgactcaactgaggcatcgcgtgctttccccccccccccccccccccccccttccaaatctgtgtccaggggcaggggatcttggagggggtctgctggtgggtccgagcagggcagcggcggcgttggatggagactggggcggcggcggcaccggcatcgagggcggacggcgtgcggaggtgcaaaatactcgtgccctggcgtttccagcccggcttcgtcaggcagccgctcaagcaggccgccaatgacgcagcggtcaacggcgacggaggtaataccgccggcgcgcctgatgctaaaagttgccgagcggatggggcggcgagcgacggcggtgagaccaacgttttccgagacgcaaaaaaattcggatcgggtagggctacccgcgggaagaatggggaagttgacggaggagaggagcattcggagagatgcactagcagtcagagtttgaagagtcctgatgtagaaaatggcggtcgccctggacccggagatgcatgcaatctgggcgagtctgtaaggggaggctgggtgaagagctccccattggaaggtactggaaatagcaggggtgcaaatggtggcgtcgaggctggagaggactacaatctggggagctctaactgtgatgctagttggaaggacgctcgcacccaggaattcaggggtgctggtgatggagcagcttgcgatcctgaggtgattgagagcaatgtaggagcagagaagtgctttgccaagggtttgaagaagccgtttatggatcagaccgggtcaaagagcaatggttcttctgctccaggactcgagtcagaggaccctgagggaaatgttggcttggaagattcctcttatcaagccgcaaaggggtgtagcatgggagatggagcagccaaggagaatgaagcaacagccaatggttgcagctcggcgactcctggcagcattggtaatggaacgtacgtccgcaagggacggaaggcagctgtaccatggagatttcaggccaggtacaagcgatcgttctctgatgcttttggctccaataatgaatctcctgatcttccagcatacatgtttgacagtagttcaacacagtgcaccccagcaactagaagcaccgtgcggtgttatgcgagtgctcattctggtgttagagtttcggctatgaataacttctcagtgaaaggtgatactgaatgtaagaagaggaaaactaataatgattatcaggatgaatcaatgctaaataatggaggtgtcgttgttagagaacgcatcatgcggtctctacaggatctccgtttaatttatcgggaccttttagatgaagaagataattctagggaaaaagtgcttaatgtgcggcctgatctaaaggcttacagaatcttcagggagcggttctgcacagattttgatgatgagaaatatattggcagtgtgcctggaatatatcctggtgatatcttccatctgagggtagagctttgtgttgttggtctccatcgcccacatagggtaggtattgattgtaccaagaaggatgatggtacaactgtggctgttagtatcgtgtcatgcgcacaatctcatgacatcaagtataatctggatgccttcgtatatactggactggtggctgttgcagtcaatcagaggatagagggtaccaacttggctcttaaaaagagcatggatactaatacaccagtccgtgttatccatgggttcaccacttttaatggaaaaaagaaatttcctgcatatatatatggtggtttataccttgttgagaagtactggagggagaaagagcatggagaccgttatgtgtatatgttccgactgagaagaatggaaggacaaaagcacattgacatccaagaaattctgcaaacagggaactctggatcaaacgacaatgttattatcaaagatctatcacgtggattggagagagttcctctacctgttgttaacaaaatatccgatgagcgtccaatgccctattgctacatttcacaccttcgatatccccgtaactaccggccaactcctccagccggttgtaattgtgtaggtgggtgctcagactcaaacaagtgtgcatgtgcagtgaaaaatggtggagaaatccctttcaatgataaaggccgtattgtagaagcaaaacctctcgtttatgagtgtggtccttcttgcaagtgccctcctacatgtcacaacagagttggccaacatgggctcaagtttcggctgcaaatcttcaaaacaaaatcaatgggttggggtgtgagaactcttgaattcataccatctggaagctttgtgtgtgaatatataggtgaagtgttggaggatgaagaagcacaaaaaaggacgaatgatgagtatttatttgctattgggcacaattattatgataagtctctttgggagggcctatcaagatctataccgtcacttcagaagggtccgggcaaagatgatgaaaatgaaactggatttgctgttgatgcttcagagatggggaactttgcaaaatttatcaatcacaattgcaccccaaacatatatgcacaaaacgtcctttatgatcacgaagatatcagtgtgcctcatatcatgttctttgcttgcgatgatattcgacccaatcaagaactagcataccactacaattataaaatagatcaggttcatgatgccaatgggaacatcaagaagaagaaatgcctttgtggctcggttgagtgtgatggctggctgtattgattttttaaaaacttgctgtattacgtttagaatctgcagtttttttaagcataactgaacttgaacttgtttcattttgccttcatctagatcatgttgtgacaaaatgtaaaataagacatcagtgtttttagttgccaatgggggtcaagttttttcctttctcattctattcgttattttatatgtctagctttcaatatgtagaataatgtgtgaatatacatggcaataagttcaagtgaatttgctatatttgacaatttacataca

SEQ ID NO: 106589 - DNA, 2930 bp, Zea Mays
gaaatcctccacaacccccatcccggaaccgttccgccgcaccgcgggccgcttccatctccaggggcaggggatcttggagggggtctgctggtgggtccgagcagggcagcggcggcgttggatggagactggggcggcggcggcaccggcatcgagggcggacggcgtgcggaggtgcaaaatactcgtgccctggcgtttccagcccggcttcgtcaggcagccgctcaagcaggccgccaatgacgcagcggtcaacggcgacggaggtaataccgccggcgcgcctgatgctaaaagttgccgagcggatggggcggcgagcgacggcggtgagaccaacgttttccgagacgcaaaaaaattcggatcgggtagggctacccgcgggaagaatggggaagttgacggaggagaggagcattcggagagatgcactagcagtcagagtttgaagagtcctgatgtagaaaatggcggtcgccctggacccggagatgcatgcaatctgggcgagtctgtaaggggaggctgggtgaagagctccccattggaaggtactggaaatagcaggggtgcaaatggtggcgtcgaggctggagaggactacaatctggggagctctaactgtgatgctagttggaaggacgctcgcacccaggaattcaggggtgctggtgatggagcagcttgcgatcctgaggtgattgagagcaatgtaggagcagagaagtgctttgccaagggtttgaagaagccgtttatggatcagaccgggtcaaagagcaatggttcttctgctccaggactcgagtcagaggaccctgagggaaatgttggcttggaagattcctcttatcaagccgcaaaggggtgtagcatgggagatggagcagccaaggagaatgaagcaacagccaatggttgcagctcggcgactcctggcagcattggtaatggaacgtacgtccgcaagggacggaaggcagctgtaccatggagatttcaggccaggtacaagcgatcgttctctgatgcttttggctccaataatgaatctcctgatcttccagcatacatgtttgacagtagttcaacacagtgcaccccagcaactagaagcaccgtgcggtgttatgcgagtgctcattctggtgttagagtttcggctatgaataacttctcagtgaaaggtgatactgaatgtaagaagaggaaaactaataatgattatcaggatgaatcaatgctaaataatggaggtgtcgttgttagagaacgcatcatgcggtctctacaggatctccgtttaatttatcgggaccttttagatgaagaagataattctagggaaaaagtgcttaatgtgcggcctgatctaaaggcttacagaatcttcagggagcggttctgcacagattttgatgatgagaaatatattggcagtgtgcctggaatatatcctggtgatatcttccatctgagggtagagctttgtgttgttggtctccatcgcccacatagggtaggtattgattgtaccaagaaggatgatggtacaactgtggctgttagtatcgtgtcatgcgcacaatctcatgacatcaagtataatctggatgccttcgtatatactggactggtggctgttgcagtcaatcagaggatagagggtaccaacttggctcttaaaaagagcatggatactaatacaccagtccgtgttatccatgggttcaccacttttaatggaaaaaagaaatttcctgcatatatatatggtggtttataccttgttgagaagtactggagggagaaagagcatggagaccgttatgtgtatatgttccgactgagaagaatggaaggacaaaagcacattgacatccaagaaattctgcaaacagggaactctggatcaaacgacaatgttattatcaaagatctatcacgtggattggagagagttcctctacctgttgttaacaaaatatccgatgagcgtccaatgccctattgctacatttcacaccttcgatatccccgtaactaccggccaactcctccagccggttgtaattgtgtaggtgggtgctcagactcaaacaagtgtgcatgtgcagtgaaaaatggtggagaaatccctttcaatgataaaggccgtattgtagaagcaaaacctctcgtttatgagtgtggtccttcttgcaagtgccctcctacatgtcacaacagagttggccaacatgggctcaagtttcggctgcaaatcttcaaaacaaaatcaatgggttggggtgtgagaactcttgaattcataccatctggaagctttgtgtgtgaatatataggtgaagtgttggaggatgaagaagcacaaaaaaggacgaatgatgagtatttatttgctattgggcacaattattatgataagtctctttgggagggcctatcaagatctataccgtcacttcagaagggtccgggcaaagatgatgaaaatgaaactggatttgctgttgatgcttcagagatggggaactttgcaaaatttatcaatcacaattgcaccccaaacatatatgcacaaaacgtcctttatgatcacgaagatatcagtgtgcctcatatcatgttctttgcttgcgatgatattcgacccaatcaagaactagcataccactacaattataaaatagatcaggttcatgatgccaatgggaacatcaagaagaagaaatgcctttgtggctcggttgagtgtgatggctggctgtattgattttttaaaaacttgctgtattacgtttagaatctgcagtttttttaagcataactgaacttgaacttgtttcattttgccttcatctagatcatgttgtgacaaaatgtaaaataagacatcagtgtttttagttgccaatggg

SEQ ID NO: 106590 - DNA, 1340 bp, Zea Mays
atgagagctcccaaaactgtaagattcctgtttagaagtatggctgaaatagcattacatggagaattgaaatgaggtcgccaacctttgacaccgactcttctactgcagtacgccagtaccgctttctttcgacacggaaatgctcaatacataattcaactacaatcgccgcaagcttttttttttgtttgtttgtatatcctgaatatccacacagtttttctttaacaatcttccctccaatttatacaacaacgacctcttcggctcgccaacattaggtccagtccacccctccagccaacccaagtctccatccacaagagctcgagaacctggccacgagcccatgacggcaagaagcggtcatggccggtgatgaggaggaccacctagcagacgcgccgcgggtggtgggcgtcctctccgcgctcctggaacgtgtcgtggagcgcaacgacgcggtggccgatgagctcgccgccgggaccgagtccgcggcgccgccgtcggcgttccgggcgacggcgaggcccgacatctcggtgcgctcgtacatggcgcgcatcgcgcggttcgcagggtgcagcccggcttgctacgtcgtggcgtacgtctacctcgaccgcctcctgcgccgcgcccgcagcgcgcccgccgtggactcgtacaccgtgcaccgcctcctcatcaccgccgtgctcgcggccgtcaagttcatggatgacgtatgctacaacaacgcctacttcgccagggtcggcggcatcagcctgtcggagatgaactacctggaggtggacttcctcttcgccgtcgggttcgacctcaacgtgtcgccggagacgttcggccactactgcacggtcctccgggccgagatgctgtacctggagctggagggtcctcctcctccagccgccagtacaagtctgcacaggtgctgcttgtcagaagacgacgacggtagcagcagcaccagcagcagctagctgcatagagacaggtacagcggttgcttccaagcaagcaaccatgtatgaatgtgtccgtgtacactgtacagtacagacatgcttgcttgaaagcaaacacggagtacgtgacgtaggcatctgcgtgtgatcggtttgctatctggcggctggcgcttagttgtttttagctttgttattaggtaatctgttgctcttgtagtcttgtatagctgcattgctgttgttcatgtggaaatcggaaaaccgtaaggaacggtataaattgcagtcttggggcagtgtaattgttttcttgtccagcagtttatccatagtttatctaaaatattgtttttgctc

SEQ ID NO: 106591 - DNA, 1081 bp, Zea Mays
atgagagctcccaaaactgtaagattcctgtttagaagtatggctgaaatagcattacatggagaattgaaatgaggtcgccaacctttgacaccgactcttctactgcagtacgccagtaccgctttctttcgacacggaaatgctcaatacataattcaactacaatcgccgcaagcttttttttttgtttgtttgtatatcctgaatatccacacagtttttctttaacaatcttccctccaatttatacaacaacgacctcttcggctcgccaacattaggtccagtccacccctccagccaacccaagtctccatccacaagagctcgagaacctggccacgagcccatgacggcaagaagcggtcatggccggtgatgaggaggaccacctagcagacgcgccgcgggtggtgggcgtcctctccgcgctcctggaacgtgtcgtggagcgcaacgacgcggtggccgatgagctcgccgccgggaccgagtccgcggcgccgccgtcggcgttccgggcgacggcgaggcccgacatctcggtgcgctcgtacatggcgcgcatcgcgcggttcgcagggtgcagcccggcttgctacgtcgtggcgtacgtctacctcgaccgcctcctgcgccgcgcccgcagcgcgcccgccgtggactcgtacaccgtgcaccgcctcctcatcaccgccgtgctcgcggccgtcaagttcatggatgacgtgtgagtgtgcctgcttcacgcctgatcgcccttggcgcagtttcaattgctagtacgatcgttccacgcgcgcgcaatcgaatcattcatttctgggcgttattgcgtttagtttgttgttcctgaccttaattctctcaccctacagcaacagtttttatcaacgagatcaaatgtaaaagttcaggagccattcgttggatagactacgagagaaattcagagacaaagtacttaggaatacacgcaacgtggcgagatagcttgatctcatacgagtcatgttcttttgtgacaaatttgaccactactttacctgaccagttgctgatttggggatcaatcatg

SEQ ID NO: 106592 - DNA, 2028 bp, Zea Mays
cttatccccttcactcccttcaggctttcatccgcattccgcaggccgcagcggaagccgccctcctcctcggccgccccgcacgctagctcaccatgctgctccatctcgtcacctcctcccccctaaccccggcatgcccctcgcctaagcggcgtacgtgtgtcgttgcggcggcagttctagtgactgtgagatgtgcggcctcctcctcgtcgagcaccccgtcgtcatctgcatcggaggctgctgctgccgggcagcgggtggcgaaggtgcacagctacgggacggtggattacgagcgtcgatctccactgcgttggggcaccctgtaccggcgcatcgctgtggggcacggcgggcggcccgtggggcgcacgctgggggcgtgggacgagggggagcgccgcctcgacaagtgggagctctgccgcatcgccaaggagctccggaagttcaggaggttcaacctcgcgctccaggtttacgattggatgacagagcgcagagatagatttcctctctcatcgagtgacatggcaatccagttggatctgattgccaaagtacgtggtgttccacatgctgagaaatactttgacgagctccctgatgcgatgaaggacaagcggacgtacggttcccttctgaatgtttacgcccaagctatgatgaaagagaaaacagaagaaacatttgagcaaatgaggaagaaaggatttgcgtctgatacattaccttgtaatgtgctgatgaatttctatgtggattctggagaacctgatgaagtgctggcaattattgatgagatgaaggaaagaaatgtttcttttgatgtctgcacttacaacatttggataaaaagttgtgcggctaaacaagatgctgaagaaatggagcaagtctttagccaaatgattgctgatgagtctgtcgttgccaattggactacttataccactctggctagcatgtatcttaagctaggaaactctgagaaggcagaagaatgcttgaaagatgctgaaaagagaacaacaggccgggagaaaaagtgttttcactatctcatgacgctgtatagccatcttgggaagaaggaagaagtttaccgaatttggaactggtataaggcaactttccctatgattcataacctgggttaccaggagttactgtctgctcttataagaataggagatatcgagggagccgagcttctatatgaggaatgggcatccaaaagctatagttttgatcctaagaccatgaacattttattagcatggtatgctaaagaaggtctgattacaaaggctgagcaaactgtgaatcgatttgttgagaaaggtggaaatcccaagccaaacacctgggaaatccttgccacagcctacatgaatgatgataaaatatctgaagctctgtcatgcatggaaaaagccacggcagttaaaagtgcaagtaaatggaaaccgagacccaccaacgttgagactctcctagcaagtttcaaggagaagaatgacgcagagggtgcagacaggttagtgagtgtccttacaagtagaggatgtgctgaggacgaagaatacaagtcactgattgacacctatgcttttgcgggcacatagcatggagacggtgcatgatatcattgaatcaatgatatgatgagtatgacgcactgaacaatcacattacttgcccataatgtttctaaaatagtaccatgagaacctattgctctcgtaagttcatctggtacagttacatccatcagagaggtcagataaaatgcattcgatcagttgtccccctagacgaaatcagaaaaatgagatacatagatctttccggtcacttggcttagatagaaatcctcaaaatgtttcttcaaattaaaatcctcaaaatgtcaacatgacacttagatggcttctttgtacttcctattgtatatttatattattttttaggattaatcaagccttctcagtgcaaatacttattttattagcaact

SEQ ID NO: 106593 - DNA, 81 bp, Zea Mays
agcaaccagcatgtgccaggcttcattacacaggctgaacagctccaagccaagggtgtagacgagatcctgcttatcagc

SEQ ID NO: 106594 - DNA, 1959 bp, Zea Mays
gctgctgcattccttcctctattatttctccaaccctttcccctctctttctctctctcatctaccctctctctaaaagactggatacagaacgaggaaaacaaacacccgaaaagaaaggaagaagaggagaagaacaccaaacaagcagaactttttttttgagaactccataggctgtggaattgtctccaggaatcccctctgggtttgacgagattcatacagagaaatacttcttgattttccccctttcttttgctcaagaatttacctgtacaggcgaaaccgcttctttgttcccttttttttctgtgtttgttttattgggattttcctctggtccgttcttcttcacctgtgaggtggtgagaagcagagagaatcatggggaagcaaggaccctgccgtcattgtggagtcacaagtactcccctgtggcgaaatgggccaccagataagccggtgctctgcaatgcatgtggctcgagatggagaacaaagggttcattggcaaactacactccaatgcatcgcaaggacgatattgatgacgatgaacccagagttagcaagctgaagccaccgacatcaaagctgaagtcacagaagaaaaaaccaaatcacattataatggagaatgggccattttctggtcagaatttccgaaagatgggggatgtcgaccaaagttatcggtctagttcgggatctgcagtatcatactctgagagttgtgccccatatggtgctgctgatgcaagtgaaatgactggttcagcacagtcgcatgcttgggagtccctagtgccatcaagaaagaggagctgtgtcacccgtccgaagccttcccctgtagaaaagcttgcaaaagatctaaacttcatcatgcatgaagagcagttatattacccttcaggatcatcggaggaagacctactataccatagtgaaactcctgtcggttcctttgagatgggctctggaagtgtgcttctaagacatccaaactcgaaatcactggagaaagaatcagaagcaagctctattcctgcagataataaatcatatattacaagtgaatcctactcgggctctgcctcgtttgccattcacaatggaaacaaggcagcaattaacttaaacgcttcaaatgcaaggctgaagaagtcgccgctgcatatggaagacaatgctagaaggggagtagggagcatcagtggtccggaaggctttaccaagtctactatgaaaccactcaaaagaccccgtgacacccaatttcagattgatgcagaactagaaggtaccatgaggagtcctctaagaggtctaaaatctggtgctttggctcagtttgaaagttcatctttgccaaaatctggctacaccaccaaagattcaacctgcactggaggagcacttaatttattcatgttacccccagaaaagttattagtggtccctcctcagtatgtcgaccctgatcaagacttgctgctggagatacctctcaatgcacgacacccagaggcagaacttctgtgtcaaccatctcagctgatgagctctataagccgcagctccacctctatgggtggggttgctgaaggagaagggtgcctgaagcaaccatagtctcaggtcacatcagcaaggagcttaggaacagccagtagttgcagtttactttagcctcctggatcttgacgcctccatttactgatcaccaatgggcgttatgcatccgtcattccctaatttacataacaatgtgcgtcatcttccaacttggcgaattgtccgttcagctaacatttgtagcatgcttttggattgggtttctgctggttgtctgtagcatatggtccgtggagaaagtattatctccgtgtgaaaaaaatatcaccttattgcagggaaatgaaaaaaagaggatactggagagttatgtatgtg

SEQ ID NO: 106595 - DNA, 2056 bp, Zea Mays
cgcgcacggacggcgaggccgacgccgccggtactgtctctgccggagtgctggatatccgcccgctgctcctcagtcgaccctccgctcccgcccatgcctcgacccaagcccgccgctgccggtggcggctggctttcagggtgggggtgggacctcatgctcggatcgattgccgcgttctacgccgtcatggcgccctacaccaaggtggaggagagcttcaacgtgcaggccatacatgatattctttatcacacttatcacatcgagaagtatgatcatttggaatttcctggagttgttcctcgaacgtttataggagcatttgttatctctattctctcatcacccacagtctttgtattgcgtttacttcgtgttccaaagttctatagtcttcttacagttcgattaacattgagttgtgtcactttgatgagtttgagacttctcagagttcaggtaaaaaagaagtttggccatcaagcagaagcattctttgtggtactaactgctatccagtttcacttgctgttctactcaagccgtccgcttccaaatatctttgctttagctttagtcaacttggcatactctttctggttcaagggaagctacctatgtacattacgggctctgattgttgcagcagttgtttttagatgtgatatgattctgcttcttggcccaatagggcttgcacttttgctcagcagatctgtttctctcttggaagcaataaaatgttgcataagcactacccttgtatgcataggatttaccgtgctaatcgactctataatgtggcgtcgaatcctgtggccagaatttcaagttctctggtttaattcagttctgaatcggagttcagaatggggtacccattcaattcattggtactttacatcggcgcttccccgttccatgatagtggcataccctctctgcatggttggtgctcttcttgatagaaggatagtaccatacatgtttccggtcttcttatttgttgtgctctattcaaaacttccacataaggaactccgtttcataattggctcaattcccatgtttaatgtgtctgcttcactaacagctagcagactatataataaccgaaagaaagctgggtggaatttgctttttattctcatgcttggtgcctttcttgtcagtctaggatattctactgtgactttcatggcatcctacaacaattatcctggtggctatgctttaaaggctctacatgaagcagattcttcagtgaaggaaaagatggtacatattgatgccttcactgcaatgagcggggtttctcgtttctgtgaaaatgaatatccttggagatactccaaggaggaagaaattcccatcgaagaatttgagaaaaggaatttcacctatctactgaatgagcaccgctccatcggtggctaccagtgcctgttcgctgtggatggattctccagagtaaaacttacgccccaaatccccccgctctctctggtgaaagaacccaaggtgtttgcacatgggaatacgagagaccctgacattctttcactgagttggcccggttgtccttgagggcatggggacaccggacacccagattcctgtggcaggaccactaactgccagcagtgaagatgtgtttgagtcagtccgcgtgacacatatatggtatacatctctgggtcttgccatgaagctaccttacctgcaaatctagaatggggcccctcctcccctagatcccacggcttcgaaaccacagctttaaggaacactgccattttcaggtgcaaatttgtgtaacattttagagccggaagaaagacagaaagcacacggggggtggggggaatcatagcaattagcaaccttgtatttacaagttggtcgatatatttttttcccttttgaggcaactttcatactccatcttatataacaagagcttctagactttatttatcggcagcaggcatacagtcgtgctggagacgcatacttgctccattcaaagataatatatttgttttctatc

SEQ ID NO: 106596 - DNA, 1677 bp, Zea Mays
gcttacattgggacaggcctaacaacagtagcccaacacggcctgccactaactccgcgcacggacggcgaggccgacgccgccggtactgtctctgccggagtgctggatatccgcccgctgctcctcagtcgaccctccgctcccgcccatgcctcgacccaagcccgccgctgccggtggcggctggctttcagggtgggggtgggacctcatgctcggatcgattgccgcgttctacgccgtcatggcgccctacaccaaggtggaggagagcttcaacgtgcaggccatacatgatattctttatcacacttatcacatcgagaagtatgatcatttggaatttcctggagttgttcctcgaacgtttataggagcatttgttatctctattctctcatcacccacagtctttgtattgcgtttacttcgtgttccaaagttctatagtcttcttacagttcgattaacattgagttgtgtcactttgatgagtttgagacttctcagagttcaggtaaaaaagaagtttggccatcaagcagaagcattctttgtggtactaactgctatccagtttcacttgctgttctactcaagccgtccgcttccaaatatctttgctttagctttagtcaacttggcatactctttctggttcaagggaagctacctatgtacattacgggctctgattgttgcagcagttgtttttagatgtgatatgattctgcttcttggcccaatagggcttgcacttttgctcagcagatctgtttctctcttggaagcaataaaatgttgcataagcactacccttgtatgcataggatttaccgtgctaatcgactctataatgtggcgtcgaatcctgtggccagaatttcaagttctctggtttaattcagttctgaatcggagttcagaatggggtacccattcaattcattggtactttacatcggcgcttccccgttccatgatagtggcataccctctctgcatggttggtgctcttcttgatagaaggatagtaccatacatgtttccggtcttcttatttgttgtgctctattcaaaacttccacataaggaactccgtttcataattggctcaattcccatgtttaatgtgtctgcttcactaacagctagcagactatataataaccgaaagaaagctgggtggaatttgctttttattctcatgcttggtgcctttcttgtcagtctaggatattctactgtgactttcatggcatcctacaacaattatcctggtggctatgctttaaaggctctacatgaagcagattcttcagtgaaggaaaagatggtacatattgatgccttcactgcaatgagcggggtttctcgtttctgtgaaaatgaatatccttggaggtatgtttctaaccgacaaaactagttgatatgtatgctactatgctattttattttttctgttgattgctcaaatcttctttcattattgttaattaatatcaccagtccattagttttttctttctggattattgattttggactatcaggtaaaacttagatcatattagttttacaaatactcttagttataggatgcaattattgtaatactgaaccagacacccctttctttgcaaactacactttcactatatttgacaaatt

SEQ ID NO: 106597 - DNA, 823 bp, Zea Mays
cgcgcacggacggcgaggccgacgccgccggtactgtctctgccggagtgctggatatccgcccgctgctcctcagtcgaccctccgctcccgcccatgcctcgacccaagcccgccgctgccggtggcggctggctttcagggtgggggtgggacctcatgctcggatcgattgccgcgttctacgccgtcatggcgccctacaccaaggtggaggagagcttcaacgtgcaggccatacatgatattctttatcacacttatcacatcgagaagtatgatcatttggaatttcctggagttgttcctcgaacgtttataggagcatttgttatctctattctctcatcacccacagtctttgtattgcgtttacttcgtgttccaaagttctatagtcttcttacagttcgattaacattgagttgtgtcactttgatgagtttgagacttctcagagttcaggtaaaaaagaagtttggccatcaagcagaagcattctttgtggtactaactgctatccagtttcacttgctgttctactcaagccgtccgcttccaaatatctttgctttagctttagtcaacttggcatactctttctggttcaagggaagctacctatgtacattacgggctctggtatgccttatgcccttttctgatgccttacctaccgagggaagctcggttctcaccaaattcagacataatcattatttctagtacccaagatataattcttcgtttcagcaccaaggatctggatcaacaaaggattaaagctttcacacaattaaaatcataccgaactatgtgtatt

SEQ ID NO: 106598 - DNA, 170 bp, Zea Mays
cgtgacggatcaagattcaggaacagcaaatggcttcatcgttttctttcttgtcttgggttcgttcagttattaattcaccccatgtcgcatgtataggtcggcaaaaaaaaagattttgtcttgggttctttcttattgcattttacgcttccactaaaaagcaagtg

SEQ ID NO: 106599 - DNA, 1342 bp, Zea Mays
gacagaaatcttcctcggcatctcccattctcactcactcacctactcatgccccccaataccactttgacccaccccatcgatcaattgatcaccaccacaacccacaccccgcacggtcgatctatcttgttatatgcgtgcatggaggggagcagcagccagctgctggagacctgccttcctgctagcctctacgcggttactcctcctccatgcgcccatcctcatccccttcttgccccgctgccgaaccagcagcacatgcttctgcagatgccgtttgtcaaggagcaggctgcgaataatcatggcctgatgctctcttcggaccaccaccaccacagcggcctcctgtacccgctgcttcttcccggcatccctttctgcccctccgtcgccgccgcctgcgagaagactaccaccaccggctccggggcgctcgatgccggcgaggcgggcaccagctcggcggcggcgaaagccaccggcgagatcgctagtaccgccgccaccgcatgcaacagcccaagttcctgcaattggtggaagggcccggcggcggcagcagcgggggagaaaggaggacggatgaaggtgaggaggaagatgagggaaccgaggttctgcttccagacaaggagcgacgtggatgtgctggacgacggctacaagtggagaaagtacggccagaaggttgtcaagaacagcctccatccaaggagctactaccggtgcacccacagcaactgccgcgtgaagaagcgagtggagaggctatcggaggactgccgcatggtgatgaccacctatgagggtcgccacacgcactccccctgcagcgacgacgccgacgccggcggcggcgatcacactggcagctgcgctttcacgtcgctctagagaccgatgcatagctttgtgcatctgaacgaacctgctagcacctagcagcgcagtgctttagagacgatcgatcgatgcaccaatatatccatgcatgcaagtttgtagaaagtaaatcaatcaaatggatcagcacggtacgcgtgcctgcttaaagcctgacatctgccatgcatgaaggcacagaaagcgaggccaggccaccatgctggcttgctgctgtagctgtagcctgtaggcagtacacacattggtaatcacctggttaattgtacaaagaaggcagctcgttgttcatcgtgcgtgcagctgctaatgattgcgaaactgcaccatagcagtttctgcgagcctgcaggcaaacgaacctgagcttgcagacaaactaagcagtgtttggttgaaaagacaggtagaacggagtcgttctgtctta

SEQ ID NO: 106600 - DNA, 1385 bp, Zea Mays
gacagaaatcttcctcggcatctcccattctcactcactcacctactcatgccccccaataccactttgacccaccccatcgatcaattgatcaccaccacaacccacaccccgcacggtcgatctatcttgttatatgcgtgcatggaggggagcagcagccagctgctggagacctgccttcctgctagcctctacgcggttactcctcctccatgcgcccatcctcatccccttcttgccccgctgccgaaccagcagcacatgcttctgcagatgccgtttgtcaaggagcaggctgcgaataatcatggcctgatgctctcttcggaccaccaccaccacagcggcctcctgtacccgctgcttcttcccggcatccctttctgcccctccgtcgccgccgcctgcgagaagactaccaccaccggctccggggcgctcgatgccggcgaggtaaatgaagctagcgacgagccgacgactccatcccgtcctgctgcgagaagaccaccacctggtcctggtgggatgctctccttgatccttgtaatcttggttttcgcaggcgggcaccagctcggcggcggcgaaagccaccggcgagatcgctagtaccgccgccaccgcatgcaacagcccaagttcctgcaattggtggaagggcccggcggcggcagcagcgggggagaaaggaggacggatgaaggtgaggaggaagatgagggaaccgaggttctgcttccagacaaggagcgacgtggatgtgctggacgacggctacaagtggagaaagtacggccagaaggttgtcaagaacagcctccatccaaggagctactaccggtgcacccacagcaactgccgcgtgaagaagcgagtggagaggctatcggaggactgccgcatggtgatgaccacctatgagggtcgccacacgcactccccctgcagcgacgacgccgacgccggcggcggcgatcacactggcagctgcgctttcacgtcgctctagagaccgatgcatagctttgtgcatctgaacgaacctgctagcacctagcagcgcagtgctttagagacgatcgatcgatgcaccaatatatccatgcatgcaagtttgtagaaagtaaatcaatcaaatggatcagcacggtacgcgtgcctgcttaaagcctgacatctgccatgcatgaaggcacagaaagcgaggccaggccaccatgctggcttgctgctgtagctgtagcctgtaggcagtacacacattggtaatcacctggttaattgtacaaagaaggcagctcgttgttcatcgtgcgtgcagctgctaatgattgcgaaactgcaccatagcagtttctgcgagcctgcaggcaaacgaa

SEQ ID NO: 106601 - DNA, 1479 bp, Zea Mays
gaaacgccaagttgccagccaaacgaaccagctaaaacaagggggggcagcaccgcggcgcggcgcggcgtggggacagagccctcgtgatcgatccgtccgtgggatctcgcgcacgccaggattggagagccgcggcctccccccgccccaaccagccatgggttcccgcgcggatcgcggctcttagacgcggaggaggagagagacagggggaggggaaggccgaggcctaggaggcgtggtgcagcgcgcgagcgcgttcgttcggcatggaacagaacgacggctcgttcctcgccgtgcgacgcctctccggcggcgccatccaccaccatcgccaccactcttcgccggctgaggtcgtgggcgtgtccacggcgtggatcgggaaggggcttacgtcgtgcgtgtgcgcgcaggggacggagagcgacgggcgcctctccttcgatttgagtcccattcaggaagagtgcttgcataggttgcagaaccggatagaggtgcagtatgatggttcaaatctagagcatcagaaagcactggtggccctttggcatgcttcttttcctggaactgaacttctaggattagtatcagaccagtggaaggagatgggatggcaagggaaagatccatctacagatttcaggggtggtggttttatatctttggagaatttactgtatttctctaagaaatatccaaaatccttccatgagctccttcgtaagcagaatggtgatagagcattgtgggaatacccctttgctgtagctggtgtaaatattacattcatgctaattcagatgcttgatcttcaagcagctaagccaacgtcattggttggagcagttttcctaaatctactcttagaaaatgatcgagcgtttgacattctttactgcataaccttcaaactgatggatcagaaatggcttgaaatgcacgccagttacatggatttcaatgtggttattaaatctacacggcgccagctcgagagggagctgttgctagaagacatccagaggatccaggacatgccatcatacatgcttctcacctgctagcaattgaacttggtcatacctaacattgcagcaaggtagtgcatctccatacactcgaagaagttgcgacgttggaaccacgtataccgagctcagtatggggggcgtgggcgatctaggttcatggactgtggatgtgctgctttaaattgtcgtgtttacctacttgacaacgaccttaacaccgaatgccttttcgtttggacgatgcgctgcatcttggagctaactttcgttgtaaacaggactacaggaggatcgtggaaacttgtctgaatatgatttgtagccatgtgtatgcataatcttgccgctttactgaaaaaaggcagattaaggctaattatagccttatagtcatttgagttgggctgggtaccttgtgtggggcccataacgaaca

SEQ ID NO: 106602 - DNA, 347 bp, Zea Mays
agtggtaactgtaagggtgttggagctgtcttctcgcccttcacaacagagatggagcatgttggagttgggagcaaagaagagtacctttatgactgctacactctttctcacattgggagatcttttgatggtagtcatgtctctgagatccgaaggaaaacaaattgggtcccaatcaatccttttggagaggctgagaagcagattacatcatatgatggtgggagtcaaaacacttcgggtgggaaggaaactgttgatttaccatcatacaagtcttttgatcttaacaggagtgttgtgcttgatgaagaaacttctctatggaaactggaattgtattt

SEQ ID NO: 106603 - DNA, 1335 bp, Zea Mays
acgaggttgactttttgcaagcaagcatatatacattcaaatgtacacgcacaatacaatatatatttgtgaagcgaccatccttccattagattattgaaacctcgaaacaccaccacaccaacaaaaaggctgcaacaagccgtgcaactcgctaccaccgcgggcgactctgaaccaataccgttgattttttgcagcgtggaagaaagcagtattggcattgggtgatttgcctccaaactccaaaggtcgccatgcctcgatcactagttccatgtttccgtcgcgctccgaatcccgcgacctaccgcctggccccatcctccattggcacaaagcggccagttctctccatcagttgcgtcgagagcaccatggcgcgcggcgacggcgacatgcacgtacgttacacacacacgagccttaagcctatgtactagcctctccatttcaggccaccgcattccactcaacaagcggccagggctcccacagctccggcatggcgcagtaggactccgggaactcgtcgtcgtagtgaaggtgctggtcgtcgcactcggactccaccgagacgtcggccagcgccgcgcacgtcgacccgacgagcacacagctctcggcgggcggctccatgtcgacgcatccgaacagcaggacgttcctcttgtcgtcctccgcctcctcctcaccaccaccgccgatgcagctgctgctgctagccatcgtctcgcggccgccgccgccggcggcggcggcccggtcgtcccgctccctcagcctctcgcttagctcgctcaactgtggtgagtgcgagcttgtcctgcttgagggactcgacgtgggcgtggagatcgtcgaacttggcgcggagcagggcgtagtcgtgctcgagctgcttggagcgccaccgggcgcgcttgttctggaaccagatggccacctgccgcggctgcaggcccagctcccgcgccagctccgccttctcccggggctccagcttggcgtggtgcgcgtggaacatggactccagcgaccgtatctgctcctccgtgaaccgccgcttcctctcccccctccccgacgccccgcctccgcctctccccgccaaaaacgaggacggcggctcgtcgagcatcgggacgcagagctgctgctgctgctgctgtggctgtggcacctgcaccgtcgtcggcatgaagaactgctgctgctggtgatctggcctgtccatgtcgtcgatggatcgatcgatcgttggatcctagctatagctactagaagcggtgtgtgttcttcctaccagccggccgggactccgtggtaccgtcc

SEQ ID NO: 106604 - DNA, 2988 bp, Zea Mays
tttcttgcgcaattgctcgcccttgctgacgaggagcagcacctcatactgaagcagcacccaggtatggaatcactcgtattggcctgtcaaaatcggagatgctcctcctgtttgtccatcatttccccctcttttcggtgacctccacatttcttcctctgtcactggctcagtgctgtgtgttgtccttctggctggagcaagcggagcccaggaggggcggaggcggcaacaccaacaccaacaccacaggccgccgccgcgcctcgagctggctatggcgcacgcgcggggcggcgggggccacggccacggccacgaggaggaagcggaggcggccgtctgcctggacggcgactccgaggcgggcgaagcgcgcagcgcggggcgcgcgccgccgtggcgggaccagctgacggcgcgcgggatggtggcgagcctcgccgtcggcgccatgtacagcgtcatcgtcatgaagctgggcctcaccacagggctcgtccccacgctcaacgtctccgccgcgctcatcgccttcgtcatcctccgcgggtggacgcaggcgctcgcccgcttcggcgtcgctacgcgcccgttcacccgccaggagaacaccgtcgtccagacatgcgccgtcgcctgctacagcatcgccgtcggaggtgggtttggctccttcttgcttgctctgaacaagaggacctacgagatggctggggaggacacggaaggcaaccttccgggaagctacaaggagcctggcattggctggatgaccggcttcctcttcgccgtaagcttcgtcgggattgttgcgctaatacctctaaggaagatcatgataattgactacaaattaacttacccaagtggtactgcaacagctgttcttataaatggattccacacaactcatggagatgcaacggcaaagcagcaagtgaatgggttcacaaaatactttgcaatcagcttcttttggagcttcttccagtggttttactcaggtggagacaactgtgggttttcacagtttcccacttttggacttagagcttggaaacaaacatttttcttcgatttcagtctaacatatgttggcgctgggatgatttgctctcacctcgttaatctatctctccttcttggtgcacttctctcatggggaataatgtggccactggtcagtgatttgaaaggggattggtatcctgcagatatgccagaaagcagcatgagaagcctgcaaggttacaaggccttcatctgcatagcgctcctcttgggcgatggtctttacaattttgttaaggttgttgcattcactgttaagagtctacttggcagatcaagactgaagaatgcaaagaaagaggaagacattccagtgcttgatgaaattcagcgcaatgagatttttacaagagacagtatccccacatggctagcctactctggatatcttgcactatcagctgttgctgtgtttgccattcccttgatgttccatgagatgaaatggtactatgttattatagcatacttattggccccggcattgggtttctgcaatgcctatggtgctggccttactgatatcaacatggcctacaattatggaaaggtcgcgctctttattcttgcggcctgggctgggaaggactctggtgttgtagctggcctagtgggttgtggtttggtgaaatcactggtgtcaatatccgctgatctgatgcatgacttcaagactggacatcttacattaacatcacctagatcaatgattattgctcaggctattggcactgccatgggctgtgtcattggaccactgacatttttactgttctacaaggcttttgacattggaaaccctgatgggtactggaaggcaccatatgctctaatctaccgcaatatggcaattcttggtgtccagggcttctctgctctgcccctgcattgtttgcagctgtgctacggattctttggatttgcagtggcagccaatctgatgagggacctcttgccaccaaagtacggcaaatgggttccattaccaatggcaatgggggttcccttcctagttggtgcgagctttgccatcgacatgtgtgtggggagcttgatggtcttcatctggcacatcattgacagaagtaaagcatctttaatggtgccagcagttgcatctgggttgatatgtggcgatgggctttggatcttccctgaatccttgcttgccttggccaagatcagtccaccattgtgcatggcattcaggtcttcacactagagtaacaaaatgctcgacatctgagaacagttccatgtccaatcggagaagctgttggcatgccaagtttgttattaattagctgggatatgatacatgcaggtaggtaaagatgcagtgcctatctggatgttacctacatataatgacgtaatgtggtacccctgtaaaatttatcatatgcaagatgatacatcacattagagcaatggtaagtttgagaatttcaccccagtggtaatggatggatgcaagagctagcagtagccaaaattttgcaccataggttgtacccccacccctatagtttaatatggaaccacaagctacagtatacaaaccatcttccaaagacagctgaccctattgtcaatcacagctggttttggtaaaagaaaaatgcagtcaaatcttgcatgaatggttagcaaatcatgtatatatttatgtatgtctttgccataacttggattcacaagatgcaatgtagtaagaggcatcttggtcaggcatctgatacaattgtaaaatcatctgctgcgtccttttatcataaacaaaatcatcaggtgatgtatgcctatgaatagttagcaaaaggtacatatatggttatgtatattaaacacgttctgtgaagaagaaatgtaaccattcaacaagaacaatccaatgatacatttgtcagc

SEQ ID NO: 106605 - DNA, 2784 bp, Zea Mays
ttcttcatcaagttattttcttgctccacggattgcctgctctgatgatctggtccttggcaagatcacactcgtgttcataaactcaccaactcactgacacccccgtactctttcttcttcacccacggccaagatagaactcactggcatgctaggcttcctctttttaattcaccaactccctcctccggcgcatccgcatccgaatctcaatccccacgggcacgaatctgacgctgcgaaaacctttccgccatgaagcaggaggggcggaggcggcaacaccaacaccaacaccacaggccgccgccgcgcctcgagctggctatggcgcacgcgcggggcggcgggggccacggccacggccacgaggaggaagcggaggcggccgtctgcctggacggcgactccgaggcgggcgaagcgcgcagcgcggggcgcgcgccgccgtggcgggaccagctgacggcgcgcgggatggtggcgagcctcgccgtcggcgccatgtacagcgtcatcgtcatgaagctgggcctcaccacagggctcgtccccacgctcaacgtctccgccgcgctcatcgccttcgtcatcctccgcgggtggacgcaggcgctcgcccgcttcggcgtcgctacgcgcccgttcacccgccaggagaacaccgtcgtccagacatgcgccgtcgcctgctacagcatcgccgtcggaggtgggtttggctccttcttgcttgctctgaacaagaggacctacgagatggctggggaggacacggaaggcaaccttccgggaagctacaaggagcctggcattggctggatgaccggcttcctcttcgccgtaagcttcgtcgggattgttgcgctaatacctctaaggaagatttttcttcgatttcagtctaacatatgttggcgctgggatgatttgctctcacctcgttaatctatctctccttcttggtgcacttctctcatggggaataatgtggccactggtcagtgatttgaaaggggattggtatcctgcagatatgccagaaagcagcatgagaagcctgcaaggttacaaggccttcatctgcatagcgctcctcttgggcgatggtctttacaattttgttaaggttgttgcattcactgttaagagtctacttggcagatcaagactgaagaatgcaaagaaagaggaagacattccagtgcttgatgaaattcagcgcaatgagatttttacaagagacagtatccccacatggctagcctactctggatatcttgcactatcagctgttgctgtgtttgccattcccttgatgttccatgagatgaaatggtactatgttattatagcatacttattggccccggcattgggtttctgcaatgcctatggtgctggccttactgatatcaacatggcctacaattatggaaaggtcgcgctctttattcttgcggcctgggctgggaaggactctggtgttgtagctggcctagtgggttgtggtttggtgaaatcactggtgtcaatatccgctgatctgatgcatgacttcaagactggacatcttacattaacatcacctagatcaatgattattgctcaggctattggcactgccatgggctgtgtcattggaccactgacatttttactgttctacaaggcttttgacattggaaaccctgatgggtactggaaggcaccatatgctctaatctaccgcaatatggcaattcttggtgtccagggcttctctgctctgcccctgcattgtttgcagctgtgctacggattctttggatttgcagtggcagccaatctgatgagggacctcttgccaccaaagtacggcaaatgggttccattaccaatggcaatgggggttcccttcctagttggtgcgagctttgccatcgacatgtgtgtggggagcttgatggtcttcatctggcacatcattgacagaagtaaagcatctttaatggtgccagcagttgcatctgggttgatatgtggcgatgggctttggatcttccctgaatccttgcttgccttggccaagatcagtccaccattgtgcatggcattcaggtcttcacactagagtaacaaaatgctcgacatctgagaacagttccatgtccaatcggagaagctgttggcatgccaagtttgttattaattagctgggatatgatacatgcaggtaggtaaagatgcagtgcctatctggatgttacctacatataatgacgtaatgtggtacccctgtaaaatttatcatatgcaagatgatacatcacattagagcaatggtaagtttgagaatttcaccccagtggtaatggatggatgcaagagctagcagtagccaaaattttgcaccataggttgtacccccacccctatagtttaatatggaaccacaagctacagtatacaaaccatcttccaaagacagctgaccctattgtcaatcacagctggttttggtaaaagaaaaatgcagtcaaatcttgcatgaatggttagcaaatcatgtatatatttatgtatgtctttgccataacttggattcacaagatgcaatgtagtaagaggcatcttggtcaggcatctgatacaattgtaaaatcatctgctgcgtccttttatcataaacaaaatcatcaggtgatgtatgcctatgaatagttagcaaaaggtacatatatggttatgtatattaaacacgttctgtgaagaagaaatgtaaccattcaacaagaacaa

SEQ ID NO: 106606 - DNA, 2749 bp, Zea Mays
ttcttcatcaagttattttcttgctccacggattgcctgctctgatgatctggtccttggcaagatcacactcgtgttcataaactcaccaactcactgacacccccgtactctttcttcttcacccacggccaagatagaactcactggcatgctaggcttcctctttttaattcaccaactccctcctccggcgcatccgcatccgaatctcaatccccacgggcacgaatctgacgctgcgaaaacctttccgccatgaagcaggaggggcggaggcggcaacaccaacaccaacaccacaggccgccgccgcgcctcgagctggctatggcgcacgcgcggggcggcgggggccacggccacggccacgaggaggaagcggaggcggccgtctgcctggacggcgactccgaggcgggcgaagcgcgcagcgcggggcgcgcgccgccgtggcgggaccagctgacggcgcgcgggatggtggcgagcctcgccgtcggcgccatgtacagcgtcatcgtcatgaagctgggcctcaccacagggctcgtccccacgctcaacgtctccgccgcgctcatcgccttcgtcatcctccgcgggtggacgcaggcgctcgcccgcttcggcgtcgctacgcgcccgttcacccgccaggagaacaccgtcgtccagacatgcgccgtcgcctgctacagcatcgccgtcggaggtgggtttggctccttcttgcttgctctgaacaagaggacctacgagatggctggggaggacacggaaggcaaccttccgggaagctacaaggagcctggcattggctggatgaccggcttcctcttcgccgtaagcttcgtcgggattgttgcgctaatacctctaaggaagatcatgataattgactacaaattaacttacccaagtggtactgcaacagctgttcttataaatggattccacacaactcatggagatgcaacggcaaagcagcaagtgaatgggttcacaaaatactttgcaatcagcttcttttggagcttcttccagtggttttactcaggtggagacaactgtgggttttcacagtttcccacttttggacttagagcttggaaacaaacatttttcttcgatttcagtctaacatatgttggcgctgggatgatttgctctcacctcgttaatctatctctccttcttggtgcacttctctcatggggaataatgtggccactggtcagtgatttgaaaggggattggtatcctgcagatatgccagaaagcagcatgagaagcctgcaaggttacaaggccttcatctgcatagcgctcctcttgggcgatggtctttacaattttgttaaggttgttgcattcactgttaagagtctacttggcagatcaagactgaagaatgcaaagaaagaggaagacattccagtgcttgatgaaattcagcgcaatgagatttttacaagagacagtatccccacatggctagcctactctggatatcttgcactatcagctgttgctgtgtttgccattcccttgatgttccatgagatgaaatggtactatgttattatagcatacttattggccccggcattgggtttctgcaatgcctatggtgctggccttactgatatcaacatggcctacaattatggaaaggtcgcgctctttattcttgcggcctgggctgggaaggactctggtgttgtagctggcctagtgggttgtggtttggtgaaatcactggtgtcaatatccgctgatctgatgcatgacttcaagactggacatcttacattaacatcacctagatcaatgattattgctcaggctattggcactgccatgggctgtgtcattggaccactgacatttttactgttctacaaggcttttgacattggaaaccctgatgggtactggaaggcaccatatgctctaatctaccgcaatatggcaattcttggtgtccagggcttctctgctctgcccctgcattgtttgcagctgtgctacggattctttggatttgcagtggcagccaatctgatgagggacctcttgccaccaaagtacggcaaatgggttccattaccaatggcaatgggggttcccttcctagttggtgcgagctttgccatcgacatgtgtgtggggagcttgatggtcttcatctggcacatcattgacagaagtaaagcatctttaatggtgccagcagttgcatctgggttgatatgtggcgatgggctttggatcttccctgaatccttgcttgccttggccaagatcagtccaccattgtgcatggcattcaggtcttcacactagagtaacaaaatgctcgacatctgagaacagttccatgtccaatcggagaagctgttggcatgccaagtttgttattaattagctgggatatgatacatgcaggtaggtaaagatgcagtgcctatctggatgttacctacatataatgacgtaatgtggtacccctgtaaaatttatcatatgcaagatgatacatcacattagagcaatggtaagtttgagaatttcaccccagtggtaatggatggatgcaagagctagcagtagccaaaattttgcaccataggttgtacccccacccctatagtttaatatggaaccacaagctacagtatacaaaccatcttccaaagacagctgaccctattgtcaatcacagctggttttggtaaaagaaaaa

SEQ ID NO: 106607 - DNA, 2702 bp, Zea Mays
tttcttgcgcaattgctcgcccttgctgacgaggagcagcacctcatactgaagcagcacccaggtatggaatcactcgtattggcctgtcaaaatcggagatgctcctcctgtttgtccatcatttccccctcttttcggtgacctccacatttcttcctctgtcactggctcagtgctgtgtgttgtccttctggctggagcaagcggagcccagcaggaggggcggaggcggcaacaccaacaccaacaccacaggccgccgccgcgcctcgagctggctatggcgcacgcgcggggcggcgggggccacggccacggccacgaggaggaagcggaggcggccgtctgcctggacggcgactccgaggcgggcgaagcgcgcagcgcggggcgcgcgccgccgtggcgggaccagctgacggcgcgcgggatggtggcgagcctcgccgtcggcgccatgtacagcgtcatcgtcatgaagctgggcctcaccacagggctcgtccccacgctcaacgtctccgccgcgctcatcgccttcgtcatcctccgcgggtggacgcaggcgctcgcccgcttcggcgtcgctacgcgcccgttcacccgccaggagaacaccgtcgtccagacatgcgccgtcgcctgctacagcatcgccgtcggaggtgggtttggctccttcttgcttgctctgaacaagaggacctacgagatggctggggaggacacggaaggcaaccttccgggaagctacaaggagcctggcattggctggatgaccggcttcctcttcgccgtaagcttcgtcgggattgttgcgctaatacctctaaggaagatcatgataattgactacaaattaacttacccaagtggtactgcaacagctgttcttataaatggattccacacaactcatggagatgcaacggcaaagcagcaagtgaatgggttcacaaaatactttgcaatcagcttcttttggagcttcttccagtggttttactcaggtggagacaactgtgggttttcacagtttcccacttttggacttagagcttggaaacaaacatttttcttcgatttcagtctaacatatgttggcgctgggatgatttgctctcacctcgttaatctatctctccttcttggtgcacttctctcatggggaataatgtggccactggtcagtgatttgaaaggggattggtatcctgcagatatgccagaaagcagcatgagaagcctgcaaggttacaaggccttcatctgcatagcgctcctcttgggcgatggtctttacaattttgttaaggttgttgcattcactgttaagagtctacttggcagatcaagactgaagaatgcaaagaaagaggaagacattccagtgcttgatgaaattcagcgcaatgagatttttacaagagacagtatccccacatggctagcctactctggatatcttgcactatcagctgttgctgtgtttgccattcccttgatgttccatgagatgaaatggtactatgttattatagcatacttattggccccggcattgggtttctgcaatgcctatggtgctggccttactgatatcaacatggcctacaattatggaaaggtcgcgctctttattcttgcggcctgggctgggaaggactctggtgttgtagctggcctagtgggttgtggtttggtgaaatcactggtgtcaatatccgctgatctgatgcatgacttcaagactggacatcttacattaacatcacctagatcaatgattattgctcaggctattggcactgccatgggctgtgtcattggaccactgacatttttactgttctacaaggcttttgacattggaaaccctgatgggtactggaaggcaccatatgctctaatctaccgcaatatggcaattcttggtgtccagggcttctctgctctgcccctgcattgtttgcagctgtgctacggattctttggatttgcagtggcagccaatctgatgagggacctcttgccaccaaagtacggcaaatgggttccattaccaatggcaatgggggttcccttcctagttggtgcgagctttgccatcgacatgtgtgtggggagcttgatggtcttcatctggcacatcattgacagaagtaaagcatctttaatggtgccagcagttgcatctgggttgatatgtggcgatgggctttggatcttccctgaatccttgcttgccttggccaagatcagtccaccattgtgcatggcattcaggtcttcacactagagtaacaaaatgctcgacatctgagaacagttccatgtccaatcggagaagctgttggcatgccaagtttgttattaattagctgggatatgatacatgcaggtaggtaaagatgcagtgcctatctggatgttacctacatataatgacgtaatgtggtacccctgtaaaatttatcatatgcaagatgatacatcacattagagcaatggtaagtttgagaatttcaccccagtggtaatggatggatgcaagagctagcagtagccaaaattttgcaccataggttgtacccccacccctatagtttaatatggaaccacaagctacagtatacaaaccatcttccaaagacagctgaccctattgtcaatcacagctggttttggtaaaagaaaaa

SEQ ID NO: 106608 - DNA, 459 bp, Zea Mays
atcgactgggctgggatttacaaccgatttgaactccaattggcgaactggataccgaaatcagaggttaagttcaatgaattcgactaaaaccttcacacgagtggatggaatcttgggatgatatatacaaaattccatggagtagatgtccgaacaagcacgacgacgcaataggccatctacctaccggccaagcgagaaaaatagtttcctaaccaatcgagaagggaaccatgtccccctaaacaaatctaaaacaatgacgtgtcagaatctcaccttgcgtgccctccctcctggcggtggcggcggcgctcatcccaccggaggccgacggcttgcagtccggcgggtcctcgaagagcgacctcgacaggctcttgtgggctaacctgatgtcgaacagggaccccgggttcctggtcctggacgaggatgcccttgacgagtgaaagg

SEQ ID NO: 106609 - DNA, 1432 bp, Zea Mays
gggacgatggggcgcttcgtcttcgtcctgctaatcctgatgtgctgttcctcctcccgattcacaggtgcctacgaccccatagatccgaacgggaacatcacgatcgtctgggattttcagagtctcgacgtcgcgggcatgaccccgtacacggtcatggtgagcatccacaactaccagatgtaccgacacatcgagcgtccggggtggcggctgagctggagctgggccggcaaggaggtcatctggagcacgacgggcgcggagacgacggagcagggcgactgctcccgcgtcggcagcgggggcagccgcccgcattgctgccagaagcggcccgtcatggtggacctgccgcctggcacgccgtacaacatgcaggtcgccaactgctgccggggcggcgtgctgtcgtctctcgtccagagcgacctgacgtccgccgccgcgttccagatggtggtcggcgagttcgccctcgccagggacagcggcggcaaggagcccgagaagccgtggcagttcgacatgggcgtgccggggtacacctgcagcaacgcgaccacggtggccccgaccaggatcaaggtcgacaagaaccgctacgtccaggcgctccaggatcgagctgaactccgtgcagtgacatggcaggtgacctgctcgtactcgcagtaccgggcgtcggcggcgccgtcgtgctgcgtctccatgacgaccttctacagcgagacgatcgtagattgcccgcggtgcagctgcggctgccaagggtccccaccgtcgccacaatgcgtcagcgtcgatcaacaacaaccatggttgccggccgtcggcgacgacgagccgtcgtcggcgccgatcgtctggtgctccgagcacatgtgcccgatccgggtgcactggcacgtgaagacgaactaccgcaagtactggcgggtgaaggtgacggtgtccaactacaacctggcgaggaactacagcgactggaacctggtgctgcagcaccccaacctgcggagcctgacgcagctgttcagcttcaactacaggcctctcgtcgagtacggcgcctacaacgacacggggatgttctgggggttacgttactacaacgagatgctgctgcaggacgggaacgtgcagtcggagatgatcctggagaaggagagcgacttcacctattccggtggctgggcgttcccgcggagggtctacttcaacggccaagagtgcgtcatgccgccggcggaccagtaccccgtactgcccaacggagcctcggctttgcgggggcatttttgcttcctgctgctactcttcttcgttgtggtgtagactcgtttgcttcagaaacttgctagctagcaaggctgtccgcataaatagcgtttatacgttttaacatttgggtttttttttcttgaaa

SEQ ID NO: 106610 - DNA, 1125 bp, Zea Mays
ggctcggacggtgctttggtgcttgctaaccgagtagcggcgctgcctgtctggcatcggctgcgtgcaggagcggaggggcttcttgttctgcaaggaggacagggcgatcctgtgccgggagtgcgacgcgccggtgcacagcgccagcgacatgacgaggcggcacagccggttcctgctcaccggcgtgcgcctctcgtcagcgccggtggactctgcgggcccatccgaagaggaggagcaggagaacagccgcggcccctgcaacgacgaatcctgcagcagcggcagcggcgccggcggcgcgaccacggcgaccgccagcgacgggagcagcatctccgagtacctgaccaagacgctgcccgggtggcacgtcgaggacttcctcattgacgacgcgtccgctggcgacgtcggcgcctgctcggatggcctctatcaggtcggttcagttctatcatcccagccgtcggttcggtgccatgcaaatactgctgcaagattctagtcttctgcggcgtgcatgaagaaacctttaactgaggcgaacctttgactaacgcgtgtttgaatgcacagctcctaaaattagctgaaaatattcaaaagctaaaatacaagtcttctatagcgtgcaaagctttgactaaggcgttcctgagagcgccacgaacattttgcgaagaagtctggtcctgtcttgggccgccatttgtacagagccgcagaggccaaacgcgccatacgtgtcgccgccggccgtttcgccggtcatctaccccctatctactatacaatcttcgggacaaaatggacagatcagtggggtgctgcaagaagcttacctgccgtggacggagcgggagcaggtgcaaactgacgtcgcagacgagcgggccagctgggagcggtgggtgccacagatgcatgcggagttcggcggcggcggcaagcgacctagagcgtcgccttcgcctccctgttcgtactggtgattggtgaaaagttcgccgtcttcagcaagatgatttgtattgggctaattagtagagctactgtaggaacgaccgaaaaatgagccaaaaaagtaacggcctccatcgagctcgttttaaatta

SEQ ID NO: 106611 - DNA, 1034 bp, Zea Mays
ctacctatctctctctcacgcagtcacgccccgccgccccgccgcctttttatgattaatcagcgagagtccttttgcgccgcgcggatcgcatactagagaggaggttgagcggagtaggcggcggccagcaatgaaggtacagtgcgacgtgtgcacggccgaggcggcctccgtcttctgctgcgccgacgaggccgcgctgtgcgacgcatgcgaccgccgtgtccaccgcgccaacaagctcgcggggaagcaccgccgcttctccctcctgcacccgtgttcttcctcttcctcctccgccgcgcacaagccgccgctctgcgacatctgccaggagcggaggggcttcttgttctgcaaggaggacagggcgatcctgtgccgggagtgcgacgcgccggtgcacagcgccagcgacatgacgaggcggcacagccggttcctgctcaccggcgtgcgcctctcgtcagcgccggtggactctgcgggcccatccgaagaggaggagcaggagaacagccgcggcccctgcaacgacgaatcctgcagcagcggcagcggcgccggcggcgcgaccacggcgaccgccagcgacgggagcagcatctccgagtacctgaccaagacgctgcccgggtggcacgtcgaggacttcctcattgacgacgcgtccgctggcgacgtcggcgcctgctcggatggcctctatcagggacaaaatggacagatcagtggggtgctgcaagaagcttacctgccgtggacggagcgggagcaggtgcaaactgacgtcgcagacgagcgggccagctgggagcggtgggtgccacagatgcatgcggagttcggcggcggcggcaagcgacctagagcgtcgccttcgcctccctgttcgtactggtgattggtgaaaagttcgccgtcttcagcaagatgatttgtattgggctaattagtagagctactgtaggaacgaccgaaaaatgagccaaaaaagtaacggcctccatcgagctcgttttaaatta

SEQ ID NO: 106612 - DNA, 456 bp, Zea Mays
atacctgttagaattactggtgcttaggatcgattcctaagtccctagaataccaatccgtctgtaactcaaagtaaaatcttgatgacgtgtagatctgatctactatctactgagaggaacggggaaacacacctttattgttgttgctatcttcataccgtcgccctgcagagaagcagcaggcatcgggatccgagccgctgtaggttgtcgcgtttccaaacactccgacgcctaggcgatggggcctctgaggactagggttttggggcgaggtactagcgttagtctttcctgcgaccccttagtcctatatttatagcgtcgtgtgcctgggggctccaccgaggttagcgtgggccctcccaatcaagggcccatttaaagagatagatagtaggtttagcccaatccggtcactgatgaccagctgttgaggacacacccaacaat

SEQ ID NO: 106613 - DNA, 2004 bp, Zea Mays
cacggactccggcagccattcaaggctccaccaacaaaacgctcatccccttcctgattctcggcctccgtctccgcctcttcctcctcgcctccaacgccgccaccacagccccggccccgtgttgttcctgcaccccacccgtcctgcgaggctcctccgccatgccgtcatacgcgcaccaccatagcagccctctggatgataccaggatggacgcgctgaagtgtaacaacaacagcgccccgccggaggagaccgcggaggacgccgacgccgccggggcgctcgtcgagaaagacgggttctcggtcgaggacttgctggacctcgaggagtttggcgagcctgacaaggacggcgccgagcctgaggacgatgacgccccgccggtacccgccgcggccgaggagaggtcgaaagacgactcgcagccgttgtcggtcgtgacgtacgacctcccgtcgccgccgccggagatggttgaactgccgtcgcatgacgtcgaggagttggagtgggtgtcccgtatcatggacgactcgctctctgagctgccgccgcaggcgcagcctccccccgctgtggttgcgtcgttggctgggcggcccccgcttgcgcagcagcggcggccgttcgcgcacgacggtgcgtaccgggccgtggcgccgccgcccggcccgctgcggacgccgaccatctgtgcgctgtcaacggaggcgatgataccggtgaaggcgaagcgcagcaagcggtcgcggggcccggcgtggtggcggtcgggcgccccgttcttgtccgactcggcctcgtcctcgtcgacaacgaccacttcctcgtgctcatcgtcaggttcgttctcgccgttccttcgtctggactcgtccccgttcggtgggctggaggtcggcgagggctattacggccacctcctgccgcggccgccgtcgaagaagtccaagcacggcgccaagggcagcaagcacaagcccaagaagcgcgggcgcaagccgaagcacctccctaccaactcgtccggcgccggcgcggccgcgtcgcagcccgggccgagcgaccgccgctgcagccactgtggcgtgcagaagaccccgcagtggcgcgcggggcccgagggcgcaaagacgctgtgcaatgcgtgcggcgtccgctacaagtcgggccggctcctgcccgagtaccgcccggcgtgcagccccaccttcgtgagcagcatccactccaactcccatcgcaaggtcctcgagatgcgccgcaagaaggagggcgacatggtcgccaccgccgcgccggccgtggcgtcgttctgagctgcactcgctgtcagcaaggacgctggccacccagcggtggctgtacatttttttttcttgccataatggccctgtaccgtacctgaactctcctcccctcactcatcctagtgtggtcgttgtagtcccggttgggttaattagagtttaggagtctcaattaggccaggttagttttagctttggttccggttaggtttctactgcgacagctgcggcgcagaacttcaattcgtagcatttctaaaaagtagtttctatttcgtcttcctttctccgagtggagtaggtcgtttggtccatccatcaatggccgaaccggactgctggggtactccaccactgatgaggagggctgttgctggtgttggaatctggaaggcagaagacgagtctgttcgttcggccaaggaagaagagtgcaccttgcacttggactgtatgtattgggacaggtgcatgttgcgtgcacccttggttacatacatcacatggtgttgtcacccgtaacgacatgataggcctagttaggagagctgagtggtggtagcgaggtgttgaagcaagaaactatgactttagcttgctatctgtgtgattgcgatctgtgtgaggctgaggtaaaaaaatatgaatggaccaatggaacagtaaagtcagtggaggaaagctc

SEQ ID NO: 106614 - DNA, 1476 bp, Zea Mays
cacggactccggcagccattcaaggctccaccaacaaaacgctcatccccttcctgattctcggcctccgtctccgcctcttcctcctcgcctccaacgccgccaccacagccccggccccgtgttgttcctgcaccccacccgtcctgcgaggctcctccgccatgccgtcatacgcgcaccaccatagcagccctctggatgataccaggatggacgcgctgaagtgtaacaacaacagcgccccgccggaggagaccgcggaggacgccgacgccgccggggcgctcgtcgagaaagacgggttctcggtcgaggacttgctggacctcgaggagtttggcgagcctgacaaggacggcgccgagcctgaggacgatgacgccccgccggtacccgccgcggccgaggagaggtcgaaagacgactcgcagccgttgtcggtcgtgacgtacgacctcccgtcgccgccgccggagatggttgaactgccgtcgcatgacgtcgaggagttggagtgggtgtcccgtatcatggacgactcgctctctgagctgccgccgcaggcgcagcctccccccgctgtggttgcgtcgttggctgggcggcccccgctgcagccactgtggcgtgcagaagaccccgcagtggcgcgcggggcccgagggcgcaaagacgctgtgcaatgcgtgcggcgtccgctacaagtcgggccggctcctgcccgagtaccgcccggcgtgcagccccaccttcgtgagcagcatccactccaactcccatcgcaaggtcctcgagatgcgccgcaagaaggagggcgacatggtcgccaccgccgcgccggccgtggcgtcgttctgagctgcactcgctgtcagcaaggacgctggccacccagcggtggctgtacatttttttttcttgccataatggccctgtaccgtacctgaactctcctcccctcactcatcctagtgtggtcgttgtagtcccggttgggttaattagagtttaggagtctcaattaggccaggttagttttagctttggttccggttaggtttctactgcgacagctgcggcgcagaacttcaattcgtagcatttctaaaaagtagtttctatttcgtcttcctttctccgagtggagtaggtcgtttggtccatccatcaatggccgaaccggactgctggggtactccaccactgatgaggagggctgttgctggtgttggaatctggaaggcagaagacgagtctgttcgttcggccaaggaagaagagtgcaccttgcacttggactgtatgtattgggacaggtgcatgttgcgtgcacccttggttacatacatcacatggtgttgtcacccgtaacgacatgataggcctagttaggagagctgagtggtggtagcgaggtgttgaagcaagaaactatgactttagcttgctatctgtgtgattgcgatctgtgtg

SEQ ID NO: 106615 - DNA, 1890 bp, Zea Mays
cacggactccggcagccattcaaggctccaccaacaaaacgctcatccccttcctgattctcggcctccgtctccgcctcttcctcctcgcctccaacgccgccaccacagccccggccccgtgttgttcctgcaccccacccgtcctgcgaggctcctccgccatgccgtcatacgcgcaccaccatagcagccctctggtaaggaacggtgccggccgtgttgtccgtagacgattgagggggacagaaagagattctttggatgtttttctttgtttcctttatttataccgagagataaacaaaaaaaaaaacccagagacgaaaaaactttttttcttgaaccgccctgcttcccctctggtgttgggaatttgtgattttgacatacgacctgtatgggtatttttccggccggtgaaggatgataccaggatggacgcgctgaagtgtaacaacaacagcgccccgccggaggagaccgcggaggacgccgacgccgccggggcgctcgtcgagaaagacgggttctcggtcgaggacttgctggacctcgaggagtttggcgagcctgacaaggacggcgccgagcctgaggacgatgacgccccgccggtacccgccgcggccgaggagaggtcgaaagacgactcgcagccgttgtcggtcgtgacgtacgacctcccgtcgccgccgccggagatggttgaactgccgtcgcatgacgtcgaggagttggagtgggtgtcccgtatcatggacgactcgctctctgagctgccgccgcaggcgcagcctccccccgctgtggttgcgtcgttggctgggcggcccccgcttgcgcagcagcggcggccgttcgcgcacgacggtgcgtaccgggccgtggcgccgccgcccggcccgctgcggacgccgaccatctgtgcgctgtcaacggaggcgatgataccggtgaaggcgaagcgcagcaagcggtcgcggggcccggcgtggtggcggtcgggcgccccgttcttgtccgactcggcctcgtcctcgtcgacaacgaccacttcctcgtgctcatcgtcaggttcgttctcgccgttccttcgtctggactcgtccccgttcggtgggctggaggtcggcgagggctattacggccacctcctgccgcggccgccgtcgaagaagtccaagcacggcgccaagggcagcaagcacaagcccaagaagcgcgggcgcaagccgaagcacctccctaccaactcgtccggcgccggcgcggccgcgtcgcagcccgggccgagcgaccgccgctgcagccactgtggcgtgcagaagaccccgcagtggcgcgcggggcccgagggcgcaaagacgctgtgcaatgcgtgcggcgtccgctacaagtcgggccggctcctgcccgagtaccgcccggcgtgcagccccaccttcgtgagcagcatccactccaactcccatcgcaaggtcctcgagatgcgccgcaagaaggagggcgacatggtcgccaccgccgcgccggccgtggcgtcgttctgagctgcactcgctgtcagcaaggacgctggccacccagcggtggctgtacatttttttttcttgccataatggccctgtaccgtacctgaactctcctcccctcactcatcctagtgtggtcgttgtagtcccggttgggttaattagagtttaggagtctcaattaggccaggttagttttagctttggttccggttaggtttctactgcgacagctgcggcgcagaacttcaattcgtagcatttctaaaaagtagtttctatttcgtcttcctttctccgagtggagtaggtcgtttggtccatccatcaatggccgaaccggactgctggggta

SEQ ID NO: 106616 - DNA, 1124 bp, Zea Mays
aggtttaggatgcatcgatccctgtttattcgcataatgaatgctgttgaacaacatgatgattactttaagcaaaaaagaaacacggctcaacaacaaggtttaagttgtttgcagaaggttactgcagtatttcgtatgctaacttatggagtggcagcagatgctacagatgaatatgtacgtattggagaaagtactgcgctggaaagtctaagaaggttcgttaaagttgtaattgacgtttttggtgaggagtatttaagagcacccaatgaaagcgatatacatcggttacttgcacttggcgatgaaagaggatttcctggtatgctgggttcacttgattgcatgcattggaggtggaagaattgtccatcatctttacaaggtcaattttcgggccatcatcacacgcctactataattttagaagcagttgcttcacaagatttatggatttggcatgctttttttggattacctggctctctcaatgacatcaatgttcttcatcgatctcccctgttcgcaaaattatcaaatggagaaagtccacaagtgaattatagaataaataaccatgactgttcaatgggatattaccttgcagatggcatatacccttcttgggcaacattggttaagaccataccagaaccacggggcaataaaagaatctactatgcgaaggcacaagaagcggcacggaaggatgtagaacgagcctttggggtccttcaatctcgttttgccattgttcgtggtccagctcgtttatgggacgaggcgacactaagcaacataatgatagcatgtataattatgcacaacatgattattgaagatgaggaaagagtcgatccggatgaacgttttgagcacggaggagaaaatgtggagccctcccatgagatgacaacagattttgatgaatttcttaagaatcacaagaaaattaggaaccaagaaacacattatcaacttagagaagatctagttgagcacttgtggcaacaccacccagatttatatccttaagttcatttgttaaagttgtttttctatttcctgcaaggtgaacacaatagattatgtaaaggactagataatttactgcatca

SEQ ID NO: 106617 - DNA, 1258 bp, Zea Mays
cccttatccacacacacaaaaaagtacgcgacacaagccacgctctccgcttgtggctaagctgctgcacgcgcggaacgacaaaaatccagcactagccaaagcacaggcgaagaagcaggcgagaggccaccacaaacatggcgaccacggcgtttctacccccggccaagctgccgctgcaggggcgtcggttcgctagccccaaaacggcgggacgtatcagcgtcagggtccctccggcgcgagcgcagcaagagcagcaggtgaaggaggaggaggccgaggtggcgagcgtgccgccgccacaggacgcggagaagcaggcgaggaagggggacgcgcagtccctgccgcggcagcctttggcggagagcaagaacatgagccgcgagtacggcgggcagtggctgagcagcaccacgcggcacgtccgcatctacgctgcgtacatcgacccggtgaccaacgcgttcgaccagacgcagatggacaagctgacgctcatgctcgacccccaggacgagttcgcctggaccgacgaggcctgccagatggtcttcaacgagttccaggacctcgtcgatcactacgagggggctgagctgtcggagtacacacttcggttgatcgggtcagaccttgagcactacatccgcaaactgctgtacgacggggtgatcaagtacaacatgaggtccagagtcctcaatttcagcatgggcaagcctcgcatcaagttcaacagcaaccagataccagaaaagatatagaatgtacttatccaacgcccttaaaagaatggtttctctccattcgattaccgagcaagatgtatactctgcagtcccagatacgatccagagcattccagaattcatattacgcagatgcaaagccatacaccgattctgttggcagaattttgtcacccctgcacagtaataaccacataacgagagtctgggcaaaataagggtttgctcgagtttagataccccttctgtttctagggcactcgaattgggttacagtacacaataccatagtttctgctaatagatacgtatcaccgaataccacatgaggtcagagagttgcacagagacgaccgcgctaacttaccaaacgactttctgaactggatggagtaatggctagtatgggtaaaccctctacaaacattccatgacaactcggtactttttaaattcatcgctccatggtctgaattggtcttctagctcaatgttctaca

SEQ ID NO: 106618 - DNA, 734 bp, Zea Mays
cttgccagactagcttgtttgtttcccgtcatggtgggctggtggccacgggaccctagctatatatacatgacctttctgcctcttggcctggacgagaagtgtcgttgtttcaccgatcaaaccttgttttccgacaaaacacggctgcgttgactctccgccgcaaaacctctatggatttccacgagaaggatgcgcgcagctatgacgcgcatggccctgctcccgccctccccctcgtccgcctgaaccacgtctcgttccagtgcgagtccgtggaagcatcggtcggcttctaccagcgcgtgcttggcttcgagctcgtcaaacgcccggcgtccctcgacttcggaggagcatggatgcacaggtacggcatggggatatatctactgcagcgcggctcggattcgtcgcccaacgctccggcagctgcaagaccgccggcgatcaaccccaagggcaaccacatttcctttcagtgcacggacatggggctcatgaagacgaggctgggtgacatggagctggagttcgtggcggcgcgggtgtgagacggcgagacggtggtggagcagctcttcttccgcgacccagacggcaatgtggtcgaggtctgcgactgcgagaagctccccgtgatacccctcgcagatgcaggcagcaccggccttcttccaaatacgctgctgctgccggtggaaacgaacttgcatggctagttcgtggtg

SEQ ID NO: 106619 - DNA, 833 bp, Zea Mays
aggatcacatggcactatggcaggacagtctccctactgctcataattttacccgcgcctcactagccatcactgtggcaccaagctagtaaatcagcaatccccacagcaacctgcaatgctgtcatgctgaagcgagtcaagcgacagcgacacggaagctgggaacaagagcgcgagaggaattttaccgaacctagatgtgggctgtcagcggactgggcgtccggtgacttgtcggaggcgaggaagacgaagcagaggaagaacgagtcgaagagagacagcagtcgaagagagacagcagatgaagctcagtacctacttgtcacgaagcgaagccagacgatgatgtcgctccaaggatgttgttcatggtgcgatgccttggcatgacactgtcattgtcggcatccaatattcgtccatgtttacaggcgataagatgaacttcaactgtagtagtggagtttatgctgacaatggatacacaagaggagcagttgatgccagtgttagagtcacgggatagatatagtggatgttgttgggattgaatctagacggatgtgaaggagggacgtcgggactagatgagtccttgattggatgctgaaggccatcacgagggagtggttggtgggctaatttagagaggcttcggactaggggtggtagaaggaagctgctggcttggggcgatgttgtttgttttgtcacgagcaacacgaagtaatcttaaagattttatgccactataaatgattagagtattgaatctgatggtacatttataaagaatatcatctataaagaaatactcacttcgcata

SEQ ID NO: 106620 - DNA, 768 bp, Zea Mays
atgcagctctcggtcggggtcgcgcgagagttcttcgcgctgcaggaccgcctcgggttcgacaaggccagcaagaccgtgaactggctcctcgcccagtccaagccggccatcgaccgcctcaatagagcgagattgggttctgaaaggcagttcgtcgcgccgcccaacagaacgcggccggagcagttcgtcgcgccgcgcagcctatcaaaaagggctgttagtgcagaggaggaggtggctggagtggcagcgaggaagggttgtgtgaggcaaattggcggcgatgctgatgagacgaagaaggttacctttgtagaggtgggcggagatgtccctttgaagctgtccaggaggaattcgctggccgcacatgtccctatgacgtggtctaggaggaattcgctgggcgcagatgtccttgtgaggcagtccagcagaaattcgctatgtgctgaggctcaagactgtgaactgaggtcccaagtcacctgttcgcctgttgttgccaagccaagggggaagtctgctcaagccggttctgtagaggtgggcgcagttgtccctttgaggcgttccaggagaaattcactgagagctgccgagtctgaagaagtacaagtggctgtttttgttgacaggaagcgcaagtgcaagaaccaggagaatgataagggtgttgctctcagcgctcaggttggagcttcgtccagagttacaagaagatcaagccatgctctgtcttccttgaaaccaggagaatga

SEQ ID NO: 106621 - DNA, 2500 bp, Zea Mays
ctcgggactagaacccgtgccttctctctccactctttatacttgcccctcctcgacggttcgccaaaaggttcgagacgcgcaccgccagccgatacgaatccgacgagctcgatcgctccacttccccgatcgcacgccaatcagcaccagccaccgtggcgatgacggaggaggcggaggcgaaggcgaagggcaacgcggcgttcgcggccggccgtttcgaggaggctgtccagcacttcagcgacgccatcgcgctcgcgcccgacaaccacgtcctctactccaaccgctcggcggcgtacgcgtcgctctggcgctacgcggaggcgctagatgacgccaagcggaccgtggcgctgaagccggactgggccaagggctactcccgcctcggcgccgcgcaccttggcctcggtgacgcgcccaaggccgtcgaggcctacgagaaagggcttgcgctcgagccgtccaatgaggcgctcaaatccggcctcgcacaggcgcgccagtccgcatcggcgccgagacgtccggtgggctccggggctgacgccgttggcaagatgttccagggccctgagctatggagcaaggtcgcggccgatcccaccacgcgtggctacctcgaccagccggacttcgtgcagatgctgcgggaggtgcagcgaaaccccggcagactgaacagctacctttctgaccaacgaatggttcaggtgctcaccctcatgctgaacatcaagttccagaaccagagcagtggggcgcctgacccggcagcagcacaatcgaacccgccgccaccaaagcagcagccagaggcgaaggcaagagaaccagagccggacccggagcccgagcctatggaggtgacagaggaggataaggagcagaaggagaggaaagcgtcggcgcagaaggagaaggaagcaggcaacgccgcttacaaaaggaaggattttgataccgcgatccagcactacacagaagccatggagctcgatgacgaggatatctcctacatcaccaatcgtgctgctgtttaccttgagatgggaaagtatgatgaatgcattaaggactgtgataaggctgtcgagagaggaagggaactgcatgctgatttcaagatgatctcaagggcacttaccagaaaaggaactgctcttgccaaacttgctaaatcatcgcaagactatgatgctgccattgagattttccagaaggcgttaactgagcaccggaacccagatacactgaaaaaactaaatgatgcagaacgagcaaagaaggagctggagcaacaagagtactatgacccaagaattgctgacgaggagcgagaaaaaggtaatgagttctttaagcagcagaaatatccagaagcagtgaaacattacaccgaagctctcaggagaaaccccaaggaccccagggtatacagcaatagggctgcctgttacaccaagctaggggcccttcctgaaggtctgaaagatgctgagaagtgcattgagctagatcccacattctccaagggatacacaaggaaaggtgctatccagtttttcatgaaagaatatgacaaagcgctggaaacttatcaagctggcctaaagcatgacccgaaaaaccaggagttacttgatggtgtaaggaggtgtgttgaacagatcaacaaggcgagcagaggcgaactcagtgaggaggaactgaaagagagacagaacaaagccatgcaagaccctgagatccagaacatcctgactgatccgatcatgcagcaggttttgacggatctgcaggagaaccctcgggctgcgcaggcgcacctcaagaaccccggagtgatgcagaagatccagaagctcgtcagcgcagggatagttcagatgaagtagacggtggctggaatgtccgggttcagatctgggacctgtgctggaaatgctgtgaacttgatcattgtttcgcattttggaaactgaacccttttgtgcgaccatagtttggtcatggctgttaatgatccatatatgggttttcccatccgatatgttccaattcgtgcctttccccctggaatgcccgtgaaaaaggaagaatattcatcaaccttgcactcgagcagtttgtagagtcgtttaatgcgatggtatggtaccgtactaccgtggtaacatccagttgaacagcggcagaggtagtatttgcccccctcgtttgccaccggatagttactaggataatgattggtaccatccggataggcatcagggaacatatgaggtacactatgcaatcaagacgtgaaagtttttttttttaatattagtacataggaaaggtgagagtgagaggctgttttgaaacataatattatagatgaggtgatgtaaacataatagatggaaccatacatacatattagtagtgcaactatataaccaagacacaagtatataaatgagagtgaaatggttgtttaaaatat

SEQ ID NO: 106622 - DNA, 2028 bp, Zea Mays
tccccaccaccaccaccacctttctcctcactgcctagacggaaaagcatcgcgcgatcgccactgctccccccagagccagtcagccagccagccagcggcgcacgaaggaacgcacggtgcacttccgttccgtctcatcgtcatcagctatgcatcgcccgcgcagccatcgtctctgccgctcgcgcgtcgccgcagctgtttccgccgccatcatcatcggtctaggcgcggcgggcgtcggcgaagcggccaccggcacgttcatctacgccggctgctcgccgtccaagtaccagccgggcacccccttcgaggccaacctggagtcgctcctggcctccatggccggcgcggcgcccaaggccgggtacagcagcttcacggcgggtgccggcggcgttggcaacggcacgacggcgtacgggctgtaccagtgccgcggggacctggcgggggccgactgcgcggcgtgcgtgcgggacgcgctgggccagctgggccaggtgtgcgcggcggcgtacgcggcgtcgctgcagctggagggctgctacgtgcggtacgacggcaccgacttcctgggcacgcccgacgccgccatggtgtaccgcaagtgcagcaccagcagcagcagcgacggcgagttcctcagggaccgggacgccgtgctcgccggggacctgctgcagggcggcgcggccaataatggtagtagtaacgggtacaaggcgggcagctccggaagcgtgcagggcgtggcgcagtgcctcggcgacctcgcggcgcccgactgcgcggcgtgcctggcgcaggcggtcggccagctcaagggcacgtgcggcaccgccctggccgccgacgtctacctggcgcagtgctacgtcaggtactgggccgacggctactacttccgccccacacaagattattcgcaggacgacgtcgggaggactgtggccataatcgtcggaatcttagcagggctggcgatcttcgtggtgttcatctcgttcctcagaaaagcatgctagcttggccactggaaacggcgggcttccacattccctctcagacggtggcacgaggacggcataggggagaaggagggatcgggaacgagattggcctgcatgcaaaatgcttcacaaagcacatgtagtctggttttgttagcaatagatttgggctatcgatcagaggagcactaccttgatttgggtcatcattttcggtccactgattatggcctacttgcgatcacccatcgcaacagcattcacatctgatcttttaatcatttcggtacttggatgaagatcagagttgagttggtattactactttacataggcacgagcacaagtgcatgatatgtacaaccgtcgatgggtccacagtccccagatgatacgagctcgctcacagggacatggggcagcagacctcggggggctttgctatttgatctttaccatcaagcactgtgtccccgagccatcgggctccacctcgccgagttgtagctgctgcaagcgctgatgctcgactccctcattttcatctcagatataccactgttgcagatgtttgcaaacgctctcatgtacttcatgccgtactgagtaagtgaaccacactgggactcgaaaatccgcacctaagcaaaagccaccaagtgaaatgagttaggcagcgcactgacaggatgggaatgtgcgcacagcagtaaggagcttcattttcatgtgcatgccttgtatcaagagtcgaataagaaaaatcaccatactcaccatcctcttcaaacagtcccagtcatcgactaatggttgaccagaggttctaacagcctcaagcatcgaaggccctttctcaaatccgaagacgagcctcccaacgaaatcgatactgctgtcaagatgcttcctgtgctgaacagtttctttaatctctatgagagccctcagcttctcttcggtccccccatttaactgctcgtactgaaagaaagaactgaacattagg

SEQ ID NO: 106623 - DNA, 1328 bp, Zea Mays
tccccaccaccaccaccacctttctcctcactgcctagacggaaaagcatcgcgcgatcgccactgctccccccagagccagtcagccagccagccagcggcgcacgaaggaacgcacggtgcacttccgttccgtctcatcgtcatcagctatgcatcgcccgcgcagccatcgtctctgccgctcgcgcgtcgccgcagctgtttccgccgccatcatcatcggtctaggcgcggcgggcgtcggcgaagcggccaccggcacgttcatctacgccggctgctcgccgtccaagtaccagccgggcacccccttcgaggccaacctggagtcgctcctggcctccatggccggcgcggcgcccaaggccgggtacagcagcttcacggcgggtgccggcggcgttggcaacggcacgacggcgtacgggctgtaccagtgccgcggggacctggcgggggccgactgcgcggcgtgcgtgcgggacgcgctgggccagctgggccaggtgtgcgcggcggcgtacgcggcgtcgctgcagctggagggctgctacgtgcggtacgacggcaccgacttcctgggcacgcccgacgccgccatggtgtaccgcaagtgcagcaccagcagcagcagcgacggcgagttcctcagggaccgggacgccgtgctcgccggggacctgctgcagggcggcgcggccaataatggtagtagtaacgggtacaaggcgggcagctccggaagcgtgcagggcgtggcgcagtgcctcggcgacctcgcggcgcccgactgcgcggcgtgcctggcgcaggcggtcggccagctcaagggcacgtgcggcaccgccctggccgccgacgtctacctggcgcagtgctacgtcaggtactgggccgacggctactacttccgccccacacaagattattcgcaggacgacgtcgggaggactgtggccataatcgtcggaatcttagcagggctggcgatcttcgtggtgttcatctcgttcctcagaaaagcatgtatgatccgctaagcctaagcgtcgtccaatcacgcatgcgcgcgggatcgatccagggccttgccttaactaacctcgtgcacgcaactggtgtctcaataggctagcttggccactggaaacggcgggcttccacattccctctcagacggtggcacgaggacggcataggggagaaggagggatcgggaacgagattggcctgcatgcaaaatgcttcacaaagcacatgtagtctggttttgttagcaatagatttgggctatcgatcagaggagcactaccttgatttgggtc

SEQ ID NO: 106624 - DNA, 1110 bp, Zea Mays
gtccgggctcactcctgcgcgcttccgttgcgattgcgactttgcaccattaacactccctgcgtgcggtgcgtctgcttagggaggggaaggacagactctcaacgaaggagagaccttcccgcagtttctctctctcttgcaatcctcctcgccatgctaaggaggtcccgccacggcggggtccgtctcggccggaatctgctcggcctgtggcggcgggcgctctgcggccggcgccggcgccggggaggctactgccgcctgcagcagcagcagcagcccacctgcgccggcagcggctgcacgcccgggcgcggcgctaccgcgaggaagctcgcgccggtgctgcggtggggccggtcgctggcgcggcgcctgcggctcgggtggagggccgccggcggcgggcaccggatgctgccggacggcgacggcgagcccgcggtgagcacgcccaaggggcaggtggccgtgtacgtcggcggcgagggcgaggcgtcgcagtcgctgcggtacgtggtgcccgtggtgtacttcaaccaccccacgttcggcgagctgctgagggaggccgaggaggagttcgggttccagcacccgggcgtcatcagcatcccctgccccgccgcgcggttcgagcgggccgcggccctcgccgccgcggccaagaagggcttcggcaggtggtaggcaggcaggcggggcgcgcggtagtcgttgattagggagggagagacgccgcacgacgacggaggccccctgaccgccgccggccggtggcggaggcggatgatggtgtatatgcatgcatgtgcgctttgcttcagaaacgtacggggctgcctggcctaggcctagctgattttgttctctggattcttggtcctggtgcatccatccggttacttgtttcgtccatgtctactgcttcttgtcttcggattcaccctcagaccactggaaggattcacacaactgttgcttgctggacgtgtgtgctgaattcaccacgtttgccaattccgctagtagtagtgtgtacgtattacgggagcaaatgctctgtgtgtccctctccctctcttgacttaactgcaaacttctcat

SEQ ID NO: 106625 - DNA, 1507 bp, Zea Mays
gtttctggcacctactcattctgaatggcggaccttacagacatcggttgctgctgttgctttagctttttaaggaagcccagtgtacctgtatgtgaacatcaggatgctgatggcatgttaactgaagatttactgaagcgtcaatcagctgaagatcatgatggaagtttctacactggagatgatcctggggatgatcttgatagaagcttctacaatggagatgatcatgatagaagcttctacgatagagatgattctgactatcttgacggaagtgatgatggaccatcaaggaagagttctgaagatattatacagttaagagctcaaaatggctttgcatgtagagaggtcccagttaaagagactaaaaaagtatttcgctcagaggatgaaaatggtaataagatggtcaaccaatatgtccacttgggaaagatcggttctggaagctacggaaaagtggttctgtacagaaacattaaagatgggaagctgtatgcagtaaaggttctgaataagccatacatgatgaaagtacatgttgtacatacaaaaactgccatgacagatgttcttcgagaggtatccataatgaaaatgttgaaccaccccaacattgtaaatctcgttgaagtgattgatgacccaaacatggataaattttacatggttcttgagtatgttgaaggaaaaatggtttgtgataatggtttagaagaagctactgcaagattttttttgcgagacataatatctggtcttttgtatcttcactcccataatgttattcatggtgatatcaagccagacaatctcttggttaccagtaccggcaacgtgaagatcggggatttcagtgttagccaggtttttgaggatgatgatgatatgctttggagatctcctggcactcctgttttcactgccccggagtgctgtcaaggttcagcctaccatggtagagcatctgatacatgggcagttggtgtaactttatattgtatggtctctgggcactatccatttctgggggatacattgcaggaaacttatgataagattgccaatgatcctgtggaattacctggcgacgtgaatccccaacttgccgatttgctcctaaggcttctctgcaaagatccaggagatcgcatcacactgcgtgctgcggctgagcatccttgggtcgctggggatgaggggccagtccctgaattcatctgtagatgtgggtttggccgcaggaagaggaatgatgtccgggaagaagttcaataacaaagcatcctcggatggtctaataggtctagcgtagataattgatgatcggcaaagcgaagccctgacgatgagttcgttgttccgtgttccctgtttctaatacgcgctcgactgaacatatttctttttgctacagaatatatactgcgtaaccctatgccagtaaggcaacgtttgtcacagtttcacgttgtcaaacgcagcttaacgggtgatg

SEQ ID NO: 106626 - DNA, 1758 bp, Zea Mays
cctccgtgtatcgatccggctagctgacgacagcgagggagcttccgatcccgccagcacacatcaagttgtttaattttcgatccattcgcgcgaagcgggccggccggccggcgaggaaagggtggtggtgcggcgcgaagcgtttcggccggtgctccagtaccttgcagtcggcgtgctaaaaggagtgtgtgaagccgccggcgcagctagctttggcacgagcacgaccgcaccaggccagctcagtgaggtttgcttgacgtctaccagctgcgcataataacttggctcggaagaagaagaagatggacgctttcacacatgttcctcccggctttcgtttccaccctaccgatgaggaactcgttgactactaccttaggaaaaaggtagcactgaagaagatagatttggatgtgataaaagatgtggatttgtacaagattgagccttgggatctgcaagaaaagtgcaggattggaagcgaagagcagaacgagtggtacttcttcagccacaaggacaagaagtacccaaccggcactcgcaccaacagagcgacgacggccggtttttggaaggccacggggagagacaagccgatctacgtgaagaactgcctcgtagggatgaggaagacactggttttctacaaaggccgggcgcccaatggacagaagtcagactggatcatgcacgagtatcgcctggagaccaacaacaatggaattccacatgaggaaggatgggttgtatgcagggtgttcaggaagcgactcgcgactgtccaaagaatggccggggactcgccttactggttcaatgaccacgcggggttcatggcgccggagctcggctcaccgaggcaggcggcgcaccaccagcagaacgtcatgatgtaccacaggcaacagagcagctacagctacccttgcaaggtggagctggagtaccaccacctccttccccaggagcacttcctgcagcagctccctcagctggagagccccaagctccctgaccttattggccaagtagacactactctccagccagcatgcggccttacacaggagcatggtgcccctcgctacaccctgcaggagcttcaggccgagcctctctatctggcgactggcggggacacagattggcgagctctcgacaagttcatggcgtcccagcttagccacggagacatcacccctaataaggattcagctaataactactccaatccggcactgcaggtgattcagcagtctgaagagaaagaagaggccttggactacgtgtcaacgtcagcctcctgtggaggggacaatgatttgtggaaataacagcgtcaatggtaatacatattcacatacgcactaaatcactggactagtgcattattccctcattacacagttaataacattgaggcgtgctggatgtaatgtaacgtagtatataaagtagccaactgattcatgtgtcatggtatagtagaatggtatgtgcataacaaagtgtaaccgagtaggtcacacgtccatgcataagttggcataatgtctggtgttaataataaggttagctaacagctgaagctaaggagcttcagcacctgatttggcaaaacatccgtgaagaattaggtaatttgtcaaagagacaatgcctatttgtattgttcttctgtccatgtatacttgtgcacctttgttgtcattctatttatttaaagataaatatattcaaaacaat

SEQ ID NO: 106627 - DNA, 2450 bp, Zea Mays
gctccaacgttcacctctctctctctcgttcatccttggcgcatgcctcccgtatgaacacgcccatgccagccacagcataaggcggctgctgtgccaccgatcgtgcatgcctcgatctcgtctaccattactcgaaccctagatagcgagaaagcctggtgtttctggaggaggcagccatgatccctgccgttgctgatccgacgacgctggacggcgggggcgcgcgcaggccgttgctcccggagacggaccctcgggggcgggctgccgccggcgccgggcagaagcggccgccggcgacgccgaccgttctccccgccgtcgtctccgccgtgctcctgctcgtcgtcgtggcggtcacagtcctcgcgtcgcagcacgtcgacgggcagggtgggggcgttcccgcgggcgaagatgccgtcgtcgtcgaggtggccgcctcccgtggcgtggctgagggcgtgtcggagaagtcaacggcccagctcctcggcgccggcgcgctccaggacttctcctggaccaacgcgatgctggcgtggcagcgcacggcgttccacttccagccccccaagaactggatgaacgatccgaacggtccgctgtatcacaagggctggtaccacctcttctaccagtggaacccggactccgcggtatggggcaacatcacctggggccacgccgtctcgcgcgacctcctccactggctgcacctaccgctggccatggtgcccgatcacccgtacgacgccaacggcgtctggtccgggtcggcgacgcgcctgcccgacggccggatcgtcatgctctacacgggctccacggcggagtcgtcggcgcaggtgcagaacctcgcggagccggccgacgcgtccgacccgctgctgcgggagtgggtcaagtcggacgccaacccggtgctggtgccgccgccgggcatcgggccgacggacttccgcgacccgacgacggcgtggcggacgcccggcaacgacacgccggcgtggcgggtcgccatcgggtccaaggaccgggaccacgcgggcttggcgctggtgtaccggacggaggacttcgtgcggtacgacccggcgccggcgctgatgcacgccgtgccgggcacgggcatgtgggagtgcgtggacttctacccggtggccgcgggatcaggcgccgcggcggacagcggggacgggctggagacgtccgcggcgccggggcccggggtgaagcacgtgctcaaggccagcctcgacgacgacaagcacgactactacgcgatcggcacctacgacccggcgacggacacctggacccccgacagcgcggaggacgacgtcggcatcggcctccggtacgactacggaaagtactacgcgtccaagaccttctacgaccccgtccttcgccggcgggtgctctgggggtgggtcggcgagaccgacagcgagcgcgcggacatcctcaagggctgggcatccgtgcagtcaatccccaggacggtcctcctggacacgaagacgggcagcaacctgctccagtggccggtggtggaggtggagaacctccggatgagcggcaagagcttcgacggcgtcgcgctggaccgcggatccgtcgtgcccctcgacgtcggcaaggcgacgcagttggacatcgaggctgtgttcgaggtggacgcgtcggacgcggcggccgtgacggaggccgacgtgacgttcaactgcagcaccagcgctggcgcggcgggccggggcctgctcggcccgttcggccttctcgtgctggcggacgacgacttgtccgagcagaccgccgtgtacttctacctgctcaagggcacggacggcagcctccaaactttcttctgccaagacgagctcagggcatccaaggcgaacgatctggttaagagagtatacgggagcttggtccctgtgctagatggggagaatctctcggtcagaatactggttgaccactccatcgtggagagctttgctcaaggcgggaggacgtgcatcacgtcgcgagtgtaccccacacgagccatctacgactccgcccgcgtcttcctcttcaacaacgccacacatgctcacgtcaaagcaaaatccgtcaagatctggcagctcaactccgcctacatccggccatatccggcaacgacgacttctctatgactaaattaagtgacggacagataggcgatattgcatacttgcatcatgaactcatttgtacaacagtgattgtttaatttatttgctgccttccttatccttcttgtgaaactatatggtacacacatgtatcattaggtctagtagtgttgttgcaaagacacttagacaccagaggttccaggagtatcagagataaggtgataagaggagcagggagcaggtatcgtaaagtatgtctataaagtagtgcca

SEQ ID NO: 106628 - DNA, 961 bp, Zea Mays
aagtacgcctctatccgaagccaaaccacacgcacacgccgcgccagcctcacgctctcacccatgttttgtgcgcgcacgcgtcctgcttcttctcgccaacgacaagccgcacgcagcgtctcgccagctagctgatcatgagcaacggcgacacgctcgacaagctggtggtgttcctggcgaagcgcgacggcatcgacaagctggtcaagacgttccagtacgtgtccaagctggcgcactggggcgccgagtcttcgctcccggagctcgcgcagcgcgccaagagctgggagacggcgtccgggctgagccgcaaggcgttccggtcgggccgcttcctggccgggttcaacgcgctgcgccgcggcccggtcccggtcccgggggagctcggcgcgctggccgtgctggccaacgccggcgagatggtctacttcttcttcgaccacttcacgtggctgtcccgcgcgggcgtgctcgagccctggctggcgcgccgggccagcttcgtgtcggccttcggcgaggccgtcggctacgtgtttttcatcgccatggacttcatcatgatcaggcggggcctgcggcaggagagggagctgctgagggaaggcgccaaggacgccgcggagaaggaggtgcggaggatccgggtggacagggtgatgcggctcatggcgacggcggccaacgccgccgacctgatcatcgccgtcgcggaaaccgatcccaacccgttctgcaaccacgccgtcacgctggggattagcggcctcgtgtcagcgtgggctggctggtacagaaactggccctcgtgaactgggccgcttcggcctacatgtgcatatttttcattcacttatttaactgcggctgcgatgcatgatgatattgccagatttgaaccttttctatctccagcaataacctttaaggcctaatttgaaaacttaaa

SEQ ID NO: 106629 - DNA, 1918 bp, Zea Mays
cgacctgtcaaattcatctctccaaggattcttggcaccagagatcgggtccttgagatctttgcagactctcgtgttggatcgcaacacattcatgggctcaataccaaaaggcatcggcatgctacagaacctgatcgagctgaacctcagctccaaccagctcgcggggcctattcccagtgagatcggtgacatggcgaagatcacaaaaatagaccttcacgcgaatcggctggacggcactatccctcctgagcttggcaagctgggaagcctccttgagctacggctgagcaacaactgccttacaggcattgttcctgcaagtaatgattccgacgtggaatccgccagcacctctgatcaaactggattgtgtcagctatctcagctaaccaatattgatctctcgtataacttcttggttggagatgttcccgcatgcttacagcaaatccaaagatcaagcttggtagggaattgcttccagaacaacacatcaaaccgcccacttcaacaatgtgaaactaatcaggacagaggcaaagacaatgatgctgatgagaatgtgcagaaaggcctgccagagccactttggcttctcattctggaagtcatcgcagcagtttcattgctttgcttcttaacactttgtaccatgactggcctccgaaggtgcagagccagatcctctgggtctgagaccagtgttccatggacaagagctgtaagctggaaggagaacaccgtaatctcaatcgatgatgacctcctggtaaatgtgccaaagataagccggcaggagctggcagaggcttgcgaggacttcagcaacataattggatcgtctcaggagacagttgtgtacaagggaactctgaaggatggccgggaaatcgctgttgtgtcgctgtctgttccggtgcattactggaatgactatgtcgaacttcactttcacaaggaggtgatagaaatgtccagaccgagtcacgaaaatgtcgcaaagatggtgggatactgcaaggagtctgatccattttcgagaatgctagtctttcagtacccaccaaatgggacactctacgagcatctgcacgatggagatgggtggcagctatcttggcctagacggatgaaattagcactcgccatctcgagggctctcagatacttgcacactgagctgcaacctccgtttgcagttgctgcactgacgtctagttcagtctacctaactgaagacttctccccaaagataatcgatttcgagaggtggagatatcttgcgaccaaaccaggatttggctcactaaatggcgggtcagtcaacagcgttacagattctcggcataagcgcttcatggacgtccaggccaacacttacgcgtttggcgtgatcctgctggagctggtcagtggcagagcctcggtttccaaagatacaggaggcttggtggattgggcaagaaagcacctggagcatcccgaggagttcggcaagctggtggacccgaggctgcagagcgtgaaccaggagagcctgggcatcgtctgcaacgtggtgaacctgtgcatcgacctggagccgtcgcggcggccctccatgagcatgatcgcggccatcctggaggaaggcatcgaagcgtcggcggccaccttgctcaggaattcgtctctggcctgggccgaagccgagctggccatctcctagaacctagataccctctttgcatgttttgctgcacttgctagactgtatgtttggacagtgacgatggtttaacccgttgttactccgtttggcattgttatttctctcccttttttggagagagaaatggctcacagatctgaattcaaaatgactcaagttttgatttcatcagcgcgaggagatgcatttttatctttt

SEQ ID NO: 106630 - DNA, 527 bp, Zea Mays
cgattagactagttgttcgagcacatcatcgctgcttggcgtggccgtcaagtgcaagcagtgtgcgactgcttcgtcctgttccacctcgcgctcgcggctccgggccataaacatacaccagaccacacgaggagctcgatagccatgtaatgtaaagtgaagcaaagcaagcgaaacaagccgccgccgcctctgctttcctctcgatcacctccggcgcccgccaccaccgcgccgccgccgtcgtgatacttttgcccctccttttttttttcttgtggtctggtgttgcgctttttggggcgggcggatggggaggagcggcacgtcgacggtgaggctgctgctgctggggagctccttcctctgcgtgcttctcgtcagtacctcagaacctgcctcggagtcggatgacgtatctgcgcttcttgcgttcaagagagccatctacgaggaccctctgtccaagctctcggactggaactccaaggacgaggatccctgcgcctggtccggtgtagggt

SEQ ID NO: 106631 - DNA, 1302 bp, Zea Mays
atggcgacggcagcggcggactgccgtacgcgaaccgtgctcaaggcggcgctgtcgaggaccaccgccgccttcctcttcgtcgccgtcgtcgccgtcggggtggtcgtctcgggtcgctggatcaccgccacaaccgctggacgcctgaggcgccttcccaccaccgcggccattcccgccgccgccgtactccacccctccgaaacgcaacagctacaaccgccgcgcccgcactccactcctcccccttcccgaccaccgtctccctcctactccatctcctgccccagcctcaacctctccagtcccgccaaagcgcccaaaacctcacaaaccctcgcgcgcgcgctctcctctccctccatctgccccgcctcccccagcccgcccccgccctacgccgcttcatcgccgtcctccaacacctcgtgcccgtcctacttccgcttcatccacgaggacctccgcccatggcgcgccgcgggcgggatcacgcgcgccatgctcgaccgcgcccgcctcaccgccaccttccgcctcgtcgtgctcggcggcaacgcctacgtccagcggttccgcccggcgttccagacccgcgacctcttcaccatctggggcgtcctccagctgctccgtcgccaccccggccgcgtccccgatctcgacctcatgttcgacaccgtcgactggcccgtcgtccgctcccacctctaccgcgggaagaacgccgagatgttgccgccgctgttccgctactgcggggatgataaaacgctggatatcgtcttcccggattggtcattctggggatggcccgagatcaacataaaaccatgggatgccttgaaggaggacttgaaggccggtaataacagagtgagatggatggatagagaaccttatgcttactggaaagggaatccatcagtttctgggacacgtaaggaactggttaagtgtaacgtctctagtacgcatgattggaacgcaaggatttacgctcaggactggttcaaggagagcaaggcaggatataaggactcagatttgagtagtcagtgtgctcacaggtacaagatctatattgaaggatcagcgtggtctatcagtgagaaatatatactagcatgtgattcaatgactctgttggttacaccaagatactatgatttcttttcaaggtcacttatgccgattcagcattattggcctgttcggtatgacaataaatgtgcctccataaaatatgctgttgattggggcaactctcacaagcaattggctttattccagtgctaa

SEQ ID NO: 106632 - DNA, 1164 bp, Zea Mays
aggacgccttcccggcctttagcagcagtcagcagcttctcgtttcatcagccagccaccaccaaccaaccacagcgaaacacctctttctcgctctctcataaacgacgaggaggccgtacggcactccgcaagcttctcagttcactctctggtctccagtctccaccgctccagcagcctgagctagtgagctgagccccgagctgctataccgtacaccaagtgcacaagcggatcggatcggatcggagcgagatggccgcggccgggctgggcgtgaaggcgacgccgttcacgtacgcggcgcacgcgctggccgcggtggcggcggcgctggtgctggtgtggtgcgtccacttccgcggcggcctcgcgctcgaggcacagaacaagaacctcatcttcaacgttcatcctgttcttatgctgatcggctacattatcctcggcagtgaagccattatgatctacaaggtgtttccgaacctgaaccacgacacggccaagctgacgcacctgatcctccacgccgtcgcgaccgtgctcggcgccttcggcatctactgcgcgttcaagtaccacaacgacagcggcatcgccaacctctacagcctgcactcctggctcgggatcgggaccatcgctctgtacgccattcagtcgatgctgtgttcgcagtgggtgttcgggttcgtgaccttcttcctccccggcgcggcgcccggcgtgaggcgcggcgcgctgccctggcacgcgctcttcggcctcttcgtctacgttctggcgctggcgaccgcggagctcgggttcctggagaagctgaccttcctggagagcggggggctcgacaagtacggcgccgaggcgttcctggtcaacttcacggcgctcgtcgtcgtgctgctcggcgccttcgtcgtcgtcgccgcagtcactccggcgcacgccgaggaaccgcggggctacgccccgattccggtcagctagagggggaggagttcgctgggcagtcagaagagggcagctgtgttttgtttttgaattgaaccatgacacatcaggcgtgtgcgtgcctcgcgtccgggtttacttcgaagcggacgcgacgggtttcggtctatgaatgaatacagcccgatgggccgcagctttccacaaaca

SEQ ID NO: 106633 - DNA, 1146 bp, Zea Mays
aggacgccttcccggcctttagcagcagtcagcagcttctcgtttcatcagccagccaccaccaaccaaccacagcgaaacacctctttctcgctctctcataaacgacgaggaggccgtacggcactccgcaagcttctcagttcactctctggtctccagtctccaccgctccagcagcctgagctagtgagctgagccccgagctgctataccgtacaccaagtgcacaagcggatcggatcggatcggagcgagatggccgcggccgggctgggcgtgaaggcgacgccgttcacgtacgcggcgcacgcgctggccgcggtggcggcggcgctggtgctggtgtggtgcgtccacttccgcggcggcctcgcgctcgaggcacagaacaagaacctcatcttcaacgttcatcctgttcttatgctgatcggctacattatcctcggcagtgaagccattatgatctacaaggtgtttccgaacctgaaccacgacacggccaagctgacgcacctgatcctccacgccgtcgcgaccgtgctcggcgccttcggcatctactgcgcgttcaagtaccacaacgacagcggcatcgccaacctctacagcctgcactcctggctcgggatcgggaccatcgctctgtacgccattcagtgggtgttcgggttcgtgaccttcttcctccccggcgcggcgcccggcgtgaggcgcggcgcgctgccctggcacgcgctcttcggcctcttcgtctacgttctggcgctggcgaccgcggagctcgggttcctggagaagctgaccttcctggagagcggggggctcgacaagtacggcgccgaggcgttcctggtcaacttcacggcgctcgtcgtcgtgctgctcggcgccttcgtcgtcgtcgccgcagtcactccggcgcacgccgaggaaccgcggggctacgccccgattccggtcagctagagggggaggagttcgctgggcagtcagaagagggcagctgtgttttgtttttgaattgaaccatgacacatcaggcgtgtgcgtgcctcgcgtccgggtttacttcgaagcggacgcgacgggtttcggtctatgaatgaatacagcccgatgggccgcagctttccacaaaca

SEQ ID NO: 106634 - DNA, 1181 bp, Zea Mays
ctttctcgctctctcataaacgacgaggaggccgtacggcactccgcaagcttctcagttcactctctggtctccagtctccaccgctccagcagcctgagctagtgagctgagccccgagctgctataccgtacaccaagtgcacaagcggatcggatcggatcggagcgagatggccgcggccgggctgggcgtgaaggcgacgccgttcacgtacgcggcgcacgcgctggccgcggtggcggcggcgctggtgctggtgtggtgcgtccacttccgcggcggcctcgcgctcgaggcacagaacaagaacctcatcttcaacgttcatcctgttcttatgctgatcggctacattatcctcggcagtgaaggtaacagcaacacaaaaatcaaactcattttatttccatcttccatgtctgccgtaccagcgctaaacgttggtttctcccgaatcccgatccactgtatggcagccattatgatctacaaggtgtttccgaacctgaaccacgacacggccaagctgacgcacctgatcctccacgccgtcgcgaccgtgctcggcgccttcggcatctactgcgcgttcaagtaccacaacgacagcggcatcgccaacctctacagcctgcactcctggctcgggatcgggaccatcgctctgtacgccattcagtcgatgctgtgttcgcagtgggtgttcgggttcgtgaccttcttcctccccggcgcggcgcccggcgtgaggcgcggcgcgctgccctggcacgcgctcttcggcctcttcgtctacgttctggcgctggcgaccgcggagctcgggttcctggagaagctgaccttcctggagagcggggggctcgacaagtacggcgccgaggcgttcctggtcaacttcacggcgctcgtcgtcgtgctgctcggcgccttcgtcgtcgtcgccgcagtcactccggcgcacgccgaggaaccgcggggctacgccccgattccggtcagctagagggggaggagttcgctgggcagtcagaagagggcagctgtgttttgtttttgaattgaaccatgacacatcaggcgtgtgcgtgcctcgcgtccgggtttacttcgaagcggacgcgacgggtttcggtctatgaatgaatacagcccgatgggccgcagctttccacaa

SEQ ID NO: 106635 - DNA, 1666 bp, Zea Mays
agctggtgaacaaactccaaaatcagtagttgcaaagtctttctcaagcagtaatcaaagacatggttatagttcaacaaaccttggaacaaccatgatccattctggcacacaaggttattatggaatgcaaaattctcatgcagcatacacaagccaacattctcttactggaagttggaatgccacgtcaagtcagtttggggtcgcggtaaatcctgtgacacctactcagcctgccagggggagcttttcaggacaaaacatagtgtctgcagaaaatatgggtcatctaactcctggaacggctcctgcagctgcaaatgcagaaatggttaattcagatttgacctcccagaagcaaatatcgcatttaccgcaaacagacggcatattagctgatgacattgaatccaaatcaggagaagatgtttcacatggaaaagtgagctcttcagccaaagcaattggaccactgggtgcacagcttggacaaggacaactgaacactcagcaacatgaagcagacacaaaaaaccagatgtcatcaactgatgtctccaactcgacgatgccatcacagatgatgtcaacaccatccgctgcatcagtacaaccttcattgacaaccattgctggcagtgataatcaaagcagtgggtgggctgtacctacacaagtggtgaacacatctggccagtctcagataactgaaaatctgacctggggaaatacacctcacggtgatgcaagcttaggttggggaatgatgggacagaacaatatgaatatgccttgggtagcatcagctcaaggtgcttcgggctacaacatgggtgcagccatgtcaacccagccaaattcagttccaaacatgggttggttaccaaatccaggaaacaccaacatgaacatgatctgggccgcaactcaaggccaggggattccaaatgcagctgctatgatgggaggtcagatgcaaggagtcgcagtggccccttggggtggtgttgcagcaggaaatgcaaattcttatcctgcctggggaaaccaacaagttggaaacatgaaccaaaacgttcgatggagtgctcctgtgcagggaaacccgagtcaggcaaataacaacatgaactggaatgcaccaaatggtaatcctaataattggaataatcagcagagagagaatgagagcaggcactctggacaccgtggtgcttttagtgctggcgactcaggcagaaagtcatggaagccacgctctggtgccgatggggggtcatgggggacatagagcagtctgctatacatttcttgaacgcggggactgctttaaagttgactgcaaattcgcccattcaacaaacacagagggatatccatgcatccaggatccgggcaacgagaggcgatatgagaatcacaatgagagaaacgatcgacagtttgataggcagccttcggataatgaaaggcatcatgttaggcctggtggcagggatgacgataggcaggctgataggtctcagtcaagagagccgcgttagaactggtttctgtttcgtaccttccctttgttgtatgtgcagtagcaaactagcataatagcttccgtgcatgttttgaactttatgccaggtcagggcgctggctatggggtcacgaa

SEQ ID NO: 106636 - DNA, 1219 bp, Zea Mays
caccatcgctcgcttctcttcggcttccttgtgtatcattgcaaccttgttcttcatcttctctgcatattcagccttcttcttttccagttgttcctgaacatgaataaaccatataagctgtagctaagaggatatcaccttttagggggggagggggggtggcatattagttccactggatctattcttttccaaattcctctataattgattaattgttatcggtggctcaagtctctattaaaatatgggacagacttaaactagtaagtgcacagacgataaaaaagagtattccttcaatgacatacctcaatcttcttcagttcagcttctatgtttgctttctttgtgttttcccatgaaagaatagcggatactttcttagcagccctgtcacagttatgcgtattaattcaagttaggaatttccacatctcctgcctatggtttatatcaacttctattggatattgagaatctaaatatgatatcttccaattgacatactatgttatcctgtttgcccttatggctttttcttgttttagtttgaactgagcagaattttatatccacactgccctggctgtacagaaaccagtattaaacttccaatttgctttgatgaaagaattatagatgactgaagaaagcattgcaaaaattgcatctactgcaacagacaaataatggttccactgaagacgatttcaggggaatggataaggtgagaaacatacttgttctcagcttttgtcttctcattctcttcccaagctttgatcaaagagttcctcttctctgtttccacccttgcaagagcgagatctgcagaccatgtttcaggttttaattggcaacttgtactcaatctcgatgacacaacaattattcaataattacccctgtcattggagcccccttgcttcgcaggggcaggcttctcgggagcaggttcatctgcaacttctggaaagacagaaaaaaatagagaatttatgcctgctttggcgcaaaaactaaattcagattcataaacagtttttgctgaacaattttatatggaagaaagaagctagcaagtggttgtatgctgatcaatgatccaatccaacccattagcatcacagagcaaaatgtaatttatgtcgctatactattatctttgcaggagcatgcacttgagtttgcaatgctcaacttatttgtgtcc

SEQ ID NO: 106637 - DNA, 1408 bp, Zea Mays
aagccagccacgctgcccttcccttccccttgctctcgtcgacgtcggagcagcagcccagccagcaggagagacggagagcgaccgaccgccatggggagaactccgtgctgccacagcaatgggatcaagaagggacagtgggcgctggaggaggacaagctgctcgtcgactacgtccaggccaacggtgccggaaattggcgcatgctccccaagctcgcggggctgaaccggtgcggcaagagctgccggctgcggtggaccaactacctgcgcccggacatcaagcgcgggcacttcacccccgaggagcacaactctatcctccagctccacgccatcatcggcaacaggtggtccacgatcgcggcacagctgccgggccggacggacaacgagatcaagaactactggaacacgcacatgaagcagcagctccgacaggaggcgctcgccgtcgccgtcgccggcgagggcgctggcgcgcagctcgccaaggcggccgccgcgtcctgtcccgtcgctcgccacatggcccagtgggagaccgcccgcctcgaggccgaggcgcgcctctccctgctctcgtcgacctcggccacgacgatcgtcacctccgccaccgcctcttcctcctcgtccaccgtcgcgcccgagcacgcggcgcccgacatcttcctgcgcctctggaactccgaggtcggggattctttccgcggcaccgcagtgaaggggcatggtccggcgtcgagtggtgtgccggcggcgctacctgctgagctcggcgacgacgattcctcggccgcgtcgacctacgggaccgaggcggcggcgagcgacgactaccagtcgttcctggacctggcggcgatggaggagttcgggctgctgcaaggccggctcgacgcgttctcggtgctcccgcatgtcgacgtgttcgccgaggcgccctgctgcctgttcgagtagctttgctgtttgctcgatctcatttccagacccactcagagtagtcaccagagtagtagactagacgtacgtggccgcgttctgcatgcgttcgtctgcgtacgcgtacgtacatacatacgtacacatgccggttgtcttggggacgacacgatggcgtatgtacagtacgtgcctgtacgcagcgagcggatgggtgcaggagttggcgtgtgacagtatgcaagtctgtgccctagagcaagaggtttttgggactgctctagccgtggcatttctctggtgaatgtcgtcaactttcaagtcttttgcctctgcgtgtgtacattgtcgcggtttcgatttgtgtgttctgtgtctgtgtgtgtggtgtgggtcagaattctctgttgtatgtatcaccagtttggatgagaaaagagtacgcactttttgc

SEQ ID NO: 106638 - DNA, 1754 bp, Zea Mays
aaattaaattaattacataatcaaattccagacgtcagatataacaagctaaacaatattgaacatacaaaaattttaatactgaaaaaagacaactagaaaataatatgtacatttacaaaattatactaaaaattaaaaatactcacttagcggctcggcggtagggtggacgcgcggcatgggcggggcggggccggcgagggacgagtcggggcaggtgccggggtgggggcagttggcagcggccatggccgcggcgagcagggcgacggcggtgggcaggacggcggcggtgctctgggcgcgatggacaagttggaaatggaacggcgcggtccggtcccacgtgttaaaatcacttatgtccgtcggaacggcttccatagcgctgaagcgaggcgtgccgcattgggttgttcgagagctcctagtgttgccctactacatgatggagggcgatctccccacgcccgcgaacgctaggtacgtacacctgacatatatgcatccgcgcgttcgctctggcagccagtggcgagaattgccagtgaatcaatcatgcgcgtctgctgtatgttactggttgcatcgatctgccagggttgttgccgtggtcaccggcggcaacaaggggatcgggctggaggtgtgccggcagctggcctgcagcggcgtcaccgtcgtcttgacagccagggacgacgcgaggggcgcggcggccgtggagaacctcagaggcctggggctctccgatgtcctcttccaccgactggacgttaccgacgctccgagcatcgctcgactcgctggtttcctcgagacccgtttcgggaagctagacatcctggtaaataatgccgcgattggcggggttgagtatgttcatgaccaagattgtggctcagtaacgagcgaggaaaaggcaaagttgagcggcatggacatggatcagaggcttggatggctgtgggagaattgccgggagacctacgacgatgcaaagacaggcctacgaacaaactactacggcacaaagcaagtaatcgagactttactgcctctactgcaagcctcctccgatgggaggatcgttaacgtctcctcccacttcggccagctaaggcttttccgaaacgaggagctgaagcgggagctgaacgacattgacaacctcaccccggagaggctggatggcctgctggacatgttcttaaatgacttggaggccggcgaggtggagtcgtcgaacggctggccgatgtatttctcggcgtacaaggtggccaaggcggccatgaacgcgtactcgaggatcctggcgaggcggcaccccgagctgcgcgtcaactgcgtgcaccccggctatgtcaggaccgacatgaccatacactcggggctgttgacaccggaggaaggtggcagcagggtggccatggtggcgctgctgccgggaggcgggccaaccggcgcgttctttgaagattttcaacagtcgtcgttcgtgtgatgttgaacatgcagctgcatctcatatgtattctatagatattatttatgtgaaagatgctacagtacgctccccctgcgtttacattcagcgcacctctgaactcttaaacttcaagtcttcaacgacaaatctagacatgatgctgcaaaacatttttaatgtctcctctttcaaaacacgagtttcgtgcgtcatgcacgaagcacaaagagttttttttctcttccatatcatatctcgt

SEQ ID NO: 106639 - DNA, 1637 bp, Zea Mays
aaattaaattaattacataatcaaattccagacgtcagatataacaagctaaacaatattgaacatacaaaaattttaatactgaaaaaagacaactagaaaataatatgtacatttacaaaattatactaaaaattaaaaatactcacttagcggctcggcggtagggtggacgcgcggcatgggcggggcggggccggcgagggacgagtcggggcaggtgccggggtgggggcagttggcagcggccatggccgcggcgagcagggcgacggcggtgggcaggacggcggcggtgctctgggcgcgatggacaagttggaaatggaacggcgcggtccggtcccacgtgttaaaatcacttatgtccgtcggaacggcttccatagcgctgaagcgaggcgtgccgcattgggttgttcgagagctcctagtgttgccctactacatgatggagggcgatctccccacgcccgcgaacgctagggttgttgccgtggtcaccggcggcaacaaggggatcgggctggaggtgtgccggcagctggcctgcagcggcgtcaccgtcgtcttgacagccagggacgacgcgaggggcgcggcggccgtggagaacctcagaggcctggggctctccgatgtcctcttccaccgactggacgttaccgacgctccgagcatcgctcgactcgctggtttcctcgagacccgtttcgggaagctagacatcctggtaaataatgccgcgattggcggggttgagtatgttcatgaccaagattgtggctcagtaacgagcgaggaaaaggcaaagttgagcggcatggacatggatcagaggcttggatggctgtgggagaattgccgggagacctacgacgatgcaaagacaggcctacgaacaaactactacggcacaaagcaagtaatcgagactttactgcctctactgcaagcctcctccgatgggaggatcgttaacgtctcctcccacttcggccagctaaggcttttccgaaacgaggagctgaagcgggagctgaacgacattgacaacctcaccccggagaggctggatggcctgctggacatgttcttaaatgacttggaggccggcgaggtggagtcgtcgaacggctggccgatgtatttctcggcgtacaaggtggccaaggcggccatgaacgcgtactcgaggatcctggcgaggcggcaccccgagctgcgcgtcaactgcgtgcaccccggctatgtcaggaccgacatgaccatacactcggggctgttgacaccggaggaaggtggcagcagggtggccatggtggcgctgctgccgggaggcgggccaaccggcgcgttctttgaagattttcaacagtcgtcgttcgtgtgatgttgaacatgcagctgcatctcatatgtattctatagatattatttatgtgaaagatgctacagtacgctccccctgcgtttacattcagcgcacctctgaactcttaaacttcaagtcttcaacgacaaatctagacatgatgctgcaaaacatttttaatgtctcctctttcaaaacacgagtttcgtgcgtcatgcacgaagcacaaagagttttttttctcttccatatcatatctcgt

SEQ ID NO: 106640 - DNA, 1703 bp, Zea Mays
aaattaaattaattacataatcaaattccagacgtcagatataacaagctaaacaatattgaacatacaaaaattttaatactgaaaaaagacaactagaaaataatatgtacatttacaaaattatactaaaaattaaaaatactcacttagcggctcggcggtagggtggacgcgcggcatgggcggggcggggccggcgagggacgagtcggggcaggtgccggggtgggggcagttggcagcggccatggccgcggcgagcagggcgacggcggtgggcaggacggcggcggtgctctgggcgcgatggacaagttggaaatggaacggcgcggtccggtcccacgtgttaaaatcacttatgtccgtcggaacggcttccatagcgctgaagcgaggcgtgccgcattgggttgttcgagagctcctagtgttgccctactacatgatggagggcgatctccccacgcccgcgaacgctagggttgttgccgtggtcaccggcggcaacaaggggatcgggctggaggtgtgccggcagctggcctgcagcggcgtcaccgtcgtcttgacagccagggacgacgcgaggggcgcggcggccgtggagaacctcagaggcctggggctctccgatgtcctcttccaccgactggacgttaccgacgctccgagcatcgctcgactcgctggtttcctcgagacccgtttcgggaagctagacatcctggttgaagatcttgtccgggtatatagttggctgatttcgatgtgcgtggttgtgtgccatttgtaggtaaataatgccgcgattggcggggttgagtatgttcatgaccaagattgtggctcagtaacgagcgaggaaaaggcaaagttgagcggcatggacatggatcagaggcttggatggctgtgggagaattgccgggagacctacgacgatgcaaagacaggcctacgaacaaactactacggcacaaagcaagtaatcgagactttactgcctctactgcaagcctcctccgatgggaggatcgttaacgtctcctcccacttcggccagctaaggcttttccgaaacgaggagctgaagcgggagctgaacgacattgacaacctcaccccggagaggctggatggcctgctggacatgttcttaaatgacttggaggccggcgaggtggagtcgtcgaacggctggccgatgtatttctcggcgtacaaggtggccaaggcggccatgaacgcgtactcgaggatcctggcgaggcggcaccccgagctgcgcgtcaactgcgtgcaccccggctatgtcaggaccgacatgaccatacactcggggctgttgacaccggaggaaggtggcagcagggtggccatggtggcgctgctgccgggaggcgggccaaccggcgcgttctttgaagattttcaacagtcgtcgttcgtgtgatgttgaacatgcagctgcatctcatatgtattctatagatattatttatgtgaaagatgctacagtacgctccccctgcgtttacattcagcgcacctctgaactcttaaacttcaagtcttcaacgacaaatctagacatgatgctgcaaaacatttttaatgtctcctctttcaaaacacgagtttcgtgcgtcatgcacgaagcacaaagagttttttttctcttccatatcatatctcgt

SEQ ID NO: 106641 - DNA, 1388 bp, Zea Mays
ctagtgaactgagaccacacaaacaaggcacggagctgtcggcatgaatcacgttctagtgttctacagttcgtcatagttcccgtgatggtcgactgattgacactgccaacctcccaacttcccaaatatatcgtcgtcggtcaatgtcgacgagctcgcagtgcacgctcatggaaggcgctatctcccttcctcgcaacacaagcagaattgccgtggttaccggcgcgaacagaggtatcgggctagaggtgtgccggcagctggctggcaatggcgtcaccgtcgtcttgacagcagtggacgaggagctaggcgcgaaagccgtcggcaatctccaagggctagctctctccgatgttctttctcaccagctggatatcacggatgcttccagcatcgctcggttggccaacttcttgaaggcccgattcgggaagttggatatcctggtcaataatgctgcggttgctggggtcgtgtactctcaagatcatttggatgatctagaaccgagagaggaaaagttcaatctcatggatagggatcagaggcttgaatggctgtggaggaactgccgggagacctaccatgctgcaaaggaatgcctgcagacaaactactacggcacaaagcatgtgatcgaagccttgctgcctctgctgaaagcctccgatgatggaagaatcgtcaatatatcctccgactttgggttgttaaggcatttcagaaacgaggatctgaagcaagtgctgaacgacgtcggcaacctcaccgaggagcggctggacgaactgctggaccagttcctgagagacttcaaggtcggcacggcagaagcgcgcgggtggccagtggcgttcgcggcgtacaaggtgagcaaggcggccgtgaacgcgtactcgaggatgctggcggcgaagcagcccgcgctgcgcgttaactgcgcgcatcccggctacgtcaagactgacataaccttacactcggggctcctggcgccggaggagggcgcgagtaatgtggtgaaggtggcgctgctgccggacggcggggtgaccggcgccttctttgaggagggcaatgagctggcctccttcgtgtgatgtcaggatcggcctggttcgctagctgcggctgtttgccatcgcgtgagctcacggagtgtttggacccctcggtctgatgtttaagtgtgtggtagcaggatgcaagacgattctggtaataaactgattatgtttgtgaacggtgataacctgatgatgtatgtgttgtaaatttagagaacggtgataacctgatgatgtatgtgttgtaaatttagagaaataagtgacatgcttccttcagatttaaataaattaaatattctaattccgaat

SEQ ID NO: 106642 - DNA, 1385 bp, Zea Mays
ctagtgaactgagaccacacaaacaaggcacggagctgtcggcatgaatcacgttctagtgttctacagttcgtcatagttcccgtgatggtcgactgattgacactgccaacctcccaacttcccaaatatatcgtcgtcggtcaatgtcgacgagctcgcagtgcacgctcatggaaggcgctatctcccttcctcgcaacacaagaattgccgtggttaccggcgcgaacagaggtatcgggctagaggtgtgccggcagctggctggcaatggcgtcaccgtcgtcttgacagcagtggacgaggagctaggcgcgaaagccgtcggcaatctccaagggctagctctctccgatgttctttctcaccagctggatatcacggatgcttccagcatcgctcggttggccaacttcttgaaggcccgattcgggaagttggatatcctggtcaataatgctgcggttgctggggtcgtgtactctcaagatcatttggatgatctagaaccgagagaggaaaagttcaatctcatggatagggatcagaggcttgaatggctgtggaggaactgccgggagacctaccatgctgcaaaggaatgcctgcagacaaactactacggcacaaagcatgtgatcgaagccttgctgcctctgctgaaagcctccgatgatggaagaatcgtcaatatatcctccgactttgggttgttaaggcatttcagaaacgaggatctgaagcaagtgctgaacgacgtcggcaacctcaccgaggagcggctggacgaactgctggaccagttcctgagagacttcaaggtcggcacggcagaagcgcgcgggtggccagtggcgttcgcggcgtacaaggtgagcaaggcggccgtgaacgcgtactcgaggatgctggcggcgaagcagcccgcgctgcgcgttaactgcgcgcatcccggctacgtcaagactgacataaccttacactcggggctcctggcgccggaggagggcgcgagtaatgtggtgaaggtggcgctgctgccggacggcggggtgaccggcgccttctttgaggagggcaatgagctggcctccttcgtgtgatgtcaggatcggcctggttcgctagctgcggctgtttgccatcgcgtgagctcacggagtgtttggacccctcggtctgatgtttaagtgtgtggtagcaggatgcaagacgattctggtaataaactgattatgtttgtgaacggtgataacctgatgatgtatgtgttgtaaatttagagaacggtgataacctgatgatgtatgtgttgtaaatttagagaaataagtgacatgcttccttcagatttaaataaattaaatattctaattccgaat

SEQ ID NO: 106643 - DNA, 1248 bp, Zea Mays
atgtcgacgagctcgcagtgcacgctcatggaaggcgctatctcccttcctcgcaacacaagcagaattgccgtggttaccggcgcgaacagaggtatcgggctagaggtgtgccggcagctggctggcaatggcgtcaccgtcgtcttgacagcagtggacgaggagctaggcgcgaaagccgtcggcaatctccaagggctagctctctccgatgttctttctcaccagctggatatcacggatgcttccagcatcgctcggttggccaacttcttgaaggcccgattcgggaagttggatatcctggtcaataatgctgcggttgctggggtcgtgtactctcaagatcatttggatgatctagaaccgagagaggaaaagttaaagttagctgcatttaattgctcggtatgtgacaacaacacttaaaaatgacgaagttcaatctcatggatagggatcagaggcttgaatggctgtggaggaactgccgggagacctaccatgctgcaaaggaatgcctgcagacaaactactacggcacaaagcatgtgatcgaagccttgctgcctctgctgaaagcctccgatgatggaagaatcgtcaatatatcctccgactttgggttgttaaggcatttcagaaacgaggatctgaagcaagtgctgaacgacgtcggcaacctcaccgaggagcggctggacgaactgctggaccagttcctgagagacttcaaggtcggcacggcagaagcgcgcgggtggccagtggcgttcgcggcgtacaaggtgagcaaggcggccgtgaacgcgtactcgaggatgctggcggcgaagcagcccgcgctgcgcgttaactgcgcgcatcccggctacgtcaagactgacataaccttacactcggggctcctggcgccggaggagggcgcgagtaatgtggtgaaggtggcgctgctgccggacggcggggtgaccggcgccttctttgaggagggcaatgagctggcctccttcgtgtgatgtcaggatcggcctggttcgctagctgcggctgtttgccatcgcgtgagctcacggagtgtttggacccctcggtctgatgtttaagtgtgtggtagcaggatgcaagacgattctggtaataaactgattatgtttgtgaacggtgataacctgatgatgtatgtgttgtaaatttagagaacggtgataacctgatgatgtatgtgttgtaaatttagagaaa

SEQ ID NO: 106644 - DNA, 1314 bp, Zea Mays
ctagtgaactgagaccacacaaacaaggcacggagctgtcggcatgaatcacgttctagtgttctacagttcgtcatagttcccgtgatggtcgactgattgacactgccaacctcccaacttcccaaatatatcgtcgtcggtcaatgtcgacgagctcgcagtgcacgctcatggaaggcgctatctcccttcctcgcaacacaagaattgccgtggttaccggcgcgaacagaggtatcgggctagaggtgtgccggcagctggctggcaatggcgtcaccgtcgtcttgacagcagtggacgaggagctaggcgcgaaagccgtcggcaatctccaagggctagctctctccgatgttctttctcaccagctggatatcacggatgcttccagcatcgctcggttggccaacttcttgaaggcccgattcgggaagttggatatcctggtcaataatgctgcggttgctggggtcgtgtactctcaagatcatttggatgatctagaaccgagagaggaaaagttcaatctcatggatagggatcagaggcttgaatggctgtggaggaactgccgggagacctaccatgctgcaaaggaatgcctgcagacaaactactacggcacaaagcatgtgatcgaagccttgctgcctctgctgaaagcctccgatgatggaagaatcgtcaatatatcctccgactttggaaacgaggatctgaagcaagtgctgaacgacgtcggcaacctcaccgaggagcggctggacgaactgctggaccagttcctgagagacttcaaggtcggcacggcagaagcgcgcgggtggccagtggcgttcgcggcgtacaaggtgagcaaggcggccgtgaacgcgtactcgaggatgctggcggcgaagcagcccgcgctgcgcgttaactgcgcgcatcccggctacgtcaagactgacataaccttacactcggggctcctggcgccggaggagggcgcgagtaatgtggtgaaggtggcgctgctgccggacggcggggtgaccggcgccttctttgaggagggcaatgagctggcctccttcgtgtgatgtcaggatcggcctggttcgctagctgcggctgtttgccatcgcgtgagctcacggagtgtttggacccctcggtctgatgtttaagtgtgtggtagcaggatgcaagacgattctggtaataaactgattatgtttgtgaacggtgataacctgatgatgtatgtgttgtaaatttagagaacggtgataacctgatgatgtatgtgttgtaaatttagagaaa

SEQ ID NO: 106645 - DNA, 102 bp, Zea Mays
gcttgtttttggatggtgcaatatgtgatttagtttgtttcaatcattcctatactacgttgcagcaaggtgcttcataaggttatttcaggtattagatcg

SEQ ID NO: 106646 - DNA, 105 bp, Zea Mays
tcttcaccttctccttcctgcctgccagtctccactctccaggggtgtttagcgtcatttccgctcgacgtcgtggcgagcaagcggacatgggagcccggacaa

SEQ ID NO: 106647 - DNA, 554 bp, Zea Mays
caaaatcgctctcttccggtcgtaccacagcgctcgccgctcggcgtcctcatcctcccagtcagtcccagactcccaggcagcacccagccgtccggtcccgaccccgagcatggagcgacacggcatgagcgcacgacggctaccagccatgctgctggcaatgcttctgctgctggcgacggagctggcctccttcggctgctgcggccacaggattcccagagcggacgtggcggcgtggaggcacgggcgggaggcgacgacgacgacgatggcaggcgcgcgcgctacgcccccctcccccacgaaggcagacctggacacggaggcggcgctcggcgagtccaagaggatggtgccgcagggctccaacccgctgcacaactaactaggagccagagcgagagagcgagaggaggcaagcgccggcaggttcttcgttcggctagcttccgtatttttttttctgccccctctccctccctgctcaaccatcacacacagcgatgatagatgtgcgcctgtaactaactgtaattagctagcgcgcc

SEQ ID NO: 106648 - DNA, 1780 bp, Zea Mays
cactccgtaaaaccacaggaaacctcacacgtcttcctccgtccagcctgtctccggccggccccccgccttccttaactccgcatcatccccttccaatctcgtcttcccagcacccgaaccgatcaaattcacttccgctcgattctccgggagggggagggtagctgaaggacatcccggggacgcaatgcgcgtcctcgccgtgttcctcctcggcgcagcgttcgcggcggcggccggaggcggcggggagcttccggagttccgggaagctccggcgttccgcaacggcgcagcctgcgcggacgcgccgacgatccacatcgcgatgacgctggacggcacctacctgcggggctccctcgccggcgtcctctccgtgctccgccacgccgcctgtccggagtccgtcgccttccacttcgtcgcctcctcggcctccccggcgcgccgcctcgcctcgctccgccgtgcgctggcggctgccttccccacgctcccggccaccgtgcatcgcttcgacgcacgcctcgtccggggcaagatctcctcatccgtccggcgcgcgctcgaccagcccctcaactacgcccgcatctacctcgcggacctcctgccgcgctccgtctcccgcgtgctctacctcgactccgacctcctcgtggtcgacgacgtggcccgcctctgggcgaccgacctcggccccgacgccgccctcgctgcccccgagtggcgctccggtgggtacaccgcgaagctggaatactggatggaggtgcagaagcaggaggccaggatttacgagctgggctccctcccgccgtttctcctggtgttcgccggcgaggtgaaagccgtggagcaccggtggaaccagcacgggctcggcggcgacaacgtggcggggcagtgccggcagctgcaccccggtccggttagcctgctgcactggagtgggaaggggaagccgtggctgcggctggacgccgggcggccgtgcccgctcgacgcgctctggatgccctacgacctccttcgccgccgcggcgctcgggacgatctcctcgccgccgtctcctgacaatgctgtccgcgcatcgctgcagggcgatcgatttgctcgcgtccgatcggatcatatgccacggcgcttggctgctccgctcgttccgtcgtcccacgggtcggcgtcggtcaccaagtcacagacacgttggacccacctggacactctcctctccgcatgggtccatgcgcaatggcgttagttggtgtggccctgtcggtactgaagtccgtcggccccactcgttggtggcggatggggatttttggggtgggggccaaggtgaaattcagacatgggctgtgtacagctgttgtttttggcctgttgggatattagttctatattctttttattgtgttcttgttgtagattcttgaagaatctacctccatataatagacaatagtgcaggcacaggtttatcaccgtggaataaaattgggtatatttggaattagggtttatatatatttatattgtacatgatcgtcagaggttagggctcagcaggtggaaacaaggagagttgttcttgggaaatgccataaaggttgctgtagttttatttattagttattgtacgaatgcaagctgctattttaaatccattgatcgcagtgcacagctagccagatttgagatgtcgttttgctcccagaatgaaaagaaaagccactcttctaactttagctgaagcaaaaaacaaaa

SEQ ID NO: 106649 - DNA, 1917 bp, Zea Mays
cccactccgtaaaaccacaggaaacctcacacgtcttcctccgtccagcctgtctccggccggccccccgccttccttaactccgcatcatccccttccaatctcgtcttcccagcacccgaaccgatcaaattcacttccgctcgattctccgggagggggagggtagctgaaggacatcccggggacgcaatgcgcgtcctcgccgtgttcctcctcggcgcagcgttcgcggcggcggccggaggcggcggggagcttccggagttccgggaagctccggcgttccgcaacggcgcagcctgcgcggacgcgccgacgatccacatcgcgatgacgctggacggcacctacctgcggggctccctcgccggcgtcctctccgtgctccgccacgccgcctgtccggagtccgtcgccttccacttcgtcgcctcctcggcctccccggcgcgccgcctcgcctcgctccgccgtgcgctggcggctgccttccccacgctcccggccaccgtgcatcgcttcgacgcacgcctcgtccggggcaagatctcctcatccgtccggcgcgcgctcgaccagcccctcaactacgcccgcatctacctcgcggacctcctgccgcgctccgtctcccgcgtgctctacctcgactccgacctcctcgtggtcgacgacgtggcccgcctctgggcgaccgacctcggccccgacgccgccctcgctgcccccgagtactgccacgccaactttacctcctatttcaccgacgcgttctggagccaccccgagtacaccgccgtcttcgccaaccggacgcgcgtcccctgctacttcaacaccggggtaatggtcatcgacctggacaggtggcgctccggtgggtacaccgcgaagctggaatactggatggaggtgcagaagcaggaggccaggatttacgagctgggctccctcccgccgtttctcctggtgttcgccggcgaggtgaaagccgtggagcaccggtggaaccagcacgggctcggcggcgacaacgtggcggggcagtgccggcagctgcaccccggtccggttagcctgctgcactggagtgggaaggggaagccgtggctgcggctggacgccgggcggccgtgcccgctcgacgcgctctggatgccctacgacctccttcgccgccgcggcgctcgggacgatctcctcgccgccgtctcctgacaatgctgtccgcgcatcgctgcagggcgatcgatttgctcgcgtccgatcggatcatatgccacggcgcttggctgctccgctcgttccgtcgtcccacgggtcggcgtcggtcaccaagtcacagacacgttggacccacctggacactctcctctccgcatgggtccatgcgcaatggcgttagttggtgtggccctgtcggtactgaagtccgtcggccccactcgttggtggcggatggggatttttggggtgggggccaaggtgaaattcagacatgggctgtgtacagctgttgtttttggcctgttgggatattagttctatattctttttattgtgttcttgttgtagattcttgaagaatctacctccatataatagacaatagtgcaggcacaggtttatcaccgtggaataaaattgggtatatttggaattagggtttatatatatttatattgtacatgatcgtcagaggttagggctcagcaggtggaaacaaggagagttgttcttgggaaatgccataaaggttgctgtagttttatttattagttattgtacgaatgcaagctgctattttaaatccattgatcgcagtgcacagctagccagatttgagatgtcgttttgctcccagaatgaaaagaaaagccactcttctaactttagctgaagcaaaaaacaaaa

SEQ ID NO: 106650 - DNA, 103 bp, Zea Mays
cggcagcgcgtgttttttttaataatccctccacaggtcagtacgtaccacaccagtcgggttggggcaatcagtactcagattaggcccgcattgaatctag

SEQ ID NO: 106651 - DNA, 91 bp, Zea Mays
acgtatcatctctcaattgtgtatatcatctatgcattgcctaaatccagtttagataataacgaactgattcatttccacaaactttggc

SEQ ID NO: 106652 - DNA, 1671 bp, Zea Mays
atggcagcgccatggggtaacaagtccataagtgagtatacgacgccgacgtctgttcatcgaccaaatcaatgcttggatatcgtaacaatggtgcaggaagaacaacaaggagggaaccagttagcgtcagatggaattacgcatacagaatcagctactgctgtagatgcaattactccaccagcagctttgaaggccccgggggttgatgatcagaccatatttgaggcatcgaggatgacagtaaatcaaggaggacaacaccttaatactatgcgtactattggtgatcatgaacaggacacaccagtgattctgcagagacatgaagttacaattgatccgagattagtacctaaagttggtatgacattcagtggggtggatgaagcatataaattttatagtaggtatgcatatgaagttggatttccattgaaaaagtataggcaacggaaaaattgtaagtggttgaattgctcgatggaaggcaaaagagcagtaaggggaatatcaaacccaaaggataccgaaaagaatcaattacaatgcaacaagacgcatgatcctgaatacatggagttcataagttcaatgcaagagagtcaaatcccgcaacattgtattatggattatgtatcagaaatgcacggtggtcctgagagtgtgcctgtaacagcacaggacatgtataacctgaaaaaggcaaagcaacgagaaagaaatgcaaatgatgtggcaaagctactatccttttttgcatcctgcaaaaaggataatccacaatttttctctgacttccaatctaaacggaagcggcgtggggcgtcctgcggtggagtcaccgggttcgccaacctgctctcggtgtcctccggcgacgacgaggacgccgtagtggagctcgctgaggcggatgagccctggaggaaacagaagaagaggcatcactggaagcagaggaaaaggcaacggaaggaggcgaccgctgcggctgcggctgccgtggacgaggaagagaaggagccgtttgctcgcacgcccgcgtttggcgggttacgtccgttttcggcatgggcgctcgccacgcccgttcctgttcagcgaagtcgcttcacctgctccatcgtccgggaatcgtccccgtgcccagatttctgctgccgctgctgtgccggtcccaggtcacgcgcggacccacgtgcggcggcctcgggagctgctgtcgctggtgtgccggtcccaggtcacgcgcggacccacgtgcagcggcttcgggagaggatttgggccgtcgcgcggcggcttccgatgcgtctcctcgccgagcccgccgaagcaacgctccacagtgagggcacgtcgcagcagtgctgcggcatgggcatcctcacagtcctcctccggacggccataagatctgatttcttgctgacgccgctgggattgcctgttgcactgataccgttcgtgacctagctcgtgtggaggcggtcgtggtcgtaggtttgtttggctaactacgcttgcttccgcatcttagtcctctgcttagtgtgcgttcttctttgcttcctggaacacacgtgctttggtcggtctctggtgtactgcacaggttaggttagtggcgcgcttagcagacatggttttgcagtataatcaccc

SEQ ID NO: 106653 - DNA, 540 bp, Zea Mays
gcttgcacgcttgcacataaagactgcttgcatagcagttgttgcctatcaaactagctctaattgctagtttaggaacttcatttttccaatgattcctattttcctaccttgagaaaataaaaatcgttagtaaaatgaggtttccaaagtagccataaaaaacattgatctgcccggacttaaaattaggacaaaaacacatggatcgggtgcttatagttataggtgtccaaagttcagacaatcacacagaaattattgacacgagaagaataatagaatgtttcgaacgcaagaagtttttagtatttgattgtctcacggtaagcaaaaaagaaaaagtatagacggatcttgatatatcatgacaatacgtctaagagcacctccaacaaaaatcttaaacgaagttgtatttgaaatataagacgctaatgccataaacctgctctacagagttacctctcacaaaaattcatcatcaaataattataggactgtctttaaatttaggactccatataaccttttattttt

SEQ ID NO: 106654 - DNA, 627 bp, Zea Mays
aaccgccgacgcggccgcacaactcatttccagagctttacagatcagcccccgagttcgcgaccactccgcaccgcgcttcctttatatgtagtggtctcctcgttgccacccgttcgctgcgatccaaacgcgcgacgcgacttattcagcaccaccgccgcctttcattttttccttcgcatcttgagagagagagagagagagagcggaggaggagagcaaggagatgggcggcttcgaccagcaggtgaaggagcggaccaaggagctgaagcacctcaagaccgcggcgatgaagggcatcaaggcggccggcgagtcgtgcaagaaggcgtggagcaaggtcaggagcagcatcaagcgctaaaaggccctaggcgttgttgctctgctgctgcgtggttttctgagttgtggactgtggtagatttgcgcttgtggtttctgtttgttggatctacttatttattttggatatacatcatgtgtgaagatctgcatgtgtgtgttcctagtgttttttgcttctgttcgttcgctgtgtgatcctcttcgagttgttgtagccacagaaagaaatcttccgtgccaacaaactctctagtctggaatggatattcaccg

SEQ ID NO: 106655 - DNA, 1470 bp, Zea Mays
acgttctctgcacgttcatgttcgtcgtcacctccggattccccgaaatagacaaattcgcccacaccacaccctccgccgctgcacgcctccacgcctcgcccacccataggccatagccggtagatactttcatcaaagatagcacacaggattcgccccgccggttcgcgtgaaaaggagccgacgaatccacctacccgcattcgggctccagcgccaccccgtgccatcgggctgcgtccgctaacgaccgcccgttcgcgcagggcccagggtgtgggagggagcaatggtcgctgggatggaggcggaggaaggggtgatggcgacggacttcttctggtcgtacacggacgagccgcacgcgtcgcgccgccgggagatcctggccaagtacccgcagatcaaggagctcttcggcccggatccgtgggccttcctcaagattggtttggtcgtgtcgcttcagctatggactgctacattcctccgtgacgccagctggctgaagctactgacggtgtcctacttcttcgggtcgtttctaaaccacaacctgttcctggccatccacgagctgagccacaaccttgccttcgcgaccccatccctgaaccgctggctgggcatcttcgcgaacctccccatcggtgtgcccatgtccatcacgttccagaagtaccacctggagcaccaccggttccagggcgtggacggcgtggacatggacatcccgagccaggcggaggcgcgcgccgtgaggagcgccgccggcaagtccgcgtgggtcgtgctccagctcttcttctacgctctgcggccgctgttcctgaagccgaagcctccgggcctgtgggagctgaccaacctggcggcccaggtcggcctcgacgccgggctcgtgtacctgtgcggctggaggtcgctggcctaccttgtcctctccacgttcgtcggcggcggcatgcaccccatggcgggccacttcatctcggagcactacgtgttcagccccgagcaggagacctactcgtactacgggcccctgaacctggtggcgtggcacgtggggtaccacaacgagcaccacgacttccccaggatcccgggcacccggctgcacagggtgaaggagatggcgccggagtactacgacggcctcgagtcgtacaggtcctggagccaggtcatttacatgtacatcatggaccggacggtcggcccgttcagccggatgaagaggaaggcgcagaagaaagactcgtagtcgccgtgtgctcaatttgttttttttttggtcgcgtgtgatgtgaactcatgtttggtgtaagcatttcgattcgtcggaacagcttgtttgtgatatcaatggctcgttttttcgtgctggatccaccgtgcccagcacgagctgtcaaaatggcgcgttgacacccccggagttcgtcccagctccaggctgctatt

SEQ ID NO: 106656 - DNA, 147 bp, Zea Mays
ctttccatgtgaacgtgcaaactcagaatggtttggcatgtccgtcaccttgttgtcttatcgatccaagccggttttcaacaatgtgtgctatgcaatgcaagttagcaaaggcgtggaactgaaaagatatgtacatttcctttc

SEQ ID NO: 106657 - DNA, 1410 bp, Zea Mays
gactggggcaagcaaagcattggggcttgggatttctcgaagccataaaagagtgagccccaaaaagaagcctaccaaagtaccactacgactccgcctccggctccgagagcagcagcctcagtaccaccagtccagtccagcctccagctaggggaagaagaagaagagcgaaggaaggggacgggggcgaggaaggagccagagcagacccaatccctcaatggcttcctctcgcgctctcgctctcgctctcttcctcctctgcgccctgctgcccgcgccccctgtctcggccacattgctgttcggcggcggcgagtcggccaagaaggcgggcgtcgacgcggagtggcggccggccactgcgacgtggtacggcgaggcagagggcgacggcagcgacggcggcgcgtgcgggtacgggacgctggtggacgtggtgccgatgaaggcgcgggtggggtcggtgagccccgtgctgttcaaggacggcgagggctgcggcgcctgctacaaggtcaggtgcctggaccgcggcgtgtgctcgcgccgtgccgtcacggtggtcgtcacggacgagtgccccggcgggctgtgcgcgttcggccgcacccacttcgacctcagcggcgccgcgttcagcaggatggccgtcgccggggccggcggccggctgcgcgaccggggccagctgtccgtcgtgtacaggaggacggcctgcaagtacggcgggaagaacatcgcgttccgtgtgaacgagggctcgactaacttctggctctcgctgctcgtcgagttcgaggacggcgagggcgacataggatccatgcagataaagcaggccaactcggtggagtggctggacatgcggcacgtgtggggggcaacctggtgcctggtgcggggcccgctcgtgggccccttctccgtgaggctcaccacgctgtccgcgcggaagacgctcacggcccgcgacgtgatccccaggaactggacgcccaaggccacctacacctcgcgcctcaacttccagccgtctctctaggtctaggacgagggagggacccaccgcggcgactggggcccacgttttatcggccccggacactgccctgtgggcccgttgcaaaacgaggaatcagtcagtccagagtgtttttttttttgttttccctgtatgcagatgcaggcaaccttcgtatggtttggtttttatcttatcgtagtcgtagctagtgtgaggaggtggttcatggccatcatagtacgtaggcatcgaacatgtgtgatgctcatgaggatgagttgagtctgtgagcgggcacagagtgccagccaccaggtacacacagacaggcgctgtctccaaaggagagagcgttcgttcgctgcttgctcccgggtcca

SEQ ID NO: 106658 - DNA, 744 bp, Zea Mays
actactctgcctctgactggggcaagcaaagcattggggcttgggatttctcgaagccataaaagagtgagccccaaaaagaagcctaccaaagtaccactacgactccgcctccggctccgagagcagcagcctcagtaccaccagtccagtccagcctccagctaggggaagaagaagaagagcgaaggaaggggacgggggcgaggaaggagccagagcagacccaatccctcaatggcttcctctcgcgctctcgctctcgctctcttcctcctctgcgccctgctgcccgcgccccctgtctcggccacattgctgttcggcggcggcgagtcggccaagaaggcgggcgtcgacgcggagtggcggccggccactgcgacgtggtacggcgaggcagagggcgacggcagcgacggtgagcgctctcagctctgctcctcaactcactatcatgccggtcttactgggctccgggactctggtctgggggtagtatgtatacgagcagaatacttgagggagtgctgtacaacgacactgccattcttaattcgttcgctgagtttattattagtaggatttttcagctgttactctatctactactatcgcaatatactcttagtagatttcctttaccgcgtctggaagaaaatgtttttttttttgtggtagtaaactagtagtaataatgtacaagaaggagacgaataataaacaattcctcccgttgcgaca

SEQ ID NO: 106659 - DNA, 1226 bp, Zea Mays
cgccagcccacgctcccgccgccaccgctcctccaccgcgcccgccgccagccgctcctccaccgcgcccgccgctagcccgctcctccaccgcgcccccactcctccacctccacctccaccacgcgcgtccgccagaccgcgcgccgccacctccaccctagctgcggttcctcctccagatcccggcggcccggccccatggccgccctcgtttctagctccagcttctccgctctctagctccggatcgcacgcgcacgtaaagacacggagcccgcagccaaggatgccgcagccgctgtgccggactcgtgggagacggccgacatagacgggcccttgagccggctcatcctctccgcgcgacgcatgtcgtcttcgccggacttcgctgacggccaggacccgccccagccgccgcccacactacagccgcagggcgctccttcggctccctcagatgtgtgcgagggcctggtagcccaggtcgatcagttcctacgagaggccctcgagaagccaagggagaggctttctgtgctaagaatggagcaagaaattttgaagttcattcatgaccctagtcgtacagagtatgaattcaatggccttccaacttcgtatctgcgtcttgctgcacatcgcctggcgcaacattacttcctgcagtccattgccataccagacaacagtttgcctgatggaactggttcacgtatcatccttcgtaagacaacattcgactgtcgactgcctgctgtccgccttgcagatattccagttaatctgccacaagaagacatctctgtggcgaaagtagctattaagcagagacctcaaaagaatttccatggcatgaacagctcaagtgctcactcttctagagacaacctccaaaaaagcgtcgaagaaagaaaagaggaatacaacaaggcacgagcgcggatatttaacaacagaataggataggtccacttccttggagttgaacccaagcaatagaataggtcaaggggccgaaattactcttgagaggagcctgactaccacttcagctagcagcaggtcaaatagaatcaagattgataaggagcatgcagtcaatagaaacaagcagaacaataggtttgcaattttcagagatcgtgagctagagcgcaaggatcctgattatgacagaagctatgacaggtcagtttcttttgtcgtaacacatctctttg

SEQ ID NO: 106660 - DNA, 3722 bp, Zea Mays
caaaggaaattcctctttgcaccttctggaaatcatcgacgaataagacaaaacaaagggcaatggggggacggaattttttttaccaccagctcatgattcgggcatagcacaggtgacgacgccaaagcgcacgacagacgccctctttccgcgtcaccttaaaactctcaaaacacgccttccaaattgaccgccttctccttgcactaatccacttccccgaaacggcaggagcgagcggttaccctttcccaagtttgtcgcgctcgcgcccgaacgctcccggctgacggctgggtccagcggccgatgggtttttaacgtcaccttccctccccatggccaggggaggccggagtaggcgctggtaaacatcgccaacaacaacgacgcacgcagccgcagccgcagcggggggagaggaggtggtggcattggcaagcatcaccacccgcaataacaacgacgacggcgccagcagtccagcaccaaccaccacttttttcgagggaaggcacgaacaggcacaggcaggcgcgcggcacggggtaggaacccgtcgcgattggcccgtccgacgacgaaccggtcgcgggcctcgtgcccgtggtggatctgactccacctgcgcgcggtcgcggtcgcgggcgccttgcttccccctcccccgctcatcgccgcggcgtccacggggcaatttccatccgcggggcgccgccgtgtcgactccatcttcctcggcggtcaatgcgggcgcggagatgagagccggcggcggggaggaggaagaggaggaggaggtgttctacgagtcgcgagaccgcgtgctctcctcctcctgctcctccacctccgcctcggacgatgacgacaacgaccacccgcgacggcgacgggacggggccgcctctgcggcggcggcggcgctcgacgtgtggacgtcggagccggcgcccgtgcaggagcggcgccggaagctgctccagatgatggggctcgccggggaccccgccctagcgcgcctcgagatgggccgatcggtctcctacgacgggcccgtccgcccggcgccggcctcgcccatcccccgatccagatcagacggcgccgtgccggtctcgtcgaccaagcccccgctgggcgggcggtcgcgccaggcgtcgtcgggctcctccgaggccacgcccgaaggggaggacgctggcccgaggtgcctaatccggaacctcgacgacggcaccgagttcgtggtcaaggaggagttccagctccgcgaggtcggcacgggccgccacttcaccatggaggagtttgttgacctctgcgtaggctgctcgcctatcgtccaggagctcatgcgacgcgataacgtggggagctccggctcgaacaacggcgcgtccacccccatccagaggtccaactccgactccagcaacggggctacgcgccaccggcggcacagcagctggcttcggagccttcgaaacgttgccggctccatggcggtcacctcccgcgaccgccgcagcagcgacgagaaggacacgtcctcggagaaaggcggccgccggtccagctcagcgacggatgacagccaggacagcgccggagcctccgtgcaccatggccgggtgcgcgttaaggtgaggcagtctgggaagtcgtacaaggagctcagtggcctgttcatgaaccaggagattcaggctcacaatgggtccatctggagcatcaggtttagtccagatggccggtacctcgcgagtgctggggaagactgcgtgatccatgtctgggaagtgtccgagtttgagaggaaacgcgaggagaacggactgtgcaatcctcttgttgccatggcgtgcaacggttcaccggagacaacattagccttggccagcagtctggatgggagcaatcgtgagaagaagcgtcgggcaaggttcttggagggtcgtaggtctgtgagctcagaccggctaatggtgccagagcatgtgtttgcactgtcagaaaagccgattcggaccttcgtggggcattcagaagatgtgcttgatctctgctggtccaaatcccagtacttactttcatcttcaatggataaaacggtgaagttgtggcacatttcgagcgcttcctgtctaaaaacattttcacacagtgactatgtgacatgcatccagttcaaccctgttgatgatagatacttcattagtggttcactggatgaaaaagtccgcatatggagcattcaaaaccgtgaaattgttgattggaaagatttgcatgaaatggtcactgctgcttgctataccccagatggacagagtgcactaattggttcccataaaggcagctgccatatttatgatacatctgataataagcttctccaaaagaaacaaattgacctgcaaaataagaaaaagaagtccagtcagaagaaaataactggatttcagtttctcccagggagtacttcaagggtccttattacatctgcagattcaagaatcagggtttttgatggccttaatctagttcacaagtacaaaggtttccgaaacactaacagccagatttcagcatgtttagctgctaatgggaggtatgtgatctcagcaagtgaggattcccatgtgtacatatggagaaacgatggtagccttgaaaaaggcagaagcaaggcgaatgttactgtcaccagttcctatgaacatttccactgccaggatgtgacagttgctgttgcaccgccatctaatggctcagcagtggtatccagatcaaactccacgaagcacgatgagcgggattctgtattggagcatcctctgctgcatgctgtccctgaaaaactgcaagattcctccgatctgcagcctcaaagtggcaatatcctaagcaccagttcaaatcacagcggtgatagagcaacttggcctgaagaactgatgacgccaacaaagcagagccctcagtctagtgccagtcttctcagcggtgctgatcaagctccatgctggtcagcctggggaactgtaattgtcacagcaggccgtggaggtcagatcagagcatttcagaactttgggtttcctgctcgagtatagtactgtagctatgagaccgctgcctggtcttggcgtctgccctgcagcaagacgggtgatttttgtgtatagataggtgaaagtttgggtgatctgcacgcagtctgggactggattctgttgctgctcctaggtgcacctgcctgcgaacttcaactaacctacgacctggtactcaaggtacggcgaattcgtttgcccggaattgtatatgagaatggagcccgggaaggacgagcgggcgtcggccggttggagctagatctttgggatctttttgccagccatcttttcatctgttttctccattgagtccagtttagctttttcattttttttactttatgtttaccagctattatatatttttgtaagaaatcttagttctacagaaatagaaaagcaaaaaagagttgcatacagtggtgaattcgctggactggtatagcaggcttgagatgttagtggtacatgggtatagtagtaattgagggactaggagggtgtgaaatcttttgagttctgaagcttttggaccttgcttccggacaaggctggcaggtgcatttctgtgtcccaactgtcggttgcccaacagat

SEQ ID NO: 106661 - DNA, 1005 bp, Zea Mays
gtacacaatgtttgctaacgtcatcgactcgagccaggttagggttcagcgtggaggttcatcgaggtctgctgctcgtagctcccgtcgctccactcaagatccagcagaagtggagcaactgcgagaagaacttaggcgagatcaggattacttgaagcaaaaagctgcgcaacatgaatattatgctacacagattcagcaacaacaaacactcatacaacaactagcacaggcccaagggatacacgtcctggtgccccccccaccacctcccgttcattatccttggtcttcacctccacctgtacctacatctccatctaccgaacatcagacccctccagctaccttgccgacgcatgaacaagaggatgggttagactttgtcgaaaccctcttgaatagtggaggtttcgatggtgatcggcgaccgtgagctttccatgttattgcattctgatacttgagacttttattatgactatgtatgagatattgtctctggatgatgatatgtgtgagacttttgtgatgataagactatggatgagacttttgtgatgtaataattgatgagactatggatttaaatattgttatgtgattgtgtgtgagatgttttatgcgataatatgttgtgctatatagctattaatatatttgttattttctggaatgtggtgtaaaatataaacagcatttgtaatgttggtcaaattaacttcctagaggctacagtaagccgtaggacgttagccagctaacttcctaggggctacagtaagctgtaggaagttagccagctaacttcctaggggctacagtaagccataggaagttagccaactagcttcctaggggctacactaagccgtaggaagttagccagctaacttcctaggggctacagtaagccgtaggaagttactcgtaggaagttagtcagctgacagcgctgacggcgtgaaactactaacttccgagaatctactaacttccgag

SEQ ID NO: 106662 - DNA, 2688 bp, Zea Mays
atgctttcctcctttataacccctgccgcgctagctgtctctccaccgcatcgaccggacggtctctctctcgtctctcccgacgcgcctccacggccggccccgccccggctcgctagcctcctcccactcccagtaccagcccccgcccctccagcaccaccagcagctcgccttcggaccatgagacgggtcggaggagacctgcagggcgacggcacgacgcctcggtccgcggcggcggggcaggccatgatggagcttcaggccaacgggtcggccgccgtcgggggcgccatggtggtggggctcagcccgctcagcgaggccctgtggcgggacagcaaggcgctcccgccgggggccggccccgccgcgctcatcggcgacgtgtccgccaggctcacgtggaaggacctctgcgtcaccgtggctctgggccccggcaagacgcagaccgtgctggacgagctcaccgggtacgcggagcccgggtcgctgaccgcgctcatggggccctcggggtccggcaagtccaccctgctcgacgccctcgccggccgcctcgccgccaacgccttcctctccggcaacgtgctcctcaacggccgcaaggccaagctctccttcggcgccgcggcgtacgtgacgcaggacgacaacctgatcgggacgctgacggtgcgcgagacgatcggctactcggcgctgctgcggctgccggacaagatgccgcgggaggacaagcgcgcgctggtggagggcaccatcgtcgagatggggctgcaggactgcgccgacaccgtcatcggcaactggcacctccgcggggtcagcggcggcgagaagcgccgcgtcagcatcgcgctcgagctactcatgcgcccgcgcctcctcttcctcgacgagcccaccagcggcctcgacagctcgtctgcgttcttcgtgacgcagacgctgcggggcctggcgagggacggcaggacggtgattgcttccatccaccagcccagcagcgaggtgttcgagctcttcgacatgctcttcctgctatccgggggcaagaccgtctacttcggacaagcatcgcaagcatgcgagttctttgctcaagccggtttcccttgcccggctctgcggaatccgtccgaccatttcctgaggtgcgtcaactcggacttcgacaaggtgaaggccacccttaaaggatcgatgaaagcaagggtcgagaggtccgacgatccacttgacaggatgaccacatcggaggccatcaggaagttggttgcatcctacagcaggtcccagtactactacgccgcaagggagaaagtaaatgacatctcgcgaatgaaaggaaccgtgctggattccggtggcagccaggccagcttcctgatgcaggcctgcaccctgaccaagcgctccttcatcaacatgtcgcgggactttgggtactactggctcaggctcctcatctacctcctcgtcaccgtttgcatcggcacgatctacctggacgtcggcaccaaatacacatccatcctggccagggctgcctgttccgcgttcgtctttgggttcgttacgttcatgtccattggaggattcccttcgttcgttgaagaaatgaaggtcttccagcgggaacggctgaacgggcactacggtgtcgcggcgtttgtcatcagcaacaccatctcggcaacgccgttcctgattctgatatgcttcttgtcgggaaccatatgctacttcatggtgcgcctccatcctggcttcgagcactacatcttcttcgtcttgaacctgtacgccagcgttacggtggtcgagagcttgatgatggcgattgccagtgtcattcccaatttcctcatgggtatcatcataggggccgggattcagggaatattcatgctggtctctggctacttcagacttccatacgacatcccgaagcccttttggagataccccatgcagtacatcagcttccactactgggcactgcagggccagtgccagaacgacatgaagggcctcgtgttcgacaaccagtacccggaccaacccaagatccccggggacttcatcctcaagtacatcttccagatcaacgtggaccgttccaagtggatcgacctgtcggtcattttcagcatgatcttcatctaccgcatcctcttcttcctcatgatcaagatcaacgaggacgcgctgccgtggatccgcggccacatcgcgaggaagaggatgcagaagaagggccctacccccaccatgggcaagacgccttcgctgagaggctacgtcgtcgatccggagctcggttccaacgagggctagaggtcgtgcttgttcttttgggtagcggaaaaaaaatagggtgtttctcccccccggctcttggtgttatattgtatatttaagatcaggggataaaaaaactggtatcacacgttttggaaccgaagctaatttgagtacaggtatacatacatgcatgtaatgtgagcgaagtggcatcggagagatcgatgccgagtgacacatgcatgactcgttgttcagaatttattgccttcgacttcgacagacgaacaagtggttggagcactaattaaagcggccgggtaccggctcgcatggccgtgtattattatcacattgatttcgattgcttgc

SEQ ID NO: 106663 - DNA, 2160 bp, Zea Mays
gtagtatggctagtaccggagaagactactgatccatccagaggcgtggttgcaggcgtacgtgacgcaggacgacaacctgatcgggacgctgacggtgcgcgagacgatcggctactcggcgctgctgcggctgccggacaagatgccgcgggaggacaagcgcgcgctggtggagggcaccatcgtcgagatggggctgcaggactgcgccgacaccgtcatcggcaactggcacctccgcggggtcagcggcggcgagaagcgccgcgtcagcatcgcgctcgagctactcatgcgcccgcgcctcctcttcctcgacgagcccaccagcggcctcgacagctcgtctgcgttcttcgtgacgcagacgctgcggggcctggcgagggacggcaggacggtgattgcttccatccaccagcccagcagcgaggtgttcgagctcttcgacatgctcttcctgctatccgggggcaagaccgtctacttcggacaagcatcgcaagcatgcgagttctttgctcaagccggtttcccttgcccggctctgcggaatccgtccgaccatttcctgaggtgcgtcaactcggacttcgacaaggtgaaggccacccttaaaggatcgatgaaagcaagggtcgagaggtccgacgatccacttgacaggatgaccacatcggaggccatcaggaagttggttgcatcctacagcaggtcccagtactactacgccgcaagggagaaagtaaatgacatctcgcgaatgaaaggaaccgtgctggattccggtggcagccaggccagcttcctgatgcaggcctgcaccctgaccaagcgctccttcatcaacatgtcgcgggactttgggtactactggctcaggctcctcatctacctcctcgtcaccgtttgcatcggcacgatctacctggacgtcggcaccaaatacacatccatcctggccagggctgcctgttccgcgttcgtctttgggttcgttacgttcatgtccattggaggattcccttcgttcgttgaagaaatgaaggtcttccagcgggaacggctgaacgggcactacggtgtcgcggcgtttgtcatcagcaacaccatctcggcaacgccgttcctgattctgatatgcttcttgtcgggaaccatatgctacttcatggtgcgcctccatcctggcttcgagcactacatcttcttcgtcttgaacctgtacgccagcgttacggtggtcgagagcttgatgatggcgattgccagtgtcattcccaatttcctcatgggtatcatcataggggccgggattcagggaatattcatgctggtctctggctacttcagacttccatacgacatcccgaagcccttttggagataccccatgcagtacatcagcttccactactgggcactgcaggtaaactcggttccactcccacacagtggagcaagagcaacccacgacacttaaactccatgcgtgtaaaacagggccagtgccagaacgacatgaagggcctcgtgttcgacaaccagtacccggaccaacccaagatccccggggacttcatcctcaagtacatcttccagatcaacgtggaccgttccaagtggatcgacctgtcggtcattttcagcatgatcttcatctaccgcatcctcttcttcctcatgatcaagatcaacgaggacgcgctgccgtggatccgcggccacatcgcgaggaagaggatgcagaagaagggccctacccccaccatgggcaagacgccttcgctgagaggctacgtcgtcgatccggagctcggttccaacgagggctagaggtcgtgcttgttcttttgggtagcggaaaaaaaatagggtgtttctcccccccggctcttggtgttatattgtatatttaagatcaggggataaaaaaactggtatcacacgttttggaaccgaagctaatttgagtacaggtatacatacatgcatgtaatgtgagcgaagtggcatcggagagatcgatgccgagtgacacatgcatgactcgttgttcagaatttattgccttcgacttcgacagacgaacaagtggttggagcactaattaaagcggccgggtaccggctcgcatggccgtgtattattatcaca

SEQ ID NO: 106664 - DNA, 2086 bp, Zea Mays
gtagtatggctagtaccggagaagactactgatccatccagaggcgtggttgcaggcgtacgtgacgcaggacgacaacctgatcgggacgctgacggtgcgcgagacgatcggctactcggcgctgctgcggctgccggacaagatgccgcgggaggacaagcgcgcgctggtggagggcaccatcgtcgagatggggctgcaggactgcgccgacaccgtcatcggcaactggcacctccgcggggtcagcggcggcgagaagcgccgcgtcagcatcgcgctcgagctactcatgcgcccgcgcctcctcttcctcgacgagcccaccagcggcctcgacagctcgtctgcgttcttcgtgacgcagacgctgcggggcctggcgagggacggcaggacggtgattgcttccatccaccagcccagcagcgaggtgttcgagctcttcgacatgctcttcctgctatccgggggcaagaccgtctacttcggacaagcatcgcaagcatgcgagttctttgctcaagccggtttcccttgcccggctctgcggaatccgtccgaccatttcctgaggtgcgtcaactcggacttcgacaaggtgaaggccacccttaaaggatcgatgaaagcaagggtcgagaggtccgacgatccacttgacaggatgaccacatcggaggccatcaggaagttggttgcatcctacagcaggtcccagtactactacgccgcaagggagaaagtaaatgacatctcgcgaatgaaaggaaccgtgctggattccggtggcagccaggccagcttcctgatgcaggcctgcaccctgaccaagcgctccttcatcaacatgtcgcgggactttgggtactactggctcaggctcctcatctacctcctcgtcaccgtttgcatcggcacgatctacctggacgtcggcaccaaatacacatccatcctggccagggctgcctgttccgcgttcgtctttgggttcgttacgttcatgtccattggaggattcccttcgttcgttgaagaaatgaaggtcttccagcgggaacggctgaacgggcactacggtgtcgcggcgtttgtcatcagcaacaccatctcggcaacgccgttcctgattctgatatgcttcttgtcgggaaccatatgctacttcatggtgcgcctccatcctggcttcgagcactacatcttcttcgtcttgaacctgtacgccagcgttacggtggtcgagagcttgatgatggcgattgccagtgtcattcccaatttcctcatgggtatcatcataggggccgggattcagggaatattcatgctggtctctggctacttcagacttccatacgacatcccgaagcccttttggagataccccatgcagtacatcagcttccactactgggcactgcagggccagtgccagaacgacatgaagggcctcgtgttcgacaaccagtacccggaccaacccaagatccccggggacttcatcctcaagtacatcttccagatcaacgtggaccgttccaagtggatcgacctgtcggtcattttcagcatgatcttcatctaccgcatcctcttcttcctcatgatcaagatcaacgaggacgcgctgccgtggatccgcggccacatcgcgaggaagaggatgcagaagaagggccctacccccaccatgggcaagacgccttcgctgagaggctacgtcgtcgatccggagctcggttccaacgagggctagaggtcgtgcttgttcttttgggtagcggaaaaaaaatagggtgtttctcccccccggctcttggtgttatattgtatatttaagatcaggggataaaaaaactggtatcacacgttttggaaccgaagctaatttgagtacaggtatacatacatgcatgtaatgtgagcgaagtggcatcggagagatcgatgccgagtgacacatgcatgactcgttgttcagaatttattgccttcgacttcgacagacgaacaagtggttggagcactaattaaagcggccgggtaccggctcgcatggccgtgtattattatcaca

SEQ ID NO: 106665 - DNA, 817 bp, Zea Mays
aacgtggagactcgttggtctacaacgtaaacgataaaggctgcggcagcagcaagcatgacgaggtcgcgagctgtagtgacgttagtgctcctgctggccgtcgccacggcgagctgcaggctgtcgctcgccgccgacgagaccatcgcggccatcttgggccgcgacctgcgggggttcatcgccagggccggcaacctcttcaggtcggacggcggcgcctggcgcgccgcgaacctcaccgccgccgaggcgaagaacctgagggccgccaccgccaggaagtcgtcctccggcggcagagcgggctgcgtgagcgccgcggcgtgcgggaagaggcgggtgatctgcggcaagaggtgctctgacgtcgcctcctcgcgcgccgccagcctcagccacgtcccgtcgcgatgcgtcgtcaagtgcagggagtgcgtgcccacctgctagatcctcggcccctctcttcgttatgcgatgggtctccactctcgcctcttggtgctcagcgcatatgcaggcaatgcagctccgactccggtccacacttgtgtgtcgtaggttcagtcatcagtggaataaaataaaagatgcagagactgttccacacggcagtaggtagtaggtacacacgtactaccagtgactatacagtgactatagtgaacagtgacttggacactgtactccgtctgtgagttctttcttttttttttggaatttggattctttttcttttcctccatgcttgcagttgttgtagctagggtatggggtaccgggcgcctatggctcctttcattttctttca

SEQ ID NO: 106666 - DNA, 786 bp, Zea Mays
ggctgcgaggcagggaactgaggaaacgtctcgaatggtcgaacagtagtttgctcgctattatccatggcgacttctacggctgctgccactgcactgctccgccccaggccggcagttccagccaagttggcgcagaggaggtgcctccatgcggttgctgggtggacgacgatgaggaggaggggagctgcaggggtcgtgcgagctttcttcaaccctctcggggatgagcgcatcctccgagaagccatcaaggagccagtagcattcatgggtggtgtgtttgctggcctcttgaggcttgacctgaatgaggatcctctcaaggaatggataagtcggacagtggaggcttctggaatagctgaggaaaacagctctgaagaatcaagtgaggcagatcaaaatgatgcacctcagcaaattgagattgagtgagggacggctatcggaatatccttcgcctgtaaggatggttggcaccccagaaccagaaactgcgtaattgttgatttgaccccaaggcacagacgttaactcgagtgatatatcaatgcaaccgctaactacttgatgacgactggaaaatatttccgctagacttatgcctctcattgttgatgaccggaaatctggaagatttttctgctagagatcttttatgcttctcactggaaaggggctgccctttaatgctgacgatgaagaaatggcatgaattcatgttaagaacatttccagcaattgcattggagaagttgcatatggtttatcaattgataa

SEQ ID NO: 106667 - DNA, 776 bp, Zea Mays
ggctgcgaggcagggaactgaggaaacgtctcgaatggtcgaacagtagtttgctcgctattatccatggcgacttctacggctgctgccactgcactgctccgccccaggccggcagttccagccaagttggcgcagaggaggtgcctccatgcggttgctgggtggacgacgatgaggaggaggggagctgcaggggtcgtgcgagctttcttcaaccctctcggggatgagcgcatcctccgagaagccatcaaggagccagtagcattcatgggtggtgtgtttgctggcctcttgaggcttgacctgaatgaggatcctctcaaggaatggataagtcggacagtggaggcttctggaatagctgaggaaaacagctctgaagaatcaagtgaggcagatcaaaatgatgcacctcagcaaattgagattgagtgagaagaactgcacatgagaacaggggaaaggtcctcaaaatacaaaacaattcccgaaataatacccggaataggtgagaccgtgagagcagactctgaccacacaagggagagcatactcctaccacaccccataccactaggacagcagcttatttggtcatcttctttttgaaaaattattatttggttgtcatgtttcttatcttagtataatataccctctccagcgatgtcctgtagagagttcgtgttgttgtaagacctggccatttattccccgcaatggaaaatacacactctccttcgtattaaaaaaagtgtccagtccttaaa

SEQ ID NO: 106668 - DNA, 1063 bp, Zea Mays
atggcgacttctacggctgctgccactgcactgctccgccccaggccggcagttccagccaagaggaggtgcctccatgcggttgctgggtggacgacgatgaggaggaggggagctgcaggggtcgtgcgagctttcttcaaccctctcggggatgagcgcatcctccgagaagccatcaagtttgagtttcaatacccgtttagtcgtgtgtatgactgtatgcttgcaaagtttatccttgaaaaggtgagagggggagtatatgcaacagtcgaaaaattcagtgttgtttcaatgtagattaacttttgattaagcttttcagtggccattattaaggtgaaactaacaaaattgaaacctaagcttgagatatttaggcatattgtttcatacttcactgttatttggttctcccaatctaatcaactttgggaatcagaatgctttgtggaaagaaaattgcagaggtcgtttcaggaagagtagctattcctcaaacaataccaatacgtcttcagtctagaacttacttttcttgctcgctgaagcaagaccagatgacgatactctaaatgcactgtctgtaggagccagtagcattcatgggtggtgtgtttgctggcctcttgaggcttgacctgaatgaggatcctctcaaggaatggataagtcggacagtggaggcttctggaatagctgaggaaaacagctctgaagaatcaagtgaggcagatcaaaatgatgcacctcagcaaattgagattgagtgaggtgcattgtctacttttgtccacttgtcacttttcccttgtaacttatcctgaatatatgtgacacctgattcatcacgtgcttgtcaaaaaaaaaaagttggccttataacgtttttaattcaaatattgtatcaacctcaaaatatcaaaccttgggccctggttttattctacaactcctgtttcataatatggagccccagtcctctagacatgattttaaacttggccataagtataactagagtgtattaccagtaaatggaaagttacacttttgaatg

SEQ ID NO: 106669 - DNA, 728 bp, Zea Mays
ggctgcgaggcagggaactgaggaaacgtctcgaatggtcgaacagtagtttgctcgctattatccatggcgacttctacggctgctgccactgcactgctccgccccaggccggcagttccagccaagttggcgcagaggaggtgcctccatgcggttgctgggtggacgacgatgaggaggaggggagctgcaggggtcgtgcgagctttcttcaaccctctcggggatgagcgcatcctccgagaagccatcaaggagccagtagcattcatgggtggtgtgtttgctggcctcttgaggcttgacctgaatgaggatcctctcaaggaatggataagtcggacagtggaggcttctggaatagctgaggaaaacagctctgaagaatcaagtgaggcagatcaaaatgatgcacctcagcaaattgagattgagtgaggtgcattgtctacttttgtccacttgtcacttttcccttgtaacttatcctgaatatatgtgacacctgattcatcacgtgcttgtcaaaaaaaaaaagttggccttataacgtttttaattcaaatattgtatcaacctcaaaatatcaaaccttgggccctggttttattctacaactcctgtttcataatatggagccccagtcctctagacatgattttaaacttggccataagtataactagagtgtattaccagtaaatggaaagttacacttttgaatg

SEQ ID NO: 106670 - DNA, 719 bp, Zea Mays
ggctgcgaggcagggaactgaggaaacgtctcgaatggtcgaacagtagtttgctcgctattatccatggcgacttctacggctgctgccactgcactgctccgccccaggccggcagttccagccaagaggaggtgcctccatgcggttgctgggtggacgacgatgaggaggaggggagctgcaggggtcgtgcgagctttcttcaaccctctcggggatgagcgcatcctccgagaagccatcaaggagccagtagcattcatgggtggtgtgtttgctggcctcttgaggcttgacctgaatgaggatcctctcaaggaatggataagtcggacagtggaggcttctggaatagctgaggaaaacagctctgaagaatcaagtgaggcagatcaaaatgatgcacctcagcaaattgagattgagtgaggtgcattgtctacttttgtccacttgtcacttttcccttgtaacttatcctgaatatatgtgacacctgattcatcacgtgcttgtcaaaaaaaaaaagttggccttataacgtttttaattcaaatattgtatcaacctcaaaatatcaaaccttgggccctggttttattctacaactcctgtttcataatatggagccccagtcctctagacatgattttaaacttggccataagtataactagagtgtattaccagtaaatggaaagttacacttttgaatg

SEQ ID NO: 106671 - DNA, 3671 bp, Zea Mays
aaggagctcatgaaagccaagcgaggaggtccatgacgaccggaggccgccgatggaatggcagatcccgtcgacatcgacaaggcacttgttgctctaaagaaaggcactcaactccttaaatatggtcgcaaaggaaagcctaaattcattcccttcagactatcgaatgatgaatcgactcttgtttgggtttcaaataacaaagataaaagtttgaaactagcttctgtgtctaggattctctcaggccaaagaacgctggtttttcaacgttttctgctccccgagaaggaccatttatccttctccctcatatataatgatggcaagcggtctctcgatctgatctgcaagaataaagtcgaggcggaggcttggtttactggtcttagtgccttgatatgtcgaggacagcatggatcccaggtccaacatatagatggaatccggatcgctggacttccttttgatggtgcaagagaaagtagcctaagtggtagctctactttcacttcggattcctttgagaataagctgagctcggtaaactcttccaaggatcgttcttcgggagaatatacatattcagaaaggactgatgtgtcggatatgcaagtgaaaagtgtttcttcttcagacattcgaatcagtgtttccagtgcccttagcacatccagccatggctctggaggtgaagattccgaatcgtttggagatatttatgtatggggggaagtcatctgtgataccatctcaagatcagggtctgatagaagtgcttactctcctggcacaactacagatgttcttgtaccaaagcccctagagtcaaatgtaatgctcgatgtgagttatgtggcttgtggcgtgaaacacgctgcccttgttacaagacaggcagaggtatttacgtggggagaagaatgcagcggtcgtctcggtcatggcattggaacaaatgttttccagccacgtcttgttgagtcactatcgacctgcaatgtcgaactaattgcctgtggtgaattccacacttgcgctgtcactgcaactggtgatctctacacctggggagatggcacacataatgctggattgcttggtcatggtagtaacgtgagccactggatcccaaaaagagtgtcaggtccactggatggtcttccggtatcagctgtatcttgcggcacatggcatacagccttgataactagctctgggcagttatacacatttggtgatggcacatttggagtcttaggtcatggaaacagagcatcatgctcatatccaaaggaagtggagtctttgaagggtctgaggacaatttctgtttcgtgtggtgtgtggcatactgctgctgttgttgaggttatcatttcacagtcaaatgcttcatctggaaagttgttcacttggggtgatggagacaaatatcgcctgggtcatggtgataggtcttcaaaactgaaaccaacatgcgtcccctcgttgatagattacaacttccataaggctgcatgtggccatactcttacgattgggttgactacctcagggcacatttttactgttggaagccctgtgtatggacagcttggcaatccaaataatgatggaaggtatcctcgcctggtcgaagagcagcttgggggtggcggtgttgtggaggttgcttgtgggtcttatcatgtcgcggttttgacaaatgctggtgaagtttacacatggggtaagggtacaaatggaagattaggccatggtgatattgcggatcgtaaagtgcctacactcgttgaggcattgaaggataggtctgtaaaacgtgttgcttgtggatcaagctttacagcagccatctgtcagcacaaatgggtgtctgggatggagcagtctcagtgctcggcatgcaggcagccatttggtttcactcgaaaaaggcacaactgttacaattgtggtttagtacactgccattcgtgcagttcaaagaaggctctgagagcagcattgtctccaaacccgggtaagccataccgtgtctgtgattcatgttacgtgaagctaagtaaagttttggattctggtgttagttatagcagaaatactatcccccgcttacctggtgatacaaaggccgagagaatagacacaaaggcaaccagagttgcacagtctaatagttcagatatgattaggaatttggatgtgaaggcagccaagcagacgaagaagtctgagtattcgtcgcaagttccagcgacgttgcagctgaaagacatccctttcatcagcgcacctgacctgcagaacctgtctacagtggctaatcagtacccttatgaccccagatctactttaccatccttgagaatgccatatctgaactactccagctccatgtcctcggaaagctccgagagtcttaaggatgcaaatgaactcctgaagcaagaggttcaaaaactacaagcggaggttaatagtttgagacaggaacgtgaacagcaagatgctgagctgcagaaagcagatgctaaagcccgtgaagcgatgaaccttgccaccgaggaagcatccaaactgaagacagcgaaggatgtcataaattcactaacagcccagctaaaagaaatgtctgaaaggcttcctcctggagcatgtgacgtgaagaacaatggacgcgttatgggcgatttagcgcccgaaatggggagagagaagcagatgcgatatggtgatcggttcagtggattgcctgctcaagtttaccaaacaagcaactacagtgaaacagccatggttcctccacaagggagcagcaggagcgagcacgtcgacggtgtccgagagttcttctcccctgtgcagcagatggccaatggaggagggtctacgactattgggtatcgttacaggtcagatgaccacgaccgaagggagacagacaggttccagataaatctgcagagcttgaatacgagaagctctaattctcccagtaaccaagtcgacgcggagtggatagaacagtatgagccaggagtgtacctgactctagtttctcttcgtgatggaaccaaagagctgaaacgcgtacggttcagccgaaggagatttggtgaacaccaagcagaatcatggtggaaagacaactgtgagaaagtgtacgacaagtacaatgtctgcggaacagatcgtctctcttcggtaacgacagcctagcgtaggccctgcatgcatgacatccaaaaaggagggcaaagccagtgcgcctgtagcatcgttgtgccctctttctttctctccatcatttgaagagcgggaggcatccagcttggttttggaacgtgcgctgcttaatcgacttgtttatctttttctgtcacctgcttggattcccctctctctcgttgtcgttgtatagaggagatgatggaaccaaagcagttgttgctcctttgactgagatatactatatacacgtagctgggcgtaaatcgtaatgcaagccccgttatcgtcgccttgtgatgtatctcttctgtcagtcgtcatgcatactctgtctgtaacacctggtacactctcgtattgatggtacatatttctgacagtcctttttaaaaccatagctcatccttagatcaacactagtcttttgtgcg

SEQ ID NO: 106672 - DNA, 117 bp, Zea Mays
attctaccaattttgggctttacagacgcgcaccaaggtaacctagtctatgacacgggggcccgggtccacaagtcatatagattgtgcgctgaactttgggtgcggaagaggtga

SEQ ID NO: 106673 - DNA, 1991 bp, Zea Mays
cccgctatggtctcatccgtgtgttccccacctaaccccaccccccaatccgccatgcccggcggctcctgccccgacccggccgcggaagcgcagctcccgccgccgatccaccacctgccgccggacgcgctccacaacgtgctgctccggctgcagctgcgcgacgccgtcgtgtgccgcctcgtctcgcgcctcttccacgagaccctctcgccgcagctcctcgcgctgctgcccaccctgcgcctcctcctcctccgccacccgcgccccgacggcggcggctgcctccacgccttcgaccccgcgcgccgcacctggctccgcctccccttcgctcacttcctcccctaccagtccttctcccccgtcgcctcatccacgtccctcctctacctctgggtcgagacctcctcctccacctcgcccctagccctccagtccaccactacgtcttcctccgccgcctcgcccgcgcacccgctcaaatcgctcgccgtctgcaaccccttcgccggaacgtaccgcctcctgccccagctcggatccgcctgggcgcgccacggcaccgtcctcgccggccccggcggcatggtgctcgtcctcaccgagctcgcagcgctgtcctacacaccctccgaatccggcaagtggatgaagcacccgctctcgctgccgtccaagccgcggagccccatactggcctccgccgccgtcttcgccctctgcgacgtcggcacgccgtggcgcagccagtggaagctcttctcctgcccgctggacaggctcaccgggggctgggcgcccgtggagcgagcagcgtggggagacgtcttcgaggttctcaagcgtcctcggctccttgccggtgccggcggccgccgggttcttatggtcggcgggctcagatcctcgttcgccatggacgcgccgtgctccaccgttctcatactccgtctagatctagccaccatggagtgggacgaagctgggcgcatgccgcccaatatgtaccgctgcttcactggcctctgcgaggctgcttcacagggcaacgccatgcctgccaccgctggcgggggtaacaataaggtcaaggttttcggaggcgatggaaaggtgtggttcgctggtaagcgagtgcgcgggaagcttgcaatgtgggaggaagatgagacggggagcagtggcaagtgggactgggtggatggtgttcctggttatgatgatggtgtgtatcgtggatttgtgttcgatagtggattcacagcgattccttgatgcacatggaaaacgtatcctagtctggtgcactcaaattgaggtttaatttgacccaggacatctatctatcgcatgcacaggatctgttatgcccacacattttatttacagtctttagcatgggctgttgatacttatcctattattaccagttgcctttaacttcatgagaatagaggaataatgggaggggagcaggccagcaaggccaagactctgcagctgctgctgttcctgttggttctgtcgcggtggccagcgcagagcttactctggtcattcacggcacggccgatctgtaaggggacagcagcagtagtcgatttgagggcacagagcaacaaggaaagggaagagaagtgacaagaatgaaaagtttcgggtggcggcgcatctggagagcgggagggagtatgtgggctggggcaaacacctcattccctgtccctccccttccattctgctgttttgcagtttgttagatcggtatggcgtcgacttgccttgtaagtgcctaggtgagattggaagggggtggtttgcacctgccttatcgccttaggccttgtttggttgcatatggattgagggggattaaatcctcttctattcaattttgactagaaaggtatttatctgctccaaacctcttcaatcccctcctaacagaacaagtccttaaggatcatggttttagcctacca

SEQ ID NO: 106674 - DNA, 1562 bp, Zea Mays
gtagcggacaacgcggattgcgcgactgcggcctgagcgacgtgaatccaagcgtgcaagcaagcggcggtaatggcggcggctctgcaagccacgccgctcaaaaccctatccatctcccgccggcgcgtcggcggcgcgggggcgcggccgcgtccgatggcggcgagcttccgatgctccgcggcggcgaggagctacaatatcacgctcctccccggagacggcatcggccctgaggtggtcgccgtcgccaaggacgtgctgtccctcgccggcgccctcgaaggcgtcgagctccggttccaggagaagcttgtgggtggctcggccctggacgccaccggcgtgccgctccccgacgagacactcgacgcggccaagggttccgacgccgtcctcctcggcgccattggaggctataagtgggataacaatgagaagcacctcaagcctgagaccgggctgctgcagctccgtgccggacttggggtctttgccaatctgcgaccagctgcagtattgccgcagttggtagatgcatccactctgaagaaagaggtagctgaaggtgttgacatcatggttgtcagagagcttactggaggcatctacttcggcaaacccaggggttttggaacaaatgacaatggagatgacattgggttcaacacagaagtttattcagcttctgagattgatcgtatcgcacgagtcgcatttgaggttgctcgcaagagaagagggagactatgctcggttgacaaagcaaatgtcttggaggcatctatgctttggaggaaaagggtgactgcactagcttcggaattccctgatattgagctctcacacatgtatgttgataatgctgcgatgcagcttgttaggaatcctaagcagtttgacacaattgtcacaaacaatatttttggtgacatattatctgatgaagcatcaatgattacgggaagtattggaatgctcccatctgccagtgttggtgaatcgggacctggtctttttgaacctattcatggctctgcccctgatattgctggacaggacaaggccaatccattggctacaattcttagtgcagcgatgctattgagatatggcctaggagaagaaaatgctgcgaacagaattgaagctgcagttactgaaacactgaaccatgggttccgaactggggacatatattctcctggaacaacattggttggatgcaagcggatgggggaagaagtcctgaagacagtgaactcactgaaggaagtggctgctgtaaactgatgcatgttggtacttaatttataaccctacaggatgagatggttgaaagggacttgcattttattagaagttgagcctggtgaaagagagcactgcgtctggttttgaatcgcaactgtagcggctgaaccgacggtcttttttcatttctggtgtttgttggccttcctgtaactcaattttgtacaaggaaggataagcatatgtatgataaaatgggatagtttatgccagttgaataaaatatgttctataacttctattca

SEQ ID NO: 106675 - DNA, 1794 bp, Zea Mays
tggcctacatatactctaaacccttcgctcggtcgccggaaccacgccccacagagagagagagagaaaaaaaaaccctcgtttggtcgccggcacacaagacggtagtaggcggcgatcgatcggtggacgacggacggaactcagctaagcaatctcgcctcgtcttctccggcggcgacacacacgcgccccttctacgtcgagaaatcagttccccatcctccatcatccattccgattctccatctatcgctggtgcggcaggatcgcagtagctagcacgcgtccgtcgtctcgggtccgtccggcggcgcaatggccgcctgtgccggcgtaggacctgttgtggggatggtggtgttccagattatctttgcatttgtcaatatcttctataagctagctgtgtcggacggcatggatctgagggtactcatcgcctaccgctaccttttcggatcagccttcctcggcccgctcgcctacttcgtcgagaggaaaaaccgaacgaaactgacatggagggtggtgttcttgtctttcgcgtgtggcctctcagggggcacgatggcgcagaacctgtacatcgccggcatgaagttcacctcggccactttcgcctccgcgacaaccaacctcctcccggcgtgtaccttcgtcatcgccctcgtcttccgctacgagaagttcgccatccgcagcctggccagccaggccaaggtcgccgggaccctgctgggcgtcggcggggccatgctgctcaccttctacaagggcgtcgacatcacgccctggcacagcaacctgaacctcgtcgccacgctcacccagcaccaccaccatcacaccaccaccaccaccaccaactacgccatggggtcgctgctctgcgtctgcagctgcttcttctacgcgctttggatcgtcgtgcaggccaagctgagcaacgagtacccgttccactactccagcaccgccctcatgtgcatcatgaccacgctgcagtcctccatcttcgcgctctgcttcgacagggacgcctcgcaatggcgactcaagttcgacatcaggctgctctcctgcgcctactcgggcatctttgcgtcgggcgtcgcgctggtgataatggcgtggtgcgtgcagcagcgcgggccactgttcgtctccgtgtttagcccgctgatgctgctcattgtggccgtgctgagctcgctgctgctgggtgagaagctgcacctcggcacggcaatgggcgcggtgctcatcgtcatgggactctacgccgtgctctggggcaagggacgcgaggcagcggctgaggcggccagggtcagcgtcaacgaccaccccaccaccagcaacagcaacagcagcgaggaggacgacgacaagaagcggcacgttagcgtcccaatgcctcccgcaccaaactccgtctgatgttaagctacaaacggggccggggttggggcgaaaataaatacggagtactagctagtatatataattatatatatatatacgactatggtgatacttccattcccatgcccatacatccagtctctcacaacagaaatcggatctctcaaaacatgatgatagccgatccgtcgccgtcgtcccaatcagactagctagcgcagcgccggaagagtctcgctctcgacctcgttccccatcgagctcgatcggccacccgccggcctcgctcctttcttcatcgctagctctcttgcgcagtggccggtgccggccctgcggtggcctcgcggcgatgcagacatgcag

SEQ ID NO: 106676 - DNA, 4337 bp, Zea Mays
cttaatcagtccagttttcttgtcaagctcatatttaactttgcttccctttgtgatctcaacaacctgcataaagatgtaaataatgcagtcactgtatgaagcgaactagtagatttgttaaacattatgataaaaaatgcacttttttgctcgacaagcaaatcgttgtcaacaggctcatgtaccattatgttgtaggtgcatcaaatgttcatcaatgcaaatatctgtaaccaaacaattaaataggctatttgcgtaattgaaattaaaggaacattctgctcaattgaaaagctataaatcgattttagctcgtcaaacaagaaagaacaaacaaattgcttgggtaaacacgagcctagcgatttatggtgattttactagaatcacatttctagctgcaatctgtaaaaaaattaatagaaagctaccatttctatgtcaactcaacacataaatgcctagaacaaaaacaaccctgacaaactgtcagctacaatactatacactattagggctgagggagtaagatagctttatatttgggaagtcaatagatctacccatcctgttctctaatcaactattgtggatcagtcaatcatggagtcatcatgcgcatcatggtactcgtttgctaattgctaggtatatttcctttctatccatcataatacttctactacatactagagagcggatgtgtcagggcctaaggaggccgacggaggggctgcggcagcagcagccatgagccctccaagggggattagataaggatagttagagataagattagaagattagttgagattatctaggagattagttgagattatctaggaaggtgatcagatagtagttgttgaggctccatcgatgggagatttgtggaccaacataagggctgatctcacaaagatgcaagccacgctccagaaggttgagcaagggctgctgcaaatcaaggcagcagtgcaacatgagtaacaccagctggcgttgtccgcacggctccggacatcggcggctgtgggcatacaagctgctgctcgtggcttccttgcacgacagaaagtgcgggagatgcgctggcagatgctcgaggcagccttggtgacggttgacctcggcacacgtcggcgcgacctcaccctatcggacggccatcagcagtggcaccaggccgctatctcgaagtgcgagcatgatacgtgtcccgcgggcgacgaacttcaactctacgacagcggcggtagggaaggcactcacctcgtcatcaacaagggcgcactatttagcgccaccacattccgctactggccgccacgagggcgcctccgctggttattgttgcgacctattccaagtgcccatccatgtgctcccctttcgtgcagatggcgtccatgggatccaggtggctgcacacgtgcgtgtccgccttatcttatggggtaaaaaaatcagattcagaataataagataagccgagatgtaaaaggcttgtcttctatgtgtttggttttgggtcaagtagactcggtctttgagcacccgttatgcggcagctcgagggcgagctgcttgttcaggaggggtgtagtgtcagggcctaaggaggcccacggaggggctgcggtagcagcagccatgggccctcaagggggattagataaggacagttagagataagattagaagattagttgagattatctaggagattagttgagattatctaggaaggttatcagttagtagtttgttgagagtttttaggagataaggatctctagctagataggggcagccaaccggcctatttatgtaatcaatggatgagaaataaagcaggcaagaattagaagggagaaaccctcctcttgcttggccgtgggcaaaggcccccggccgacgttcctgcccatcgatacccctctccaatccctcaccgatctagtgaccataacatctgtatcggctagcttgggtttcgatctgatcccatggcttctgctgccaatttcgcggcgtcatcctggcaatcggcgtccccatctccatggacaacgccgcatgtcaccttcgccacgccgtcctggcaaccgacgtccccatctccatgggttgcgccgcatgccaccttcgtcacgccatcctggcaaccggcgtccctatctccatgggcagcatcacctgccaattttgtcaccacatcctggacgccagcgtgcccatccccagggacaatgccaaatttcatcacatcatcttcgttgacggcgtctccgtccccatgggcgacgccactaggggcagccacgactcagcaatcaccagctccatcgatgggagatttgtggaccaacataagggctgatctcacaaagatgcaagccacgctccagaaggttgagcaagggctactgcaaatcaaggcagcagtgcaacatgagcaacaccagctggcgttgtccgcacggctccagacgtcggcggctgtgggcatacaagctgttgctcgtggcttccttgcacgacgtagagtgcgggagatgcgtcggcatatgctcgaggctgccttggtgacggttgacctcggcacacgggtgcgcgacctcgccctgtcagacggccatcaacagcggcaccaggccgctatctccaaatgcgagcatggtacgtgtcccacgggcgacgaacttcaaccctacggcagcggcggtagggaaggcactcccctcgtcatcgacaagggcgcactatttagtgccaccacattccgctatcggccgtcacgagggcgcctccgttggttattgttgcgacctattccaggtgcccatccatgtgctcccctttcgtccagatggcatccatgggatccaggtggctgcacacgtgcaagtccaatgtgcggagggtgtccgccttatcttatagggtcaaaaaaattcggattcggaataataagataagccgagatgtaaaaggcttgtcttctaggtgtctggttttgggtcaagtagactcggtctttgagcatccgtcatgctgcagctcgaggacgagctgcttgtccaggaggggtgtagtgtcagggcctaaggaggccgacggaggggctgcggcagcagcagccatgggccctccaagggggattagataaggatagttagagataagattagaagattagttgagattatctaggagattagttgagattatctaggaaggtgatcagatagtagttgttgagggtttttaggagagttttaaggagataaggatctctagttagatagggacgactagctagcctatttatgtaatcaatggatgagaaataaagtaggcaagaattagaagggagaaaccctcctcttgcttggccgtgggcaaaggcccccggccgacgttcctgcccatcgatacccctctccaatccctcaccgatctagtgaccataacaggatgatttgttgaacttatgcaaatcaggaaaaaatggttcctacaatggtgggttttcctgttttaagttcaaaataaagaccctgccaaccttttatgccaactgaataatcgttcagaactagtggcagaactgtgggttgaacaacctttcacatgacagagataattatacaaattattcgataataacagaaaaaccatgactcaaatctgccttgtatttgacaaagttaattgcactaatcattcaacactacagagagatcatgatataggactaactggtcaacatttgaggcaaaatcattagtcatacttgcccttcacatgacagcactgattatactaactatttaacactaatgtcaaatcgtgtgtagaacctgccttctatgtgtctggtttaattacactaaatgttcaacattaataatgcgattatgagtttaaactaccttttacttaaacagaattaattatattcatgagtggaacctgcctttttacacaacaaaaatagttaacgcttcaacaataacggcacaatcatgaatcaccttctagctgagtgaaaaaatcatttggtaaccgttttggtaaagtcagtttaaataaatgagaaatgctgaatcatccaaagtgttgttcccaacaacttcagtctgattgagataccataccaatataaatggagtgagacttaagtggtcagaaagcactacagaatcaccattacagctgcatgaaacccctcaccttcccgtagatggttccagacaacctaagtccccacagcaccgaacatataacacatcaaacggttctaaggtaatgctggtacttacaac

SEQ ID NO: 106677 - DNA, 903 bp, Zea Mays
cttaatcagtccagttttcttgtcaagctcatatttaactttgcttccctttgtgatctcaacaacctgcataaagatgtaaataatgcagtcactgtatgaagcgaactagtagatttgttaaacattatgataaaaaatgcacttttttgctcgacaagcaaatcgttgtcaacaggctcatgtaccattatgttgtaggtgcatcaaatgttcatcaatgcaaatatctgtaaccaaacaattaaataggctatttgcgtaattgaaattaaaggaacattctgctcaattgaaaagctataaatcgattttagctcgtcaaacaagaaagaacaaacaaattgcttgggtaaacacgagcctagcgatttatggtgattttactagaatcacatttctagctgcaatctgtaaaaaaattaatagaaagctaccatttctatgtcaactcaacacataaatgcctagaacaaaaacaaccctgacaaactgtcagctacaatactatacactattagggctgagggagtaagatagctttatatttgggaagtcaatagatctacccatcctgttctctaatcaactattgtggatcagtcaatcatggagtcatcatgcgcatcatggtactcgtttgctaattgctaggtatatttcctttctatccatcataatacttctactacatactagagagcggatgtgtcagggcctaaggaggccgacggaggggctgcggcagcagcagccatgagccctccaagggggattagataaggatagttagagataagattagaagattagttgagattatctaggagattagttgagattatctaggaaggtgatcagatagtagttgttgaggctccatcgatgggagatttgtggacc

SEQ ID NO: 106678 - DNA, 417 bp, Zea Mays
atgactttccatagagaagataatcctttagggccttctttccttctgctcgtttttgccgaaccacatacctctcataatttttgcctggctgagcaaacttctgagtgtttgattcctttattgattgcctcgttattctgggctttcaaggtttgttcttgcttggccaagagagccaatccggctcgcctcggctggcaaggctgcctttccctggatgcctttcgtgctcctttttcgctctgcacaatgttttggcagcaggaaatctgtcagaatgtaaattatatgcgtagaactgccctcaaaaaggagaaattttgtcccctgacaatgacttgtggcagtcccatttgttcctccacttggcgaaggaggcgggcgtactgtggaaggacgaggaggcgcctgtga

SEQ ID NO: 106679 - DNA, 1123 bp, Zea Mays
cccttggtggatggcgatgagctggtgcgtgctgccaaaaagcccaaaacgtcatcactcacccaacggcagggctgcctcctgcctgcatctcagtgtccagtgtccacgcccgcccacaggccacaccgtccatcctcttcctcccgtgccgcgcatctgtcggctgccgcgcgcggcaagctaatccatggatctgcactacggcgcccgggtcggggaggccatggcggtgggcgaggcggcctacatcgccaccgcgggcgccggcgtcggcgccggaccctccaccgtggtagacgttgtgactcgcgagtcggcagcgcaggcgctgggcacggtggtgcagctgcacttcgacaagacggtggagaagaagcgcgccgccgacgcgcagaagcaggagctgtggcgcctcttcctggccttcttcttcctgctggcgctggtcctgtcgggcgtcgccgcctccccgcccgcgcgcctccagtgccgccacctctgggcgcccgcgggcctgctctcgctcgcgcacctcgccttctacgccgccgtcgcgcaccacctccgctgcctcaacggcttccgctaccagcgccgatgccacaagctcacgctcgcgctcgccgccgacaggctcaggatgctcaagtccgcggccgatgtcgtcccggccgcagacgtcgaggtgccgtaccaggagccgcccgaggcgtacctcgccaagttcaggcggagctgggccatccactttgccttcctcatcaccacattcgcattctgcgtcgccgcctccgtcgcaatcctctgcttctagtacccttctatggctgctgcttctagtttttggatcgatctgtctaggagatcctggatccatctctctgcatagcataatgcatcagttgaatagagtctgagacgatggcatttcagtttcagaggagaatccagattacctaccatcgtttcttttctttattataagtagcacttctaggagctgcactagctatgaaatgaaaagagaggtcaagattctcctctcctaattgtgtcggaatgatgcttttgcctgcccctgctaccagcctaccatgagtatcagtcttttcattcattc

SEQ ID NO: 106680 - DNA, 1388 bp, Zea Mays
aaatatataacgcatactacaacaccttgtctcttgcttggcctgttcacaaattatatgcaatcgcaagcgagcagaatggcgaggtccagtggtagtagaccagtggccctcgtgctgctggcgctgtgcgccgccgccctctcgtcggccacggtgaccgtgaatgagcccatcgccaatggcctctcctggagcttctacgacgtttcctgcccgtcggtggagggcatcgtgcgctggcacgtcgccgaggccctccgccgcgacatcggcatcgccgcggggctcatccgcatcttcttccacgactgcttcccgcagggctgcgacgcgtccgtcctcctgtctggttccaacagcgagcagatcgaggtacccaaccagacgctgcgtcccgaggcgctcaagctcatcgacgacatccgcgccgccgtccacgccgtctgcgggcccacggtgtcctgcgccgacatcaccacgctcgccaccagggacgccgtcgtcgcgtccggcggccccttcttcgaggttcctctcgggcggcgcgacggtctggcgccggcgtcaagcgacctggtgggcaccctgccggcgcccttcttcgacgtgccgacgctgatcgagtcgttcaagaaccggagcctggacaaggcggacctggtggcgctgtccggcgcgcacacggtgggccgcggccactgcgtctccttcagcgaccggctgccgcccaacgcggacgacggcaccatggacccggcgttccggcagaggctgacggctaagtgcgccagcgaccccagcgggaacgtggtgacccaggtgctggacgtgcgcacgcccaacgccttcgacaacaagtactacttcgacctcatcgccaagcaggggctcttcaagtcggaccagggcctcatcaaccacccggacaccaagcgcgcggccacccgcttcgcgctcaaccaggccgccttcttcgaccagttcgccaggtccatggtgaagatgagccagatggacatcctcaccggcagcgcgggagagatccgccgcaactgctccgtgcgcaacaccgccctcggagatgtctcatcgtcagcccaccagctcgagaccaccgccggcgacgaggggctcgcggccgacgcgtgaaatgatgattagctgctgttgttttttctctggtctccttcgattctgttgaaataaggcttgctgcatcatcggtatagtttgcattcttctacccatcaatatggtatatcttcctgtgtcagccccgtgattaccatgcagaccaacgcgtgagcatctatatgtcttaacaatatcagcagcaaagcatgcatttgatgtgttcatttgaaacacaaagtctagacacacaa

SEQ ID NO: 106681 - DNA, 1382 bp, Zea Mays
gaagacacacaccaccactgcacgcaccacccatcactgcagtactgcaaatgaagtgcaaaatggccagcagtagtagagtagtagcagccgccgccgtccttgtagccttttgcgccgccgccctctcgtcggccacggtgaccgtgaacgagcccatcgtcaacggcctctcctggagcttctacgacgcgtcctgcccgtccgtcgagggcatcgtgcgctggcacgtcgccgacgccctccgccgcgacatcggcatcgccgccggcctcatccgcatcttcttccacgactgcttcccgcagggctgcgacgcgtccgtcctcctgtctggttccaacagcgagcagaagcagggacccaaccagacgctccgtcccgaggcgctcaagctcatcgacgacatccgcgccgccgtccacgccgcctgcggccccaaggtgtcctgcgccgacatcaccacgctcgccacccgggacgccgtcgtcgcgtccgggggtcccttcttcgaggtgcctctcggccgccgcgacgggctatcgccggcgtccagcgaccaggtcttcacgctgccgggccccgacttcgacgtgcccacgctgctcgccgcgttcaagaaccggagcctggacacggcggacctcgtggcgctctccggggcgcacaccgtgggtcgtggccactgctcctccttcaccagccgcctcccgcccaacgccgacgacggcaccatggacccggcgttccgccggacgctcgcggccaagtgcgccaaggacgccagcgcggcgcaggtgctggacgtgcgcacccccaacgccttcgacaacaagtactacttcgacctcatcgccaagcaggggctcttcaagtcggaccagggcctcatcaacgaccagaccaccaaacgcgccgccacgcgcttcgcgctcaaccaggccgccttcttcgaccagttcgccaggtccatggtcaagatgagccagatggacgtgctcacgggcaacgccggagaggtccgcctcaactgcgcagtgcgcaacgccgcccgcgtcgtctcagcagaccagctcgagaccgccgccggcgacgaggggctcgcggccgacgcgtgattagaattttgttttacaataaatgggtggcgagcgcgagttgcgagtagaacgagagccaagagctgactgttgtggtgtgtggctcatggaagcctgtcttttgctgttgcttctccagttctccttgtcctatctgtacggcgcgtgcactactctctccttatattttttttcttcatttctcgtgaaaaaggcacttcatttaccacatgaaagatttccaagcctttacatacgaagggacacggaaattcttgcggc

SEQ ID NO: 106682 - DNA, 86 bp, Zea Mays
accatttattatgcttgcaatgctccctttgctatttgtagaaagggtaaaaaggtaattgctagaaagttaggggcaagatgcaa

SEQ ID NO: 106683 - DNA, 1701 bp, Zea Mays
atgcatgaggaccgatcgactagctccacctttatttttattccgttgagagttatcgtcatctaagtttttaagaagcgtaaaatctaacaaagctcggactaagagcatggatctgaagccagcgttcggaaccttcggaccctcttctacattgctttaaataatatgacaatatcatacagctaagctagcggtactggccatgtttgtgtgactgagccggccagctccgccaatcccgttggcttggctgcaactaacgaattggctataaatatcagcagctgcgggcttcagtgctcaaccaaagctagctactttgttgctgtttttattcgtttgtcacataagcagtggtggtcggtcggccggcgacaatgagcggccgtgtgttcgtcctggccgctgccttcggcgtgctgctcgccgcagccgccgtgtcctcgaggcccgtcctgactccgctgggtactagccgccctgctgccggcgacctgtccgtgtacttccacgcggactcgtgcccgcagctggagacgatcgtgcggtccagcgtggacgcggcgctccagcagaacgtccgtctgacggcgggtctcctccgcctcttgttccacgactgcttcccgcagggctgcgacgcgtccatcctcctggacaacggcgagcgcggcctcccgcccaacgtggggctgcagcaggaggccgtgcagctggtggaggacatccgcgggaaggtgcacgcggcgtgcgggcccaccgtgtcgtgcgccgacatcacggtgctggccacccgcgacgccgtgagcctgtccggcgggccttccttcacggtgccgctggggcggctggacagcgcggcgccggcgtccagcaacgacgtgttcacgctgccgccgccgacggcgacggtggacgagctgctgacggcgttcgggagcaagaacctgtcggacccggcggacctggtggcgctgtcgggcgcgcacacggtggggaaggcgcggtgcagctcgtttggcgacgtggcgggcccggccaccgacgacgtgacgcggtgcgtgacggcgacgtgctcggcccccgggagcggcgacacgctgcgggacctggacttcctgacgcccgccgtgttcgacaacctctacttcgtggagctgacgctgaggaagaacaagggggtgatgctgccgtcggaccaggggctggtgagcgacccgcgcacgagctggctcgtccagggcttcgccgacaaccactggtggttcttcgaccagttcaggacctccatgatcaagatgagccagctcaggggaccccaggggaacgtcggcgagatccgccgtaactgcttccgcccaaacaccaacggcatcgccgcctctgcttgagttgactgaccaggcaccgatccattacttcactttcactgtgtgtaataattaataataataaaacaaaaacaacgccagcccgtacgtgccgtgtgaggggggcacgtggttgtggctatactgtagccgtcaccaccatgtcggcgtcgtccatgcatgtcgcattaccgatttttgttcatgttccgatctcatctcatcatctcgctatcaataacaattataatagtgtttattagtagtacatcgcatcacatggcgactctgactctcaactatgatcacctactcaccagtttcttgt

SEQ ID NO: 106684 - DNA, 1881 bp, Zea Mays
tcgttttcttgtcatttctctgctgcctgccttgccggcctcaatgacagccatacatgagagcagataagggaacgatgcatttcactattgggctgtgtggtccgctgaccttgactttgcacactccaatccttatgtcacccaacccaatccaagtgcgacttttcaattattcctctttttttaaccttaacctaatcacaattgtctgtatgtcaccccaattctctgactgcctagctagtttatggaccaatatgcgtgcgacctgacgtttcgccgtgacattggctcactattggattgctgcgacgactcttcagtttattccgtacttgacccatatattcttccttcttcttgcatccatcgatcgttttcctctttactgttcactcgtttttgggttctccttccagagctagccattcatggagccagcatcagttgccttccttggtgagcaagccgtcctgggctgggcagttgccacaacctactaacgtacggtacggctataagtaccggccacccctttgtcgtgaagaaaccacaccgtaccacaagccctcgatcgagctagctaagtaacctaggcggtggagtggagtggatctagtgtgcagaaacatggcgcgaagcagcagcccagctaggatggccatgttgctgctcttgctctcggccctcgcagtgctcttcccacccgccgtggccgacgacctgctctccgtggacttccacgccgcgtcgtgcccgcagctggaccgcatcgtgcgcaccgccgtgcaggccgccctccggagggagatcgcgctcgccgcgggcctcctccgcatcttcttccacgactgcttcccgcagggctgcgacgcgtccgtgctcctcaagggcaacgccacggagcagaccatggggcccaacaccacgctgcagccgcgggcgctgcagctcatcgacgacatccgcgccaaggtgcacgccgcctgcgggcccaccgtgtcctgcgccgacgtcacggcgctcgccacccgcgccgccgtcgtcgcgtcggggggaccctcctaccccgtgcccctgggccagcgcgacagcctcgccccggcgcccgaggacgacgtcaacgcgctcccgtcgcccaccaccgccagcgtcccggagctcctggcggcgttccggggcaggggcatccgcgacgtggccgacctggtcgcgctctccggtgctcacaccgtcgggagggccatctgccccttcttccaggaccgcgccgacagccaggaggatgacttcgccaggcagctcaaggccgactgcgccagggaccccaaccggctgcagcagctggacgtcgtcacgcccgatgccttcgacaacgtctactacaagaacctcaacgccagccggggcgtcttcacgtccgacatggcgctcatcagggaccctacaacggcgccgatcgtcaggtgcttcgcggggagcaaggacgccttcttcgcccagttcgccacctccatggtcaagctcagcaaggtgcccaggaagccccccgggaacgtcggcgagatccgccgccgcagctgcttcaggaccaataacgccaagatgagcatccttgacgtcgacgatgccgtgggcagcttggcggcggcgtctgcccgttgaccaacaccaactattatattacctgctggctgtggctgctgtacgcctgtactgtactaggcgtcgtcggcgccttacgtgtatgtcctgtacgactgttatcttgctttggttggtggctgcatgtctgcatgctaagtttaagtacccacgcacgccacgatggcttcttgcttgttcaatcttatctatatatatatgttatgaccagtg

SEQ ID NO: 106685 - DNA, 1232 bp, Zea Mays
atggcggcaccaagggtgtactgtagtggcgtcctcaccattagcctgctgctggccgccgtcgttggcgcagtagtgccatctcttgtgctggtgactgacgaccgtaccggtggcttgtcgctggactttcacgcggcgtcgtgtccgcagctggaaggcatcgtgcgcggcgccgtgcaggccgagcgaggccaggacgttcaggtcaccgccggcctcctgcgcatcttcttccatgactgcctcccgcaggggtgcgacgcgtccatccttctggacggcgagaagacctttgggccgaacgcttctctgcagccgcgggcgctgcagctgatcgagagcatccgcgccaaggtgcacgccgtgtgcggcgccaccgtgtcatgcgccgacatcatcgcgctggccacccgcgacgccgtgagcctggccggaggtccgtccatcgcgatgccgcagggccgcaccgacagcctgaggccggccaccaacgccgaggtgagcacgctgccgtcgcccttctccgacgtgagcacgctgggcctcggcgaccccgccgacctcgtcgcgctctccggcggccacaccgtggggaaggccagctgcggcttcatcaggagggggaacgacgacttcgcccggaggatcgccgccatctgctccgggaagcagagcctggacgtgatcacgcccgacgccttcgacaacaggtacttcgtggcgctgaggagcacccagggggtgctcctctccgaccagggcctcaacggagaccagcgcacgagccgcttcgtcgccgccttcgccagcaaccagggcgccttcttcgaccagttcgccaagtccatggtcaagctgggcagcatcagggcagccgcacccggcgagatacgccgcaactgcttcaggcccaacggcggccgcgccgccgccgacatcagcgctctcgtcggcggtgacgacgagggctatgcagcatccgcttgatgacaaggtctagcatgcatgcattaataagggatgtatcatgtaacgccgtgttttggtttgcttttttttttccagtgaaagtataggtttgaacttgagtcgtcgatcgatggacgatcggtcgtcgctggtgtatgcgtgtaataataacagtacgtgcattgttggcacgcggcatgcagtttcagatggagatggcagaccagatgcatgcatcacgtaactagtatattttctta

SEQ ID NO: 106686 - DNA, 4208 bp, Zea Mays
gctactcgtacgccggaagcaacgcgaaaaaacaaatcattgtctcgcctcacctcgcctcgccccagccgccgccccagcgatccgaaacccctcttcggccccttccccactccactccactccactctcactctcactcccactcctcacgcgccgccgcctccaaatgccggcgcttcacccccaccgccggtccttccccattcccctgctacttctcctatcgctcttcgcctcctcccctctattcttctccccgagccccgcagcaaccgccgtcggagattgccctctggattttagctgggcaaatttcacactagctgcggcagcctgctctgacccaacgcagcgggcggcgtgctgccgctacatcaatgccttcgttgccatctccattgcccgctatgccaatgccaccggcaggctgggtgtccctcctgcctttgctgagatctgtctcagctccgtgtccgagacattcaagctgcgggggatccccaccgacgccgacgtcttctgcggtctgggccccaagataagggtttcgtatcagtgcgctgggcgggataccgtgttggaaatgatgcagtccccgaacttcaatgacgttatcgggagctgcaggggccctctgtcgctggatatcacctgcaagacttgcttgaattatggcatcgtgtacctccatcgcctcatcggttcagacgataatgtcggcctcagcgtgtgccgcaatgcggtttttgtaacccttgccactcaagggggtattctttcatatgaagatatcgtcacgtgcttctttggtgtccagggaatcaccacatttccaggaccggcatctgtcacatcgacaccagcatcctctccgaatgtcactgttgattctccagctccaaggatcaagagtcttccacagaagcaacaccagcactaccggattacagttattccagggataggaatcggtgttatattgtttgctgtgctgctgcaaatcgtcttagcggtactgattcgaagaaagagcagggaattgaagaacgccgaatttcccgctcggaatccagataacacatttcactacaatcaatcctggagatgccccgaaggccaatcaccaatgttccaaaggtttagctacaaagaaacaatgaaagcaacagataatttcagcacagtcattggaaaggggggatttggaactgtctttaaagctcaatttaatgatggctctatagctgcggtgaaaaggatggacaaggtttcaaagcaagctgaagaagagttctgtagggaaatggaactcttggctaggttgcaccatcgccatctcgtgaccctcaagggcttctgcatcgaaaagaaagaaaggtttcttgtgtatgaatacatggcgaacggaagtctaaaagatcacctgcactcatctggaaggaagccattaagctggcagacaaggctgcagattgcaacggacgtggccaatgctctggagtatctgcacttcttttgtaaccctccactttgccatagggacatcaaatcgagcaacattcttttagatgagcatttcgttgcaaaggttgctgattttggccttgcacatgcatcaaggaccggagcgataagctttgaagccgtgaacacggatatacgaggaaccccagggtacatggaccccgaatatgtggttactcaagagctgacggagaagagtgatatatacagctacggggtgcttcttctggagcttgtgaccggacgtagagcaatccaggacaggactaacttggtggagtgggcacagtcgcacctctcgtcgggagcggtctctcctgaacttgtagacccgaggatcaggggcgctgttgacgtggaccatctgcatgtggtggtgggcatcgtgcagtggtgcacccatagagaagggcggcagaggccctccgtgaggcaggttcttcggatgctctcggagaggctggacccggggaacggcagcttcggcgagggcatggaagacgcggagggcggcttctatccccggagcagcaggtgcggcggcgcacatcaccggaacgagctggtcccatacggcggcggtgacatgaggtctctgcattcctcgtcgagcacgaccaggtcctcttactgcagccgcagcatgctgctggagagcgggcagactcaatcgcccccagaaacccagtgatgaatgaatgaatctagttagttcataggcaacttgttggtggttgctgttatttattattatttgctgtttgtttgttttgtaagggggaaaaaaggaattgtcaagtggtcattggaaggaaccagtggcggcagtgaatgagcaaagcagcagcacatgttccatgtggttgttggtcatcatgtccctctttgggttttgagttttgactgggatctgtgaaattgcttcaggttttttttttttgactagcaaccatgttcagtgcagttgaccaacaaccatgctctgtagataattcaatcaaccgtcgcaaaaaaaaaaacatggtgaaggtggagatagaaaaggtggcgggtggcgaatggctttgctttgctttgctggaccgacacagacacaaacacaggaggggaggactggactggacagccagccgcgcatgaactggcgaggctagtctgtctcgcaaccgacggatctggggcacatgcttgtcctgcgcaggcagtggtatcgtaggttaaggccaccccaagcaggagtctgcttccgttccattgcatcccagtcccagccaaagcaggatgccgcacgccaagacggactcggaggtgacgagcctggcgccgtcgtcgcctccgcggtcgcctccacggacccgcggcgccgtctactacgtgcagagcccgtcccgcgactcgcacgacggcgagacgatcaaggcggccacgtctgtgcactccacccccgcgctgagccccatggcgtcgccgcgccactcgcactcccactcccactcgtccatgggcagggactcctcctccagccgattctcgggccacggccacaacaagcgcaaggccgacaagggcggcagcaacaagggcgcgccgggcggcaaggggtggcaggagatcggcgtcatcgaggaggaagggctcatggacgaggaggaccacacgcggatcgtgccccgcaagtgctactgcttcctcgccttcctgctcggcttcgtcgcgctcttctccttcttcgcgctcgtgctctggggcgccagcaggtcccagaagccgcgcatcgtcatgggcaccatccgcttcgacaacttcatcatccaggccggcaccgacgcgtcgctcgtgcccaccgacatggccaccaccaactccaccgtcagattcacctaccgcaacaggggcaccttcttcgggatccacgtcaccgccgacccgttccagctctcctacagccagctcacgctcgcgtcaggagacgtaagtgaatctgtcctcgtccgtccatccagatggagatccatctatcctggactgtctaacaaagggaatccgtgaatgaaatgcagctccacaacttctaccagcctcgcagcagcagccgcaccgtcagcgtcgccgtggtcggcaacaaggtgccgctgtacggcggcggacccacgctgacggcggcgccggcggccgggggcaaggggcagcagcaggccagcgccaaggtggcatcggtgcccatggtgctgaggaccacgctgcactcgcgggcctacgtgctgggcgcgctggtcaagcccaagttcacgctcgccgtcgagtgcagggtgctcatgaacccaaacaagcagaacaagcccatctcgctcgggaacgcctgccactactcatgatatatttagcctctcatactagctgctcaacatcaccatgcccatgcatccatctcctacctacctctcaattgtactgtaatggagtatttattgatttatttatgctttgcttcgtcttctcttctctgtattgattttctttgttcattccttctacctttcgtatgcatattttggggttattttcgtctattttaatagtgatgacggtgaggctaggtatgtctttcaagagtcgtcagaaggcggaaactttacatgtaaactcaaaacatttaatctaaattatggaatagtccaatg

SEQ ID NO: 106687 - DNA, 4208 bp, Zea Mays
gctactcgtacgccggaagcaacgcgaaaaaacaaatcattgtctcgcctcacctcgcctcgccccagccgccgccccagcgatccgaaacccctcttcggccccttccccactccactccactccactctcactctcactcccactcctcacgcgccgccgcctccaaatgccggcgcttcacccccaccgccggtccttccccattcccctgctacttctcctatcgctcttcgcctcctcccctctattcttctccccgagccccgcagcaaccgccgtcggagattgccctctggattttagctgggcaaatttcacactagctgcggcagcctgctctgacccaacgcagcgggcggcgtgctgccgctacatcaatgccttcgttgccatctccattgcccgctatgccaatgccaccggcaggctgggtgtccctcctgcctttgctgagatctgtctcagctccgtgtccgagacattcaagctgcgggggatccccaccgacgccgacgtcttctgcggtctgggccccaagataagggtttcgtatcagtgcgctgggcgggataccgtgttggaaatgatgcagtccccgaacttcaatgacgttatcgggagctgcaggggccctctgtcgctggatatcacctgcaagacttgcttgaattatggcatcgtgtacctccatcgcctcatcggttcagacgataatgtcggcctcagcgtgtgccgcaatgcggtttttgtaacccttgccactcaagggggtattctttcatatgaagatatcgtcacgtgcttctttggtgtccagggaatcaccacatttccaggaccggcatctgtcacatcgacaccagcatcctctccgaatgtcactgttgattctccagctccaaggatcaagagtcttccacagaagcaacaccagcactaccggattacagttattccagggataggaatcggtgttatattgtttgctgtgctgctgcaaatcgtcttagcggtactgattcgaagaaagagcagggaattgaagaacgccgaatttcccgctcggaatccagataacacatttcactacaatcaatcctggagatgccccgaaggccaatcaccaatgttccaaaggtttagctacaaagaaacaatgaaagcaacagataatttcagcacagtcattggaaaggggggatttggaactgtctttaaagctcaatttaatgatggctctatagctgcggtgaaaaggatggacaaggtttcaaagcaagctgaagaagagttctgtagggaaatggaactcttggctaggttgcaccatcgccatctcgtgaccctcaagggcttctgcatcgaaaagaaagaaaggtttcttgtgtatgaatacatggcgaacggaagtctaaaagatcacctgcactcatctggaaggaagccattaagctggcagacaaggctgcagattgcaacggacgtggccaatgctctggagtatctgcacttcttttgtaaccctccactttgccatagggacatcaaatcgagcaacattcttttagatgagcatttcgttgcaaaggttgctgattttggccttgcacatgcatcaaggaccggagcgataagctttgaagccgtgaacacggatatacgaggaaccccagggtacatggaccccgaatatgtggttactcaagagctgacggagaagagtgatatatacagctacggggtgcttcttctggagcttgtgaccggacgtagagcaatccaggacaggactaacttggtggagtgggcacagtcgcacctctcgtcgggagcggtctctcctgaacttgtagacccgaggatcaggggcgctgttgacgtggaccatctgcatgtggtggtgggcatcgtgcagtggtgcacccatagagaagggcggcagaggccctccgtgaggcaggttcttcggatgctctcggagaggctggacccggggaacggcagcttcggcgagggcatggaagacgcggagggcggcttctatccccggagcagcaggtgcggcggcgcacatcaccggaacgagctggtcccatacggcggcggtgacatgaggtctctgcattcctcgtcgagcacgaccaggtcctcttactgcagccgcagcatgctgctggagagcgggcagactcaatcgcccccagaaacccagtgatgaatgaatgaatctagttagttcataggcaacttgttggtggttgctgttatttattattatttgctgtttgtttgttttgtaagggggaaaaaaggaattgtcaagtggtcattggaaggaaccagtggcggcagtgaatgagcaaagcagcagcacatgttccatgtggttgttggtcatcatgtccctctttgggttttgagttttgactgggatctgtgaaattgcttcaggttttttttttttgactagcaaccatgttcagtgcagttgaccaacaaccatgctctgtagataattcaatcaaccgtcgcaaaaaaaaaaacatggtgaaggtggagatagaaaaggtggcgggtggcgaatggctttgctttgctttgctggaccgacacagacacaaacacaggaggggaggactggactggacagccagccgcgcatgaactggcgaggctagtctgtctcgcaaccgacggatctggggcacatgcttgtcctgcgcaggcaggcaggttccttcctgctcacctcacctcactccaccgacaatttcctttgccttctttcgccgttcatatactccgccgcttctactagtggtatcgtaggttaaggccaccccaagcaggagtctgcttccgttccattgcatcccagtcccagccaaagcaggatgccgcacgccaagacggactcggaggtgacgagcctggcgccgtcgtcgcctccgcggtcgcctccacggacccgcggcgccgtctactacgtgcagagcccgtcccgcgactcgcacgacggcgagacgatcaaggcggccacgtctgtgcactccacccccgcgctgagccccatggcgtcgccgcgccactcgcactcccactcccactcgtccatgggcagggactcctcctccagccgattctcgggccacggccacaacaagcgcaaggccgacaagggcggcagcaacaagggcgcgccgggcggcaaggggtggcaggagatcggcgtcatcgaggaggaagggctcatggacgaggaggaccacacgcggatcgtgccccgcaagtgctactgcttcctcgccttcctgctcggcttcgtcgcgctcttctccttcttcgcgctcgtgctctggggcgccagcaggtcccagaagccgcgcatcgtcatgggcaccatccgcttcgacaacttcatcatccaggccggcaccgacgcgtcgctcgtgcccaccgacatggccaccaccaactccaccgtcagattcacctaccgcaacaggggcaccttcttcgggatccacgtcaccgccgacccgttccagctctcctacagccagctcacgctcgcgtcaggagacctccacaacttctaccagcctcgcagcagcagccgcaccgtcagcgtcgccgtggtcggcaacaaggtgccgctgtacggcggcggacccacgctgacggcggcgccggcggccgggggcaaggggcagcagcaggccagcgccaaggtggcatcggtgcccatggtgctgaggaccacgctgcactcgcgggcctacgtgctgggcgcgctggtcaagcccaagttcacgctcgccgtcgagtgcagggtgctcatgaacccaaacaagcagaacaagcccatctcgctcgggaacgcctgccactactcatgatatatttagcctctcatactagctgctcaacatcaccatgcccatgcatccatctcctacctacctctcaattgtactgtaatggagtatttattgatttatttatgctttgcttcgtcttctcttctctgtattgattttctttgttcattccttctacctttcgtatgcatattttggggttattttcgtctattttaatagtgatgacggtgaggctaggtatgtctttcaagagtcgtcagaaggcggaaactttacatgtaaactcaaaacatttaatctaaattatggaatagtccaatg

SEQ ID NO: 106688 - DNA, 941 bp, Zea Mays
gtctgcccctagttcttctgcggcgaacaaggtcaatccagggccgtggtgcgggtgctgttttttttccaacaagtttatgttggtcgctcgaccgctacagcaatgaagatacagaaagcaaatgcaggtgtccttacaaacttcgaagtccttgacttcttgcggtcaagaggtgccaaaattgacccaatgggatgtttgggggctgttgctgtatcagagtgtaaggtgtatgagtatatcttaaaaacccctgcttgcaaccagacaagggaatcgatttatgaatttgtgaagagaagtgagggtttcaggcttgcagaggctgataagttaaatgtcatcaactggagaccatcctcagctgccgatgcctatgcgatgatagaagaatgtgggaaacgattttccagggatgaacgaggagaagcatgtgatgaagatgaacgagtccaggagtttcttgatatggtgaaggaggttttgccagcccctccgaaagcagaggtggagacagcggaggcagaggccgaggcgggagtagaggcaatgcaagagtgaatgtggtgtaagttaacatatttgagggccagattgcattagacactagtgctaagtgctgcaaggaaacttagaacactcaggtcggctgttagttctggaagctttctccctaacgcttcgtttggatattatcgtattcatctcaatccatgtatattgaggtggattgaggcgtaaattaaactattttacactccaatctgcctcaatacacatggattaaggtgaatacaggagtatccaaacaagccctaaagtttttttactcttaaccatattctacactcggctgtgtttattgtgatatgttgtgatctgcattctgggcagtgcttcatcatttaacagaaaccccagctgtgtattgccccgcg

SEQ ID NO: 106689 - DNA, 216 bp, Zea Mays
atgggcggcgacggcttcgagagggacaagcggagacagggaaaccctttccgaccttgtgacaccggggatggaaacgctgtgcaccccaccggatgccccgcggatcagaccgggtgcatagtcaccaaagaaacaaaaaacctttccctgggtgtgattgggcccgcggatttctatgccagggaaattgccaggatcctcccgggatcctag

SEQ ID NO: 106690 - DNA, 4806 bp, Zea Mays
cgcaccgccagtccgccatcggccaccgcaacagtgcagaaacagagctaaccctgatcctcccctcgcagcctgcctgccaccatcagcggcgctacacctcgccgctgccgccgctggggataaacaaacggaacgaacgcaggttcacctcggatctgcggctcgccggactccgaacgaacgtcacgtcactgaacggacgccacagatttggcctgctccgccccacgggacgcctagccggatttgacagctccacgcgcgcgcgcgcgcgcacccaacccgcgtcttctccggcctgccagtgccgcggccggggctccatccccatccatgcattcgccgaggtcgcgcattcgcgtccgcgacccacacccaaacccgcaccggccctcgggtggcggacgaggaggaggaggaggatgcctccgccgccggtcaccgcctgctccgccctccccgcgttaccggcgacgcccgcagaggcacaccccgccgccgcggcgcggcagcgatcctcaccccgacatctccgccatcgcccgccaccgcatcctgctcgaggccggccgcttcgccgcgcattacctggtcgcccagggcgtcctccccgaccacgtgctcagggacagggaagacccgcccgccagccgcgggaggaatctagacggcggcggcgatcctagatcgagctggaacgatggggactgggcccgcgcctgggaggatgacgacaggcaggcacggaagtcgacgagatgggacaggagaagccagagctttgacgacaggggtaaaaagtaccacgacgccggccgtgatgtagaccggggtgcccgccggactcgagattacgatgagcccaggagacctccgatgtcgagatcctactcgcataacgaccgccgcccttccggctccgctgatggcggcagagtggatccaaggagcaggagcaggagtagaagcagggccaggatccgcagagatttggatcacaccaaggtgacagactctggcattattcctgctgatgctgctgatgatggagactgtgatgtgcactacggtcatgttgatgaaatgccaaggcagcagcggagggtgcctagttcagtggtggttgcagacagtgccgatcaggcaatggctaccgaagacggggaggcggagttcgatatccatggactgaatcgcactcgagacgtttctgaagacgaggacggtgagtttgcagctgctcgcttgaatggtgaagatgatgttcatccgttgaaatctgttaaggaaccggccttgcatagggggtcccagctcagcaatgccgtagaggacagggaagctgccaatgcacccaccatggtcatggatgcttgtacgagggaaacatcaggtgaggacaatgcctactctgaagcaacaaatgaaatggtggctccacatccacatagtgaaggtaaaccagagctgccagcttcgtgcagaccttttgacctcaacgtcgtcgaaactccagatgcctgtgaaatggctggtgatcctcaagcagaccatgtttctgatttagttggctggatacaccagcaaactaactgccatgcttcagaatttcaaggtcaagatgagcgtcacatgctgaagaatgggcacgacttgattaggtatgatctgaacagcgaggctgttgaagacgcacaggatattcacctgctggaggatgagaaattacctgtaggtcttggcattgatgcgcatgatacgactagaatccaatgttggcgcggttcgcatttacgtctgaatcaaaatgctggtgagctggaacatgaaaacgactgtgtgattggtgagcagctgctgctaagtgatggcatggatggacatcttgtccgcgattaccaaatggcgtcagaacccaagatgggtgtctatgatttgcacagctacaatctggaaagcgagaaaatgctcctagatgatggtgcagagaaacacgcacatgataattgccatctacacgacgggcaagtgcttttcaatcagtctgcgaatctacaggctcacaatagggccaatgagcgaacaattcctgtgatcaatctcgaagatgatgattatgaagagcagtctgatatcagggagtttctcgaatccaaaagttatcaatgcctgggacatgcccttctctgagcttgggaagtgggcaagtggccatgttgtttgccaagacggctgcgagattctgcgtcagtcagtgcaatatgtcgtcatcctggagcattggaaacaagatttgcaatgttttaaaggtggatgcatcatgctccatccatacataataattgattgaagaaaggaagtcgttcaggtgctgtactaggagaggatacctgactcaccgacctggcctcagcactcagcagtcagcagcagcttgtaggcgtcttcaaaacttcagcttcaccttcttgtagttgtgttcctttcctttccagtttccatgctggtgcgtacgtgtgcgtgcaagcaatattcagtgtgatgcatggccacaatattcaacttcaccttcttgtagttgtgatttgctgtcgaggtgatgcatggccacaatattcagtgtgtctatgtatgtatctcaggcccggagcagtgagctgcgtctgcgcatgaacgcaaagtaaagctgtgactgtgactgtgactgtcaggaacaggaagtactactacactactggtggcctgtgtgcgctgtcccctgtggagggaaaccaacaaggccaaacacacacgcacgttgggccgagaaaaaagaaatagaaatacgggcccatctcatctatgttctagttaatggaaaatccggcctgtgtcactgatggtagatcaggcccaatgaacacgatcacagccacaccaacgcaccacgctcggctgcgagcttgcgaccccaccgacacacacagcagggaagcgaggggaaggagaggcaaggcggcgcggccagcggcccaggatatctgcgcgtgcgatcccgaggaggcgtcggcgaggtgggatgatatcgcagttcttcgttctgtcgcagcgcggcgaccacatcgtcttccgcgactatcgcggcgaggtgcccaagggaagcgcggagatcttcttccggaaggtcaagttctggaacgacgacgaggcagaggaggcgcccccggtcttcaatgtcgatggggttaactatattcatgtcaaagtcgctggactattttttgtggtaaccacaatggttaatgtctccccatcccttctcttggagcttcttcaaaggattgcacgtgttacaaaagattatctcggcgttcttaatgaagattcattgcggaagaactttattttggtgtatgaattgcttgatgaagtcattgactttggatacccacagacaacctctactgaagttctcaagtcgtacatattcaatgaacccattatggttgatgctggaaggctgccaccgcttggtcctgctgctatgttcatgcaaggcacgaagcgtatgcctggtacagctgttacaaaatctgttgttgctactgagcctggggggaagaagagggaggaaatttttgttgatatcattgagagaattagtgtaacattcagctcgagtggctatatacttacatctgagattgatggaacaattcaaatgaaaagttacctcactggcaatccggaaatccgtcttgctctcaatgaggatttgagcatcggaagaactggatcttcttcatacgattacagaagttcttctggaggaggaacagtcattcttgatgattgcaatttccatgagtcagtacatctggacagttttgatattgacagaactttgactttaataccgcccgatggagaatttcctgtaatgaactaccgtatgacccaagaatttaagccaccattccgtgtaaccgcactaattgaagaagctggaccagcgagggctgaagttctactgaaaataagagctgacttctccgcgagtgccactgctaacacaatcgtagtacaaatgccagtgcctgcatacacaatgagagcgagttttgagttggaagctggagcagttggacagacaaccgattttaaggaaggatccaggagacttgagtggaatctaaagaagattgttggtggttctgagcacaccctccgtgcaaagctgacattttctcaggagtcacatgggaatatcacaaaggaagctggcccagtgaacatgaatttcactataccgatgtacaatgcatcaaagttgcaggtcaggtatcttcagatcgcaaagaaatcgaaggcatacaacccttatagatgggtgcgatacgttacacaagccaactcctacgtagctcgtctatgaggaatcagcatctgtactcttgtttccagtccattttttttgggtgtaatatttgagcgttatcatggacatagtggcgtgtattgtgtaactgtatattgaggttcgcataccgctcagctcctgtagtaacaattgtttttcgtcgtgcaatgtgcagatgaataattcatgttctaatgctgcaaaactgattgaggcgagtacctattgtcttgcataattcctgcgaggttttagaaactgtgaactgacctcgcctgtgggacattgggtcctattgtttcgcataatttctgcaaggttctagaaactatgaactgagctttggccagtaaagctctttgtattaaagtaataatgtattttcagttgagttcaggtactca

SEQ ID NO: 106691 - DNA, 2603 bp, Zea Mays
cgcaccgccagtccgccatcggccaccgcaacagtgcagaaacagagctaaccctgatcctcccctcgcagcctgcctgccaccatcagcggcgctacacctcgccgctgccgccgctggggataaacaaacggaacgaacgcaggttcacctcggatctgcggctcgccggactccgaacgaacgtcacgtcactgaacggacgccacagatttggcctgctccgccccacgggacgcctagccggatttgacagctccacgcgcgcgcgcgcgcgcacccaacccgcgtcttctccggcctgccagtgccgcggccggggctccatccccatccatgcattcgccgaggtcgcgcattcgcgtccgcgacccacacccaaacccgcaccggccctcgggtggcggacgaggaggaggaggaggatgcctccgccgccggtcaccgcctgctccgccctccccgcgttaccggcgacgcccgcagaggcacaccccgccgccgcggcgcggcagcgatcctcaccccgacatctccgccatcgcccgccaccgcatcctgctcgaggccggccgcttcgccgcgcattacctggtcgcccagggcgtcctccccgaccacgtgctcagggacagggaagacccgcccgccagccgcgggaggaatctagacggcggcggcgatcctagatcgagctggaacgatggggactgggcccgcgcctgggaggatgacgacaggcaggcacggaagtcgacgagatgggacaggagaagccagagctttgacgacaggggtaaaaagtaccacgacgccggccgtgatgtagaccggggtgcccgccggactcgagattacgatgagcccaggagacctccgatgtcgagatcctactcgcataacgaccgccgcccttccggctccgctgatggcggcagagtggatccaaggagcaggagcaggagtagaagcagggccaggatccgcagagatttggatcacaccaaggtgacagactctggcattattcctgctgatgctgctgatgatggagactgtgatgtgcactacggtcatgttgatgaaatgccaaggcagcagcggagggtgcctagttcagtggtggttgcagacagtgccgatcaggcaatggctaccgaagacggggaggcggagttcgatatccatggactgaatcgcactcgagacgtttctgaagacgaggacggtgagtttgcagctgctcgcttgaatggtgaagatgatgttcatccgttgaaatctgttaaggaaccggccttgcatagggggtcccagctcagcaatgccgtagaggacagggaagctgccaatgcacccaccatggtcatggatgcttgtacgagggaaacatcaggtgaggacaatgcctactctgaagcaacaaatgaaatggtggctccacatccacatagtgaaggtaaaccagagctgccagcttcgtgcagaccttttgacctcaacgtcgtcgaaactccagatgcctgtgaaatggctggtgatcctcaagcagaccatgtttctgatttagttggctggatacaccagcaaactaactgccatgcttcagaatttcaaggtcaagatgagcgtcacatgctgaagaatgggcacgacttgattaggtatgatctgaacagcgaggctgttgaagacgcacaggatattcacctgctggaggatgagaaattacctgtaggtcttggcattgatgcgcatgatacgactagaatccaatgttggcgcggttcgcatttacgtctgaatcaaaatgctggtgagctggaacatgaaaacgactgtgtgattggtgagcagctgctgctaagtgatggcatggatggacatcttgtccgcgattaccaaatggcgtcagaacccaagatgggtgtctatgatttgcacagctacaatctggaaagcgagaaaatgctcctagatgatggtgcagagaaacacgcacatgataattgccatctacacgacgggcaagtgcttttcaatcagtctgcgaatctacaggctcacaatagggccaatgagcgaacaattcctgtgatcaatctcgaagatgatgattatgaagagcagtctgatatcagggagtttctcgaatccaattatcaatgcctgggacatgcccttctctgagcttgggaagtgggcaagtggccatgttgtttgccaagacggctgcgagattctgcgtcagtcagtgcaatatgtcgtcatcctggagcattggaaacaagatttgcaatgttttaaaggtggatgcatcatgctccatccatacataataattgattgaagaaaggaagtcgttcaggtgctgtactaggagaggatacctgactcaccgacctggcctcagcactcagcagtcagcagcagcttgtaggcgtcttcaaaacttcagcttcaccttcttgtagttgtgttcctttcctttccagtttccatgctggtgcgtacgtgtgcgtgcaagcaatattcagtgtgatgcatggccacaatattcaacttcaccttcttgtagttgtgatttgctgtcgaggtgatgc

SEQ ID NO: 106692 - DNA, 341 bp, Zea Mays
acaagttctgctatgagggcttgaagccaacctacaacaaccgggtcacaaccatggtgctggctctcgacgacgcctgatgagcgcctgatccctcatcgacatcggcctctaggaggcctcccacctcctcgtcgcctcgtgcctccagcattcctatgggagcccctgaagtcactcacccacctagacatcgcccctgttgttatttggtggtcagtatgtcacaatatagtcagttttttttgcttatgttgttggtattgattttattggatgtgaatttattcatcctttcattgtatattggaattcatgacattatctacatatgtacatgc

SEQ ID NO: 106693 - DNA, 589 bp, Zea Mays
ctgatgcctttaatggaaatggacacaagaccttggttgcaatggatgattatcttgtcactgacaaaatcactgcattcatagtgcaaatgcaacatgcagcaactgaagtccttaaagaaaagcaaccaaaagaccgtatgaaatggaccaagtattgcagacaatattacaaatattggacacgttcatggctctttctgaagatactcatggataaattatcttgtacctgagaatcccccttatttttgcacaattggtggctgtgtccagtagtggctttgatgattcatcactcctaaacgattttagaaagctataccaactaatgtgtggaggacctgggcaaggggtggtagtcgcgctggttcactatccacggtggcaagccgcctgctcgaagatcccgcctccgaggacgccgctgcggggaggacatgggcacgaatcttgaactaaaactaggggggtgtctatgtaagttatactttctctcacatttgtatcaaaatttgttttctgataatcaacagatcttgacatgtttctatgtactttctctcacattgagagttttttagattca

SEQ ID NO: 106694 - DNA, 777 bp, Zea Mays
atgcatgcatgcatgggctgccccgcccccgaccgaccaggcctccttaccgacgacggcgacctaccacgcccggtccccgtgcgcgcgcctccgagtgaggctccggatccagcctctccctctggccttggaccgctcagccgccgccgccgccgccttcttgccgtccagcccacccgcagcggcggacgacctcctccagcgcgccagctgcagcatgcggcccaccacctgtttgcgccaccgggtgacgccgacacgcttgacgtgctccaccgctaccatggtcgtcgtcgacgacgacctcgcgggagctgccgccttgtgctggctctggctgtcccacgtcgccttgccgttgtcctcgaatttgatggagatgaaggaatcatcgaggcttgcgacggaggcggtggcgtcgtcgtcgtcggagtagcagttgttgtcccgccctcgtccccggtggtggcgggagtcgaggcgctggaggaaggaggagccgagcgcgaagaccttggggagggagatgctcctgctcctgctcctgcttttgcggcgggcgtcgtcgtcgatcttattgttgttggcagcggcgaggaggaggaggaggcgatccttgaggcagtgagcgcagacgccgacgccgacctcccggggatggaaacagcagtagcctgggacgtcggcctgctgcccatttccgtacccgtacgcctgctgctgcttgttcatgcttccaattccttccctgcttctacttttgcaatgggatga

SEQ ID NO: 106695 - DNA, 1104 bp, Zea Mays
gcattgcattactttatttaatttgccggtcttgcatgcaccatatacatatctctttctttcttttaacaagtactaacgcatagcaatccacaccaacagctagctgctattaactgtacgtatagtagcctatagtaggtaaaaggaggcactcactcatctcacttggtacaaagcacaagcaagcaattactacgtctccatccaaagcaaggggggaagctcgcagatccatccatccatcggacaccatgcatgcatgcatgggctgccccgcccccgaccgaccaggcctccttaccgacgacggcgacctaccacgcccggtccccgtgcgcgcgcctccgagtgaggctccggatccagcctctccctctggccttggaccgctcagccgccgccgccgccgccttcttgccgtccagcccacccgcagcggcggacgacctcctccagcgcgccagctgcagcatgcggcccaccacctgtttgcgccaccgggtgacgccgacacgcttgacgtgctccaccgctaccatggtcgtcgtcgacgacgacctcgcgggagctgccgccttgtgctggctctggctgtcccacgtcgccttgccgttgtcctcgaatttgatggagatgaaggaatcttttttttttcacatccgccgggccactgaatcattgatctggcaagcagacaagaaacaagcaaactgcagatggatgggattgtaccatcgaggcttgcgacggaggcggtggcgtcgtcgtcgtcggagtagcagttgttgtcccgccctcgtccccggtggtggcgggagtcgaggcgctggaggaaggaggagccgagcgcgaagaccttggggagggagatgctcctgctcctgctcctgcttttgcggcgggcgtcgtcgtcgatcttattgttgttggcagcggcgaggaggaggaggaggcgatccttgaggcagtgagcgcagacgccgacgccgacctcccggggatggaaacagcagtagcctgggacgtcggcctgctgcccatttccgtacccgtacgcctgctgctgcttgttcatgcttccaattccttccctgcttctac

SEQ ID NO: 106696 - DNA, 2001 bp, Zea Mays
cttccttccttctcaccgacgaatcctccatcccgcgcagcatctcctccctccctccctccgctccgtccgcgtcgccaaaccctagtagtacgttgtacaggacaatggggccacagccaccgcttcaccttcccgccgccaacggcgacagcatcgtcgaccgcgacgtttggctcgcctgcgccgtcccgctctcccgcctccccgccgtcggtgccgaggtctactacttcccgcacggccacgccgagcagtgccccgcgcatctcccggcgccgctcccggcgccgcacctcttcccttgcaccgtcgccggcgtcagccttggcgcggacgacgagaccaacgaggtgttcgccaaaatctccctcagcccaggcccccaccgcgggcccgccgccgcttgtcgtaccgaccccaccagcgactgcccgccgcaggagctcagttacttcaccaaggagctcacgcagagcgacgccaacaacggcggcggattctccgtcccgcgctactgcgccgaccacatcttccccacgctcgacttcgacgccaacccgcccgtgcagaagcttttcatgcgcgacaccaggggcaacccgtggcagttccgccacatctaccgcggcacgccacgccgccacctgcttaccaccggctggagcaggttcgtcaacgccaagctgctcgtcgcgggggacatcgtcgtcttcatgcgccgccacaacggcgacctcatcgtcggcctgcgccgcacgcccaggtacccgctcgtcttccccagggtcgggtccggagccggggtcgacccggaccagcccccgccccgcaacgcgcgcgcgcgggtaccgccccaggacgtcattgaggccgcacgcctcgccgcggagggcaggtccttcgcggtcacctacttcccgagacaggccgccggggagttcatcgtcccgcgcgacgaggtggagggcgtgctcgccacccgctgggagccaggcgcgcaggtgcgtatgcaggtcatggaggccgaggacacgcggcgcaccgtgtgggccgacggccacgtcaagtcgctccaccaaaacatctggcgagcgctcgagatcgactgggatgattcctctccattatcaccaaatctgagcagatttgtgaatgcttggcaagtcgagcttgttacacaccctcctcttccaaatggagcgaggatctgcaacccaattgcgtctctttgccatggagatgtctcttatccactgatcggatcggaaatccaggggccaccaattcctgctagcatgcagggagccaggcacaccggcccttgtgctgcgccctctgaatcttctgcagtgctcacgaatcgggtactgttccccctgctcaacccggacctccagatgccaccgtttacaagccccagtgattcctctgagattctggatcctgaatctgcttctcctcccaacaaatcagtaaggttgcctccagcagagcttccagtccaagtgaagagcatacagctctttggcgccacaatcatggtccatgttgtgcgaagtgttgcctgtggtggttgttgtgaagaactgaatggagctcctagtggtgatgctacggctgatggcagtgtcggaaaagatgtctaaaccatgcacctgtacttgaagatgccttttaagtctgggagtgtgggtttctactaccaaagtacaagtgttggtgcatgcagagtttatctgtagctacatttagtaggctgtggggggagtattaccgttgcaagttgcaacccatggctgtagtttagttaacagaacacttcatattgttggttggttgattcaattctgggagtttggtcgtatcactttcttctgctctgctgttgcaattgcattgcgcgcaactatatgtgggtttaatttggtaatgatatgggtcaatgacccttcccccgctaattaattgtttgttgggtgtggatcagctcatgtggaa

SEQ ID NO: 106697 - DNA, 462 bp, Zea Mays
ctgccgtagaggagggggagacgccatgggagagcttgccaaggtgagagaggagcttgggagggctcggtcgccagctccattggaggggggttgctgctgcatggggtgctagagagagggagatagagagagagggagggagtagggagagtggcgtggggagagggagggagaggaaatggctggttggggagggggcatgggggatttaaaggagaagaaaaggggctggtttgattgcttagaagtgaagcaaggggttgcttacaagagaagcaaggggttgcttacaagagaagcaaaggttgcttagatgacaagcaaaatatgttgcttataggagaagaaagggggttccttctaggctaagtaaattgttcaaagggagaaaaatctcccgtgggatttgccggtgtggagaatagggagaatcgacgtctggcaaacgagagtccgagg

SEQ ID NO: 106698 - DNA, 1544 bp, Zea Mays
aaagcagcagctgctcttctcttctgctagcagctttatttgcctgcctccctaccggcgagggtatcgatctgtactctctatcctttctttgcatgcatgtgcagattgcagtgtcttctttcttgctatagcttcctccgatccctgaccctgatcctgatgactcactacaaggaggtacgtgcgccgatcgagaagcagcagcagcaattaataactaaacatggatcaggcggcggaggagtcttgtgttcccccaggcttcaggttccaccctacggaggaagaactggtgggctactaccttgccaggaaggtggcctcccagaggatcgacctcgacatcatccaggaggtggatctctacaggatagagccatgggatctgcaagagcggtgcaagccgcagcacgccggcggtgggcacgacgagcagacacaggagtggtacttcttcagctacaaggaccgcaagtaccccagcgggacgaggacgaaccgcgccacggcggccggcttctggaaggccaccggcagggacaaaccggtgctgtcgtcgtccaccaggaccaccaggtgtagcagggtcatcggcatgaggaagacgctggtgttctacaagggcagggcacccaacggcaggaagagcgactggatcatgcacgagtaccgactccaatccaacgagcacgcaccggcgcaggaggaaggctgggtggtgtgccgcgctttccagaagcctatccccaaccagcggcccttcttccccaccagctacgccggctactacgaccacaacctctcaacgacggcacggctgcacgtagacggcgaccgccatttcctggcgggctcatcagcagcagcagcagcactgctacagcagccaccagggcttgcaggcagcagcttcccgcagctgtactccgacgacgacttggagtccaagaagcagctgttgagtatcccgccgctggagagccccactgccatggcctgctgttccgacgccggcggctacgcgcagagaagcagctacgatgaacatgagatgatgatgatgatgatccagcagggaggaggaggaggagagcaagctgcagccgccatcgactggaactttctggacagcctgctgtccgcgacgtcgcaactccatgggccctcgggatccttgttgcagtgacctccggccatcgtcgatcgatccatctttctttgatccagcggagaacattattcattcatcggcattatacaatatatttattagttgcatacacacacagagtatacgtatatgctaataattcagatgtgttcatacacacttccattgtcatgtgtagttcgttgcgacttacattacagactgccttagatgattcaggtatactgtatacaacatgatgcacagtatagtaggagtaagtgcaccagtctcagcagctggtagctagctagctatgtaaaattcctccttaattacagctatgtaacatatatatacagttattattacttactgatatgatctatct

SEQ ID NO: 106699 - DNA, 182 bp, Zea Mays
tttcctctccctccctctccccacgccactctccctactccctccctctctctctatctccctctctctagcaccccatgcagcagcaacccccctccaatggagctggcgaccgagccctcccaagctcctctctcaccttggcaagctctcccatggcgtctccccctcctctacggcag

SEQ ID NO: 106700 - DNA, 504 bp, Zea Mays
tcgccgctcacgccactctactccctgctcgcggcatcgctctgctccctactcgcgtcatcgctctgcatcatcgacggttccctgttcctggccgattgctcacgccgctctgctccttgttcctggccgacggcggcatcgacgacgatgaggttctaacctagaggttgtgaagaaccaaaagttgttttgggatttgccgcctcaagtttcatctagctacctccaacaaatccttcaatctccatggctacctcgatatcaactcaatatactaacgaagaggaaattaaaaggaagagaaagaagcgaaagtgagttgttgtattagttgtgtctatttatggctattattgcaaaccggtatcaacggaggagacctagacacatcgtagatgctaacgaagttcaagagagaaatgtcgagtgcagaaaacaaatgctacgtaatatgtactggggttcaaatgtctattgctatgacagtttgcgcctaagaga

SEQ ID NO: 106701 - DNA, 543 bp, Zea Mays
atgtttgtgcaggataaggatggtgtgctactcattgctgaggattctgtatttagagcagaggaaatagcaatagcaagcacttacaagcacaacatgaacgtttttcaggctctcctggaagagcatgtggctctggatgcgataggcgaagagacagaatttacaactctagtgtgtgcttgggccagaatgttagcgatcacgcgtgtgtttaggagtcagttgtatgcatgggcatgcaagcgagtcaaggaggcgaatgccaaccggcttcagagggaattcggcgacctcgcgttcaagccaggcgagatggtggaggacttcgccggacaggcttcgaatctcgcgaaccaacttcgagtagtcggagttgacatcgctgaggaggtagtgaagaagttgctacattatgttcctgatgaccttgaacagatcgtgttgtccattgaaacgctcctcgacctcagcatcgccactcgtggtggtgactggactccgcacaatggagcttggtggatcatccagcaaggaaggtag

SEQ ID NO: 106702 - DNA, 4562 bp, Zea Mays
atgctgagagccatgaacgggcagctcagaatgctcgccgctcgctttctagagtcggctggcattgataccagcagctggcttgatatcgtcatctccctgtcctgggaagctgcccttgccatcaagcctgatgttggcactgctgtaggcaaccaaatggacccttcctcatacatcaaggttaagtgcctagcatctgggacaccccgccaatgtgaggtcgtcaagggcctagtcttcaggaagaacgtcgctcataagcacatgcccaccaagtgtcacaatcccaggctgctgcttcttagtggactcctcggccattcccatgttggcttctcatcgttcagttccatagagcaggagaaagaccatctggacaagtctgtctgcgaaatgatggagatctgccgcccagatgtcgtcttggtcgagagaacggtttcacgcgacatacaggagcttcttctcaaggaaggtgtcactctagtgcttgacatgaagctcaaccggctgcagagggttgctcgctgctccggcgcccccatagtctcgttttcagaggttctcagcaagccaaagctgaagcagtgcgactacttccacattgaaaaggtgacggaggagcacagcctgattacctgcagcgctggagttggaagcaggccatctaaaacattaatgttcctggaaggctttcacaagccactgggatgcacgatattgctaaggggagcaaatactcaagaactgaagaaaatcaagcaggtcatgaactacacagtgtttgcagcgtaccgcctcgttcttgagacatccttcttcgaagatcagagactaatcttgaacaataaggattcttccaaagaagaagtttctgtcgctaggaaggccggaccatcgtcactaggatcagtacaggaaactactgattccaatgctctaaatccactcgacaagggcttccctaatcaagcactactcccttctgaaggactagtagtatcagcagtcccagaatcacccagaagattcattgatatactccgttatcataatatttatttgccggtcacttcttctcaagaggcaactgatcatcagatacaagacagtatccatatcagcccaaacgttggagtaccaattggttctgttgagagtgtggatcatttaagcgatccccaggaacaagcatcctctgaaaccaatcagcaaatggcattggacggcccttcggttagtgaaaaacatgagcagtcattggaaaatattaaaacatctgatacagatgaggtggacgatgtgttggagtctcagagcatacttattttgctgtctagccagtgtatcacaaagcaggttatctgcgagcagagccgtctatcccgtataagatactacgggaattttgatgtttccttaggacgctatttgcaagacattttgcagaagcagaatctcagctgttcctcatgtggagagcctccagaggctcacatgtattcctacactcaccgcaatgggaatctgactgttcttgtgaggcacttgctgcctaaatatcgtttacctggtgaatcagaaggaaagatttggatgtggactagatgcttaaggtgtgaacgtgaaagtgggatctccagatcatcacgaagggtgataatgtcagctgaagcacactacctttcatttgggaagttccttgaactcagtttttcaaaccactcaaccgctagaaggctgtcaatatgcgggcattcactcaataccgattgtctgcgcttttttgggttgggctccaaagttgcaatgttccagtattcctcagtcgaaatttacaatgcctgcaaaccacagcctactcttgagtttcacaatcccgatatgcacgagtggtacgggcaagaggttcttgccacaggagttacacttttctcggaagtcacaagcgcactacagaagctcaaggatcagtttcctgttaaagacctttcccaacttgaagagatgttgattaaagagaaggctgagttcatggattctctagcaaagactgttgatcgaaatagggaatcaagctctgtggatgatatccttaatgtaaattggctctatcaggatcttctactggaactttatgtgtgggactgccggctgcaccaacttgtagattgtacacttgctgaaaacgcaatagtggcaaatggccaaactgcagcagccgctgaagcagacggaatcggtgagcgcatgagcagcatagcaccttttgagaatagatgtatcaaggaaccagagaagttcattgaagcagggactgcatcagccttgcttgatgatgcatggaatgataagcattgcaatgatcagcacaacacaaactgtgagtgtgacgggggggaagaaaaatggatttggaacccagtgaatgagtccagattggctttcaggcaggaagtggaagttggatgtttggaaaggtttgaggtcgttaaccactactgtccaagtcatttatcccccttgcacaaacacagagaatctggcgaggagatggggggatctccacagttcacagtaggtccaggtggcagtatcttgtgtgtatcagaggatgagatatccagtataatatcacgagctcttgctgtatccgaggaacgtcggcacttactgatggatgctgtcgctgagactgaaccagcagataccaccaggagtaaaacaatggacaagtcttacagctctttatctgaaagttcatctgcttctctgtggtcttcggattctgaggcaagcatttcgtctgacgacctctccagctatgatacctcgcttcttctatcgtcctctctccatccagaaatagctgtcaacgggataacagctctcaaagggaggtactcggtcatctgtgtacactctaaccagttctacaacctccgaaggaaatgctgcccatcggagcttgcatacgttgcctcattgagccgttgcaagaggtgggatgctcagggcgggaagagcaaggcattctttgcaagaacaatggatggcaggctcatcataaagcaaataaagaagacagagtttgagtccttcataaaatttgcgcctgattacttcaggcatgtcaaccattctctggacacggggagccagacttgccttgccaaaatcttagggatctatcaggtgaagcagacaagacatggcaaggagatcaagatggatctgatggtgatggagaacatcttgtttggacacaatgtgtcgcggacatatgatctgaaaggcgccatcttttcacgttatgtctccgacccaaatgaccatgctggcactgtctacttggaccagaactttgtggatgacatgcgtgtttctccaatctatattggtggaagagcaaagcatctcttggagcgggcaatctggaacgacacgtcttttctcacgtccatcaatgtcatggactactctttgctggttggagtggacaggcagaagcgtgagctggtattcggcatcatcgactacctgaggcagtatacatgggacaagcagctggagacgatggtgaaagcgtctctggtggtgcccaagaatgaatcgccaacggtgatttccccaagggattacaagaagaggttcaggaagttcatgagcaagcacttcctcacagttcccgacgagtggagcacggagagtcggccgccggtggcctgggagtcctgtgcccacgccggcgagttgccgggagtgaagccccagcatccaagcccaatcctcctggcgtgcgcttaattcaatttcacattctgatgctggcgaatagtgtcacaaatggaaggaggaaacgatgcttgtacgaagttccagtttactaccctcaccacacacgcacgcacgagtacatatataattctctcttcaacaagtgaagagaaggcctagcaccattgctaaaccttttcttgcttctcgtccacaacaaggggaatcatctccgtctgattccttgcttgcgctgttcctagactccctggggctgcagcctgccgctgcgagatcagatgcctcacgtagccatagaaagtgcaaccaaccagggtgattccacacccgattgcattcattgcagagattggattccggaagatcgaccacgacactaacactgccaccgcgactttaaggttgcctgcaacgttgaacgtcactgctgttgttgaatggatgacgtagaagatggagaagttaaggcagaacgcaagcacccccgaacctaggatgatagtcagcgcaggaacgatggaatcatgtgtgtagaaccagttcattacacctcctccttcaagcaccatcgctggtagagccagtatcatggtggcaaagggtgccatgtagtacaccgtgttaatgctgtcaaacttgtatccatggagtagggactctgccaagatggtctttgtagacgtagccaggcagccaaccatggcagcacagaaaccgaaaatgttgaagctaagctctgtcaccgaagtcaggagtattcc

SEQ ID NO: 106703 - DNA, 4571 bp, Zea Mays
atgctgagagccatgaacgggcagctcagaatgctcgccgctcgctttctagagtcggctggcattgataccagcagctggcttgatatcgtcatctccctgtcctgggaagctgcccttgccatcaagcctgatgttggcactgctgtaggcaaccaaatggacccttcctcatacatcaaggttaagtgcctagcatctgggacaccccgccaatgtgaggtcgtcaagggcctagtcttcaggaagaacgtcgctcataagcacatgcccaccaagtgtcacaatcccaggctgctgcttcttagtggactcctcggccattcccatgttggcttctcatcgttcagttccatagagcaggagaaagaccatctggacaagtctgtctgcgaaatgatggagatctgccgcccagatgtcgtcttggtcgagagaacggtttcacgcgacatacaggagcttcttctcaaggaaggtgtcactctagtgcttgacatgaagctcaaccggctgcagagggttgctcgctgctccggcgcccccatagtctcgttttcagaggttctcagcaagccaaagctgaagcagtgcgactacttccacattgaaaaggtgacggaggagcacagcctgattacctgcagcgctggagttggaagcaggccatctaaaacattaatgttcctggaaggctttcacaagccactgggatgcacgatattgctaaggggagcaaatactcaagaactgaagaaaatcaagcaggtcatgaactacacagtgtttgcagcgtaccgcctcgttcttgagacatccttcttcgaagatcagagactaatcttgaacaataaggattcttccaaagaagaagtttctgtcgctaggaaggccggaccatcgtcactaggatcagtacaggaaactactgattccaatgctctaaatccactcgacaagggcttccctaatcaagcactactcccttctgaaggactagtagtatcagcagtcccagaatcacccagaagattcattgatatactccgttatcataatatttatttgccggtcacttcttctcaagaggcaactgatcatcagatacaagacagtatccatatcagcccaaacgttggagtaccaattggttctgttgagagtgtggatcatttaagcgatccccaggaacaagcatcctctgaaaccaatcagcaaatggcattggacggcccttcggttagtgaaaaacatgagcagtcattggaaaatattaaaacatctgatacagatgaggtggacgatgtgttggagtctcagagcatacttattttgctgtctagccagtgtatcacaaagcaggttatctgcgagcagagccgtctatcccgtataagatactacgggaattttgatgtttccttaggacgctatttgcaagacattttgcagaagcagaatctcagctgttcctcatgtggagagcctccagaggctcacatgtattcctacactcaccgcaatgggaatctgactgttcttgtgaggcacttgctgcctaaatatcgtttacctggtgaatcagaaggaaagatttggatgtggactagatgcttaaggtgtgaacgtgaaagtgggatctccagatcatcacgaagggtgataatgtcagctgaagcacactacctttcatttgggaagttccttgaactcagtttttcaaaccactcaaccgctagaaggctgtcaatatgcgggcattcactcaataccgattgtctgcgcttttttgggttgggctccaaagttgcaatgttccagtattcctcagtcgaaatttacaatgcctgcaaaccacagcctactcttgagtttcacaatcccgatatgcacgagtggtacgggcaagaggtacgaaatgttcttgccacaggagttacacttttctcggaagtcacaagcgcactacagaagctcaaggatcagtttcctgttaaagacctttcccaacttgaagagatgttgattaaagagaaggctgagttcatggattctctagcaaagactgttgatcgaaatagggaatcaagctctgtggatgatatccttaatgtaaattggctctatcaggatcttctactggaactttatgtgtgggactgccggctgcaccaacttgtagattgtacacttgctgaaaacgcaatagtggcaaatggccaaactgcagcagccgctgaagcagacggaatcggtgagcgcatgagcagcatagcaccttttgagaatagatgtatcaaggaaccagagaagttcattgaagcagggactgcatcagccttgcttgatgatgcatggaatgataagcattgcaatgatcagcacaacacaaactgtgagtgtgacgggggggaagaaaaatggatttggaacccagtgaatgagtccagattggctttcaggcaggaagtggaagttggatgtttggaaaggtttgaggtcgttaaccactactgtccaagtcatttatcccccttgcacaaacacagagaatctggcgaggagatggggggatctccacagttcacagtaggtccaggtggcagtatcttgtgtgtatcagaggatgagatatccagtataatatcacgagctcttgctgtatccgaggaacgtcggcacttactgatggatgctgtcgctgagactgaaccagcagataccaccaggagtaaaacaatggacaagtcttacagctctttatctgaaagttcatctgcttctctgtggtcttcggattctgaggcaagcatttcgtctgacgacctctccagctatgatacctcgcttcttctatcgtcctctctccatccagaaatagctgtcaacgggataacagctctcaaagggaggtactcggtcatctgtgtacactctaaccagttctacaacctccgaaggaaatgctgcccatcggagcttgcatacgttgcctcattgagccgttgcaagaggtgggatgctcagggcgggaagagcaaggcattctttgcaagaacaatggatggcaggctcatcataaagcaaataaagaagacagagtttgagtccttcataaaatttgcgcctgattacttcaggcatgtcaaccattctctggacacggggagccagacttgccttgccaaaatcttagggatctatcaggtgaagcagacaagacatggcaaggagatcaagatggatctgatggtgatggagaacatcttgtttggacacaatgtgtcgcggacatatgatctgaaaggcgccatcttttcacgttatgtctccgacccaaatgaccatgctggcactgtctacttggaccagaactttgtggatgacatgcgtgtttctccaatctatattggtggaagagcaaagcatctcttggagcgggcaatctggaacgacacgtcttttctcacgtccatcaatgtcatggactactctttgctggttggagtggacaggcagaagcgtgagctggtattcggcatcatcgactacctgaggcagtatacatgggacaagcagctggagacgatggtgaaagcgtctctggtggtgcccaagaatgaatcgccaacggtgatttccccaagggattacaagaagaggttcaggaagttcatgagcaagcacttcctcacagttcccgacgagtggagcacggagagtcggccgccggtggcctgggagtcctgtgcccacgccggcgagttgccgggagtgaagccccagcatccaagcccaatcctcctggcgtgcgcttaattcaatttcacattctgatgctggcgaatagtgtcacaaatggaaggaggaaacgatgcttgtacgaagttccagtttactaccctcaccacacacgcacgcacgagtacatatataattctctcttcaacaagtgaagagaaggcctagcaccattgctaaaccttttcttgcttctcgtccacaacaaggggaatcatctccgtctgattccttgcttgcgctgttcctagactccctggggctgcagcctgccgctgcgagatcagatgcctcacgtagccatagaaagtgcaaccaaccagggtgattccacacccgattgcattcattgcagagattggattccggaagatcgaccacgacactaacactgccaccgcgactttaaggttgcctgcaacgttgaacgtcactgctgttgttgaatggatgacgtagaagatggagaagttaaggcagaacgcaagcacccccgaacctaggatgatagtcagcgcaggaacgatggaatcatgtgtgtagaaccagttcattacacctcctccttcaagcaccatcgctggtagagccagtatcatggtggcaaagggtgccatgtagtacaccgtgttaatgctgtcaaacttgtatccatggagtagggactctgccaagatggtctttgtagacgtagccaggcagccaaccatggcagcacagaaaccgaaaatgttgaagctaagctctgtcaccgaagtcaggagtattcc

SEQ ID NO: 106704 - DNA, 1684 bp, Zea Mays
gagatgaaccacgaactgaacattgaatgatagcgaaggtatgtatccatctgttcattaactgtaatccacttgtatccatgaaaacatacatctacaggtgacgcatgatggatgccaccgttaacgtggcatcaagaattcactgctgacgttgtattgtaccaaaaatcgtatgtggtcacggcttccatgatgacggcggcggcggcgtggccgggaacattggcggcacggcggagaacatggtgttcttgtcgacggtggtgacgccggctcccctaccgctgttggtgagagccaccagggccgcgacgaggccggcgttgcccaccagcgtcggctcgttctgcccgaaggtgttgcgcgagtccttgaagccgtcgttcttgtcaggcccgccgaccatggcgcccgccagcaggttggggtccgccttcttgctgtcgcgccacttgtagccgccggtgcacgagtacttgacgccgttgtgcggcgtggacgcgccacggtggtgcacgtgccgcgggtacttgctgccgaacccaaccacgtagctcatcttcttggggttgtcaccgagaatgtagttgacctgagacctggcgaactcccggaggtcgttggtggtcatgaagtttgggccgcagtaccagccggggacgttgacggcctccatgtagtcggcgtagagcgcggcgatgaaggagttggcgacgacgtactgcagcggctgccccctgccgtggttgaagagcgccatcccgcccttggtgaagttgaaggcggcgaagcgcgggaagtacatgcacatgttgaggctggtggcgttgtggtagccggctagcgactcctcgtacgggtagccggggttgaggaacatgcgcaggcgcgacagcagcagctgggcgcccgggagcttgttgtcccagctgaacacggagaagtcgaggatgctgaagaaggccttggcgttcttgggcagccgcgggtcggtggcgaaggtgatgtagctgctgttgccagtggcgtagtacatccaccccgcgctccacatgtactcgtcccagtagctggtggagttgtagtagtactcgatgtccggctgccggagcgagtagggggtgcgccgccccgactgccgcgcgaacttgtacacggtggccgcgccctggctgagcttcttggagtaggcggcgttgtcacggaacacgatggaggcagccgcaagtgcagcggcgacctcgccacccagatcaggggcggagctcacggacagtgaagggcgagggtacgccatgtcctccggccggttccagcagtaatggtcgtccggccggctgccgttgatcttagcagcacccacctgggcgtataacttgtcgatggtggaagcagaggagttgaaggtgagtagcagatagtcggtgccccacttgatgagctccctgacatggtcatactcccccatggccttgtacttggcgctgtactcgatcaccgaccagctcagcagcgtcatggagaaggccatcgggaagtggaacttgatgttgtcgccagcgtcgtagtagccgccgacgaggccacccttgacgtccttggcgtcggagccgtctgacaggccagagttcccgcgccacttgatgccattgttcttgggaaggtggccggctgcaagaat

SEQ ID NO: 106705 - DNA, 1911 bp, Zea Mays
caggtcaggcacgcgagtacgcgacgcacccgggtgggcccctttccgctcccctccctctcccctccgctcctcttctcccccagatctctctcttcttctcttgcgaagtcgccaaggccagtccccaatccccatccagccagaccgccggcgatgacggaccaccgcgacgtgatgttgcccttgtccctccaatacatagccacccgtgccctcctcctgctcgtcatcgcgtccgccgtttcctgctcttccttgccgccggaggacggcatccgggtcgtctctgcagagaaaagaatcgacctcacgggtcccatcgtcaaagtcttcctaacattgaaggttgagaatgctcccacggcctctgaagcatcacgagttctcctcgccttcacgcccacagagtttcaacatctctctattgtcaaggccacaagagcggaggggaagcgcaagaagaaggcattcgtacccctctcggtccaagcctctgagctcgccaccaccgctcccgacgcccctcgcctctactctgttctgctcagcactcctctgaaaccgggcgatgcaaccactctagaagtgctatacatgctcactcactctttagagcccttccccgctgagattagccagtcagagtcccagttggtttactaccgtgacagtgcggtgcttctctcgccctaccatgtcctggagcaggttacctacatcaaaatgccaagcaataggatcgaatccttcacaagggtcgatcctaccacacgagctggttctgaagtgaaatatggcacatacagtaaccagatgccaaactcctatttgccagttcttgtgcattatgagaataaccgcccatttgctgttgttgaggagcttgtacgcaaggtggagatttctcactggggaaacatccaaatcaccgagcagtataaactgaaacacggtggtgctcgtcacaaaggagtcttttccaggcttgagtatcaatctaggccatctatcagtggagcttcgtcctttaagaatcttcttgcaaggctgccacctcgggttcattcagtttactatcgtgatgagattggtaacatctcctcatcccatctgcgcactgattcacacaagtccgatctagaaattgagcccagatatccgttatttggtgggtggcactgcacgttcaccattggctatggtcttccattgcaagattttgtctttgagtcagttgatggccggcgctacatcaaccttacttttggttgccctctattggatactgtggttgacgatcttacagttaaagttgtgcttcctgaaggatcaaaaaatccagagcatgtagttccttttgtgacagagaaacatcttgagactagttattcataccttgacgttgttggaaggacgacggttgtactgaagaagaaaaatgttgtaggggagcacaacgttcctttccaggtgtactatgaattcaatccgatcttcatgctggcggaaccattgatgctgatatctgcagtgttgctgtttttcgttgccttcattgcgtatcttcacatggatctttccatcagaaaatcatcataggcctgttggcaattctgtccaccacagtattttttgaggcacatgttctgctaactgtgattgatgaagtaacaatccttgttctagcgcactagttgaactgtttatcagtgcaccatcctcaatggagaaggacgatgtttttttttttgtgtgtgtgtgggtggaatatgattgcttcatgtagggctcacaacgatcagaaacgatatcatctataggaaaacgattgcctagaaatttagctggtttcataattaatcaacgtggtgactacaatacgatattgatatatgtttgaaattcaaa

SEQ ID NO: 106706 - DNA, 107 bp, Zea Mays
ggggatccggttatctgagactaatgcaagattatttctccgacaacccggtctacaatgacgacatattcagacgacggtttcggatgacgaagcctatgttccac

SEQ ID NO: 106707 - DNA, 1788 bp, Zea Mays
cccgtggctggagggagggccgcttggtgccccgtcaaccttcttccttccttccaggcttccacagccacaaaccggcgcagcggccacgtccctccctccccagctctcctctcctcctccagtactccacaccgcacccctcctggacgtcgccggccgcattaacaccaagaacagaagagaggaagagacaccgcaaccgcattaccatgagagagagctaggggggcctggcctgctgcccctgcatcgtctgaccctgaagatggcggcagcagcatccatggcggcccgtagccgcgcgctcgttgcgagcaggaggaggatgggtggcccgccgcgtctcttggtcgtcagctgcgacgccaggacagcggatgcctactgctccctggccgcaaagattttgggacctcccacgaccttcaatgcagcgaagctcaaggtggagttcgccggggaggagctccggcctcctttccccagagcctacactctgacccactgcgacttgacggcgaacctgacgctgggcgtgatgagtagcgagcagctgcgcaagtcgacgctgcagagggacgacgtggtggcagagtggaaggaaaccgccggggagatgacgctgcaggtgcattgcttcgtcagcggcgccaacctcctgcaggagctggccgcaggtttcagatactacgtcttctccaaggagctaccgctggtcctcaaggcggtggttcatggcgacgccgctctgttcgccgacaggccggagctgatggaggccaaggtgtgggtgcacttccactccagctctcgcaagtacaaccggttagagtgctggggcccgctctgggaggctgccacaactaccaggaggaaccaccacctgctggagctggaccaactgcagagcgccatcaccaagaagaagactatctttaacgccctgctcgcccttctcctctgattttgattcagccgcctatacaatgaacggacggactatagagtgatcaagcaaacccaccaagcattctgcatctctgtctgactgtaatggttgctgctttgtctggggattatattattcatataatcatcatcagaaaaagcattgtattgcataaacgatagacccagcccagagatgcagcaaaaagagcagacttgattgatgctagtcacaacccagtgactaaagctattcaaaacactttacttttgccgagcacagactctccatgtcttggatcagtcatccaaggaaatcacttcagtgcccccctccttcagccccttctcagcagaagtcagcttctcgtccagctcatttatctgcctccttatcttctcaccaccatctggtagcttcgacaacagcacctacattcaattcaacaatttattttacactcatctatctgtgtatacaagtttcacgtgacaggatgacttacagcgttggagagggtctgtgaaagccggttgattcttgcctttatctcttcaggactctctgcgcttctgttacttggaatgtagtttcgaacagtgaaactttcatcctttggcttcagcgcaaaagatgccctgcacaaaattcaaacacaaagtttaaacagtacagtacaatcatgcagggagaaggagaacatggccatccttacccgttggcgacatagtcagatgaggatcccttgtaatattgctggggcatcatgggcatgccccgaggtttgctacatgtaaaaacagtatacaatcataaatatgtcataacatcaatgc

SEQ ID NO: 106708 - DNA, 1519 bp, Zea Mays
gccgcattaacaccaagaacagaagagaggaagagacaccgcaaccgcattaccatgagagagagctaggggggcctggcctgctgcccctgcatcgtctgaccctgaagatggcggcagcagcatccatggcggcccgtagccgcgcgctcgttgcgagcaggaggaggatgggtggcccgccgcgtctcttggtcgtcagctgcgacgccaggacagcggatgcctactgctccctggtaggtatgctatgcatggtttttgttctgattgattaattagttagttagttagttaaaatgtgtgtcgatatatatacatctgctgcaggccgcaaagattttgggacctcccacgaccttcaatgcagcgaagctcaaggtggagttcgccggggaggagctccggcctcctttccccagagcctacactctgacccactgcgacttgacggcgaacctgacgctgggcgtgatgagtagcgagcagctgcgcaagtcgacgctgcagagggacgacgtggtggcagagtggaaggaaaccgccggggagatgacgctgcaggtgcattgcttcgtcagcggcgccaacctcctgcaggagctggccgcaggtttcagatactacgtcttctccaaggagctaccgctggtcctcaaggcggtggttcatggcgacgccgctctgttcgccgacaggccggagctgatggaggccaaggtgtgggtgcacttccactccagctctcgcaagtacaaccggttagagtgctggggcccgctctgggaggctgccacaactaccaggaggaaccaccacctgctggagctggaccaactgcagagcgccatcaccaagaagaagactatctttaacgccctgctcgcccttctcctctgattttgattcagccgcctatacaatgaacggacggactatagagtgatcaagcaaacccaccaagcattctgcatctctgtctgactgtaatggttgctgctttgtctggggattatattattcatataatcatcatcagaaaaagcattgtattgcataaacgatagacccagcccagagatgcagcaaaaagagcagacttgattgatgctagtcacaacccagtgactaaagctattcaaaacactttacttttgccgagcacagactctccatgtcttggatcagtcatccaaggaaatcacttcagtgcccccctccttcagccccttctcagcagaagtcagcttctcgtccagctcatttatctgcctccttatcttctcaccaccatctggtagcttcgacaacagcacctacattcaattcaacaatttattttacactcatctatctgtgtatacaagtttcacgtgacaggatgacttacagcgttggagagggtctgtgaaagccggttgattcttgcctttatctcttcaggactctctgcgcttctgttacttggaatgtagtttcgaacagtgaaactttcatcctttggcttcagcgcaaaaga

SEQ ID NO: 106709 - DNA, 1177 bp, Zea Mays
caccgtggatcgcgcaaacggccagacgtgatctctcgcccacgtgtcccttgcccctgtccagctgtcccctccggagcctgcaaagaactccccacccagctatcaactatcatttccggcgctgaaaaggagagtgacactcaacactgcagaaatcagattcggagcttcgggggaaaaaggcaggcacagtatcgtcgaacatgctgccaggtcgccacccggcgcgccgggccgacaccaccgggacggggccgctcctgccggacgccactcgcgcggtggtgtcggagttcgtcgccacagccatgttcgtgttcgccgccgaaggctccgtctacggcctctggaagctgtacaaggacacggcaacgccgggcggcctgctcgcggtggccatcgcgcacacgctggcgctggtggccgcggtggcggtagcgagcaacgcgtcgggtgggcacgtcaaccctgcggtcacgttcggcctgctcgtgggccgtcgcatctctttcggccgtgccgcggtatactggctcgcgcagatgctcggcgccgtggtcgcgtcgttgctgctaacgctcgtctccggcggcacgcgtcccgtgggcttcgggctcgtccgcggcgtccacgagcggcacgcgctcctgctagaggccgtcatgacgttcgggctcatgtacgccgtgtacgccaccgcggtggatcaccggagccggggcggcgcggtcgcgatcgcgcccctcgccatcggcttcgtcctgggcgcgaacatcctcgccggcggcccgttcgacggcgccgcgatgaacccggcgcgggcgttcgggcccgcgctcgtcggctggagctggcgccaccactgggtctactgggtcgggccactgatcggcgccgggctggctggcggcttgtacgagtttgtcatggttgagcaggagcccgaggcgccggcgccagctgcagttcctcggatgccagtggcctctgaggactactgatgtaggtgtacatgtattgtatccctaccgtttgtattttcactgtgtatcgtatgggtgtaccgtgtatctaggagactaggaccgagcttggcatctgctttagaggcacgtcatagactttttggatattcccaagaacccttactactagatcaaaataaacacagaca

SEQ ID NO: 106710 - DNA, 1456 bp, Zea Mays
atcagctgttccttactgggccgctcggcccgtattccctgctcgttcagtcgtcctcttcctccaaacctttccgctgccggtgaacttcctccacctgaagcccctaccacgataagccctaatcccagcgccacctcgatggcgaccacctctttctttcatccgctcgccgccccgatggaccgcggtagcgtttgttttcgtcgctgcccgttcagcctaaccatccccgcccgtacagcgccccggcgaccggcgccgcttctcgtcgtccgcgctaagcgcgccggcagccagccccctgctgccgccgcctcgcgtcagcccgcgaatcccagcgcggtcccgaagcgggacgtggaagaagaggaggaggaggtcgaggaggagatgccctggatccaggacaaggcgctggacctcgtggagttcactggcaccgtcacacaggccatcccagggccccgtgttggctctagccctgttccatggcttctcgcggttcccctcgcctacgtcggggtctcctttgtgctcgcggtcgtccgcaccgtgcgcaagttcacctcgccgcacactaagaagaagcgaagggtgagtaagaatatattcttgttgaagtcactagatgatctgtttcagaagggcagggaggcaataaattatcctgctcttcaggacctaatgcaaaagacaggatttgacatggatgatgtagtaaggaagtacatccgttacacactgaatgaaaaacagttcagtcctgatgtggttgtggatctcatacatcttaggaaggcatcaatgctggaagatgcagaagttgctgaaattttaaatgagatttcaagacgaattgtccgggaaaaagggccagtagttatggacttatctggttttacagagcaaggttttaagcggaagcttgctgtacaagcactgtttggaaaaatcctatacttatcagaacttccggagttctgttcacgggacagctcacttgtagtcaaagaaatctttggagttacagatgaggatgcagacagcctgcggattcacaccctatcagcaacaggtgatatcgaatctatacagaagatggtggacgatctagacctagaacaaggtcccccatcatcgtcttgagttatggtggtggaataatgctaaacatcttcgttgatagtgttgcaattttagattgatgtgagtttctcgaatcttttcgtttagttttttcagctgctgaagtaggacttgggcctgtgaacacaggatactttcggctggagcctggaggttttgtaaattgcctctcgattaggataacgtatgtcagacctgcccatgatttgagtaaacgagaatactattattatagaaaagcgcacggcagcagtgagtttatagaacgcgggacacgtatcaccatacgcttttgcttaaacaaaaa

SEQ ID NO: 106711 - DNA, 1842 bp, Zea Mays
taaatccgaagccattaggcatgattgcatgaactagaaagttttatacaaaaatcaggatttatatgcttttctactgctgccttctcccgcttcggcctctccctaccgcttccgatccaatgaagcttcactagagcctttcctaatttaaaatatacacaatataacgtagcgctgcgacagtttagttcagtccctcctaatttttttccggcctacgtccctgagcaaccgaccaaacctacagggccagaagcggcctgagccggtccaccaactgccggagcccagctgcagatgcaaggaaacaccgcgcagataccaaaattagaccttgagaaagcaacagtacagcaacacaaggaggtgaggtgggtgagtgcgctcgcctggaagctggaggagtgcttaaccgtgtcgagggggtgcacggcgacggcggaggcgctgatcgctgccgcaccgaaagccgcgtggcccgcgtgacgctgtcctccatcggtttgccgcctcccacggtcccaccatctcggcggcctgcaaggcaggaactggaacacacgctccccgagaaatagcgaaaagcggcgagcgacgtttaggggaagacaagaagagagaagccgcgggagaatttggggcccattgagaaacctgcccacctcgggtattggtgttcggcccacagagttccgtggccaagcgaagatcggatggctggcacctggcactggcaggcaggctgggagccggggacgcgccggaccgccggtgctagtcgaactcgggtcgaagtttccttccgaggttggtcgctgcctcgactccagcgttgagccaactccgccgccctgtcgttttcgcctctccctagcatttaccggaagaaacgagcgtgaccgccgccttctcccgctcccgctcccgctctgcatctctccatgggccagatcgagagccaggtcactcctccagcggaggagccttctccacccaccgtggagccgtcgccgtcgtctcctgccccgcctccgtcttcccttgaggcgattgctgcagaagccatgtcatttgatgaggatgacactgaggagtcaatcgatgtgaaggtacagaaagctctggactgtccatgtgttgctgatttgaaaaatggtccttgtggaggtcaattcgtcgatgcattttcctgctttctcaggagcagagaagaagagaagggatcagattgcgtgaaacccttcatcacattgcaggactgcatcaaagcaaatccagaggcattctctaaggagattctggaggaagaggaaaatgatgaggaggcagataagtccaacctgaaagttagagctccatcatggtccagagaatccaaacctaaggtttgagattgcttggtattaactgatagtgatattcatccagtgtgcagactcaccttattcaactataagggcttgttcgctttcctctcaatccatgtgatctcaatccatgtggattgggtgggattggatgagtttaaatcctgaacaagtcaaaatccttcatattttttctaatctcatccaatccacatgggacaggaataaccgaacaagccctaagtttgccagtagtagactgatttcagagagcgaggtatcataaattgattaacagaaatacccatattttgtgtataagaaatgcttcatggtatccacaattttagaatgtacatgtcatttcaagtatcaatcgagaactgatgaacttgtaattcgattcctagatacagggcatatttgatcaccactgtattattatactatgaaatatacatatgattatcat

SEQ ID NO: 106712 - DNA, 3091 bp, Zea Mays
caccgcgaacgtctacaggataagaccagtcgcctctcgctccgttccgctcgcttgtgttgtccttgtccgttgtgcgtgctttgtgctgcgcgcgcgtgcagcaccgcggagacggccgggagcagggggggcgggagggatagtggcggcctctgctgctgctggtcgaggcttcgattccgggcgggggctggtggtctcgagaatcccggagggaagggagcgagcgcaaagatagatacctaagcgggccgcttccgctgcacagccacaggcatggggtgcggggcgtcgagccacaaggacgccggggcgcgccggagacggcctgggagcgtcggcgacgtggtcgttttcctcccgggcctccgggtgccgagggccgtcgacttcgcccaggcgctcggcggctgcctggccagggctatagtcgagcggctgtcggctctgaggtcgcgggtcgtcgagatggcaatgcaagaatcggcggcggcgctcaagcccaggcggaaggcggctgcacggcacgggtctagtacagccaatcttctacaggccctcgaagactacttgccagttctgctgggactagcacaacaaggtagcgtcttgagacacaaagtgcagttcacctggagtaaccaagaggataatgctgaggagacagccatttcagatgtctggtacgaggtgctgtccgtgctgcacttgatggccatggtctgcttgctgcaggccaacaccctgcttctcccaaggtcatacggcgatggctacgccccaagagtttctgaagagagtagacgggccactgttgatgtcttcttgaaggcagctggatacctagactgcgcaattcgtcatgtacttccgaagatgccactggaactaaggagacaacttccagtcgacctggctgaaggaaatctcaaagctctaagcctgcaagcctttgggtcagggggttgacatgcagctcggcttggctattgatagtccaaaggccactttagcagtcaaaaggcgcttagcctgtgagatggtcaaatattggcaacaagttcaagagagcattccagagcttccagtctctgatggatggggaaaaaagcaccggctatttgtaaagtggaagtatgttgaagccaaggctgcagcatactatttccacggtttgattcttgacgagggaaataccgagaaatcccatggaatggcaatagctgcactacaagcttcagaagaatttctgaaagaaagcaaaatggtttcggaagccttccatgcaactcctccaacatcgaggagtccgaatgcattcggaacagcaaaatatctgtttgacaagatcccaagagatgcttccagcaaggtccgaatcaaacaggacctgtatactcaagaaaaggtcattggagcaccacccccattaccagattttgcattggcgctaacacctgaagattatgatcttcctccactagatccactttggaacaaagaagatacacaccattaagtgtctatacagcagattggttgcttctggcaaaaaattggctctggagagaaaggaggaccaagatctaccatgtcaaaggtcgaacatggtaacaaatgaagtgtacaaaatattttcaaacaaaattacatgtcaacaaaattaagcaaggcttgaagataatctgaagagctctgtacaggcaattttcttctgacaagggaaatgatatgtcaaagggttcattgatcattgtcgatcctgattcctgatgcttttattttttcaacaacagattttcagcattcgaaatggaactggaatcagcctctgatcgaagtggaaacctttttttagtcgtaaacatttacattggcaccttaaaatatactctggaacaatcagtctcagctgaacagtttataatacatgaactagctaaagtacagacatgcccaaaccttaggcaccacagtacattctgaatgacttttggcagtatcaaatgtacgtgaagccagtaagccaccgccgccacccctgcgaagcctgcagcaacactagaggcaaaaggggatatagggcctgcttcttctagattactcaaaactggcaaaagattaggataaactaaaaaaatgttacttcacaaagttaccgtgctgtccctatcattacttcaaatcaatttcgctagcatcattccatacctaggttcagggctcatattaactgccttccaggtgaacatcgctgtgcgtaggaattgccaaatagaaaaaaaaaacatagcaccaaatacagtctcgagctatctgatctgagccctctccaaagagcaccccatccttcaagcaatatcactctagaaggtagatgcacatcagacggcaatgggggtttcccagagccagtaagcatccatgggtgctgtttcagagcacccaacatgtcgggatgcttggagaaagatcagataaaaggcccgccgtgttgttccacaccgttatatcaagaacatacccagcaacagttgaaaaccactggaaatgatccttaacaacatttgcagggcccatagcttttgaaggaatcacaaaactaactagctttcgaagtttgaaaagttcaaatggtgtgcagaaaacagtctctacagcaccagcaactatgccagccaacatagcctcagaataatagacatagttgtcctcccttccatctgccaagacatctgttaacagttcataggtcacaaaatgtgctcccaacccaggaagtttacccattatggaccatccaatgccactgtaaaaacctaaaaggccagaagcggcctgagccggtccaccaactgccggagcccagctgcagatgcaaggaaacaccgcgcagataccaaaattagaccttgagaaagcaacagtacagcaacacaaggaggtgaggtgggtgagtgcgctcgcctggaagctggaggagtgcttaaccgtgtcgagggggtgcacggcgacggcggaggcgctgatcgctgccgcaccgaaagccgcgtggcccgcgtgacgctgtcctccatcggtttgccgc

SEQ ID NO: 106713 - DNA, 3188 bp, Zea Mays
gcagtccagctcaccaggaccaggaggaacaaagaagttgcatcgaacacagctgagttcctccctcttccctgaaatgcgcccggcagctagaaaggagcagctagcgggcgggctgcccatacgtcgttgagatagatacctaagcgggccgcttccgctgcacagccacaggcatggggtgcggggcgtcgagccacaaggacgccggggcgcgccggagacggcctgggagcgtcggcgacgtggtcgttttcctcccgggcctccgggtgccgagggccgtcgacttcgcccaggcgctcggcggctgcctggccagggctatagtcgagcggctgtcggctctgaggtcgcgggtcgtcgagatggcaatgcaagaatcggcggcggcgctcaagcccaggcggaaggcggctgcacggcacggtgtgtgtaggccactggagaagggggcggtgtggtacagcgcctggatggattgccaatcttctacaggccctcgaagactacttgccagttctgctgggactagcacaacaaggtagcgtcttgagacacaaagtgcagttcacctggagtaaccaagaggataatgctgaggagacagccatttcagatgtctggtacgaggtgctgtccgtgctgcacttgatggccatggtctgcttgctgcaggccaacaccctgcttctcccaaggtcatacggcgatggctacgccccaagagtttctgaagagagtagacgggccactgttgatgtcttcttgaaggcagctggatacctagactgcgcaattcgtcatgtacttccgaagatgccactggaactaaggagacaacttccagtcgacctggctgaaggaaatctcaaagctctaagcctgcaagcctttgggtcagggggttgacatgcagctcggcttggctattgatagtccaaaggccactttagcagtcaaaaggcgcttagcctgtgagatggtcaaatattggcaacaagttcaagagagcattccagagcttccagtctctgatggatggggaaaaaagcaccggctatttgtaaagtggaagtatgttgaagccaaggtatataagctatgccactattatcattctctttaataagctgtaaattcttgtctaaataaaacaggctaaattttctccagatgatgtaattctctaatgtttaatcttttaagcatttctactgcatggcatctattttacatgtttatctcaggctgcagcatactatttccacggtttgattcttgacgagggaaataccgagaaatcccatggaatggcaatagctgcactacaagcttcagaagaatttctgaaagaaagcaaaatggtttcggaagccttccatgcaactcctccaacatcgaggagtccgaatgcattcggaacagcaaaatatctgtttgacaagatcccaagagatgcttccagcaaggtccgaatcaaacaggacctgtatactcaagaaaaggtcattggagcaccacccccattaccagattttgcattggcgctaacacctgaagattatgatcttcctccactagatccactttggaacaaagaagatacacaccattaagtgtctatacagcagattggttgcttctggcaaaaaattggctctggagagaaaggaggaccaagatctaccatgtcaaaggtcgaacatggtaacaaatgaagtgtacaaaatattttcaaacaaaattacatgtcaacaaaattaagcaaggcttgaagataatctgaagagctctgtacaggcaattttcttctgacaagggaaatgatatgtcaaagggttcattgatcattgtcgatcctgattcctgatgcttttattttttcaacaacagattttcagcattcgaaatggaactggaatcagcctctgatcgaagtggaaacctttttttagtcgtaaacatttacattggcaccttaaaatatactctggaacaatcagtctcagctgaacagtttataatacatgaactagctaaagtacagacatgcccaaaccttaggcaccacagtacattctgaatgacttttggcagtatcaaatgtacgtgaagccagtaagccaccgccgccacccctgcgaagcctgcagcaacactagaggcaaaaggggatatagggcctgcttcttctagattactcaaaactggcaaaagattaggataaactaaaaaaatgttacttcacaaagttaccgtgctgtccctatcattacttcaaatcaatttcgctagcatcattccatacctaggttcagggctcatattaactgccttccaggtgaacatcgctgtgcgtaggaattgccaaatagaaaaaaaaaacatagcaccaaatacagtctcgagctatctgatctgagccctctccaaagagcaccccatccttcaagcaatatcactctagaaggtagatgcacatcagacggcaatgggggtttcccagagccagtaagcatccatgggtgctgtttcagagcacccaacatgtcgggatgcttggagaaagatcagataaaaggcccgccgtgttgttccacaccgttatatcaagaacatacccagcaacagttgaaaaccactggaaatgatccttaacaacatttgcagggcccatagcttttgaaggaatcacaaaactaactagctttcgaagtttgaaaagttcaaatggtgtgcagaaaacagtctctacagcaccagcaactatgccagccaacatagcctcagaataatagacatagttgtcctcccttccatctgccaagacatctgttaacagttcataggtcacaaaatgtgctcccaacccaggaagtttacccattatggaccatccaatgccactgtaaaaacctaaaaggccagaagcggcctgagccggtccaccaactgccggagcccagctgcagatgcaaggaaacaccgcgcagataccaaaattagaccttgagaaagcaacagtacagcaacacaaggaggtgaggtgggtgagtgcgctcgcctggaagctggaggagtgcttaaccgtgtcgagggggtgcacggcgacggcggaggcgctgatcgctgccgcaccgaaagccgcgtggcccgcgtgacgctgtcctccatcggtttgccgc

SEQ ID NO: 106714 - DNA, 3087 bp, Zea Mays
aaccctgtaggcctctcccttcttctgctctccctcccttctcaaggcttcctcctgcagtccagctcaccaggaccaggaggaacaaagaagttgcatcgaacacagctgagttcctccctcttccctgaaatgcgcccggcagctagaaaggagcagctagcgggcgggctgcccatacgtcgttgagatagatacctaagcgggccgcttccgctgcacagccacaggcatggggtgcggggcgtcgagccacaaggacgccggggcgcgccggagacggcctgggagcgtcggcgacgtggtcgttttcctcccgggcctccgggtgccgagggccgtcgacttcgcccaggcgctcggcggctgcctggccagggctatagtcgagcggctgtcggctctgaggtcgcgggtcgtcgagatggcaatgcaagaatcggcggcggcgctcaagcccaggcggaaggcggctgcacggcacggtgtgtgtaggccactggagaagggggcggtgtggtacagcgcctggatggattgccaatcttctacaggccctcgaagactacttgccagttctgctgggactagcacaacaaggtagcgtcttgagacacaaagtgcagttcacctggagtaaccaagaggataatgctgaggagacagccatttcagatgtctggtacgaggtgctgtccgtgctgcacttgatggccatggtctgcttgctgcaggccaacaccctgcttctcccaaggtcatacggcgatggctacgccccaagagtttctgaagagagtagacgggccactgttgatgtcttcttgaaggcagctggatacctagactgcgcaattcgtcatgtacttccgaagatgccactggaactaaggagacaacttccagtcgacctggctgaaggaaatctcaaagctctaagcctgcaagcctttgggtcagggggttgacatgcagctcggcttggctattgatagtccaaaggccactttagcagtcaaaaggcgcttagcctgtgagatggtcaaatattggcaacaagttcaagagagcattccagagcttccagtctctgatggatggggaaaaaagcaccggctatttgtaaagtggaagtatgttgaagccaaggctgcagcatactatttccacggtttgattcttgacgagggaaataccgagaaatcccatggaatggcaatagctgcactacaagcttcagaagaatttctgaaagaaagcaaaatggtttcggaagccttccatgcaactcctccaacatcgaggagtccgaatgcattcggaacagcaaaatatctgtttgacaagatcccaagagatgcttccagcaaggtccgaatcaaacaggacctgtatactcaagaaaaggtcattggagcaccacccccattaccagattttgcattggcgctaacacctgaagattatgatcttcctccactagatccactttggaacaaagaagatacacaccattaagtgtctatacagcagattggttgcttctggcaaaaaattggctctggagagaaaggaggaccaagatctaccatgtcaaaggtcgaacatggtaacaaatgaagtgtacaaaatattttcaaacaaaattacatgtcaacaaaattaagcaaggcttgaagataatctgaagagctctgtacaggcaattttcttctgacaagggaaatgatatgtcaaagggttcattgatcattgtcgatcctgattcctgatgcttttattttttcaacaacagattttcagcattcgaaatggaactggaatcagcctctgatcgaagtggaaacctttttttagtcgtaaacatttacattggcaccttaaaatatactctggaacaatcagtctcagctgaacagtttataatacatgaactagctaaagtacagacatgcccaaaccttaggcaccacagtacattctgaatgacttttggcagtatcaaatgtacgtgaagccagtaagccaccgccgccacccctgcgaagcctgcagcaacactagaggcaaaaggggatatagggcctgcttcttctagattactcaaaactggcaaaagattaggataaactaaaaaaatgttacttcacaaagttaccgtgctgtccctatcattacttcaaatcaatttcgctagcatcattccatacctaggttcagggctcatattaactgccttccaggtgaacatcgctgtgcgtaggaattgccaaatagaaaaaaaaaacatagcaccaaatacagtctcgagctatctgatctgagccctctccaaagagcaccccatccttcaagcaatatcactctagaaggtagatgcacatcagacggcaatgggggtttcccagagccagtaagcatccatgggtgctgtttcagagcacccaacatgtcgggatgcttggagaaagatcagataaaaggcccgccgtgttgttccacaccgttatatcaagaacatacccagcaacagttgaaaaccactggaaatgatccttaacaacatttgcagggcccatagcttttgaaggaatcacaaaactaactagctttcgaagtttgaaaagttcaaatggtgtgcagaaaacagtctctacagcaccagcaactatgccagccaacatagcctcagaataatagacatagttgtcctcccttccatctgccaagacatctgttaacagttcataggtcacaaaatgtgctcccaacccaggaagtttacccattatggaccatccaatgccactgtaaaaacctaaaaggccagaagcggcctgagccggtccaccaactgccggagcccagctgcagatgcaaggaaacaccgcgcagataccaaaattagaccttgagaaagcaacagtacagcaacacaaggaggtgaggtgggtgagtgcgctcgcctggaagctggaggagtgcttaaccgtgtcgagggggtgcacggcgacggcggaggcgctgatcgctgccgcaccgaaagccgcgtggcccgcgtgacgctgtcctccatcggtttgccgc

SEQ ID NO: 106715 - DNA, 3080 bp, Zea Mays
aaccctgtaggcctctcccttcttctgctctccctcccttctcaaggcttcctcctgcagtccagctcaccaggaccaggaggaacaaagaagttgcatcgaacacagctgagttcctccctcttccctgaaatgcgcccggcagctagaaaggagcagctagcgggcgggctgcccatacgtcgttgagatagatacctaagcgggccgcttccgctgcacagccacaggcatggggtgcggggcgtcgagccacaaggacgccggggcgcgccggagacggcctgggagcgtcggcgacgtggtcgttttcctcccgggcctccgggtgccgagggccgtcgacttcgcccaggcgctcggcggctgcctggccagggctatagtcgagcggctgtcggctctgaggtcgcgggtcgtcgagatggcaatgcaagaatcggcggcggcgctcaagcccaggcggaaggcggctgcacggcacggtgtgtgtaggccactggagaagggggcggtgtggtacagcgcctggatggattgccaatcttctacaggccctcgaagactacttgccagttctgctgggactagcacaacaaggtagcgtcttgagacacaaagtgcagttcacctggagtaaccaagaggataatgctgaggagacagccatttcagatgtctggtacgaggtgctgtccgtgctgcacttgatggccatggtctgcttgctgcaggccaacaccctgcttctcccaaggtcatacggcgatggctacgccccaagagtttctgaagagagtagacgggccactgttgatgtcttcttgaaggcagctggatacctagactgcgcaattcgtcatgtacttccgaagatgccactggaactaaggagacaacttccagtcgacctggctgaaggaaatctcaaagctctaagcctgcaagcctttgggtcagggggttgacatgcagctcggcttggctattgatagtccaaaggccactttagcagtcaaaaggcgcttagcctgtgagatggtcaaatattggcaacaagttcaagagagcattccagagcttccagtctctgatggatggggaaaaaagcaccggctatttgtaaagtggaagtatgttgaagccaagcatactatttccacggtttgattcttgacgagggaaataccgagaaatcccatggaatggcaatagctgcactacaagcttcagaagaatttctgaaagaaagcaaaatggtttcggaagccttccatgcaactcctccaacatcgaggagtccgaatgcattcggaacagcaaaatatctgtttgacaagatcccaagagatgcttccagcaaggtccgaatcaaacaggacctgtatactcaagaaaaggtcattggagcaccacccccattaccagattttgcattggcgctaacacctgaagattatgatcttcctccactagatccactttggaacaaagaagatacacaccattaagtgtctatacagcagattggttgcttctggcaaaaaattggctctggagagaaaggaggaccaagatctaccatgtcaaaggtcgaacatggtaacaaatgaagtgtacaaaatattttcaaacaaaattacatgtcaacaaaattaagcaaggcttgaagataatctgaagagctctgtacaggcaattttcttctgacaagggaaatgatatgtcaaagggttcattgatcattgtcgatcctgattcctgatgcttttattttttcaacaacagattttcagcattcgaaatggaactggaatcagcctctgatcgaagtggaaacctttttttagtcgtaaacatttacattggcaccttaaaatatactctggaacaatcagtctcagctgaacagtttataatacatgaactagctaaagtacagacatgcccaaaccttaggcaccacagtacattctgaatgacttttggcagtatcaaatgtacgtgaagccagtaagccaccgccgccacccctgcgaagcctgcagcaacactagaggcaaaaggggatatagggcctgcttcttctagattactcaaaactggcaaaagattaggataaactaaaaaaatgttacttcacaaagttaccgtgctgtccctatcattacttcaaatcaatttcgctagcatcattccatacctaggttcagggctcatattaactgccttccaggtgaacatcgctgtgcgtaggaattgccaaatagaaaaaaaaaacatagcaccaaatacagtctcgagctatctgatctgagccctctccaaagagcaccccatccttcaagcaatatcactctagaaggtagatgcacatcagacggcaatgggggtttcccagagccagtaagcatccatgggtgctgtttcagagcacccaacatgtcgggatgcttggagaaagatcagataaaaggcccgccgtgttgttccacaccgttatatcaagaacatacccagcaacagttgaaaaccactggaaatgatccttaacaacatttgcagggcccatagcttttgaaggaatcacaaaactaactagctttcgaagtttgaaaagttcaaatggtgtgcagaaaacagtctctacagcaccagcaactatgccagccaacatagcctcagaataatagacatagttgtcctcccttccatctgccaagacatctgttaacagttcataggtcacaaaatgtgctcccaacccaggaagtttacccattatggaccatccaatgccactgtaaaaacctaaaaggccagaagcggcctgagccggtccaccaactgccggagcccagctgcagatgcaaggaaacaccgcgcagataccaaaattagaccttgagaaagcaacagtacagcaacacaaggaggtgaggtgggtgagtgcgctcgcctggaagctggaggagtgcttaaccgtgtcgagggggtgcacggcgacggcggaggcgctgatcgctgccgcaccgaaagccgcgtggcccgcgtgacgctgtcctccatcggtttgccgc

SEQ ID NO: 106716 - DNA, 449 bp, Zea Mays
tcttctgcttgcatgatttcttgttttctattgattttatctgggtccaatttagactctgtttgtcatagctccaattcaccggcagagctgttttttagcttcacgtacggtctctgttggcggagtttaagctattttggcaaactatttgtaaaccagagtcgagttgagcaagagcaactgctacgcactacgcatacgaaacgaagcaccgcatcaagcatgcatggtggtgtccttctggaacacgacggcatgagcccggtcggtctcggtggtgccgagccacgcgcggcggtccccatcgtccctgaacacgcccaggtcctggcacgacgtcgacgcgctggagcccccgcaccacaccagcttgtacccgcggctgtgcttctcgacgcggaacaccttctcccgtccgttcgggctcgaggacaggaccgggccgg

SEQ ID NO: 106717 - DNA, 1628 bp, Zea Mays
atttggcccaaggttcaccgctttgcctcgttcccgttctcctcctcgcaactctctcgtccatacgtcgtagccgccgcctgtctctcaccgccgacatcccgacagctctcagcccagatcgagcttcccccttcccaaatcgggttctgcttgggctcccgccaccgccgccctacaccaggtgccaaggccttcgccgacctcttcgccggcgaagagcgcccagcagagatgaatgtagcggtgccaccacaatctccacatcttcgtctatatgactttgccaagagtgccatcatcaaaatttttgcctttccttatgctacggtctgctatatgctcctctcttttatgatcttcagttcattccaaattagcgagaaactccggaggaatcctgaaagtaattttacatttattggttgccaaatgcctaaggtctgtgacctgtattgcgacggtggaatggatacagacaagtggtgtgatgcccaggttggccactacataggcatcgatgcctctgcatcgggtgtcaactatgcccgtgagctatgggagaacaggaggaaacctttcactgctgaattcatcgagttggatccttctgatgatggttttgaagctcaagtgcaggaaaagggcatccaagcagatatggtttgctgtatgcagcacttgcagttatgctttgagaatgaagaacaggcaaagaagcttctgaacaatgtatcatcacttctcaaacctggaggctacttctttggcataactccagattcatctacaatatggacaaaatatcaaaagaatgttgaggcttcacataataagggtttgaagactgttccaaatagcattcgctcagagaactataccattacctttgaagtcgaggaagagaagtttcccttttttggaaagaagtatcaactcaaattcgcgagtgacgcggtgtttgagaatcagtgcctggtccactttcccacccttatgagattatcaagggaagctggacttgaatatgtggagatccagaatttaaccgagttttatgatgataacagaacacaattcgctccaatgcttggtggttacggtgcaagttttttggatgctcgagggaagcttgttgctcgttcctacgacattttaggcttgtattcagcatttgtgttccagaagcctgatccagaggcaataccaccgattgtaactcccgacttgcctgatcctgataaaggtcacgaagaggagtggctccagccacagcaggcgtcagtggaagatgggagacgctcgcatgcggatgtgcttcccatagaccctgagaaaggcatcctgggtcctggacctgcagacatgaggctttagttgctggacattcaaatgcagctgagcctgggtagtgatttttttttccaccgtgggcattctcccatagtcccatgtggccatgtctcctttatgagtccacgaaaatagcgaacaacactacaaggctcatgaatcctgcacggacgcatgggctttcttgtaaaacaaatgctcgatacgtatgaccttgtacggtctttgatgtgtatatttgactgctcatactcagtaccattttttaattgcct

SEQ ID NO: 106718 - DNA, 1498 bp, Zea Mays
atttggcccaaggttcaccgctttgcctcgttcccgttctcctcctcgcaactctctcgtccatacgtcgtagccgccgcctgtctctcaccgccgacatcccgacagctctcagcccagatcgagcttcccccttcccaaatcgggttctgcttgggctcccgccaccgccgccctacaccaggtgccaaggccttcgccgacctcttcgccggcgaagagcgcccagcagttcattccaaattagcgagaaactccggaggaatcctgaaagtaattttacatttattggttgccaaatgcctaaggtctgtgacctgtattgcgacggtggaatggatacagacaagtggtgtgatgcccaggttggccactacataggcatcgatgcctctgcatcgggtgtcaactatgcccgtgagctatgggagaacaggaggaaacctttcactgctgaattcatcgagttggatccttctgatgatggttttgaagctcaagtgcaggaaaagggcatccaagcagatatggtttgctgtatgcagcacttgcagttatgctttgagaatgaagaacaggcaaagaagcttctgaacaatgtatcatcacttctcaaacctggaggctacttctttggcataactccagattcatctacaatatggacaaaatatcaaaagaatgttgaggcttcacataataagggtttgaagactgttccaaatagcattcgctcagagaactataccattacctttgaagtcgaggaagagaagtttcccttttttggaaagaagtatcaactcaaattcgcgagtgacgcggtgtttgagaatcagtgcctggtccactttcccacccttatgagattatcaagggaagctggacttgaatatgtggagatccagaatttaaccgagttttatgatgataacagaacacaattcgctccaatgcttggtggttacggtgcaagttttttggatgctcgagggaagcttgttgctcgttcctacgacattttaggcttgtattcagcatttgtgttccagaagcctgatccagaggcaataccaccgattgtaactcccgacttgcctgatcctgataaaggtcacgaagagcaggagtggctccagccacagcaggcgtcagtggaagatgggagacgctcgcatgcggatgtgcttcccatagaccctgagaaaggcatcctgggtcctggacctgcagacatgaggctttagttgctggacattcaaatgcagctgagcctgggtagtgatttttttttccaccgtgggcattctcccatagtcccatgtggccatgtctcctttatgagtccacgaaaatagcgaacaacactacaaggctcatgaatcctgcacggacgcatgggctttcttgtaaaacaaatgctcgatacgtatgaccttgtacggtctttgatgtgtatatttgactgctcatactcagtaccattttttaattgcct

SEQ ID NO: 106719 - DNA, 1532 bp, Zea Mays
atttggcccaaggttcaccgctttgcctcgttcccgttctcctcctcgcaactctctcgtccatacgtcgtagccgccgcctgtctctcaccgccgacatcccgacagctctcagcccagatcgagcttcccccttcccaaatcgggttctgcttgggctcccgccaccgccgccctacaccaggtgccaaggccttcgccgacctcttcgccggcgaagagcgcccagcagagatgaatgtagcggtgccaccacaatctccacatcttcgtctatatgactttgccaagagtgccatcatcaaaatttttgcctttccttatgctacggtctgctatatgctcctctcttttatgatcttcagttcattccaaattagcgagaaactccggaggaatcctgaaagtaattttacatttattggttgccaaatgcctaaggtctgtgacctgtattgcgacggtggaatggatacagacaagtggtgtgatgcccaggttggccactacataggcatcgatgcctctgcatcgggtgtcaactatgcccgtgagctatgggagaacaggaggaaacctttcactgctgaattcatcgagttggatccttctgatgatggttttgaagctcaagtgcaggaaaagggcatccaagcagatatggtttgctgtatgcagcacttgcagttatgctttgagaatgaagaacaggcaaagaagcttctgaacaatgtatcatcacttctcaaacctggaggctacttctttggcataactccagattcatctacaatatggacaaaatatcaaaagaatgttgaggcttcacataataagggtttgaagactgttccaaatagcattcgctcagagaactataccattacctttgaagtcgaggaagagaagtttcccttttttggaaagaagtatcaactcaaattcgcgagtgacgcggtgtttgagaatcagtgcctggtccactttcccacccttatgagattatcaagggaagctggacttgaatatgtggagatccagaatttaaccgagttttatgatgataacagaacacaattcgctccaatgcttggtggttacggtgcaagttttttggatgctcgagggaagcttgttgctcgttcctacgacattttaggcttgtattcagcatttgtgttccagaagcctgatccagaggcaataccaccgattgtaactcccgacttgcctgatcctgataaaggtcacgaagagcaggagtggctccagccacagcaggcgtcagtggaagatgggagacgctcgcatgcggatgtgcttcccatagaccctgagaaaggcatcctgggtcctggacctgcagacatgaggctttagttgctggacattcaaatgcagctgagcctgggtagtgatttttttttccaccgtgggcattctcccatagtcccatgtggccatgtctcctttatgagtccacgaaaatagcgaacaacactacaaggctcatgaatcctgcacggacgcat

SEQ ID NO: 106720 - DNA, 1421 bp, Zea Mays
atttggcccaaggttcaccgctttgcctcgttcccgttctcctcctcgcaactctctcgtccatacgtcgtagccgccgcctgtctctcaccgccgacatcccgacagctctcagcccagatcgagcttcccccttcccaaatcgggttctgcttgggctcccgccaccgccgccctacaccaggtgccaaggccttcgccgacctcttcgccggcgaagagcgcccagcagagatgaatgtagcggtgccaccacaatctccacatcttcgtctatatgactttgccaagagtgccatcatcaaaatttttgcctttccttatgctacggtctgtgacctgtattgcgacggtggaatggatacagacaagtggtgtgatgcccaggttggccactacataggcatcgatgcctctgcatcgggtgtcaactatgcccgtgagctatgggagaacaggaggaaacctttcactgctgaattcatcgagttggatccttctgatgatggttttgaagctcaagtgcaggaaaagggcatccaagcagatatggtttgctgtatgcagcacttgcagttatgctttgagaatgaagaacaggcaaagaagcttctgaacaatgtatcatcacttctcaaacctggaggctacttctttggcataactccagattcatctacaatatggacaaaatatcaaaagaatgttgaggcttcacataataagggtttgaagactgttccaaatagcattcgctcagagaactataccattacctttgaagtcgaggaagagaagtttcccttttttggaaagaagtatcaactcaaattcgcgagtgacgcggtgtttgagaatcagtgcctggtccactttcccacccttatgagattatcaagggaagctggacttgaatatgtggagatccagaatttaaccgagttttatgatgataacagaacacaattcgctccaatgcttggtggttacggtgcaagttttttggatgctcgagggaagcttgttgctcgttcctacgacattttaggcttgtattcagcatttgtgttccagaagcctgatccagaggcaataccaccgattgtaactcccgacttgcctgatcctgataaaggtcacgaagagcaggagtggctccagccacagcaggcgtcagtggaagatgggagacgctcgcatgcggatgtgcttcccatagaccctgagaaaggcatcctgggtcctggacctgcagacatgaggctttagttgctggacattcaaatgcagctgagcctgggtagtgatttttttttccaccgtgggcattctcccatagtcccatgtggccatgtctcctttatgagtccacgaaaatagcgaacaacactacaaggctcatgaatcctgcacggacgcat

SEQ ID NO: 106721 - DNA, 1698 bp, Zea Mays
atttggcccaaggttcaccgctttgcctcgttcccgttctcctcctcgcaactctctcgtccatacgtcgtagccgccgcctgtctctcaccgccgacatcccgacagctctcagcccagatcgagcttcccccttcccaaatcgggttctgcttgggctcccgccaccgccgccctacaccaggtgccaaggccttcgccgacctcttcgccggcgaagagcgcccagcaggtattcccaatctcaccccccttctcttccctgttagctgtgcgaaaccgagttcgcaaactacctcaagctatctggctattcgattcctagtaactttttgcaaaagccattggtgtgcatgtacacccgtccctctactaatccgcccgtgttctgtctcgacctcgccgctggttatctgcttacatgtaattgcagagatgaatgtagcggtgccaccacaatctccacatcttcgtctatatgactttgccaagagtgccatcatcaaaatttttgcctttccttatgctacggtctgctatatgctcctctcttttatgatcttcagttcattccaaattagcgagaaactccggaggaatcctgaaagtaattttacatttattggttgccaaatgcctaaggtctgtgacctgtattgcgacggtggaatggatacagacaagtggtgtgatgcccaggttggccactacataggcatcgatgcctctgcatcgggtgtcaactatgcccgtgagctatgggagaacaggaggaaacctttcactgctgaattcatcgagttggatccttctgatgatggttttgaagctcaagtgcaggaaaagggcatccaagcagatatggtttgctgtatgcagcacttgcaggcgagttggttgttctctagaactgtagaatatgatatgcttttatgctttgagaatgaagaacaggcaaagaagcttctgaacaatgtatcatcacttctcaaacctggaggctacttctttggcataactccagattcatctacaatatggacaaaatatcaaaagaatgttgaggcttcacataataagggtttgaagactgttccaaatagcattcgctcagagaactataccattacctttgaagtcgaggaagagaagtttcccttttttggaaagaagtatcaactcaaattcgcgagtgacgcggtgtttgagaatcagtgcctggtccactttcccacccttatgagattatcaagggaagctggacttgaatatgtggagatccagaatttaaccgagttttatgatgataacagaacacaattcgctccaatgcttggtggttacggtgcaagttttttggatgctcgagggaagcttgttgctcgttcctacgacattttaggtggtgtagaattctttttctttttagaagggcaggcctggtgcaacgatgagagctgtctcactgagtcactaggcttgtattcagcatttgtgttccagaagcctgatccagaggcaataccaccgattgtaactcccgacttgcctgatcctgataaaggtcacgaagagcaggagtggctccagccacagcaggcgtcagtggaagatgggagacgctcgcatgcggatgtgcttcccatagaccctgagaaaggcatcctgggtcctggacctgcagacatgaggctttag

SEQ ID NO: 106722 - DNA, 2532 bp, Zea Mays
gcacgtccactagcgcctgtctccctcgttgcaatcaccacgccgccggagtccggagggcagcgtgcgaactgcgaaaccgaactcggggagaggaaggaatctcctaccagccggcagccaacacccagcattcgtgctcccgtagccttcgtcgtccccagccccacggccgctgcgtcgccttcccctctcggtcgaaaccacaacggcctcttccggcataacaatatgcaccgaatattcagctcatccgctctcctataaaaacgaagcgcaaatccaaaaaaaaaaaaaccccgcccgcacgacgcattgtccgttccgtttggacccatgatatatctcgctgggatcttgaccgtgcgcgagacgaatctcctcgtgcggtaaccgataccccccaagtcaaaaatcagcccataaaatttttatgggcggaggatcacccgtcgccgcagttcaggacgcgagcgacgacggcgccagggtcgtggtgctagtcgcgggttctcccgtcgattccgcctccgattccctccctcctcccgttgcggcgactcctgctcctgcggcggaggccaagcaggagtcggtgtcggagacggaggaaactaagcaggcggcggcggcggcggcagcaccagcaacagcggcaggaggtgtgcaggccatggcggtcaccgtagtgcgggacgtcgagacgggcctggacgcgagcaccagcgaccgggacggtgacaagccttcctggttcacacctaagagattacttgtcatgttctgcattatcaacatgctgaactatattgatcgaggagtaatagcaagtaatggggtcaatggtacccgcaaaagttgttctggtggcacatgcacctcgggctcaggaattcaaggagacttcaatcttaataatcttgaagatggtacactgtcctcagcatttatggttgggttgttggtgtcttcgttgatatttgcaagccttgtaaaaagatataatcctttcaggcttattggtgttggcttgttagtgtggactatcgcaacagctggttgtggagtatcatttgatttctggtcaattactatatgccgcatgtttgttggcgttggcgaagcttcatttataagtctcgcagctccattcattgatgacaatgcaccggtagctcagaaaacagcatggcttggtatgttctacatgtgtataccaactgggatagcattaggctatgtttatggcggactggttggaaaatatctgaactggcgtgctgctttctggggagagtcaatattgatggttccttttgttattcttggttttgtaataaagccactaaacctcaaaggatttgctcacaacacaacaaaagaatatggccagatgcttaatcctgaggttcaagatcagataaataataatgcgacaaagcatgttttgcctggtggaattgaggatctttcagggaaggttccacaaaagttctccttgtccagtttttgccacggtatcatgactgaaattggtcgcttcagcaaagatatgaaagaactactacaagagaaggtttttgtcatcgttgttttaggttatatatcctacaatttcgtcattggtgcttattcctactggggcccaaaggcaggtcaagagatctacaatatggggagtgcagatcttatgtttggtggaattactatagtgtgtggaattattggatcactagcaggaggtttcatccttgacaagatagggtctactattcctaatgccttcaagcttctttcgggtgcgacatttgtaggggcaatattctgctttggtgctttttgtttcaagagcctttatgggttcataccctcctttgcagttggggagctttcagtgttcgcaactcaggcacctgtaaattttgtatgccttcacgccgtgaagccacatttgcggccattggcaatggccgtatccactgtttcaatccatatatttggcgatgtgccttcttcacctcttgttgggcttcttcaggacaaaatcaataattggagggccacagctcttattttgacatccatccttttcgctgctgttgtgttctggttcattggcatatttatccccagcgtcgatcgtttcaatgaagagagcgagcatggccttactgtcgccgagagatcaaatctcaggccgctccttgatgaaaaggacgagccacggacatctgactaaaacctacgcaagtcataaccttttatttcttggcttagtccgtagtttttcccttatgccatcaacatgtgaaatgtaaatttgcatgcccattggctgtacctgtacatatacgaggtttgttcgttttgcgttattcttttacttttttttgtacaggctacagaaacaagcaaaagagtgctagaattcctttttttacgaattaaaacattttagaatttctttttacgaatgtaaaacgtgttcggattgtgacatggcataactttctggttatgcggttatgctct

SEQ ID NO: 106723 - DNA, 1253 bp, Zea Mays
aagtctgaacggataataagcgccatcggcaacagaactgataggagagaggacagaacccatacaaggttgcctagatattaccctccagatcttcagatattgcaagtcccgttacttcatgtgacagacaacggcactgcaccagagatctgaatacaagtatcgttgcaaaacgagatctgaacaagcaggcgttagcggttgtgactatgtttttctttttcttttttacgtatacataggttctatacattcgcatcatagccgatcgatccaacgaaggcctgaaagcagacacaagggccaatgggccagcgtgcatcttgtatgcaagcaaactcagcagcgcagttcaacaagcataggcacaaccgtaaaggtataaatacaaggtgcagagcatctggatcacaagttcacaacgtcgcacacacctcatcactgggccgccttccccagcgccgcctcgagccgcttgcaatcgacgaggtaagcgaacccgtacgccatgttggcgagcgtggcatcctgcaggtcctggctggccgtggccgtggcgtcggcggagaagaacacgcggaaccccctgacgaaggcgtcccgcgcggtggtctcgcagcacaggttggtcatcacgccggccacgatcacctccccggcgcccatccgccgcagcgtcgcctccagccccgtgcccacgaaggcgctgtacgtgcccttctccaccacgaggtccccctgggcgcggccggcccccgggagcagctcggccgcgggcgtgccggcgtcgatgcggtcgccgggccaccactcgccgagcgggggcaggcgcgggaccgggtccacgtggcgggtgtacacgaccggcacgcccgcggcgcggcacagagcgacggtggacgcgatggccggcatgatcggggcggccagcgaggcgaagtggccctgcacgtcgatcacgaggagcacggccgcgcgggggtccggatctcggcggcgggtctcgtacttggtgtacgtggtggcgagaggcggcatggtgattgagcggcgggcggtgcgatccccgctacgctacgtgcgcggataggatgaggccggaggacagctgttgcagagacgcgattgagggaatagctggttcccgcgcggacttaacatccgtcacccggttgcttagagtaggtccggtgtcatctgatgccacgtgaagcacgaggtatattctacggtcttcctccgatttaaaa

SEQ ID NO: 106724 - DNA, 2228 bp, Zea Mays
gcgcagtagcagtgtagcacccccacaattccagctcacgctgcactcctccatcccagtcgacctgttcccaacttcccatcccctcggcaccggcccgactaccggagcctcttgccgcatttttcagactgtcctgtttcgtgacgtcccaggattctaggagaagagaacaccctcgcccccctggggcatagtcgctgccgagccagtggtactggccgcgacggagcggtcagaagctgcggcggccggcgcggtttcggtttcggtttcctggctggcccgaggagtttgactcctctcctgatttgtgaaagtggagaaataagatacacagtggaagatgagatcagttgttcggtcacttcgccagcttcgccgtttcactcagcaccatgcagaggggcactcacaagcaaccagattgttcgggcagcagaacgctttaatcatgtgcggttcgacatctggttcactgagcacgttacgttgtaatggtgaaattagcagatttgcaagccctggcgtcgagttgatgaggtccatgttctctactgtagtgactgatccgatcaaagatattggaagaggtggtccaatggtggaatatgagaggagaatagcatcaggagagctagtagacggtgatagctttcaggttgatacaattcaacaattacaaaggctctatgaggagttgattgagaatgaagaagactgtcagctggatagatataaatcatctgagaaatcaggccggagtcgatggctatggtcccgcctcattactcagccttctacgtatgctcctattaagggcctttacctctatggtggtgttggtacagggaagacaatgcttatggacttgttctatgaacagctgccatttaattggagaaaaaaacgtattcactttcatgatttcatgctgaatgtacatagtcgtcttcagatgcacaaaggtgtttcagatccccttgatgttgtagcagctgagatttcagatgaggccatcatattatgtcttgatgagtttatggtaactgatgttgctgatgctatgattctgaaccgtctgttcagacaattgttcagcaaaggcgttattcttgtttcgacttctaaccgtgctccagataagctttatgaaggtggcttacaacgggaccttttcttgccatttattgacaccttgaaagaaagatgcatcgtgcatgccattggatctgcggtggactatcgtcaactgggttctgctgaacaaggtttctattttgtcggaaaacattacagtacgcttctgaaacagaagctccagtctttaattggagatgagaaacccagcccacaaactgttgaagtaattatgggaaggaaattacaggttcccctaggagcaaatggttgtgcatattttccttttgaagacctttgtgataaacctttaggtgcagcagattactttggactctttaaaaaatttcacaccctggcacttgatggtattccaaagcttgggtctagtaacagaacagcagcttatcggttcgtcacactgattgatgttatgtacgagaacaaggcaaggctgttatgtacagccgaggctggaccagtaggactgttcgagaatatcgtgactgttgctgaagcacggaaggtttcaccaagatcttcacgctcacagaaaagcgacgacactgacctatgcgtggacaatgagcttggatttgccaaggatcgtacgattagcaggttgacagagatcaacagcagagaatatttggaggacttcgaaatgagattgaggcaacagcagcagctgcccttgcaaggtctagataaaaggtggtgatgctgtactaaacataagaagcagaaggcttctgcgcctcatcttgaaattcttgtattcacacccacctggcttacataggcaactgagaagctatgcttttccaacagtggtgcatgtaaatgtccaataaagctatgtaagggcatttttgctaacaggtgagtgatctataaaatggcccaacctgggggaggggggataccatatcgttttttttagtgtatcacatatttccaaacctttagagaggcctcctaaggctcaaaaacagcatgagttacactgcataaagccatatataggctgaaagctttcgctgaactttgtgaattgagggaaaaaaagtctaacaattgttcatgtt

SEQ ID NO: 106725 - DNA, 2263 bp, Zea Mays
gcgcagtagcagtgtagcacccccacaattccagctcacgctgcactcctccatcccagtcgacctgttcccaacttcccatcccctcggcaccggcccgactaccggagcctcttgccgcatttttcagactgtcctgtttcgtgacgtcccaggattctaggagaagagaacaccctcgcccccctggggcatagtcgctgccgagccagtggtactggccgcgacggagcggtcagaagctgcggcggccggcgcggtttcggtttcggtttcctggctggcccgaggagtttgactcctctcctgatttgtggctcataacttctttatggtgtttggtgtgcctagaaagtggagaaataagatacacagtggaagatgagatcagttgttcggtcacttcgccagcttcgccgtttcactcagcaccatgcagaggggcactcacaagcaaccagattgttcgggcagcagaacgctttaatcatgtgcggttcgacatctggttcactgagcacgttacgttgtaatggtgaaattagcagatttgcaagccctggcgtcgagttgatgaggtccatgttctctactgtagtgactgatccgatcaaagatattggaagaggtggtccaatggtggaatatgagaggagaatagcatcaggagagctagtagacggtgatagctttcaggttgatacaattcaacaattacaaaggctctatgaggagttgattgagaatgaagaagactgtcagctggatagatataaatcatctgagaaatcaggccggagtcgatggctatggtcccgcctcattactcagccttctacgtatgctcctattaagggcctttacctctatggtggtgttggtacagggaagacaatgcttatggacttgttctatgaacagctgccatttaattggagaaaaaaacgtattcactttcatgatttcatgctgaatgtacatagtcgtcttcagatgcacaaaggtgtttcagatccccttgatgttgtagcagctgagatttcagatgaggccatcatattatgtcttgatgagtttatggtaactgatgttgctgatgctatgattctgaaccgtctgttcagacaattgttcagcaaaggcgttattcttgtttcgacttctaaccgtgctccagataagctttatgaaggtggcttacaacgggaccttttcttgccatttattgacaccttgaaagaaagatgcatcgtgcatgccattggatctgcggtggactatcgtcaactgggttctgctgaacaaggtttctattttgtcggaaaacattacagtacgcttctgaaacagaagctccagtctttaattggagatgagaaacccagcccacaaactgttgaagtaattatgggaaggaaattacaggttcccctaggagcaaatggttgtgcatattttccttttgaagacctttgtgataaacctttaggtgcagcagattactttggactctttaaaaaatttcacaccctggcacttgatggtattccaaagcttgggtctagtaacagaacagcagcttatcggttcgtcacactgattgatgttatgtacgagaacaaggcaaggctgttatgtacagccgaggctggaccagtaggactgttcgagaatatcgtgactgttgctgaagcacggaaggtttcaccaagatcttcacgctcacagaaaagcgacgacactgacctatgcgtggacaatgagcttggatttgccaaggatcgtacgattagcaggttgacagagatcaacagcagagaatatttggaggacttcgaaatgagattgaggcaacagcagcagctgcccttgcaaggtctagataaaaggtggtgatgctgtactaaacataagaagcagaaggcttctgcgcctcatcttgaaattcttgtattcacacccacctggcttacataggcaactgagaagctatgcttttccaacagtggtgcatgtaaatgtccaataaagctatgtaagggcatttttgctaacaggtgagtgatctataaaatggcccaacctgggggaggggggataccatatcgttttttttagtgtatcacatatttccaaacctttagagaggcctcctaaggctcaaaaacagcatgagttacactgcataaagccatatataggctgaaagctttcgctgaactttgtgaattgagggaaaaaaagtctaacaattgttcatgtt

SEQ ID NO: 106726 - DNA, 2397 bp, Zea Mays
gcgcagtagcagtgtagcacccccacaattccagctcacgctgcactcctccatcccagtcgacctgttcccaacttcccatcccctcggcaccggcccgactaccggagcctcttgccgcatttttcagactgtcctgtttcgtgacgtcccaggattctaggagaagagaacaccctcgcccccctggggcatagtcgctgccgagccagtggtactggccgcgacggagcggtcagaagctgcggcggccggcgcggtttcggtttcggtttcctggctggcccgaggagtttgactcctctcctgatttgtgcgccggggcgtctcttgttctgctgcagcggattgtcgcggactggacgcggtgaggcggacatccctgtgcggaaggcgtgctcgggcagggccagcccaaccgccgttcgtgcgctagagttcctcgctcaggctcataacttctttatggtgtttggtgtgcctagaaagtggagaaataagatacacagtggaagatgagatcagttgttcggtcacttcgccagcttcgccgtttcactcagcaccatgcagaggggcactcacaagcaaccagattgttcgggcagcagaacgctttaatcatgtgcggttcgacatctggttcactgagcacgttacgttgtaatggtgaaattagcagatttgcaagccctggcgtcgagttgatgaggtccatgttctctactgtagtgactgatccgatcaaagatattggaagaggtggtccaatggtggaatatgagaggagaatagcatcaggagagctagtagacggtgatagctttcaggttgatacaattcaacaattacaaaggctctatgaggagttgattgagaatgaagaagactgtcagctggatagatataaatcatctgagaaatcaggccggagtcgatggctatggtcccgcctcattactcagccttctacgtatgctcctattaagggcctttacctctatggtggtgttggtacagggaagacaatgcttatggacttgttctatgaacagctgccatttaattggagaaaaaaacgtattcactttcatgatttcatgctgaatgtacatagtcgtcttcagatgcacaaaggtgtttcagatccccttgatgttgtagcagctgagatttcagatgaggccatcatattatgtcttgatgagtttatggtaactgatgttgctgatgctatgattctgaaccgtctgttcagacaattgttcagcaaaggcgttattcttgtttcgacttctaaccgtgctccagataagctttatgaaggtggcttacaacgggaccttttcttgccatttattgacaccttgaaagaaagatgcatcgtgcatgccattggatctgcggtggactatcgtcaactgggttctgctgaacaaggtttctattttgtcggaaaacattacagtacgcttctgaaacagaagctccagtctttaattggagatgagaaacccagcccacaaactgttgaagtaattatgggaaggaaattacaggttcccctaggagcaaatggttgtgcatattttccttttgaagacctttgtgataaacctttaggtgcagcagattactttggactctttaaaaaatttcacaccctggcacttgatggtattccaaagcttgggtctagtaacagaacagcagcttatcggttcgtcacactgattgatgttatgtacgagaacaaggcaaggctgttatgtacagccgaggctggaccagtaggactgttcgagaatatcgtgactgttgctgaagcacggaaggtttcaccaagatcttcacgctcacagaaaagcgacgacactgacctatgcgtggacaatgagcttggatttgccaaggatcgtacgattagcaggttgacagagatcaacagcagagaatatttggaggacttcgaaatgagattgaggcaacagcagcagctgcccttgcaaggtctagataaaaggtggtgatgctgtactaaacataagaagcagaaggcttctgcgcctcatcttgaaattcttgtattcacacccacctggcttacataggcaactgagaagctatgcttttccaacagtggtgcatgtaaatgtccaataaagctatgtaagggcatttttgctaacaggtgagtgatctataaaatggcccaacctgggggaggggggataccatatcgttttttttagtgtatcacatatttccaaacctttagagaggcctcctaaggctcaaaaacagcatgagttacactgcataaagccatatataggctgaaagctttcgctgaactttgtgaattgagggaaaaaaagtctaacaattgttcatgtt

SEQ ID NO: 106727 - DNA, 2520 bp, Zea Mays
gcgcagtagcagtgtagcacccccacaattccagctcacgctgcactcctccatcccagtcgacctgttcccaacttcccatcccctcggcaccggcccgactaccggagcctcttgccgcatttttcagactgtcctgtttcgtgacgtcccaggattctaggagaagagaacaccctcgcccccctggggcatagtcgctgccgagccagtggtactggccgcgacggagcggtcagaagctgcggcggccggcgcggtttcggtttcggtttcctggctggcccgaggagtttgactcctctcctgatttgtgtggttctagtacagagttgtcttgaggccccgtcgctgtctgtctcctcacgcttgactgctcgccggcggcgccactgtcggtggcagctactaatcgccgcgtccggtggccgcgttgcagcgccggggcgtctcttgttctgctgcagcggattgtcgcggactggacgcggtgaggcggacatccctgtgcggaaggcgtgctcgggcagggccagcccaaccgccgttcgtgcgctagagttcctcgctcaggctcataacttctttatggtgtttggtgtgcctagaaagtggagaaataagatacacagtggaagatgagatcagttgttcggtcacttcgccagcttcgccgtttcactcagcaccatgcagaggggcactcacaagcaaccagattgttcgggcagcagaacgctttaatcatgtgcggttcgacatctggttcactgagcacgttacgttgtaatggtgaaattagcagatttgcaagccctggcgtcgagttgatgaggtccatgttctctactgtagtgactgatccgatcaaagatattggaagaggtggtccaatggtggaatatgagaggagaatagcatcaggagagctagtagacggtgatagctttcaggttgatacaattcaacaattacaaaggctctatgaggagttgattgagaatgaagaagactgtcagctggatagatataaatcatctgagaaatcaggccggagtcgatggctatggtcccgcctcattactcagccttctacgtatgctcctattaagggcctttacctctatggtggtgttggtacagggaagacaatgcttatggacttgttctatgaacagctgccatttaattggagaaaaaaacgtattcactttcatgatttcatgctgaatgtacatagtcgtcttcagatgcacaaaggtgtttcagatccccttgatgttgtagcagctgagatttcagatgaggccatcatattatgtcttgatgagtttatggtaactgatgttgctgatgctatgattctgaaccgtctgttcagacaattgttcagcaaaggcgttattcttgtttcgacttctaaccgtgctccagataagctttatgaaggtggcttacaacgggaccttttcttgccatttattgacaccttgaaagaaagatgcatcgtgcatgccattggatctgcggtggactatcgtcaactgggttctgctgaacaaggtttctattttgtcggaaaacattacagtacgcttctgaaacagaagctccagtctttaattggagatgagaaacccagcccacaaactgttgaagtaattatgggaaggaaattacaggttcccctaggagcaaatggttgtgcatattttccttttgaagacctttgtgataaacctttaggtgcagcagattactttggactctttaaaaaatttcacaccctggcacttgatggtattccaaagcttgggtctagtaacagaacagcagcttatcggttcgtcacactgattgatgttatgtacgagaacaaggcaaggctgttatgtacagccgaggctggaccagtaggactgttcgagaatatcgtgactgttgctgaagcacggaaggtttcaccaagatcttcacgctcacagaaaagcgacgacactgacctatgcgtggacaatgagcttggatttgccaaggatcgtacgattagcaggttgacagagatcaacagcagagaatatttggaggacttcgaaatgagattgaggcaacagcagcagctgcccttgcaaggtctagataaaaggtggtgatgctgtactaaacataagaagcagaaggcttctgcgcctcatcttgaaattcttgtattcacacccacctggcttacataggcaactgagaagctatgcttttccaacagtggtgcatgtaaatgtccaataaagctatgtaagggcatttttgctaacaggtgagtgatctataaaatggcccaacctgggggaggggggataccatatcgttttttttagtgtatcacatatttccaaacctttagagaggcctcctaaggctcaaaaacagcatgagttacactgcataaagccatatataggctgaaagctttcgctgaactttgtgaattgagggaaaaaaagtctaacaattgttcatgtt

SEQ ID NO: 106728 - DNA, 2526 bp, Zea Mays
gcgcagtagcagtgtagcacccccacaattccagctcacgctgcactcctccatcccagtcgacctgttcccaacttcccatcccctcggcaccggcccgactaccggagcctcttgccgcatttttcagactgtcctgtttcgtgacgtcccaggattctaggagaagagaacaccctcgcccccctggggcatagtcgctgccgagccagtggtactggccgcgacggagcggtcagaagctgcggcggccggcgcggtttcggtttcggtttcctggctggcccgaggagtttgactcctctcctgatttgtggaaaagtggttctagtacagagttgtcttgaggccccgtcgctgtctgtctcctcacgcttgactgctcgccggcggcgccactgtcggtggcagctactaatcgccgcgtccggtggccgcgttgcagcgccggggcgtctcttgttctgctgcagcggattgtcgcggactggacgcggtgaggcggacatccctgtgcggaaggcgtgctcgggcagggccagcccaaccgccgttcgtgcgctagagttcctcgctcaggctcataacttctttatggtgtttggtgtgcctagaaagtggagaaataagatacacagtggaagatgagatcagttgttcggtcacttcgccagcttcgccgtttcactcagcaccatgcagaggggcactcacaagcaaccagattgttcgggcagcagaacgctttaatcatgtgcggttcgacatctggttcactgagcacgttacgttgtaatggtgaaattagcagatttgcaagccctggcgtcgagttgatgaggtccatgttctctactgtagtgactgatccgatcaaagatattggaagaggtggtccaatggtggaatatgagaggagaatagcatcaggagagctagtagacggtgatagctttcaggttgatacaattcaacaattacaaaggctctatgaggagttgattgagaatgaagaagactgtcagctggatagatataaatcatctgagaaatcaggccggagtcgatggctatggtcccgcctcattactcagccttctacgtatgctcctattaagggcctttacctctatggtggtgttggtacagggaagacaatgcttatggacttgttctatgaacagctgccatttaattggagaaaaaaacgtattcactttcatgatttcatgctgaatgtacatagtcgtcttcagatgcacaaaggtgtttcagatccccttgatgttgtagcagctgagatttcagatgaggccatcatattatgtcttgatgagtttatggtaactgatgttgctgatgctatgattctgaaccgtctgttcagacaattgttcagcaaaggcgttattcttgtttcgacttctaaccgtgctccagataagctttatgaaggtggcttacaacgggaccttttcttgccatttattgacaccttgaaagaaagatgcatcgtgcatgccattggatctgcggtggactatcgtcaactgggttctgctgaacaaggtttctattttgtcggaaaacattacagtacgcttctgaaacagaagctccagtctttaattggagatgagaaacccagcccacaaactgttgaagtaattatgggaaggaaattacaggttcccctaggagcaaatggttgtgcatattttccttttgaagacctttgtgataaacctttaggtgcagcagattactttggactctttaaaaaatttcacaccctggcacttgatggtattccaaagcttgggtctagtaacagaacagcagcttatcggttcgtcacactgattgatgttatgtacgagaacaaggcaaggctgttatgtacagccgaggctggaccagtaggactgttcgagaatatcgtgactgttgctgaagcacggaaggtttcaccaagatcttcacgctcacagaaaagcgacgacactgacctatgcgtggacaatgagcttggatttgccaaggatcgtacgattagcaggttgacagagatcaacagcagagaatatttggaggacttcgaaatgagattgaggcaacagcagcagctgcccttgcaaggtctagataaaaggtggtgatgctgtactaaacataagaagcagaaggcttctgcgcctcatcttgaaattcttgtattcacacccacctggcttacataggcaactgagaagctatgcttttccaacagtggtgcatgtaaatgtccaataaagctatgtaagggcatttttgctaacaggtgagtgatctataaaatggcccaacctgggggaggggggataccatatcgttttttttagtgtatcacatatttccaaacctttagagaggcctcctaaggctcaaaaacagcatgagttacactgcataaagccatatataggctgaaagctttcgctgaactttgtgaattgagggaaaaaaagtctaacaattgttcatgtt

SEQ ID NO: 106729 - DNA, 1331 bp, Zea Mays
cctcacggggccaccaatggatttctttggaacccacggaggcacggacccacctccctgccccaccatgccaccccctggtcccactcgtctgacacgacccctacctccccttcccaactcccaagctcgtgtaattgctgcggcgacagtgcccaaataaaatcccctaaacctagcgccgccgccgccatgcttcgccgtctcgccgccgtcgcccagcggaccttctcctcctcttccccgcacgccccgccgctggctgcgtcgggctacaccccgcgccgcgagtacggcctggtgcccatggtgatcgagcatacctcccgcggggagcgcgcctacgacatcttctcgcgcttgctcaaggagcgcatcgtatgcatccatggccccatcactgacgatacggcgtccctcgtcgtcgcccagctgctcttccttgaatccgagaaccccgccaagcccgtccacctctacatcaactccccggggggcgtcgtcactgcgggcctcgccatctacgataccatgcagtacatccgctcccccgtcaccacgctctgcatcggtcaggccgcctccatggcgtcgctactcctcgccgctggggcgagcggggagaggcgggcgctgccgaacgcgcgggtcatgatccaccagccctccggtggcgcgtcggggcaggcgtcagacatcgccatccacgccaaggagatccttaaggtgcgggaccggctcaacaaaatctatgccaagcacacgggccaggccatcgaccgcatcgagcagtgtatggagagggacatgttcatggacccggaggaggcacatgattgggggcttatcgacgaggtcatcgagcaccgccctgtctctcttgtgtctgatgctgttggcagtgattcgcaaaacctcggtggaggcggagctggggtgaataaaggagcggatgagccatcctcagcgtgatggcattggacagtcgcaaggtgcaatcgttgtcatgctcctgtagctgtcttatttggatttgaggtttaattcgtacatgaggtgaataacttaattttctggttgctgggctaatccactagcaacgctgttgttttgatactttaattgatctgttgctgataacgaatgctatctggtatgagccctcaacagcgttgttaaagatttgttgtctggaatcaatgagtcctgtttaacccacagccttgcaaaattatgtttatttcatcccggggctaattcagagtgccatttctgtattacacaaaattcgaatttctaattatcattgcaggttacctgatcttttcagc

SEQ ID NO: 106730 - DNA, 2645 bp, Zea Mays
cgaacgagtcgcgcacggcgcaccgcaccgactgacgacaccacaccatggctccagcagcaggcaccgccaccggcagcgcttccggcggctcagccgtacacgacgatgccgaggccgtggaactaggccacaacaacctgatccgccggcgccaccccggcgccgacgtcgaagacgaagccgacgacaggaacgtcggcgccagtgccgccgccggtaaggagctggccccgtcgtcggtggagcaggccttcgcggatcagcccgtgccgtcgtggcgggagcagctgacggtgcgcgccttcgtggtgggggccctcctctccgtcgtgttcaacgtcatcctcatgaagatcgacctgaccacgggcatcaacccgtcgctcaacgtctgcgccagcctcctcagctacttcctcctccgcacctggaccagggccatcgggtgcatgggcttgctcaggcagcccttcacgcgccaggagaacaccatgatccagacctgcgtcgtctccgcctacggcatcaccttcactggtggatttagcagttatctgtttggtatgagtgcaaaaattgctaacaaaacagaggtgaacgatcctcaggatatcaaggatccccatcttggatggatgatggggtttatgtttctcgtcagctttcttggtcttttcgctctggtgcctctgagaaaggttatgatcgtggattacaaactgacttatccaagtggcgctgcgactgcttacctcatcaatggattccatgcacctgagggttctgaacgtgcaaagaaacaggttaggacgttaggcaagtacttctcccttagtttcctttgggcgttcttccagtggttctacaccgccgggaatcactgcggatttggttctttcccaacgctcggccttgaagcctataaaaataggttcttttttgatttctcacctacttatattggagttggaatgatctgcccctatattgtaaatgtgtctcttcttcttggaggcatcatgtcctggggaataatgtggccattgatcagcacaaagaaaggaagttggtaccccgagactcttccggatagcagcctgcatggactgcacggctacagagtgtttctaaccatatcagtaattcttggggatggcctgtacaacatcttgaaggtactttatagcacaatcgaagccttcgtatcaaggtacaggaatagaaaagcaaacacgcttcctgtgtcgaacgatggcacccctgctgatgccaccactgaaaccgagtctttcgacgacaagcgtcgtcttgagctattcacgaaggatcagattcccaagacagttgcgttgggaggctatgtcgttctggcagctataacaatcggttgtctccctctcataatcccacagctcaaatggtaccatattttggttgcgtacatcgtttcacctgcactggccttctgcaatgcctatggatgtggcctaacaaactggtccttcgcaagtgcctatggtaaacttgcgatctttagcttcggtgcgtgggcaggtgcttcacatagtggtgtgattgtggcactggctgcgtgtggtgtgatgatgagcattgtgggaacagctgctgatctaatgcaagacttcaagactgggtacctgacactggcctcaccaaggtccatgttcataagccaagtgataggcactgccatgggctgtgttattgccccctgcgtcttctggctgttttacaagtcgttcgatgttggagccaccaatggcgcttacccagcaccttacacatttatgtaccgtaacatggcgatcatgggcgtcgatggattgtcccttccaaagcattgcctgacattatcctacatcttctttgcggccgccttcgctgtcaatatggtcaaggacctggtgccgaagaaggtggcgaagttcatccccatccccatggcagtagccattcctttctatgttggagcatacttcaccattgacatgttcttgggctgcacaatactcttcatttgggagatgagaaataaagctgaagcagactcgttcggaccggccgttgcatcaggctgcatgtgtggtgatggtctctgggcactacccgaggctattctttctcttgcaaatgtgaaacctcccatttgcatgaagtttctgtcaaggtctgttaatgccagagtggactccttccttgggaattagtgagtgccagtctgatagtagaacataatttttctttctttcatagctcagtggttgaataattctataaatttgtgaaatctcattaggcagtgatcataactttttagtaatgactagtgaagaacaattagcgaagttgcctaattttagttagtgctgcaaattgtccggttgttatatctgtccgtccccacccaggcatcgggtcgtgacacatgcacccatacccatagcagcgagctttgagtatgttggaccaacactctccaaaaaactagtcccttagaggttgcatcacaaccatataaatcatgcttgtccactgacaacatacaatgtgtgactattcccaacaaatatctctagtgaatcaaaaaggcaaaactgtaaatatgcttagtgttagtattg

SEQ ID NO: 106731 - DNA, 1869 bp, Zea Mays
cgcaccgactgacgacaccacaccatggctccagcagcaggcaccgccaccggcagcgcttccggcggctcagccgtacacgacgatgccgaggccgtggaactaggccacaacaacctgatccgccggcgccaccccggcgccgacgtcgaagacgaagccgacgacaggaacgtcggcgccagtgccgccgccggtaaggagctggccccgtcgtcggtggagcaggccttcgcggatcagcccgtgccgtcgtggcgggagcagctgacggtgcgcgccttcgtggtgggggccctcctctccgtcgtgttcaacgtcatcctcatgaagatcgacctgaccacgggcatcaacccgtcgctcaacgtctgcgccagcctcctcagctacttcctcctccgcacctggaccagggccatcgggtgcatgggcttgctcaggcagcccttcacgcgccaggagaacaccatgatccagacctgcgtcgtctccgcctacggcatcaccttcactggtggatttagcagttatctgtttggtatgagtgcaaaaattgctaacaaaacagaggtgaacgatcctcaggatatcaaggatccccatcttggatggatgatggggtttatgtttctcgtcagctttcttggtcttttcgctctggtgcctctgagaaaggttatgatcgtggattacaaactgacttatccaagtggcgctgcgactgcttacctcatcaatggattccatgcacctgagggttctgaacgtgcaaagaaacaggttaggacgttaggcaagtacttctcccttagtttcctttgggcgttcttccagtggttctacaccgccgggaatcactgcggatttggttctttcccaacgctcggccttgaagcctataaaaataggttcttttttgatttctcacctacttatattggagttggaatgatctgcccctatattgtaaatgtgtctcttcttcttggaggcatcatgtcctggggaataatgtggccattgatcagcacaaagaaaggaagttggtaccccgagactcttccggatagcagcctgcatggactgcacggctacagagtgtttctaaccatatcagtaattcttggggatggcctgtacaacatcttgaaggtactttatagcacaatcgaagccttcgtatcaaggtacaggaatagaaaagcaaacacgcttcctgtgtcgaacgatggcacccctgctgatgccaccactgaaaccgagtctttcgacgacaagcgtcgtcttgagctattcacgaaggatcagattcccaagacagttgcgttgggaggctatgtcgttctggcagctataacaatcggttgtctccctctcataatcccacagctcaaatggtaccatattttggttgcgtacatcgtttcacctgcactggccttctgcaatgcctatggatgtggcctaacaaactggtccttcgcaagtgcctatggtaaacttgcgatctttagcttcggtgcgtgggcaggtgcttcacatagtggtgtgattgtggcactggctgcgtgtggtgtgatgatgagcattgtgggaacagctgctgatctaatgcaagacttcaagactgggtacctgacactggcctcaccaaggtccatgttcataagccaagtgataggcactgccatgggctgtgttattgccccctgcgtcttctggctgttttacaagtcgttcgatgttggagccaccaatggcgcttacccagcaccttacacatttatgtaccgtaacatggcgatcatgggcgtcgatggattgtcccttccaaagcattgcctgacattatcctacatcttcttt

SEQ ID NO: 106732 - DNA, 555 bp, Zea Mays
agcacaaagaaaggaagttggtacccgaaatccctttctgatagcagtctacaactctacatggacttaatggtgtttataaccatagccgtaattcttggggacggcctgaacaacttcttgaaagtatttatgcacattcgtaggtatcaatgtattggaagaaacatgccaacacacttgctgtgtcggacaatgggacaccacctccggccccaactgaaactgggtcatttgatgacaagcgtcgcattgagctattcgttaaggaccagattcccgaggcagttgcattgggtggctatgttttgttctggcagctatatcgatcggctgtctccctctcattatccctcagatcaagtggtaccacatctttgcacctgtactagccttctgcaatgcctatggatgcggcctaacagattggtccctcgccagcacctatggcaagcttgcaatcttttgtgattggtgcatgggccggggcttcacatggcggagtgctctgtgctcgtagggttagctgcatgcggtgtcatgatgagcattgta

SEQ ID NO: 106733 - DNA, 134 bp, Zea Mays
gaatgatctagcaggcatgtgggttcttgttgctaagttgaaaagaggggctttagacatatctaatttgaatgttgatgatcgaactaaagtgtaagggcgtagcgatcaccacattgttgtctcataattgg

SEQ ID NO: 106734 - DNA, 637 bp, Zea Mays
atcagccgctccttcctctggagaggaaaggctgaatcaaatggaggtcattgtctcatggcttggccactagtcagcaagcccaaaaccctaggcggtctgggtatcctcaacctcgacaaattcagctgcgccctccggctaagatggctttggaagagctggacggcagaggatcacccttggaaagggtttgatgtgccttgtaaccttgcggacaggctcctctttagcgcctccaccatcgtcaccgttggagatggcaagacaaccaaattctggcacgacagttggcttgatggcatggcgccaagaaacctagcaccacacctctttgagctagtctcaagaaagaacaagtcagttgccattgagatcaatgacgggaattggattaggtcgttgcgaggcaagattacctccacggtacagatcgaggaattcgtctccctcttgtttagactccatgatttccacctccaaccacaggtgccggactccattacctggaaatggaacccccgacgatgtcttcactgtaaaatcagtctacaatgcacaattcatcagatcgtacaaccacattaattctgattttgtttggcgggcacgggcagagcaaaagtgcaagattttt

SEQ ID NO: 106735 - DNA, 424 bp, Zea Mays
taggcttagttttagttaacatattagtggtgaattatctaggcatacatccagtccacaccctcaacctaccgagttaggcttagttttagttaaacagcgtctcggtttcttgtgcctactgatggattttcttaaaattatatcaacgacatcttaggttttggaaggtggtgcatttgtcatgactcttagagatcatagtattccttctaatggggatatcaatgaaagtaaagtttcttatttgttattattttattattgttggtgcagcctgaaaatgaaaagccaattactgaaagcggagatgaaatctcttatgaaggagcaaaggcaaaaagtccaatatatttattatcgggactacgaaggagatcaacagcccatgctaagtttggaccaagtcatcacgagagaaagg

SEQ ID NO: 106736 - DNA, 133 bp, Zea Mays
tttaattaccgaaccgatttcatatctatgtttctaatatttttacgaacgaaactagaccacacatgttatgtatattttaaataaaaaaatttacgtggttaagattagtatataattagcgtttattaac

SEQ ID NO: 106737 - DNA, 117 bp, Zea Mays
aagcattgggggtacccctaattacggtccccgacgcatagatatcgtcggtaacgaattttttgtcggataccgtgtaagacagcattccacgcatattccatgtgtttggttgcc

SEQ ID NO: 106738 - DNA, 1621 bp, Zea Mays
actccatacgttacacagctcatgtgacacgaggccaagaaaaccagtcaaacttccgcgcactgccgtctgtccactatggccttcgccgcctccccttccctctccgcactcgcttcctcctcgtcgtcaaccgccgccgcccccacgccttcttccaaccctttgcacgagccgaggcctctccacctctcgctcaagcccgtcttacccctccccaaaccgcatgcgctctcctgctccgcgccgcacatcccccgcgccgccgctggggacggatcgggcgtcgggaatggaggcaaggatggaggcggcggcgggggtggcgaggatgaagacgactgtgacgatgcggacttcggtccgctgctcggcttcaacgaggtgctgcacctcgccgcggcgcgcggcgttgcgctcccgggcgacatgctggaggcggccaaggacgccggcatccgggaagtcctcttgctccgctacttcgatctgcaggccgcgccgtggccactaggcgtgttgatccgcgccttctcgatgctccgcaaccggatgctcgccgacccgtcgttcctcttcaaagttagcaccgagattgtgatcgactcttgctgcgcgacatttgcagaggtgcagaagaggggaaaggatttttgggcagagtttgaactgtacgctgctgatcttcttgtcggtgtagcagttgatattgcacttgtggggctgctggctccatatgtgagaattgggaagccatctgcttcaacgggtctctttggaagattcagcaggatggctggatctttgccaagcagtgtttttgaagctgaaagaccaggctgcagatttacagcccagcaaagaatcggaacatacttttacaaggtaatgaaccttacgtggcaaagatactctcaactttgagccatgtatgattgttagttcaaactacaggagcattgccatgttgtgtgtacaaattatactggcataactgtttgaactgcagggtgtcttgtatggttcagttggatttgtctgtggcataattggtcaaggaattgctaatatgataatgactgccaaaaggagtgtcaaaaaatcagatgaagatattcctgttccaccacttgttaaaagtgcagctctatggggtgtgttcctcgctgtatcatctaacacacgctaccagatcatcaatggcctggagcgggtagtggaggcatcgcctgtcgcaagacgtgttccccctgttgctatggcttttacggttggggttcgttttgccaacaatatctacggtggaatgcagttcgtggattgggctcggtggagcggcgttcagtaatgggctcttggttgcagttaccaaaacatcaatacattgtacgttcaaatcttagttgcagtaatcgttcaggtggatccgtgttgttttctcgttacatttcctggtaagtagcggaggctggggcagagctctatgaagttttaactcatttactatgagaaacaaggaagtacttcgcatcatatggcatttatattgctgctcctaattgatcatgtgcacttttgccatactgaatgaatagaagcgttctgactcctgcattgcccc

SEQ ID NO: 106739 - DNA, 1508 bp, Zea Mays
cttaaaccaacactccatacgttacacagctcatgtgacacgaggccaagaaaaccagtcaaacttccgcgcactgccgtctgtccactatggccttcgccgcctccccttccctctccgcactcgcttcctcctcgtcgtcaaccgccgccgcccccacgccttcttccaaccctttgcacgagccgaggcctctccacctctcgctcaagcccgtcttacccctccccaaaccgcatgcgctctcctgctccgcgccgcacatcccccgcgccgccgctggggacggatcgggcgtcgggaatggaggcaaggatggaggcggcggcgggggtggcgaggatgaagacgactgtgacgatgcggacttcggtccgctgctcggcttcaacgaggtgctgcacctcgccgcggcgcgcggcgttgcgctcccgggcgacatgctggaggcggccaaggacgccggcatccgggaagtcctcttgctccgctacttcgatctgcaggccgcgccgtggccactaggcgtgttgatccgcgccttctcgatgctccgcaaccggatgctcgccgacccgtcgttcctcttcaaagttagcaccgagattgtgatcgactcttgctgcgcgacatttgcagaggtgcagaagaggggaaaggatttttgggcagagtttgaactgtacgctgctgatcttcttgtcggtgtagcagttgatattgcacttgtggggctgctggctccatatgtgagaattgggaagccatctgcttcaacgggtctctttggaagattcagcaggatggctggatctttgccaagcagtgtttttgaagctgaaagaccaggctgcagatttacagcccagcaaagaatcggaacatacttttacaagggtgtcttgtatggttcagttggatttgtctgtggcataattggtcaaggaattgctaatatgataatgactgccaaaaggagtgtcaaaaaatcagatgaagatattcctgttccaccacttgttaaaagtgcagctctatggggtgtgttcctcgctgtatcatctaacacacgctaccagatcatcaatggcctggagcgggtagtggaggcatcgcctgtcgcaagacgtgttccccctgttgctatggcttttacggttggggttcgttttgccaacaatatctacggtggaatgcagttcgtggattgggctcggtggagcggcgttcagtaatgggctcttggttgcagttaccaaaacatcaatacattgtacgttcaaatcttagttgcagtaatcgttcaggtggatccgtgttgttttctcgttacatttcctggtaagtagcggaggctggggcagagctctatgaagttttaactcatttactatgagaaacaaggaagtacttcgcatcatatggcatttatattgctgctcctaattgatcatgtgcacttttgccatactgaatgaatagaagcgttctgactcctgcattgcccc

SEQ ID NO: 106740 - DNA, 797 bp, Zea Mays
gatccatttcgaggactcgtactaggttcggcgttcgtagctcgtgtcgtttctgaagctagatagctagcgacaggcgatggcgagccgcaagtgtctcggaggcgagggaagcgcgccggcgccgcacgtcctcgcggtggacgacagctcggtcgaccgcgccgtcatcgcaggcatcctcaggagctcacagttccgcgtgacggccgtggacagcgggaagagggcactggagctgctgggcaccgagcccaacgtgagcatgatcattaccgactactggatgcccgagatgactggatacgagctcctcaagaagatcaaggctgaaggagatccccgtggtgatcatgtcctcagagaacgtgccgacaaggatcaacaggtgcctggaggaaggcgccgaggatttcctgctgaagcccgtccgcccgtccgacgtgtcgcgcctgtgcagccgcgtcctgcggtgagcacggcggcaagtagtagcacagcatgctggcgcgcatgctcgtggtagttcttttggggatgcatggtggtagctgtagcagcggcattccgaagctctgtgtcttctcatcgagcatggggctcgtatacgttggatggatatggaggagtccttgtcgtgctaggctgctatagtgtgctcgcggaaccgtacaagtggtcatgctctgttagcctttccctgtatgcatgttcagttaaatgtgttcagtaaaaaggatgttgcctttctgcctagctgcatgtacgccgagttgccttcaatttgaacttcattt

SEQ ID NO: 106741 - DNA, 844 bp, Zea Mays
cctccatttactgatcaccaatgggcgttatgcatccgtcattccctaatttacataacaatgtgcgtcatcttccaacttggcgaattgtccgtttagctaacatttgtagcatgcttttggattgggtttctgctggttgtctgtagcatatggtccgtggacacttatcttttggtacatttaaaagagacattatcattcaaaaacacaacaaagaccttaaacgtatttgttccatatgtccagtttatatgccactgcaatatccattgctatttacttttggtgagcgtggatttcaatttggtgttccatatgttgaaatggaggttctgggagtgagaagatgaggatcaactgctgcagcatctggcgcaacaaggcactgaggaggatgtgtttcagtgaaaggggtgctgtgagcagcacccagtgtgtgctcacatcagatgctggcccagacactcttgtcgtccgaacatcctttcggagtaattatgctgatcctaacgaagtcactgctatcattttgggtggtgctggggaagacgaccggggaaggaaaagccagcaagagggacacaaagagcaccagcagcacaagttgaccctcccaactgtttcgaattataccattcacgatgccactgacggcaccgacaatgacaaacaggaagatcagtatgctttttttatacttattacacataacggtgctggtacttgttcatggcgtttttgtcgtcctgctgatgttgcatatggcaacacagatacagaatttaatctcactccggatgttgaccagagaaatggtcgagacagtaatttcttagattaa

SEQ ID NO: 106742 - DNA, 1286 bp, Zea Mays
gaaagaaagaaagaaagaaagaaaagatacgggtgatcggtggcctttgttcctttgccggttgtttatgtgttgtttgtcccgtcggttgcaggcacaggggaggtggtgacatgctcgcccacccagagcccggagcttttcttcgccgtacttggtgggcttggccagttcggtatcataacccgcgcaaggattccgctgcaagttgctccgcccaaggtgagatgggtgagggccttctacgacagcttcgagacgttcaccaaggaccaggagctgctggtctcaatgccagagctggtggactacgtggaggggttcatggtcctgaacgagcagtccctccgcagctcctccgtggccttccccgcccaggtcaacttcagaccggacttcggctccgacgacggcaccaacaagaaggtctgctactactactgcatcgagttcgcggtgcatgacttccaacggcaggactccgctgctgaccatgttgtggacctggtgtcggggaagctgagctatctgaggccccacgcgtacagcgtggaggtggcctactgggatttcctcaacagggtgcggatggaggaggagagcctcaggaggcggggcctctgggacgtgccgcacccctggctcaacctcttcgtgcccaggcatggcgtcgcgcggttcatggacctgctcatggccaccatcgcgcagggggacttcgaggggcccgtcctcgtctaccccctcctcactcacaggtgggacggcaacatgtcggcggtggttccggcggcgccagacggtgtgatgtacgtcttcagcgtgctacggtcgacggacccggcgcggtgcggccgcgcctgcatggagaggatcctggagcagcaccgccgtgtcgccgacgaggcctgccggcgcctcggcgccaagcagtacctggccaggcagccgtcgctggcgcactggcgcgaccacttcggggccagctgggaccgcttcgtggccaggaaggcccgcttcgaccccatgaacgtgctcgggccgggccagggaattttcccctggacggactcctcctcgagcccgatgtgacggcggctgtcgtgggctttggtccacccacgtacggaggaagtagctaggctgatgaggagctgaagccgatgatgctagttttgatgagattgtttattattgttcatgtggaattcctatttaggttcctaggtactagtactatgttggcaagtggctcaaggtaaaatgttcattcttttttttcccta

SEQ ID NO: 106743 - DNA, 1974 bp, Zea Mays
ccttgctgttccatccgtccacagttcttgtgggaacccaagatcgatcttgacggggacgtgagcacggcacgtcgcgaccttattcttccgtcttggccccgtgcaccggcaagcggcaaccaaatgcgcatgcccctgtgaaagctaatagtagctacatcacacagcaagacactatagccagctagccatggagggcaaggtgctgtgcacgtacgccgggatcgtggccctactgctctgctcgtcggtgaatttcatacagagcccctccgacgtgttcggccccgtggcgctgctggagccgacagcatccgcggcacgcgacttcggcggcgtggtctcggaggcggccatcgcggtcatgcagcccgggtcccccgccgacatcgcgcggctcctgggcgcgctgtcgtcgacggggccggggccggggccgaaggcggccgtggcggcgcgcggcgcggggcactcgctccacgggcaggcccaggcgcgcggcggcattgtggtggagacgcgcgccctgccgcgcctcgtggaggtggtgcgacgcggggacggggacggcggcggcgcggcgtacgcggacgtgggcggcggcgcgctgtgggtggaggtgctggaggagtgcctgagggccgggctggcgccgcggtcgtggacggactacctgtacctgaccgtgggcgggacgctgtcgaacggcggcatcagcgggcaggcgttcaagcacggcccgcagatcagcaacgtgctgcagctggaggtggtcacaggcacaggggaggtggtgacatgctcgcccacccagagcccggagcttttcttcgccgtacttggtgggcttggccagttcggtatcataacccgcgcaaggattccgctgcaagttgctccgcccaaggtgagatgggtgagggccttctacgacagcttcgagacgttcaccaaggaccaggagctgctggtctcaatgccagagctggtggactacgtggaggggttcatggtcctgaacgagcagtccctccgcagctcctccgtggccttccccgcccaggtcaacttcagaccggacttcggctccgacgacggcaccaacaagaaggtctgctactactactgcatcgagttcgcggtgcatgacttccaacggcaggactccgctgctgaccatgttgtggacctggtgtcggggaagctgagctatctgaggccccacgcgtacagcgtggaggtggcctactgggatttcctcaacagggtgcggatggaggaggagagcctcaggaggcggggcctctgggacgtgccgcacccctggctcaacctcttcgtgcccaggcatggcgtcgcgcggttcatggacctgctcatggccaccatcgcgcagggggacttcgaggggcccgtcctcgtctaccccctcctcactcacaggtgggacggcaacatgtcggcggtggttccggcggcgccagacggtgtgatgtacgtcttcagcgtgctacggtcgacggacccggcgcggtgcggccgcgcctgcatggagaggatcctggagcagcaccgccgtgtcgccgacgaggcctgccggcgcctcggcgccaagcagtacctggccaggcagccgtcgctggcgcactggcgcgaccacttcggggccagctgggaccgcttcgtggccaggaaggcccgcttcgaccccatgaacgtgctcgggccgggccagggaattttcccctggacggactcctcctcgagcccgatgtgacggcggctgtcgtgggctttggtccacccacgtacggaggaagtagctaggctgatgaggagctgaagccgatgatgctagttttgatgagattgtttattattgttcatgtggaattcctatttaggttcctaggtactagtactatgttggcaagtggctcaaggtaaaatgttcattcttttttttcccta

SEQ ID NO: 106744 - DNA, 1173 bp, Zea Mays
atgaacctgatccaagctgcagctatgcaaagagtatcccctagatctactactaacaagcgcaagaagagaacatcaccaaaagttggtcgtcttagagcaaactggaatagtggactagaaaagggtttagttgaaattcttcaagaccacaacaatgactgttataagggccaaaatgggtggtcatcggaagcatggaatagaattgtcaagttattccatgagaaattcccttatgtcacatttacaaaatgccaaatccaagataaagagaaagagttaaagagagactacaaggctcttaaagaggcaagacaacaaagtggggtatcatgggatgagcggttgtgtagaatagaggcagaagaacccatttggaataacctcaccattagtaacgagagacttaagaagtttcggactaaatctttcccactatttgaggctttaggagagctacatgatgggaatattgctgagggaaccatgaattttacttctattgagccttatcgacctccagtcacacaaccttgtcaaggtgctgctacacatccttctcaagctgcttttatgctcacacagccttctcaaccgtctttcacacaaccttctcaacccgctttcacacaaccttctcgaattgcttacacacaaccttctcaagccgctttcgcacagccttctcaagccgctttcgcacagccttctcaagccgctttcacacagccttctcaagccgctttcgcacatccttctcaagctacaatcacacaagccatttctaatgaagatgatgacctcagagtattagatccaatagcccctacatcagtgagcaaaagggcaaaaaatgttggtgctggtagttcaaggacaagaattgacaagcgtggacaagatgggaaggtggttgagatgatggaaaggtttctagagatgaaagaaaaacaagatgaggtggagaaaagggcgacaactaatgcaaatgaggatgatttccctattacaacatgcattgctattgtggatggaatggaagagctttctgatgatgagaaggttgatgcttatgatgtgtttaaggatgcccaaaacagggccattttcatgattgccaaagatgctacacgcataaaatggttgaggaagaagattgctagaacatga

SEQ ID NO: 106745 - DNA, 2089 bp, Zea Mays
tccatccatcgagaaggcgagaaccacagccggtgcacgagctccgcctccgcaatggcatcgcggctcgctgtacaggcgctgtccgcgagcctgttgtcgcttgcggaaactacgtcccccaaaccaccgaagcaacagtcgcagaggccaagggcagccagcagcagcagcagcagccggaggaggctagcagcgacggcgggggcgataatcctggcgtcccagctactgccgcccgtggcgagtagcgccgccggcacgttcgacctgcagctcatgctgccggagaagtccagcgaggaggccgaggccgtggtgcggatccacgcgcgcaacctgctgggggtgaagcgcttcatcgacgccggggcgtggcgggagctgcaggcggcgctgcgctccaatgcgtccaacctcaagcaggacctgtacgccatcatacaggcgaggcccacggggcagcgctctgagctccgcaggctctactccgacctcttcaacagcgtcaccagcctggattacgccgccagagacaaggacgcgctccaggtgcaggagcactacggcaacatcgtctccgctctcgacgagattttctccaagatcacgtaggatactcagaaatctatatttccagttcgtggatacaaaggcggagcacggataagagagaactaggaacttagatcacgttcacatgaaggaagaactagcagcaaatggcgacaggcaaaaaggatccttcttgctatgtagcgacattttttttcttctagagagaactatttagctagttcttgtgagcttcctccgctacatctatttaccctactgtctgaaggggaaaccagaaagaatcacagttttttacaggtgcagcaaggccacaaaaactgcagttcctaaaaccctcgctgtgtagccaccaacgtctaagggtagctgcagggcagctgaacggtttcatccacctctcctttcgctttcagatagagaaagcagggggtccttggtgaatggtgaccctattcaccgccacttggtgtgcaaaatgaagcagtagttctccatatggtccatccatctaccaataaactgaaacatgctggcagtggatctaccatcctcttggctcctccttcaaatcgttgcttccaagaacttgatcctgataataaggaacataaattgggcagtaagccaagaagaacacatgtgtgcaatttgaagtaaacaaaaaaaacatgaaaggacctgaaatctcaagataaaatgcagctgtctgtgcgaaaagagtgctaattagcgttacgtcacttcaaattcttaccattgtaatgccaggaagcacgaagctagcaagattttcatctattgccacagtaagtggaggcatcttggtcctcagcccaggcagttgggtcgtgctgtttacataagcattatcatcagtgagagaagcagctgtatcacaaaaccaaacccttacaagcataactctagtattcgtgcaaaacaaaccgccaacatgtttcattagatgatgcttacatttgtacaagatcattaatgttccttcttgcccgatggaagagatcgatgttgttatgaggctgcaagggagaataaagataactattaaataatgcctgtcatgtattattggagggaaaaaaaagtaattttccttatgcagtctaactgaaatggaaggggtcatgctgttctaaaagcaatatatgcttttctatcagacgtacatttctcataatgttgtataatggaaaggatgaataaaaaaactgtaaaacagagtaaaataagaaaagggggactatacaaacctgaaatctctgaatatttgtttcgatttgattaagaagcctattattttcctccagcagatgcagcactggacgatctatctctgaggctacataatacaaaaaacggcattgtcatatcatattacagacaaagcattggttaaatcttgccaaagtttaggacatgaatctgttatggtgcactactgaaaagtacaaggatctaaagtgcaatttatatgatgaacaaaatcaactga

SEQ ID NO: 106746 - DNA, 664 bp, Zea Mays
atgagccttcttgcacaccttatcagaactgcaaacaaacattacacgcatccaagggtctccttatgccaataccaggtaaacggatgtataatcagctgggcaggcgtcggtcgggtcgccgccgcctcatgccctggccccgtccccgccgatcgaggggatgattcaccgcgcgacgccggggatgttgacccaggtcaggcgcaggacgaggtcgccggtctcggtgtccctgagcctgagcaggatgtcctgggagaccttgccgtccttgcacgtgatgtggctgtcggtggcgaggcagctgcccttctccgtgtggatcgtcttcatcaccgtgccgtcggggacgtcgctcaggtcctgcttggcgatctccacgaagttgaggatggagaactcggcgttgcccatgctgtcgtccttggtgaacgtgtcatggtcgaagagttcctgtcggtccaagcaccagagaatgctcaaggttgctgcattaattctgcccatggaagatcatggcgatggggcttacaatcttgaccgggttcatcatgtttgtgatggacagggtgagttcctcgttccattccggattgatcgtgcggtattttatacttgacttgactttctgcgcagtattatttatacaaaaaacaaatgg

SEQ ID NO: 106747 - DNA, 792 bp, Zea Mays
cgatttttttttcttctctctcacttgccttcttccgtcgtgctctcattatcccataattaattacttgccacaggccttgatctccctcgcgtacacagagcgagcgatggtggagcacgagatggagcagaaggggtgtctctgccggatcaggctgcgctgtcgagctcttctcggcgatggaggaggacctggacacggacgacgagggctcgtgggaccttgttgggagggacatccggctaaaggccgccttcctgtgcattgacctcggccgtgtgatcgccttgtgcgggggcgaagagcgcaagaaggcgctcactgctcttgccaacaagctcttctactccatggatgagctgggcgacgcagtggagagcaggagcctccctctgacgcaggcgcgctacagcgacaccgctgacgcgctccgcgaggtcgtcgccgtcctcgcgctgtccctggacctggagttcggcccggatgatcccgtgtgccgtgtgcgagatcaccttcacgcggcttcacatgctgtgtggccgtgtgggtgtggctgtgtatacattattggctcatatttgggttggcgtcttcccccgtttgcgttgccgatgctccgctgctctctgattctgtaaccctctatgcgaaatgctgctgcatgcagtgctccccagacatcctgatttgatggccgcgcgttaggctagcgccgccctgataattttgacgcatgggtggatgcagtttaatagcattaaaataatttattttgtatctactcataaa

SEQ ID NO: 106748 - DNA, 1613 bp, Zea Mays
agcgtccgtttcctcgaggctcgaccagtcgagcttgagaaaaatcaaagctcccacctacctcgagacccaggacgcgtggagagcggtgccaaaccaccatggcgatcctgctcctcttgctcttcgttttgtcctcagcttcagctgatgagtacggggaagagctgctgcagcgcgcgtggggggagcgggattggatggtgagcgtgcggcggcgcatccacgcgcatccggagctcgcgttccgggagcaccgcaccgcagccctcgtccgcgaggagctcgagcacctcggccttcccgcccgcgccgtcgccggaacgggcgtcgtcgctgatgtaggttccggggcgccccccttcgtggcgctccgcgccgacatggacgcgctcccgctccaggaattagtggagtgggagcataagagcaaggtggacggagtgatgcacgcctgcgggcacgatgtccacacagcgatgcttctgggagcagcaaagttactcagccagcgtaaggatcagctcaagggaacagtgagactcctttttcaacctgccgaggaaagtggtgcaggtgcatctcatatgataagagaaggggttctggacggtgttgaagccatatttgcaatgcatgttgattatcgtataccaactggtgtaatagcagctcacccaggacctacacaagcggctgtatgtttcttcgaagcaaaaattgaaggtaaaagtgggatggctgaaaccccacacttaaatgtggatcctgttgtcgtcacatcattggccatcctgtccctgcagcagcttatttctagagaagatgatcctcttcacagccaagtggtctcggttacctatgtgaaagctggaaaagcccttgatgctacccctaaccttgttgaatttggaggtactttgaggagcctcaccactgaaggcctttactgtctgcaaagaagggttaaagaggtggtagaagggcaggcggctgtgcataggtgcaagggagctgtcgaaataaaggttgaggactacccggtgtaccctgccgttgtgaacgacgagaagctgcatcgacatgtagaggatgtcggcagaggcttgcttggcccgggcaaggtgagaccaggggaaaagatcatggccggcgaagacttcgctttctaccagcagcttgttcccggcgttatgtttggcatcggcattagaaacgaggaagctggttctgttcactcggctcacaacccctatttcttcgtcgatgaggacgtcattcctgttggggctgctttgcatgctgccattgcagaactgtacttcactgacggccccctctttcgacaaagaagactagtggtttctcgttcgtgcgtattttgtctggatcagtccgaacagatggcttcagctggccaatcagatctgaacatctggtccaccatgctgatcagccgcgctccgcggccagtatcaacctccaactatttttccctctgtaaccagaaacactacacatgtttctcaaccctacagtggtctagctattttattctctctttaaacagaaacactgcaaggttcctaaccttatagtgggatttagagcaa

SEQ ID NO: 106749 - DNA, 583 bp, Zea Mays
ctctctcaggcttccgctctgtacgaaggaggggacttgcagtcgcgttgacgatcttgagttgaaaagatggttgaaatgtggtagaagggcaggcggctgtgcataggtgcaagggagctgtcgaaataaaggttgaggactacccggtgtaccctgccgttgtgaacgacgagaagctgcatcgacatgtagaggatgtcggcagaggcttgcttggcccgggcaaggtgagaccaggggaaaagatcatggccggcgaagacttcgctttctaccagcagcttgttcccggcgttatgtttggcatcggcattagaaacgaggaagctggttctgttcactcggctcacaacccctatttcttcgtcgatgaggacgtcattcctgttggggctgctttgcatgctgccattgcagaactgtacttcactgacggccccctctttcgacaaagaagactagtggtttctcgttcgtgcggttggtctcgggttcagtaaatataaatatagtttgacatgtacaaatgcatttaaaagctcttttttacaaaattgtcaggttgttgatttggctttaa

SEQ ID NO: 106750 - DNA, 1477 bp, Zea Mays
agcgtccgtttcctcgaggctcgaccagtcgagcttgagaaaaatcaaagctcccacctacctcgagacccaggacgcgtggagagcggtgccaaaccaccatggcgatcctgctcctcttgctcttcgttttgtcctcagcttcagctgatgagtacggggaagagctgctgcagcgcgcgtggggggagcgggattggatggtgagcgtgcggcggcgcatccacgcgcatccggagctcgcgttccgggagcaccgcaccgcagccctcgtccgcgaggagctcgagcacctcggccttcccgcccgcgccgtcgccggaacgggcgtcgtcgctgatgtaggttccggggcgccccccttcgtggcgctccgcgccgacatggacgcgctcccgctccaggaattagtggagtgggagcataagagcaaggtggacggagtgatgcacgcctgcgggcacgatgtccacacagcgatgcttctgggagcagcaaagttactcagccagcgtaaggatcagctcaagggaacagtgagactcctttttcaacctgccgaggaaagtggtgcaggtgcatctcatatgataagagaaggggttctggacggtgttgaagccatatttgcaatgcatgttgattatcgtataccaactggtgtaatagcagctcacccaggacctacacaagcggctgtatgtttcttcgaagcaaaaattgaaggtaaaagtgggatggctgaaaccccacacttaaatgtggatcctgttgtcgtcacatcattggccatcctgtccctgcagcagcttatttctagagaagatgatcctcttcacagccaagtggtctcggttacctatgtgaaagctggaaaagcccttgatgctacccctaaccttgttgaatttggaggtactttgaggagcctcaccactgaaggcctttactgtctgcaaagaagggttaaagaggtggtagaagggcaggcggctgtgcataggtgcaagggagctgtcgaaataaaggttgaggactacccggtgtaccctgccgttgtgaacgacgagaagctgcatcgacatgtagaggatgtcggcagaggcttgcttggcccgggcaaggtgagaccaggggaaaagatcatggccggcgaagacttcgctttctaccagcagcttgttcccggcgttatgtttggcatcggcattagaaacgaggaagctggttctgttcactcggctcacaacccctatttcttcgtcgatgaggacgtcattcctgttggggctgctttgcatgctgccattgcagaactgtacttcactgacggccccctctttcgacaaagaagactagtggtttctcgttcgtgcggttggtctcgggttcagtaaatataaatatagtttgacatgtacaaatgcatttaaaagctcttttttacaaaattgtcaggttgttgatttggctttaa

SEQ ID NO: 106751 - DNA, 2988 bp, Zea Mays
atggacgccttcttcagcggtctcgactcccggctgcgggaggcagtgaaggtggcggactccatcatggtggggctggtgaacgccgccatggaggacgcctacaagaagagcctctggaaggacggcgacctggagcgcctcttccagaagctccgcttcgccgagctcgctatcatgcagctcgagtggtgcctccgcttcgtgcggggggagatggaggccgacggcggtgccgacgacggccacgagcagctgctagacgacctcctcgagacgcgggaccggatccaggcccgcctcgacgaggccgaactcgccgtcgcccagacggactgcgactacatgcgccggaagcgcgatgaactcgacccgtcgcgccgccgggagacgccgtccgcagttgatcaccgcggcgccgaggtggagggcggtacgttcgaggaactcagggggtccgtgggccggaagatgacgaggatgagggctaggctggaggacgcgagctccgagctggcggcgctcatgcaaaaggtcagcggcgaggcgtcgccgatggcgaggctgcaggagcccggccacgagggcgacggggtcaagggcctctcgggattctacagcatggcgcagctgcttatggagttccaggagatggtcctggacgccggcgtcctcagagacagcgtcgcatctgcgttcgatgcgatggagaggtcggtctctgctcagcgggcagccatggaggagcagcagtggctcatggatgcagagaaggagatgtacagtgccgtcgttgaaggttttctccgggagatcaacgtggaatcgacgaaacgcaatcagtctgagggagagggatgcccgacacctacattgcatcatagcagagatgctcctgataataatagctcggacgaattccagtatctgaacgatgaaactagccagctgcactcagcaaggcgtatcccggcagagaagtcagagagcagactgcgttatactaattcagaagaggattgtttctgtctctctcaagaggaagctgaaaggctaacagaaacaacgattgattcagaaattagatttgaactgcagcgtgttttgtactcagcagcattcagagacctattaagcaaactttcggttcaggcatatcatgcacagaggcttacagaacaaagagatgaaacggaaatcagaagtaatatacagtatgagatggatagtatcatattcaaagacttggtgaagaacctatgtgttgaatccgttgatcatcttatcaagacctggatccaagatgaggtgcatagagctcttcttgccaagattatgaatccttggaagatcactactgagatggttcacagcgagagacttatcaaggaagagattgaatgcattgtttttggaggtttgataaatgatttggtaaatggtcaaaatttaagtgtggtcaaatatcaacaccaaaatagacccagcgataatctgggaagattcggtatgattgacagcgccgagcagttagtgaatgggaagatacaagtcaatgtaactactgaagatgatggtgtaggctctgatcaacatagaatacttgtgaatcaagaagttttaggtctaattggtaactgtgacaggcaaaattcaaaaggaagtgataagcaagctgaagaatcaataggcagagatgatgttaaggaacgattggatgattgcaggaagctgcaaacagaagaggtagctacaggtttgtgcatgccttctgaaggagtgattcaagaaatctgcattccattgacaaacatatatgaaatatttggggactttgaggctattacctgtgaaaaaataggaacatctgtgctgagattgagagacctggacaaacaattgtcaaacctgattgaaaaagtgaactctcttaaaacaagtgagtttctgtaccggagcgctttcactaggagatgttgcgaccttcaaacagcagaagcagaggtggatcttcttggcgatgaagtggagctgcttcttggacttctcagtaagacatacggagctctggttcactactcaccagttcttcaacactatgtggggatcagggaggtgctgaacctgcttgggaaggagcttgctcatatgcctaacaagacagtgatgccaggcaaggactgcctgcgccagcccgtgcagcatggtgtccgtgttggcagtgactttgctgccgcattgcaagcgcagtttcggaggcagcggaggttggtcgggacttggatgcaggggccgacgccgactggctggagccctcgacggcgactcggcgaggcgccgctgtctcgagaagaagctctattggaacttggaagtggtgctgttctccatttcggatacttctggagtttccagcggttagccacgtggattcttgcacctgtcctgtcctctccactgccaccgtcgttcctcaggtccgttccaagggtagctatggaactcgatctgccgccgcaaccgaccccgccactcaccgacctggccgcctccatccaccgcgccgcagcggccgcggcagtgctctcagcccccgcgccctcctcccatgccgccgccgcggtggctgcccttcgcgacgcccacgctgccatcggttctttcctctcccgcctcaacgtatcgtacggtgatgatcatcaacccatggcggatagcggcgaggagttggtggaggatggggagggggcgcagatggtcggggaggcggaggagaggctccggaactgcggcctgcaggggagcaagcggcggaaacgtcctgtgccgccttcatggcccctagggcgccgctcgagcagcagttccgaagcggcggcggcagccgccgcgccgggtgccggtgctggacgtcgaggagcggcgacgcgcgaccatggatctcttgatgcaattccatgcgtgatgcgtaggaaggaacgtgagtga

SEQ ID NO: 106752 - DNA, 689 bp, Zea Mays
aacaaggcagaacgcacccttctctcagtctcagcgccgtctttcttcgttacctgcccccgctccccgaaggctcgaaccctttacagccggcgaagaagatgcacctgtggccatcgctccggatccgcgactcgttcaagcacggctacctccagaagctggagctcaacctcggcaacatgaagcgcgcgcagcggcagcgccagggccggcagggagagagccaggaggaccaggacggccagcccggcggcaacgggaaggcgccgctgctcgaggaccgctcgccatcggggtccgtgcttgccggcgcgctcgagctcgcctgggacgccgtcttgctcctcacctgctgctgctgttgcttctgctgcggagcttgtagcgacgaagaggatcacccaactgcccgctaaggagcaacttcaggtgcctgataattcatcagatcacgaaaaccagataacttgtgggcataatgaattgcagtcaaatagttcaaatagtttcggtcagctttgtacatatggttttctattcatccttatgccgcccatagatgtcattgataaacggaaaaaggatccttattttttttgttggaaacccgttgtgtaggtattttgggcgtgtaatcagttcgtatctgtattcaggataatctgtgcggttgctgtttctcaccg

SEQ ID NO: 106753 - DNA, 1378 bp, Zea Mays
caaagttcccaacgccgccgcgacggcgctgctagctagtctttggtgttgcaggtgttcgattcctgattccaaattccagactccaaactcggttcttcaatcgacagattccgatttacatcccaaagctcttcggattgaaatccagccgcgacccaagagataagagtatttgggattagtagatagggagggtagataggatagtagaatagaagaggagcactttcgctgatgattacggcggaggagaagagccccgaaagggaggaggaggaggaggaggcgaacccgcgcgcggaggcttttctggagatcatctgccgcgtcccggcgggggaggtggaggcggcgctgtccgcttgcggcatcggccccacggccgaggtcgaggaactggtgctcaagtcccgcgaatgctacaagcgccctaagtccgccgtccgcttcttccgctgggcggggcagtccgtgtcgcacaccgcctacgcatggaacctccttgtcgacatcctcggcaaggccgccatgttcgagcccatgtgggacgccatccgctccatgaagcaggagggcggcggcgggctcgtctccgtcgccaccttcgcctccgtcttcgcctcctactgcgccgctggcaacatcaaagatgcaatcgcggccttagacgtcatggaccgctacggcctcaagcacgacgccgtcgcgctcaactcgctgctctcggcgatttgccgcgtcgagggtcgcgcgcaggatgcgcaggacgtcttcgagcgtaccaaggcaaccatcccacccgacggcgacacgttcgcgatactgctcgaggcatgggagaaggaggggaacgcggtgcgcgccaagagcgtctttggcgagatggtcgtccgcatcggctgggacgcagccaacgtatccgcaaactttgcggctcacggggtagaagtttaacgcctggactgctgaattgcatgacaaccaagaatttggactagcctggatcctggaatgtaagtctggaagtctggaactgtactctgatcccacaagcagtggtcgggatgttagtgtagctcttgtagattccggaccccatttgttagctggttactcatcgagtgtaataagtggctagtttagtgagactgcacattatcgctgtttatttttcagatatattttatgaatatgaaattgggttatgtaagtatcagatattcctggctgtcagcagcgtcaggcgcctctgctgatcctttgaccatattgtttttcgtggaagaagctttttaacttctttttttttttaccgggaaggtttgagcggttggtgttttctcttgtcattcttttaatcaggtcacttgctcat

SEQ ID NO: 106754 - DNA, 193 bp, Zea Mays
atcataccaaaagaaggagaagatgactaacacggctgccccaagctgcaaagccctcctgctgcccattttggttgtttcgagtgtgtgtatgttctctgttaacgttgtcgatcctgtacctgtaccccacactccagcaataaacgttgaaaccccttcaagcccaatcgctctgctgacaactccacgt

SEQ ID NO: 106755 - DNA, 1418 bp, Zea Mays
ctccctctcttcatctccctcttccaaggagaacacccacctctctctctctctctctctctctctctctctctctcttgttgggacctggagaagaggaaggaacagggagcaggggggaagaagaggttgctgcgacggctcaagcctcaaatttttggatccaggcagacaagcagagaaacaccagttggtcaagatgtcagctggtttccagctcggtgtgatcgggtcacttgcactctctgtcgcatcctcagttgccattgtcatctgcaacaaagctctcatcagcacgcttggttttccgttcgccacaacattaacaagctggcatctgatggtgaccttctgcaccctccatgtggcacatcgcttgcatttcttcgagcccaaggcgattgatggacagacggtgatactctttgggttgctgaatggcacgtcaattggccttctcaacctgagcttaggattcaactccattggattctaccagatgacaaaattggcgatcatacctttcactgtgctattggagactatcttcttgaacaaaagattcagcgagagtatcaaactctctcttctggtcttacttcttggagtaggaattgcttcaattactgatctcaagctaaacatgcttggttccatcctttctggcctcgccattgccactacttgtgttggccaaattctcacaaatacaatacagaagaggttgaaggtctcctcaacgcagcttctgtaccaatctgcgccttaccaggcaggaattctgtttgcaactggcccttttgtggatcaacttcttactgaccggagtgtctttgcacacaaatactctgctccagttctgggtttcattgtcctatcttgcttgattgcggtgtctgtgaacttcagtacatttcttgtgatcggaacaacatccccagtgacataccaggtgcttggtcaccttaagacatgtctggttctatcatttggttacactctattacatgatcctttcactctaaggaacatattgggcattctaattgccatatttggtatggcactatactcctacttctctgtaagagagggcaagaagaagtcagcaaatgatgctctaccagtttcacagatggcagataaggaggctgaaccacttttggcaactaaagacaacaacgacaccaagaaagcaaatggtttatctcacgactgctgaggcttttcttgtagtttaggtctagtatgaactgcccttcgaatttaaaggacctggaaagccattcttttcattcttgagttcctttttaggaaacggagcttttaaaatttgtatagaatgcatattttgacattaaaattattatttgattgtattctacacacagcagttccagctgaagttttactagtgc

SEQ ID NO: 106756 - DNA, 1344 bp, Zea Mays
ctccctctcttcatctccctcttccaaggagaacacccacctctctctctctctctctctctctctctctctctctcttgttgggacctggagaagaggaaggaacagggagcaggggggaagaagaggttgctgcgacggctcaagcctcaaatttttggatccaggcagacaagcagagaaacaccagttggtcaagatgtcagctggtttccagctcggtgtgatcgggtcacttgcactctctgtcgcatcctcagttgccattgtcatctgcaacaaagctctcatcagcacgcttggttttccgttcgccacaacattaacaagctggcatctgatggtgaccttctgcaccctccatgtggcacatcgcttgcatttcttcgagcccaaggcgattgatggacagacggtgatactctttgggttgctgaatggcacgtcaattggccttctcaacctgagcttaggattcaactccattggattctaccagatgacaaaattggcgatcatacctttcactgtgctattggagactatcttcttgaacaaaagattcagcgagagtatcaaactctctcttctggtcttacttcttggagtaggaattgcttcaattactgatctcaagctaaacatgcttggttccatcctttctggcctcgccattgccactacttgtgttggccaaattctcacaaatacaatacagaagaggttgaaggtctcctcaacgcagcttctgtaccaatctgcgccttaccaggcaggaattctgtttgcaactggcccttttgtggatcaacttcttactgaccggagtgtctttgcacacaaatactctgctccagttctgggtttcattgtcctatcttgcttgattgcggtgtctgtgaacttcagtacatttcttgtgatcggaacaacatccccagtgacataccaggaacatattgggcattctaattgccatatttggtatggcactatactcctacttctctgtaagagagggcaagaagaagtcagcaaatgatgctctaccagtttcacagatggcagataaggaggctgaaccacttttggcaactaaagacaacaacgacaccaagaaagcaaatggtttatctcacgactgctgaggcttttcttgtagtttaggtctagtatgaactgcccttcgaatttaaaggacctggaaagccattcttttcattcttgagttcctttttaggaaacggagcttttaaaatttgtatagaatgcatattttgacattaaaattattatttgattgtattctacacacagcagttccagctgaagttttactagtgc

SEQ ID NO: 106757 - DNA, 1533 bp, Zea Mays
ggctcgccaaggaagcatccactgaccagcatccaagcgaggcagcctgaccgcccaccgtactacacgcgagcgcgcgcttctgcccccgccctgtaaaactctgaacataaaagtgcatcgccctgcctccctctcttcatctccctcttccaaggagaacacccacctctctctctctctctctctctctctctctctctctcttgttgggacctggagaagaggaaggaacagggagcaggggggaagaagaggttgctgcgacggctcaagcctcaagcagacaagcagagaaacaccagttggtcaagatgtcagctggtttccagctcggtgtgatcgggtcacttgcactctctgtcgcatcctcagttgccattgtcatctgcaacaaagctctcatcagcacgcttggttttccgttcgccacaacattaacaagctggcatctgatggtgaccttctgcaccctccatgtggcacatcgcttgcatttcttcgagcccaaggcgattgatggacagacggtgatactctttgggttgctgaatggcacgtcaattggccttctcaacctgagcttaggattcaactccattggattctaccagatgacaaaattggcgatcatacctttcactgtgctattggagactatcttcttgaacaaaagattcagcgagagtatcaaactctctcttctggtcttacttcttggagtaggaattgcttcaattactgatctcaagctaaacatgcttggttccatcctttctggcctcgccattgccactacttgtgttggccaaattctcacaaatacaatacagaagaggttgaaggtctcctcaacgcagcttctgtaccaatctgcgccttaccaggcaggaattctgtttgcaactggcccttttgtggatcaacttcttactgaccggagtgtctttgcacacaaatactctgctccagttctgggtttcattgtcctatcttgcttgattgcggtgtctgtgaacttcagtacatttcttgtgatcggaacaacatccccagtgacataccaggtgcttggtcaccttaagacatgtctggttctatcatttggttacactctattacatgatcctttcactctaaggaacatattgggcattctaattgccatatttggtatggcactatactcctacttctctgtaagagagggcaagaagaagtcagcaaatgatgctctaccagtttcacagatggcagataaggaggctgaaccacttttggcaactaaagacaacaacgacaccaagaaagcaaatggtttatctcacgactgctgaggcttttcttgtagtttaggtctagtatgaactgcccttcgaatttaaaggacctggaaagccattcttttcattcttgagttcctttttaggaaacggagcttttaaaatttgtatagaatgcatattttgacattaaaattattatttgattgtattctacacacagcagttccagctgaagttttactagtgc

SEQ ID NO: 106758 - DNA, 933 bp, Zea Mays
atggagatcaaggaggtagcagcagcggaggcgatgacgatgggcatgccgacggtgccctctcggttcaggaggatctgcgtcttctgcggaagcagccaggggaggaagaagagctaccaggatgctgccgtcgagctcggcgaggagctggtctcaaggaacatcgatctggtctatggcgggggaagtgtcgggctgatgggcctggtctctcgagcagtctacaatggagggaggcacgtcataggggtgattcccaagaccctcatgccaagagagattacaggtgagacggttggggaggtgaaggccgtggcggatatgcatcagaggaaggctgagatggccagacaatctgatgccttcatagcacttcctggagggtatggaacccttgaagagctgctggaagtgatcgcgtgggcgcagcttggcatccacgacaagccggttggcctgctaaacgtggacgggtactacaactcgctcctatccttcatcgacaaagctgtggaggaggagttcatcagcccgactgctcgccacatcatcgtcttggcaccgacaccaaacgaactgctcgacaagctagaggtgactcatctgactgacacaacgtatgcaacgacgaggaagttgttctctgcgaccgatcgatatcgttgggaagctgacatctggtcctgcttcatcacaggagtactccccccggcacgaggaggtcgtgccgaagaccaagtgggagacggagcagctgagctgctgcaagagctgcgagatcccgccggggctcaaagaagggacgccgatcgtccaagcacagcgaggaaccatgcatgctctgaactaatggtgttagttagctattacgtactagccagtgaccacttagggtttctcaggaggcctgcacaagtggtggtgatgtag

SEQ ID NO: 106759 - DNA, 90 bp, Zea Mays
attttagttcttctgatttggtcatgatttatattcggaatttaatttggaatttgtctaattattcaacagtctctagacggctaagcg

SEQ ID NO: 106760 - DNA, 923 bp, Zea Mays
actcaatatagtagtagtagtagtatattttaattccaaaacatattgcagatgagaaagccaagaacaacagacagaatacacgtttacacgatcactgctacaagctccaaacaaaaaagatgagtacagaggaacaacatataatgatcttcagatcgcaaacgatatgaagcctgcttgagaataccgaaatactcccttctttatttcttcctcgcgcgcgtacggtgtcatctcctcctcttgcgggtcttgcctcttggcaccggtggcgtcctcctcctcactcctcagcagatgggcaggggcttgccgtcccactccttgaggcagtcgagcatggggtcgatgagcttgccctcgctgagggccaggaacaccttgttgcactcctcgccgggggacttgagcttctcgccggtcaggtacacggcgccgaggtcctggcggatgaagcggtacagcgggtacgaccggctctccttgatcctgttggcgatcggcgcggcgccggtctcgaaggccacgcgggcggcctccatctccctgggcagcgcctcgcgcagctcctcctcgaacctgttgatcttggagaacacggacgcgctggcgtccttctcggcctcgccgctggcgagggcgtggtccaccagcacggcccggatcttcttcatcaggggcgagttggcgctgcaggggtcgtcgtagtacccgtacaccgcctcgcggtcgatggcggtgagcagggccttctcgctgaagcgcgcgctgtggaggtcgccgccgaggctggtggtcagcaccttcctggccaccgccatcacgcagctcttgacggcgctcttgaggttctcctcgaggtggctccccgtcagctccgcggccgccttgccccagttgagcgggtcgctctcgaggat

SEQ ID NO: 106761 - DNA, 267 bp, Zea Mays
gaaggtactcaggcacaaacttttgcatcctcatgtaggcatcacatagattgggtcatagattcaggagcatcaaagcatgtgactggcatgtccacccctttcaaaacatacattccttatacacattctgagtcagttcaaattgctgatggtacatctcaacaaatccgtggtataggatctgttgcgtgtacaccatctcttcacttgtcatcagttctgcatgttccatcttttccagtcaatctcctttctgtaagttca

SEQ ID NO: 106762 - DNA, 684 bp, Zea Mays
atgagtacagaggaggctgcgaagaagacagaaattgatggtagtggttcaggagggattacaaagagtgagatgatgagtgaaatgagaagtatgatccaggagctcatggggttagggttgattggtgctagggcaaatacaggtacatctgagttgaagttggaacttgtgcctaatgatgtgaagctagaaggtagtaagaattatctaagctggttcagaagagtgcgtgtactcctagggggcaagggagtgcagcattatttggaggagacatgtgttgagccgattgataagctcggtgcagaatggagaatctggcatgcgacaaactctgtgatagttgcatggttattggcatccatgtctcccactgttagcaagagggtggaagccatgcgtactgcatcacaaatctggaagaccttgagtaatatatactctcgaaaggggaatgtgatggggatgatggaaattcaaatcaaggcagatgcagtaaagcagatggggagaccactggaacaatatgttagtgagttccaacagctacgggcagagctggatcattatgctcctctccaaatggtttgcccacaggatgcacaaatggttcataagtgggtagaggataggagagtgacccactttctacaaaatctggattgacagttcgaaagcagg

SEQ ID NO: 106763 - DNA, 656 bp, Zea Mays
agctgttatccggccaaacctctcctctgtcctctcgaacatcactcgagtgtcccccttatccagctcaccgcctaacgaccttcatacacacccatatagcacaaaccttgaggccaaaccgtcagcatttaacgatcctcgcagactaggaataggccccctggcttgtctgctgagtgctgactgctgtatatatacactgcgcccaaccacattgccacacatacacatacacacctggtggtcacccctttggatgtccacagacaggcatgaaggcagggtccaagcagaggaggagattcctcaacctcaaagccttcctccatgcgtggaagaggctcgccgccgctgagacggcgggcggcgctgggtgggcccagctcgacggcggcgagggcgaggccgccatccccagggacgtgcccaggggccacacggtggtgtacgtcggggaggcgctgaggcggtacgttgtcagggtgtcctccctcgaccacccgctgttccgcgacctgctcgaccgggcgcgggacgagtacggcttcgccgccgccgacaccaggctgtgcctcccctgcgacgaggacatgttcctcgctgtcctctgccatgtcgacgcccagcgcgagatgcaccgcaaggtgctttga

SEQ ID NO: 106764 - DNA, 2863 bp, Zea Mays
ctccacccgctccaccgccgatggccgagcctgagcctctgccgcaggtgtcgtctgaacctaccactccgccgcaggaaggcagcggaaggactaagacaaagaacaagaagaatcgttccaagaagcaaccgaagcgagccggcgctgacaccgacgggttatcctcaggcgccagcaccatggttgaggaccctttcttcgtcctcgccggcggaaaggaaggagggtttctggatttggaggagatcgatgaggcagacttcggcatcttcggaggcgtcttggatgacgtaggacagagcgtcgaggaagctgggaaggatcatgggaagaagaagaagaaaacaaagaagcggaagcgtgggggtgatggcgagggcttcagtggcgacgctgcgttggtagttgagaatgaccaggtggatgtcgagaaagtggagaaaaaggtcgaggatggggagaaaggggataagaaggggaagagaaagatgaacatgaagaagaggaaggtgaaggataatgagatgaacagggagagtgatgaggatgttgctagtgacaaagcagaagacatgcaagatgacactgagaatatggaacaaaatgaggacgatgagctgattttgggcgaagatgatgtctctgcatggagggagcttaggctgcaccctctgcttctcaaggcgatgcgcagacttggattcaaagagccaacacctatacaaaagtcttgctttcctgctgcagctcatcgaggcaaggatgttatcggtgctgcagagacaggttccggaaagacacttgcttttggcctcccagttttgcaacgtctccttgaagagcgagaaaaggccacaagattgcagcaggaagatgaaaaaatggaggaacgttcttgtggaagccctcttcgtgctcttattctgacacccactagggagctcgccaaacaggtatgcgatcatctaaaagatgtggccaagttcttaggaatccatgttgttccaattgttggtggtctatcaatggaaaaacaagagagacttttgaaaaaaaagcctgaaattgttgttggaactcctggaagattgtgggaacacatgtcgatgaacaatcaacacctagttgagctgcactcattgtcattcttcatcttggatgaggctgatagaatgatcgaacgaggccatttccgtgaattacaatctatcattgagatgcttccactgaccaatggttctgatgaacaagctgcaagaacaatgccaaactgtgagactgtaccaattttgcaaataaagaagcggcaaacctttgtgttctcagccacacttgcactctcatctaattttcggaagaagttgaagcgtggcctatctacttcgaaggcatcgacgcctgatgatgtcagctctattgaagcattgtcaaaacaagctggaatgaaatctaatgctgaaatagttgatttgacaaaggcttcaatcttgcctgagaagcttgaagaatcttttattgagtgcagtgaagaggataaggatgcctatctgtattatatattgagtgttcatggtcaaggtcgcacaataatattttgtacatcaatcgccgcattacgtcacatttcttccatactgcgcattcttggaattaatgtattgacaaaccatgctcaaatgcaacaaagagctcgcatgaaggctgtggatcgcttccgtgaaagtgaaaattccattttggtcgcaactgatggttttgcaaggggtatggattttgatgatgtgcgaacagttatccattatcagttgccacattcaactgatgtctatatccacagaagtggaaggacagcacgcaagtcattggctggctgcagcattgcgttaatctctcctactgacaagtccaggttttattctctttgcaaatctttgtcaaaggagaatctccagcagtttcctgtagatcatacttacatgtctggagtgatgaacagactctcacttgctcggcagattgacaagattgcccgtaaaacttcacaggaaaatgctaacaaatcctggcttcaaaggaatgctgaatctatgggattgattttggatactagtgacagtgaagaagaccatgtgcagggacacaagaaacgaaaggctacttctgcacatctccaaaagcttcaacaggagttgagtgatctcttgcaatgcccattgcagcctaagactttctctcgccgctatttggctggggctggtgtctcacccttacttcagaagcaactagaagagttggccaagagaaatgcaagcaacaatagcagcaagagtaagaataaaggatctgggtttgttgttattggtcaggatcgtgtcgagcccttgcaagcacttcaaaattctgggcaagaggtctgtgtgaacatagacaaagaaagggaaaagcgaagagtcgctgagaactggaggcggaagaagcatgaagaaaagaaacgtacacaagagcagaagcgaaaggataagagaaaagctaaagagatggcttgatgacacatgagatagctaggggccttcaaggggtttacggaagctctttaagctcgcgtcaatcctttcagaaaggaaaggaatgcattcatcaatgttttgctgtaatacaatgcgtgcgctaagttagcgcttgcctttaacagattggaggtggtagtttgattttgttttgcggctgaagaaaataaacttagaatgcacgagcactggctctggatgagaaaagaaattaagcagatagctcacgtataacctcattggatctgtaatatgtacgcctatcagatttaaggtacaaattaattttatta

SEQ ID NO: 106765 - DNA, 1866 bp, Zea Mays
cgccctggctgggcctccacctccacggcaacggttagattccccacgaatccaaacccaagcagcgacgccaaaacatccccttcaaattccacgaaatcaagtcctcctcccgctgcacgcatctccagggtccggatccatgggctgcttcctcgcctgcttcggcggcgacgccaaccggcgccgccgacgccagaagtcgcagaggcagtctcccgcgaggactccgccgcggtcgattcatgttgcggtggcccgcgaggcggcggatgtggtggtgaaggaggtgtcgccgccgttgcgcggggcaaacccctcaacgctggcggaggccgtggaggcgccgcaagatgaggtcgccgaggatgcggatgtggcggcgaaggacgcgtcgctgccgtcccatgaggtgaaggcttcaacgccgccgccggctgtggcggctgcggatgaggcggtcacagacgctagccccgtcgacgagctcagggatttgactgagcaaaaggtgttagagaagcaagccgcaccatcactctccccagtcaaatgttctcctattgtggcagcagttgtttccccacatgattcagtgaagtgttctccagttgtggcaggaggtgtttcagctctggattcagaactcagggaggtgagtgagcatggaagtcggagcagtggcaagaagaaagtaacgttcgacatgaatatcagaacatatgaaaatgcagtaccactggaccaagaggaggaaccaccagaggaagatgaaaactatgtgcagaatactgtggttcttccagagaaccatcgttaccggaattgttctgacagtgatgatgatgatgttggagatgagtatgctgaggatgatgtctatggtgatgaagatgaggaggattctctggactgcaagattgatttggttgatgaggaggaactcaggactgaagagaacaagcaggagtctcacgaatccctattctcactgtcaatgtctaatgatcagaaaaatgacccagaagttgtcagtcctgcacccaagagcagtggtacttctgtagaggcagaaagccctctaattacgacaaagaaactccgtgatagatgccagtatgttcatcctgtgctaaacccggttcagaatctgtcacagtggaaggaagttaagagtctcaaggcccaaccagtgcatggtaagatgttggataaggagaatgtaaactcagtggcagatgtaggtccaagccatgactgtaattctgcaagccacacaaggatgaaccctagcttgtcaagtaagaaggaaaattctttggacgctagcctctctacctggttggtttcttctgagaactcagcagtggacaatgtgcaaagcaaatctccttgttccatctcgtcagtacaccgaggtgctctgactgttgatgacctgaagcaatcatcgactccaccatctccacaaagatctccaagaaccaaccgcgaaggatctccgatgttgggtacagtcggaagttactggtattgcacagagcatgacaatgagtactgttcttctagatccaattcaggaactactgggattcccaattcaacaagcaagtacagagaggtacgctaagcaagccaagtcaataaattccttggattgctggaacagttgtgtgatgtacctgtccttggatggattgttgcaggacaaaagggtgaactggcactcgactccctttactatcaggctggatagagctttgaagaaaacttcggcatgaatgaattgtttgtgttcattcagtcttgaatggattgtatcttcattcagcacggccttgcaatacacgacagtggatagtgcct

SEQ ID NO: 106766 - DNA, 1696 bp, Zea Mays
cgccctggctgggcctccacctccacggcaacggttagattccccacgaatccaaacccaagcagcgacgccaaaacatccccttcaaattccacgaaatcaagtcctcctcccgctgcacgcatctccagggtccggatccatgggctgcttcctcgcctgcttcggcggcgacgccaaccggcgccgccgacgccagaagtcgcagaggcagtctcccgcgaggactccgccgcggtcgattcatgttgcggtggcccgcgaggcggcggatgtggtggtgaaggaggtgtcgccgccgttgcgcggggcaaacccctcaacgctggcggaggccgtggaggcgccgcaagatgaggtcgccgaggatgcggatgtggcggcgaaggacgcgtcgctgccgtcccatgaggtgaaggcttcaacgccgccgccggctgtggcggctgcggatgaggcggtcacagacgctagccccgtcgacgagctcagggatttgactgagcaaaaggtgttagagaagcaagccgcaccatcactctccccagtcaaatgttctcctattgtggcagcagttgtttccccacatgattcagtgaagtgttctccagttgtggcaggaggtgtttcagctctggattcagaactcagggaggtgagtgagcatggaagtcggagcagtggcaagaagaaagtaacgttcgacatgaatatcagaacatatgaaaatgcagtaccactggaccaagaggaggaaccaccagaggaagatgaaaactatgtgcagaatactgtggttcttccagagaaccatcgttaccggaattgttctgacagtgatgatgatgatgttggagatgagtatgctgaggatgatgtctatggtgatgaagatgaggaggattctctggactgcaagattgatttggttgatgaggaggaactcaggactgaagagaacaagcaggagtctcacgaatccctattctcactgtcaatgtctaatgatcagaaaaatgacccagaagttgtcagtcctgcacccaagagcagtggtacttctgtagaggcagaaagccctctaattacgacaaagaaactccgtgatagatgccagtatgttcatcctgtgctaaacccggttcagaatctgtcacagtggaaggaagttaagagtctcaaggcccaaccagtgcatggtaagatgttggataaggagaatgtaaactcagtggcagatgtaggtccaagccatgactgtaattctgcaagccacacaaggatgaaccctagcttgtcaagtaagaaggaaaattctttggacgctagcctctctacctggttggtttcttctgagaactcagcagtggacaatgtgcaaagcaaatctccttgttccatctcgtcagtacaccgaggtgctctgactgttgatgacctgaagcaatcatcgactccaccatctccacaaagatctccaagaaccaaccgcgaaggatctccgatgttgggtacagtcggaagttactggtattgcacagagcatgacaatgagtactgttcttctagatccaattcaggaactactgggattcccaattcaacaagcaagtacagagaggacaaaagggtgaactggcactcgactccctttactatcaggctggatagagctttgaagaaaacttcggcatga

SEQ ID NO: 106767 - DNA, 1239 bp, Zea Mays
ggttttcctgtaagcatttttattatattttaatcgatgtgtatgcatacggtcagtgtctgtccaattggaaaaggccgaagcaaattgtccatttcaggaagaccgaagcaaacaatgcacacacagatacaacacaacatgtccgatgagcaacgattcgtcattatagaatctaacatagaagaactaataatgttttttttctattagtagttagtagttaccatctttgatcttgaaagcgcctcgcagagcggcctcttatggttcttcttgagcatctccatgtaagctcgcgcaacaacaatagagtgagtcaagctctcagttcatcagcatcaccgtccgtcagtcagtcacatcgcggagcagctaacagctgaaaagtaagcaagaactccaactctgcctacgacctgctatacctatacgtaccttgctgaggtgatggaggccctgctaagcggcgggggagatgagcacgattatggagcagactgccgccacaatccaagtcggtgtgaactgcagcgtcgcagtctcgtccacctgttctagaccctgcttttcttctaaggttggctgaaagcaatctatgaactggggaggagggagctatgagaacgtgtgtgttgacgacgcctgctttgtggccgtaattgcttgtcgatgagaaggaaaacgaaatcaacaccaagggattgggggaagagaaaaataattatccaaaaaatgttcgctcacgcatagattggggccgttggctcgatctgcgaccgaaaccctaggtattggcgggaggaacctctcgtcctcttcctcgctagaaccaagattgcccccattccggctcaacttcgaatagaaggaaatccctaacaccgagaaggcacatttcgaagagtgttcatacctgcagctaggcgagatgacgagagagcagacgaagttcgggttgtcaaacgtgccgaggaggaggtcgcacggtgttggactggggagcagcaaccaatggagatggagtcaggccgcacggatagagaggcagacgacaatcgacattgacggggacctgcggggcaaattggagaggcggacagtggtgcagcgtgcggtgggatgggtgccggcggcgcgagcgagagaggccaccggtgagcgtggcgggccggcggtaatgcagggagcggcaaactcaggagcgacctgtgtcttttttcgatcttttgttttttg

SEQ ID NO: 106768 - DNA, 1355 bp, Zea Mays
agtgtgtgggtgtgcccacggcatggcgttcttcagcagcggatcccgggtgctggtcgaaatcctgacgaggatgcagagcgctgaaagaccaatgcctgtcgaccacaccttcttcgagtcgggatccattcgctaccatgtggaggcttcagcgtcggatcccgagaacgtgttcctatcgatatcgacgccatcgctctcctacgactacgaggaggctgcagctgctccctcgtcgagccgcctgcctgagctgaccctgcaggaggcgaggaagacgtatcacaggttcgccgagatggtggagccgccgagggaagggtacgtcctgacgctcaagctcaacttctccggcctcacccggcccaaagatcgcgtcaaggccattaaccaggtgtcgctgctgcaatccgtggtgctgagctcgcagctgaagcacatgctggggagcctcggctcgtcgggcacgatgaggctcgtgtacaacaaccagagggagcccttcttcgtcagcaagacggctgagaagataaacgctatcttccccatgcgtttcagggatgacacggacctggccatcgccacctccttcttccaggagctgcaggaggtcgggaactcgttcgcgagggcgcccaagtgcagctggtcgccgatcccaccgccggagctgcgcggggagaacgtgcaccacctcaccaccaacggcggattcgtctccttcggcgtcctgtcgcggcacgtgagggggaagcggccgccaagaccgcgtggatcctgctcaacttccagtcctacgtcaagtaccacatcaagtgcacccggagccacgtccagagccggatgcgggagcggctggaggccctgacggaggccgtccagaacgcgaggctgcgagggaatagcggcgacgacgacaagaagcggtcgtcacaagttgtgaagaagaggagcaagagacgtctcgccagcctggcgaaagcgagcgacagggtgcgcaagggtttcagggccgtcctggacaagatgaagcggctgcggctgagggtcagggtgaagggcctggaccggctccggcggcagttccggtgccggtgcttcgccgtgcctaggctgcccgcgccatctcgcaccggcagaaggaaggagcactacagataccacaaactggccgagtaatctatatatataccgaactttggtcatcgacgacgtcgattctacgtactgtattaactgatgatgagcatggctgctagtttaatagcgatggcactccgctattatatctagcattggagcgcaaaaaagagtttagatcttttctcctcacacaggcttaaaaggtttta

SEQ ID NO: 106769 - DNA, 2657 bp, Zea Mays
cgaggtgctgccgccgcccgcgcgcgggacgctcaaaacagccgcttccccaaccaaaaggcgcaagaaaactcgtccccgccgctcaaaaatctcccgcctcccgcggatgggatggcatccagtttcacagaccacacgcccacccgctccgccgctcgcgcccaaaaattttcgttcagccggctgcctgccccccaccaccacttccctcccgttccgaaaccccgattagccgccgacccgccgtctccccacgtatttgactggtgctagagccagcgcccagatcaaccttcctgagtccatcggcaccgcatctgcctcgcgatccgtctctctctctgtcccctcacggccgtagaccttttcgagggcggtatcggagggaggagagggggaggcgaaggcgggagtagtagaaactaggaagggccgttcgtgtcttgcggagaagatggagaacctgaggaggttcctgaacccgctggtgctcaacctgcagaagatggagctggagctcacctgccccgtctgcctgaagttgctcacctcgcccacaacgctgccgtgttaccacacatcctgcagcaagtgtgcccttacaccgacttcaaaaggctacagctgtgccatttgcaaatcaggctattgttctcaagatttaaggccagcttctcaccttgagtcgatagtgagcattcataggagcctcagctctaccgtcagcaccatgattgaacaacaggattctcaaattaacattcatgttgcaaaggcagcatctcatggaacaccagaatcaggaaacagaagtggggtggaggagaaatctgaccagatgaaatcttacaaccctgttgcttcaaagctagtatataaccaaccaactggacctgcatttgggaacattgatagtgttcaagcaaaagatcctgcatttgagaacaatgctggtgccgcagctgttgcaccaatggcttttgtacgaaagggtcattctgggtcacaatcttctgatggccctggagatttggactgtgacagcaatgacctcgaaggagaactgatgacaagcctatcacctcttcaaactgcattgaaacgagaggcaaatgcaatggatgatcataccagagaattgaagaagcaaaaatcaaatgatcaagttcaaagacaaacaaacatggccagtgcttggaaatgtgagttctgtcattcttcccaagttactgagtgtactggccctttgtcacattatttgaatggggagccagtagaagctgatcaagcttggaaatcaagtgttcagcatgtccatgagaaatgcattgaatgggctcctcaagcattctttactggtgacaccgcaaacaacttggggcctgagttggcccgtgcttctaagatcaaatgcagtgtttgtggcttaaaaggcgcagcacttggctgccttgtgaagagctgccgcaaaagttttcatgtcccatgtgcctacaacatcaaaggctgcaaatgggatcaagagaactttgttatgctgtgtcctacacattcgtcaaaaaagttgccttgtgagagattaaagccaaaaaagaaggccaagctgcagcaaccatcttccgacattgatggtccgatttcaccctctccgatgcaaagggctgaactttggactgcctcaccttttctgactagtgaatgggtgatatgtggatctgcgctcgttggccatgagaaggaaatcttggatcagtttgagtgtcacactggcatcacagtaaccaacacctggagttcagatgtgactcatgtgattgctaatacggatgaacgtggggcatgtgcacggacactcaaggtcctcatggctattttagctgggaagtgggttctcaatgtgaattggctgaaagcctgtatggaggctagggaaccagtcccagaagagccctacgagataaggtgtgatgttcatggctctgtcgacggccctcgctcaggaaggctccgagcgatgcagcaggcaccaggtctgtttgctgggttgaccttctacttcagtggccatttcatgccgggatacagggccaacctcgaagatttgatcgccgcagcaggggggtccgttctggagaaggccgagctctctagcacgtccttgatcctctacagcatggaggcgccgccgccccacaacaacctagacgccctcgagaccatcaacaagagattagccgaggcccaggaactggcgaccacggctggctgcaaagccattcctcatacatggcttctggactgtatcgcgtcgtgcgcggttgagttgaacgtgtcgtgttctactgcctaggttcaaacgtaggaatgtgacatctgctgctgtttttttttgaaaaaggagattaagagacgattggcttgttgtcttgatccaaagtatctttagacgttgtagcatgaaagcggaatttagtcggaataagcctgtgtatcttagtcaacgttactgtcggtgatgtcatccacatgtttcacctactgacaggtgcagtttgtctgatttttttcttcttgatttgtatctaaaaaaacataaaaggatgcactcaggtcaggtttactccactttttcttgaattgacgttggaaaaaaa

SEQ ID NO: 106770 - DNA, 1042 bp, Zea Mays
ctccttgaaccagaattttttctgcttccttccatcctctcccgtctccctctctcgctctccaccgctcccccctccttccccttgcctctgccctggcaagttacggtcctgcccctgtgtgggtcccacaatctccgttctttactttgtgctctgtctctctcttttttttctatttcctacccctttttgccacagcaggaaaagaagataaatctgtgcctctcctccttttttatccccttttggacggctctgctccgcgctgacgtggctagaggcgaaccgaggccgtcgatatgtcgctcagcgagaagctggaggcggcgcgtgtcgctctcggcaagcgaaaggagcgtgagcgcgagctgcaggccgcacaggcgcagccgctcccggtgccggctaaagccgagccgaggaagccggctccggcttgtgcggccgccgccgccggcggcgacaacaagctcctggccggccacctggcccacgagttcctcgtccacggcacgctcctggggcggcggatcgagccgagccgcggagccccagctccggctcaggctccggcgcgggccgagccggaccccaaaaggaggtatgcggaggtgtcgtggctgctaatggcgagaggggcccacgtccccggcgtcgtcaacccgacgcagctcggccgctggctgcagataaaggagtgacggccacgtcggcgtggcaggtggcgcggcgccattgggcggggccgccgatcgacgacctgcgtgcgcgcgcggcgggagaggctgttacaaaaacagagaagctcacatcggccaagtggtttcgccatctccgccgcccctggatcactcggtgctctcctctcctactctcccattcagattctctaagaaaaaaaggtctagatctagcgagatcgtgctgtagtagccttgttgcttggcgcatcgttgtttgttaacattacatgcttactgttgcccgtgtgcgtgtatcaccactgtatccatccatccatgtttgtttctgcatgaaa

SEQ ID NO: 106771 - DNA, 431 bp, Zea Mays
ccaataggaaccggccatagtggattattgccatttttgtcttttgactatactcaacactaacataaaaaatatattataagccaataaccacaaacagcatcaaatgacttctccatatcgaccaaaatggtaagcaataattatttagacaattaacgtttggcgtcgctaccagattatacaaataggtgatggaagcaaattggatctgtaagggtcaggatgtggagaagagatgaccacctccagtgctactaatgagttgtcctctaaaattaagaatctaagtaatcaaggcaaatgttcgacgaaatttaaaactaaaaaggtaattagtcagccaacctgctacacagtggatcaggcacacttaggtaacgcaattaaactgattgcgacgcatatattaggtaaaaaccttatggtaa

SEQ ID NO: 106772 - DNA, 843 bp, Zea Mays
cgccgtgatggcgcgtctcttcttcctcctcctcctctttccgctcctctactcctccgtcaccggcctcaaccgcagcgacttcccgccgtccttcctcttcggcgccagcacgtcgtcttaccaggtcgaaggcgcatacctagacgacagcaagggcctaagcaattgggatgtcttctcccatgttccaggaaatattgacgatggaagcaatggcgacgtagctgctgaccattatcatcgatacaaggacgacatagaaatgatgcattcgattggtctcagctcctacagattctcattgtcgtggtcgagaattcttccaaagggtcgcttcggaggtgttaatcaggcaggcgttaaattctacaatagcctcatcaacggactgctagaaaaagggatacaaccatttgtgacgatcaaccactatgacatacctgaagaactccaagaaagatacaattcttggttgaacccagagattcaggaggacttcacctacttcgttgagctttgcttcaagatgtttggtgaccgagtaaagcactgggtcacattcaatgagccaaatcttattgtaaagcttgcatactccattggggcatttccacccaaccgttgttccgagccatatgggaaatgtgattcagggaattcatcaactgagccctacattgcagcgcataacatgatattagctcatgcaaagacggtcaacatctacagaaagaattacaagtccaagcaaggtggctttgtaggaatttcattacatctaagatggtatgaaccactaaggaatatcacagaggaccacttggcagtaagccgagctct

SEQ ID NO: 106773 - DNA, 1473 bp, Zea Mays
atggcgcgtctcttcttcctcctcctcctctttcccctcctctactcctccgtcaccggcctcaaccgtagcgacttcccgccgtccttcctcttcggcgccggcacgtcgtcttatcagcctaatttccacgctcatacatattgcatgttaattagacgtatctatttagaagtcttggcaattaaccataaatcaggaaatattgacgatggaagcaatggcgacgtggctgctgaccattatcatcgatacaaggacgacatagaaatgatgcattcgattggcctcggctcctacagattctcattgtcgtggtctagaattcttccaaagggtcgcttcggaggtgttaatcaggcaggcattaaattctacaatagcctcatcaacggactgctggaaaaagggatacaaccattggtgacgatcaaccactttgacatacctgaagaactccaagaaagatacaattcttggttaagcccagagattcaggaggacttcacctacttcgctgagctttgtttcaagatgtttggtgaccgagtaaagcattgggtcacattcaatgagccaaatcttgttgtaaagcttgcatactccattggggcatttccacccaaccactgttctgagccatatgggaaatgtgattcagggaattcatcaactgagccctacattgcagcgcataacatgatattagctcatgcaaagacggtcaacatctacagaaagaattacaagtccaagcaaggtggctttgtaggaatttcattacatctaagatggtatgaaccactaaggaatatcacagaggaccacttggcaatgcgccaaatcttaggtccaaacttgccaaaattcacagaaggagagaagaaactactaaagaaccaaattgacttcatcggggtaaatcattaccaaacattctatgttaaggattgcatatattctccatgtgatatggacgcctacccttctgaagctttagtttctatatcaacagaacgaaatgggatacccattggaaaaccgacacctgttgcaaacacatatgccgttccaagctccatggagaagttggtcatgtatttaaaccagagatataaaaacatacctttgtacatcacagagaatggttatgcccaaatagccaatattagcactacaacagaagaaataattaatgatactgaaagatcaacttacattcgtgactacctcacttacttgagctttgcaataaggaaaggagcagatgtgagaggttattttgtgtggtctttgatggataactttgaatggatctctggttacaccgtaaagtatggtctttgtcatgtgaatttcaagtcactaaagcgaacaccaaaactgtctgctaaatggtatagcaagtttatcaaaggctatgaacagatagagatggcctctgaagatttacctaagtatatggtttcctag

SEQ ID NO: 106774 - DNA, 1691 bp, Zea Mays
gccgtcatggcgcgtctcttcctcctcctcctattctccctcctccactcctccgtcactgggctcaggcgcagcgacttcccgccgtccttcctcttcggcgccggctcgtcgtcttaccagattgaaggcgcttacctagaagacaacaagggcctgagcaattgggatgtcttcacccatattaaaggaaatattgatgatggaagcaatggcgacatggccactgaccattatcatcgatacaaggacgacattgaaatgatgcattcgattggcctcacctcctacaaattctcattgtcctggtcgagaattcttccaaagggtcgctttggaggtattaatcaggcaggcattaaattctacaataacctcatcaatggactgctggaaaaagggatacaaccattggtgacgatcaaccactatgacatacccgaggaactccaagaaagatacaactcatggttgaacccagagattcaggaggacttcacctactttgctgagctttgcttcaagatgtttggtgaccgagtaaagcactgggtcacattcaatgagccaaatcttttggcaaagctcgaatacttcatcgggggatttccccccaaccgctgttctgagccaaatgggaaatgtgattatgggaattcatcaactgagccctacattgcagcgcataacatgatattagctcatgcaaagacgaacaacatctacagaaagaattacaagtccaagcaaggtggctcagttggaattacaatacatatgagatggtatgaaccactgaggaatatcacagaggaccacttggcagtaagccgagctctgtctttcgaagctccatggttcttggatcccttgttctttggtgactatcctcatcaaatgcgccaaatcttaggcccaaacttgccgaaattcacagcaggagaggagaaactattgaagaaccaaattgacttcatcggagtaaatcactaccaaacattctatgtcaaggattgcatatattctctatgtgatattgacccctacacatctgaagctttagtttctgaatcaacagaacgaaatgggatacccattggaaaactgacacaggatgcaaacacctatgtcgttccaagctctatggagaaattggtcatgtatttaaaggagagatataataacatacctttgtacatcacagagaatggttatgctcaaatacccaatatcagcactacagtagaagaaataattaatgacactgaaaggataaattacattcgtgactacctcacttacttgagttttgcaataaggaaaggagcagatgtgagaggttattttgtctggtctttgatggatagctttgaatggatctctggttacaccataaagtatggacttttccatgtgaatttcaagtcactaaagcgaacacccaaattgtccgctaaatggtacaacaagtttatcaagggatatgaacagatagagatagcctctgaagaatcacttgagcatatggtttcctaacagaaatacagaattctcaaggtccgtgtttctacataactcgatgatttgttaaagatgtttacaactttacatggtcaatttactcatgcccatgtatgcaagtgccataaactctaagccttttttttctcaaatatgcctctaaaggtagt

SEQ ID NO: 106775 - DNA, 3300 bp, Zea Mays
caaccactcaaaaaccgaacggacggcacatgcggcggccgcggccgtgcgcacatgcattccgcttccgccgccctcgtccgcgctgcgcctaagccgtggcccgagcagcatcctctccgcttctttccggcaacttcgaaggcggcgggtgagctccaccccacgacctactacactaccctcctcgcgtcgctctcccgggagtgccgacacgcccaccacccgttcgacgcaggtcttcaccgaacccatcaggcgcgggcatgcggggtcctgcacgcacggatcttgcgcctcggcctgcccctccggggtcgcctcggcgacgcgctcgtcgacctgtacggcaggtccggccgcgtgggctacgcctggcgcgcgctggcctgctgcaccggggctccagcgtcaagcgcggcggcgagctcggtgctgtcctgccacgctcggtcagggtcccctcgggatgttctcgatgcgttccagcgtatcaggtgttccattggtagcacgccggaccagtttggcattgcggtggttctgtccgcgtgttcgcggctgggtgccctcgagcacggcaggcaggtgcattgtgacgtgctgaagagcgggttctgctcgagtgtcttctgtcaggcgggtctggtggacatgtatgccaaatgcggcgaggtcgacgatgcaaggaggatgtttgatgggattgcttgccctgacacaatatgctggacaagcatgattgcgggctaccatcgggttggacgctaccagcaagcgctagctttgttttccaggatggagaagatgggttctgtcccagaccaggtaacgtgtgttaccatcatttccactcttgcaagcatgggcagattgggcgacgctagaactctactgaagaggatacggatgacgagcacggttgcttggaatgctgtcatcgcaagttactcacaaagtggtcttgacagtgaagtgtttggcctatataaggatatgaagaaacagggattgatgccaactaggtccacttttgcgagcattctaagtgcagcagccaacatgacagcgtttgatgaaggtcggcagatacatgcaacggcagtaaagcatggcttagatgcaaatgtttttgtgggcagttcactcatcaacctgtatgtgaaacatggctgcatctctgatgcaaagaaggtgtttgacttctccactgaaaagaacattgtgatgtggaatgctatcctttatgggtttgttcaaaatgagctccaagaagagaccattcagatgtttcagtatatgaggagagctgatcttgaggctgatgattttacatttgtgagtgtccttggcgcgtgcattaacttgtattcacttgatttaggtaggcaggtacactgtataacaatcaagaacggcatggatgcagacttgtttgttgctaatgcaatgctagatatgtactcaaaacttggagcaattgacgttgcaaaagcactattcagtctcattccagttaaggatagcgtatcctggaatgctcttatagttggacttgcacataatgaagaggagggagaagctatcaatatgcttaaaaggatgaagttctatggtatagcactagatgaggtttcttttgcaactgcaattaatgcctgttccaacatttgggctattgagactggaaagcagattcattccgcatctatcaagtacaatgtctgctcaaaccatgctgttggcagctctctgattgacctgtattcaaagtttggagatgtagaatcttctaggaaggttttggcacatgtagacgcaagcagcatagttccaataaatgcgctaattacaggtcttgtgcagaacaatagagaagatgaagccatagagttatttcagcaagtgctaaaagatggtttcaagccgtctaacttcacatttacaagcattctttcggggtgtactagacctgtcagttcagtaattggtaaacaagtccattgttacacactgaaatctgctattttgaatcaggatacttcacttggcatctctctggttggaatatatttgaagtgcaaattgcttgaggatgcaaacaaactcttagaggaggtgccagatcacaaaaacctggttgagtggacagctactatttcagggtatgctcaaaatggttacagtgttcaatctttggtgatgttttggagaatgcgcagttatgatgttcgttcagatgaggccacattcactagtgttctgaaagcttgttctgagatggcagctcttacagatggaaaagagatacatggcctcattgtaaaatctggttttgtttcctatgaaactgcaaccagtgccctcatggacatgtactccaagtgtggggatgttatttcttcctttgaaatcttcaaggaattgaaaaacaggcaaaatataatgccatggaactccatgattgttggttttgcgaaaaatggttatgcaaatgaggcacttcttctcttccagaagatgcaagaatcacaaataaagcctgatgatgtcacactccttggtgttctgattgcttgtagccatgctggtttaatttccgaaggcttacatttcttcgattctatgagccaagtttatggtatagtacccagagtagatcactatgcatgtctcatcgatctacttgggcgtggtggtcaccttcaaaaggctcaagaagttattgaccagttaccattcagagctgatggtgtgatctgggctacataccttgcagcatgtcaaatgcacaaggatgaagagagagggaaagttgcagcaaagaaacttgttgagatggaaccacaaagctcatccacgtacgtgttcctttcaagcttacatgctgcggctggtaactgggttgaagccaaagtagccagagaagcaatgcgagaaaaaggggtgatgaaatttccagggtgtagttggatcacagtggggaacaaacaaagcgtatttgttgtacaggacacacatcatccggacgctctgagcatctacaaaatgcttgatgatctaactggaatgatgaataaagatggcagaatcaaggaatgcttacttgagggacaatgaccctgtttaactaatatatcatgctaaataatcaagggcctagattgatcttctactgtaatagaaagatgtctggttatttaggtgaggaatttggtacccttgcatagtataagtaatacaattactcataaattaaggatttaggcttttatcacatctcaccaaattggttgatga

SEQ ID NO: 106776 - DNA, 381 bp, Zea Mays
gaagtgggtgctccaattggaaaacgagctgtgggtcgacagaggaaaaataggatgaaaggatgccttgagggaggtagtggaaaaaagaaagttaacaatgacaatggtaagaaaagcatttggggcaagttcaagtgtcccaactgtggtgaactaggccacagaaaagaaagctacaaatgtccattaaatggcacaaagaaaaggttacattaattctgtattaaattatttgaccaactcgtctattttatgacattaactaatttctgtcaaaacacgaagcgaaagcctaggaaaaattcaactaaaggctggttccccaaagatgtacctgagtcatcacagccagacgtccacgagaatgaagacgtcctt

SEQ ID NO: 106777 - DNA, 3384 bp, Zea Mays
cacgaggttccattccatgtcagtgtcaagttgtcaacggaggtgctggcatctgccatgtggcggaaatgattcttcctgcccagcatctacttcgggtgccagctcatcaattcatcagccgtccacaaacccgcgggcgcaacttctcggcacgtacgcagctgtgcgcgcgcgcgggaggagtggcgccgcacgcaaggtgtttggcggattgcctcttccagatcatctccgccgtgctgcctcctgccttagacagtcgcatgccattgttgaatgaagcccggcgcggctcaacggcaaccgttgcttccacttctgattcctcgttcgcctgctgcacgctcaccactgtacgtccccgatggctgaagccatcagcgcgaccagctcgtgcctggaacccctgtgcggttgtctggaaagcacaggcgtgttcgaggcagtgggccgggaggtggccgcgttccttcgcatcaagtcgaattgtggcgacctcgagaaggcccgggacagcctgcgcgccgtcgagacgacagtcagggcgcgggtcacggcggaggaggacaagctgaacgtctgtgatcctcaggtgcaggcgtggctcaagcgcgtcgacgagcttcgcctggacaccatcgacgaggattacagcagtctgtcggggttctcttgcctctgccagtgcaccgtgcacgctcgtcgccgcgcctcgatcggcaagcgtgttgtggacgcgctggaggaggtgaacaaactgaccgaggaaggaaggcggttcaggacatttgggttcaagccaccgccgagggccgtcagtcagttaccccaaactgagaccgttgggttggagcccatgttggctcgggtccatgatttgcttgagaagggcgagtcgagcataattggtgtgtggggtcaaggaggcatcggcaagacgactctcctgcacgccttcaacaatgatctcgaaatgaaagaccaccactaccaggttgttatttttattgaagtatccaattcagagacactgaacacagtggagatgcagcagactatctccgataggcttaatttgccatggaatgaatcagagacagttgagaaacgggccagattcctattgaaggcactggccaggaaaagatttctattgttacttgatgacgtaaggaagagattccgactggaggatgtcggtatcccaactccggacacaaagagcaaaagcaagctgatcctgacatcacgtttccaagaagtatgcttccagatgggtgcacagaggagccgcattgaaatgaaggttttggatgataatgctgcctggaacctgttcttgagcaagctgagcaacgaggcttttgcagcagttgagtcaccgaatttcaacaaggttgttcgggaccaggccaggaaaatattctccagttgtggaggtctaccacttgcactcaatgtcattgggactgctgtggcagggttggaaggaccaagagaatggatttcagctgctaatgacatcaatatgttcagcaatgaagatgtggatgaaatgttttatcggctgaaatacagctatgacaggctgaaacccactcaacaacagtgctttttgtactgcactcttttcccagaatatggatctattagtaaggaaccattagttgattattggctggctgaaggtttgcttctcaatgatcgtcaaaagggtgatcagataattcagagccttatttcagcatgcttgttgcagaccggtagctcattgtcatcaaaagtaaaaatgcaccatgtaatcaggcatatggggatttggttggttaacaagacagatcaaaagtttctcgttcaagcagggatggctttggatagtgctccaccagcagaagagtggaaggaatcgacaaggatctccatcatgtctaatgatatcaaagagcttcctttctcaccggaatgtgaaaacctcactacgttgttgatccaaaataacccaaatttgaacaagctgagttcagggtttttcaagtttatgccctccttgaaagtgctggatctttctcacactgcaataacaacactcccagaatgtgagacattggttgcattacagcatctcaatttgtcacacacacgtattaggttattacctgagcggctgtggttattgaaagagttgaggcatctggatctcagcgtgactgctgaactcgaagataccttgaacaactgctcaaggttactcaatttaagagttcttaatctctttcgcagtcactatggtattagtgacgtcaacgacctgaatctggattccctgaaggcactgatgttccttggaatcactatttatacagagaaggtgttaaagaaactgaacaagactagtcctttggcaaagtcaacatatcgtctgcatcttaagtactgtagagaaatgcagtcgatcaaaatctccgatctcgaccacttggtgcaactcgaggagctgtatgtcgaatcatgctataatctaaacactcttgttgctgataccgagctgactgcatcagattcaggcctgcagctcctcaccctctcagttcttcctgtgctggagaacgtcattgttgcaccaacgccccaccattttcagcacatccgcaaattgaccatttcgagttgccccaagttgaagaacatcacatgggtcctaaaacttgaaatgctcgagaggctcgtcataacccattgtgatgggttgctgaagattgttgaagaagacagcggtgatgaggcagagacaacaatgctgggtcagggtcatccttctgaagaacaggaagataaacggattgatggtggtcaaagtgtgtgcaagagcgatgacaatgcgcatgctgagctcctgaacctgagatcaatcgtgctgactgatgtcaagagcctgagaagtatctgcaagccaagaaattttcccagcctcgagaccatccgggtggaggattgcccgaatctgagaagcatcccactgagcagcacgtacaactgtgggaaactgaagcaggtgtgcggttcagttgaatggtgggagaaactggagtgggaggacaaggagggcaaggagagcaagttcttcattccaatctgacaggcccctccgttcagctgttctcggcggttgctgtgtcagttggcaggaagcttcgttcaatgctgccacgaataagcggttcggaatctgtatatgcgacgagttgtttcttttacaggtagtctgtgtatattgcttgtgttcacaaacctgtacatgatatgattcattcatgtattgctgtaaatgcgatcaataaaattccatttgtctacttggataaaaaatagtcctctatgacc

SEQ ID NO: 106778 - DNA, 2073 bp, Zea Mays
ctccgtttcggcatttttttcccactcccacccactcccccgtcttcctcctcccgacacacctctttaactcgcgtcggcttccaaaaaatgctccagctataatttaatccagacgaggaatcgcctcgcccgggatctctccccccccgcgaatccccaggcccgctcgccgacaggaccccgcgatcggctccagcgtgagcttgacttgcgttgcggcggggacgtcgccgacgctcggcacggggctcgtcggttcggcggtcgctttaggctcgggccccgtcgaggccagcggtgccggggcaatgcggtcagttcgtggagctgtttgaggcgcttggctgggatctgagggtgccagcgtgccaggtaggggaagcaagcgagctctctgtcggtgggggagctgctggtggttgtaagtgtagagcgcgcgtttggctgacagaatggagcacgtagtcgggggcaagttcaagctcgggaagaagatcgggagtggatcatttggggaactttacctcgccgtgaacgtgcagaatggcgaggaggtggctgtcaaactggaatcagtcacatcacgacatccacagcttcactatgaatcaaaactatacatgcttttgcagggtggaactgggattccacatcttaagtggttcggggtggaggggcagtacaatgtcatggtgattgatctgcttggtccaagtctggaggacttatttaactactgcagcagaaagttctcccttaaaacagtactaatgcttgctgatcagatgatcagtagagtagaatacatgcacacaagggggtttctacatcgtgacatcaagcctgataattttctcatgggtttaggacgtaaagcaaaccaggtatttgtcatcgactatggccttgcgaagaagtatcgagatctccaaactcataagcacataccatacagggaaaacaaaaatctcacaggaacagcacgatatgccagtgtaaatacccatcttggagttgagcaaagcagaagagatgatctggaatctcttggttatgtgctcatgtatttcttaagaggaagtctcccttggcaaggcctgaaagctggcacaaagaagcagaagtatgataggatcagtgaaaagaaaatgctgacgccagttgaggtcctctgtaaatcatatccatcagagtttactgcatactttcattactgtagatcactacgattcgaagataaaccagattactcctatttgaagagactcttccgtgacttatttatccgcgaggggtaccaactagattatgtatttgactggaccattatgaaatatcctcagtttagagataaaagcaaaattcagtctagcggcaagatgagtgggttggcaggcccttctgcagaaaggactgatagaactgcagctgaagctttgtttagaaggactggatctggttctggtcacaatcgagagcacaccaagcacagaagtcttctggagtcactgatgccatccaaggtggctgttgattcggataaagcaaggccacaatcatcgtcgcgcaacgggagcacatcaagaagagctgtcatttcatcaagcaaaccaagctcttctggggatctaagcgacccgaaccgcttggggggccgcctggcccctagtagcagcagccgcccaccgactgcccaaagggagatcagatcctcgtctttgtcaaaaatcggaaggtcttcacatgacgacgctatcaggaacctcgagctgctctcacttggtgctgacaagagaaaataagggaaccgacgaaatgggctagggtctggactctggatgatgacgatgcagggctgagcaggcagctccattatctgtatgttgaaaatattcttttcggaataaaagagattatataacttatgggattgtttcccggagctgtgctgctccaatccaataacccgcaagagttacgtagcaaagctaaattatgctgtcctagtagatcactgtatatctgaggacaggcggtgagacaacgaaggggagttgatagcaagataca

SEQ ID NO: 106779 - DNA, 2070 bp, Zea Mays
ctccgtttcggcatttttttcccactcccacccactcccccgtcttcctcctcccgacacacctctttaactcgcgtcggcttccaaaaaatgctccagctataatttaatccagacgaggaatcgcctcgcccgggatctctccccccccgcgaatccccaggcccgctcgccgacaggaccccgcgatcggctccagcgtgagcttgacttgcgttgcggcggggacgtcgccgacgctcggcacggggctcgtcggttcggcggtcgctttaggctcgggccccgtcgaggccagcggtgccggggcaatgcggtcagttcgtggagctgtttgaggcgcttggctgggatctgagggtgccagcgtgccaggtaggggaagcaagcgagctctctgtcggtgggggagctgctggtggttgtaagtgtagagcgcgcgtttggctgacagaatggagcacgtagtcgggggcaagttcaagctcgggaagaagatcgggagtggatcatttggggaactttacctcgccgtgaacgtgcagaatggcgaggaggtggctgtcaaactggaatcagtcacatcacgacatccacagcttcactatgaatcaaaactatacatgcttttgcagggtggaactgggattccacatcttaagtggttcggggtggaggggcagtacaatgtcatggtgattgatctgcttggtccaagtctggaggacttatttaactactgcagcagaaagttctcccttaaaacagtactaatgcttgctgatcagatgatcagtagagtagaatacatgcacacaagggggtttctacatcgtgacatcaagcctgataattttctcatgggtttaggacgtaaagcaaaccaggtatttgtcatcgactatggccttgcgaagaagtatcgagatctccaaactcataagcacataccatacagggaaaacaaaaatctcacaggaacagcacgatatgccagtgtaaatacccatcttggagttgagcaaagcagaagagatgatctggaatctcttggttatgtgctcatgtatttcttaagaggaagtctcccttggcaaggcctgaaagctggcacaaagaagcagaagtatgataggatcagtgaaaagaaaatgctgacgccagttgaggtcctctgtaaatcatatccatcagagtttactgcatactttcattactgtagatcactacgattcgaagataaaccagattactcctatttgaagagactcttccgtgacttatttatccgcgaggggtaccaactagattatgtatttgactggaccattatgaaatatcctcagtttagagataaaagcaaaattcagtctagcggcaagatgagtgggttggcaggcccttctgcagaaaggactgatagaactgcagctgaagctttgtttagaaggactggatctggttctggtcacaatcgagagcacaccaagcacagaagtcttctggagtcactgatgccatccaaggctgttgattcggataaagcaaggccacaatcatcgtcgcgcaacgggagcacatcaagaagagctgtcatttcatcaagcaaaccaagctcttctggggatctaagcgacccgaaccgcttggggggccgcctggcccctagtagcagcagccgcccaccgactgcccaaagggagatcagatcctcgtctttgtcaaaaatcggaaggtcttcacatgacgacgctatcaggaacctcgagctgctctcacttggtgctgacaagagaaaataagggaaccgacgaaatgggctagggtctggactctggatgatgacgatgcagggctgagcaggcagctccattatctgtatgttgaaaatattcttttcggaataaaagagattatataacttatgggattgtttcccggagctgtgctgctccaatccaataacccgcaagagttacgtagcaaagctaaattatgctgtcctagtagatcactgtatatctgaggacaggcggtgagacaacgaaggggagttgatagcaagataca

SEQ ID NO: 106780 - DNA, 2513 bp, Zea Mays
atgtccgtttccgaggccgcttatccaccgccgcccccgtcctcatgggcacaacagatccgcgcggccgctgccgagggccacttctgcgacgctgtctccctcttcctccggatgcgcgcctccgccgcgccacgctcgtctgtcccggcctcactcccggccgcgctcaagtcctgtgccgccctaggcctgagcgccctcggcgcctccctccatgcgctggccatccgctccggtgcattcgccgaccgttttaccgccaatgccctcctcaacctctactgcaaggtcccgtgttcgtatctcgactccactggtgtggccatagtggatgtacccggatcatcaaccgcatttgagagcgtgcggaaggtgttcgacgaaatgatcgagagggacgtggtgtcctggaacactttggtgctgggctgcgcggaggaagggaggcaccatgaagcactggggtttgtcaggaagatgtgcagggaagggtttaggcctgactcgttcaccttatccactgtgctcccaatcttcgcggagtgtgctgatgtcaagagaggcttggaggtgcatggttttgccttcaggaatgggtttgatagcgatgtgttcgttggcagtagcctgatcgatatgtatgcgaattgtacaaggacggattattctgtcaaagtgtttgacaacctcccggtacgagaccatattctgtggaactccctgcttgcaggttgtgcacaaaatggttcagttgaggaggcccttggaatattccgtcggatgctgcaggctggtgttagacctgtgcccgtgactttctcgagcctcatacctgtctgtggtaatttggcatcattgcgcttcgggaagcagctgcacgcctatgtgatctgtggtgggtttgaagataacgtgtttatatctagctccctgattgacatgtactgcaaatgtggggagattagcattgcccattgcatatttgacaagatgagttcaccagacgttgtatcgtggactgcgatgatcatggggtatgcattgcatggtccagcaagagaggcacttgtgctgtttgagagaatggaactgggaaatgcaaagcctaaccatatcacctttcttgcggttctgactgcatgtagtcatgctggcttagtggataagggctggaaatatttcaagagtatgtcaaatcattatggaattgttcctactctagagcattttgcagcgcttgctgacacccttggtcgtgcaggagagttagacgaagcatataattttatatcgaagatgcaaataaaaccaactgcgagtgtctggtccacattgttaagggcttgcagggtccataaaaataccatgttagctgaggaagtagccaagaaaataatggagcttgaacctaggagcattgggtctcatgtagtattgtcaaatatgtattcagcttctgggagatggaatgaagcagcacacctacgagaatccatgagaaaaaagggtatgaagaaggatccagcttgtagttggattgaagtgaagagcaaactgcatgtctttgtagctcatgataggtcccacccttggtatgacaggattattgatgcactgaatgctttctcagagcagatggcacgcgaaggtcatgtacccaatacagaggatgttttccaggatattgaagaagagcacaagtcatatgtgttatgtggtcacagtgagaaacttgctatagtgtttggtattataagcacgcctgctggaacaaaaattcgtgtgatgaagaatctccgagtctgtattgattgccacacagtaactaaatttatttcaaagttagctgatagggagattgtggtgcgtgatgcaaaccgtttccaccactttaaggatggaaactgttcctgcggggacttttggtgatcgggtaaccacttgggattatcatatgtgttgcgatataaagtgaattgcttatttttctccatctacttaagcttttgagttgaattggtcggatcatgcaatgagttccaatcattgcgagaacattagagccatctgaacactatatgttcttactctttgattatattaaggtaaacttactcttcttactttcaatagctgctctatcactgtacaaaattcagctcgttgagtgtgttgagatattttttgtacatgaaattgcagtttcatctgcttttgatgccagttctgcaatccatcaaagtactagctacagtgtgctcaatttctcaaattatgttttcattgttgaatcatggtcaccttatccccaccttgcataaagaataaagaaagattgtgaagatacagaaaaaaaaaatcgtcattctcatttggtggaaggacaatgcacacagattgtcgcttttggttcacatggcccaggatgtccttgcaataccaatatcaacagtagctttagagtccgtcttcagcacaagtggatgtattttggaagactttcgtacctc

SEQ ID NO: 106781 - DNA, 951 bp, Zea Mays
gaagatgctcttcgtttctgtagctccttcagctgttcacgcactcctccctgctgcccatcgcgccaggacaattctgtagtccaagctacgcacgcaccgctgcgccctagagcgcgctacgcacccagagcaatgtcagcgtcataggcattgtgctggccgcagtacacgcacagtacagacgctgctgctacctggcgagctgcacatacaagaagcagtggcattggcactgttggctgctgggtgcaaaaccctgacctggcgacgagcgggatccagagttccagacgaatccaggcagagaggcgaccgatgcaaacgggtgcggccgcgggggccgcctgcgcgcacgtacggatgatggcacggcaggtcggctagtctcgtgacgagatcacgaggaggcgccgacgatctcgctgccgagggcgcggggcgcacccgtaccgcgctggcgcccgccgccgcggaaacagtcgtctcatgggccatttgtgctggttcggccgtttagctagacccaggcccgggacgcttctggccttctatctaggcccgcccgcgcgcgcgcggttagaaaacaaggaggacacgggtaaaactgccgggcctgatgcatgcatttgcgacggcggcagacctgttccatgtttcaactccaaggtgtttctagtgactatctttatcaataaaaaaaacagatcagcagatcaactggattcagacaagcatgataggttaggaagtcactagcagtatgccagtatgtgtacgacatgcaaggcgccaacgttatgtaggaagaaagctgtcaatatggcaattgttgaggaccatttgtgacactggacacggccagacggtccatccttaagcacaacatgctgtaactgatgttatacacattacactatcaatattgcagagtatagtattcttattaaa

SEQ ID NO: 106782 - DNA, 1341 bp, Zea Mays
acgctcatgacttttaagagtgtcgacccttggcttgggtccagccttcagacttcagaggcaggctgcaagagagttcatcgatctagctagctagctagcgtgtgtttagggtacctagctagctagcttcaacatatatatcttagttgcacacacagctcaaaagaaaggaatcatcgatcgatcggcagggagggatggggctgagggagatcgagtccacattgccgccggggttcaggttctatcccagcgacgaggagctggtgtgccactacctctacaagaaggtggccaacgagcgcgccgcgcaggggacgctggtggaggtcgacctgcacgcgcgagagccatgggagcttccagacgcggccaagctgacggcgagcgagtggtacttcttcagcttccgggaccgcaagtacgccacggggtcgcgcaccaaccgcgccaccaagacggggtactggaaggccaccggcaaggaccgcgaggtgcgcagcccggccacccgcgccgtcgtcgccatgaggaagacgctcgtcttctaccagggacgcgcacccaacggcgtcaagtcctgctgggtcatgcacgagttccgcctcgactcgccgcatacgccaccaaaggaggactgggtgctctgcagggtgttccagaagcggaaagacagcgagcaagacaacggcggcggctcctcctcgccgccgacctttgccggcgcgtcgtcgcagggggtcgttctagatctgccggacgaccagcagcccagcatgacgatggccggcgcgtacgtagcagtggaccaccaccagccaggctcttccgccgtcgggttcgcactgccgccgcatgcgcaggacaacggcctcggcgatggcggcctggacgcgttgctgatgaacggagcgaccatgtggcagtacagctcatcggccctcgccgaccacttcccgccggaggaagtgaccgccgcgcccatgatggggctaggctccaggggaggaggtgacgggtgcagcttcttctacgacagcggcttcgacgacatggcgaacatggggttcccgcagggatggatgggctgaggaggcaaggcaccaactgcaacaacgccatgggatgatggattgtgaaggaaacgattgaattgattccattagtggtagtattgtacagtaggtacgtagtgtgaggttagtttattggaaattattagagtgcacctccccaatccaaaacaacggaatgaaaagtagagcgcatgacgacaattgtatgtatccattcactcctactactatgcttgtacattaattaattagtataaacgaa

SEQ ID NO: 106783 - DNA, 916 bp, Zea Mays
ctaagaaaagcacttgctgaacctgtggagtctctatttgatgatgcagaccaaacaacctagcaatcaataagaaacatttacaaatgtgagacaaaggccatcctaccagagtttctgaataacctttgtcagtttgaaatggaatacgctccagcagaagaaatggtatccaaattaaaggattatgcccggagtgttgtggaaagtaaagctaaagaggaatctagcaaagtattgatccatatgaaggagaggttcacaacagtgtttagccatgacaaggattcaatttcaagggtctggacaggaaaggaagatgttcgtgcaatagcaaaggaagctcgatctgcggctctcaaacttctgtctgtaatggcggccattcgctgggatgacgagccagataggattgaaagcatcctcacttcaacacttctggaaggctctgttgtatcaaagattgcaagtgctgcttctgctgatccacttgcttctaccacttgggaagagattcctccaaagcatacaatgattaccccgtctcagtgcaagtcactgtggaaacaatttaaagcagaaactgagttcacgattacaagcagtatccacacagtcagcgtggtgcgacttttttcccttaagggctactttgggaaccttcgggattagaggggattgaggtgtaaataaactaattttctctccaatccccttcaatcccgaaagggatttgagtttccaaactagccctaagggtgaaagctgtacctacatctctttttaaaaaatttttacttcaccttttgttttttcaccccagcaagctcacatgcgcggtaatagtaaactgcctcctccttgggcaatcgtggccattgctattcttggtttcaatgagatcatggtgcttatt

SEQ ID NO: 106784 - DNA, 2309 bp, Zea Mays
tctcgcgtgtaggactttagttgccacgttggtgttccgttctgttctgttggcagcaagtgcaatgagcatcaatgcatcaaccatcgtgctggtacttccaaaagagcgaaaggattgccaattctgaaggagaaagcaaaccatatctgaaatacaaagcgcggacggaccatttgagcatccaattcgtgagctttggcgtctgtgtatttttaatcgggagctgtaggctgtagctagctagagaggtttagagcagcaccaaatggcgagcaaggtggtggacctccggtcagacacggtcaccaagccctccgaggccatgcgggccgccatggccgccgccgacgtcgacgacgacgtcctgggcgcggacccgaccgcgcatcgcttcgaggcggagatggccgcggtcatgggcaaggaagccgcgctgttcgtgccgtcgggcaccatgggcaacctcatctccgtcctcgtgcactgcgacgtcaggggcagcgaggccatcctcggcgacaactcgcacatccacgtctacgagaacggcggcatctccaccatcggcggcgtgcaccccaggaccgtgaagaacaaccccgacggcaccatggatatcgacaagatcgttgccgccatcaggcatcctgatctccattacccgacgaccagattgatctgcttggagaacacacatgggaatactggtggaaagtgtttatctgtagaatacactgacaaggttggtgaaattgccaagagccatggcttgaagcttcatatcgatggagctcgcatcttcaatgcgtctgtggcacttggagttcctgtagatagactcgtgaaagctgctgattcagtttcggtatgcctatcgaaagggttaggcgcacccgtcggatcagtgattgttggttcgaaggccttcattgacaaggccagaattctccggaagaccctaggcggtggaatgagacaggtgggagttctttgtgctgctgctcatgttgccgttcgtgacactgtgggaaagcttgcggatgaccacaggaaggctaaagctttggcagagggactgaagaaaatcgagcagattacagtggattcagcttcggtcgagaccaatatggtattctttgaggtcatggatccaagaatatcacctgacaaactgtgtcaagtcttggaacaggacaacgtgcttgcactgccagccaattcaaaaaggtgaagtttcattctgtgtttgaatgcactagcgctaatagttagttagctaaaaattactagttgaattaggtagctaacaaatatctagctaactattagctaatttgctaaaaatagctaatagttggactattagttagactatttggatgattttggctaattttagcagctaactattaactctagtgcatttaaacatggcctctcttggccgatcctttattcctaccatcactttggctgtttgtgcaacattgcctcccatttccggtaacaagctagactgcatatcatagtctggctgaaactccatgttcaattagcagaaccaaccttttactccaagcaagtctataatcatatcgagtttttgtaaggtccgcatttaacttaactgtccgtattcgaacttctgtgtcgtgcagtattaggttcgtcatccattaccagatttcagacgctgatgttgggtacgcattggcatgtgtcgaggtatgtgaaagcttggacccctttccatctttcactgttatagcgtttgatttttcctgtgatagtacgatttcatgttttcagaaagcaatcaaagagctactggaaggcagtactgagttggggcattcgataaacggagctaccaaaagctcgtatgggcactagatcactcggattctgccaacctgatgcatcgacacatggtacccagctgcttgttagctgctctgcttgtctgtgaccaacgcctagctgttgtagtctcgcctttcccgaataattgttgctgttcagtctctgtttggatctgcttgttctcgtgtctctgcttcatctgctttcgcttcatggtactgagtactgacgctgtgaagtggaacaagtactctctcccccaaaaaggccggtagacccaaacatcttttcttgcgggctggtaaagccaaaaatttttaaatgtactcgaacgaaaatatcatagcatagtcttgcatacaaaggaagaaatacgataagaagtgaatgtaaagcaaagcactacagatgcaaagagaaacgcaggtctcgtatgatggtgc

SEQ ID NO: 106785 - DNA, 1701 bp, Zea Mays
tctcgcgtgtaggactttagttgccacgttggtgttccgttctgttctgttggcagcaagtgcaatgagcatcaatgcatcaaccatcgtgctggtacttccaaaagagcgaaaggattgccaattctgaaggagaaagcaaaccatatctgaaatacaaagcgcggacggaccatttgagcatccaattcgtgagctttggcgtctgtgtatttttaatcgggagctgtaggctgtagctagctagagaggtttagagcagcaccaaatggcgagcaaggtggtggacctccggtcagacacggtcaccaagccctccgaggccatgcgggccgccatggccgccgccgacgtcgacgacgacgtcctgggcgcggacccgaccgcgcatcgcttcgaggcggagatggccgcggtcatgggcaaggaagccgcgctgttcgtgccgtcgggcaccatgggcaacctcatctccgtcctcgtgcactgcgacgtcaggggcagcgaggccatcctcggcgacaactcgcacatccacgtctacgagaacggcggcatctccaccatcggcggcgtgcaccccaggaccgtgaagaacaaccccgacggcaccatggatatcgacaagatcgttgccgccatcaggcatcctgatctccattacccgacgaccagattgatctgcttggagaacacacatgggaatactggtggaaagtgtttatctgtagaatacactgacaaggttggtgaaattgccaagagccatggcttgaagcttcatatcgatggagctcgcatcttcaatgcgtctgtggcacttggagttcctgtagatagactcgtgaaagctgctgattcagtttcggtatgcctatcgaaagggttaggcgcacccgtcggatcagtgattgttggttcgaaggccttcattgacaaggccagaattctccggaagaccctaggcggtggaatgagacaggtgggagttctttgtgctgctgctcatgttgccgttcgtgacactgtgggaaagcttgcggatgaccacaggaaggctaaagctttggcagagggactgaagaaaatcgagcagattacagtggattcagcttcggtcgagaccaatatggtattctttgaggtcatggatccaagaatatcacctgacaaactgtgtcaagtcttggaacaggacaacgtgcttgcactgccagccaattcaaaaagtattaggttcgtcatccattaccagatttcagacgctgatgttgggtacgcattggcatgtgtcgagaaagcaatcaaagagctactggaaggcagtactgagttggggcattcgataaacggagctaccaaaagctcgtatgggcactagatcactcggattctgccaacctgatgcatcgacacatggtacccagctgcttgttagctgctctgcttgtctgtgaccaacgcctagctgttgtagtctcgcctttcccgaataattgttgctgttcagtctctgtttggatctgcttgttctcgtgtctctgcttcatctgctttcgcttcatggtactgagtactgacgctgtgaagtggaacaagtactctctcccccaaaaaggccggtagacccaaacatcttttcttgcgggctggtaaagccaaaaatttttaaatgtactcgaacgaaaatatcatagcata

SEQ ID NO: 106786 - DNA, 1558 bp, Zea Mays
cccacacaccagtccatcgcccgttccgtgagcttccacaggtctatttcacccatccgtcatcctaacaaaggactactctctctcgtcctcgtcccgcctcgcagtcgcagcacgatggtgaccaacgtggtggacctccggtcggacacggtcaccaagccgtccgacgccatgcgcgccgccatggccgcggccgacgtcgacgacgacgtcctgggcgctgaccccaccgcgcgccgcttcgaggcggagatggccgcgctcctgggcaaggaggcggcgctgttcgtgccctcgggcaccatggccaacctcgtctccgtcctcgcgcactgcgacgtccgcggcagcgaggtcatcctcggggacgcctcccacatccacgtctacgagaacggcggcatctccaccctcggcggcgtgcaccccaggaccgtgcccaacaaccccgacggcaccatggacctcgccaggatcgtcgacgccatcaggaaccccgacggggcgctgctgtacccgacgaccaggctcatctgcctggagaacacgcatgccaattctggtgggaaatgcttgtctgtagagtacacagacaaggttggcgaaattgccgtgaaccacggcttgaagcttcacatcgatggagctcgtattttcaatgcctctgtggcactgggagttcctgtacatagacttgtaaaagctgccgactcagtttcggtatgcctatctaaagggttaggcgcacccatcggatcagttgttgttggttcagaggccttcatcgacaaggctagaattcttaggaagaccctaggcggtgggatgaggcaggttggagttctttgtgccgctgcttatgttgctgttcgtgacaccgtgggaaagcttgcggatgatcacaggaaggctaaagccttggcagagggcctgaagaaaattaaacagcttacggtggattcgtcttcagtcgagaccaatatggtgttcttcgatatcgtggatccacgcatttcaccgagcaagctatgccaagtcttggaacagcgcaatgttcttgcaatgccagcaagttcaaaaagtgtcaggttcgtcatccattaccagatttcagacagcgatgttcaatatgcattgacgtgtgtcgagaaagctgttgaagagctactgaagggcggtacaaagttggagcatttgacgaatggtactgccaaaaactcatattggcactagacgtcagcagggtgtcctgcttgtttgttatcaacgctagctgttaaaactcttctctattaatgaaatagggcacaccactcgtgtgcccgtttgatccaaaaaaaaatctagctgttaatttgtagtcacacctttgccggatggctgttgctgtttactcttcactcggatgtgttcgttcttgtgctctatagcttaccttctcagaattacctggtccgtttccgcttcctggtaagacggatgcaatgaagtattgcaaatgcagaacatacgttgcccagacaatacagtttctttagctatgttgccgcactga

SEQ ID NO: 106787 - DNA, 1642 bp, Zea Mays
tgctgtcagactgcgctcgtggcggcgcgcccagttccactctcccagggcgccgcctgcgcctctcgttctctatataaaacaccgccgccccgcgtccgcgaaggccaaggttctcagcacggcgcgcggcccgcctccccaccggtctcgctctcgcagtccctcgaccgctcgtcccggcagagcagtcgcagcacgatggtgaccaacgtggtggacctccggtcggacacggtcaccaagccgtccgacgccatgcgcgccgccatggccgcggccgacgtcgacgacgacgtcctgggcgctgaccccaccgcgcgccgcttcgaggcggagatggccgcgctcctgggcaaggaggcggcgctgttcgtgccctcgggcaccatggccaacctcgtctccgtcctcgcgcactgcgacgtccgcggcagcgaggtcatcctcggggacgcctcccacatccacgtctacgagaacggcggcatctccaccctcggcggcgtgcaccccaggaccgtgcccaacaaccccgacggcaccatggacctcgccaggatcgtcgacgccatcaggaaccccgacggggcgctgctgtacccgacgaccaggctcatctgcctggagaacacgcatgccaattctggtgggaaatgcttgtctgtagagtacacagacaaggttggcgaaattgccgtgaaccacggcttgaagcttcacatcgatggagctcgtattttcaatgcctctgtggcactgggagttcctgtacatagacttgtaaaagctgccgactcagtttcggtatgcctatctaaagggttaggcgcacccatcggatcagttgttgttggttcagaggccttcatcgacaaggctagaattcttaggaagaccctaggcggtgggatgaggcaggttggagttctttgtgccgctgcttatgttgctgttcgtgacaccgtgggaaagcttgcggatgatcacaggaaggctaaagccttggcagagggcctgaagaaaattaaacagcttacggtggattcgtcttcagtcgagaccaatatggtgttcttcgatatcgtggatccacgcatttcaccgagcaagctatgccaagtcttggaacagcgcaatgttcttgcaatgccagcaagttcaaaaagtgtcaggttcgtcatccattaccagatttcagacagcgatgttcaatatgcattgacgtgtgtcgagaaagctgttgaagagctactgaagggcggtacaaagttggagcatttgacgaatggtactgccaaaaactcatattggcactagacgtcagcagggtgtcctgcttgtttgttatcaacgctagctgttaaaactcttctctattaatgaaatagggcacaccactcgtgtgcccgtttgatccaaaaaaaaatctagctgttaatttgtagtcacacctttgccggatggctgttgctgtttactcttcactcggatgtgttcgttcttgtgctctatagcttaccttctcagaattacctggtccgtttccgcttcctggtaagacggatgcaatgaagtattgcaaatgcagaacatacgttgcccagacaatacagtttctttagctatgttgccgcactga

SEQ ID NO: 106788 - DNA, 1768 bp, Zea Mays
tgctgtcagactgcgctcgtggcggcgcgcccagttccactctcccagggcgccgcctgcgcctctcgttctctatataaaacaccgccgccccgcgtccgcgaaggccaaggttctcagcacggcgcgcggcccgcctccccaccggtctcgctctcgcagtccctcgaccgctcgtcccggcagagcagtcgcagcacgatggtgaccaacgtggtggacctccggtcggacacggtcaccaagccgtccgacgccatgcgcgccgccatggccgcggccgacgtcgacgacgacgtcctgggcgctgaccccaccgcgcgccgcttcgaggcggagatggccgcgctcctgggcaaggaggcggcgctgttcgtgccctcgggcaccatggccaacctcgtctccgtcctcgcgcactgcgacgtccgcggcagcgaggtcatcctcggggacgcctcccacatccacgtctacgagaacggcggcatctccaccctcggcggcgtgcaccccaggaccgtgcccaacaaccccgacggcaccatggacctcgccaggatcgtcgacgccatcaggaaccccgacggggcgctgctgtacccgacgaccaggctcatctgcctggagaacacgcatgccaattctggtgggaaatgcttgtctgtagagtacacagacaaggttggcgaaattgccgtgaaccacggcttgaagcttcacatcgatggagctcgtattttcaatgcctctgtggcactgggagttcctgtacatagacttgtaaaagctgccgactcagtttcggtacgttctcaagtcgctgggttctgcggtcaattcgcaacaggcatgcgtatgaaatgaccgaccttcaggtagtaacatatgcgggcggtgattctactcatttctctgaaacattatgcgcaggtatgcctatctaaagggttaggcgcacccatcggatcagttgttgttggttcagaggccttcatcgacaaggctagaattcttaggaagaccctaggcggtgggatgaggcaggttggagttctttgtgccgctgcttatgttgctgttcgtgacaccgtgggaaagcttgcggatgatcacaggaaggctaaagccttggcagagggcctgaagaaaattaaacagcttacggtggattcgtcttcagtcgagaccaatatggtgttcttcgatatcgtggatccacgcatttcaccgagcaagctatgccaagtcttggaacagcgcaatgttcttgcaatgccagcaagttcaaaaagtgtcaggttcgtcatccattaccagatttcagacagcgatgttcaatatgcattgacgtgtgtcgagaaagctgttgaagagctactgaagggcggtacaaagttggagcatttgacgaatggtactgccaaaaactcatattggcactagacgtcagcagggtgtcctgcttgtttgttatcaacgctagctgttaaaactcttctctattaatgaaatagggcacaccactcgtgtgcccgtttgatccaaaaaaaaatctagctgttaatttgtagtcacacctttgccggatggctgttgctgtttactcttcactcggatgtgttcgttcttgtgctctatagcttaccttctcagaattacctggtccgtttccgcttcctggtaagacggatgcaatgaagtattgcaaatgcagaacatacgttgcccagacaatacagtttctttagctatgttgccgcactga

SEQ ID NO: 106789 - DNA, 219 bp, Zea Mays
actcctccatcgctctgtaattttgagcagtggacctacacataaatctctgagaaagataaaaaatggatggagaatcttaagaagtgggatgcagaggacaaggagtgggtagataagaaacaagaggagcttgcgacggagcaacaacatatctaagagaaggaaatgagacgtgtcactgattacagagaggagagggagaagaagcttgagcgt

SEQ ID NO: 106790 - DNA, 1780 bp, Zea Mays
  misc_feature (272)..(272): n is a, c, g, or t
gcaaccgtgccatgccgtcccccgtcccccaatacacagccggcgagccctgcccatctgtcaatccgcgcccatccgacggtggagagcagctctccggcccctgccttcctcgcgggtcgcggctttgaagaaagctttctccgtttctccggtttccacgcgcgctctcggtctcggctctcgcttcgccaatcgccactggggagtgcgtgcctgctctagtgctctgcgtccacgggcatggacgccgctgccctcttcttctctcnactcctccccatcgtcgtcgtcgcggccatcgcgggcgcggcgccactggacccgcagcagctgctggcgctgcgcgcgctcggcctgggcgcgcacccgcgcgccgacccctgcggcgcggccgccgttgtggccgccgtgaacgcttcctgcgacgcgggggagcccttccggcgtgtcacgtcgctcgccctcacaaactgctccgacaccacctccgtctcggcggcggcgctcgaggcgctcgcgccgtcactccgggcgctggcgttctccgactgcccggccgcgccgccgcgagctctgcccccggagcagctggcgtccgggctccgggcattctcctgcaccgcctcgctccaccgcctctccgccgtgtggctctcccacctcaccaatctcacggagctcgccgtcgcggacacgcccctcgccacgggctcccccactgagctcgcagtcgtcgtctcccacatggagcacctcacccggctcaccgtctccaacgccaacctctctggcttcctcccgcaccactggcattgccccaacctcacccacctcgacctgtctggcaaccgcatcaccggcgccatcccggataccctgacgctcctcgccggcatcacccacatcaacctcagctccaacgctctcgatgggcccatccccacctccatcggcgatctcatctcgctcaccgccctggacctgtccaataacagactctccggcggcatccccgacacgctctctacgctgccggagctggaggtgctcgacttgggctccaaccggctcaacggcagcataccgccgttcctggccgagatgcatgggctgagggagctcaacctcgagaacaacgacttcgacggcatggttccgttcaccgccaagttcctgtccaggctgcgcgtgttcagggccgccgggaacggcaagctgtgctacaaccggtccgtgctgcccgctgagctcgccatgagcgtggctccgtgcgacaagtacgggttcccggtgctgccgcccccggccacggcgcggtcggagcgaagcgcggactacgacgacggcggcggggacggagaggcggacggcggcgccgacacgaggggtgggcccagcgccacggtgctcggggtggccatcgggctatcctgcctggcgttccttatcatcttgctcgtttgcatctgcaaggtgtgccgctgaggcccggcgctgcctctgttgcatgtctttttgctgagttcgttaatcagttctgctgttgcccattgggattggaagtgacgtggaaaatgtatggagtactggtagctagggcttaatttattcacctgtaattttttggcgccgttcttcgctcttgttcgtgtttcagccttgaagatgcgaagaacagctttatacagaaggagcttttggaccaggttatgacgaatgttttgggtatgtgttcttaaaaacaacatatggaatgtcaaaatccacaagaacaaga

SEQ ID NO: 106791 - DNA, 162 bp, Zea Mays
gatctggctgtctcctgattgattctgcgtcacctttgttgtggctttgtttgatctggaaaaaaaaagtaaacgaagaacatgtgggctgctatgctgatccatgtacaagtgcgtattggcgccgccattttctattccaacctgtgcctttcatgctta

SEQ ID NO: 106792 - DNA, 1537 bp, Zea Mays
tctataatgcggcgcgctaaaaaggtttcggaaaaaataataaatcacaaacgccaaaaaaaaaaaattacagccccacttggcccagctagaggatccacttgcccggaagttgcgtgggcttacgcattcgagcacgtgtccgtttgaactctcaaaagctctatgtcatcgctcgccaccaccaagataaatacccgggcaaggcaccctcgccgacgatccaccctttgccttcagcacagcacgaccaggacacagtgctccctccccaaagacaaacaggcgagcagcaaacacacacgctcgaaccgagacaagccaatctaataatggggagggctccgtgctgcgagaagatggggctgaagaaggggccatggacgcccgaggaggacaaggtcctggtcgcccatatccagagcttcggccacagcaactggcgcgcgctgcccaagcaagccgggctgctgcggtgcggcaagagctgccggctccggtggatcaactacctgcgcccggacatcaagcgcggcaacttcagcaaggaggaggaggacgccatcatcagcctccacgagcagctcggcaacaggtggtccgccatcgccgccaggctgcccgggcggacggacaacgagatcaagaacgtctggcacacgcacctcaagaagcgcctggatcccaccaagcaggagcagcagcagcagcacgggacgacgccggcggctggcgccggcaagaagcacaggcccgcggcggcggcgaagcgcgggggcggcggagccaggaaggcgacggccaacgccgacgccgtcgtcgtcccggccccggccccggccaccgctgcgccggcgtctcccgaacggtcggcggcctcgtcgtcggtgaccgagtcgtccatgacggagcaggagcaggagcacggcaacacggggagctcgcccgcgttccccaaggaggagagcctcaccacctcctcctcggacgccgaggagttccagttcgacgacagcttctggtccgagacgctgtcgatgccgctggacagcctcgacgacgtcgtccccatggagccctccgacgacgacgcgttcggcgacgtcgacgtggctgccgcctcctcctcgtccgtcggcgccgacggcgacctggactactggctcagagtgttcatggagtccggcgacgcgcacccagaactgccgcagatttagaccgctcgcgcgagaattttcggctcctaattgattcatcgttcttttgtctctatctctctctgcacgtcttgcatcggaggggacggacaaggacagcagcagctgattaacagagaaggaaatcaggcagaaacaacgcgacacgccgttgcaacttggatcgatcttgtttgccttcttgttgtatagatactagaatccatccaagcctatgcgttctgagaacagaagcacgctgtgctgtgcatgcagattcccatgtatgtacagtagccacggccgccgccagaacagaaatggatccggcctcttccaaa

SEQ ID NO: 106793 - DNA, 1006 bp, Zea Mays
aatcaacaattcctttcctttgacaaaacataaaagctgtgcgctgatgcgatgagctctgaattgctaggtggtccgccatcgccgccaggctgcccgggcggacggacaacgagatcaagaacgtctggcacacgcacctcaagaagcgcctggatcccaccaagcaggagcagcagcagcagcacgggacgacgccggcggctggcgccggcaagaagcacaggcccgcggcggcggcgaagcgcgggggcggcggagccaggaaggcgacggccaacgccgacgccgtcgtcgtcccggccccggccccggccaccgctgcgccggcgtctcccgaacggtcggcggcctcgtcgtcggtgaccgagtcgtccatgacggagcaggagcaggagcacggcaacacggggagctcgcccgcgttccccaaggaggagagcctcaccacctcctcctcggacgccgaggagttccagttcgacgacagcttctggtccgagacgctgtcgatgccgctggacagcctcgacgacgtcgtccccatggagccctccgacgacgacgcgttcggcgacgtcgacgtggctgccgcctcctcctcgtccgtcggcgccgacggcgacctggactactggctcagagtgttcatggagtccggcgacgcgcacccagaactgccgcagatttagaccgctcgcgcgagaattttcggctcctaattgattcatcgttcttttgtctctatctctctctgcacgtcttgcatcggaggggacggacaaggacagcagcagctgattaacagagaaggaaatcaggcagaaacaacgcgacacgccgttgcaacttggatcgatcttgtttgccttcttgttgtatagatactagaatccatccaagcctatgcgttctgagaacagaagcacgctgtgctgtgcatgcagattcccatgtatgtacagtagccacggccgccgccagaacagaaatggatccggcctct

SEQ ID NO: 106794 - DNA, 1737 bp, Zea Mays
ttttttttgtaggcatgtaataatcacttattcgtgcacttctgttttggtgtttcaggctcagataaaatatatggcccgactgattttgacactagaatgaaaatagccctcggcgcagcaaggggactagcctatctgcatgaggacgccaaccctcatgtcattcaccgggatttcaaggctagcaatgttctactggaaaacgatttcacccccaaggttgctgattttgggctggcaaaggaagcatcagatgggatggatcatatttctactcaggtcatggggactttcgggtacgttgccccagagtatgcgatgacagggcatctgcttgtcaagagcgacgtctacagctacggagtggtgctcctggagctgctgtcaggccgaaaacccgtggacatgacccagccgccggggtccgagaacctggtcacctgggcgcgcccgctcctcaccacgcgggaaggactgcagcggctggtggacccgtcgctcccggccggttacgacttcgagaagctggccaaggcggcggccatcgcgtccatgtgcgtgcacgtcgaggcgtcgcaccggccgttcatgggcgaggtcgtgcaggcgctgaagctgatccacagcggcggaggcggcgacgagacctgcagcggctccttcgtgggcggcgcaacagaggagtccccgtggaacgacgtcagcaggagctcgtggaacgacgacccgccggccactccgggcccggcgctccccctgggatacggctcggaccctgccggcgccgacgagcgcaggccacggtcggcgtcgagcgcggtgctggacaagatcgagtccctggcgatgtacgactggtccggcccgctgcgcaccaaggggaggggcagcttctacaggctgagggggagcatgagcgagcacggtcgcccctcggacgacggtagcgtcgaaggttacttgatgtagccggcggcccgacgaccgtgcgcagcagattgccgcggcaggcatacctcgcgtttcttttgtctgtctagaattgtatagctgctgcttgacgagattttggtgcctgttgcgaagaatacatcgttctggacatcggacgtatccgatgcagtttggtcaagagatgttcagaatttgcgtatgtcgaattgaatcacatatcagagctacattggtcggatcgtcatggacgagaatcatgttttcatagtagaaaatgaggaggtttataatcaaaccataatttctgactgcttccagcatgtgttctcgcattcacagatatgttagcaacaccttcgcagcgagtaatcagcatagcaagcattatatgctatttagtcgttcttaaaatatactggatctcaaaacttagtttacagttgctgcgatctcatgagtgctgaatagatggtgcccaaggtacaaaatctcataacataatgtcttcactcttttaagtgggagaaactagctaacatattcgaccttgaatttgctagctccacaatcaagtcaagtgctgcaacaaatacaagtacagttagataaaaaaatagtttaatctggatacaattttgtcacgaagaatcaaaacctgtttcaaatgaaagttgggcggttcttagttttggggataccaatcccccaaagactgataatgcttttgatctcgctctttgaacctaatgtgcaaaatggccaaaaggagaatcaacaaat

SEQ ID NO: 106795 - DNA, 2481 bp, Zea Mays
agtcttcaagatcctgaaaagacaacagtgaccattgatttggtgccattaggccagaaatttgataggacttcagccttactgattagcaacagatttttgcaaaagaaggtgccaataaactcatccacttttggtgattatgttgctacatatgttcattatccaggccttgcttctttagtacctattcctggatcattgggtccagtaagcagtaatgaggacccttttggtgcaaatatacacaatagaaggcaccacaagattaactctaaaactgttgccataattgctctatcagctgtggtttttgttttgacgtgcttggccattggcatcacttggagattcaatggactaaaacattctcatgctatgggccctatttcaagttcgtccatcactagaaaaggagctatgaggtcatcgttctctggtacgagcagctcggcagcatcatttggttcaacaataggaacctgcccatccaccgtgaagacatttacaataactgagcttgagaaggccacagaaaacttcagcttcaacaaaataataggcgaagggggttatggacgcgtctatcgtggtgtaattgaagatggtgttgaggttgctgtcaaattgctcacaaggaaacatcaaaacagagaccgcgagttcattgcagaggttgagatgctaagtcgtctacatcaccgcaaccttgtcaagctgattggtatatgcattgagcggagcacaaggtgcttggtttttgagctcgttccaaacggaagtgttgaatctcatctacatggctcagataaaatatatggcccgactgattttgacactagaatgaaaatagccctcggcgcagcaaggggactagcctatctgcatgaggacgccaaccctcatgtcattcaccgggatttcaaggctagcaatgttctactggaaaacgatttcacccccaaggttgctgattttgggctggcaaaggaagcatcagatgggatggatcatatttctactcaggtcatggggactttcgggtacgttgccccagagtatgcgatgacagggcatctgcttgtcaagagcgacgtctacagctacggagtggtgctcctggagctgctgtcaggccgaaaacccgtggacatgacccagccgccggggtccgagaacctggtcacctgggcgcgcccgctcctcaccacgcgggaaggactgcagcggctggtggacccgtcgctcccggccggttacgacttcgagaagctggccaaggcggcggccatcgcgtccatgtgcgtgcacgtcgaggcgtcgcaccggccgttcatgggcgaggtcgtgcaggcgctgaagctgatccacagcggcggaggcggcgacgagacctgcagcggctccttcgtgggcggcgcaacagaggagtccccgtggaacgacgtcagcaggagctcgtggaacgacgacccgccggccactccgggcccggcgctccccctgggatacggctcggaccctgccggcgccgacgagcgcaggccacggtcggcgtcgagcgcggtgctggacaagatcgagtccctggcgatgtacgactggtccggcccgctgcgcaccaaggggaggggcagcttctacaggctgagggggagcatgagcgagcacggtcgcccctcggacgacggtagcgtcgaaggttacttgatgtagccggcggcccgacgaccgtgcgcagcagattgccgcggcaggcatacctcgcgtttcttttgtctgtctagaattgtatagctgctgcttgacgagattttggtgcctgttgcgaagaatacatcgttctggacatcggacgtatccgatgcagtttggtcaagagatgttcagaatttgcgtatgtcgaattgaatcacatatcagagctacattggtcggatcgtcatggacgagaatcatgttttcatagtagaaaatgaggaggtttataatcaaaccataatttctgactgcttccagcatgtgttctcgcattcacagatatgttagcaacaccttcgcagcgagtaatcagcatagcaagcattatatgctatttagtcgttcttaaaatatactggatctcaaaacttagtttacagttgctgcgatctcatgagtgctgaatagatggtgcccaaggtacaaaatctcataacataatgtcttcactcttttaagtgggagaaactagctaacatattcgaccttgaatttgctagctccacaatcaagtcaagtgctgcaacaaatacaagtacagttagataaaaaaatagtttaatctggatacaattttgtcacgaagaatcaaaacctgtttcaaatgaaagttgggcggttcttagttttggggataccaatcccccaaagactgataatgcttttgatctcgctctttgaacctaatgtgcaaaatggccaaaaggagaatcaacaaat

SEQ ID NO: 106796 - DNA, 336 bp, Zea Mays
tggacgacgatggggaaaggggaggacggggagctgggggcggggcaggaggcggacgcacggctaccggagcggcctggcgaggcggactgtggctactacctccgcacggctaccggaccggcctggcgaggcggctgcggctatcgctggtggcgtcgtggggtacagtgacagcgaggtgttcagagatgcgtcgagttcctcaattctcccaggcagggtggaacaagaggcagtcaggcagataactcgattggaagttaccagatttctctgttaccagaatttgctgcgcatatgtgcgtaatctgactgcgacgaatctctagatcc

SEQ ID NO: 106797 - DNA, 955 bp, Zea Mays
tggagattcatcaaaatggtggcgaacctgactcagacatttttttctagcgagcgacatacataaatttatttttctttcctacctaattcattccgatcactaatcgtactactgcgattcacccacaccatcacccgcacaaattttaatacccaaggaaatataaattaccatgctaaatatcacgacagcttgacgacgagatgagcgagacgtcacctggtgtggaatgagctcagggtgacgtcggcgttcagcagctccatgagacgacgcaccagagcaaggaaaaatgagtcaggtggcggattccaagcgcgacgaggaggatgttgttcagcgagtgccgcttgaggctgtggcggtgttgaatgcgatggggagcaggtgagcagttgtaggacgctgaacgctggtagatgtagaggcaaggacgagcgcgaccagaccgaacgcgacgccggcgtccagtggcttgagcggatgcggcagggtgtaggcacaaggacgagtagcaggggcggctgggcttctgggccgcgacggagacaagcagggctagtggtgtccggtggctgaagacgactacgccgaccgcagcagggtgccgagctcgcgactgatggagcgaatcggccaaggatgatgtcgcccaggcaaggccgggcacggacaggagcaacagcggtgggatttttttcctaggaaccagaacgcttgcttgtgatgtgagaagaaggtacgaaacttcactccaagtattccagcaccaagcacggagataaaggacggtgtgggagagaacgacctgaagatgcaagcgttggggaaaagatcagagatagcgatcgagctggagatagagcggtggagattttttttgtttcttcagaaaccgacgttcaccagccactggggagaggataagcaagacgagaaaaaaacaaaaaaa

SEQ ID NO: 106798 - DNA, 2012 bp, Zea Mays
tccccgaatcccgacctcgcctccagttccactcttccggcggcgtcggcggccgccccttccccacgcccacaccatgtacggcgtcggcggcggcttcaacgcgccctccaccgctgcctctcggcgccgcaacccaggcgacgaagaggaggacgaggaggatgagggcggtgagggccgcgtcctggaggcgtgggagcgcgcgtacgcggacgaacggtcgtgggagtcactgcaggaggatgagtcgggcctcctccgtcccgtcgacaccaagaccctcgtccacgcgcagtaccgccggcgcctcctactccggtctgccgccgccgccgctgcccgcatccaaaaggggctcatccgctacctctacatcgtcatagacctctcccgggcggcttcagagatggattatcgtcctagtcgaatggctgttgttgcaaaacatgctgaggctttcataagagaattctttgaccagaatccattgagccatgttggcctagtgacaattaaagatggtattgcccatcgacttacagaaatcggagggagcccagagtcacagattaaggctttgatggggaagcttgagtgttctggtgattcatccctgcagaatgctctagacctcgtacatggttatttagatcaagtaccatcatatggtcacaaggaagttctgattttatactctgccctgaatacatttgatcctggtgatatcacggagacaatagcaaagtgtaagaagtcaaaaattagatgctctgttattggtcttgctgcagagatcttcatttgcaaacatctatgtgaagagactggtggatcttacacagttgcactggatgagtctcatttcaaagagttgttactggaacatgctcccccacctcctgcaatagcagaatatgctgcagctaatttgattaagatgggctttccacagaggggtgctgaggagcttatctctatttgctcttgtcacaagaagataaaatctggggctgaaggttacatatgtcctagatgcaaagttaatgtctgtgagcttccaacagaatgtcgaacttgtggtcttacgctagttagttctccacacttggcaaggtcgtatcatcatctcttcccagtaccaccgtttgatgaggtcacccctgtcccaaatagaattcaaaggggagggcagatctgtttcagctgccagcagagcctttataacccagacggccaatctaacctccatgtgcgctgcccaaaatgcaaccaacacttctgccttgattgtgatatttacatccatgagagcctgcacaattgccctggttgtgagagccaacgcagcatcgcttcatagagaccgtgttactgcgtgcattattcaggttgtaccttaagctttctcctacactgtaacagccagcaaagttgtttcatgatcagcttttttctggctagcttttctgagaatctagctgtagagagaatctggctgtgagaagaatctgtgtatcgtgggaattacgtgcggaggaagatgaagtggtccaaatagttcaggatctagaaagcgatggatttctaccatcgcgatgattcaaccgattctgtgtttatgttgattttggatggtttctaccaaaacgattcttataaaagcgggttgaaaagctggatgtttgacagtccgcagcagcttttggtggccagaagctaaaaaaaagcccaaacaaacagggtcattccggcatccttttattgatagttcctgttagattgagtacctactagctagtgttgagctattgctacccatcagaggccaatgggttgatagttttaatttgtgccgagaagagaagctgaaagtgtataacatgaccgagacttgactcttgctgtttttttttcttccctgaagcgtgacagtatatttatttgttttcatttgtttatgctaaaactttgtcataaattgagttgtggattgggtcgggggtttcatc

SEQ ID NO: 106799 - DNA, 1568 bp, Zea Mays
acgggccacggccgcggccgaattgaattaatggcgtgacgcgaagtcgcgaaaacccgatttattacgtgacgacgaccaacgatgcagctcgatagacttatgggcgcctccgtggtcctcgccgtcgttgtttccctcgccgctgtcctccctattgctcgcgctgagatcaagacgacgcctattgtctccgactcgcgctccgtcatcctgttcgaggagttcggcttcaggcgcggcggccacgccagtgtctcagccaccggcatctcgtggagggtccccgaggggtctcagctgcaagccgtggacacgacgctcatgggtttcttcctcatctccaactccctcttctacgagatcaacaatgagtccgactacgccgaggccaccggcggcgccttctgcccgctcacaagcaagtacgtgcagcggctcttcctgttcaaggaggtggcgcccgacggcacgggcaggggctctctgaccatcgactccgacgaccagtacacggtgctgttcagcagctgccaagagggcgtggaggtcaccatggacgtgcgcaccgagatgtacaacctgcggcgctccggcaccagggagtacctccccgtcggcctgctaccgctgccgtggatcttcgcggccgcggccgcggtgcacttcgcgttcctgggcacgtgggtggtcgtctgcgtcaaacaccgcaggacggcggagcgcatccacgccgtgatgggcgcgctgctgctgttcaaggcgctcaagctcgcgtgcgccgccgaggaccagtggttcgtggagcgcacgggcacgccgcatgggtgggacgtcgccttctacgtgttcggcttcttcaagggcatcctgctcttcaccgtcatcgtgctcatcggcaccggctggtccttcttgaaaccttacctccaggagcgcgagaagaacgtgctgatgatcgtcatacccctgcaagtgatcgagaacatcgcgtccgcggtgataggggagacggggccggcggggagggactggctggcgtggaaccagatattcctcctggtggacgtcatctgctgttgcgcggtgttcttccccatcatatggtccatccgcaacctgcgggaggcgtccaagactgacggcaaggcagcgcggaacctccagaagctcacgctcttcaagcagttctacctggtggtggtgtgctacctctacttcacgcggatcgccgcgtcggccatcgccgccgtgctcagctacaagtaccagtgggccgtcaatgtctccatcgagatgaccagccttgcgttctatgtgttcgtgttctataacttccagcccgtggagaagaacccttacctgtacgtgggtgacgatgaggaggaagccgcgggtgggcagcttgagatggagagcacatttgagatctgacgagacattttctttagattatatgagatctgatgagacatgcatgcatgtaatacgttatggatgtcttattatctctcccagttttgtatatatagttatacagtgctacaaacaacctgatatggctttca

SEQ ID NO: 106800 - DNA, 828 bp, Zea Mays
aaactctactaccagacgtccagactccagacccaccggtcaccaccgcgtcgccgccgcccttctccgcccccaccttatattataaatacggcaggaacggaaagcgccagagatgggaatcacctcctcaacctccagcccaacctccagcccggaatcgagagcaatggcgctcgccaaggccaaggagatcgttgcctccgctcccctcgtcgtcttcagcaaaacttcctgccctttctgcgtccgtgtgaagcagttgttcgagaagctcggagcaagctacaaggccattgagttggataaggaaagtgatggagctgagctccagaatgccctgaaggagtggactggacagaggactgtcccaaatgtcttcatcaatgggaagcatattggcggctgtgatgatactatggcactgaacaatgatgggaagctggtgcctctgctgactgaggctggagccatcgccggttctgcctcgaagacaaccatcactgcttgacatgtgtgttaccattcccgtgcttaaaaataatgatgctttgcaagtgctgaacttgcagatgctatgtgggagtgactgttcgttccctgtgtaaaactccctagacatcagtcgagtcgtgttgctgtggtggttgtgaaatctacaataatcattgctacaataatgtcgtgttccctagacatcagatgagaaagatgagaagaaataacattataatcttattcgaactatcatctgtaagcttcttttgatacaatatttttatttatagattttaaaaacatttgtaggactaataagatttttaggca

SEQ ID NO: 106801 - DNA, 1849 bp, Zea Mays
aaactctactaccagacgtccagactccagacccaccggtcaccaccgcgtcgccgccgcccttctccgcccccaccttatattataaatacggcaggaacggaaagcgccagagatgggaatcacctcctcaacctccagcccaacctccagcccggaatcgagagcaatggcgctcgccaaggccaaggagatcgttgcctccgctcccctcgtcgtcttcagcaaaacttcctgccctttctgcgtccgtgtgaagcagttgttcgagaagctcggagcaagctacaaggccattgagttggataaggaaagtgagtgcacttaaatagttaaatttgttcgttttttcttttcagtgacttatgtaattcatagtttggctgtatgcaccgtaggtattaccattagctgaaaaaaattggcatgttttcattgtactgttttgctgaaatagaaataaatagttataaaagcttataagtacagcagtaccattatggattgtggcacaattgaatttctatgcaagttcatgatttggtttgtccttatgacatgagattaaatcacttggttaggtgctggatgaacactgattatggcaataatgagtgacaaagaactaatcattggtgtcctttttgcttcttttttgtacagttctttgcaaaaaatttgtacagctttgctctctatataaatttcccctcctgctggctgctatatttatagaataaaaataaccaagaacaaattacctgacaaatgttaagtggtatgtcgttaacctgcaatatcttatatgtgtcctattgtttcacttactgctgaagtattgtggttccaagaaaaaaatattacgccaggagtgtagtacactcacggaaaacatttagcgggtctctcttcttaatttaggactctgcatagtgattatcatcatgggatttgaggcaaactcttgggtgtgtttggtgtgtggaataaattggtccatcgtcatctcactctttagtttatttgtttgatttgtggaaagaatgagttatccatcgtcaccagctaataacataactagtacattcctcacaagctaatgacataactagtacgagtggcatctcatgatgcatcacctcatctaaactgggatgattccccaaaccaaacacaccattagggcttgttcggttagctctcaatccatgtggattgagtgggattggatgggtttgaatcccaaataagtcaaacttcttaagaattttttccaatcccatccaatccatgtgtatagggaataaccgaacaaggccttactgaaccaagctgttctatttaggtgatggagctgagctccagaatgccctgaaggagtggactggacagaggactgtcccaaatgtcttcatcaatgggaagcatattggcggctgtgatgatactatggcactgaacaatgatgggaagctggtgcctctgctgactgaggctggagccatcgccggttctgcctcgaagacaaccatcactgcttgacatgtgtgttaccattcccgtgcttaaaaataatgatgctttgcaagtgctgaacttgcagatgctatgtgggagtgactgttcgttccctgtgtaaaactccctagacatcagtcgagtcgtgttgctgtggtggttgtgaaatctacaataatcattgctacaataatgtcgtgttccctagacatcagatgagaaagatgagaagaaataacattataatcttattcgaactatcatctgtaagcttcttttgatacaatatttttatttatagattttaaaaacatttgtaggactaataaga

SEQ ID NO: 106802 - DNA, 919 bp, Zea Mays
aggcccgttcatgaaatctactcaagttttccggtattcggcccaatcgcgcattaaactgccgcccaaacccggctctggccaactctagggttgagataaaagaaatcttcaagtcattggcccgtgtaacgactttccatcgacccgccgcctgtagcccttcccgtctctggagtctggaagcttcttcctcctcgcctccgactccgtcatggccggcggcaacctgttcgggcgggcgctgagctacgtagtcaacgagctcctcgtcgagggcctcgccaacaaccgtgcattccagaggttcgctgtgaagaccaacaggactcttgagagcctatcgtctaaagctaaggaagtgagggaggagttatcggaacaattgaaggaagctcgtggccagaaagatcacttcaagcagtgaagctggttcccacatcgattcagcaagatgatactgacaatcttgttacgagtttagtccttgtctgggtactatttatgaatgacattctggatgtcattcaatggaaattagtcttaagtttctctgcacttagattagtagacgcagagcagttggtctcatgtcctttgtcataaactattgtataatttttaataatgtgtgcctatgttgatattttttcttgaagtgtgaaatgtagatttgaagaagaattggcttgccctaaaaactgatagaaaaaaactgaactattatcattcttgtgtcgtgcgtcgcccgtgcagtgggatccccagtcgtggcccatagcttgctcgatgggcctccatgtgcccctctgacacagcgctgttcgcgccctacctcgctccgtcccagcagtgcaggtcgacgctccctgcggggatatatctaaacttttccctctttgccatatgaaagagaaaa

SEQ ID NO: 106803 - DNA, 685 bp, Zea Mays
aggcccgttcatgaaatctactcaagttttccggtattcggcccaatcgcgcattaaactgccgcccaaacccggctctggccaactctagggttgagataaaagaaatcttcaagtcattggcccgtgtaacgactttccatcgacccgccgcctgtagcccttcccgtctctggagtctggaagcttcttcctcctcgcctccgactccgtcatggccggcggcaacctgttcgggcgggcgctgagctacgtagtcaacgagctcctcgtcgagggcctcgccaacaaccgtgcattccagaggttcgctgtgaagaccaacaggactcttgagagcctatcgtctaaagctaaggaagtgagggaggagttatcggaacaattgaaggaagctcgtggccagaaagatcacttcaagcagtgaagctggttcccacatcgattcagcaagatgatactgacaatcttgttacgagtttagtccttgtctgggtactatttatgaatgacattctggatgtcattcaatggaaattagtcttaagtttctctgcacttagattagtagacgcagagcagttggtctcatgtcctttgtcataaactattgtataatttttaataatgtgtgcctatgttgatattttttcttgaaaaaaactgatagaaaaaaactgaacta

SEQ ID NO: 106804 - DNA, 1710 bp, Zea Mays
ctctcttcgtctacaagagggacaccgccgcgccacctttcagtccccgtgcgccacgccacctgccagtactagctcgcccgctcgatcgcgcccatcaatcaatcaattctcgacctcactactcgatctcgtctcatcagtgtgagtgtccgagcacggcagcacgcgcaatggacgctctgctcgtgactacgaccttcctcgtccccgtggtggcgctcctcctcgggtccgggtccgggtccgcggcggcgctgccgcgcgccttcttcgtgttcggtgactccctcgtggacaacggcaacaacaactacctgatgacgacggcgcgcgccgacgcgccgccctacgggatcgacttccccacgcacatggccacggggcggttctccaacgggctgaacatccccgacatcatcagcgagcacctcggctcccagcccgcgctgccgtacctgagccccgacctccgcggcgcccagctcctggtgggcgccaacttcgcgtccgccggcgtcggcatcctcaacgacaccggcatacagttcgtgaacatcatcaggatcgggcagcagctgcgcaacttccaggagtaccagcagaggctggcggcgttcgtcggcgacgaggacgcggcgcggcaggccgtcagcgacgcgctcgtgctcatcacgctcggcggcaacgacttcgtcaacaactactacctggtgcccttctccgtccgctctcgccagtttgccatccaagactacgtcccctacctcatctccgagtacaggaagatcctcacgcggctgtacgagctcggggcccggcgcgtggtggtgacgggcaccgggatgatcgggtgcgtgccggcggagctcgccatgcacagcgtcgacggcgagtgcgcgcgcgacctcacggaggcggccgacctcttcaacccgcagctggtgcagatgctctcggagctcaacgccgacatcggcgccgacgtcttcatcgccgccaacaccaaccgggtcagcttcgacttcatgttcaacccgcaggactacgggttcgtgacgtccaaggtggcgtgctgcgggcagggcccctacaacgggatcgggctatgcacgccggcgtccaacgtgtgccccaaccgggacgtgtacgcgtactgggacgcgttccaccccacggagcgcgccaaccggatcatcgtcggccagttcatgcacggatccaccgaccacatcagccccatgaacatcagcaccatcctcgccatggacaacaggaactaggccctgcgcgtggcgtgcctcgacctccatccatccatccatccatctcaatcccagctggctagctgctaatctgccattgatccgtccgcgtccggacactggcagctatactacgactacgacgacacacatagctactgcatgcatgcgtaatactactagtataagttcgtgtcattggtaattggttatgttcatgaagcttcttttttgtggtttagattgacgtgaattgatggtgagaaattaatcctttattagagatgcatgggttcaatataatacagctgtatgtcaagtttctttgatccagcagattgtttggctggcaggggctagctataggaacttcagaaattagcaagtactggcactaccacctagtccgcccgatcgattaattcaagaaattaaatttgttgca

SEQ ID NO: 106805 - DNA, 829 bp, Zea Mays
agtccccgtgcgccacgccacctgccagtactagctcgcccgctcgatcgcgcccatcaatcaatcaattctcgacctcactactcgatctcgtctcatcagtgtgagtgtccgagcacggcagcacgcgcaatggacgctctgctcgtgactacgaccttcctcgtccccgtggtggcgctcctcctcgggtccgggtccgggtccgcggcggcgctgccgcgcgccttcttcgtgttcggtgactccctcgtggacaacggcaacaacaactacctgatgacgacggcgcgcgccgacgcgccgccctacgggatcgacttccccacgcacatggccacggggcggttctccaacgggctgaacatccccgacatcatcagcgagcacctcggctcccagcccgcgctgccgtacctgagccccgacctccgcggcgcccagctcctggtgggcgccaacttcgcgtccgccggcgtcggcatcctcaacgacaccggcatacagttcgtgaacatcatcaggatcgggcagcagctgcgcaacttccaggagtaccagcagaggctggcggcgttcgtcggcgacgaggacgcggcgcggcaggccgtcagcgacgcgctcgtgctcatcacgctcggcggcaacgacttcgtcaacaactactacctggtgcccttctccgtccgctctcgccagtttgccatccaagactacgtcccctacctcatctccgagtacaggaagatcctcacggtaaataatttaatcattcctctccaaaacaaaagacattaattacttgaagcaacaagaagatatgggtcgg

SEQ ID NO: 106806 - DNA, 1116 bp, Zea Mays
gatcatttctgctataattttctgtgacaaccagtttagggcctcttaactatattttcctcgatacgtttcgtttttgttctctgcttttgttatccttattcctcagtaaactaacgatgagacatgctgcaggatgttgtttctattgaagtacctatttcttctgcctgtccaagtgaacatattgatggatcgagatcaggtggtctgaattgtagctgtgataagcctagccctacttcaattcttgatgtatcatttgaagatagcaaccttaatggatctgaatcgtcaagaagcattccttgtagcaacgagagaattgccttacgatccgatgccaattgaatctgtcacgcgctcattatccatgggagggaggatatgagctcaccttcgcctttacttgattcgacaaacttaaccccaatctcaagcgtggacgacgatgaacttgaatgtgttgcctttgtacaaaagattgtatcatctgctgggctaggcgacctgcggttggatatggtcttcacaggctggtacttgcctgactgccctgtagaccctgcattgtgcgacaagctattggaccggaaggaggaggctgctaagtcgagggagcggaggtcgaaccaaaagcttcttttcgattacgtgaacatggcagtggtcgagattggccatgacaccttactatgcgcctacccctggaggcaggcgtgctccatggcctgggaggagaccctctctcaagctttggcggaggaagtgccacaccatatgagggattggctccatggatcaggaaagtttgcaggaaacgagaacgacaacgccggaacgttgttggagagagtcatgcggcaggaggtggaagggagaggctgggtgaaatccatgagatgggagttggatgagatcacagagcagattgcaggaaatgtgctggatgaaatagtggtagaagcattggatggtctcgggatttgttctccgtggccagaaatggccatggcaataccgaatctgtagtagtagcgattgctctgtgtatgagaaatgagaactgctcttaaaattattttgtgctggaaaaaaaaactctcgagcatctgc

SEQ ID NO: 106807 - DNA, 1433 bp, Zea Mays
gccactcccctagtggatggtagtagtagtactagctaactgtcatgctcctgtctctcagttagatttctttaggctttatggatctcagaggtcgcgtttatgatcagaagaaggcaatgatcaacttatttgacctcagcgcagggatgtctagcacaaacatgctcacagatcgagctcgtatagatggttctccagcgtgtagaagcaggcaagatgccaagagaacagttgatcctgctaaagtttataccaacgataaagtaggagctagtaactggagctcatccagaaataaatcaaatgtgtctccattgaatgtggcgttagaaaaggagatgtccaaggaattggaatcaaagaagaagtcaccaagtgtggttgccagattgatgggacttgaagaagatctacctggtcaagagccagcattaccttccactaaaagaaatttgaagaaaagacacctaaatggcaacttggtcaaaacaaacaatctccatcgacatcaagagcagtaccattccagtatgacaacatgcgacaaacacataggacccaaagaaacagttgaatttaaggatgtttatgaagtcagtgaagaaccattgagaacataccattttcaggaccaaacttttcctagggaaatgtcttccaggagcaagagagacataaggatggaaattgttcgtcagaagttcatggaagcaaagcgtcttgctacagatgagaaactcctgcattcaaaggagtttcaagaagctcttgaggttctaagttctaacagagatttgttccttaagtttcttgaggaaccaaactctactttctcaaagcagctagctggacttcacagaagcccatcaccacctcagacaaagcgtattactgtgttgaaaccaactaaatttgttgagagcgattgcagaagggaaatcagaacacacagaataaatgaaggaaatgaacacgtgatgcggaggacacactggagatctcattcagcagaagataccttatcccagccaactaggatagtggtcctgaagcctagtcctggcaagcctagcagaacaatggctaggctaacaaccgaagcagccccagctcagttcgctgagcagataggtttttatggaggtttagaaggtcacaattacccatcagatgctctacatcggcgggatgagtctttattatcttctgtatactcaaatggctatggtggagatgaaagttctttcggcagatcagaagttgactacattgatgaagaagatagtaacctaagtgactcggagatcgttagcccagtaccgccgctgcattcatgggatcacttcaaaagatacagcagtcctcactcaggttcaacttttagcagaacatctcggtcgcccgagtcatctgtgatcacggaaagctaa

SEQ ID NO: 106808 - DNA, 1396 bp, Zea Mays
cgcgtcgcgccccgcgccccgcgccggcgaatgctccggctctcctcgccgcagaggtcgcgtttatgatcagaagaaggcaatgatcaacttatttgacctcagcgcagggatgtctagcacaaacatgctcacagatcgagctcgtatagatggttctccagcgtgtagaagcaggcaagatgccaagagaacagttgatcctgctaaagtttataccaacgataaagtaggagctagtaactggagctcatccagaaataaatcaaatgtgtctccattgaatgtggcgttagaaaaggagatgtccaaggaattggaatcaaagaagaagtcaccaagtgtggttgccagattgatgggacttgaagaagatctacctggtcaagagccagcattaccttccactaaaagaaatttgaagaaaagacacctaaatggcaacttggtcaaaacaaacaatctccatcgacatcaagagcagtaccattccagtatgacaacatgcgacaaacacataggacccaaagaaacagttgaatttaaggatgtttatgaagtcagtgaagaaccattgagaacataccattttcaggaccaaacttttcctagggaaatgtcttccaggagcaagagagacataaggatggaaattgttcgtcagaagttcatggaagcaaagcgtcttgctacagatgagaaactcctgcattcaaaggagtttcaagaagctcttgaggttctaagttctaacagagatttgttccttaagtttcttgaggaaccaaactctactttctcaaagcagctagctggacttcacagaagcccatcaccacctcagacaaagcgtattactgtgttgaaaccaactaaatttgttgagagcgattgcagaagggaaatcagaacacacagaataaatgaaggaaatgaacacgtgatgcggaggacacactggagatctcattcagcagaagataccttatcccagccaactaggatagtggtcctgaagcctagtcctggcaagcctagcagaacaatggctaggctaacaaccgaagcagccccagctcagttcgctgagcagataggtttttatggaggtttagaaggtcacaattacccatcagatgctctacatcggcgggatgagtctttattatcttctgtatactcaaatggctatggtggagatgaaagttctttcggcagatcagaagttgactacattgatgaagaagatagtaacctaagtgactcggagatcgttagcccagtaccgccgctgcattcatgggatcacttcaaaagatacagcagtcctcactcaggttcaacttttagcagaacatctcggtcgcccgagtcatctgtgatcacggaaagctaa

SEQ ID NO: 106809 - DNA, 1314 bp, Zea Mays
cacggaccagagctctagtctgcactccgcaggcaggcaagcacgcaaagctgccggcgtcctgagatggcggcgacccttcccgttccctacgccctacggctacgcgcccctcttcccatgtcgcggcgaattccccgtaagccatcattctcctgtaacagggcatgccgcgccggcgtccgctgctccgccgcaaacaagccctcccctcctcccccgaccactccggatagcagcgagctccattgcgaagatacggagtgaggtcctctccccgttccggtcggtgcggatgttcttctacctcgcgttcatggccagcggcacgctggggggcctcatcgcgctcacgcggctcctcccggcgctgtccgggtccgaccccgcgagcgcggccagcacgctcaagggcctgggcatcgacgtcgcggccgtctcgctcttcgccttcctctactcgcgcgagagcaaggccaaggacgcccaggtggccaggctcgcgcgggaggagcgcctgtccaggctcaggctccggctccgcgccggcgccgccgagggcgcgggtagcagcaggccgttcacgctcggcgagctgcggggcactacgcggctcgtcatcgtggcggggcccgccgagttcgtcgccgagtcgttccgcaggagccagccgttcctgcgggagctcgcggagagggccgtgctggcggtgcccttcgccacggacggcagcacgcccgagctgcggctggacgatgggggcgacgacgaggacggcgtcgacgacgacgttgccaggaggagcaagaggctgtggcagctcactccggtgttcacgaccgaatgggcgcaatggttagacgaccagaagaagctggccggcgtgccatctgattcccccgtgtacctctccctccgaatggacgggcgcgtccgcggcagcggcgtggggtacccgccgtggcaagcgttcgtggcgcagctaccgccggtgaaagggatgtggtcgggtcttcttgacgggatggacggcagggtgctctaggccaacaacgtgataattgataaggacccccatttttgccgtgcctagtttagctagatgtaaccggtgcttataaggatgttttacttgcttgtccataagcagagttgaaattgagaaattaagcactacttgtatagtaattacagtaccacaatagcacgtggacgtaaaaccaaagacatcatgtgtattggcaatcttcctgtatgctacacgcctatacccgctgtaaattcgctacccacctaagagcttgtttggtttgt

SEQ ID NO: 106810 - DNA, 1454 bp, Zea Mays
ccttttgggagacacggaccagagctctagtctgcactccgcaggcaggcaagcacgcaaagctgccggcgtcctgagatggcggcgacccttcccgttccctacgccctacggctacgcgcccctcttcccatgtcgcggcgaattccccgtaagccatcattctcctgtaacagggcatgccgcgccggcgtccgctgctccgccgcaaacaagccctcccctcctcccccgaccactccggatagcagcgaggtaaggtagccaccgccaccagcttgtttctgctcatcagcgcgtagcaaaccatggctagctcttgagtccttatcatccgggtgaaccggcaccggcctgctcatgcgtgcatgtcgtcgccgcagctccattgcgaagatacggagtgaggtcctctccccgttccggtcggtgcggatgttcttctacctcgcgttcatggccagcggcacgctggggggcctcatcgcgctcacgcggctcctcccggcgctgtccgggtccgaccccgcgagcgcggccagcacgctcaagggcctgggcatcgacgtcgcggccgtctcgctcttcgccttcctctactcgcgcgagagcaaggccaaggacgcccaggtggccaggctcgcgcgggaggagcgcctgtccaggctcaggctccggctccgcgccggcgccgccgagggcgcgggtagcagcaggccgttcacgctcggcgagctgcggggcactacgcggctcgtcatcgtggcggggcccgccgagttcgtcgccgagtcgttccgcaggagccagccgttcctgcgggagctcgcggagagggccgtgctggcggtgcccttcgccacggacggcagcacgcccgagctgcggctggacgatgggggcgacgacgaggacggcgtcgacgacgacgttgccaggaggagcaagaggctgtggcagctcactccggtgttcacgaccgaatgggcgcaatggttagacgaccagaagaagctggccggcgtgccatctgattcccccgtgtacctctccctccgaatggacgggcgcgtccgcggcagcggcgtggggtacccgccgtggcaagcgttcgtggcgcagctaccgccggtgaaagggatgtggtcgggtcttcttgacgggatggacggcagggtgctctaggccaacaacgtgataattgataaggacccccatttttgccgtgcctagtttagctagatgtaaccggtgcttataaggatgttttacttgcttgtccataagcagagttgaaattgagaaattaagcactacttgtatagtaattacagtaccacaatagcacgtggacgtaaaaccaaagacatcatgtgtattggcaatcttcctgtatgctacacgcctatacccgctgtaaattcgctacccacctaagagcttgtttggtttgt

SEQ ID NO: 106811 - DNA, 1331 bp, Zea Mays
ccttttgggagacacggaccagagctctagtctgcactccgcaggcaggcaagcacgcaaagctgccggcgtcctgagatggcggcgacccttcccgttccctacgccctacggctacgcgcccctcttcccatgtcgcggcgaattccccgtaagccatcattctcctgtaacagggcatgccgcgccggcgtccgctgctccgccgcaaacaagccctcccctcctcccccgaccactccggatagcagcgaggtaagctccattgcgaagatacggagtgaggtcctctccccgttccggtcggtgcggatgttcttctacctcgcgttcatggccagcggcacgctggggggcctcatcgcgctcacgcggctcctcccggcgctgtccgggtccgaccccgcgagcgcggccagcacgctcaagggcctgggcatcgacgtcgcggccgtctcgctcttcgccttcctctactcgcgcgagagcaaggccaaggacgcccaggtggccaggctcgcgcgggaggagcgcctgtccaggctcaggctccggctccgcgccggcgccgccgagggcgcgggtagcagcaggccgttcacgctcggcgagctgcggggcactacgcggctcgtcatcgtggcggggcccgccgagttcgtcgccgagtcgttccgcaggagccagccgttcctgcgggagctcgcggagagggccgtgctggcggtgcccttcgccacggacggcagcacgcccgagctgcggctggacgatgggggcgacgacgaggacggcgtcgacgacgacgttgccaggaggagcaagaggctgtggcagctcactccggtgttcacgaccgaatgggcgcaatggttagacgaccagaagaagctggccggcgtgccatctgattcccccgtgtacctctccctccgaatggacgggcgcgtccgcggcagcggcgtggggtacccgccgtggcaagcgttcgtggcgcagctaccgccggtgaaagggatgtggtcgggtcttcttgacgggatggacggcagggtgctctaggccaacaacgtgataattgataaggacccccatttttgccgtgcctagtttagctagatgtaaccggtgcttataaggatgttttacttgcttgtccataagcagagttgaaattgagaaattaagcactacttgtatagtaattacagtaccacaatagcacgtggacgtaaaaccaaagacatcatgtgtattggcaatcttcctgtatgctacacgcctatacccgctgtaaattcgctacccacctaagagcttgtttggtttgt

SEQ ID NO: 106812 - DNA, 1609 bp, Zea Mays
cacggaccagagctctagtctgcactccgcaggcaggcaagcacgcaaagctgccggcgtcctgagatggcggcgacccttcccgttccctacgccctacggctacgcgcccctcttcccatgtcgcggcgaattccccgtaagccatcattctcctgtaacagggcatgccgcgccggcgtccgctgctccgccgcaaacaagccctcccctcctcccccgaccactccggatagcagcgaggtaaggtagccaccgccaccagcttgtttctgctcatcagcgcgtagcaaaccatggctagctcttgagtccttatcatccgggtgaaccggcaccggcctgctcatgcgtgcatgtcgtcgccgcagctccattgcgaagatacggagtgaggtcctctccccgttccggtcggtgcggatgttcttctacctcgcgttcatggccagcggcacgctggggggcctcatcgcgctcacgcggctcctcccggcgctgtccgggtccgaccccgcgagcgcggccagcacgctcaagggcctgggcatcgacgtcgcggccgtctcgctcttcgccttcctctactcgcgcgagagcaaggccaaggacgcccaggtggccaggctcgcgcgggaggagcgcctgtccaggctcaggctccggctccgcgccggcgccgccgagggcgcgggtagcagcaggccgttcacgctcggcgagctgcggggcactacgcggctcgtcatcgtggcggggcccgccgagttcgtcgccgagtcgttccgcaggagccagccgttcctgcgggagctcgcggagagggccgtgctggcggtgcccttcgccacggacggcagcacgcccgagctgcggctggacgatgggggcgacgacgaggacggcgtcgacgacgacgttgccaggaggagcaagaggctgtggcagctcactccggtgttcacgaccgaatgggcgcagtacgaaactaacaagcacaaccttgtgacgcctttgtcaatccataacttaatttgattactctccagttgatcgccactttcgtgcatctgatgcagatggttagacgaccagaagaagctggccggcgtgccatctgattcccccgtgtaagcacctcgaaacttgcctggtttcccaacgtcgttgttctcaagatttcttatgatctttaccatccgatgtcgtcgacgctgcgttgcaggtacctctccctccgaatggacgggcgcgtccgcggcagcggcgtggggtacccgccgtggcaagcgttcgtggcgcagctaccgccggtgaaagggatgtggtcgggtcttcttgacgggatggacggcagggtgctctaggccaacaacgtgataattgataaggacccccatttttgccgtgcctagtttagctagatgtaaccggtgcttataaggatgttttacttgcttgtccataagcagagttgaaattgagaaattaagcactacttgtatagtaattacagtaccacaatagcacgtggacgtaaaaccaaagacatcatgtgtattggcaatcttcctgtatgctacacgcctatacccgctgtaaattcgct

SEQ ID NO: 106813 - DNA, 4870 bp, Zea Mays
cccacctcacccctcccgccccctccctcctcagatccggccatctcctgcccgcctcgccgccggtcccgcggcccggaaccctaaagctcacccccgtggcggtgcccccggtcgcgtggggagaatggaggcggcgctggaggcggcgcgcgccaaggacaccaaggagcgcctggccggggtcgagcggctgcacgaggcgctcgacgccgcggcgcgccgcgggctgaccgcggccgaggtcaccgcgctcgtggacacctgcatggatctgacgcgggacgccaacttccgcatcgcccagggcggcctccaggcgctctccgccgccgccgtcgtcgccggcgaccacttcaagatccatctcaacgccctcgtcccggccgccgtcgaacgcctcggcgacggcaagcagcccgttcgcgacgccgcgcggcagctcctcattactctgatggaggtttcttcaccaacaatcatagttgaaagagctggtagttatgcatggactcataagagttggagggtgcgggaagagtttgtacgtacggtggcaactgcaattgggctatttgcttctactgagatttccttgcaacgggttttgctttcacctgtcctgcaattgatgaatgattcgaaccaaagtgtccgagatgctgctatctattgtattgaggagatgtacaaacacatgggatcacaatttcatgaagagttgcagcgccataatctgccttcatatatgctaaaagaaataaattcgagattggataaaatagaaccaaaggttcgatcatctgatacagcaatgcagtataaggctgtagagtctagatctgttagtgccaatcccaaaagaggcagtccaaggacaaaaagcacaccaagggaaagtacactatatggaggtgacaccgatgttacagaaaaccctgtggaaccagtaaaagttcattctgagaaagaattacttcgggaatttgagaagatcgcagctaccctttctccagaaaaggattggtctttacgtattgctgccttgcaaaggattgaagccctggtttatggaggtgccattgattatccatcatttcttatgctcttgaagcaactggttcctccattgtctaatcagctgtgtgatcgacgttctagtattgtcaaacaggcatgccacctacttaatatactatccaaagaactgctcggtgattttgagccatgtgctgaactattcatcccgatgctttttaagcttgttgtcataaccgtgcttgtgatcgctgaatctgcagatacatgcataaaaactattctgcggaattgcaaggttgctaggattcttcctcgcatagttgacacagcaaagaatgaccggagtgcaatcctccgtgcaaggtgctgtgagtatgcacttctgatactggagtattgggctgatgcctcagaaatacaacgttcagctgatttatatgaggatatgataaaatgctgtgtcgcagatgcgatgagcgaggttagggcaactgcaagaacttgctatagaatgtttgcaaagacatggcctgagcgttcacgccgtctttttatgttatttgatcctgcgatacagaggataataaacgatgaagatggtggtgtgcataaaagatatgcttctccctcattgcgtgatagggttgtgcaaccttcacgtgcttcctctcattcaagtggtacatatgtacctggatatggcacttcagctattgttgcaatggacaagagtgcagctatttcttcagattcatcttttccatcaaccaatcttcggttatcacagtcaaagacgattggcagaagttctgagagaagcctggagagcgtgcttagctccagtaaagaaaaagtttctgccattgaaagtttgctgaaaggtgtcagcatgtcagggcaaaatttctctgctgcacgctcaacaagtttggatcttggagttgatcctccatcatctcgtgatcctcctgtgctgcttgcagcaccagcatcaaatgttctatcattgcagaactcagcactgttggactcatcccttcctaccatcccacctagttcgcgaaatggaggttcccgcttattggaaacgatgacaacacacttgcccaccaaagaaagatcaaggtcaccatacttgagtaatatgtcatctgagtccatgtctggcttatcactgccttactcaagaagatcttcggagaggcttcaagaaggaggccgcatggatgagagctatgatatccgttcaactaggcgaatgcctcaaatgcacttcgacagaaactatgttgatatgccttacagggatgccagccacagagattcacataacaacaatgtcccaaattttcagagacctcttctaaggaaacaagtaatgtcaagggcttctgcaagtggcagacacagctttgatgatagtcatgtaccatcaggtgacgtgcctagctatacagattctctggcttctctaaatgatgcactttctgagggtctcagccctagttctgactgggtagcaagagtttcagctttcgagtttattagaaatttattgaaacaaggccagaaaggcattcaagaaattactcagaattttgagaaggttatgaagctgtttttccgtcatttggatgatcctcaccataaggttgcacaggcagctttctctacacttgcagagattatcccagcttccaagaagccatttgaaagttatgtagagcgaattctaccttatgtattttcacggcttattgatccaaaagagttggtgaaaaaaccatgctccataacattggaggttgttggtcgaacatatgctattgatatgttactacctgcactagtacgctcattagatgaacagagatctccaaaggcaaaattggccgttcttgagtttgcaaataaatcattcagcaagtacactgtggactctgatggttatagtaacagtggcttccttaaactatggctttcaaaattggcacctttggtaaatgaaaagaatgcaaaattaaaggaggcatctatttctggtatcatatccgtttattctcattttgattcaacagcagtgctaaattttattctcagtttgtcagttgaagatcaaaacctcttgaggagagctctgaagatcaaaacccctcgtatcgaggttgatctggtgaactacttgcagagcaagaaagaacgtccacgccccaaatcttatgaccaggtggattttggaacttcggaggatggctatgcactgacatccaagaagagctatccatttggacggttttcttctagttcccttgatgctgaagggggaaagatgatcagttcgatgcacgaaccagtgctgcataatgtttctataggtcgaacaacttctgatatgagcatggatcatgctattcaaagtttggagtcatctacaggagctgaagttcatttaactaggagtagggaaccaaagaataacattaactcagttgtggaagctgctcgctcttggacaaactacactgaaaaaactgatgcctctttagatggtgaaactgctaccagtactcctcggttagatgtcagccggtttgtaacttctgatgggcataatactgttggctcaaccactgaagaaagtgttcaagagggtgatatgattgtgaatcttagttctataaagaccagccttcaaatggacaacggtctgagcgtaccacaacttctctatcagataagcaatgacactgaagtttcaagctcagaaaagcgggaagcactacaacaattggtcgatgcttccctcgataacaacagctccatttgggcaaagtacttcaatcaaatcttaaaggttgtgcttgaagtattagatgactctgattcatccatgagggagcttgctttatctttgattactgagatgctcaactaccagaaagatgcaattgaagactctatggagattgtttttgaaaaactcctgcatgtgaccaaagatgctgtggccaagatttcaaatgaggcaaaccaatgcttaaatgttctattggcaaaatacaaccctttcacatgtcttgctattactgtacctttattggtcagtgatgatgagaagatgcttgttgtgtgtatcaactgcttgacaaagcttgttggacgcctttctcaagaggaattgattgttcaattgcctacatttctgccagcattatttgatgcttttaacaaccaaagtccagatgtccgaaagactgttgtgttctgtctggtggatatctacatcatgcttgggaaagcatttgctccatacttggaagggcttagcagcacgcagctccgcctagtaaccatctacgctaaccggatttcacaggcgaggtccggcaagccaatcgattctaaccaatgaggttgtaacattgttattatttgtggtctatatgagcatttctccggtagggtggttttcttgtcatttgtttgtgtatgtgtatagtataaacaagcgcctcccatctgttaagagctcctggtttttgccctgtgtgattatgcattccctctttacgccttttcctctcttttccccctttggtagcttgtggagagtgctaatgagtgtggcttcatttgtactacttggtacatactctgtacaaagaaaggaaagtgtagtttcgtggagaacagttatgcaagtgatttttttgacgccattttccttggcgggatgacagtttgccggcctgtttgtggtgaaatatggcaaaactgttatgtattctcttcttcagctcgatcacttctcttcgtattacgtctgtta

SEQ ID NO: 106814 - DNA, 1456 bp, Zea Mays
cccacctcacccctcccgccccctccctcctcagatccggccatctcctgcccgcctcgccgccggtcccgcggcccggaaccctaaagctcacccccgtggcggtgcccccggtcgcgtggggagaatggaggcggcgctggaggcggcgcgcgccaaggacaccaaggagcgcctggccggggtcgagcggctgcacgaggcgctcgacgccgcggcgcgccgcgggctgaccgcggccgaggtcaccgcgctcgtggacacctgcatggatctgacgcgggacgccaacttccgcatcgcccagggcggcctccaggcgctctccgccgccgccgtcgtcgccggcgaccacttcaagatccatctcaacgccctcgtcccggccgccgtcgaacgcctcggcgacggcaagcagcccgttcgcgacgccgcgcggcagctcctcattactctgatggaggtttcttcaccaacaatcatagttgaaagagctggtagttatgcatggactcataagagttggagggtgcgggaagagtttgtacgtacggtggcaactgcaattgggctatttgcttctactgagatttccttgcaacgggttttgctttcacctgtcctgcaattgatgaatgattcgaaccaaagtgtccgagatgctgctatctattgtattgaggagatgtacaaacacatgggatcacaatttcatgaagagttgcagcgccataatctgccttcatatatgctaaaagaaataaattcgagattggataaaatagaaccaaaggttcgatcatctgatacagcaatgcagtataaggctgtagagtctagatctgttagtgccaatcccaaaagaggcagtccaaggacaaaaagcacaccaagggaaagtacactatatggaggtgacaccgatgttacagaaaaccctgtggaaccagtaaaagttcattctgagaaagaattacttcgggaatttgagaagatcgcagctaccctttctccagaaaaggattggtctttacgtattgctgccttgcaaaggattgaagccctggtttatggaggtgccattgattatccatcatttcttatgctcttgaagcaactggttcctccattgtctaatcagctgtgtgatcgacgttctagtattgtcaaacaggcatgccacctacttaatatactatccaaagaactgctcggtgattttgagccatgtgctgaactattcatcccgatgctttttaagcttgttgtcataaccgtgcttgtgatcgctgaatctgcagatacatgcataaaaactattctgcggaattgcaaggttgctaggattcttcctcgcatagttgacacagcaaagaatgaccggagtgcaatcctccgtgcaaggtaaatgtgtttgactgttttcacattgtccattggtttcttgccagttttt

SEQ ID NO: 106815 - DNA, 487 bp, Zea Mays
ctgtgacgactgatgacaacataaaacccgtggttgaatacgctattacgcccaattactagatcgcgcgtatgctctgctttgtaaacatgtagaccaccaatcctacattgtttttgttcttcctattatgcttttacgatgatttgaattggtccttttcaaaacaatgcacccccagtacttatacttgttctgatgtgtctttatgctttatacaggcttacacagacctgttttgataagagctgagcagcaatgcttccatttcggaccacgaccttagctaaaggctaatggttcgaaatgtctgaagtaccgaagacagggctagctcctcgttttttgtcatgtcaaataaattgtgtatgattgcaacaatattggcaaaatatcgttgtactttatattttgatatactgtgaacaaaacaagtgccctatgagaccatcgtgatttatgcattttcaaactaaattttacgaca

SEQ ID NO: 106816 - DNA, 1530 bp, Zea Mays
atgctgcgagccgccatccccactgaagtccgaccagcgcctcgtcgaggtcttcacccccttcctcgagaattcctcgagaagctcatacgcctaccggatctcacagcctccgcatatgacttgatgagcgagtcaaaggggcgcgacggcgaggaggggaggaggtggagcgcgcggaggaagcagacgaggagcgggagtggagggaaggacgcgacgaggcgggaggccgtggggagcgagagcgggaggtggaggcggctgagagggagcggaggcaagcgcgtggaagcgttgaggagagccgcgaggtgcgcgtggtggacgtggctactgcacgcctccgccgtcgcttgtcgcgtggaggcggaggcggctgccgtattcttcaggcccccgccggtaggagtactaccccctgctccggcgcctgcagtggaaggcaaggagaaggtcaacggtagctggatctggcgagcacgtgaccgcaccccgtctgcggccaggcggtgcccagatccgtttcgatttgcaaccctgcgagtaagatctggttattaagcacgaattgtacatcagcttgcaagtgccaggttcattcggatgttaaagtggcccctacatcggacttcaagggcagtagcaaatctgaaacttggaggatcaagacgctctacgttcgttgatgcctgtgtgacgaccatgtgtttaactgttcttagtctgctgctttgatgactgcaaggttctaatttacctctgtcaggccctactggatctctaatgtgcggataatattgttcttagctgataaacacatgccttttattaacatagtatttctttctaaattactgattttctcacccaagtttaattagttggtttcggcagaggggagagaacatttaagaacacatgcctttttacttcatgttataatttgtaggcatgccatgttcagtgaccgcatgaattgaggtggacagtaaggagtgtctacatcagcggtacttcagcaaggaatactctgaatttctggatgagtttatggccgcagttaggcagaactatggacaaaaggtccttgtccagttcttgcagggattattgctgctctgaagtctgttggtgggactctagctgatcatacattcttgttcttcagtgtgagttatacgatcaagtgactagtgatgtgatttgccatggtgagaaaacttcttacaagatgggcgcaagagctttcctagtggccattctcgcttacacagacctgttttgataagagctgagcagcaatgcttccatttcggaccacgaccttagctaaaggctaatggttcgaaatgtctgaagtaccgaagacagggctagctcctcgttttttgtcatgtcaaataaattgtgtatgattgcaacaatattggcaaaatatcgttgtactttatattttgatatactgtgaacaaaacaagtgccctatgagaccatcgtgatttatgcattttcaaactaaattttacg

SEQ ID NO: 106817 - DNA, 1662 bp, Zea Mays
cgcaaacacgcacgcacaccgtacccctcagctcgcgccaccggccaccgcacacagaacgcgtgctccgtccgtcctccctctgcctcgcgcgcgcagggttagcgtgagctgatcgagcaacgagagctagctagctagaggacacgacacgatggccttgcaggtcaccggcggcgtgggctgctgctgccctccgggcagtgcccggcggttgccgcaagcggcggcgctgtgtcgcccgccccgcgcggtagtgtccggcgcaaccagggtggtggaggaggacgagggcaaggtgaggctgggcggctcaggcgtcgcggtcaccaagctcggcatcggcgcgtggtcctggggcgacaccacctactggaacgactccgagtgggatgacaggagactgagggaagcacaggacgcgttcgatgcgagcatcgataacgggatgaccttcttcgatactgcagaagtttacggtacagcactgatgggagcagtcaattctgaaactttactaggaggattcatcaaggaaaggcaacagaaggaccagatcgaggtgtccgttgcaacaaagttcgctgcccttccttggagatttggaaggggtagcgttctttcggcgctgaagaaatcgctagaccgtctaggcctagcgtctgtcgagctctatcaactccactggccagggatttgggggaacgaaggtacccgatgcagcatacgtaccctttgcgaaagctaaaatctgatcgactagtcagtgaactccgctgttctgatttttactgagcatacatggtgcaggatatcttgatggtctcgcggatgcttatgagcaaggcctagtcaaggctgttggagtctcaaactacaatgagaagcgccttcgggatgcacatgctcgcctgaagaagcggggggttccacttgctgcaaaccaggtgaactacagcctcatatatagaacccctgagttgaatggcgtgaaagcagcatgtgatgagctcggcatcaccttgattgcttattccccgatagcgcaaggtgttctgacaggtaagtacactccagaaaacccccctactggtcctcgagcaaacacatacacccctgagttcctcgccaagctccaaccacttatgaacaggattaaagagatcggagcaagctatggcaagagtccaacccaggtgtctctgaactggctgacctgccaggggaacgtggtgccaatccccggagccaagaatgccagccaggccaaggagttcgccggtgcactcggctggagcctgacgggggacgaggtggaagagctacggactctggcacgcgagatcaagggcatcaggatgcccatcgaggagtcgtagatactctgtatttcaccaacccatgtcgtagcaggcgctgacggagaagacgacgcaaggatctagaaataaaccaggttgtgtaagtagaatagcttccaacgaatctcaggcctaagcattgtaagtatgcaatattcatttgccgaaaccagggctgtacctctgctgcctgttctctgctgaaaaaaaagttaggatggaaagatagagactattgtgccgcaaaacaacacaaaggaaattactgaaaatgaaagaaaagttacaacctgtccatttg

SEQ ID NO: 106818 - DNA, 1562 bp, Zea Mays
cgcaaacacgcacgcacaccgtacccctcagctcgcgccaccggccaccgcacacagaacgcgtgctccgtccgtcctccctctgcctcgcgcgcgcagggttagcgtgagctgatcgagcaacgagagctagctagctagaggacacgacacgatggccttgcaggtcaccggcggcgtgggctgctgctgccctccgggcagtgcccggcggttgccgcaagcggcggcgctgtgtcgcccgccccgcgcggtagtgtccggcgcaaccagggtggtggaggaggacgagggcaaggtgaggctgggcggctcaggcgtcgcggtcaccaagctcggcatcggcgcgtggtcctggggcgacaccacctactggaacgactccgagtgggatgacaggagactgagggaagcacaggacgcgttcgatgcgagcatcgataacgggatgaccttcttcgatactgcagaagtttacggtacagcactgatgggagcagtcaattctgaaactttactaggaggattcatcaaggaaaggcaacagaaggaccagatcgaggtgtccgttgcaacaaagttcgctgcccttccttggagatttggaaggggtagcgttctttcggcgctgaagaaatcgctagaccgtctaggcctagcgtctgtcgagctctatcaactccactggccagggatttgggggaacgaaggatatcttgatggtctcgcggatgcttatgagcaaggcctagtcaaggctgttggagtctcaaactacaatgagaagcgccttcgggatgcacatgctcgcctgaagaagcggggggttccacttgctgcaaaccaggtgaactacagcctcatatatagaacccctgagttgaatggcgtgaaagcagcatgtgatgagctcggcatcaccttgattgcttattccccgatagcgcaaggtgttctgacaggtaagtacactccagaaaacccccctactggtcctcgagcaaacacatacacccctgagttcctcgccaagctccaaccacttatgaacaggattaaagagatcggagcaagctatggcaagagtccaacccaggtgtctctgaactggctgacctgccaggggaacgtggtgccaatccccggagccaagaatgccagccaggccaaggagttcgccggtgcactcggctggagcctgacgggggacgaggtggaagagctacggactctggcacgcgagatcaagggcatcaggatgcccatcgaggagtcgtagatactctgtatttcaccaacccatgtcgtagcaggcgctgacggagaagacgacgcaaggatctagaaataaaccaggttgtgtaagtagaatagcttccaacgaatctcaggcctaagcattgtaagtatgcaatattcatttgccgaaaccagggctgtacctctgctgcctgttctctgctgaaaaaaaagttaggatggaaagatagagactattgtgccgcaaaacaacacaaaggaaattactgaaaatgaaagaaaagttacaacctgtccatttg

SEQ ID NO: 106819 - DNA, 1586 bp, Zea Mays
cgcaaacacgcacgcacaccgtacccctcagctcgcgccaccggccaccgcacacagaacgcgtgctccgtccgtcctccctctgcctcgcgcgcgcagggttagcgtgagctgatcgagcaacgagagctagctagctagaggacacgacacgatggccttgcaggtcaccggcggcgtgggctgctgctgccctccgggcagtgcccggcggttgccgcaagcggcggcgctgtgtcgcccgccccgcgcggtagtgtccggcgcaaccagggtggtggaggaggacgagggcaaggtgaggctgggcggctcaggcgtcgcggtcaccaagctcggcatcggcgcgtggtcctggggcgacaccacctactggaacgactccgagtgggatgacaggagactgagggaagcacaggacgcgttcgatgcgagcatcgataacgggatgaccttcttcgatactgcagaagtttacggtacagcactgatgggagcagtcaattctgaaactttactaggaggattcatcaaggaaaggcaacagaaggaccagatcgaggtgtccgttgcaacaaagttcgctgcccttccttggagatttggaaggggtagcgttctttcggcgctgaagaaatcgctagaccgtctaggcctagcgtctgtcgagctctatcaactccactggccagggatttgggggaacgaaggatatcttgatggtctcgcggatgcttatgagcaaggcctagtcaaggctgttggagtctcaaactacaatgagaagcgccttcgggatgcacatgctcgcctgaagaagcggggggttccacttgctgcaaaccaggtgaactacagcctcatatatagaacccctgagttgaatggcgtgaaagcagcatgtgatgagctcggcatcaccttgattgcttattccccgatagcgcaaggtgttctgacaggtaagtacactccagaaaacccccctactggtcctcgagcaaacacatacacccctgagttcctcgccaagatgcgccatgtcatgtatgtacagctccaaccacttatgaacaggattaaagagatcggagcaagctatggcaagagtccaacccaggtgtctctgaactggctgacctgccaggggaacgtggtgccaatccccggagccaagaatgccagccaggccaaggagttcgccggtgcactcggctggagcctgacgggggacgaggtggaagagctacggactctggcacgcgagatcaagggcatcaggatgcccatcgaggagtcgtagatactctgtatttcaccaacccatgtcgtagcaggcgctgacggagaagacgacgcaaggatctagaaataaaccaggttgtgtaagtagaatagcttccaacgaatctcaggcctaagcattgtaagtatgcaatattcatttgccgaaaccagggctgtacctctgctgcctgttctctgctgaaaaaaaagttaggatggaaagatagagactattgtgccgcaaaacaacacaaaggaaattactgaaaatgaaagaaaagttacaacctgtccatttg

SEQ ID NO: 106820 - DNA, 321 bp, Zea Mays
atgggatttgagggactcataaatgactctatgccacccaaggatcctgaagagggaggtgaaaattgtgaaggcaatgcagatccagaaagcctttctgacattgacgatgcagaggctgatgggtaccttcacaatgaggaagaaacacaatataaaaagattatctgggaggaaatgaacaaagagtaccttgaggaacaagcagccaaggaagctttggcagctgaattggcagctacagggattgatccagaagcgggaaagaaagtaaggaacaattttgggcaacaaaacttcctgtttaactttggcaactga

SEQ ID NO: 106821 - DNA, 342 bp, Zea Mays
atgagcgcgccgtgctcccgcgccagcaggatgccgctgttgccgaccacggcgcacgacgcgtacggccgccgcccgtcgtcgctgtccgtcgccccggcgccgacgccgtagtgccaccggtcgagggggcgcttgatgaggtccacgagctcggccatcacctggggctcgaaccgctgcctgccgagccactcgcggaggccgcgcaccgcggcgtcccggcgctccgggggagccctcgtcaggttcccctccagcaacctctcggcggcccgcagcactgccgacgcggccgggtccgcggccgcgagctccgcgagcgtggcgtccacggcgtag

SEQ ID NO: 106822 - DNA, 861 bp, Zea Mays
gagggtagcgtcttcgccttcgccccaacaagctgcaatagctcatggttcatgcattccaccaagcctaagcgtgcacgcttctcttctaatgccctattgcaatccataagctcatgttacaatagacaacaaaagtagaacacttcaaaactcaaattcgttgtgcaatctgtaacaccctgaatttgagggtataaaatttcttttctaatatccaccaaattcaggtgttactctctcagttcttcgctttcttttctcttttccctaaaaatggagaattattttgttttatattagcgtaaacctagtggaatgagccctagaggcactttggttgttgcattcatgccgttgcatggtgtttctaagtgcaaaatgtgtttgaaacatgttaacatatcttatagaagcactcggtaaattttcatatttttcggaatatttttctattttccggaaaccaaaaactatttatttgtggaacttaaaaatatttttagaaattctaattatgttttttgagttcattaggtgtcaaaacatttataggaatttttctggaatttttgaaagtatctataatattttgagcacaaaatatggatttctaagctttttcgaattttaaaaatagtaaaatccgaattttaactggatttttatctcgtccaaaccctaggtatatatatatgtccggcttcatctcgtcgagcccgttacagaacaccaaacgtttcccccaaatccaatccctagctcccggtattgctcgccgaagttcggggcggttccaactccggcgacaactccggcgagcaattactcccaatccgtgcatcgtctgcggaatccgag

SEQ ID NO: 106823 - DNA, 450 bp, Zea Mays
atgcggcagcaagcgacgaaggcggcattgatctcgtcgtcggttattttccacgtcggggaatcccttgaccccaacagcggtggcctccttggggtagcactccatgccgagcttcacgaaggcgacatcgctgatcatggcgtgcagcgtggcggcggcctcggcgaaccacgacataagctgcgacgggaggcgacgagaggcatgaaccatgacatgagctgtgatgtgaggttcatcacgtcgtctcctctggccccttggcgctgcgtctcatccgctgaggcaacaatccacgtgggtggtcgaggccgtcaacggttcctagatcccatcgcggtgcaacctctagtgagggcgtcgaatccaatgagggcttcggtgagggtgcgagatctagcgagggctcagacaccaaatctgatgagagggccacacgagctctag

SEQ ID NO: 106824 - DNA, 1885 bp, Zea Mays
actcgctcgcccactcgatcgcgccgtcgtggtcgcgctccctcccgcacaacacggttcgcggggagatttggcaggagacgccgtgcgggaccggctggttctctcggcttgcgtgaaaaagcgcagggggagctaggcacgtggtttccctcgtcttctgccgcagacgcttcccgtgatcagaatccaagaaatggcgggtccaggtccagcgcgcaccgcgcggagcgttgctctcctgtgtttcctggtttcctgcgctgcgctcgtggacagccgtggcggagccagccggccgagccggcaggacctcgatgtcggcctcggcggcgggggcgtcggcatcggcatcggcatcggcggcggcagcccttcgtcgccttctccgacgccgccgtcgtcgcagccgcagccgtgcgacttcgagaacgagcggctgtacagggcgtacctcgtgatccagcagttccggagcacggtgacgtgcgacccgatgggcgtcacgcagagctggagcggcaccgacgtgtgcagctacaagggcttcttctgcgagcggccgcccaacgtgacggaccgggccatcgcgtccgtcgacttcaacggctacatgctgcaggcggggtccctgcggggcttcgtcgacagcctgccggacctggcgctgttccacgccaactccaacgacttcggcggcgccgtgcccgcgctgggcggcctgcagtacttctacgagctggacctgagcaacaacaagctcgcgcccgccgcgttcccggcggacgtgctgggcctcaccaacgccaccttcgtcgacatccgcttcaacagcttctacggcgagctccccgccggcgtcttctgcaagctcccgcgggtgcaggccatcttcgtcaacaacaaccgcttctccggcgccctccccgacaacatcgggcagtcgccggtgaactacctctctctggccaacaacaggttcacgggggagatacccaggtccatcgcccgcaacgccggcacgctcctcgaggtgctcttcctcaacaacagcctcagcggctgcctcccccacgagctcggcctcctggagaaggccacggtcatcgacgccggcgctaaccgcctcacgggcaccatcccggcgtcgttcgcgtgcctgcgcaaggtggagcagctcaacctggcgggcaacctcttgtacggcgaggtgcccgacgcgctctgccggctcgcgttcagcaacctcaagaacctcacgctctccgacaactacttcacgtcgctcgggtcctgctgctgggacctgatcaaggaagggaggctcaacgtcgaccgcaactgcatccagtgggcgcccaaccagcgctcgcacgaggactgcgccaagttcctccgccagcccaagtcatgcccggtcaacaactacgttccgtgccgcagcaaataccaaagctccagcgagccggccgacgacgcggcggcggagtacaggtaccggacctactcggcgctgcatccttgaggtggagtggagtggagggcacttcactgattgataaagcgcattgtccgtttcgtgtgagcgtgaaacgactggtcactcgcctgggcctggccctggcccgtttgtgctcggtgggttgtgttgatgtgttgtgtcactgtgtagaaatgttgaatgttccccttcgctcgatccggcccagctaggtaattcatatgcatcatgtgcgtgtgtccgcgtcgctagatttcttggtcacatacaggccgcattgcaagctgcctttttcttccgtgtgcttgtacaaaaccgtcgaggttatgtaatttgcatcagcaaaggtaaccatagcaggtaaacagaaaacactatttgaag

SEQ ID NO: 106825 - DNA, 652 bp, Zea Mays
gctgtgacttcatgaggacaggtcgaggaccgtctgctcactagtcactacgtctacgcattgaagctagaggattcatctttgggccagccattgcgctagccataggagcaaagttcataccactacgtaaacctaagaagcttccaggtgaggtattttctgaaagttatgtacttgagtatgggatggattgtttggagatgcatgttggagctattgaacccggggagcgcgtagtggttgtcgatgatttggttgcaactggtggaactctttctgctgcaataagacttctcgagcgcgcaggagctaacgtggttgagtgtgcatgcctcattgggcttcccaagtttaaggatttctataagctcaacgggaaaccggtttacatcctggtggagtcccgcaaataggacgcagtaaaatggtcagacaaaaaaagctttctagcttcccgtccaaagaagctcacagcttcactcatttgcacgcgcaagcaaggtggtatgggggcaccgagaaactccgcagtaatctgtgttgaggccacggccagatgatgctatgtactcctatcttcatggagagggtgatggactgggtgaaacgtagtcactgtacttttgtagcacgtcatgtctagtgtttc

SEQ ID NO: 106826 - DNA, 1307 bp, Zea Mays
atggacgaccaagtccacaccgaggatactcgcactgccctatggggacagtcgagcctggtcaaggtaacactatggcatcagaaagtccgaataatggcctgtatagcgaaagggatgggacaacgcccataccgaaagctgatcagcagcatgatggggagtgacgcaagaatcgagaggggtccgtcgggggaggtttggccactgggcactgaccaagaaagagtgatgactgatgagcaccccccagcccagctgccgctcaaagcgacaggtggagatcggagggaggaagaagaactgagctgcggatcgagggaagggaacaagcaagcagccagagccaggtcgtggggagccggcggcagtgatcttcttgcgtcgaaggcgaggccggagcgtcggtttgagcgctcgtgcgatatgggggagcaggagaacaacaagatcggcggcagcggcaacgacaacgccatggcggtggacgaagcgggcgcgggcgcggccgcgaacaaggggaagagcctcggcgccgcggacccgcgcctgcaggccatttccgacgccatccgcgtcgtcccccacttccccaagccagggatcatgttcaacgacatcacggagctgctgctgcggccgggcgtgttcagggacgccgtggacatgttcgtcgagcgctaccgcggcatgggcatcgcggccgtcgcaggcattgaagctagaggattcatctttgggccagccattgcgctagccataggagcaaagttcataccactacgtaaacctaagaagcttccaggtgaggtattttctgaaagttatgtacttgagtatgggatggattgtttggagatgcatgttggagctattgaacccggggagcgcgtagtggttgtcgatgatttggttgcaactggtggaactctttctgctgcaataagacttctcgagcgcgcaggagctaacgtggttgagtgtgcatgcctcattgggcttcccaagtttaaggatttctataagctcaacgggaaaccggtttacatcctggtggagtcccgcaaataggacgcagtaaaatggtcagacaaaaaaagctttctagcttcccgtccaaagaagctcacagcttcactcatttgcacgcgcaagcaaggtggtatgggggcaccgagaaactccgcagtaatctgtgttgaggccacggccagatgatgctatgtactcctatcttcatggagagggtgatggactgggtgaaacgtagtcactgtacttttgtagcacgtcatgtctagtgtttc

SEQ ID NO: 106827 - DNA, 1213 bp, Zea Mays
ggtgctacggccaccccgcgcgctgtacctggtcttggcttgccgtgtttatttatatatatatgtaggcaccccccagcccagctgccgctcaaagcgacaggtggagatcggagggaggaagaagaactgagctgcggatcgagggaagggaacaagcaagcagccagagccaggtcgtggggagccggcggcagtgatcttcttgcgtcgaaggcgaggccggagcgtcggtttgagcgctcgtgcgatatgggggagcaggagaacaacaagatcggcggcagcggcaacgacaacgccatggcggtggacgaagcgggcgcgggcgcggccgcgaacaaggggaagagcctcggcgccgcggacccgcgcctgcaggccatttccgacgccatccgcgtcgtcccccacttccccaagccagggatcatgttcaacgacatcacggagctgctgctgcggccgggcgtgttcagggacgccgtggacatgttcgtcgagcgctaccgcggcatgggcatcgcggccgtcgcaggcattgaagctagaggattcatctttgggccagccattgcgctagccataggagcaaagttcataccactacgtaaacctaagaagcttccaggtgaggtattttctgaaagttatgtacttgagtatgggatggattgtttggagatgcatgttggagctattgaacccggggagcgcgtagtggttgtcgatgatttggttgcaactggtggaactctttctgctgcaataagacttctcgagcgcgcaggagctaacgtggttgagtgtgcatgcctcattgggcttcccaagtttaaggtaccaaaatctaagttcgttcaaaaaagctaccaaatgtatatttcttttttctcaaggtgcaccaatatgctccttacatgcacttcagttagctaaaggaaattgaggaagtattccatctcggtctgagggaggaaagacgcaatagaacaaggccagtgtaaaaaaaaactagtctgcctgtaactattcctgtacatgtgactgcagatttttaataaatgaaatggtatcatctagccgatatcttttcctcctacgagtaaaaccgagagcaacctcagcgtgtgtttgaaaacaaagtattttaaaaaccatggtgttttgaggtaaagtatctcaaaccatggtattggtatgcatgtgcaag

SEQ ID NO: 106828 - DNA, 2698 bp, Zea Mays
gctccgtttcctctctctcctcctattaaccactctccacccgctcgcctcgccctctcgttgagagagtcgtcccctccgcgtgctctccgcctgcggcatctgtatcccacaacgaaaaactaccaaaaaaattagaaatccccaaatccgcgagatctatcagtatcgagcgatttaccgatccgattgctagggtttagtttcgaaaaagaaactctgaaaaaaaattctggtcgaggggaggagacgatggcagcgcaagtggcggcggtggtggtgccgaatgggagcccgggcgctgtccccgcggtggtgtcgccgggagcggtcggcgtcggactcggcgtggcgcagccgctcccgaccacgtcgctctacgtcggcgacctggaggggtccgtctcggactcgcagctgtacgagctcttcagccaggcggggcaggtggtgtcggtgcgcgtctgcagggacgtcacctcgcgccgctcgctcggatacgcctacgtcaacttcaacaaccccttggatgctgcaagggcattggaagtgctgaactttgctcctcttaacaacaaacctatccgggtgatgtattcaaaccgtgatccaagtagccgcaggagtggatctgctaacattttcataaagaatcttgacaagatgatagacaataaatcccttcatgagaccttttcttcatttggtaccattctctcatgtaaggtagccatggatgaaggaggccaatccaaaggctttggttttgttcagtatgaaaaagaagaagcagcacagaacgctataaaaagtcttaacggaatgcttataaatgataaacctgtttttgttggaccttttcttcgcaagcaagaaagggatcactcttttgacaagacaaaatttaacaatgtcttcgtgaaaaacttgtctgagtctaccacaaaagaagatttactcaaaatctttggtgaatatgggaatattacaagtgctgttgtgatgattggcatggatggtaaatcaaggtgctttggtttcatcaattttgagaatccagatgcagcttcccgtgctgttcaggaacttaatggtaagaagataaatgacaaagagtggtatgttggaagagctcagaagaagtcagaaagagagatggaactaaaaaggagatttgagcagatcttgaaagatgctgctgacaaatatcaaggactgaacttatatctcaagaacttggatgatagcattggagatgatcaacttcgtgaattgttctcaaattttggcaaaattacttcatgcaaggtgatgcgtgatcaaaatggtcttagcaaaggctctggatttgttgctttctcaactcgtgaggaagcatctcaggctttaactgaaatgaatggcaaaatgatatctggaaaaccattgtatgttgcatttgcgcagcgcaaagaagatagaaaagcgatgttgcaggcacagttttctcagatgcgccctgctgtaccaatgacacccactctagccccgcgccttccaatgtaccctcctatggctcctcagcaactcttctatggacaagcgccacctgctatgataccccctcagccaggatttggtttccagcaacaacttgttccaggcatgaggcctgggggtcctcatatgccaaattattttgttccagttgtccaacaccaacagggccaacagggtccacgcccaggtattaggcgtggagctggagcccagggtcagcaacctgtgccaccatttcagcagcagattgttccaagaggacggatgtaccgttacccaactggtcgcaacatgcctgaagctccggcgatgccaggggttgctggaggtatgatgcaggcatacgatatgggcggcttccctgtgagggatgctgccttatccccggctgcccaaattgggactctgacttctgcccttgcaaatgctaatcctgaacagcaaagaacgatccttggtgaaaacctatacccactggttgagcaactggaaccaaaccaagcggcaaaggtcactggaatgcttttggagatggatcagactgaggtcctccacctgcttgagtcccctgatgccctcaagtcaaaggttgctgaggcgatggatgttctccacaatgtggcccatcagcaaaacgcaaacaccccgaccagtcagcttgctgcattatcactaaccgaaggcattatctcctaacttgaaagccataacaaactatcttcagtttgcaattgagtgatgtttccagaggttatctggcacatgacagtattgctccttttttttcttctatggttggacttgagtgctgttttcgtatttgcactctgcggtgtactgccgttaaggcaaatcagttgtttgcaagtttgagtgttattgggggccgttgattacatacctgtcttttgcaccttgtcggaagttttgctacttaattgaatgagtgagggaacttgtttgcactgttttgtgatctggtgtggagtaattattcaacaccttggattttaatctcggtttgatgcctgagaatttttatgcagagctgcttccgctgatgcctgctactgctagttgctttggttgcttggttccattcttcgtgatggaccagttcatggcttccaaaaaaaaaaaaaaactgagctattctggt

SEQ ID NO: 106829 - DNA, 1914 bp, Zea Mays
cttccggtcgtcggtcttggcctcttccgcgaccgcgtcgctacttcctcctaccgctggaggcacacggtttccacgccagccagcaaatgggtgcccaccgcaaagatcaaatcaaatcaaaagggaatttctgaaaaggagagaggaacacccttcctcgccatttccgtccaaagtgtttccccgaggagtcgcgcgtgcctgccgggttgcgtaggcgctggggcggcgggacgggagcatcgcaggccgcggtggaccctggcgctcgagtttcttctctgcggtgaccaactgaccagagggacagccttgtggcaatcatatataggacagtttcgtatctataataatgtgctcatataaagaaatcaagtacaaatgaagaagcacatctctgcccattatttgatgactgaagacaggttgcactatggtagctgctacaactgcgggaatgtttcttgtgtgttttgagtccctctgtccctgttttgggtcaaaaagtaaggatgggagcgaagaccatgttcttgcagaatattccaattccttgaattcttctgaaatgaggtcgatttctgatagaattgctgcaagtccgcttcgagtacctgcaagtccatctagattttcactgtcttcgccaccaagttactttggaaaggtctacagagcggcgctgttagatggacgtgttgtagctattaaaagggcaaagaaggaaaattttctctctttacgtgctgaattcagcaacgaagtcgcattactaaaaagtattgaacataaaaacttggtccagttgcttggttacattgacaaagccaatgaacggattctcataacagagtacatatcaaatggaactcttagggagcatttggatggtcaacatggcctagttttgggatttaatcagcggctcgaaattgctatagatgttgcccatggattgacttatctgcatctctatgcagagaagcccataatacacagggatgtgaagtcatcaaacattctactgacagaagctttcatggccaaagtggctgactttggatttgcaagaactggtcctactgagccagaccagtcacagattgagactgatgtgagaggaacagcaggctatttagatccagagtatatggggacaagccatcttacgatcaagagtgatgtgttctcttatggtattttgctcctagaaatcctttcgggacgtcgtcctattgagagaacgaggggtccagcagaaaggattacagtgagatgggccttcaataagtaccgcagaggcaatgttaggggcatactggacccaatgttaactgaagcagtgaacgaggatatactgaacaaaatcttcgatgtggcgttccagtgtgtcgctcctacccgcgaagacagaccctccatgaaagaagttgtggagaggctgtggaagataagaagggatcatacaaaaatacagaggatagcagaattgactctctgaatccttaaggctctgttcgttttttacagattggaggcccgaaacggttcctgaccggattgtttctctaatttatataagttttgataagttggaatgaatcctggtccaatactagacaaacgaacgggccctaaaccatctggtcctggttgctgtttttgcttgggagaacatgggtcagttcctagtgaagaccaaagaccgccacataaaaataattcaaattttgtggttgtgaacaactgggattctttaagagatgtggggaacaatgccctgcgattgatggtttccctgtagccattactgttaatcagcataagctgttcagtcatcgtcctcgagaagtacagtgtagcttcggtgtacggcatccttgtactttggaaaacagttagatatgaagg

SEQ ID NO: 106830 - DNA, 1611 bp, Zea Mays
cttccggtcgtcggtcttggcctcttccgcgaccgcgtcgctacttcctcctaccgctggaggcacacggtttccacgccagccagcaaatgggtgcccaccgcaaagatcaaatcaaatcaaaagggaatttctgaaaaggagagaggaacacccttcctcgccatttccgtccaaagtgtttccccgaggagtcgcgcgtgcctgccgggttgcgtaggcgctggggcggcgggacgggagcatcgcaggccgcggtggaccctggcgctcgagtttcttctctgcggtgaccaactgaccagagggacagccttgtggcaatcatatataggacagtttcgtatctataataatgtgctcatataaagaaatcaagtacaaatgaagaagcacatctctgcccattatttgatgactgaagacaggttgcactatggtagctgctacaactgcgggaatgtttcttgtgtgttttgagtccctctgtccctgttttgggtcaaaaagtaaggatgggagcgaagaccatgttcttgcagaatattccaattccttgaattcttctgaaatgaggtcgatttctgatagaattgctgcaagtccgcttcgagtacctgcaagtccatctagattttcactgtcttcgccaccaagtagaaacgagcctttaaacatcagtcttgaacatgttgttaaactgacacataactttgcgccgaccttgatgattggcgaaggttactttggaaaggtctacagagcggcgctgttagatggacgtgttgtagctattaaaagggcaaagaaggaaaattttctctctttacgtgctgaattcagcaacgaagtcgcattactaaaaagtattgaacataaaaacttggtccagttgcttggttacattgacaaagccaatgaacggattctcataacagagtacatatcaaatggaactcttagggagcatttggatggtcaacatggcctagttttgggatttaatcagcggctcgaaattgctatagatgttgcccatggattgacttatctgcatctctatgcagagaagcccataatacacagggatgtgaagtcatcaaacattctactgacagaagctttcatggccaaagtggctgactttggatttgcaagaactggtcctactgagccagaccagtcacagattgagactgatgtgagaggaacagcaggctatttagatccagagtatatggggacaagccatcttacgatcaagagtgatgtgttctcttatggtattttgctcctagaaatcctttcgggacgtcgtcctattgagagaacgaggggtccagcagaaaggattacagtgagatgggccttcaataagtaccgcagaggcaatgttaggggcatactggacccaatgttaactgaagcagtgaacgaggatatactgaacaaaatcttcgatgtggcgttccagtgtgtcgctcctacccgcgaagacagaccctccatgaaagaagttgtggagaggctgtggaagataagaagggatcatacaaaaatacagaggatagcagaattgactctctgaatccttaaggctctgttcgtttt

SEQ ID NO: 106831 - DNA, 414 bp, Zea Mays
atgaaccttgagactgttgagcctcacatgctgggttcatgcaaaaaggtaataactgaagagctaggaatgaaccttgagaatgttgagcctcacatgctgggttcatgcaaaaagctaattttattccaaccacatgttttgaaaagaaatccatttaatgatcatttactgttaacaaatgttgatgaggaaggacatctatatggggtttctggaggttctgggggctatgcagaaacaatctttctggtgtgcattttatttctctgtataattaaaaacgacttgtctcatcaattcatcatgattcaggtaataactgaagagctaggaatgaaccttgagaatgttgagtctcacatgctgggttcatgcaaaaaggggtcattggaaaagaaacatctgctgtaa

SEQ ID NO: 106832 - DNA, 491 bp, Zea Mays
gcccatagggtagctggagacgagaacgaaagcggggaagagggggactcatggaaggtgatgttgaggacgaggagtgagtatgtgtcgtggatcggcggtggtccgaatcgaccgaagtgtgacatctcgccggagtcggaggcggcgtgggatgggggtcgagttgcggcaggcagtcagacttcatcattggtgggcgtgatcctggacacaacaccatccacctccgtggcctgttggtggatgtcaggcgcgacgacgacctcctcttctcctagtcatcgctagcgtgggactccctacatatgacagaggaggcggcgggctgatacacaacgaccgaccttcgccactcgacagtgaaagggaaagggcgctgctggaggaggaagatgggatgactgatggtggtctcgagtagagatgtcaacggaatccaatactgataacccatggaaattatggaaattattctattaggtcatgtt

SEQ ID NO: 106833 - DNA, 1818 bp, Zea Mays
ctgactccacagtccacaccaccaccacacccaggcttccacttgccgccgcgcccgcgcctccccctcattttctccccctccactgctttgcgcctacgcatcgccgccccgcctctagtcctctgtcctcctcttcctactgtaaaccacctcgtccctatccgcggcaaccgttcaccgcgccgcgaggcctgctgatccgaccgaccttccaccgtcatggctcccctgcgccgcgcgtctcgcctccttcgatcagccgtctgccggctgaggtctccagcgccggctcgggccttctccagcgccgcggcgaccgagacgggtgccgtgatcgccgccgctgccgtggcggtggccagctccgggctcgggctgtggctgaaaccgccgtcgcttgccgactccggcgaggcgcccggcgaccagatctcggtcgcctgtgccggcgccacggaggcgcgggaggagaaggggtggttcctgttcgcagactcatttcgtagaagggtcttcttcaactacgagaagaggatacggcttctcagtcctcctgagaagagtccacggtagttcgtgaaggaagattaaggggggagcggagccctggagaattgcactgtgctccatcagagttctttatgcagttcgacacaaataatgatggcctcatctcctttgctgagtacattttttttgtgacattgctcagcattcatgagtcaaatttcactgtggccttcaaaatgttcgacattgaccacattaatttatctcgccaagaaaaaagacctgctcgttatgagcatgttcaatcatctgacttgtttgttgatggtaaaagaaggggtgatagacagagaagagtttaagaaaataatggcactgatgcggtcctttaacagacaagggtcgactcataaggatggtttacgtattggacttaaagttggcaagcctgtggaaaatggtggggtggtcgagtacttctttgggagtgatgggaatgaacctctacactttgacaagttttctaaaattttgaaggaattgcatgatgagattattcaactggagttcagtcattatgatgtcaaatcgtctaaaacaataccagcaaaggattttgcattgtccatggttgcttctgctgacatgaaccatatcaacaagctgcttgatagagttgatagtttggtcaaggagccagatctgaaggacatacgcatcacctttgaggagtttaaggcatttgctgatttgcgacgaagattggagccactgtcgatggctatctttgcttacggtaaattgaatgggttattgacgaaggaggatctaaaacgtgcagcgcaacatgtttgcggggtcgacttaacagatagagtagtagacatcattttccatgtgttcgacacaaatcaggatgggaacttgagcccagaagagttcttaagagcgttacaaagaagagaaactgatattcgtgaaccaacaataccaggtccattggggttcttgtcttgctggttcagtggtaggaagtgttcttcactaaaacatgtggttatctgattgagcccctatttgatcctcacggcgcagaaggtaatcaccaagcagtgcattgctgatcgttacaacggacttcactgtatgtcgtcttggtggccgaagcttgactagcagtaacagctctaattgtaaatcgtgtcttctgtagccctaggactgagtgatatacatcgttattctcacgtgtaaattaaaccccatatggccatatggcttcaatatatgaaacattgtcattta

SEQ ID NO: 106834 - DNA, 1383 bp, Zea Mays
ctgactccacagtccacaccaccaccacacccaggcttccacttgccgccgcgcccgcgcctccccctcattttctccccctccactgctttgcgcctacgcatcgccgccccgcctctagtcctctgtcctcctcttcctactgtaaaccacctcgtccctatccgcggcaaccgttcaccgcgccgcgaggcctgctgatccgaccgaccttccaccgtcatggctcccctgcgccgcgcgtctcgcctccttcgatcagccgtctgccggctgaggtctccagcgccggctcgggccttctccagcgccgcggcgaccgagacgggtgccgtgatcgccgccgctgccgtggcggtggccagctccgggctcgggctgtggctgaaaccgccgtcgcttgccgactccggcgaggcgcccggcgaccagatctcggtcgcctgtgccggcgccacggaggcgcgggaggagaaggggtggttcctgttcgcagactcatttcgtagaagggtcttcttcaactacgagaagaggatacggcttctcagtcctcctgagaagatttttgagtactttgcgtctgtgaggaatcgagaaggggaagtttacatgttgcctgctgacttgatgagagcagtagtccctgtttttcctccatcagagtccacggtagttcgtgaaggaagattaaggggggagcggagccctggagaattgcactgtgctccatcagagttctttatgcagttcgacacaaataatgatggcctcatctcctttgctgagtacattttttttgtgacattgctcagcattcatgagtcaaatttcactgtggccttcaaaatgttcgacattgaccacagtggattattcaactggagttcagtcattatgatgtcaaatcgtctaaaacaataccagcaaaggattttgcattgtccatggttgcttctgctgacatgaaccatatcaacaagctgcttgatagagttgatagtttggtcaaggagccagatctgaaggacatacgcatcacctttgaggagtttaaggcatttgctgatttgcgacgaagattggagccactgtcgatggctatctttgcttacggtaaattgaatgggttattgacgaaggaggatctaaaacgtgcagcgcaacatgcgcagaaggtaatcaccaagcagtgcattgctgatcgttacaacggacttcactgtatgtcgtcttggtggccgaagcttgactagcagtaacagctctaattgtaaatcgtgtcttctgtagccctaggactgagtgatatacatcgttattctcacgtgtaaattaaaccccatatggccatatggcttcaatatatgaaacattgtcatt

SEQ ID NO: 106835 - DNA, 703 bp, Zea Mays
cacacaaataatcatggtgctcttcttgctggctacatctatgacaaggaggcagcaaggcagcacccaggtgtactggagccttccgactgctatgggcctgactgtttcagattgactttctatgtctgcgccgtcgtgtgttgctgcggtaccctgttgggcgtgttcttcatatcgaggataaagccggtctaccagatgctctacgcaagtggatcgttcagacatcctcggagccaacagcagctccactgatgttgcatatacactacagtcatatgctaagaaatagtcctattgagttttgggaatgaaatcataatgttctggagtaaatcatctgctggatgccatgttccggtgctgtatcgcattaacggtgcttgatttgcccctgtttgtatcagagttttattctgatttcatttgtccctgctctgtaaggtcgccagcctagtagatataatatagcgggtcatcaatatatactggtaaaccagctgcctatttatatggcagctcgtgtgcatcagcaagtttgaggacgtcataaagcgaatgtatcttctttattctgttgttcctatacaatgggtttcctccattgagacgctgctgcttctttattctgttactaggtatgtacccgtgcgttgcaacggtacacagattaatttagtcgagccttatgacaccgtac

SEQ ID NO: 106836 - DNA, 2464 bp, Zea Mays
ccgagtactcgagtggcgctcgttcgccccgcaggtccgccgcccgccggggttatattccactgatgctgtgacgcatcgagtccagacaccaggcaaatgcggcgaaggcactgaagaagccacaccgccgccgctgtagcctgtaggctgtcgccacgacccacgcccgcgcgcgcgctgctgccgtgctgcggtctgctgccactgccacgcacctgacctgtcagcagcctccggaggaggcccggcccggggcagtgcggcggcatggctggtggtggtggagggccggggccggggcgggtgaaggcggggagccgcccgccgtgggtcgggctggcggcggcggtgtgggtgcaggtggctgcggggagcgcctacgtgttcccgctctactcgcacgccgtcaaggaggcgctcggctacaaccagcaggcgctcaccatgctcggcgtcggcaacgacgtcggcgagaacgtggggctcgtcccggggttgctcgccaaccgcctcccgccctggctcatcctcgtcatcggctctgcgtgcgccttcttcggcttcggcacgctctggctcgccgtgaccaagaccgtcgccatgccttattgggtgttgtggatagctttatgtattggcacgaacagcagtgcatggttgggcactgctgctcttgttaccaacatgaggaatttccctctcagccgaggcactgttgctggtctcatcaagggttatgttgctgttagtgctgctgtctacactgaaacgtttaatggaatgctaggcaattcacccacaaatcttttgatgttgcttgccttggggatcccaacagcatgtattgtggtgatgtattttgttaggccttgcactccatcactggatgaggacaactcaacagaacacagccatttcatgtacacacaaatctcaagtgtggttctcggaatataccttatggttgctacaatacttggtgatactttaaaactaagtcaggctgtcacctatctattgtttggcataatgatacttttgctccttgctccacttgcaataccaataaagatgacactttatccaaacaaacaaacaaaggaaaaggccagcacccttgctccatcttattcaactgatagtctgtctggtgcggatccagagaactcacaaccacttttgggcagtgcctcaacaacacttgctacaggtaccaatgaatctgatgacagtactgatttggatcttctattggctgagggtgagggagcagtgaatttgaagaagaaaagggggccaagaaggggggatgatttcacattccttgaagccctagtaaaggcggacttctggctactgtttgttgtttacttttgtggagttggcacaggggtcactgttctcaataacctggcgcagattggaatgtctgttggtgctaatgacacaactattttgttgtgcctctttggcttctgcaactttgctggtcgtatccttggtggatctgtctctgaatatttcgtaaggtcaaggatgctccctcgtcctttctggatgatgtgcacacaaataatcatggtggtaacgttcctgctcttcgcgactggtcttcatagcttgatttatgtttcaactactctcctggggatatgctacggggtccaatttgctgtcatgataccaacggtctcggagctttttgggctaagggacttcgggctaatgtacaacttcatgctgttagtgaatccactcggtgcattctttttctcagctcttcttgctggctacatctatgacaaggaggcagcaaggcagcacccaggtgtactggagccttccgactgctatgggcctgactgtttcagattgactttctatgtctgcgccgtcgtgtgttgctgcggtaccctgttgggcgtgttcttcatatcgaggataaagccggtctaccagatgctctacgcaagtggatcgttcagacatcctcggagccaacagcagctccactgatgttgcatatacactacagtcatatgctaagaaatagtcctattgagttttgggaatgaaatcataatgttctggagtaaatcatctgctggatgccatgttccggtgctgtatcgcattaacggtgcttgatttgcccctgtttgtatcagagttttattctgatttcatttgtccctgctctgtaaggtcgccagcctagtagatataatatagcgggtcatcaatatatactggtaaaccagctgcctatttatatggcagctcgtgtgcatcagcaagtttgaggacgtcataaagcgaatgtatcttctttattctgttgttcctatacaatgggtttcctccattgagacgctgctgcttctttattctgttactaggtatgtacccgtgcgttgcaacggtacacagattaatttagtcgagccttatgacaccgtac

SEQ ID NO: 106837 - DNA, 3840 bp, Zea Mays
ccaccagcgagacactcagatctgcctttcccgacccggagccagccaggtgagccgaggcaggggggacgcgccactggccatggagcccgggttgagcatcgagtccggttctgccatccgcgtcgcggtgctccccgtgggcggcccgattccgccgccgcgcctgcgcgagtacgcggccctggtggcgcgccacgcgcgcgtcgacctcgcctcgctccgcacctactacgcggagcaccagaagagccccttccagcaccagccctgggagaccggatgcctccgcctcaagttcgtgctcggcggctgcgtgccttcaccctgggaggacttccagtcctcgcgcaaggtgctcgccgtgatcggcatctgtcacctgccgtcctcgcccgacctcgaccacgtggcggcagacttcatagacgctgcgcggtcgtacccgtcggcgctcgccaaccgctgcttcgccttctgccccacggacgcacagctgtcagcgaagaagagggacgatattattatgttccctccttctgatcagcaatcgctggaacttcatatgcttacaatgatccaagatctcgctgcttctttgttgatggagtttgagaagtgggtcttgcgtgcagaatccacaggaaccattttgaagacccctttggattcacaatccagtcttggctcagaggaggtaattaaggctaaaaaaagaaggcttggtcgtgcacagaagataataggagattattgcctcttggctggatcacctgtggatgctaatgcacattacaccaccgctatagagcttgcaagattgaccggtgatgttttctggcatgctggagcccttgagggtagtgtctgcgcattagtggtggataggatgggccaaagtgaccctattttggaggatgaagtcaaatatcgctattacaccattatccagctatacagaagagccactttacaagataatgctcaaagagtttcacctgtgagctttgagcttgaagctgccttgaagttggcaagatacttgtgcaggcgagaacttgccaaggaggtctcagatttgttaatgggagctgctgatggtgccaaggctcttattgatgccagtgatcggctcatactatatattgaaattgcaagactttttggtacacttggttataagcgcaaggcggcctttttttcaagacaagttgcacagttgtaccttcagcaagacaatgcatatgctgctatgagtgctatgcaggttctaactatgactacaaatgcataccatgtccaaagccgaaagactatgaaaatgaatcatgatccgtccaagtctatagtgtcattgtttgagtcacaatggagtacccttcaaatggtggttctaagagaaatattgatatcgtcgatccgggcggcagatccactctcatcatggagcgctgcagctcgtcttcttcgatcattttacccactcatcacaccagctggtcagagtggcctagcaagctcacttgcaaacgctgctgacaagcttccaacaggcacacgctgtgccgatccatgtcttccttttatcaggttgcattctttcccgcttcacccttctcaaagggatatagtaaaacggaatccacataaaaaggagtggtgggctggtgcaggtccttcaggacctttcatttatactcctttcagcaaagcaggagcttctgggacttccaagcaagagcttagttggattgtgggggagccggttcaagtcatggttgagttagcaaacccttgcagcttcgacatagttgtggagagcatctatctctctgtccattctgggaattttgatgcctttccagttagcgttagtcttccacctaacacttcaaaattagttttattatctggtattccaacaaaagtcggacaaatatcaattcctgggtgcattgttcattgctttggtgttattacagaacacctattcaaagaggtcgattgtttgctccttggagctgcacaagggcttgtcctttctgatcctttcagatgctgtggctctagcaagttcaagagtgtcaactttcctagcatttctgttgttcctcctctgccattgttaattgccaatgttgtgggtggagatggttctattcttctttatgaaggagaaattcgtgatgttctgataacactgacaaatgccggaaccgtgccagttgaagaagcaaatgttgcattgtcagggaagaatcaggattctgttatttcgattgctcatagcacatggaaatctgcgctccctattaaaccgggtggagaagtgacatttgcagtgactctaagagcctggcatctcagctcagcagatttggaagcagatggcagtagatctcctgtaaattcaaggagaatagcaagagaaggaaccaatccattcttggatattcactatgctggtcctgctgcgaatcttgagaatggagatgtttctcttctacctggaagacgcctagttgttcccttgaatatctgtgttgtgcagggcatgcgtcttgtaagagcacgcctgttgtccatggaaatacctgctcgatttactgaaacacacttaaaacctgtcagtggcaaagacataaacttattgaaggttgatccctataaaggaagctgggggctccgccttctggaacttgagcttttcaatcctactgatgtcgttttttatgttgatgttgctgtgcatttggatgacacggatgtggaccaagaagtaatttcagacggggatgctgcttgtcacaaaactagaattgatcgggactactctgccagagttctcatacctcttgagaacttcaaattgcctgttcttgatgcttccttctttgtaaaggcaagtagtagtgatgaacctcttggatccagggccgccgccatagcagaaaggaatgccaaggcagagctaaatgcgtctatcaacaacttgatttcaaaaataaaagtgaaatggcactctgggagaaatagctcaggtgagctgaatattaaagatgctatccagacggcactacaagcatctataatggacatactgttgccagatcccctgatgtttagctttaagcttgttacgaatggaactgtggtcaatgtcgattctccaaaggattctggcaatgttctgaggtgcaaagatcctatatctgctcatgaaatgacccatatggaagttcagattcgcaacaacacaaaggaaattatccggatgaaccttagcatttcatgcaaagatgttgctggagagaattgcttcgatgaaaatagtgctactgtcctctgggctggtgttcttagcgatatacacctggaagttccaccgttgcaagaggtggtacatcctttctccatgtatttccttgtaccgggtgactactcgctccaagctgcttctgttataatcgatgccacagacgttcttcgtgctcgtgcaaaggcggagtcaccagatgaacctatactgtgtcgcggatccccattccatatccgggtagtcggtacagcataggcagttcttctgagttactcctagtctagaggcctcattttactgtgacaattgtaggtgtggaaaatcttgtacaagagtgatccctggcgccctgcccctcatgcgatatgttttttgtcctttttgttggcttctttgtaagtcatgtcatgtacagtgtacaagcatagtgagtattgtttcaagcacagaaattgtatgtcgatgattccacaatcttaatttctggttagcttatatgattttacttaacattttttaca

SEQ ID NO: 106838 - DNA, 3842 bp, Zea Mays
ccgacctgccgggcatcgcctattcgcctgttcctccaccagcgagacactcagatctgcctttcccgacccggagccagccaggtgagccgaggcaggggggacgcgccactggccatggagcccgggttgagcatcgagtccggttctgccatccgcgtcgcggtgctccccgtgggcggcccgattccgccgccgcgcctgcgcgagtacgcggccctggtggcgcgccacgcgcgcgtcgacctcgcctcgctccgcacctactacgcggagcaccagaagagccccttccagcaccagccctgggagaccggatgcctccgcctcaagttcgtgctcggcggctgcgtgccttcaccctgggaggacttccagtcctcgcgcaaggtgctcgccgtgatcggcatctgtcacctgccgtcctcgcccgacctcgaccacgtggcggcagacttcatagacgctgcgcggtcgtacccgtcggcgctcgccaaccgctgcttcgccttctgccccacggacgcacagctgtcagcgaagaagagggacgatattattatgttccctccttctgatcagcaatcgctggaacttcatatgcttacaatgatccaagatctcgctgcttctttgttgatggagtttgagaagtgggtcttgcgtgcagaatccacaggaaccattttgaagacccctttggattcacaatccagtcttggctcagaggaggtaattaaggctaaaaaaagaaggcttggtcgtgcacagaagataataggagattattgcctcttggctggatcacctgtggatgctaatgcacattacaccaccgctatagagcttgcaagattgaccggtgatgttttctggcatgctggagcccttgagggtagtgtctgcgcattagtggtggataggatgggccaaagtgaccctattttggaggatgaagtcaaatatcgctattacaccattatccagctatacagaagagccactttacaagataatgctcaaagagtttcacctgtgagctttgagcttgaagctgccttgaagttggcaagatacttgtgcaggcgagaacttgccaaggaggtctcagatttgttaatgggagctgctgatggtgccaaggctcttattgatgccagtgatcggctcatactatatattgaaattgcaagactttttggtacacttggttataagcgcaaggcggcctttttttcaagacaagttgcacagttgtaccttcagcaagacaatgcatatgctgctatgagtgctatgcaggttctaactatgactacaaatgcataccatgtccaaagccgaaagactatgaaaatgaatcatgatccgtccaaggaacctcgtgctggcaatactgattctggaaaggtgcaccctcagtctatagtgtcattgtttgagtcacaatggagtacccttcaaatggtggttctaagagaaatattgatatcgtcgatccgggcggcagatccactctcatcatggagcgctgcagctcgtcttcttcgatcattttacccactcatcacaccagctggtcagagtggcctagcaagctcacttgcaaacgctgctgacaagcttccaacaggcacacgctgtgccgatccatgtcttccttttatcaggttgcattctttcccgcttcacccttctcaaagggatatagtaaaacggaatccacataaaaaggagtggtgggctggtgcaggtccttcaggacctttcatttatactcctttcagcaaagcaggagcttctgggacttccaagcaagagcttagttggattgtgggggagccggttcaagtcatggttgagttagcaaacccttgcagcttcgacatagttgtggagagcatctatctctctgtccattctgggaattttgatgcctttccagttagcgttagtcttccacctaacacttcaaaattagttttattatctggtattccaacaaaagtcggacaaatatcaattcctgggtgcattgttcattgctttggtgttattacagaacacctattcaaagaggtcgattgtttgctccttggagctgcacaagggcttgtcctttctgatcctttcagatgctgtggctctagcaagttcaagagtgtcaactttcctagcatttctgttgttcctcctctgccattgttaattgccaatgttgtgggtggagatggttctattcttctttatgaaggagaaattcgtgatgttctgataacactgacaaatgccggaaccgtgccagttgaagaagcaaatgttgcattgtcagggaagaatcaggattctgttatttcgattgctcatagcacatggaaatctgcgctccctattaaaccgggtggagaagtgacatttgcagtgactctaagagcctggcatctcagctcagcagatttggaagcagatggcagtagatctcctgtaaattcaaggagaatagcaagagaaggaaccaatccattcttggatattcactatgctggtcctgctgcgaatcttgagaatggagatgtttctcttctacctggaagacgcctagttgttcccttgaatatctgtgttgtgcagggcatgcgtcttgtaagagcacgcctgttgtccatggaaatacctgctcgatttactgaaacacacttaaaacctgtcagtggcaaagacataaacttattgaaggttgatccctataaaggaagctgggggctccgccttctggaacttgagcttttcaatcctactgatgtcgttttttatgttgatgttgctgtgcatttggatgacacggatgtggaccaagaagtaatttcagacggggatgctgcttgtcacaaaactagaattgatcgggactactctgccagagttctcatacctcttgagaacttcaaattgcctgttcttgatgcttccttctttgtaaaggcaagtagtagtgatgaacctcttggatccagggccgccgccatagcagaaaggaatgccaaggcagagctaaatgcgtctatcaacaacttgatttcaaaaataaaagtgaaatggcactctgggagaaatagctcaggtgagctgaatattaaagatgctatccagacggcactacaagcatctataatggacatactgttgccagatcccctgatgtttagctttaagcttgttacgaatggaactgtggtcaatgtcgattctccaaaggattctggcaatgttctgaggtgcaaagatcctatatctgctcatgaaatgacccatatggaagttcagattcgcaacaacacaaaggaaattatccggatgaaccttagcatttcatgcaaagatgttgctggagagaattgcttcgatgaaaatagtgctactgtcctctgggctggtgttcttagcgatatacacctggaagttccaccgttgcaagaggtggtacatcctttctccatgtatttccttgtaccgggtgactactcgctccaagctgcttctgttataatcgatgccacagacgttcttcgtgctcgtgcaaaggcggagtcaccagatgaacctatactgtgtcgcggatccccattccatatccgggtagtcggtacagcataggcagttcttctgagttactcctagtctagaggcctcattttactgtgacaattgtaggtgtggaaaatcttgtacaagagtgatccctggcgccctgcccctcatgcgatatgttttttgtcctttttgttggcttctttgtaagtcatgtcatgtacagtgtacaagcatagtgagtattgtttcaa

SEQ ID NO: 106839 - DNA, 339 bp, Zea Mays
atggcggttcccaaggggcgcgcacgacagctccccaagcgcacgacggtgacggttcctgaggtgcacatgtggtggctgctctccaaggcgcccgttggcgacggttcccaaggggcacgcgcggcgggtcctcaggaggcacgaatagcagcggtggccagaagcgtgcacaggcagcgacacctccctgatgtgagtgtgacagtaaggccctccacctcaaactattttcgagctccgacgagtcgaacgccactgcgacagcgtggatcattcgacgatgacctcctccgatccagcggctttgaggcatccgacgacgacgacctcatctaa

SEQ ID NO: 106840 - DNA, 1559 bp, Zea Mays
atgatggtatccagcctttcactaaccatcagatattcagatgtctatgctagaatcacgcaaatgaaaggttcaagccattctccagggatcgatgtccaccagaccaccaccgatggagacacaatcctgatgacatgcatggtagtgcggaaacggcggcaggccgggatagatctgccgaccgtgccaccgtattgtgcctttccttgctctttcctcacctcctcctccactctgcctcttgctgagctcatcttatccctgacacacgcggcgccgtttgtggatcggctctcgagcctaacagtaagcctggaaaggaaagaagagacagagtacggtaggggaagaactgagtagtggtactagtaataaatagatctggtcagaaacaccttggagggaactacggatcctccgtccggtagattcctgctcctgacgatgccgcgcgctgccatattccagaggggggggggggggggggggggtgattcatgaatggtacagtaaattaaatccttgccggaaagggagttaaaaaaatgtggtggtacttcccctaatggcatagggctcctcggaaaagatgagcggaggggcgtcgtacgaggccgagggagggaagctagctagcccaagaagaaacgacgagaaaagtacagcgccatcaagaagggaaaaaaacctagtagtagagtaaacccccggtcgttccattccatcaaccatcaaatcaaacagcgccatgaatgtaggtgtagaaagacggccggccggaaaacgcccccaaaaaagatgagatcgaaattctactgcgaacgaattaagaagagacgggtcatgcagggaggatataagggctagcctagccacagtgggcggcgccggccggcggtgagcgagagccgcgccctgccgtgagggtgtgccagcggatgacagagagagcagtgagcacgcggccgcgacggcacatccgcgccggtgccgtcacaccggccgtgtgctcactctcttctgtcaccgcgcgcgcgcccgccggaccggcagccatccgggccgccgccgccactgctgccgcttactcactccccagacgacgccacagagcaacctgggtgctttggccgctaatctaggcgaggcgactggcggtgggttgcattgcattgaggaggagcgcgtaccggcggtcccgctttatagcggggaggtgggcccgcgcgcgcaccagcccaggcgtggcaggctggacgctcgcgctccggctgatccgatccatacaggtcgaccgaaggcttttagggttcgcgcgcgcgctgctctctgctctgctccggtgctccccatcgatcgggtggtgagtggtggatgcggcggcgaacgtgggcggctgctgccgtggccatgaaccctctgcccatgcatgagaggtgtgggagctttggcatggcaacggtgagtggaggaatatgaggaggctggaggcaggcagctagctagctaggcttgcgaggtggggttgctcgctccaggagataaggatattcaaa

SEQ ID NO: 106841 - DNA, 225 bp, Zea Mays
ccggcggtcccgctttatagcggggaggtgggcccgcgcgcgcaccagcccaggcgtggcaggctggacgctcgcgctccggctgatccgatccatacaggtcgaccgaaggcttttagggttcgcgcgcgcgctgctctctgctctgctccggtgctccccatcgatcgggtggtgagtggtggatgcggcggcgaacgtgggcggctgctgccgtggccatga

SEQ ID NO: 106842 - DNA, 363 bp, Zea Mays
atgatggtatccagcctttcactaaccatcagatattcagatgtctatgctagaatcacgcaaatgaaaggttcaagccattctccagggatcgatgtccaccagaccaccaccgatggagacacaatcctgatgacatgcatggtagtgcggaaacggcggcaggccgggatagatctgccgaccgtgccaccgtattgtgcctttccttgctctttcctcacctcctcctccactctgcctcttgctgagctcatcttatccctgacacacgcggcgccgtttgtggatcggctctcgagcctaacagtaagcctggaaaggaaagaagagacagagtacggtaggggaagaactgagtag

SEQ ID NO: 106843 - DNA, 2156 bp, Zea Mays
aagccaaatctactgccgaccaccacggctggcacgcggagcaccctccagtcctccactccactccactccactccactccactccacccacccaccaataccagcggcagtaaattccgagcagccgctgcccgctgccgaggctcgaggctctctcctcgctccccccacccgtctgctcctcctagggtttcctctcggctcgccggcgtgccgcatcgcctcgcctcgcccttgccgcgggttccgccgctcgggggcacccgaaccgatcctcgcgggagttgttcgtgctgattcctgctgggtcttgtggctcggactctggggcgtcgggtgggaaagattttgccgcccgtgggggtttggatcgagggctctaagccgtgtctccgcaatgccgggctggcctggcggcgattgctagggttttctggtcggatttcggcggaagagctgaggcgttgcttcgagtgcgggagctgtctgcaatccgccgcttgccttggcccgagtttggtgtttccgcagcaatgcctctccgattttagctcgccctggggttctgaagggcgaaggggctgttgggcggtttgagcttgcaaggcgttgctggttcggtccaatgtccggggctagcgcgagggggcggctgtcgccggcgtccagcggcggcggagactctgaaccgcggtccacggggggcaggacgcgctcggtgtccgctgctcgcggcaggaagccctcaccgaggcccgggagggatgtggccgcggcagcgggcgcgacagaggagaagaaacccgcagccgtgctcacattgcagccctcgctcagcgcgcccgcagggatgcgtcggcaggagctgctgctgcgctcggggctgtctcttgacgcgtcctgctcctcggacgcgtccacggactcgttctgcagccgggcatccacgggccggattgggaggccggcgtttggggctaggaagaagaaggctctctctcagactgattacaaggccctttccatgctggaaagggacggtggattgatttcccagactgatgctgctggtgtgaagaggaggtgtgcgtgggtgacagcaaataccgatccctgttatgctgcatttcatgatgaagagtggggagttcctgttcatgacgacaagaagttatttgagctgctagtgctgtcaggagcattagctgaactgacatggccagcaattctgaataagagagacatattcagggaagttttcatggattttgacccagtattggtttcaaagttaagtgagaagaagattattgcgcctggaagtcctagctgctccttgttatctgaacagaaattgcgtggtgttattgaaaatgcacgtcaaatactcaagatcatagaggaatttggatcatttgataaatactgttggagcttcgtgaaccacaaacctatattgagccgattcaggtactcccgtcaagtgcctgtcaaaacatcgaaagcagatgccataagcaaagacttggttcgaaggggtttccgcagtgtcggcccaacagtcgtatataccttcatgcaagtctctggcatgactaacgaccaccttatctcctgctaccgttttgctgaatgcgcggcctcctctgctggcgctgctaaactttctgatggaagcctagcaaattcaagtgatagcagccatggcacggcagagcagaagatgaacgggacgaatgggctggattcaggtcttgaactctccaggactatcgatgagctcagcatttcatagcggggtaggagcggtgctgaagcgatatggtgttagtttgtgtattttatgtgctgtagtataggtgtgattcggcgacctttttctgtagtttttccactcgtcaatgtaggctagaaaaatttttagtcttcggtgtgtcaggacccttgaacgacagcagggtaccgatgtactaccttcgtccggagataattgtctatctcgtattttgaggtgcttccttcgtcccgagataattgtttatctcgtattctgagaagttaaatattttaaatttcgactattttatttaaaaataataatattaacatttgtgtcacgtcacaacaccttggtttcccaaggtacaaaaaaaa

SEQ ID NO: 106844 - DNA, 1833 bp, Zea Mays
ttcgataaaatttaaatccacggtgatccacttttttgcgctggcgaaagctgagcagcctccaccgattctctccaccccgggtccccggtgtccggggagatccatgatcccatcctttcccaccacatgctcggcgcttcccttgacacgtcactaccgtcccagaccagccgcgtacgcctgccttcgctaacgccatggaccagggccacctcaaggacagcctcctcgtcccgtcctcccgcgccgccgcgacgaatgggccccaccaccgccgcgccacgctcgcgccgggaactggcgccggaggcccatgtggcggagccggcggcgtgtccatcgacgtcaacggcctgaagcggcgtggcggcgggaggcgctcgtgggtgcgcgtggacgcggcgacgggcgccgcggaggccgtcgaggtcgccaagccggcgttgatgcggcggctggacctgcccgcgcgggacctccgcctcctcgaccccctcttcgtctacccgtccgccatcctcggccgcgagcgcgccgtcgtctgcaacctcgagcacctgcggtgcatcatcaccgccgatgaggcgctcgttctgcgcgaacccgacgccgctgggggcgccgcagcggaggaggccgtgaggaggtacgtcgacgagctgcagcgacgcctcgtcgaccgcgccgacgacctgcctttcgagttcatcgcgctggaggtcgcgctggaggccgcttgctccttcctagactcgcaggctattgaattagaggctgaagcttacccattactagatgagctgacagcaaaaattagtaccctcaacttggaacgagtccgacgcctaaagagcaagctggttgcattgacaaggagagtacagaaggtcagagatgagatagagcaactgatggatgacgatggtgatatggctgaaatgtatctcactgagaagaagataagaatggaagcatcaatgttagatgacgaggaccttcagggaattggcaatagtcataatgggtttggttcatctctatcggctccagtttcaccagtttcgacaacccctgcaactcggaggcttgagaaggaattcagttttgccagaagcaggcacagcagcttcaagagctcagatagcagccagtacaatatagaagaactggaaatgttgttggaggcctactttgttgttatcgattacaccctcagcaagttgacttcgctaaaggagtatattgatgacacagaagatttcatcaacatacaactggataacgtccggaaccagctgatccaattcgagctgctcctgaccaccgccacgttcgtggtggccatcttcggggtggtctcgggggttttcggcatgaacttcgaggtccctctgttctcggttccgcacgcgttcgagtggaccctcgccataactggggtctgcggcgccgtcgtgttctgctgcttcatctggtacttcaagaagaggaggtttttccccttgtaggtgaaagcttgaagcttctcttctctcgccctgtcaccagagtccagacagcagcgtacgtatgagactgggtacggcaattgtacatgcattgttctcgaaatgcgctgtctgttcacgtgagcttttctccctttttaagctcacgccgctgatcgtgtgtagcttcaccggtctgctgtacactttgtattattgttgttgctgggtagtgggtactgcatgtgacactgttcggccccggaagaggggaaggagcccaacagatcagatcagtgctgttctcctctcccttgcggtgcgtgttgttggcttgttttcc

SEQ ID NO: 106845 - DNA, 890 bp, Zea Mays
gtgagagtcaaggtctcttatatttcgtgtatctgttcgtatcggtagcttttgctgttaatcgtgagaaggttttgtgggagggatctctttgaccttagtacgcccatctcatcgtgttcaggagacatcttcgagaagctgaaatggctcctaaagctgctcctgccaagaagggtgatgccaagacccaggccttgaaggttgccaaggctgtgaagtctggggcagccaagaagaagaccaagaagatccgcacgtctgtgacatttcaccgccccacgaccctgaagaaggctagggaccccaagtacccacgaatcagcactaccggaaggaacaagcttgatcagtaccaaattctcaagtacccccttaccacagaatcagcgatgaagaagattgaagataacaacactctggtcttcattgttgacctcaaggcagacaagaagaagatcaaggctgccgtcaagaagatgtatgacatccaggcaaagaaggtcaacaccttgatcaggcctgatgggaagaagaaggcttacgtgaagctgactcccgactatgatgctcttgatgtggccaacaaaatcggaatcatctaagtgctgcattaggcatctgttgtttcctagttcaatctgttgtgtcctagttctatgtgaaaccagagttttgtagctatggatctcaatcgttccattaccatgtgttatgcacacttctgaatttgatatcatccaagtgaccggttgaactagtttgcgttctgcacttcattacacttggacaccgtcagtctttatgaccagtaattttgtttgtcgtaataggttggttttgcaactcgaccaaataattcgaccaaataaccgtgtatgtgttgtatc

SEQ ID NO: 106846 - DNA, 1868 bp, Zea Mays
attctataaaacctctgcccgggggctagggtttcctcccagccgtcatcgtttcgcgtccgcctcagcccgccgcaaggagaggtaaggtaagccgctctcctctcgccccatctctccactgtccggccgttgtggtctcagcattccgaattgtatgtacttctttgttgggtagccggctcggtcggttcgtggaacagccggatctgctctgtaagcgcttgttctggagaggtctttcggcgggagtgagagtcaaggtctcttatatttcgtgtatctgttcgtatcggtagcttttgctgttaatcgtgagaaggttttgtgggagggatctctttgaccttagtacgcccatctcatcgtggtaaggatgctgtctatgatttcaaatattattgccattgttgaattggaaatggcgctggtttactaatggtcttgctatgtttctgattttggctgggttaacgcctaaacttggctttcggttaacgctagaccgagtactgttatttgttaaccggtagcatttatgtagatgacaaaaccattctatggttcactacacaatttgcattattttgtcttgtctcctttgcttcttcacctatctgacattattttctttctttgtatgtttccagttcaggagacatcttcgagaagctgaaatggctcctaaaggtacacgcctaacatatttctataggtgccatatacttgatcaagaaatgccctgtgtcaaccttgaaattgctataagctgatcgtgcatttcctgttcccttgtttgtctcaccacgacaccatgtattaggaactagtaactagtgggtatttgtacatttaggtcttcgatctaacaacctcctctttgttgtactcatgccttgaccagaacatgagtcctctcaaaagggtgagtatagaattagcaaactgtatttgctgcattatctcttgaatacagatatgatctctaatgcattggcatcaatacatgttgtaatcctgtctattttagcgcacaatcatcatgctgaaattcattacctgtcttttttatcttactgtggtttcattagctgctcctgattacctgttttttttatctaactgtggtttcattagctgctcctgccaagaagggtgatgccaagacccaggccttgaaggttgccaaggctgtgaagtctggggcagccaagaagaagaccaagaagatccgcacgtctgtgacatttcaccgccccacgaccctgaagaaggctagggaccccaagtacccacgaatcagcactaccggaaggaacaagcttgatcagtaccaaattctcaagtacccccttaccacagaatcagcgatgaagaagattgaagataacaacactctggtcttcattgttgacctcaaggcagacaagaagaagatcaaggctgccgtcaagaagatgtatgacatccaggcaaagaaggtcaacaccttgatcaggcctgatgggaagaagaaggcttacgtgaagctgactcccgactatgatgctcttgatgtggccaacaaaatcggaatcatctaagtgctgcattaggcatctgttgtttcctagttcaatctgttgtgtcctagttctatgtgaaaccagagttttgtagctatggatctcaatcgttccattaccatgtgttatgcacacttctgaatttgatatcatccaagtgaccggttgaactagtttgcgttctgcacttcattacacttggacaccgtcagtctttatgaccagtaattttgtttgtcgtaataggttggttttgcaactcgaccaaataattcgaccaaataaccgtgtatgtgttgtatc

SEQ ID NO: 106847 - DNA, 850 bp, Zea Mays
attctataaaacctctgcccgggggctagggtttcctcccagccgtcatcgtttcgcgtccgcctcagcccgccgcaaggagaggagacatcttcgagaagctgaaatggctcctaaagctgctcctgccaagaagggtgatgccaagacccaggccttgaaggttgccaaggctgtgaagtctggggcagccaagaagaagaccaagaagatccgcacgtctgtgacatttcaccgccccacgaccctgaagaaggctagggaccccaagtacccacgaatcagcactaccggaaggaacaagcttgatcagtaccaaattctcaagtacccccttaccacagaatcagcgatgaagaagattgaagataacaacactctggtcttcattgttgacctcaaggcagacaagaagaagatcaaggctgccgtcaagaagatgtatgacatccaggcaaagaaggtcaacaccttgatcaggcctgatgggaagaagaaggcttacgtgaagctgactcccgactatgatgctcttgatgtggccaacaaaatcggaatcatctaagtgctgcattaggcatctgttgtttcctagttcaatctgttgtgtcctagttctatgtgaaaccagagttttgtagctatggatctcaatcgttccattaccatgtgttatgcacacttctgaatttgatatcatccaagtgaccggttgaactagtttgcgttctgcacttcattacacttggacaccgtcagtctttatgaccagtaattttgtttgtcgtaataggttggttttgcaactcgaccaaataattcgaccaaataaccgtgtatgtgttgtatc

SEQ ID NO: 106848 - DNA, 860 bp, Zea Mays
attctataaaacctctgcccgggggctagggtttcctcccagccgtcatcgtttcgcgtccgcctcagcccgccgcaaggagaggtaagttcaggagacatcttcgagaagctgaaatggctcctaaagctgctcctgccaagaagggtgatgccaagacccaggccttgaaggttgccaaggctgtgaagtctggggcagccaagaagaagaccaagaagatccgcacgtctgtgacatttcaccgccccacgaccctgaagaaggctagggaccccaagtacccacgaatcagcactaccggaaggaacaagcttgatcagtaccaaattctcaagtacccccttaccacagaatcagcgatgaagaagattgaagataacaacactctggtcttcattgttgacctcaaggcagacaagaagaagatcaaggctgccgtcaagaagatgtatgacatccaggcaaagaaggtcaacaccttgatcaggcctgatgggaagaagaaggcttacgtgaagctgactcccgactatgatgctcttgatgtggccaacaaaatcggaatcatctaagtgctgcattaggcatctgttgtttcctagttcaatctgttgtgtcctagttctatgtgaaaccagagttttgtagctatggatctcaatcgttccattaccatgtgttatgcacacttctgaatttgatatcatccaagtgaccggttgaactagtttgcgttctgcacttcattacacttggacaccgtcagtctttatgaccagtaattttgtttgtcgtaataggttggttttgcaactcgaccaaataattcgaccaaataaccgtgtatgtgttgtatc

SEQ ID NO: 106849 - DNA, 869 bp, Zea Mays
attctataaaacctctgcccgggggctagggtttcctcccagccgtcatcgtttcgcgtccgcctcagcccgccgcaaggagaggtaagttcaggagacatcttcgagaagctgaaatggctcctaaagtttcattagctgctcctgccaagaagggtgatgccaagacccaggccttgaaggttgccaaggctgtgaagtctggggcagccaagaagaagaccaagaagatccgcacgtctgtgacatttcaccgccccacgaccctgaagaaggctagggaccccaagtacccacgaatcagcactaccggaaggaacaagcttgatcagtaccaaattctcaagtacccccttaccacagaatcagcgatgaagaagattgaagataacaacactctggtcttcattgttgacctcaaggcagacaagaagaagatcaaggctgccgtcaagaagatgtatgacatccaggcaaagaaggtcaacaccttgatcaggcctgatgggaagaagaaggcttacgtgaagctgactcccgactatgatgctcttgatgtggccaacaaaatcggaatcatctaagtgctgcattaggcatctgttgtttcctagttcaatctgttgtgtcctagttctatgtgaaaccagagttttgtagctatggatctcaatcgttccattaccatgtgttatgcacacttctgaatttgatatcatccaagtgaccggttgaactagtttgcgttctgcacttcattacacttggacaccgtcagtctttatgaccagtaattttgtttgtcgtaataggttggttttgcaactcgaccaaataattcgaccaaataaccgtgtatgtgttgtatc

SEQ ID NO: 106850 - DNA, 1823 bp, Zea Mays
attctataaaacctctgcccgggggctagggtttcctcccagccgtcatcgtttcgcgtccgcctcagcccgccgcaaggagaggtaaggtaagccgctctcctctcgccccatctctccactgtccggccgttgtggtctcagcattccgaattgtatgtacttctttgttgggtagccggctcggtcggttcgtggaacagccggatctgctctgtaagcgcttgttctggagaggtctttcggcgggagtgagagtcaaggtctcttatatttcgtgtatctgttcgtatcggtagcttttgctgttaatcgtgagaaggttttgtgggagggatctctttgaccttagtacgcccatctcatcgtggtaaggatgctgtctatgatttcaaatattattgccattgttgaattggaaatggcgctggtttactaatggtcttgctatgtttctgattttggctgggttaacgcctaaacttggctttcggttaacgctagaccgagtactgttatttgttaaccggtagcatttatgtagatgacaaaaccattctatggttcactacacaatttgcattattttgtcttgtctcctttgcttcttcacctatctgacattattttctttctttgtatgtttccagttcaggagacatcttcgagaagctgaaatggctcctaaaggtacacgcctaacatatttctataggtgccatatacttgatcaagaaatgccctgtgtcaaccttgaaattgctataagctgatcgtgcatttcctgttcccttgtttgtctcaccacgacaccatgtattaggaactagtaactagtgggtatttgtacatttaggtcttcgatctaacaacctcctctttgttgtactcatgccttgaccagaacatgagtcctctcaaaagggtgagtatagaattagcaaactgtatttgctgcattatctcttgaatacagatatgatctctaatgcattggcatcaatacatgttgtaatcctgtctattttagcgcacaatcatcatgctgaaattcattacctgtcttttttatcttactgtggtttcattagctgctcctgattacctgttttttttatctaactgtggtttcattagctgctcctgccaagaagggtgatgccaagacccaggccttgaaggttgccaaggctgtgaagtctggggcagccaagaagaagaccaagaagatccgcacgtctgtgacatttcaccgccccacgaccctgaagaaggctagggaccccaagtacccacgaatcagcactaccggaaggaacaagcttgatcagtaccaaattctcaagtacccccttaccacagaatcagcgatgaagaagattgaagataacaacactctggtcttcattgttgacctcaaggcagacaagaagaagatcaaggctgccgtcaagaagatgtatgacatccaggcaaagaaggtcaacaccttgatcaggttagcacttgccccagtgtaattttttcctgcacgatttattatgttgtgcaactaaagagttattcttatcgtgtctgtgcaggcctgatgggaagaagaaggcttacgtgaagctgactcccgactatgatgctcttgatgtggccaacaaaatcggaatcatctaagtgctgcattaggcatctgttgtttcctagttcaatctgttgtgtcctagttctatgtgaaaccagagttttgtagctatggatctcaatcgttccattaccatgtgttatgcacacttctgaatttgatatcatccaagtgaccggttgaacta

SEQ ID NO: 106851 - DNA, 908 bp, Zea Mays
tggaattcgacacacaacatgattatggaggccattgagtacaaagttgtcttgaagagatatgctgaggaacaacttgagccttcaccagatgatgaagagtggacaaattctgaggcaattggagagtttcttggggcatttgaggaagctacaaaagcattctcagcacatagaagtccaacatctcatttgtttttgcataatgtgctatgtatccatcaagctctaagaaatgaaaattggcaaatcaattgtgtgcttgaggatttggcactagcaatggattctaagttcgataaatactgggagaagggcaagtataatatggcacttgtcatagccactatacttgacccgtcaaagaagatggattttttggactttttttatgagaagacgtgtcaacagtttatcgacatccagataaacatgtccttggccaaacaatggttcactaaattttttggtgaatatgcaaaaattgttcaaaaagatactacagtctcacctattgttgctacaaatactagtactttgggctcaccgattcttggaaaaagaaggttggataaagaattttctcagtggtcccaaacaagaggaagacgtcttgcaaagtctgagcttgacgcatacttagaagaagaatttgtgagaacagatgaaagatttgaaattctaagttggtggaggacaaatacaaacaaatacccagtgctttcagctatggcgcgtgatttattagcaatacctttgagcactgttccttcggagtctgcttttagcgccggtggtcgcattcttgctgataatcgaagctcaatgacaccagaaacacttgaatgccttgtatgctgcaaggattggttgtatgagtacccaaatattcaaggtacttgataagt

SEQ ID NO: 106852 - DNA, 850 bp, Zea Mays
gttcggtgctcctcctagtcctagcctcagccagcgctcctcctagcctcggcttgccgcagcctgcatcacggatcccctcccatcacggatcgacgctccccatcacggatcccgctgggcgctgggcgctccccatcacggatcagcctgcatcacggatcccgctgggcgctggcctcggcttcacggatccactgccagcggcctagctccccatcccgtcgtggctggcgagcagaggcgtcgccggctcccctgccagcggcctagctccccatccctccctggctggcgagcagatgcgtcgtcggctcccctgccagctcccccgccatctctacgccagaggcccagagtcgtggcaagcagagcgcgattgaacgcctgtcaccagcacgactgaacgtccgccgccctacaacagcaacagaaagcatcctcctgtaactggattgtggctgctccgttgctgtttgactcagtgaagttcagcttgaaggacagagaactgacaccggtgatattacaaaacacgattgagtggagatggatttaaggatatctgagggttctggtactaataccaccttggatgaccaatcgatacaatcgccgaccagaagggcaaaggtttgggagtattttctacaagagttagttgaggttgatggagtgatgaaggctgtttgcaaatactgtggggcgaagctgacaagtaaaaggaattcaggaacaaatagccttagaaaccatgttgcggatacatgtcctaaaattccagttgaggaccgcaagcaattcattgctacaatgagaaaaaggacaggagaaggttcatttgtgtttg

SEQ ID NO: 106853 - DNA, 2321 bp, Zea Mays
aaggcccaactccactcatcgccactgcgccgaaacccaaagcggggaggaggagcggaaaagaaaaggaaaatgggaggagcggaagcaagtccgagcaagtcagaggatccgccggcctatctccgcctataaaatgccgtcccaccccccaccttcctagcagctgctctccaccaagagctgctggcaccaccaaaccaatcgctggatttgtccagagtatttccggtttcaccgccctagatctgacccgagacgccgcgtcttcgctgagatggcgattactgtgaggcggtcgacgatggtgcgcccggcgcgggagacgccgcggcagcggctgtggaactccaacctcgacctcgtggtgccgcgcttccacacgcccagtgtctacttctaccgccgcgacggccccgtgccggatgcggaggggttcttcgacggcgagcggatgcggcgcgcgctggcagaggcgctcgtgccgttctatccaatggcgggccgcctcgcgcgggacgaggacggtagggtcgagatcgactgcaatggcgagggagtgctcttcgtcgaggccgacgcgcccgatgcctctgtcgatgactacggtgacttcgcgcccaccatggagctcaagcgcctcatcccgaccgtcgattacaccgacgacatctcggccttctcgctactcgtgctccaggtgacttatttcaaatgtggaggcgtctcccttggtgttggcatgcaacaccatgcagcggatggcatgtctggcttgcacttcattaactcatggtctgacctctgccgtggagctcaaatttctgtcatgcccttcattgaccgcacccttcttcgtgctcgtgatccaccaactccatcttttcaacatatcgagtaccagtctgccccagctatgttgtcctccacaacccagttccttgcttccaagtcaaagccacctgccactgctgtggacattttcaagctcactcgctcagaccttggccggctgcgctcacagcttcctgcaggggaaggtgcaccccggttcagcacatatgcagtgctagcggcacatgtctggaaatgtgtctcccttgcacgcagcctacctcctgaacaacccaccaagttgtattgcgccactgatggccgacaacggctacagcctccactaccagatgggtactttggcaatgtcatcttcaccgcgacaccacttgctgaggcgggcaaggtgaccagtgagctggcagaaggagcagcagtcatccagggagcactggataggatggacaacgactactgccgctcagcgttagactacctggagcttcaaccggatctgtcagcacttgtgcgtggagcgcataccttccgctgcccgaacctagggctcaccagctgggtgcgccttcctatccatgatgctgacttcggatggggccggcctgtgttcatggggccaggtggcattgcgtatgaaggtctggcgtttgtcctcccaagtgcaaatggcgacggcagcctgtccattgctatctcgttgcaggctgagcacatggagaagttccggaagctaatcggcgaagcttaaacggtgccaactgttgaaggaggatgttattgggcgagaaggattatgctctgcccaaattctcagataaaatactgaagtttcaagtgaacccagtggctgcactttcactttgaagacttgcagaggaaattcatggtcacttcattttgtgagattaattatagagaaagggtagaaattatatgaagaaacatagtaaaaaatcattgttaggaacaaactccaatagcaggctctacttgtacgtcgcagacataagctgagactgagctgcgattgcaacagattatactcttctatcaggttgactgaagttccctcagtggccaatcttggatctttctgcaggctgatgagatgcaactgagcacacagcctgaggttgtggcggtgtggcctgatctggcttgccattgtcggacatcgtcatcggcgccggggacaccgagcagttcgtcgaggcactagtttttcaacactgctgggtggtgagcagttctattacgccatgacgccaccttgcacaaactttacgttgcgattacctctgcatagcggcggtcctaacattctaagggcccgggacaaggtttcaaatagaggcctttcaaattatttttaatgtataaatgttactaattaaacactcaaaatacatctaaaaatatttatatcaaataataagtaaataaaagaatatatattatagtattacttt

SEQ ID NO: 106854 - DNA, 2045 bp, Zea Mays
ctcccgtccccgtccctgtcccaccaacccccaaggcccaactccactcatcgccactgcgccgaaacccaaagcggggaggaggagcggaaaagaaaaggaaaatgggaggagcggaagcaagtccgagcaagtcagaggatccgccggcctatctccgcctataaaatgccgtcccaccccccaccttcctagcagctgctctccaccaagagctgctggcaccaccaaaccaatcgctggatttgtccagagtatttccggtttcaccgccctagatctgacccgagacgccgcgtcttcgctgagatggcgattactgtgaggcggtcgacgatggtgcgcccggcgcgggagacgccgcggcagcggctgtggaactccaacctcgacctcgtggtgccgcgcttccacacgcccagtgtctacttctaccgccgcgacggccccgtgccggatgcggaggggttcttcgacggcgagcggatgcggcgcgcgctggcagaggcgctcgtgccgttctatccaatggcgggccgcctcgcgcgggacgaggacggtagggtcgagatcgactgcaatggcgagggagtgctcttcgtcgaggccgacgcgcccgatgcctctgtcgatgactacggtgacttcgcgcccaccatggagctcaagcgcctcatcccgaccgtcgattacaccgacgacatctcggccttctcgctactcgtgctccaggtgacttatttcaaatgtggaggcgtctcccttggtgttggcatgcaacaccatgcagcggatggcatgtctggcttgcacttcattaactcatggtctgacctctgccgtggagctcaaatttctgtcatgcccttcattgaccgcacccttcttcgtgctcgtgatccaccaactccatcttttcaacatatcgagtaccagtctgccccagctatgttgtcctccacaacccagttccttgcttccaagtcaaagccacctgccactgctgtggacattttcaagctcactcgctcagaccttggccggctgcgctcacagcttcctgcaggggaaggtgcaccccggttcagcacatatgcagtgctagcggcacatgtctggaaatgtgtctcccttgcacgcagcctacctcctgaacaacccaccaagttgtattgcgccactgatggccgacaacggctacagcctccactaccagatgggtactttggcaatgtcatcttcaccgcgacaccacttgctgaggcgggcaaggtgaccagtgagctggcagaaggagcagcagtcatccagggagcactggataggatggacaacgactactgccgctcagcgttagactacctggagcttcaaccggatctgtcagcacttgtgcgtggagcgcataccttccgctgcccgaacctagggctcaccagctgggtgcgccttcctatccatgatgctgacttcggatggggccggcctgtgttcatggggccaggtggcattgcgtatgaaggtctggcgtttgtcctcccaagtgcaaatggcgacggcagcctgtccattgctatctcgttgcaggctgagcacatggagaagttccggaagctaatcggcgaagcttaaacggtgccaactgttgaaggaggatgttattgggcgagaaggattatgctctgcccaaattctcagataaaatactgaagtttcaagtgaacccagtggctgcactttcactttgaagacttgcagaggaaattcatggtcacttcattttgtgagattaattatagagaaagggtagaaattatatgaagaaacatagtaaaaaatcattgttaggaacaaactccaatagcaggctctacttgtacgtcgcagacataagctgagactgagctgcgattgcaacagattatactcttctatcaggttgactgaagttccctcagtggccaatcttggatctttctgcaggtgttgtgcagatcttagccctttttctgaggcttgaaaaagaaccccaaactgagattctc

SEQ ID NO: 106855 - DNA, 183 bp, Zea Mays
atggacgaaggaggaagggagccgagcaaagggccactacctagagcggatgcacacaggatctgcagaacagagaaatcgaacaagatccaatcgatgggcaggggtagcatcaacctggggattctggggaacttggcagaggcggaagaatcatttggaacttttggggagcgtttgtag

SEQ ID NO: 106856 - DNA, 415 bp, Zea Mays
aactggcaactattgggccttatgatttatgatgaaatgttcaggtggcactgccagcagaagtgatccgttgacttcggctatgggcaacctgtgctgctgtgttcaagttgaccagttgactgtggccatcagggagcagtttggcaagtttgacagcgtgcttgagccaggatgccactgcatgccttggttcgtcggcaagcgtgtagctgggcatctcacacttagactgcagcaacaggatgtgccctgtgagacaaaaacaaaggacaatgtttttgtgaatgtggtggtatctattcagtactgcgctctggctgacaaagcaagtgacgctttctacaaactgagcaacacaaggtcccatctgcacttcaatacagaaagaagaccattctcatcttcaagataa

SEQ ID NO: 106857 - DNA, 228 bp, Zea Mays
atggcacggtggcgatgggttcgccggccatctgtggggaagggggactgggaaggcgggactcttcaatggatagtggacgccgatgatggggcgaggagagtggatcgcgccttccatgttgagctggggctcggtcgcaccttccacggccttccatggggagccagggcaaggtcatcgcggtggggcaagagaccgttgattgcgggaggccatagagagtag

SEQ ID NO: 106858 - DNA, 373 bp, Zea Mays
atggcgctcggcacccagtgcccctgctcctcttcctggcagccgggtggagctcccccccatgggcgagcctccaaccttccctttgagctcccacaaacccaagtacagggtgcccccgcgagctccatggccgcgcgtgccaggccttcgccatctatggagctcggcgttgcccccttcgccgcgcgctgctcatcctctccaccgctcggagatccgcccgatgcctcaccagagcgtgtggatgtcgcggcgtccaccaattcgggggtcatggcgtcgtatctggggcgatttcttgccggtgatgaagctccgctgcggaccacaaatcctccgtgggcgggcctctgcacgtcgtttccgccgg

SEQ ID NO: 106859 - DNA, 950 bp, Zea Mays
aacacagggatcatatattcgttcacagatcgattcgcaggcgggtggtcggcgtctcactatccaccaccgcgccgctccggtttaatttctcctcgaccggccagcgcaattctgtgcctcgatcgatcggtcgtaaggcaagtgagcaagctatatatatatatatatatatatatatataggagattcttcgagcgagctagtagcgagatgggttccgccgtcctcttttactgcatctgcatcgccgccgtcgtcgcattgtcgtcgtccatggtcgccgtcgggtccgccgccccgggggaaacccccaagttcatctcggcgagcgcccttgagtgctccgctaacgtaacggaaatagcaaaggcgcgcaagctgatcgatgtccatggccacgggctgtgcccggtgcggttcgaccacacgcgcgggatcagcgcggtggccagcagctgcaaggaccgcccgctgccgtcgccggagcgctgctgcggggcgctcaaggcctacgcgtgcccctacagcgagctcatcaacgacaacgccaacaacggctgcgccagcgagatgttctacgtcatcatgacacgcggcaggctgcggccgggcctcttctcgcagctgtgcgtcgaaggcccgctgggcctccagtgctgatcaacactggcctgctgccgcccaccgcccggaatctatctatctatctatctccttggaaacatatatcagacgatgccccagcgcgtgccgctgatttgatgcaagtatgcggttttcatttgtaaatcggagtcgatccatactaagcgatacaggaacaccctgtatcaattttcacttgtgatgaaattgcacatgtactcatttgttgtacacacatacacacacagaaaaaaaaacgttagaatataagaggatatatgtttgtcaatcgaccgttagac

SEQ ID NO: 106860 - DNA, 1993 bp, Zea Mays
ctgactacgtacgtaccatccgttgggcatggcaaacctgctacagcagtccatgcgcgagctgatggttccacgagcatggtgcctgctgctgctccctatcttcgtcttgcttctgcgctactcggtgagtagcaagagggcaaggaagaggcagcggcagctagacggagacgacgacgacgaccatctgcctctgccgccttcgcctccgccgctgccgttcttcgggcacctccacctcatcggctcgctccctcacgtctccctccggaacctggccacgaagcacggctccgacctcatgctgctccgcctcggcgccatgccggtgctcgtcgtgtcgtcgccccgcgccgccgaggcggtgctgcgcacgcacgaccacgtgttcgcgtcccggccgcgctctctggccgccgaggtcgtcctgtacggctcgtccgacatcggcttcgcgccgtacggggaccactggcggaaggcgaggaagctcgtcaccacccacctgctcaccgtcagaagggtgaggtcgttccgccacgcccgcgaggaagaggtgagcaaggtgatggctcagatcgccgaggcggccgctgccggcgcggcggtggacgtgggcgagctgctgggctcgttcatgaatgatctggcgtgccgcgcagtgatgggcaagtcatccggccggacgaccaagcagttgcggcagctggttgccgacacgtcgcccctcttgggaggcttcaacgtcgaggagttcttcccgttcctggcccgcttcggcgttctcagcaaggtggtccgtgccaagtccgagatgttgaggaagaagtgggacgagctcctggacgggctgatcgacggccatgagagcacgtacaagccgacgacagcggcggcgccggcgagtgatctcaaggacaaggacgaggacgaggacttcatacatatcctgctctctgttcgacaggagtacggcctcaccagagaggccatgaaagctatcctgcttgacgtatttttcggcggcatagacacatcagcttcactactcgaatacaccatgattgagctcatccagaggccacacgtgatgaagaaactacaggccgaggtgaggagcagcagcctgcccccgcaccagcaccagcaggggcaagaaatcctgagagagaccgacctgaacaacatgtcgtacctgagagccgtcataaaggagtcgctccggctacgcaccgtgacgccgctgctggcgccgcacttgtcgatgtcccgctgcgccatcgacgggctcgcggtccccgccggcgtgcgcgtgctcatcaacgtctgggccatcggcagggacccgcgcttctgggaggacgcggaggagttcgtcccggagaggttcctcgacggcggcagcgcggcggacgtgggcttcaggggcacccatttccagctcctgccgttcagcgccgggcgaaggcagtgccccggggtcaacttcgcgatggccgccgtcgaggtgatgctggcgaacctcgtgcaccgcttcgactgggagctgccggcgggcaaggcggcgcgcgacattgacatgtccgaggagttcgggctggtggtgcaccggaaggagaagctccttctagtcccgaaactacacgcgtagcgcgtggctccgatccgtgctgctgcatccaagcgcggtcgtccatcagattaaaatgtggcgtgggttatattattattgctagtgtgcacatcaataggggtcatgcacacaacagtgtagtgtgtacttatttccgatcgacccgtagattgtgcttgaatacttgtgtccaacccatgcatttgtagatactgtgatggcgtacgtgcttgcataattggatgattagtgcatccataagttgtagtgtaatgttccgcttacattcccatacatggttcttgtataaatacaataatgctttgaattttctgattgtatgtattgatgtttact

SEQ ID NO: 106861 - DNA, 1392 bp, Zea Mays
atgccggtcatcgtggtgtcgtcgccacgggccgccgaggcggtgctgcgcacgcacgaccacgtgttcgcgtcgcggccgcactccttagtcgctgagatcgtcctctacggcccgtccgatgtgggtttcgcgccgcacggggaatactggcggcaggcgaggaagctggtcaccacgcacatgctcagcgtcaagaaggtgcaggcgctgcgccttgcccgcgaggaggaggtgagagtggtgatggcccagattggcgaggcagccgcggcaggtgcggccgtggacatgagcgacctgctcggctcgttcgtcaacgacctgggctgccgcgccgtgatgggcaagtccttccggagcgagggccggaacaagctgctccggcagcttctcagtgacacctcgccgctgctggctggtttcaacgtggaggagttcttcccgttcttggctcggtttggcgtgctcagcaagatggttcgcgcgaaatccgagaggctgaaacggaggtgggaccatctgctggacaagctgatccaggaccacgagagggataacagcagcgatccgaaagataaagacgccaatttcatccatgttctgctgtccgttcgacatgagtacggcctcagcaggcagcagatgaaaggaatcctgcttgacgtatttttcgcaggaatagagacgtcgtcttcggtgctggacttcaccatgtcggagctcatgcggaggccgcgtctgatgaagaagcttcaagccgaggtggacagcagcgtccccgagggacaagaagccgtgagcgaagctgatctagccctagccgacatgacttacctgagagccgtcgtgaaggagtcgctccggctacaccccgtggcgcctctgctcccgcacttctccatggctccctgcagcatcgacggctacaccgtcccggctggggtgcgggtcttgatcaacgcgctggccatcggcagggacgcgcgctactgggaggacgccgaggagttcctccccgacaggttcgtcggccacggcagcgccgcgcacgtcggcttcaaggggaacgatttccagttcctgccttttgggtctggacggaggatgtgcgctggggtgaacatggggatagccagcgtcgagctgatgctggctaacctcgtgcgtcgttttgactgggagctgccggtggggaagaagagaggtgacatcggtatgtcggaggtgtttgggttagtagtgaacagaaaagacaaacttgtattggttccgaaattgcgcgtgtagaatttgtacgttatatatgtatgttgcctggaagtgcaaaataagatgtcgcacttgcatgtgtgggcacagtacaatttatatatgacaacaagctccggc

SEQ ID NO: 106862 - DNA, 1897 bp, Zea Mays
atggtgtccgtcttctactcgcaagtggcaagcgatatatcaagctccatatcgatcgagctctgtaaaccggagcggcggcaccatttcgttaccatggagaacctggcagggcagcagttcgtttatgaggtgacgagtctacgagcattgtttctgctgctgctcctctctcccttcctcttcctcatcatgcgcaacgcgcgagcaacaacactaatgttcgataccaagaggacaaggggccaccggcagcctgcagatcggcagcagagcctcccgccgtcgcctccggcagtgcctgtcctcggccacctgcacctcgtcggctctctcccgcacgtctccctccgcagcctcgccaggacgcttggcgcggacctcatgctgctccgcctgggctccacgccggtgctggtcgtgtcgtcgtccagcgccgccgaggccgtgctgcgcacgcacgaccacgtgttcgcgtcgcggccgcacgccctggtctccgaggtcgtcctgtacggtccgtccgacgtcgggttcgcgccgcacggcgactgctggcggcgggggcggaagctcatcaccacgcaccttctcagcgtcaacagggtgcagtcgttccgccacgcccgggaagaagaggtgagcgtggtgatgggccggatcgccgaggcggcggccgctggtgcggcggtggacgtgggcgagctgctcggctcgttcacgaacgacctagcgtgccgcgccgtgatgggcaagtccttccggagcgagggtcgcaacaagctgttccgggagcttgtcctcgacaccaccaagctgctggtcggcttcaacgtcgaggacttcttccccttcctggctcgcttcggcgtgctcagcaagctggtccgcgccaagtccgagagactgaggaggaggtgggacgagctactcgataggctgatcgaggatcgtgagagcaagtatgaggcggcggcggcgagtgatctcaaggacgatgatgacgataacttcatacatgtcttgctctccgttcgacaggagtacggccatattacgagggagcaaatgaaagctctcctgcaggacgtgtttatcggggggatagactccacatcttcgctgctcgagttcaccatggctgagctcatgcggaaaccacgagtgatgaacaagctccaagccgaggtaaggagcagcacgcccgaggggcatgatggagtcgtcggcgaagacagcctggagcacatggcctacctgagggccgtcacaaaagagtccctccggatccataacgtgacgccgctcctggccccgcacctgtccatggatagctgcaccatcgatggctacacggtccccgtcggggtgcaggtcctgatcaactcttgggccatcggcagggacacgcgctactggggcgacgatgctgaggagttcgtccctgagaggttcatggatggcggcagcgccgttcatgtcagcttcaaggggagtgacttcgagttcctgccattcgggtctggacgaaggatgtgcgccggggtgaacttcgcgatggccacggtagagctaatgttggcgaacctcgtgcatcgttttgactgggatttaccaccggggcaggagggtcgcgacattgatgtgtcgcaggtgttcggactagtagtccgccggaaaaagaaacttctcttggttccaaaattacgtgtatactagcatccccctccccgcacccaagatatactgggctgttgcatatatgtatgtactgcaataaaggttgcctatatgtaagcttacgacattacttgtactgggtatatgatgcaataatgttattagaaatttaagtacattcgatactaatttaatccagaaaaatattaatagcatg

SEQ ID NO: 106863 - DNA, 261 bp, Zea Mays
gttagacatggtgaagcagttgggataattggaccttcagggacggggaaatcaactatattgaaggttatggctgggctgcttgctccggacaaggtctttcaaagtgctgcactttttgattctctcacagttcgtgaaaatgttggattccttttatataaaaattcaagcttacccgaggaccgcattggtgaattggtgacagaaactttggctgcagtaggactaaaggcaagtcaagcttccatattcgtttag

SEQ ID NO: 106864 - DNA, 540 bp, Zea Mays
atggaggtgcaatccactcttattggtaggaagcaagttttgtcaaatagcggtattgcaagtatctcggttgtgttgatagcattagtcatcggagggacagataggtgtttagattcaaaagagtcaactcttgttactgctcttattgatggtgttattggacattatgcttgctacaatggagatacatggtcatctgagctcgacattctttgtaaagctgagccacgaattatcacaacattcaaggtggtgggagtagatggtccaatattaacctttaaaatggtaaagccaacaaagttcaatatttacaataactcgatgtgtccagggtttgcaagacaagattaagcagctctaagattaagatagttgccatcgatcttgccacaatttttacttgagctgagcagataacaagcggcttggggtattgatatttatttttctatcttgtttaatatatttgctcaactaatttcaaaacagttagtgctttagcatctcatcacagatcctaaatacttcctttgt

SEQ ID NO: 106865 - DNA, 744 bp, Zea Mays
atggaggtgcaatccactcttattggtaggaagcaagttttgtcaaatagcggtattgcaagtatctcggttgtgttgatagcattagtcatcggagggacagataggtgtttagattcaaaagagtcaactcttgttactgctcttattgatggtgttattggacattatgcttgctacaatggagatacatggtcatctgagctcgacattctttgtaaagctgagccacgaattatcacaacattcaagagtgcggaaggctaccattggtggtgtaaccatagatgggcttcttgcaacagcaattggattctcgattgggcttgcatttgtgctgataggatttttcaccactcaatgttctcctgatgtattctagaaccagctgctagctatacccttggcacaactgccgccctatgtagaagtttgatcgattccttcttgagcgcaacatttcagtatagtgggttctacagtgtttgcaaaaaggtaaagccaacaaagttcaatatttacaataactcgatgtgtccagggtttgcaagacaagattaagcagctctaagattaagatagttgccatcgatcttgccacaatttttacttgagctgagcagataacaagcggcttggggtattgatatttatttttctatcttgtttaatatatttgctcaactaatttcaaaacagttagtgctttagcatctcatcacagatcctaaatacttcctttgt

SEQ ID NO: 106866 - DNA, 234 bp, Zea Mays
gagaaacacatcctctacaatgaggaagaaaaattttgaggggtcctctgtactctcttgtgaacaagatcatagtgtctgcatgccattaattgagagtggtacgtgttggaaggtgaaggtgcaagaagccatcaacccttttttctgaatgggttattggtgcagactgatttaggagggtttttattgccattgttctgatttgctgctcctcataaaaagccaattgta

SEQ ID NO: 106867 - DNA, 2736 bp, Zea Mays
gtgctgtgggaggtcgagctcgtcgatgcgacgctcgtcgtaaccggtagctgctgcggtgcgtgcgggagtgtgggggtacaacacgtcggggcgaattcaggtggtgctgagcagggctcgtcgacggtgctgcagctcggcagggctgtgctgcgcgcacatgcacggtagcacggaacgtggctcggtcgcagctcacctcgccggggctgaggacgggctggccggagagcggctaggcgcgacggggctcgcgtcgaccaagggagtggagagcggtgcacgccatggacggcatttggggagggaaagggcagcacgacatggaagaaaagggagaagagacttgccgagcgggagaagcggtttgggaagaggaaaatcgacttgtttgccgcttcttgccggccgtaggaacagccgcgtcggggcgaagcgcttgcgggagaagcctcccagaagttgtgtttggttcagcttccggcttctggcggccagaatctccccagaagctgaaccaaacaggggcgttgtgtcgcgtttccctgcgggtggctggggcggctgtcccgcgagctgcactggaccttcgtgctcgcggtcgccgccgtctacggtctacggcgcctgtcaaggcgtcggcaacgccatcggcggagtcgccgcggggtactactggaaggacgtgcagcgcgtgcagccttcggtggcccagttctaccaaggcgtcacggacgcgccgtggatcgtcaaacccatctggggcctgctcaccgacgtcgtccccgtggccgggttccgccgccgcccatacttcgttctcgcaggcgtgattggcgtgtcatctatgctgatgttttccctaaaccacgagctggggattatgccggcgttgctgatgctgacggcgcagagtgcgggcgccgctgtaggcgacgtgacagtggacgctctggttgctcagaacagcatcacgcacccgccccttgctgctgatatgcaaagcttgtgtgggtttagctcctctattggagcgctgcttggattctccctaagtggcttgcttgtgcactcaatgggctcccagggggctcttggtctgttgagtatcccctctgcactggtgttattagctggcattctgctgaaggagaaccgtggtacagaatttgattacatgcaggttcacaagaagttctataaagcaatacaatccatgggaagaacactgaagtgccctcaggtctggagaccatgtgcatatatttttgtttctctcaatttaagcctggatattcaaggaggaatgttctattggtacacggaccctgttgttggaccaggattttctgagggatatattggtctcatctattcaattggttcagttggttcactaattggagttttactataccaaagcaccctaaaggactatacttttcggagcatgctattatggggtcaagtgctctcaagtctggcaggaatgcttgatctggtgttagtgacccggctaaacctgaaaattggcatgccggattacttctttgcggtggctgataacacagtttcccaaatggttggtaggctccaatggctaccactacttgtgctttgctctaagctttgtcctcctggcaccgaagggacattgtatgcattactcatgtctctacaaaatgccgggttgctgatgtctgcttggtggggtggcctgctgctgcacatgctgaacgtgacccgattggagttcagtaacctctggatcgccgtcttgattagaaacatatcaaggtttgtccctttgatgctactgtttcttgttcctgactgtgatcagaactcagcactcctgcctgcagagatgcttcatggcagtgaatcaacagaaaccatggaaaaaggatcaaatgagttttctgttcttgttggagacgattgtggctgcatttctcctgatgtgacagttgataatgagcaaatcaaaatgtttgatgctgaaattgatgatgtcgaattgatcccactggttaacaagagcggattgaccatctcatgatgccttgaatgccaggatccttatgctgattctactagacattgttcggttattcccatcctatatagattggatgggattggaaaaaattatgaggagacttttttactgcgacatgaacggtaaagggaattgaagaatttggtaatgaaggccgatgaattactgttacaggggtggtggtaccagtcatgtgctggagtactttagttggcaattcagttccttctgtcactgtcgccctagacgagcgactgactgaccacaaagtttcttgttacagaaagcccattacttatttaatttctttcttttgaaaggagaaaatatcgtgaaagtgtctctagctgagttggttaggtggtaatataatgaccccatccgatgctacaatactgctggcattgaagctaatgaccccaaaaatcaggtttggagtttaattttgaggggtacttttcccgacgacacaccatgccaggataggaccattctgcctctatttgctcagtattcaactcccccctgacaaaattgagaaactcccttgttgttcgagataaagaaatttccttccttttaggtatttagctttcaccagcttaaaccaagtttcatcagagcctttgacttttccatatccacttaattaatagatattactcatttgg

SEQ ID NO: 106868 - DNA, 333 bp, Zea Mays
ttgctggtgaataataggacaacaagcgccagtgaaatagttgcttcagcacttcatgacaattgcaaagctgttcttgttggcgaaaggacttttggcaagggcttaatccaatctgtatttgaacttcatgatggttctggtattgtcgtcacagttggcaaatacgtgacaccaaaccacaaggatatcaatgggaatggaatagagccggattacaatcgtcttcctggtactctaagaaaacgccagatttcttttgtggcaattgaattctgcaatatttcaatgaagccagagattacctttcatgatgcggaattaaagaattaa

SEQ ID NO: 106869 - DNA, 861 bp, Zea Mays
tttgctttctctcccccgacctcctctggcaaggggctagcatgccgttactgcaagaccagtgcattcttagtctacaaagacggaccggtgtaacacttgtactctaagaaagccctctctgaaacttttcttcctcttgtaaaatacgcttatcttgttggagcatttgacaaaaaaaatgtaaacaattagatcaataagtattcaggtagaccagaaattagcgatgctttgtaacaatgtagctttctcttttgagtggtgacaatagctttcttgtgatcttcataaataacttttcatggtctcacatgctccgttgcagcaatgctgctgcagctgcaccaagcatggaactaggagagtgcatctacaagatggatgttttgagcaagaaaatgacagactgcagcagcagagtgacaatacatcaatgaatgaatcatgtatcactgatggctgatacgtgctgtttctgaggataagaaaaggaattcttagaatttttattacaaggacctagcagtcttgtagaatacaggaatacactcaggaatcattctagctcaggaattgttctagctgattaaaacttgtataaatcagataagcaattcggtcaggaattgtttcagtcgatggccccttaatgtctcctcactggtaaagaactaaagataagcaccttagagctgatttgaagtgggtattatgtaacgaacttgccgagatatcttatctcattgctgccatttcagcttcctggcaaaggccttcgagaccaacacaagtgaacaactcggaatactccacaatcttccaaagatatacatcctctccaatttcattctgtgtatg

SEQ ID NO: 106870 - DNA, 2156 bp, Zea Mays
tcttcagccgcacgcttcttgttgccaaagaattccctcccctagccgccgccgccgccgctcgtctccctgagaggtgccgggaccgaggaactggccgagtactaggtagagaatcggtttttcttgtctcagcccggggtctgctgcgtctggtggtggtgaaggggagaaattcgtgagatctgttccggatcaggcgtgcgagctcgggaatcaggggtttcacacatagcttcgtcgatttgaatttgatgtactaatggagtctaagggtggcaaaaagtctagcagtagtcgttctatgatgtatgaagctccccttggctacagcattgaggacgttcgacctgccggaggcgtgaagaagttccagtctgctgcttactccaactgcgcgaagaagccatcctgatatcccttttggcttcctcattctagtagtttaggatttcttttctgacactttgattctgaccaatctctctggcctgctgcttcctgataatcgaccagttccccagtcttgctccttgcactcctccctccatctccagcattgtgttctgattcacctgctccaatggctgttctttctgctgctgatgcttccccggtctcagctatcgggtttgagggctatgagaagcgccttgagatcacattctctgaggcacctgtctttgtggaccctcatgggcgtggtttgcgtgccctctccagggcccagattgactctgttctggatcttgcacggtgcacaattgtgtctgagctctccaacaaggatttcgactcatatgtcctttctgagtcaagcttgtttatctatcctctgaagattgtcatcaagacctgtggcactaccaagctcctgctcaccattccaagaatccttgagcttgctgaagagctgtctatgccacttgctgctgtgaagtactcccgtgggacgttcatctttcctggcgcacagccagccccccacaggagcttctctgaggaagttgctgcacttaaccgctactttggcggcctgaaatctggtggtaatgcttatgtgattggagatccagcaagacctggacagaagtggcacgtcttctacgccactgagtacccagagcaaccaatggttaaccttgagatgtgcatgactggtctggacaagaagaaagcttgtgtctttttcaagactaatgctgatgggaacacaacatgtgccaaggaaatgacaaagctctctggcatctctgaaatcatccccgagatggagatctgcgattttgacttcgaaccctgtggctactccatgaatgcgatccatggctctgcattctccacaatccatgtgacgcccgaggacggtttcagctacgccagttacgaggttatgggcttggatgccactgctctgtcttatggtgaccttgtcaagagggtcctccggtgctttggcccctcagagttttccgttgccgtgaccatcttcggcgggcgtggccatgccgggacatggggaaaggcacttggtgcagaggtctatgactgcaacaacatggtggagcaggagctgcctggaggcgggctcctcgtgtaccagagcttctgtgctgctgaagacgctgttgctacctcgcccaaatctgttttccactgctttgacggcgagaacgtggagagtgctcctcctcctatgaagaaggactacaagctggctaatcttctctgctgggaggaggaagcggatgccatggaggagaaggcgggagtgcttgatgagtaagacgggcttctggggtcgatttgcttctgagttgtttattttatatcgtcgcaatttcgtggttgtcgtttggttattctgtgaagcagccaagccaggctattgttatgaaaatttgtcgtctgtaagcatgtgaacttccgatgttgccacatgctggatcagtctgaataagtaagtatgcagctctaggtggtcagctgcgtctaccacaatgagcatgaacgtatggagaaatatctgtgaacccattttgtttatgaataagatttgtttttttcgagttaaagaaaacacacatagaacatgaaaatttcctacaatccaaattagtttatttccacaggaaaacacacatagaacatgaaaa

SEQ ID NO: 106871 - DNA, 1224 bp, Zea Mays
cccggccgcgaattcaggtcgtggcgggccctgccgacccaactactggtccagaggcctccacgcgagccgtgggccgtggtctaggagccgggtccgcctatctacttgacggtcacggaaacccggacccggtaggaaggagctataaagacaagccaaacgagggcatcccttcttcagccgcacgcttcttgttgccaaagaattccctcccctagccgccgccgccgccgctcgtctccctgagaggtgccgggaccgaggaactggccgagtactaggtagagaatcggtttttcttgtctcagcccggggtctgctgcgtctggtggtggtgaaggggagaaattcgtgagatctgttccggatcaggcgtgcgagctcgggaatcaggggtttcacacatagcttcgtcgatttgaatttgatgtactaatggagtctaagggtggcaaaaagtctagcagtagtcgttctatgatgtatgaagctccccttggctacagcattgaggacgttcgacctgccggaggcgtgaagaagttccagtctgctgcttactccaactgcgcgaagaagccatcctgatatcccttttggcttcctcattctagtagtttaggatttcttttctgacactttgattctgaccaatctctctggcctgctgcttcctgataatcgaccagttccccagtcttgctcctcctcctatgaagaaggactacaagctggctaatcttctctgctgggaggaggaagcggatgccatggaggagaaggcgggagtgcttgatgagtaagacgggcttctggggtcgatttgcttctgagttgtttattttatatcgtcgcaatttcgtggttgtcgtttggttattctgtgaagcagccaagccaggctattgttatgaaaatttgtcgtctgtaagcatgtgaacttccgatgttgccacatgctggatcagtctgaataagtaagtatgcagctctaggtggtcagctgcgtctaccacaatgagcatgaacgtatggagaaatatctgtgaacccattttgtttatgaataagatttgtttttttcgagttaaagtggtttggttgttagtcttaaatttcttttgttataccgcggtcaccgttacttctgcaccactcactgcaaaggaattagtttatttccacaggaaaacacacatagaacatgaaaatttcctacaa

SEQ ID NO: 106872 - DNA, 1009 bp, Zea Mays
cccggccgcgaattcaggtcgtggcgggccctgccgacccaactactggtccagaggcctccacgcgagccgtgggccgtggtctaggagccgggtccgcctatctacttgacggtcacggaaacccggacccggtaggaaggagctataaagacaagccaaacgagggcatcccttcttcagccgcacgcttcttgttgccaaagaattccctcccctagccgccgccgccgccgctcgtctccctgagaggtgccgggaccgaggaactggccgagtactaggtagagaatcggtttttcttgtctcagcccggggtctgctgcgtctggtggtggtgaaggggagaaattcgtgagatctgttccggatcaggcgtgcgagctcgggaatcaggggtttcacacatagcttcgtcgatttgtaagttttttctagccgattcctctctttttgtacgttttttgttattagattcgagatttgttggatgtgttggtttatgttgctgcctttctagatttctcggtgtgaatgtatgagggttggatccttaggcatgaaaacatagctacatggagttagctcgttttcttaagtcacgtggtggtcggcgttatacctgttgcttgatgcgttatccgtgctatcgctgttcagatttagataggtggatcggtcatttgttcgttgtacgtattttgttacttcaaaattgatgctaaccctgttaattgaaaattgatggcagtggatacgctccacctttgtttagatttggaaacatggttaggaaatatgtgttcatattaggaaacgtggataggaaatatggctcattaccctggtactcggaaaagtaaggaaaaactattaacctttttgtttaggttttgattcgtggacaagatctataaattcactgaaaagacgcatacgatttcttgtacaggtgatatcatgccatgtggaaagtaaatgaaatcatacaaggctgatttttgctttt

SEQ ID NO: 106873 - DNA, 112 bp, Zea Mays
tgtaaatgtaattttagagccaacaaccagtggcggatccagaggaggggttgggtgggctccagcaagcaggagggagagaggaagaaagaaaatgagaaagagagaggaa

SEQ ID NO: 106874 - DNA, 1896 bp, Zea Mays
atggaagcagacctcgagagaggcctgattgtgtatgaagagccgggtccagagccgacggacctgctctccagcgcgtggtgcagctcggcagctatccgagtgcttcacgcgggacccaaggacgagtgctccatggcgctggtggagcacccggtcatggcgcttggcagcggcaggagcgacgtgttggcgaagagtggtcgtagtcgtagcttggtggctgacagcagcggtttcagcacggcccagtggaaatatgatgatctgaagtcgtggctatggctgcagaaggcaattcatcccgaactggactacgatctctgcctcaagaagaaatggctcccgcgcaagatggctgcgtggaacgggacctcgctcaagaaatgggtcaaggagcggaagcagaggcgcaaggaggaggcgcgcctgcagcgggccgaggtccacgcggccgtgtccgtggccggcgtcgcggccgcgctggccgccgtcgccgcggagaacgctgccgccgcgccgcgccgcgcgcccgggacgagggagacggcggtggcgtccgcggccgcgctcgtcgcggcgcagtgcgccaaggcggccgaggccgcgggtgcctcgcgcggccaggtcgcggcggccgtcgacgccgccagggcctccacggacgccggcagcgtcatcacgctcaccgcggccgcggccacctcgctgcgtggcgccgcgacgctgaggggacggcgcagctgcgggcacgggcagaacgagagggcggagcacgcggggccggcgctgtcgcgggacgacctcgacttcgacttgaaccacgcgaggtccagggcggcgctggccaagggcgacgagatgctcgtcgcgatgccggacgggaagtggaagctccacacggtgtcggcggcgtcgaacaagcgcggcgagatcgtgctgcggatcaagaagacgagcctcgtcgtcatggcccccttctcccacgcaaaagaaagtgtggtccgcgacgtgcgggcgtgcggcccggagaagccgagccacgacgagggcgcgacatacgcggtggaggtctccacggacaagggcaaggtggagctccgcgcggacgactacggggtgtacaagcggtttttcttctgccactacacagtacaagttcctcaggatgaacatcaggggaggaaagggaacctgaaggaagcttctgtaggaagatctgtctcccttgatcgatcattgctgcaggataagtcatctcaaactggaacaacttctgaaaaaggacttgatatgccacttgaccatggaaataatcataggttgattgttcgctttccaaatcctggtcgtagtcctgctagaagtgcaagtgctggatcatttgatgacccatctgtaactgggggtagagcttcatctcctatggttgcgaataggcatgatcagactgagcgcagggtgaaagggaagactcaaaatacttggcctcatttagcatctgatgctaacacagagtcttggcacagcaacgacggagctactggttcagaggaaggtgataaatcgccgtgtgctatattagacgatgacaacagcaggacacctgatgattctgttaaggatacacatgcatcacgagttgcatgctcgtcacatacgaatgaaaaaggtgtcggcgaaactgaggtgggaactccgttcagcccgatgaatgctcttattgaaatcaagtactcggaagctagtcattcacagcaagctggagatgacacagctataaatctaagaagaagattaagaccagaggtcggaaggcgagcaaacctggacgtaagggagggatgtcagaagaccttgcggaacgccatcagcggcaaagcgagggagccctaa

SEQ ID NO: 106875 - DNA, 2122 bp, Zea Mays
ggcaaaccccaatccccagttccccactcctggagccccgccatgccgaccggcgcagccacctcgctgctcggcctcaaccccccgcataccagctgctccagcctccgcgtccttcccccgacagccgccgccaccgcctctcccttgcgttccagatccgcatctttcgctccgccgttcctcagacgcagcagacccagcgccgccgccgccatccatgcctccacactcgcttctgattccgcattccccacctctccgactccgcccccgcgcgcgcccgctccgccggagcctccctccaccgtggtccacgcgggccgcagcaaaaagaagaagaacccccagggcggcggcggacgcatcgagggaagcggggacgtgcggcgcgaggccaaggccaaggcgcgcatccgcagccgccgcatgggcgagaacgccttcttccgccgcaagcgccgcgccgcggccacgggccaggccgacgccttcacggacgcggagctcgagatgatcgggatggggtacgaccgcgccgtccggttcatggacgggcccgacgacccgcggctccggcacccgcacgactggtacaagtacggccgctacgggccctacaactggcgcggcatcgtcgtcggcccgcccatccgcggccgcttctccgacgaccgcgtctcgctcatggaacaggtccacgaccacgaggagtgggaccgcatcgagcagttcgacatgtgcaaccagttcacgcaccgcctcaacgagctcagcgacggcgtcgggttccggtactactgggtgttcgtgcgccaccccaagtggcgccccgacgagaagccgtgggagcagtggacgctctcggccgaggttgccgtccaggccagcaaagacgagcggctcgacaagtggagcctcatgggcaggttcggcaacccgacgcgcgagctcatcacgcggtgcgcggcctggacgcgcccggacatcatatacgtcaagcggcctctgtaccagtcgcggtttgagccgcaggaggatttcttcagcaagcttcgcccgttggttgatcctgccacggagaacaacttcctgttcgatcttgagctggatggccaggtcgttcggacatcctactttggtggcctgtgcaagattgtgaaatccaacccaaaggcttacgtcgacgatgttgtgaatgcttactcgaggctgagtgatgcggacaagtcacgatgcctggaattcctgctcacgaaccaccccatggatctcctccatccttacaccaaggagtggaaggtgaagctagaggagctagaactgggatgtgacgctcctgatgagagtgaggatgaggttggtgatgacgatggaattgaggtggttgactgcatcgaggaaaatgaggtcgatgatgattattatgaagatgaggatgaaaccgatgcacaggaggatttgaaagcagatgaacctgaaaatgttgaggatagcgaggaatactgggatgagcagtgggagaaggctatgagaagttctgataaaatggagaagctagtaaagacgagcattgtggcgtcaaatgagtacagtaagcagcagaaggatctagagaaagaaatggagtggaaaatggccagagcaaatgcgattattacggagcaggaagctgaggtggaggaggagagcgccaggagaaggactgcgaaggatggaaatcagaacgatgcaaacacagggctcttcttgagggccgctgttcggccattcacttacagaaatcttgtcaaggaaattgttctgatgagacaccacatcattgatggggaaatagtttagtttgcatgaggctgtattctcacatcattgatggggagatagtttagtttgcatgaggctgtattcagtttttcagattagggatttgcccatttcaatttacaaatgcagagcttgcatttcgaaggtctaaggccatctcccgcagatcttgtaaaatactgttttacagtgtaatccctgttttgcagagtgtagtttgaaatagtgagtaagatagagagtgtaatatggagtctactggagatagtaagaagtccctacaattccttggttttgt

SEQ ID NO: 106876 - DNA, 1349 bp, Zea Mays
caaattgacccgggagccgggacggcgacttccgtggtcagtcggtcctccacgtcgctcgttcgcgccgaagacccgcccaggccgccccacacggccacagctcaaatcctgagcagagtgggaaagcttggctgagaatcgcttcgtcccgacagccactactaggaattgccgagcgagcgagcttgcgccgtgcgcgatggagggtgacgagaagtcggcgggcggggcccctgcttactggggcctgggcgcgcggccctgcgacgcgtgcggcgccgaggcggcgcgcctctactgccgcgcggacgcggcgttcctgtgcgccgggtgcgacgcgcgggcgcacggcgccgggtcgcgccacgcgcgggtctggctctgcgaggtctgcgagcacgcgccggcggcggtcacgtgccgcgcggacgctgccgcgctctgcgcctcctgcgacgccgacatccactcggcgaacccgctcgcgcgccgccacgagcgcctccacgtggcgcccttcttcggcgcgctggccgacgcgcccaagcccttcgcctcggcggcgccgcccaaagcaaccgacgacgacgggagcaacgaggacgaggcggcgtcgtggctcctccccgagcccgaccacgggcagaaagaaggcgccacgacggaggtgttcttcgcggactctgacccgtacctcgacctcgacttcgcgcgttccatggacgaaatcaagaccatcggcgtccagcagagcgggtcaccagagctcgacctcgccggcaccaagctcttctactccgatcactccgtgaaccacagtgtgtcatcgtcggaggcagcggttgtgcccgacgcggcgtctggcatggcgcccatggtggcagtggtcagcaggggcctggagcgagaggcgcggctgatgcggtaccgggagaagcgcaagagcaggcggttcgagaagacgatccggtacgcgtcccgcaaggcgtacgcggagacgcggccgcgcatcaagggccggttcgccaagcgcacgcccggggctggggaggacacgctggaggagcacgaggagatgtactcctccgccgctgccgccgtggctgcgctcatggcccccggcggagccgatgcggactacggcgtcgtgcccacatattgatctatgcaattgcaacgccgacatgtacactagttagcctcgtgctctggggctgtaatttttgctgcatgcattgcatgcaaagctcttattgattgcctgtatgattaacggaagccattacaagcaaggacttcctccctccttttcaattcctatgtatattactatcatcactacgagc

SEQ ID NO: 106877 - DNA, 1659 bp, Zea Mays
atggtcgacccgtgcccgcaaatcccgtcgtggccactgcagccgccagttcacccgtgtggttgtgtggtcgtggctgcctcgcctcccgctcagagctgtagtgcacgagcgcctcgcctcccccttcgatgtccccttacccacccgaggctgcagagacccggccatacccccgccttgcccccacctccgcgctcctccgacccacctgcggatgcagatgcacgtgcttcggcgccgctccacccgcatccgcgacatgagcgggatctccaacccacccgcggttgccgctccacccgcatcggccacggaccatatgcagaaccaagaaaggatggttccctactggttctgcctataggaagcttgaggccactatgcggcaacttacttgttaacttgagagatcctcggagaccaatttgcaaggttggatactttgggttgtcaaggatcaagcgcaacactctggtttctggtggtgtctgcggcactcttccatggatggcaccaaagctactaaatggcagcaacaacaaagtctctgagaaagcaagtttttttccgaccatactcctgatagctctttgcatatggaaccctgacaggctaatacgtaatgagtatttggttttacacatgcaggtggatgtgttctcttttgggatagttttatgggagatcttgactggtgaggaaccgtatgttaagtgtacaaaatttaagctaatagaaggcctcaagcattttatgtcattaaagaatttagtgttagaatacagatctgaaccaagaaaggatagttccctactggttctgcctataggaagatccaacaatcctgacagtctggcatcttccttcgtgcagatggttgaacttgggtacaaatctatggcacactttttaattgcgacacatcgagcatcatcagataactcagaggattcaagcccagctggcaaagagaagtcgttgtctactaaatctgaaagctcgtgcatttccgatcatgatggcccggatgccaatgagaggcccgaggatggtgaaacgagcagcaaagctaaggtgaagaaagcaacccgccgcaaagggaagaagagttctgacggcgacaaagaagacagcagaagcgagtccgtggtgacatctgagtgccaggatggccatcaagccaacacggaggctgggtgtgtcactcaatcgtccaagtcagtgtcaaggaagaggaaaggctcggtcccttttgcgatgaagttgtggcgctttcacttgcaagcagttcatggtatgctagcgaagatgtttagtttcagcagagaatgtatccttattgaggagaacaagggcctcctctctacatcctccttcgataggcctcgtgccagaaggcaagaggagggttgtaatccctctcctgatgtaggctacatcggtgaaatattgaagcttatacctgaagagtttggaccaaggcaaagtctactgtcactggtgtttgatgttcagttgctgaagatcatgtggttctgcatttctgcaaccatcgttatcatcatccttggtcaatgcaaacagtgcttcaagggaatcacagagttcattgtaaacttacttgttctccctttgaaatcaaggtctataaactaa

SEQ ID NO: 106878 - DNA, 696 bp, Zea Mays
aagttaagaagaatcctaactgggtatgtccagtttgtcgtggcatctgtaattgcagcatatgcagaaccaagaaaggatggttccctactggttctgcctataggaagatggttgaacttgggtacaaatctatggcacactttttaattgcgacacatcgagcatcatcagataactcagaggattcaagcccagctggcaaagagaagtcgttgtctactaaatctgaaagctcgtgcatttccgatcatgatggcccggatgccaatgagaggcccgaggatggtgaaacgagcagcaaagctaaggtgaagaaagcaacccgccgcaaagggaagaagagttctgacggcgacaaagaagacagcagaagcgagtccgtggtgacatctgagtgccaggatggccatcaagccaacacggaggctgggtgtgtcactcaatcgtccaagtcagtgtcaaggaagaggaagtgagttgaacgaagccccgactgcattgcaagtaggctgcggtctcggctcagtatgccgtgatcgcccatggacagtgatcagcatcatgggtctctttttactgtctgaccgcagaggctcggtcccttttgcgatgaagttgtggcgctttcacttgcaagcagttcatggtatgctagcgaagatgtttagtttcagcaggtgattggtgcagcag

SEQ ID NO: 106879 - DNA, 110 bp, Zea Mays
atgaatatcatttttgcatgcacggtttttcatgtttcgagtgacatggagttcaaatctgaatttttcgaagaaattcaattaaatggactaacagttatagaaaacac

SEQ ID NO: 106880 - DNA, 264 bp, Zea Mays
atcatttatatgacatcgagctattccatgctcacacaaaaaaagattgttgctgccaccatggttcttcataacttcattcgcgaacatgcgagtgaggatgaggattttgctaattttgacagtgatccacattttgttcatactatcctagaaagatacaagtatgcagtgtctcatggatcgacttcggaattaagctttgtgaccatgtgtgcatttcatgatagtttggctacatctattgccttttcgtggaactag

SEQ ID NO: 106881 - DNA, 1092 bp, Zea Mays
cactcacttcacttccccgtaggtgctggtagtaacgtcatgatgtgactcgtgacctcacatctatcagcattggctctggctcctgtctctcgacgccgctttgtccgtgccagcccagatgtttctccactccactccctcttgatgcaaaaaatggcaaagaacacgcagcagccaagaaaagatggcggcgcgagatcaggcgggatgtcgtcgtccaagaagtcccggtggtaccagcgcgcggtggaggtgctcctcctcctcgtctggaagcagccggcggcgggcggggccaaggcatcgccgacgaaggccgcggcggcatcgggggtgacggccgccggcaagggcacggcgctggcgacgggccccgggaagctgcgcaggtcttcgtcgctgaacgtggcggcgtcgttcacgcgggtgtgcctgtgcgcgcccatctcctcgtacaacagcgagtcgctctactgcttccaggccgacgcggcggcgccgcgcccgagctacagctacccgcgcgcgtcgtccgcgtccgcgtcggcgtccgggtgcgcgagcccgctggcggcggccgagctgcaggccgccgctgggcgggggaggccggccgcgggcaaaggaggaggcggcggcgagggcgcccgccgcgtgttccgcggcaagtcgctgacggacgacgtgctgatgcggcggttcgtggtggacgaggaggcggcgcggcggcgcgacgagatggaggtggtccgccggcgccaggcggcggtctccaggcgccggcgcctcggccccagcccgctcagccgtatggcgctggcggatgcggagtcgaaagccgaggaggaaccggaagcgccggcggcggcagcgcctgcagcagctgcgagggggacggatgatcgcgtggcagctgcaggagcgtagtagcatggcggacctttcactgtgtcctgtctcctgtgtcctttcgatcggctcgccgtcgtcgcctctgtctttttcctctgtcgttttcctcttctgctcttgctgacatgcgctgcgagaaggagaatctggagcaacgcacagttttaacacagaaca

SEQ ID NO: 106882 - DNA, 3559 bp, Zea Mays
atggacattggacagggtgcgacaatcttggtcagcgctggatggttgtattctccgttctccagttcgtcaccgtcagggaggaggcagttacggcggtgttgttggtcatgggcgaagggaggaggtaccgacgtgctccccttcgatttccccctggctggccgctcctccacttccgatgatcgagcgtcgcggcgctcggatctggcctgttgggcgaggcaagaggacggagcgctagttcgccctcgggctcacacgccgatgggagaccgccgcactgggagccggcactacgcctccgcccggactctctctgtcggtgctccttcatcctccccgtcccgtcaatgtggaggcaagattctattcagccagaagacagtgctcttctttatatcctgtccggagctcaatacagtgctccaaatccatatcagcctgctaggagtggataaggatctttgcctcaacgagtggagcaaaaccatggatgtgcctacgcctcccaaccgtgccggctgcaacagtaacatcagcaacatcggcagccccatgcaatcttttgatgatccctttggtggtgctgccatgacgagctttgatggatactcggagctcagcagcccatcagttgctgatcacatattctccctgctgaatgatccctcgtctgtgcaacatatgtttgccttgtggtcatcttcggggtcatctccgcgtgcttctgctgtgagagaagacatgtcgtttgacacctatcctggacctatggacgtgacagcatcacttgctcaaaggatcaactcagcatcagtattcaatccaactgaagtggacagaggactaaaagactcagatgggcttgttccaaataatggttcacaacaagggagtagcatcattccgaggtcggttggcaacattcttgcagacaggatgctcatggcgctatctttgttcaggaagtcattgagcgatggtgttcttgcccaagtctggatgcctgttgagcacaatggtcgtgtcgtgttgagtacatccgagcagccctatttacttgaccaggatcttgcaggttacagagaagtttctagaaatttcttgttttcagttaaggaggagcctggtctgcacctagggcttccagggagggtcttcatatctggggtgccagagtggacctcaagtgttacgtattacagtaagccagagtatttgagaatggagcatgctcttcttcatgaaatacgagggtcacttgctatgccagtttatgatcccagcaagggttcttgttgtgcagttcttgaacttgtcacaaacaaggagaaacctgattttgatgcagagatggacattggtgtgaacttgcagacaacaacagatcgcagcaatcagaaggtttactctgaaaatcagaaatatgcttctacagagattttggatgttctaagagctatttgccatgcacatatgcttcctttggcccttacatggatccctacatcaaacggcaccgctaatggtttttgtgtcgcaaagaatatcaggcttgattcgcaaccaggaaaatcagtacttcgtatccatgaatcagcttgttatgttaacgatgcaaagatgcagggatttcttcatgcatgtgctgaacgtcatcttgagaaagggcagggtattgcaggccgagcccttaaatctaatcttccattcttttcgcctgatataagagagtacagtatcgaagactacccgcttgcacaccatgctcgtaagtttggtctgcatgctgctgtagccatccgactgaggagtacgtacactggtaaggatgactacatactagaattctttctcccagtcaactgcaagggctgtggagagcagcagatgttattaaacagcctttccagcacaatgcaaagaatatgcaaaagcttgcgaacagtttctgaagcagagaccgatagtgttagtgctactgaaccaatgtatgagaagactaatggaagttgtttaccaactggtaactctgaaagttcctcacatgatgaccagccaatcacagaatctgcattccatgatctatcttcgggtgacaaacaaggagacagagaacctgctaaggcacggagtagctcaaagcgagttgcagagaaaaaacgcagtacatctgaaaagaattttagtctggatgttcttcgcaaatacttttctgggagcctcagggatgctgcaatgagccttggcgtttgtccaacaactttgaaacgaatatgcagacaacatggaatttccagatggccatctcgaaagataaacaaggtcaaccgttcactgaagaagatcgagaaggtcatcaaatcggttcatggtgtggacagatccttgcagtacgatcctgccactggatctcttgttccagcaacctcccttccggataagatgcctacctcatctgcgggcgtaaaaacagtggaggaaaaatctagcccagaaccaggacaggatttctcttcgcctgatggatggcaaagagaaagtagccaacttcatgcctccagtatacctacaagggtaggtgatgaagtccaaatgctggcaatcaacaacgaaggcagcaggaactatgcttctggtatcgcaaatatcgcgcagcattcaaactccgaagacgcacacggtcctttatatcccgtcggtgctgttaattcttcgcgtaccggagaaacaggctacatcgattctccaacctccctccacatggatagcgtcgaaggccaaacaacggtgagggactcaagatctgtacagcaagcagatgtcaccatggccaccaaggagcagacccttccctccacctctggcacaaccgattcttcgagcggcagcgcctcaagtcagcctgctttcaaggggaacccaggacgtgccctcaaagttagcagcagcgatgcactgacggtgaaagctacctgtaacggcgacaccgtgcggttcaagttcctgccggcaatgggctggtaccacctgctggaagaggtagcgaagaggtttaagctggcgacaggagcgttccagctcaaatacaaggacgacgaggacgagtgggtgatcctggcgaacgacgccgacctccaggagtgcgtggacgtcctggactcgatcggctcgcgcagcgtgaagctgcaggtgcgcgacctcccctgcctcgtcagcagctcgggcagcagcagctgctgcttgcaggtggaaggaagcgcctagctcatgacggcaggacggaagcctgggtcatggcacgttgactgttgtagtaggttttagccttctgctgtcgccgtaatggatccatgtctacgctcaatacaaaatggcgagtgcagaaaaggagaagtgtaatactcgtcgcacggctgaaacaatgccgtgaaggccttgccataatctgttgtttgttcacaaaagtcgtggcaataatctgttgccatgaatatgggaggttttaagacgcgacaccaagtttctgagcttgctgtgttccgaattttcagaa

SEQ ID NO: 106883 - DNA, 1767 bp, Zea Mays
gtagcagtagcaagtagcagcatactctcctacgcgaatcgattaacgggcggcactcacccaccgtgtggcctgccaaactgtcccctaggccccggccccgcccgcgcctggccagtggccatccatcccttcccttcgcttcgacgcaccaatcttgtcccggcgcctgccaaatccagcaaggccacacagcccgaggcaggaagggcagcgcaggaacagggagcgagcagcgcacgggcaatggcggcttcttccgggacgcgctccgtgcgcctgctggtgctgctgctctgccttctcgggttctgcgtcgcgctgagccaccaggagtcggcggcggactcgtgcgccagggccaaggtcgcggtcgccagcctcgtgcccttcgactccacgtccttccgctgcaccgccgcctggaagcagcaggacttcgtcctcaggtacaagaacacggggcccagcgagtggagcttcatcctctcggcgccggacaggggctcgtacgtggcggtcggcttctcgggcaagggcgccatggtggggagcagcgccgtcgtcgggtgggcggccaacggcaggggcaccgtcaagcagtactacctcggcgggaagagccccgaggagtgcgcccccaacaggggcctcctcaagctcgtcaggaacaggaccgccgtcgcctcgcgctccggccgcctctacctcgccttccagctcagcaccgactacccgcagccgtacctgatctacgccgtcgggccggacggcagcctgccgcagtccgactcgctgcggctgccggcgcaccagaacatggcctcccgctccttcaactacacctccgggctgtcgtacaacgtcgccgggtccggcgacgccgcgttcccgccggagaggaagcacgggctgctgggcatgatggggtggggcgtgctgatgcccatcggcatgatcaccgcgcgctacttccggcagctggacccgtgctggttctacacccacatggccatccaggtggctggctacgccgtcggcatcgcgggcatcgtcctcggcttccgcctcagcgaggacgggctcaggaacgtggacgtgcacaaggcgctcggcatcgccatcttggccatggcgtctcttcaggtgatggcgatcctggcgcggccggacaagacgtccaaggtgcggcggttctggaactggtaccaccacaacatcgggcgcgcggcgatcctgctggccatcggcaacatcttcctgggcctctccatcgcgcaggagaccagcgcctacatcgtctcctacggcgtgttcgtcgccgtctgggtgctcgccgtcgccgccttcgagatgaagcgctgctacgccgacgacgactgatgagctagcgacacgtaagagtcacagttcggtcccaacagctgacggcgaagtttggtgtcgttaaactgagcgttccacggccagctgggacgtgacagacacacgagcgccgagcgcgcgcgcgcgcacacacacaccattcttgttgttccgtagctcgcagctggacagtgcattattggttcgaggagggcgtgctttggttggctaattaaaaaaaaaatgtttttttttttaggtataggatgtgaggaaggggacggtctgctgtttctaggctagctggacgctctgattcataaatttgtacattgattggtacgtggtcgtgttgtgttgtaccctttttggacgatagcatgttcttcgcccttttcttct

SEQ ID NO: 106884 - DNA, 1997 bp, Zea Mays
gcgtcgttcccatcaaaatctgcacgggattctgttgtgcgagtgatactcgtgcagagtctactccgcggctccgcgcgggcgcacgcagatgggcatcagcccctccaagcgcgtggacgctgcgctgcgccgcgcgccgttgttcgccgccgcctgcgacgccgccttcgaccggtgcctcgccgacgcgcagcgccgcttcccgggcgtccgccggtaccagctcgccgacgccgccgcacaccttcactcggagctcagcgcgtccgtcccgctggtccggcgctgggtgccctcgccgccgccccgcgtccgagtcgacgccgcgctccgcgccgctgggctagaggacgaggcagagctctcgcgactccagttccgggagtttgccgtcgagctgttcagggaggccgtgctggccggagctgcggacctcctccgcgcgcccgcagccgcggccgggatcgtcgggataggcatggtggctcgagccgctcccccggtggtcgggaggatcgtcgccgtctgcgccgctagcgtggccaccgcagtttacctcagcctgggctagggtttcccccccaaattctagtgatgattagagaacctatacaaaccacttcccacagctctgctgtgttacggttgaacctggattcaacggcagttgttgcagtaatgcattttatgatcggattgagctcaaatgccattgaatcagctgtgcaatgtttcactgtcaaatcgcattcctgaaagaactaaaggatttgctgctgcatgagatatttgtatagtttatatttgatccataaacttactacattttacccttttttctctgaattgattgtgcaaatgatgtacatgtgacgatataacagaagaaagtagttccaacttgcttatcaaagtaatttgtaaagaaagtactgcgtttgctttcttgcagaattgttctaggctcttttcaaccatcagctgagcattctacaagtggagtactaatttttggattgtgtctgttattgtagcatttagtttactcagcaccgtctcccatcagatcaggtcaaccacgcactgttcttcattgttttctgtgaatctgctcttactaccatgtttcctttcagtacacctagaattttcagtgcctgtataagaaatatagttggaccttttgttcagtttgatcctgtttataggattcagagaaacagaaggataaaaggctgggaacagagttagaggtcagttgatttcttctttttccttggatttgttaagtcagggtaggaggaatatattatttttttttctggaaatcgaaggaacgaaaacttagcttctgaatagtagcaggaactatgctctttagcccaaagccaggtgttattcataaagatagcagtttgaaacagagggagtagcacgtagctacctgtacactctattttcaatctcatcaacctcgatgcttagatgttacctgtttttttttcatttggtttctctgaagttgatccttatgccgtatctcgtttgagtatatatatctgtagttcacaatgctcacgtgtaataattgtctcagtgccttacttcaatctgttgttgtatataggattcggagaaacaagatagaataggagaaatagaatggggcagcagttcggaggtgaaatggacacgcgaaagtctagccttatcggattctccaatgggtgaagcctggacattgcacacttgggtatagcgcgtgtgtattggtatgtatgtaggaatgtccccatgccacatgtgttctgccctcttctttcactaaccgtagattttttattttcttgtcggcgcaaagcagaaacaaacagcttttcagcttagggcttgttcggttgtaccggaataggccaggattcattccagctcatcaaaatctatataaattagagaagtaatccggctaggaattaatctggggctccaatccg

SEQ ID NO: 106885 - DNA, 1339 bp, Zea Mays
gagatcgagccatcagctcgagtgctgctcagttcacgccagggaggcatgcagctcatcagaagggaacctcagacaagcatggcgggcggcacgaggtcacgctgccccgtgctgctgctcttgctcctcggtgtgactactgctcgactggcttcaggcgtcgtcaccgacggcctattaccaaatggcaattttgagctcgggccggccaagtccgatctgaacggcaccagggtgatgaaccaaaactccgtaccgaactgggagatctttgggttcgtggagtacatcgggtccgggcagaagcaggacgacatgatcctagcagtgccggaaggtgcatgcgccgtgcgtctgggtaacgacgcgaccatccggcagaagctagaagtgatccggaagacgacctactccatcaccttctgcgcggcgcgcacctgcgcccaggccgagaggctcaacgtgtccgtcgccgccgagtccggcgtcctcccgatccagaccgtgtacaccagcagcgggtgggactcctacgcctacgccttcagagccaggcacagcaccgcgtggttcagcatccacaaccccggccacgaggacaacccggcgtgcggccccctcatcgacttcattgccatcaaggccctgaaccctccgcctctcgctcagggtaacatgctgaggaacggagacttcgaggagggcccgttcatcttcccggacacggcgtggggcgtgctggtgccgccgatgagcgaggacgacgtgtccccgctgccggggtggatggtcatgtcggacacgaaggtcgtcaagtacgtggacgcggcgcaccacgcggtgccgcgcggcgcgcgcgccgtggagctggtggccggcagggaggccgcgctggtgcaagacgtgcgcaccgtgcccggccggcgctaccgcctgtcgctgtcggtcggggacgccgcgaacgggtgcgagggccccatggccgtcgaggcgtatgcggcgcgggcgacgctgaggacgacgtacgagtccctggggaagggcgggagcaggcgcgccgcggtcgagttcgaggcgaccgcgaacctcacgcgcgtggtgctccagagctacaaccaccacatgaagcccgacgggacgctctgcgggccggtggtggacgacgtctccctcgtcggcctgcgctagcacgccgcgcgcaggttgttctcgtagtctgcagtgctacctagctgctcgtagcgacgcaatcggattcggtagagacgttgcatatttgttttcttgttttctgtttagattcgaatccgatactaatattatcaagtatattatc

SEQ ID NO: 106886 - DNA, 1149 bp, Zea Mays
atggcgggcggcacgaggtcacgttgtcccgtgctgctgctgttgctcctcggcgtgactgctcgactggcttcaggcgtcgtctccgacggcctattaccaaatggcaacttcgagctcgggccggcaaagtccgatctgaacggcaccagggtgatgaaccaaaactccgtaccgaactgggagatcttagggttcgtggagtacatcgggtccgggcagaagcaggacgacatgatcctaccggtgccggaaggcgcatgcgccgtgcgtcttggcaacgacgccaccatccggcagaacctaaacttgattcgggagacgacctactccatcaccttctgcgcggcgcgcacctgcgcccaggccgagaggctcaaggtgtccgtcgccgccgagtccggcgtcctcccgatccagaccgtgtacaccagcaacgggtgggactcctactcctacgccttcagagccaggcacagcaccgcgtggttcagcatccacaaccccggccacgaggacgacccggcgtgcggccccctcatcgactccgttgccatcaaggccctgaaccctccgcatcttaccaaggaaagccatacggccggtttaagccagcgcagcgaacatgcagataacatgctgaggaacggagacttcgaggagggcccggtcatcttcccggacacggcgtggggcgtgctggtgccgccgatgagcgaggacgacgtgtccccgctgccggggtggatggtcatgtcggacacgaaggtcgtcaagtatgtggacgcggcgcaccacgcggtgccgcgcggcgcgcgcgccgtggagctggtggccggcagggaggccgcgctggtgcaggaggtgcgcaccgtgcccggtcggcactatcgcctgtcgctcgcggtcggagacgccgcgaacgggtgcgagggccccatggccgtggaggcgtacgcggcgcgggcgacgctgaggacgacgtacgagtcccgggggaatggcgggagcaagcgcgccgtggtcgacttcacggcgatcgcgaacctcacgcgcgtggtgctccagagctacaaccaccacatgaagcccgacgggacgctctgcgggccggtggtggacgacgtctccctcgtcggcctgcgctag

SEQ ID NO: 106887 - DNA, 1408 bp, Zea Mays
gcgcgtccgcgtgcggctcggctcctcgtgctccgcgactcgtagtgccatccagacagagacgctataagtggagcagcgcgacggcctggtgactcgccacacgtactgttccgtcgacgacaaggcggaggagcccggccggcatggaggggcgcgcgagctcacgtcgcggcgtgctgctgttcttgctcgtcggcgtggcttcggccaatcctgacgggctactaccaaacggcaacttcgagcaaggtccagacaagtaccagatgaacgggacctgggtgattggccgcaaatccataccctgctgggagatctcagggttcgtggagtacatcgtgtccgggcagcagcaggacaacggcatggtcgtggcggtgcccgagggcgcacgggccgtgcggctgggcaacgacgcgagcatccggcagcggcttacagggatgacccggggcacgtcctactccgtcaccttcagcgcgtcgcgcacctgcgcccaggccgagcagctgaacgtgtcggtcgccccggagtccggcgtcctccccatccagaccgtgtacaccagcagcgggtgggactcctactcctacgccttcagggccaggcactccgccgcgtggctcgtcatccacaaccccggcgtcgaggaggacccggcgtgcggccccgtcatcgactccgttgccatcaaggcactccaccctcccagtcgcaccgccaaggacaatatgctgaaaaacggagacttcgaggagggcccgtacgtgttcccggacaccccgtggggcgtgctggtgccgccgatggacgaggacgacgtgtccccgctgccggggtggacggtcatgtccgacaccaaggccgtcaagtacctcgacgcggcgcacttcgccgtgccgcgcggctcgcgcgccgtggagctggtggccggcacggaggccgcgctggtgcaggaggtgcggacgacacccgggcggtcctacacgctgtccttctccgccggggacgcggccgacgggtgcgcgggcgccctgcgcgtggacgcgtacgcggcgcggggcaggctgccggtctcgtacgagtcccgcggcacgggcgggttcgtgcgcaacgagctggagttcgccgcggtggcgaacctcacccgcgtcgtcttccagagcatgggccactacatgaagcccgacgggacgctctgcgggccggtcgtcgacgatgtctccctagtcgccgtgcacaaacacgctgcccgccggttgttcatgtagtccgtttccccgcgtgcagtgtcagtacaaccatgtaccagctttgacccgagaaactaacaagccccgaaccacagaacttttcattgttctttttttttgttttttactttcatcactagctgttcaatagt

SEQ ID NO: 106888 - DNA, 1688 bp, Zea Mays
cgttcgtggaagcgcccgcggatccggcgcacgtttcgctctgtcggcctgacgaggacgcgcctcggccaggccaacatcgctgccatgattgggtgttccaacgacgagacagagttctctacgccacacgtccccctataagtgcaagcttgaaaatagctatcgacacgaactcagtgtgctcataggttcctgacgtacgtatctcagttgcgttcgagcgttgtggacttgtggtggtttccttcctgcgccggagaaggtagacgatgggaaggggaagcgatgcagtgccggacgcccgtcgagctgcgctgctcttgatcgtctgcttggcggctcgagcggcttctgcgatccaggatggcctgttgccgaacggcaacttcgaggaggcgccgcccaagtcgcagctcaacggcacgagggtgatggggcgcaacgcgataccgcactgggagatctccgggtacgtggagtacatcgggtcgggccagaagcagggcgacatgctgctgccggtgccggagggcgcgtacgccgtgcggctggggaacgaggcatccatccagcagcgcctcgccgtgacgccgggcgcgcgctactccatcaccttcagcgcggcgcgcacctgcgcccaggccgagcagctcaacgtgacggtcgcccccgagtcggacgtactcccgatccagacggtctacaccagcagcgggtgggactcctactcctgggccttccaggccgcgggcagcgtcgtgaccctgatcgtccacaaccccggcgtcgccgaggacgcagcctgcggccccctcatcgatctgtttgccattaagaccatgccgactcctcggagcagcaagaataatatgctgaagaacggggacttcgaggacggtccgtacatcttccccaacacgcagtggggggtgctggtgccgccgatggacgaggacgactactccccgctggccccgtggatggtcctgtcgtccaccaagtcggtgaagtacgtggacgcgccgcaccacgccgtgccgcacggcgcccgcgccgtggagctggtgtccggcatggagacagcgctggtgcagaacgtggccaccgttcccggacagctctacaggctccagttctcggccggggacgccggcaacggctgcgtgggctccatgaccgtccaggcgtacgccgcgcggggcagcgtgaaggtgccgtaccagtcccagggcaagggcggccacacgcgcggcgtgctggacttcgcggcggtcgcggaccagaccagggtggtgttcgtcagcatgggctacatcatgaagcccgacggcacgctctgcggacccgtcgtcgacgacgtctcgcttgtctccacgcggaaccatcctgctcgccgcttgcttctgtgatgctaccgacaagattcgttcatgggttaatgtgaatggctgtgagtgtgctcgaactcgaatgctcgggcttcatttaaccagatctgggtagattccacggccatcacatgtatttgcatcgctgttttgtctttcttggccaaatgtacttgcttcgttgtagttgtatagactatgtatgcttcgacgggtgtccatcagaccgtgtttactggtacattggtgtttgattgccttcgtccgtaatcgatcacacttcgtgtgtttggttgc

SEQ ID NO: 106889 - DNA, 1349 bp, Zea Mays
ggataaccggagatggcgatcgatgagcggagcgtgcacggcggcgccgcactggtcctgcggctgctggtctgcgtcgtcgcggcgcgggctgtctcggccgtcgccgatggtcctctgctgaacggcaacttcgaggacccgccgaaccagtcccagatgagcgggtcggtggtgaccggggagcacgcggtctcctactggaagacgtccggccacatcgagttcatatgctccggccagaagcagggggacatggtcctgacggtgccggacggctcgcacgcgctgcggctgggcagcggcgcctccatccagcagcagatcagcctcacgaagggcctgtactactccctcacgttcagcgcgtcgcgcacctgctcccagaacgagatgctcaacgtgacggccgcccccgtgtccggctcccccgcccagaccggcgagctccccacccagacggtgtacaccagcagcggctgggactcctactcctgggccttcagggcggaggccggtctcatgtccatcacagtcacccacaactgcggagaagaggaagatcccgcgtgcggccccatcgtcgacgcctttgccatcaagacgctcagccagcctgaggccagccagaataacatgctgaggaacggggacttcgaggagggcccgtacatcccgccggactcgcagtggggagtgctggtgccgccggtggacgaggacgacgtctccccgctgcccgggtggaatatcatggcgtacaagaagtcggtcaagtacatagactcggcgcacttcgcggtgccgcgcggcgcgcgcgccgtggagctggtgtccggcgtggagaccgcgctcctgcaggaggtgtacaccaccgtggaagggagctggtacaggctggagttctcggccggggacgccgacgggtgcgcgtcgtcgtatgatgacggctcctcgtccgggatgaaggtgaaggcgtacgcggggacggccgaaacgaccgtggacgtcgatttccgcgacgccggcggttccaagcgcgggaagatcgagttcagggccaccgccagccccaccagggtggtgttcgtcagcttgggctaccacaccaagtccgacaacagcggcacgctctgcggtcccgtcgtagacgacgtctcgcttgtccccataccgcagccgtatgctcgccgcctgcttctataaggcctaactcatgctgcgtctttttctttttctttttcttttttgtagaagtacccatgcagcttggccgcttgggtaatggagagtgtgactgtgctggtttactggcccattttggcttaccttaattttgcactactaca

SEQ ID NO: 106890 - DNA, 126 bp, Zea Mays
gggcaattaataagcaccgcacttggcgcccccaaaaaactagtcgccgacgaagaccgatccgccagcgcgagcgctccgcctccgccacgtacgccggtccctccccgaacggcgaccgatcgg

SEQ ID NO: 106891 - DNA, 2888 bp, Zea Mays
aagaaagataaaaaggaattatattaataataatcaagagacgactgctgtataaatagacaaagagatgagatgtgttacctagatctctatagccatcaatagatttgtaacgtgtccgaccccacttttaggtccgctcggtcgtcgtccatgaatgcagcacagttgcatcgtacagaaattaaacggcttttgttttgatttggttaaacttcgcatctaaacaccagtgtggaaagcttggtagtacactgtactgtactaccgtctccactgatcgagaaatcgaacgagtttcgtacaatgcagacgtgcagtgcagtggtcatggtaaggcccaagcccaaccatggtgggcttcggctctcgactcaacggtgcgcgagtgaggcccgtcagtacaaagtaatttctgtcattcaacttcctctaactttctcctctttacttctctgttctctcgaatgagtatagcctattagtacaaaatcatggtgcttagaccacattctctcgaatgaattctcctcgaacagtgacaacggccattcatgaattcgcaaagaaattcatgaatgaccattctgacttcagtttggactctctgcgctctcagagtcagagccccgtttttatcagaattcagaaacgaatagttaaaacttgaaggacagggagacactatttattctgtgcccaattttgcttctgtacatgttcaggagttctttttttcttgccacaatctcaaccacaggccagctttacactcaagacgtgtggcagcatgaaagatttgcacggtcataagttcacaacttcggagacgagcgcatcggcagtcattaggctctgccttgcctgaatgtgcagtttcagtttcagcagctgagagaaagagaaggatatggtgagagggcatctcaaggaacatgcattaaactgcccccatttacttgctgacaggccacagactgctagttcacaagtcagtaaacacatagttacatagtactagtaccacatggagacgcagttcagggccgcttccatctgtgtggatcagctagcaagcagatcacacatatacggcgccgacaggtcactggtataatacaaggcggctgatacggacacgcttgcttaatgcttagcttcttgttaggagatcgaattgggtcaggcgcttggaaactgtactacacgcgcaccatgcagacacagcagtagtacttgcgcggtttcctccgggcagaccaccaccaggcacaggccggcagcaggctcctcctcacctgcgcctggtcgtgttcgccggcgcccacaggtcggccccgttgctctgggtcagctgcagtgtctggtccaccggcaccaggcacagcccgcggctccggaggctgtagtgctcgggatcctggatcacatgccgaacaggatgcacgcgtgttatatatggtctcgcgctaggtttcgatgcacgagagaattcagtgcagacgagggaggacgccggcagagagctcacctcaggcgcggcgccggcagccggaggagcacgcatgtaaggggagctgaggacctgcaaaggtcggtgccattgcccgtcgtcagagagaaacgaaggagagaagcgaactgaagatgtcacgtacgtagtgccggccaccatgcgcgcggtcactggtggaacaccgacctggagctgctggtgcaggaacctgatgtaccccgaggcctcctgcagaacggaagccgtgtctgtctgcacagcaaaagcaaagcaacgcaacgagagaagcgaaacgtgtgatcatcgcagcgcttgcaattccagttgcgcggacgacgacaaaggacggaacggcagaggcagtagtgcagggtgtacagcgaaaattaaactttgggaaaataatacaataccttcccgaacggcgacactagctgctggagcgccgcgactctctcgccgatcctgtccttcttctcctgctcatcaagagaacttttgagccaccagaccaccatgggaagggaggattattgctaccgtcacgactcacgcagtgcgtaccttgggcgatacgggcgcggttctcgggctgttgctattcctcggcctcggcttcttcgaggacatgggcatgcttcccaactcctctggcgggctcgcggcggcggcggcggcgacggcggctttggcactgaagtagccgtcggtgtggctccttttgctgtggttggccaccacctcggccatcatcatcttgtccaccctcgccggctcgatcggcttaccagctccgtccttgccccgcgcgtgtttcgctgctggaatccgggaggaaagcgtagcggtaagggcagaggcagaccgcagaagagaggagcctcagcctcctcctgcttggtagggtaaaagctgacttttactacagcctgtagcccgttggttcagacgtcggtttcatgggaaaatcgctgctgtcgtcgcgctccatgcatccaaaagcccggtcttgtgcgagctagctagtgtgacagcgttaaagtacttggtactatactaataacacgaatatttttttttaaaaaaaaaaagatcgacgcgacgagacgaggtcaaggatttcagtgactttagcaacctttttttttttcctgaacaggaggaacttacagtacttgtggaaaactaatggtttaaatcatcagtatgcacacgaaatgaaaaaggatctgtggcttcaccaccgtacctttggacgcgagtgcagccgtgcagggaaggtggcagccgcactaggagattctgcgcatcagaactgtcctgctagctaccgctggccccctctctcccctcactccagtgaaggccagcg

SEQ ID NO: 106892 - DNA, 456 bp, Zea Mays
atgcgcgcggtcactggtggaacaccgacctggagctgctggtgcaggaacctgatgtaccccgaggcctcctgcagaacggaagccgtgtctgtctgcacagcaaaagcaaagcaacgcaacgagagaagcgaaacgtgtgatcatcgcagcgcttgcaattccagttgcgcggacgacgacaaaggacggaacggcagaggcagtagtgcagggtgtacagcgaaaattaaactttgggaaaataatacaataccttcccgaacggcgacactagctgctggagcgccgcgactctctcgccgatcctgtccttcttctccttgggcgatacgggcgcggttctcgggctgttgctattcctcggcctcggcttcttcgaggacatgggcatgcttcccaactcctctggcgggctcgcggcggcggcggcggcgacggcggctttggcactga

SEQ ID NO: 106893 - DNA, 2071 bp, Zea Mays
atggccagccgtctcttcgtgctccgtcggcacacgaggtggtggcagcggcaggcgccacggcctcgctcgctttgcccgccgtctcacggtggggactcggcgtcttcccatgggacgctggagctgctcgcgcgtctgcgcagctcaccatcttatactttccacaaggttttcaaccgagatgctaggttcttcaggttgttgcagagttgtagcattcaagcctgccattgtatccatacgagtccatcagtcaatagcggaaatcaggctactgcagagcctcaacaacagaatccaggagtgcctgtaccggttgatggttctagtgaactaaaacccaagaggacaaagctgaaaggaaggagggcagtgacaaattttttgaaatccttgagatggaaaaagaaaaaggagtttcaaagaatgactgcagaggagaagattttgtacaaactgaagctagctcgaaagaaggaagagcggcttgttgtggcactgaagaaaattgaaccagaggatccatcagaacctacacatgatcccgaggtgcttacacctgaagagcacttctatttcctcaagatgggccaaaaatgtaaaaattatgtgcctgttggaagacgtggaatttaccagggagtgatcttgaacatgcacttgcattggaaaaagcatcaaactctccaggtaattgtgaagacatttacaccagaggaggtcaaggaaattgccatcgagttagccacactaagtggtgggattgtgcttgacattcaagatgggaacacaattattatgtacagagggaaaaactatgcacagccaccaccagagatcatgtctccaaaagtttccctctctagaaaaaaggcactggataaatccaaatatatggaaaagctcagagctcttaggcggtacattcccagacttgagcaggagcttgaagatcttcatgcacagatgaagttagctggagagcatcaaggacaaaatgcagggaaacatgttgcttcaatttcacataatacaaacagtatgccagtgagaaaagaaccttgtggttcaattcgcaacaaaacagtatctgatctcctatcagaaactgtagagggatccaagaggttagaggatgaaagttctgcgattgaagacgactcagcttcagagtctctgtcatttacagagtctgaggatctctctgacatttttgagacagaatcagaggagcaggaagaggacaacaaggatcgccccttatatctcgataggctggataagtttccctcaggaaaaaatgataatgaaccagatgattttgaggagcatctgcggaggatcgcttcactttcagataagactgattcaccttcaaaagaactgaaagtgtcagagctcgatgagattgataaaatctttctgagagcaagttcgttgttgaagaaaaggtgacgcaaaagttcagctgatgcaagaacgatctcactggtacgccagctgaagaacatttttaccaagtgaattcatctcatacatcaaactgacctcatttatcaggctgaaagcatggccctgccttttataattacatatgtgtccaacgtaagtgtcagtgcatcccatgatggcatacatacatattttgcgtacatacacatcacatgactggataattacatatgtccaacgtaagcgtcagtgcaccccatgatggcatacatacatattttgcatacatacacacatcacatgactggagaatcatgcagagatctctcatctcattctcagccaagatcaggaacgatgaagtagtcctcgtcgtcgtcgtcaggcacctccatccgtgacttcttgaacaggcgcgccccgttcgccttgtagaacccggcgttactcactggctgcggcgaggcgaagaactccgccatggcagttttagctggcgaatgggcgtggaacaggtcgatgtcctcgaaccactccagctccttgagcccaagagacgagtctttctgcaacagcaaacacaaaacagatggaaaaggaaaactgagataagaat

SEQ ID NO: 106894 - DNA, 2021 bp, Zea Mays
ttctcgcgccgcaacgcgacgcaatgccccacccgcacggtcgcgccgcgcagcgcaggaacccccaccacgcggtcggcgtcggcgtcggcggcggtgctcccgcctccccgccgtcggcgtagctcccgcgcgcttcggccctgggcgccggtgtggtttctccatcacgctctctcgcgcttcctacctgcgtgcgccctgctgcccggtgatggccagccgtctcttcgtgctccgtcggcacacgaggtggtggcagcggcaggcgccacggcctcgctcgctttgcccgccgtctcacggtggggactcggcgtcttcccatgggacgctggagctgctcgcgcgtctgcgcagctcaccatcttatactttccacaaggttttcaaccgagatgctaggttcttcaggttgttgcagagttgtagcattcaagcctgccattgtatccatacgagtccatcagtcaatagcggaaatcaggctactgcagagcctcaacaacagaatccaggagtgcctgtaccggttgatggttctagtgaactaaaacccaagaggacaaagctgaaaggaaggagggcagtgacaaattttttgaaatccttgagatggaaaaagaaaaaggagtttcaaagaatgactgcagaggagaagattttgtacaaactgaagctagctcgaaagaaggaagagcggcttgttgtggcactgaagaaaattgaaccagaggatccatcagaacctacacatgatcccgaggtgcttacacctgaagagcacttctatttcctcaagatgggccaaaaatgtaaaaattatgtgcctgttggaagacgtggaatttaccagggagtgatcttgaacatgcacttgcattggaaaaagcatcaaactctccaggtaattgtgaagacatttacaccagaggaggtcaaggaaattgccatcgagttagccacactaagtggtgggattgtgcttgacattcaagatgggaacacaattattatgtacagagggaaaaactatgcacagccaccaccagagatcatgtctccaaaagtttccctctctagaaaaaaggcactggataaatccaaatatatggaaaagctcagagctcttaggcggtacattcccagacttgagcaggagcttgaagatcttcatgcacagatgaagttagctggagagcatcaaggacaaaatgcagggaaacatgttgcttcaatttcacataatacaaacagtatgccagtgagaaaagaaccttgtggttcaattcgcaacaaaacagtatctgatctcctatcagaaactgtagagggatccaagaggttagaggatgaaagttctgcgattgaagacgactcagcttcagagtctctgtcatttacagagtctgaggatctctctgacatttttgagacagaatcagaggagcaggaagaggacaacaaggatcgccccttatatctcgataggctggataagtttccctcaggaaaaaatgataatgaaccagatgattttgaggagcatctgcggaggatcgcttcactttcagataagactgattcaccttcaaaagaactgaaagtgtcagagctcgatgagattgataaaatctttctgagagcaagttcgttgttgaagaaaaggtgaacctttgggatttgtatatgacaatcgtcatatttatatgcactgcgaaaagtattttgtgcagttttaatggcatcttcagaaaaaaagtttatgatcgtctagtgatagggccaaccctcaaagtttgtggtcaccattgttttacggtgattataatataactggaattctgtggggttgtttgaatttgttgactgataacttcgatgtgtcatacagcagattcttgttgtttcatgcttttgttgcagtttctgatgttagttgtagccatcctttgtaaaattgtaagtgctattttttttctaaaaccttgaacatatgcgactacccactcgtacaaaac

SEQ ID NO: 106895 - DNA, 2005 bp, Zea Mays
ttctcgcgccgcaacgcgacgcaatgccccacccgcacggtcgcgccgcgcagcgcaggaacccccaccacgcggtcggcgtcggcgtcggcggcggtgctcccgcctccccgccgtcggcgtagctcccgcgcgcttcggccctgggcgccggtgtggtttctccatcacgctctctcgcgcttcctacctgcgtgcgccctgctgcccggtgatggccagccgtctcttcgtgctccgtcggcacacgaggtggtggcagcggcaggcgccacggcctcgctcgctttgcccgccgtctcacggtggggactcggcgtcttcccatgggacgctggagctgctcgcgcgtctgcgcagctcaccatcgttttcaaccgagatgctaggttcttcaggttgttgcagagttgtagcattcaagcctgccattgtatccatacgagtccatcagtcaatagcggaaatcaggctactgcagagcctcaacaacagaatccaggagtgcctgtaccggttgatggttctagtgaactaaaacccaagaggacaaagctgaaaggaaggagggcagtgacaaattttttgaaatccttgagatggaaaaagaaaaaggagtttcaaagaatgactgcagaggagaagattttgtacaaactgaagctagctcgaaagaaggaagagcggcttgttgtggcactgaagaaaattgaaccagaggatccatcagaacctacacatgatcccgaggtgcttacacctgaagagcacttctatttcctcaagatgggccaaaaatgtaaaaattatgtgcctgttggaagacgtggaatttaccagggagtgatcttgaacatgcacttgcattggaaaaagcatcaaactctccaggtaattgtgaagacatttacaccagaggaggtcaaggaaattgccatcgagttagccacactaagtggtgggattgtgcttgacattcaagatgggaacacaattattatgtacagagggaaaaactatgcacagccaccaccagagatcatgtctccaaaagtttccctctctagaaaaaaggcactggataaatccaaatatatggaaaagctcagagctcttaggcggtacattcccagacttgagcaggagcttgaagatcttcatgcacagatgaagttagctggagagcatcaaggacaaaatgcagggaaacatgttgcttcaatttcacataatacaaacagtatgccagtgagaaaagaaccttgtggttcaattcgcaacaaaacagtatctgatctcctatcagaaactgtagagggatccaagaggttagaggatgaaagttctgcgattgaagacgactcagcttcagagtctctgtcatttacagagtctgaggatctctctgacatttttgagacagaatcagaggagcaggaagaggacaacaaggatcgccccttatatctcgataggctggataagtttccctcaggaaaaaatgataatgaaccagatgattttgaggagcatctgcggaggatcgcttcactttcagataagactgattcaccttcaaaagaactgaaagtgtcagagctcgatgagattgataaaatctttctgagagcaagttcgttgttgaagaaaaggtgaacctttgggatttgtatatgacaatcgtcatatttatatgcactgcgaaaagtattttgtgcagttttaatggcatcttcagaaaaaaagtttatgatcgtctagtgatagggccaaccctcaaagtttgtggtcaccattgttttacggtgattataatataactggaattctgtggggttgtttgaatttgttgactgataacttcgatgtgtcatacagcagattcttgttgtttcatgcttttgttgcagtttctgatgttagttgtagccatcctttgtaaaattgtaagtgctattttttttctaaaaccttgaacatatgcgactacccactcgtacaaaac

SEQ ID NO: 106896 - DNA, 1215 bp, Zea Mays
gggaaggctttgctggtagttgtagcacacacggcacaccacacggtttcgtcctcgtccaccatgctatcgtcctcgcacctcgttaagctgcccctcctgccgcgcggcctcctctcgtacctccccgcatccatcctcccgagcgggcgcgagagcaccgcggacgcagcaccctccacgccgccttcttccaagaagatgtcgtcgtccgcgcagcagcagcagcagcagcaagcgggcagcagcaaggcggagtcggcggagctggcgcgcgtgttcgagctgttcgacaaggacggcgacgggcgcatcacgcgggaggagctggcggagtcgctgcgcaagctgggcatgggcgtgccgggcgacgacgagctggcgtccatgatggcgcgcgtggacgccaacggcgacgggtgcgtggacgcggaggagttcggggagctctaccgcggcatcatggacggcgccgcggaggaggaggaggaggaggacgacgacgacgacgacatgcgggaggcgttccgcgtgttcgacgccaacggcgacgggtacatcaccgcggacgagctgggcgcggtgctgtcgtcgctggggctgcggcagggccgcaccgcggaggagtgccggcgcatgatcggccgcgtggaccgcgacggcgacggcagggtcgacttccgcgagttccgccagatgatgcgcgccggcgggctcgccgcgctcgggtgatgggtgaccgtcgccggccggtgctgcctcctgctcctgcacctgggcctggccatggagcgccgggcacctttttctgcatctgcgtgcttgatttcgtgtgctagaaagaacctgtagatagatattgcttgcttggagcgaggggggagctcacgtcacgtaaccgcgttgttccgtcttcgttctgttgctttggtttcgttagaattcatgggcttgctaattaactgttgtatgtactggttgttgccctgcccttagggctgatttggtgaccggggatcccgaggggaagaaatcctcttgctatttaaaattgaattgcgaggggattcctccccatggatcccctagggatccctaatcaccaaattagcccttaaggtttgctcgggcctcggggacaaggtttcccctgttttattcaggtcagggctttatttcttctatcacatggcagcatctcctgtagtctgcaga

SEQ ID NO: 106897 - DNA, 4320 bp, Zea Mays
atggggcacagctctagaaagaaaaagaagcgcggcgcggccggccgcaaggcagccaaggaccacgccgcgcagctcgaaggagacgagaccgccctcgacgaggagctcacggccctggcttcaattttaggggaggacttcaaagtaacatcagaatcacctcatacacgatgtaatatatgtattaggccttattcggatgacatgggctttgaagatctaaatatttcagctattcttattgtgatatgttttcctggttacccccacaagtgtccaaagttgcggatcctgcctgaaaaaaacttgtctaaagaagatacagatcggctcctttcgcttcttattgaccaggcaaacatttattcccgagaaggacgtgttatgattttcaatttgtttgaggctgcgcaagagtttctatctgagattgctccagctcgtgtttcagtgagcactgcttctttcttgggtttgagctcaactactgatgacaatgtggaagttggctttgacagtgatccttacctgggaatctcttacatatataactccttcgatctatatagtcagttatatgatgatacttattggagtcgacaaggttcagatctgacaacagatagtggcaggaaaaatattgtatctcaagttcaatccaatgttagaagcaagaggaagaccatcattgaaaaatcccacatctcagctgataaggtcaataatgctaaagagtcatctggtgataaagctgaacagcaacatgccacaaagcatggtgccatacgggaggcagctccaactttacatgttgtggatgaggaaactgaaatttacggcaaaagtttgtctgctagcaatacaggaaatacatcagatactcctgaaaggggttttagcagtctaaatgaacctgaggacactgaccttgcagatgaatcttggaatgaacaagattgtgattcggacttcagctcttcaaatgcactaccttatgtttcatacatgttagatgatgcttcacgaaacaagaaaagggatttagttctggtacatctgcttcggatagcctgtgcgtcgaaggattctctttcaagtgctttgccaacaatatcagcagagttgtgcaacataggggttctttccgaatgggctaaggatttaatttctgattctcctgctgtttttggagaaactttcagtcatgtttttgggcaacaaatgatctcttcagagtgttctctattttggagacctgataattcatcatctaagccaaattctcgttatttgaatgattttgaggagctccgttcacttggtcaggggggctttggtcgtgttgcattatgcaaaaacaagctagatgggcgccaatatgctgttaaaaagatacgtctgaaggatagaagtcctcaattgaatgagaagattttaagagaggtagccacactttcaagattgcaacatcaacatgttgtccgttattaccaggcatggattgaaactgaatacggtcatcataatattttgaatgctggcgggtcctgcactgctgagagctctatctttagttatgatgaagtcagcctatcggatgcaggtggtgggaataagcaggaatccacgtacttgtacattcaaatggagtattgtcctaggactttgcggcaggattttgagacatacatctcgtcttttgatgttgaccatgcctggcacctgtttcgacaaattgtggaaggtctagctcatgtccatagtcaaggaatcctacacagagacctgacacccagcaacatattttttgatgtccgcaatgatattaaaattggagattttggtttagccaaatttctgaagctggagcagctagatcatgaccaatatcttcctactgaagcactgggtgtatcaatggatggaacaggtcaagttggtacatatttttatactgcaccagaggtagagcagaaatggccacagattaatgaaaaggttgacatgtacagtttgggagtaatattttttgagctttggcatccatttgccacagcgatggaaaggcatcttgttctttccgatcttaagcagaagggagacccgccattgtcatgggaatcaaaatttcctcgtcagtcagtcctgttaagaagcttgctgtcaccaagcccgtctaaccgtccatctgctgtcgaggtcttgcaaaatgaactgcctcctcggatggaagatgagtggctaaatgatgtacttagaatgatacggacaccagaagacacatatgtttatgaccgggttatatctacaatatttaatgaggacaggttcgccaaaatgcaaggccaacatgatagcagcaaaaagtccactggtaacattgataacagtgaacttttggataccatcgttgaggttgccaaggaggttttcaagcggcattgtgctaaaaggttccaaatatcacctttgcatactttggagtggaattttaccaaaaacaggggaaacacagtgaaaatcttaactcaaggaggagagatgctagaactttgctatgaactgcgaacaccatttgttatgtcaattgcttctaatcagacatcatcattcaaacgttatgaaatatcatgggttcatagaagagccgttggccattcaactccttatcgttttcttcagggtgattttgacattattggcggtacttcaccgattccagaggctgaaatcatcaaggtggctttggacctggggacccgcttttatgattccaagacgctagtcatacgtctgaatcacggtaaacttgctgaagcaatttgctcttgggcaggggtttctcaggatcaaagacaaaatgttgctgagtttctgtcttcaactattgttcagtattggccaaatgaagctgaccgcaagtcacagtggagtttgattagggggcaacttttacaggatcttcgtctttctgaagaagttgttgagaagctacataaagcagatcagcggttttgtggctctgcagatctagtacttgctagattaagagggaccctgttttatgatgaatctgcttgcaaggctcttgatgatctatccgcgcttctgagatgtttgagagtatggtcggtagaacaaccaattactactattgatgtactcatgcctccgtcagaatgttactatacaaatttgtttttccaggtatactcaaaagaaggtaatcatggaccgggtttccatgaaaagttgctggcagttggtggacgatatgattggttggtggaacaagcttgggatgagacatctaaatctaaacccccaggtgctgttggtgtgagcattgcacttgagaaatttcttcctaacaatccttcatctgatctgggattgcgaagggttgaacctagcatcagtgtacttgtctgttcaaggggtggtggcggtctgttgactgaacgcatggaacttgtcgcagagctttggaaagctaacataatggctcagtttgttcctcaggaagatccaagtcttcaagaacagtatgaatatgccagtgaacatgatattaaatgccttgcaattatgactgaatcaggcctgtcacaaacagaccttgtgaaggtccggcatcttgattttaaaaaggagaaggatgttgaaagagagggactaataaagttcctgtctgatgcaatgtgttcacaatacaaaaatcctacgatctggagctgaccaacggccctcccaagtgcttagtgtatttgttttcaggttctagcagagcatcaaaaaatgtgtctttcgaacttccgggtgaaagcaatgtttgctgttcgaacatgtgaaggcaatcatgcgtgttggcttccgtgcatacggtgaggcagctgttggctctctgcaggttgttgccaaacgttacgccctggtctttactgaagatgggcgccgacgtgcggtgattggccaattggtataatcctggacctcttgattgttctcctgaggaccaatgccatgcaacaaggttgcttcagacacaaggtggcgtgtagttggtgcaattctgcagttttggggctgttggtattatatggatctgaaggtgcgcggttttctactacaacagatcctccgtttttgcctgtgttctctttcttgtgcatgtgattttctttttcttttccataggactaccttgtacatagttcgtttggcgtgagccatcatgtacatgcaaaatttttacattgttgggttactgacaatgaaatgctgaattttgcaactccctgatttaggacaaaacaa

SEQ ID NO: 106898 - DNA, 664 bp, Zea Mays
tttggctgtcacctatccgctggctgttgttgttttgcatgggttagaatcatcctgattcatgtttataaaacaattttctacaattttctaggggaaacacagtgaaaatcttaactcaaggaggagagatgctagaactttgctatgaactgcgaacaccatttgttatgtcaattgcttctaatcagacatcatcattcaaacgttatgaaatatcatgggttcatagaagagccgttggccattcaactccttatcgttttcttcagggtgattttgacattattggcggtacttcaccgattccagaggctgaaatcatcaaggtggctttggacctggggacccgcttttatgattccaagacgctagtcatacgtctgaatcacggtaaacttgctgaagcaatttgctcttgggcaggggtttctcaggatcaaagacaaaatgttgctgagtttctgtcttcaactattgttcagtattggccaaatgaagctgaccgcaagtcacagtggagtttgattagggggcaacttttacaggtaaaagaagcattatagtgatacagtacaggtcaaatgagtacttttgtagctttttttttgtaagagcatccttggtagtgctacaacatggaaattgcagttaacaaacttgg

SEQ ID NO: 106899 - DNA, 803 bp, Zea Mays
gcagtgagcaggagggtggagaaggtggagagggactacttgtcgtacgacgagccaagaacgtgttctcgggcgaggcatgcaacgaccttggtggcgagttctgcgatgcgtcgtaccatgtcgacgtctttagggagctagcgcacacctgaagcctgatcctaattcccatccatgtttgtccagaaccaagttgatctcacaacgatcggtcggtgtagagctagctaattctaatggttagagttcgaatcggtaacacacacgtgtgtgttgctgatgctgcagggtgttcacaatggaggcctacgacctactcgatggcgacgcgtgcaacgcgcagatatactcggtggcatcggcagtgagcaggagggtggagaaggtggagagggactacttgtcgtacgatgagccaagaacggtgttctcgggcgaggtatgcaacgaccttggtggcgagttctgcgatgtgtcgtaccatgccgacgtctttagggagctagcgcagacctgaagcctgatcctaattcccatccatgtttgtccagaaccaagttgatctcacagtcgggtagatgttcacacattgtatctacgtgtagccaagcaagaccaagggtgtatgtaatgtatataggcatgtcttgggttggctcagctgccaaggtatgtagtataaaccaagatgaaatggtactggtgttattccctgttttacgatgttagaagatggaacacaaagctatgcaagtactatgctatgcccgatctgttccctgcacttgcaagccaatgga

SEQ ID NO: 106900 - DNA, 2861 bp, Zea Mays
cgtttcagaccagacaacggcgaagaaggcagaagaaagaagacgactcgaccgtcggcggaaacagaaaaggagccacgccggcgcggcgcgcatccagaaagcgctcgggattcgcacacacacatgcccacgcgcggcgcggcgcggtatattccaccagaaccagatcaccaccttcccggggcaatccggtaactgtatacagttgcaagatgcacgatgggaaagaaggaaaaaaatccgacgcttgtcacaggataggagtgagtaaaaatcaatgaccatagcagcagaagcggcgaaacttccaccccaccttcacctccttgcttatatatactcgccccgccgccccggggccggctcccacctcgctccagtctagacggcggtttgactttccgaccggggaatcggcgctgcgtttgatttgaggaggcgacacgagacgggacgggagggatctcttcgctggagcgttgcccgattcgtcgcggttctcggacaagggagggagggcacacctcgggctccgatcgaagagctttgttaacattagagattaaaaggtagcgccgtagcaaaatgaaggcaccatcactactggttcagtgtttccctggcttgcttcccagcaaggccactagttgcgtgccaattgtatctgagaaggatctgcagctaccatcaccagctgttgaaataatcccctcaaagagtgttcatccatacaaatatgctggagagaaggttgatgtgcaaggtcttaatattttcaagggtaaagtcagtgtagcagatatgatagttatctcgccttctgaagtagcatcatcaaaatatgatggaactctgaaatactgggagagttccattacccttgtcgacattcttaaaaatgagatccgtgatgggcagttgagcttcaggggcaagcgggttctagagcttggatgtggatatggcctctctgggatttttgcctgcttgaagggtgcatccacagttcactttcaggacataaatgcagaaacgatacggtgcagaacaatacccaatgttcttgcaaatcttgagcaggctcaggaccgacagaacagaccatcagagagccctgttacaccatctaggcagctcttggctcctaatgtacatttctatgctggagagtgggatgaactcccaacaattctctcagttgtgcagccacctgcagcaccaacaaacctcagcttctctgaggatgattttatggatggctgcagtagccatgatggaagcagtgtagttggtcatgactactgccccaggagatctaggaagctttctggtagccgtgcatgggagagagctagtgagaccgaccaggcagatagtggctatgatgtgatcttgatttctgatgtcccctacgcagctaactctctgaagaagctctatgcgcttatttcaaagtgcctacgtcctccttatggagtcctgtacgtggcttccaagaagaacttggttggttccaatggtggcgccaggcagcttcgagctctcatggaagaggaaggtgtccttggtggccacttcttgactgaggtgtgtgacagggagatatggaagttctttttcaagtgagcaaatataggaagtgggaagagaaggaaatgagttctgacgttgaaacccagtttttatggtttctatctgcagcgatgtacataccgcgaggcatagttccattaattctttggtagtaggttgaaacttcaagaaatatctgcagttgagcttgcacaagtgttggagtcctttaccgctttgtagatctgctatgtgctaatgtcgctctattaagtacagaaagcaaattgtggtaacgttttatatatcgaatatatggtgatggcacttaagccggtgcatggtatgagataattcaactcttttacacgcctatatgcagccttgtagatgtacgctgtgttggagtggctatatgtggctctataaaaaaacgcagatttgacttagtcggtggcaagacatggaattttttttaaaaaaaaacatttgggcactatttttactatcatgaattccaaacgatctccgatccaaatcctcaaggcccttttggatcttttgaattaaatttcattctaataattataaattagtcatatctctactatataagaagctaacgatgtcgtccacagttacaccactcccctgttcggacatcgtgcaagccctcgctgctcgcccctcctcgcccacgtcgtgcccccgtcgatccatcgtttgtgtccccccttcctccctgcgcctccctctcaccctctatcgcctaaaaaccctagtccgtgcccagccactaccgtcgactgcgcgtggtcgctggccgcgtgcgtcgacccaactgatggcacgacctccctcacctccgccgctaacctgatccatggaaggcgaaggatcccctgattacccctctcctcccaccttcctcggctccaccctccctcgactggccgctctactgcaccgccgccaccgccacaaccaccatgcggaggcggatccacgtcgtctaggtcgacgtcccgttgctggagacttggcgcaggcccatcaactaacacgccaccgtcctcgcaccgcatgaggtgctcacgatgcgggagctcgacgttgccaaaatcgtagctacgggggatgactggacacgatgccccccacacccaacaccatgccaacgtcgccctcggcccggtcggcgcagcgtggcgggccgccttcgcacttgaggaccccgcggaggcggaggaatagcgtggacgtgccgcggtggctgttgtcgtgtg

SEQ ID NO: 106901 - DNA, 672 bp, Zea Mays
aaccgcctgtcgcgacccctgaccgtcgccaaccgcaagaagcgaacgccccaccgccgcgaatcgcgtctgccgcgaccgctccgcaaacgctgcgaacagcccgcacgccgtgccgcgccgccgcgaacgcccgcaagccacgatacacccgccacaatatttttctgttccaggatatttctcgctgggaagaaggttatgcagatagcgttggggcgtccgcctgctgatgaagctgagacaggcctccacaaactttccaagttccttcaaggcaactctggtctgttcttcaccaatcttccaagggatgatgttgagaggatgtttcgagaatttgaggagcatgattttgcaaggacaggatgtactgcggcagatacggttgagcttaaggaaggccctctagaacagttcacacatgagatggagccctttctacgcaagcaaggacttccagttcgcttgaacaaaggtgtcgtagagttagttgcagaccatgtagtttgtgaggaagggaagccccttgcgccagaagcagcatagactctgcggctgcttgggatacagatggcgacattccatctataccttgtgtgtcgctggtcgagcgatgaatttgaagcttacaaagaaggcttgatgcacctaggagctgatgattcatct

SEQ ID NO: 106902 - DNA, 1512 bp, Zea Mays
atttccttttttgtggctcaggttttcttggacacttgcttatctcgttatcagtcaaagaagattgaagcaggagcatctattggagcaattggagctcaaagtattggggagccagggactcagatgacactgaaaacatttcattttgcgggagtagctagcatgaatgttactcttggtgttcctcgaatcaaggaaattatcaatgctgctaaaaagataagcacacctattatcaccgctcagcttttgtcaaggaaagatgtgctttctgcgcgcattgtgaaaggatctatggagaaagcagtgcttggcgaggttgcagcaaccattcagactgtcctgaaatcaagtctgccaaacttggttgtcaaacttgatatgcaacttatagaaactctccacatgggaatatctgctgattctgtgaagctgtcaattttgaatcatccaaagcttaagttaaaatctgagcatgtccgagtcattgatagagccaagttgcgaatatatccagctggaactgacaagctcaaacttcagcttgaactgcataacctcaaatccatccttccaaaagtgattgtgaagggcattccaactgttgaaagggttgttattgatgaagttaaagtcaacaacgcgacagaaagataccaattgttggttgaaggaacaaacctcctggcagtcatgggtaccccaggagttgatgctaggaagacgaaaagtaatcacatcatggaaacgaaccaaacacttggaattgaagctgctaggagatctattattgatgagattcaatacacaatgaaaagtcatggcatgaacattgatcggagacatatgatgctcttggcagatttaatgacatacaagggtgaaattctcggcattactagatacggcattgcaaagatgaaaagcagtgtgctgatgcttgcttcatttgagaaaaccgcagaacatctattcaatgcctcatacagtggtcgtcaggatcagatagagggagttagtgaatgcattatcatgggcattcccatgcagctcggtaccggtattctcaaagtcaggcaaaggctcgaccatgtgcctgaattcaagtaccaaccggacccgatactgtcgtgatacatacatgtggactgaagctggaactctgtacatatatatagctgggtcatacatgcatagcgtagcgtagcctagggcaaccctggcggcttgtcatttctccggtgaacatctaactagtctcgttccatctccatgaggcagactctaggtcaacaactccctcttcggctgcatcggcaaatgcgagagtaaaattgtggcaaacacttgctacatcttctaggcagtggtacatgatcgtgttacatatctctgcaggctaatgaagcctgggaagaatcattgtttttttcttgactagataaatatctgtgttgtaaaggaaaaataataatacaatgagaattaagaattacacgcgtgtttgcc

SEQ ID NO: 106903 - DNA, 373 bp, Zea Mays
atttccttttttgtggctcaggttttcttggacacttgcttatctcgttatcagtcaaagaagattgaagcaggagcatctattggagcaattggagctcaaagtattggggagccagggactcagatgacactgaaaacatttcattttgcgggagtagctagcatgaatgttactcttggtgttcctcgaatcaaggaaattatcaatgctgctaaaaagataagcacacctattatcaccgctcagcttttgtcaaggaaagatgtgctttctgcgcgcattgtgaaaggatctatggagaaagcagtgcttggcgaggtgaactgtcactagatatgttttattacagatcattttttacatagacttt

SEQ ID NO: 106904 - DNA, 801 bp, Zea Mays
ggtatgagggatggagatgttagtcttgatgggcaagtggtacccaagaaaagacacttttcgttacttaggatcaatgcttcagaaggagggagacatcgatgaggatgtcagtcatagaatgaaagctggatggttgaaatggcggcaagctgcgggtgtcttatgcgacccccgggtgccacacaaaccactaaaagacgacatgtacaacaactaagtgtggcagagatgcgtatgttgcgctggatatgtggccacacaaggagagatcgagtcctgaatgatgatatacaagagagagtaggagtgacgccaattgaggagaagcttatgcaatatcgtttgagatggtttggacatatccaacgaagacctgaagaggcaccaatgcatatcggaataattaggcgtcccgagaatgtgaagagaggtagaggtcgaccaaccttgacgtggacagaggctgtgaagagggacctgaaggagtggaatattgataaagagctcgtcgtggataggaaggggtgaaagtgtgcaattcacgtgccagaatcctgatttgtagtttcacttttcctccttaatcgtttgacattttcttgtgcccctttagatcttgctggttcttgtgggttttatctctttttatgtgtttccccgtttcgtcgtttttcggttctcctttgcctttgtctcccttttcttttctttgggggttgagctctgaggttttcatatggggtttcatctctagcctaccccaacgtgcctgggacaaaaaggctttgttgttgttgt

SEQ ID NO: 106905 - DNA, 3318 bp, Zea Mays
gtaaaagtgatctaggtctcccgcgccgccgccgccgccgcctaagctgcttccacctccgctttctgtgcagaggactcctcgccggagaatagccggcggcggctcgagacgaaactacggtgctcgtctcccgccgcccgccgcccttcactccccagcatacctagtccctactctaatccgtacagagcaacgcatcaagtgatggcgaagccggaggagaagctgcgctgcaccaaggaacccttcatcgaggacgtcggcacccggaggataaagagcatccggttcagcgtgctctcgggcagcgagattcgcaagtcagcggaggtacaggtctggaacaaccggatctatgaccgcgacatgacgccggttcccaatgggttgctcgacccgcgaatgggaatcccgactaagagaggcaaatgcaatacctgccatggtgaatttagtgactgtccaggtcatttcggctacttgaagctcgcgcttccagtttttaacgtgggcttctttaactgtattctggacgtgttgaagtgcatctgcaagagctgtagtagagttcttcttatcgagaaagaccgcagggagtttctaaagaagatgagaaatcccagggcagatgcactacagaaaagtgctacaatgaaaaaagtgagggacaaatgcaaactatcctgctgcccccgttgtgattacagaaatggtgtagttaaaaaaggcagagcgggcttgatagtagttcatgattgtagcaaagttttggatggacatacagaagaattgaagaatgcactacaaaataagaaagaaaaggtgtctgctagttcagttctagtgttagaccctgcaactgttctatctctattcagaagaatgattgatgaggattgtgaattactaaaccttggtgataggccagagaaacttattgtgacagagattgcagtgccacctgttcctatacggccttctgttgttgttggtaatagtagaacaagcaacgaagacagcattacagttattttgaagagcattgttaatacaaactccatccttaaggagacccttcatactgggggtccattcaccaagtgctttgattgctggcaataccttcaacttcaagttgttgaatatgtgaatagtgatgccccttctcttcctgagtcacaacatcggggccttgttcaacgactcaaagggaagactggacgatttcgtggcaatttgtccggaaaacgtactgagtacacaggaagaaccgtcatatctcctgatccaaatttgaaaataacagaggtggctattcctgtgttgatggctcgagtcttgacttatcctgaaagggtttcaaactataacattgagaagctgagacaatgtatacgaaatggaccattcaaatatccaggggctaattttgttacacaacctgatggcatgaagcagagcttaaagtatggtgatagaaggattactgctcgggatttaaagtgtggatgtatagttgaaagacatttagaagatggagatgttgtcctctttaatagacagccgagcctgcatagaatgtcaattatgtgtcacagggcaaggataatgccatggagaacactcagatttaatgagtctgtttgcaacccttacaatgctgattttgacggagatgaaatgaatttgcatgtccctcagacagaggaagctcgcactgaagcgcttatgctcatgggggttcagaataatttatgtactcctaagaatggtgagatactggttgcttccacgcaagacttcttgacctcatctttcctagttacaagaaaagatactttctatgatagatcttcctttactcttttgtgctcataccttggtgatggaatggagaacattgatttgccaacaccagccttgattaaacctgttgagctttggactggtaaacaactatttagtgtgttagtccgacctaatgcgcacacaaaggtgtttctgaatcttgctgttcaagaaaaaatttattcaaagaaaaagggaaaaaaagaggggggagaggaggtaaaggaaacaatgtgtggaagggaaacaatgtgtcccaatgatggttatgtttatttccgaaatagtgaactgttatctggacaagtagggaaggccactttaggtaatgggaacaaggatggcctttactctgttcttttaagagattataattctcatgctgcagcaagctgtatgaatcgtttggcaaaatttagtgcaagatttatagggaaccatggtttttccattggtgtggacgatgtccaaccaggagaacatctaaatcggcaaaagaaaaaggaaatagacggagggtacaaaaaatgccatgatcttatttctttgtttgcgaaaggcgcgctcgcattgcatcctggttgcaacgcagcccaaacgctggagcataacatcactggtgtgttaaatgaaatcagatcaattgctggaaatgtgtgcatggatacgcttcactggaggaacagcccattgattatgtctcagtgtggttccaaaggttctccaatcaatatcagtcagatggttgcatgtgttggacagcaatcagttggagggcgtcgtgccccagatggttttctaaacagaactcttcctcactttcctataaattcaaagacccctgcagctaaaggttttgttgctaattcattctatactggtttgactgctactgagtttttcttccacacaatgggtggacgagaaggtcttgttgacacggcggtcaaaacagcagaaactggatatatgtcccgcagattgatgaaaggcttggaagatctctcagttttctatgatcagacagttcgaaatgctagcggtggtatagttcaatttttgtatggagatgatggcatggatcctgcaaagatggaaggaaaagatggcatgcccttaaatttggatcaattgtttatgaaagtcatggccacatgtcctcaaaggggatcagatacattatctccagtgggcatcaaacagatgttagaggataagttcttgcagcatgacacctcatctgatggtggctgtagtgcagagttcaagaaaaacttaactgaattccttgataaacgtatagaattaatgaaatgcacaagaagggcactccatctacatgaggatcatgtagaaaagaaagattcttgcctagaagaatctattgctgctattatatctggtatatctgcaaaacaacttcaggtgcgtgtttataatcttttgtaaccctttctattatcaaag

SEQ ID NO: 106906 - DNA, 2389 bp, Zea Mays
aaagctctcgtttctagcttccttagaggaaagctctcgttcctagcaaccaagctagcgaatccaacccaacccgtccatttctccacatccccaccctccctccgtctccgcctccgcctgcgccaccctccaatccgcgccggcgcgtcgccaccctacccgattgctacctcctcgtggtgggcgccgctccgatccgcccgatccgcgccggcgcctcgccaccctacccgattgctacctcctcgtggtgggcgcctgctcctggagttccggcgcgcggcgggggcggcgtagtaatggaatccgaggacgacatgcacgacgcgaacgactccgctgaagacgatttctacagcggcggggaggccggtctcgccgccagcgacgacggagacgccgactacgactttgcggaccacgactccgacgactccgcggagctcatctcccacagacagcagcaaaattatagtatattgagtgaagttgatatacagcggcgccaagaggatgatataaatagggtttcaaccgttctttcaatttccaaaccagaagcatgtgttcttctccgcaactataactggagtgttagtaaggtgcatgacgaatggtttgctgatgaagagcgtgtccggaaggttgtgggtttaccagagaagcataatgaaatgccaaatgacagagaagtattcccatgcttcattagtttcgcctgtaacatgtggaatatgtttcgaaagttgccctcgtgggtcgatgagtgctgctgcatgtggtcatcctttctgcagtacatgttggagaggttacattagcactgctataagtgatggtccaggatgtttgatgttgaggtgtcctgatccatcttgtgctgctgctgttggacaagatatgataaattcactggctgctgatgatgataaggaaaagtatgggcgatatcttcgcagatcttacattgaggataatagaaagacaaaatggtgtcctgcgcctggatgtgaatacgcagtggaattcgtcatgggcagtggcagctatgatgttaattgcaactgttcatatgggttttgttggaattgcaccgaggaagctcatcgtccagtagactgtgccactgtttcgaagtggatcctcaagaacagtgcagagtcagagaatatgaattggatactggctaattcaaagccttgtcccaaatgcaaacggcctattgaaaaaaatcagggatgcatgcacatcacatgcactccaccatgcaaatttgagttctgctggctatgtcttggtccatggtcagagcatggagagaggactggtggattttatgcttgtaaccgctatgagtcagcaaggcaagaaggagcgtatgatgaatctgaaaggagaagagaaatggcaaagaactcccttgagagatacacacattattatgaacgatgggcagccaatcagtcgtcgaggcaaaaggcactgggggaccttcaaagcctacagaatgacaagcttgaaaggttaagtgacatacaaagtcaacctgagtcacagctgaagttcattgtagaggcatggttacagattgttgaatgcagaagggtattgaagtggacttatgcctatggattttacctgccagagcatgagcatgccaaaagacagttctttgaatatctgcaaggtgaggcagaatctggtttggagcggctacatcaatgtgcagagaaagaacttcaaatataccttgacgcagaatctccctcgaaagacttcaatgatttccgtacaaagttggctggattaactaggcccttccactagccatggcacatgcagcaaaagcgcaacttccaagagcctcggtggtaaaagtaagagtggcaagaacagggcatcaagcagcagttccaaatctggcggctcaacccgaggtgtggatgatagtaacatctggacatgcgatcagtgcacatatgcaaaccccaaatctgccagagcctgccaggcttgtgatcgccagcatcgatagcggtgtcagtcattgctagagatttggaccccatttgtcgagaattttctggtgttgcgccgtgcgatacacaacatacatgaaaattgaatattagctgatctctgggggtaggttttcgtgtatcatggattgtttgtcgactgactgcgcatgtgaagcctcaactcagcatccactcccatttgtgtatataagtatatccatatctgtaacaatgttttgttcaatggaagtagcggagctaggaggcgtctgctgccaaaggaactcaactgttgtagtgctgttgtaatgtaagatgcattggtcaaatttaaagaaagttagtcaccctgttacagaaattcc

SEQ ID NO: 106907 - DNA, 2423 bp, Zea Mays
aaagctctcgtttctagcttccttagaggaaagctctcgttcctagcaaccaagctagcgaatccaacccaacccgtccatttctccacatccccaccctccctccgtctccgcctccgcctgcgccaccctccaatccgcgccggcgcgtcgccaccctacccgattgctacctcctcgtggtgggcgccgctccgatccgcccgatccgcgccggcgcctcgccaccctacccgattgctacctcctcgtggtgggcgcctgctcctggagttccggcgcgcggcgggggcggcgtagtaatggaatccgaggacgacatgcacgacgcgaacgactccgctgaagacgatttctacagcggcggggaggccggtctcgccgccagcgacgacggagacgccgactacgactttgcggaccacgactccgacgactccgcggagctcatctcccacagacagcagcaaaattatagtatattgagtgaagttgatatacagcggcgccaagaggatgatataaatagggtttcaaccgttctttcaatttccaaaccagaagcatgtgttcttctccgcaactataactggagtgttagtaaggtgcatgacgaatggtttgctgatgaagagcgtgtccggaaggttgtgggtttaccagagaagcataatgaaatgccaaatgacagagaagtaacatgtggaatatgtttcgaaagttgccctcgtgggtcgatgagtgctgctgcatgtggtcatcctttctgcagtacatgttggagaggttacattagcactgctataagtgatggtccaggatgtttgatgttgaggtgtcctgatccatcttgtgctgctgctgttggacaagatatgataaattcactggctgctgatgatgataaggaaaagtatgggcgatatcttcgcagatcttacattgaggataatagaaagacaaaatggtgtcctgcgcctggatgtgaatacgcagtggaattcgtcatgggcagtggcagctatgatgttaattgcaactgttcatatgggttttgttggaattgcaccgaggaagctcatcgtccagtagactgtgccactgtttcgaagtggatcctcaagaacagtgcagagtcagagaatatgaattggatactggctaattcaaagccttgtcccaaatgcaaacggcctattgaaaaaaatcagggatgcatgcacatcacatgcactccaccatgcaaatttgagttctgctggctatgtcttggtccatggtcagagcatggagagaggactggtggattttatgcttgtaaccgctatgagtcagcaaggcaagaaggagcgtatgatgaatctgaaaggagaagagaaatggcaaagaactcccttgagagatacacacattattatgaacgatgggcagccaatcagtcgtcgaggcaaaaggcactgggggaccttcaaagcctacagaatgacaagcttgaaaggttaagtgacatacaaagtcaacctgagtcacagctgaagttcattgtagaggcatggttacagattgttgaatgcagaagggtattgaagtggacttatgcctatggattttacctgccagagcatgagcatgccaaaagacagttctttgaatatctgcaaggtgaggcagaatctggtttggagcggctacatcaatgtgcagagaaagaacttcaaatataccttgacgcagaatctccctcgaaagacttcaatgatttccgtacaaagttggctggattaactagtgtgactcgcaattattttgaaaatctcgtccgggctctggaaactggattaaatgatgtaggcccttccactagccatggcacatgcagcaaaagcgcaacttccaagagcctcggtggtaaaagtaagagtggcaagaacagggcatcaagcagcagttccaaatctggcggctcaacccgaggtgtggatgatagtaacatctggacatgcgatcagtgcacatatgcaaaccccaaatctgccagagcctgccaggcttgtgatcgccagcatcgatagcggtgtcagtcattgctagagatttggaccccatttgtcgagaattttctggtgttgcgccgtgcgatacacaacatacatgaaaattgaatattagctgatctctgggggtaggttttcgtgtatcatggattgtttgtcgactgactgcgcatgtgaagcctcaactcagcatccactcccatttgtgtatataagtatatccatatctgtaacaatgttttgttcaatggaagtagcggagctaggaggcgtctgctgccaaaggaactcaactgttgtagtgctgttgtaatgtaagatgcattggtcaaatttaaagaaagttagtcaccctgttacagaaattcc

SEQ ID NO: 106908 - DNA, 2070 bp, Zea Mays
attctgaaagcaaattttatctttgctgccggtagttgctgccttgcttcttccttgcgatcgactcggagaaaaggagacaacgaactattgtaaccaccaggaaacgatcagccgcagttgactccaagtcaagtagctgggctacctatctcgtctcgtctatataaactggcagcgattggcacttgaatctcaaacagtacgtgctgtctagagtacaagtgagtagttaagcaagtgcctgtaaaccaagcttgcttgcgacttgcgagacaacacacaacacaacagccatggcagtggtagacaggtgggcgggcctgggttcggcgctcgcgagcttcctcttcctctggtccatggtgcagagacacgtgcccgtcaccatcagccaccgcgtcgccacctgggccaacaagctcgtctcctacttcaacccctacgtcgagatcaccatctccgagtacggcgccgagcgcttccgccgcagcgacttcttcctcgccgccgaggcctacctgtccgatgcctgcgcgccccgcgcccgcaagctcaaggccgagctcggcagggacagcagcaacctccaggtctccgtcggcgacaacgacgaggtcaccgacgccttccagggagccacggtctggtggtacgtcgtcaagaaggtgcccaggtctaacgtcatcagcttgtacgccaaccaagacgacccgcgcacctaccgggtcgtcttccacaggcgccaccgcgacctcgtcgtcggcaagtacctgccccacgtcctcaaggaaggacgcgccgtcaccgtccgcaaccgccagcgccgcctcttcaccaacaaccccagcggcggcggccgtgggaggggcgacgtctggagccacgtcccgttcgagcacccgtctacgttcgacacgctcgccatggatcccgacgacaaggaggctgtcgtcgacgacctggaggcgttccgggaggccaaggactactacaccaaggtcggcaaggcgtggaagcgagggtacctgctctatggtcccccgggcaccggcaagtccaccatgatcgcggccatggctaacttgctcgactacgacgtctacgacctcgaactcacggcggtcaacaacaacaccgacctgcggaagctattcatcgagaccaccgggaaatccatcatcgtcgtcgaggacatcgactgctccgtcgacctcaccggcaagcgcaaggacaagaagcaggcggacaaaaaatccgaacgcgaggccgacgacaagcccaagctgccgatggagcctgaaaaggacgaaggcagcaagattacgctttcagggatgctcaacttcatcgacggcctgtggtcggcatgcggcggcgagcgcatcatcatcttcaccaccaaccataaggacaagctggaaccggcgctgatacggcgaggcaggatggacaggcacatcgagatgtcctactgccgcttcccggccttcaaggtgctcgccaagaactacctggacgtcgaggagcacgagctattcgaccagatagggcagctgctcgaggagaccgacatgtcgccggcagatgtggcagagaacctgatgtccatgtccaagaagaagaagagggacgccaacgcgtgcttggagagtcttgtgaaggctctgaagcaggccaaggaggaggcggccaaggcgaaggtggaagcagaggcaaagaagaaggtagaggcggcggccgaggcagcaaagtccaaagaggaagacgaggcaaaggaaggcagcggataagacgaagcaggcgacaaaacttcagaatcgatgagcaacgtacgaacacacatcaaaagagatgacgacaagtctaggctcgtgattctaataggagtcatcattaaaaaaaggcttaaattgtagaatcgttgaaattagggaacaatgtacactgtctctggaaatttgttgcaactcttccacttgcctatagattggtaatggctatataaatgtttattcacgagtcgtttgatctcttaattaattttagtttaaaataaatacaaataga

SEQ ID NO: 106909 - DNA, 388 bp, Zea Mays
agctttataacgcgatgcaggcggaagtttgctcggaaggtgatagcatgtgcatatgaactatacgcgatggattggatagtttattaccatgaactgctagatgaatcaattctgataagtgttggagcacaagagtggaattcaagtgtacacaatgtacttcaaaatggcgaacaatctatatgacatcattttaacaaggttcgttgggtgctgcaaagttcaaggatatgcaaagtggtgacaacgatgctatttggttgatgcaagtgtgttctctatttgttagtattttgcttactattggatttgtctgtgaaagtagttattagatatatgaatatagattggatgccttggttgttgcgcttctccagttgagaaa

SEQ ID NO: 106910 - DNA, 629 bp, Zea Mays
atgcgcccaggctctcctccactgcgttgccgccgcccgcctcgaggtttgccggagcgagccatgcgcccgggatctcctccgctgcatcgccaccacccggtcctggagcacggcaccacgacgccctgcgtgtaccttcgccccgtggtcgcctcccacagcagccgccggacgagcagcagcaggaggagtggcgctgctgcccacgcccttgggagcaagatcggcttggtggttgccggcattgtgttgtgagagactggctgagtgagatctctctctctagctctttcttttcttttcttgttcagagtgccatggcgcttctctctctctgcactggatgtttgctgtttctcgatggagggaacagggaagcactgcactgagatctatccgagttttagtggaggaggccggaggggagggtgaagcttaaatgcggtgccggacagccagttgttgacagcagccgctgcgtcctgctgagcgagcgagggaatatctcaaatggggagaggatgaggtttccttcaaatgttacttttaccacgaccgaatggtttgtactaactgggacttttctgaaattgttttcttatctgaactgagaagcggcaattcct

SEQ ID NO: 106911 - DNA, 2023 bp, Zea Mays
gggacgggttgagaaaatttcagcgaaaccatcggcggattacataagccgacagccaccggtcgttgcgtcttgctcatcagaacgctagctaggactaggagaagcttaacctctgcaaccaccgataagagttactactatttacataggagcggcagctgccaccgcgtgcgccggcgatggggtggtgggagaacgccaagagcgtgttcggcgacgccgggaacgtcggctgcttcccgaggatcgggaggaagcagtccaagaactcgtacgctttcccggcggatcctgggagcgaaaaacggagagggtcaggcggccccgcccccgccccggaggaggtgatcacggtggaggtgccggaggtgcccctgcgcgagctgaacgggatcacggcgtccttctcaggcgagaagctgatcgggcaagggtcctacgccaaggtctaccaggccacgacgcggagcggcaggctggctgtcgtcaagcggctggagaagccctccaagcacgcgtccaacgacgtcttcctcaagcagctcggggtggcgtccaggctcaagcacgacaacttcgtccgcctgctcgggtacaccatcagcggcgacctccgcgtgctggtctacgagttcgccaccatgggcaccctccacgacgtgcttcacggggacagggatgtgctgaggctgccgccgccggagcagggcagcgccgccaggccggtgctgctgagctggattcaccgcgtgcacatcgcgctggacgcggcgagggggctggagtacctgcacgagatggtgcagccgccggtgacgcacaaggacgtgcgctccaccaacgtcctgctgttcgagggcttcagggccaagatcgccgactacaacatgttcagccaggccgcggacatggccaggctcaaccgctccacgcacacgctcggttccttcggctaccaggcgcccgagtacgccatgacgggccagatgacggacaagagcgacgtgtacagcttcggcatcgttctcctggagctcctgacgggtaggaagccattggaccggacgttgccgccgggccagcgaagcctggtgaactgggcaactccgatgctgacggaagacagggttcaggaatgcatcgatccgcaacttggtgatcagtatcctcctgctggagctgtcaagctcgggcgaatcgcggtgcagtgcctgcagtacgaccccaccttccggccgtccatgggcaccgtcgcccgcgtcatcaactacgccgtcttgcgagaccagcagggcgtcgtctgatttgatggcgtgccgaattttggttatttttagggttactcactgttcagattctggagacttctacagaaggaggaaaagcaccaacaaattctcgatgcatgtcgagctttggaggtggtggcgatgtaagtttttgcaatgcatggatggcgctcgaatgcaagaattgaagatggctagtgttttctatagtcatgacattttgttttctttgagttagtttaattattcaagcaactactctatggtgcaataatcgttatgtaatggatgtacgtatttgtatgctaaagccggaactcttgtttccataataaaaaaaatctattggcccaaaatgtggggctataaaacaagaaaacagaggaacaaggtggcccgaattctgcttctgcgtgtatagatatttcttttgcgtatacagttgacaagtcatttgttctactctcagcaaaaaaagaagaagaatttcttctatacctacctgcaggaccaaataaatcgacttcagaaaaaatccttatgaatgagatgttcctatgtaagtttagagtgcactgctaaaaagactttgaacatgtagatgaactgttgtaccgttatgccagcaaattaggtttatatttttcagtgccatcaagtcatcatttacatgctggtcactaatgttcctcatacaaacaaaagattataagcatgagatgtaccttaag

SEQ ID NO: 106912 - DNA, 1932 bp, Zea Mays
gcacgccagcgacacgttagccatgtgagtgaccaacgccctctcccgggggcgggcaggttgggaggacgagcaaacgacgtgaggcgtcgggcgtcgtgggtgcagcggtgcgaacggaccgcggactggactcggtccaaagtccaaacacgtatgtacacggtctgtccggaggccggagcttcacatcgctggccggccccccgcgaccgagatgtcgcggccgtgcttcacatcgctggcccgcccgctcgttcgtcggtctcggaactttgtccacctctgcgctgctggcctcctgctgctcctctccctcctgcagcgttgccgtccacaggaacaggacgggacgggttgagaaaatttcagcgaaaccatcggcggattacataagccgacagccaccggtcgttgcgtcttgctcatcagaacgctagctaggactaggagaagcttaacctctgcaaccaccgataagagttactactatttacataggagcggcagctgccaccgcgtgcgccggcgatggggtggtgggagaacgccaagagcgtgttcggcgacgccgggaacgtcggctgcttcccgaggatcgggaggaagcagtccaagaactcgtacgctttcccggcggatcctgggagcgaaaaacggagagggtcaggcggccccgcccccgccccggaggaggtgatcacggtggaggtgccggaggtgcccctgcgcgagctgaacgggatcacggcgtccttctcaggcgagaagctgatcgggcaagggtcctacgccaaggtctaccaggccacgacgcggagcggcaggctggctgtcgtcaagcggctggagaagccctccaagcacgcgtccaacgacgtcttcctcaagcagctcggggtggcgtccaggctcaagcacgacaacttcgtccgcctgctcgggtacaccatcagcggcgacctccgcgtgctggtctacgagttcgccaccatgggcaccctccacgacgtgcttcacggggacagggatgtgctgaggctgccgccgccggagcagggcagcgccgccaggccggtgctgctgagctggattcaccgcgtgcacatcgcgctggacgcggcgagggggctggagtacctgcacgagatggtgcagccgccggtgacgcacaaggacgtgcgctccaccaacgtcctgctgttcgagggcttcagggccaagatcgccgactacaacatgttcagccaggccgcggacatggccaggctcaaccgctccacgcacacgctcggttccttcggctaccaggcgcccgagtacgccatgacgggccagatgacggacaagagcgacgtgtacagcttcggcatcgttctcctggagctcctgacgggtaggaagccattggaccggacgttgccgccgggccagcgaagcctggtgaactgggcaactccgatgctgacggaagacagggttcaggaatgcatcgatccgcaacttggtgatcagtatcctcctgctggagctgtcaagctcgggcgaatcgcggtgcagtgcctgcagtacgaccccaccttccggccgtccatgggcaccgtcgcccgcgtcatcaactacgccgtcttgcgagaccagcagggcgtcgtctgatttgatggcgtgccgaattttggtactatagctgtgaatatcatgcatgtcttgctgtgctatgttaagtaagctggccatgtttgagcagcggttattatctgagaatggatactatccttggaagcagcacggaatgggttgcggttacgaccacataaaacaatgggctagtttgtaataacaatatatttttctctgagaatgttttgtgaaggtgtacaaaaaaaaaaagatacaggagctggtcactaaatcagttggggtttctcgacc

SEQ ID NO: 106913 - DNA, 2816 bp, Zea Mays
accggcgcggtgacttcaccacccgtctcccccttcctcgtctcgccacccgagtctccagtctccacctatatatcggcccgtgccggcgcgcctcggcctttcaagtttccccatacaccgagggaggaacacacaccgaggaggccgcagcagggcagagtacacccccgcgtttcgggaatggcagtgctgctgcgccccgcggcgatcgcaggcggccggcaggtgtggccggtggcggaggacgaggagggggcccgcgaggcggaggcgtcgtcgcagcggctggtggaggcggtggcgcgcggcgacgcgagggaggccggcgagctgctcgcggcggggcgcgcggacgtgaactacgccggagtggtgtggctcagggcgcgtcgcgtcgcggaggcggagccccgggaggacgccgccgccgaggcgcgggccgtgcacgaggagatccgcgccgacgtctcgccgctcttcctcgcggccggcaacggggacgtcgcgctcgtccgcgccttgctcgcaaagggagcggacgtgaacggcaaggtgttccggggctacccgacgacggccgcggcacgggaagggtgcgcggaggtggcggagctgcttgtgcgtgcgggcgcgtcgcagccggcctgcgaagaggccgtcgtcgaggctgcgttgcagggacaggcggccctcgcggccatcttcatgggctcggacctcgtccgcccccgtgttgccgcccacgcgctcgtgtctgccgcagcgcgcggcttcgtcgacgtggtcgacacgctcatcaagtgtggagctgatccaaacgcgaccgcccgggtgctcctgcggtcgctgaagccatccctgcacgccaacgtcgactgcacggcgctctttgcagcaatcgtgagccgtcaagtcgctgtggtccgccatctgcttcaggccggcgtgaagagggacacgaaggtgaggctgggagcgtggtcctgggacgcgtccaccggcgaggagctgcgcgtcggcgccggactcgccgaaccttacgacgcggtatggtgcgccgtggagtactacgagtccacgggctccatcctacgcatgctcctccgtagcgggttcacgtcgactgccgctcacctcggccggacgctcctccaccacgccatcctatgcggcagcgctggtgccgtccagaccttgctggcgtccggtgcagactcggaagctcccgtgaagacgaccaggagcaacaggtccaggccggttcacctggccgcgcgcctcggccagccggagatcctgcggatgctggctgacaggggctgcgacctgaacgcgagggcggaggctggcgacactgccgccatcatctgctcgcgccacaaacgcgaggactgcctccgagttctcgtgtccgccggtgcagatgtcgcgctgttaaactcggctggcgactcgtcggcctccgtcgcttcctctgggggatggaagaccggcttcgaacgggctgttattggcgcgattcggtgcggggccgtcccacgctccagcgaacggagcgtgttctccccgctgatgttcggcgcgctgtgcggcgacgcgaccgcgatggaagtgctgctctctcaaccagacgtggacgtggacgagcaggattcggacggatgctcgcccataatggctgctgccaagatgggaaacgtcgaggccttccgcgccctcgtattcgccggcgccaacgtgaagctgagcaacaagcgcggggagacggccatcgggctggcgcagcagagcaagaagagagacctcttcgagcaggtcatgctcgagctcgcgctggagaagggcatgcctggaggcttctacgcgcttcactgcgcctcccggcgcggcgacaccgcggcggtgcgccacctcgccagcacgggctgcgacgtcaatatccccgacggtgacggctacaccccgctgatgctcgcggccagggaaggccacgcgggcgtgtgcgagcttctcatctcctacggcgctcgctgcgacctccggacgccgcgcggcgagacggcgctctccctggcgcgagcagcgctggctacggcggcgttcaacaaggccgaagacgtgatcatggacgagatgggccggcaggcggtccttcagggcgcgcgcgtcaggaagcacaccaagggcggacgcgcgaggcctcacggcaagtcgctgcgcatggtcgctgcggcgggcgtgctccggtggggcgggtcaagccggcgcaacgtgatctgccgggaggccgaggtcggtggcagctcggcgttccagcggcacaggcagaggaagggggacgcgtatgagccggggctgttccgcgtggtgactgcgacagggagggaggtgcacttcgtgtgccagggcggtaaggaggccgcggagctgtgggtgaggggcatcagggccgtcaccagggcggcgtttggcaagagaggcaaggagtgagtgacgcatggctgctctctctccgttaggctctgtaggttgcagcgagcgcgtgcttgtaaagagttgtagcgggcgtagagccgtaggggtgctatgtggttcggtgtggggtgcagctgcgctggtcttcagctcgaaggctttggcttgccatgatggtttttggttcaggggcatggtgttgtgttgtgtgtatatagactggctgttgtctcatcgaagttgctttagctaactggtttgtagtgcgtttctatctgaattatcagtctcctatgcgaaacttcgccatttgagttactaattacgatttctgatgt

SEQ ID NO: 106914 - DNA, 2563 bp, Zea Mays
cgccctgttcgatgctactgccccttatctttagtgtctgtaggccaaggagagtaaagagaaggaatgctactatagtaaaaaaaaatgtagaagcaatcagtgtaggtgagatgagcattggagttgagaccattgatcacaaaaatgtttcacgagcctcggcgacgggtttaagggccctgttgtaaagcactctacgagtgccattgtgttccactggatgcttgggcttttactcaagaaaaaaccactttgtcacccgttatctgatggtttcacggttctcactttgtcgtgacgcgcgtgcaggcaaagggagcggacgtgaacggcaaggtgttccggggctacccgacgacggccgcggcacgggaagggtgcgcggaggtggcggagctgcttgtgcgtgcgggcgcgtcgcagccggcctgcgaagaggccgtcgtcgaggctgcgttgcagggacaggcggccctcgcggccatcttcatgggctcggacctcgtccgcccccgtgttgccgcccacgcgctcgtgtctgccgcagcgcgcggcttcgtcgacgtggtcgacacgctcatcaagtgtggagctgatccaaacgcgaccgcccgggtgctcctgcggtcgctgaagccatccctgcacgccaacgtcgactgcacggcgctctttgcagcaatcgtgagccgtcaagtcgctgtggtccgccatctgcttcaggccggcgtgaagagggacacgaaggtgaggctgggagcgtggtcctgggacgcgtccaccggcgaggagctgcgcgtcggcgccggactcgccgaaccttacgacgcggtatggtgcgccgtggagtactacgagtccacgggctccatcctacgcatgctcctccgtagcgggttcacgtcgactgccgctcacctcggccggacgctcctccaccacgccatcctatgcggcagcgctggtgccgtccagaccttgctggcgtccggtgcagactcggaagctcccgtgaagacgaccaggagcaacaggtccaggccggttcacctggccgcgcgcctcggccagccggagatcctgcggatgctggctgacaggggctgcgacctgaacgcgagggcggaggctggcgacactgccgccatcatctgctcgcgccacaaacgcgaggactgcctccgagttctcgtgtccgccggtgcagatgtcgcgctgttaaactcggctggcgactcgtcggcctccgtcgcttcctctgggggatggaagaccggcttcgaacgggctgttattggcgcgattcggtgcggggccgtcccacgctccagcgaacggagcgtgttctccccgctgatgttcggcgcgctgtgcggcgacgcgaccgcgatggaagtgctgctctctcaaccagacgtggacgtggacgagcaggattcggacggatgctcgcccataatggctgctgccaagatgggaaacgtcgaggccttccgcgccctcgtattcgccggcgccaacgtgaagctgagcaacaagcgcggggagacggccatcgggctggcgcagcagagcaagaagagagacctcttcgagcaggtcatgctcgagctcgcgctggagaagggcatgcctggaggcttctacgcgcttcactgcgcctcccggcgcggcgacaccgcggcggtgcgccacctcgccagcacgggctgcgacgtcaatatccccgacggtgacggctacaccccgctgatgctcgcggccagggaaggccacgcgggcgtgtgcgagcttctcatctcctacggcgctcgctgcgacctccggacgccgcgcggcgagacggcgctctccctggcgcgagcagcgctggctacggcggcgttcaacaaggccgaagacgtgatcatggacgagatgggccggcaggcggtccttcagggcgcgcgcgtcaggaagcacaccaagggcggacgcgcgaggcctcacggcaagtcgctgcgcatggtcgctgcggcgggcgtgctccggtggggcgggtcaagccggcgcaacgtgatctgccgggaggccgaggtcggtggcagctcggcgttccagcggcacaggcagaggaagggggacgcgtatgagccggggctgttccgcgtggtgactgcgacagggagggaggtgcacttcgtgtgccagggcggtaaggaggccgcggagctgtgggtgaggggcatcagggccgtcaccagggcggcgtttggcaagagaggcaaggagtgagtgacgcatggctgctctctctccgttaggctctgtaggttgcagcgagcgcgtgcttgtaaagagttgtagcgggcgtagagccgtaggggtgctatgtggttcggtgtggggtgcagctgcgctggtcttcagctcgaaggctttggcttgccatgatggtttttggttcaggggcatggtgttgtgttgtgtgtatatagactggctgttgtctcatcgaagttgctttagctaactggtttgtagtgcgtttctatctgaattatcagtctcctatgcgaaa

SEQ ID NO: 106915 - DNA, 561 bp, Zea Mays
atggccgacaccagctattgggagtggatgggcatcgaagtctgcgccgtcgccgagctcatcgtctcctttgccatcgtcaccactgtcccgtgcctcgtcttctatttcgggtacaactccgtcttgcagtggtgggaatcgccacggttccgcatcttgaggctcggcggcgtcaccaccctgaggcagaagctgaactaccactgcaccctgtgccaaggcagcatggaggccggcgagaatgtccgcaagctctcctgcaaccacgtgttccactgcgacagcagcgtcaagtgcgagggcgtcgaccaacggctttgcactacaccgatgacgccctggaactgcccgatctgtgaccaggttctccatcccgtgctgccgtggaaacggacaccgccaccgtcgccaccacctccacaaaaagcatcggcggcagcgcaacaacagttgccgcggaagtcgtcgtcgacgcgggatttggaggacccactgcttccgaggcacggcgagaaacggacgccgaggccgcttcagttccggtggacagcgagatag

SEQ ID NO: 106916 - DNA, 743 bp, Zea Mays
agactgaaaacaaagtccgcacgctccaggctcggcggcgtcaccaccctggagcggaacctgagctaccaccccctgcaccctgtgtcgagagagcatggaggtcggcgagaaggtccgcacgctctcctgctaccacgtgttccactgcggcggcagcgccaagtgcgagagggacatcggcgagaaggcttctcactgcgcgcgcggggctcatgctctgcccgatctgccgcccgattccgcatcccgtgcagaaggggaagcggccaccgtcatcgccgccaccgtagcctttcggatgatgacgacgatgaggatcggagcagacaacggcaggcgtcgccatcgcagtaggcatgcgtgatcgagcttggacgttacggtgttgacgtgccctgtggggcgttccggatcagttcttggagaggttcttcatggattatttcgtcgtttctgtctgcattcttggaactggtcgagagtagtagtctctggtggtgcgtgttgtctgatggtctggattagttctcgaaaaaattccttcgttgtttctgtcattcgctttcttagaactgatcgggctcagctgcgttcctgctcttttgttcagatttgtgttcaggttcagctgtgacgaactgaatttcttgatgtcaagaaacgatgatttgctagctagttcttggatcagttacaatgttctgactgaagcaattacatccttggttcattgctcaata

SEQ ID NO: 106917 - DNA, 1256 bp, Zea Mays
gtttttgttataaaagtcgccacagaagcgttgagatggcacattgcgcgcaatgaccacctaaacctaaccagaaatcgtaaggtaggtgggacggtggtgcttaggaactgtctaggtggctgaggtcatcaccttctaaagcagcacagtcaatcatttgaaataacccgctgaacccttataagccctacctgtgttctcgcatgtttacacatcctcgaactattctacttatatattataagtcatttattttaaataatatgtatctgattttatgtatattttcctgagtaatctcatcatgtgtataaactgtgtctatcatctctgcagactatatgccgctgcaacctcttgaagacgagaatgacactgttatcagtttcttatatcctctagaacccccggtaagattccttatttatttcagtgaggagtattacctaatcggtgcaaactgaaatgtaaggttggggctgtttgaagttttcctctattttgtgagattatctgctcactgcctcactgtagttttcacttcaaaatttttattagtttctccttccaacattattgtatttgatgcttcctaattgatgcatgcattttgatttcatataggtgtagattgttgtcatgcatcactgtgtttactttctactgcttgttgcagatagtagatgagtttgactgggaaatggacgattacgaggattttgctgatcagaaagttcaagaaggtggcctgccagaggatgagaaagaaaaattcaaggagttcctgaaggagaaggttagagaaaggaagagagagcttaaacaggctaaagaagccaggaggaaagctattgatgatatggatcctaaggtgaaagaggcattcgagaacatcaaattttacaaattttatcctgtgaaaaccccagacacgcctgatgtaaacaatgtaaaggcgaggtacatcaacagatactacaggaatgcccattatctgatgtgatggctttccttatcgcacgtgcttggcgagcttgtcacttgagaggagttgatatgaaaacagttcggtgttgtactagagttggccccagtttttcaccccccctgggcatcttttgctctccggtgtatacaatcctgaggatagattattgtgtagcactaagaggggcaaagtagtttgagactaaacaaatcattaaggaacaatttgttcccttttcatcatctattttgtggttgttttaaca

SEQ ID NO: 106918 - DNA, 1582 bp, Zea Mays
cctgactccctcgtggctcgtcccattcccgcaccatctcgacaaaccacaccaactgtcatcggacggcccaaaactgtgccgcgtgttccgttcaacggctatttcagcccgcagaacgcacatcagaagggtaaagccacgaaccccccggtccgcgcctgcgccgccttccctctcctgccttctccgcttcaaatttgcgtagcgttgatttcacgcccggatctcacaacgctcaatccaaacgctagccgcaaccctaaccctagcaaccggtgagtaatggcgcgccctaggggcaagaagcgcacggcgccccgggcggccgccactgattctgtccagccggaggcggcggcgacggagacagcggcggcggagccggcaaatcgggggcggtggaagcgcgtcaaggcgccgcccaagcccaagcccgagacggattacttcgccgagaaaagaaatctggaggatctatggttatctgcttttcctgtcggtactgagtgggaaaacattgataagataaaggagttcaactggagctttgaaaatttagagaaagccttagaagaagggggcgagcttcatggtaaaacagtttatctgtttggaagcactgagccccaactattggatgttaatggcgaatcaaagatagtgcttattccaatcgtagttgctgtagactgccctttccctccatcagacaaaattggcataaactctgtccaaagggaaaatgaggaaatagtgccaatgaaggcgatgaagatggcatgggtgccttatgttccccttgaggaccggcttagcaggattgacagtttgaaaacaaaaatattcactctcggatgcacgcagcggaggtctgcactgaagcatctcaaaattgagagagtcaagaagtttgactactgcatgccttactatatgccgctgcaacctcttgaagacgagaatgacactgttatcagtttcttatatcctctagaacccccgatagtagatgagtttgactgggaaatggacgattacgaggattttgctgatcagaaagttcaagaaggtggcctgccagaggatgagaaagaaaaattcaaggagttcctgaaggagaaggttagagaaaggaagagagagcttaaacaggctaaagaagccaggaggaaagctattgatgatatggatcctaaggtgaaagaggcattcgagaacatcaaattttacaaattttatcctgtgaaaaccccagacacgcctgatgtaaacaatgtaaaggcgaggtacatcaacagatactacaggaatgcccattatctgatgtgatggctttccttatcgcacgtgcttggcgagcttgtcacttgagaggagttgatatgaaaacagttcggtgttgtactagagttggccccagtttttcaccccccctgggcatcttttgctctccggtgtatacaatcctgaggatagattattgtgtagcactaagaggggcaaagtagtttgagactaaacaaatcattaaggaacaatttgttcccttttcatcatctattttgtggttgttttaaca

SEQ ID NO: 106919 - DNA, 122 bp, Zea Mays
ccttttctctcttttttcttttatatctccctattttgttccctagttttcaaatttagatttgaagttcaaattcaacttaggtttcggagattcaaatttacagttaaatgcacaataca

SEQ ID NO: 106920 - DNA, 876 bp, Zea Mays
atggggtttcagaccataccagtcgtaccagaccttgtggtggataagagtgaggttgaaacctcacaagttgcgggctctgattcaatagtcatagaaagggtggaaacaaatctgagcaaggaaccctttctgctagttcccttggaaaataaggaagagaaagagtcccttggtataatttgttatcttgaaaataacaaggttgatgttcctgaggccttctctccaaggagagatatacttgaattgtcaatctctagcaagtctactgatgatagtctttcattgggttgtgagacaccacgtgaaagcatctttgatccatttgctccaggacctgaggaggcagcctgtgcaccaaagaagaaagtgactagaggtgctcaagttccacctcgcaggaagctaaattttgattcaggtgactacccagttaaaaggttaagtttcgattgcagtgattctgaagaggaggatcaatatatcgaagtgattcacaagatgatcctggatctattaattctagatgtccctcttggtggacaaaaagaaactggaaagaatgcgacagatttgggcctacatggaagctgcaagacacctgattcaaagcctctacttactggcattgcatccacatgcccagatgcacctttgaggccatctcttaaagcgttaaagctgagcccaggcatttgtcgaaagattgactttgacttcgatgcagtcagtggctcaggaagtctaagttcttccatggataaaactattatagttcttctagattattgtattgagtatgcactaaccaatttaacacaaaaaattaaactgactagttaaaagttaaaacgcatatgtggcacgctcgtg

SEQ ID NO: 106921 - DNA, 1830 bp, Zea Mays
ccctaagcttttagctggtccaacgaaaggcacacagcccgacagccgccgctgtttcttcatcttcctcgcagcgccggcgctccttcttccgctccctctccgattcgcgctcggcacgcaggcgacggcggcggcgctcgtgctcgggctctcagcgacggcgggcagtcccagactcggtgtcggcgtcagcggtcccccttccgcctgtcaccaatcgcctcgcgccctcgcctccggtcctccgcacaccgaccggcgccctgcgtgcacgcctcccgctcccctcctgcctccggtggaccgtcgacggcgctcggacccggaggctgcactgcgcgccgcgtgcgaccggcgggcagcgggagccagcagccgcgccgctttggtagcgcttatacccccaaatgaatccttaccgtccgcttagctcttcagcgcgctgaagcgtgcgcttagtgccgatttttggaaccctgattgttgagtgttttgacatagtaactggctgtaacacattggtatttgaagaccattgcaggttgtaacacactgttatatttgaagaccagtggtgggttgacttaaaagcagggtttaaacatcacttttgtgatttgttctgcaatatctttgccatatcatggggtttcagaccataccagtcgtaccagaccttgtggtggataagagtgaggttgaaacctcacaagttgcgggctctgattcaatagtcatagaaagggtggaaacaaatctgagcaaggaaccctttctgctagttcccttggaaaataaggaagagaaagagtcccttggtataatttgttatcttgaaaataacaaggttgatgttcctgaggccttctctccaaggagagatatacttgaattgtcaatctctagcaagtctactgatgatagtctttcattgggttgtgagacaccacgtgaaagcatctttgatccatttgctccaggacctgaggaggcagcctgtgcaccaaagaagaaagtgactagaggtgctcaagttccacctcgcaggaagctaaattttgattcaggtgactacccagttaaaaggttaagtttcgattgcagtgattctgaagaggaggatcaatatatcgaagtgattcacaagatgatcctggatctattaattctagatgtccctcttggtggacaaaaagaaactggaaagaatgcgacagatttgggcctacatggaagctgcaagacacctgattcaaagcctctacttactggcattgcatccacatgcccagatgcacctttgaggccatctcttaaagcgttaaagctgagcccaggcatttgtcgaaagattgactttgacttcgatgcagtcagtggctcaggaagtctaagttcttccatggataaagaaagtaattgatcgttctgcccttcttgattgacaatgacaagtaatgaactgtgcattttgggactgaatgaagcatcgtgatgatcttccccaggaacagctttaatctgcatatttgcatctcatgtatcagtatcctatgccgttgtggcaccttagctaaccctgatgctttggggattattgctgatggtagacaagtacttaagtagcaagcagtttatgttatacatgtaatctatctctggttttcttttgtaactggccttgtgctaattacctcctagatttatatcagttgattcgagctctgaccatattattttgtaaatcttaagacgagacttattccatctgattaaagtaatgcacccgatgcagtttcttggtagctgttaaatcagctctgacca

SEQ ID NO: 106922 - DNA, 1711 bp, Zea Mays
ccctaagcttttagctggtccaacgaaaggcacacagcccgacagccgccgctgtttcttcatcttcctcgcagcgccggcgctccttcttccgctccctctccgattcgcgctcggcacgcaggcgacggcggcggcgctcgtgctcgggctctcagcgacggcgggcagtcccagactcggtgtcggcgtcagcggtcccccttccgcctgtcaccaatcgcctcgcgccctcgcctccggtcctccgcacaccgaccggcgccctgcgtgcacgcctcccgctcccctcctgcctccggtggaccgtcgacggcgctcggacccggaggctgcactgcgcgccgcgtgcgaccggcgggcagcgggagccagcagccgcgccgctttggctgtaacacattggtatttgaagaccattgcaggttgtaacacactgttatatttgaagaccagtggtgggttgacttaaaagcagggtttaaacatcacttttgtgatttgttctgcaatatctttgccatatcatggggtttcagaccataccagtcgtaccagaccttgtggtggataagagtgaggttgaaacctcacaagttgcgggctctgattcaatagtcatagaaagggtggaaacaaatctgagcaaggaaccctttctgctagttcccttggaaaataaggaagagaaagagtcccttggtataatttgttatcttgaaaataacaaggttgatgttcctgaggccttctctccaaggagagatatacttgaattgtcaatctctagcaagtctactgatgatagtctttcattgggttgtgagacaccacgtgaaagcatctttgatccatttgctccaggacctgaggaggcagcctgtgcaccaaagaagaaagtgactagaggtgctcaagttccacctcgcaggaagctaaattttgattcaggtgactacccagttaaaaggttaagtttcgattgcagtgattctgaagaggaggatcaatatatcgaagtgattcacaagatgatcctggatctattaattctagatgtccctcttggtggacaaaaagaaactggaaagaatgcgacagatttgggcctacatggaagctgcaagacacctgattcaaagcctctacttactggcattgcatccacatgcccagatgcacctttgaggccatctcttaaagcgttaaagctgagcccaggcatttgtcgaaagattgactttgacttcgatgcagtcagtggctcaggaagtctaagttcttccatggataaagaaagtaattgatcgttctgcccttcttgattgacaatgacaagtaatgaactgtgcattttgggactgaatgaagcatcgtgatgatcttccccaggaacagctttaatctgcatatttgcatctcatgtatcagtatcctatgccgttgtggcaccttagctaaccctgatgctttggggattattgctgatggtagacaagtacttaagtagcaagcagtttatgttatacatgtaatctatctctggttttcttttgtaactggccttgtgctaattacctcctagatttatatcagttgattcgagctctgaccatattattttgtaaatcttaagacgagacttattccatctgattaaagtaatgcacccgatgcagtttcttggtagctgttaaatcagctctgacca

SEQ ID NO: 106923 - DNA, 1839 bp, Zea Mays
gcgtttctttaccctaagcttttagctggtccaacgaaaggcacacagcccgacagccgccgctgtttcttcatcttcctcgcagcgccggcgctccttcttccgctccctctccgattcgcgctcggcacgcaggcgacggcggcggcgctcgtgctcgggctctcagcgacggcgggcagtcccagactcggtgtcggcgtcagcggtcccccttccgcctgtcaccaatcgcctcgcgccctcgcctccggtcctccgcacaccgaccggcgccctgcgtgcacgcctcccgctcccctcctgcctccggtggaccgtcgacggcgctcggacccggaggctgcactgcgcgccgcgtgcgaccggcgggcagcgggagccagcagccgcgccgctttggtagcgcttatacccccaaatgaatccttaccgtccgcttagctcttcagcgcgctgaagcgtgcgcttagtgccgatttttggaaccctgattgttgagtgttttgacatagtaactggtatatgtggtaaccctattgcattgatatatttttttctcgtgcatgtctggtatcctgaattaagtttcgcactatctacttttttgcaggctgtaacacattggtatttgaagaccattgcaggttgtaacacactgttatatttgaagaccagtggtgggttgacttaaaagcagggtttaaacatcacttttgtgatttgttctgcaatatctttgccatatcatggggtttcagaccataccagtcgtaccagaccttgtggtggataagagtgaggttgaaacctcacaagttgcgggctctgattcaatagtcatagaaagggtggaaacaaatctgagcaaggaaccctttctgctagttcccttggaaaataaggaagagaaagagtcccttggtataatttgttatcttgaaaataacaaggttgatgttcctgaggccttctctccaaggagagatatacttgaattgtcaatctctagcaagtctactgatgatagtctttcattgggttgtgagacaccacgtgaaagcatctttgatccatttgctccaggacctgaggaggcagcctgtgcaccaaagaagaaagtgactagaggtgctcaagttccacctcgcaggaagctaaattttgattcaggtgactacccagttaaaaggttaagtttcgattgcagtgattctgaagaggaggatcaatatatcgaagtgattcacaagatgatcctggatctattaattctagatgtccctcttggtggacaaaaagaaactggaaagaatgcgacagatttgggcctacatggaagctgcaagacacctgattcaaagcctctacttactggcattgcatccacatgcccagatgcacctttgaggccatctcttaaagcgttaaagctgagcccaggcatttgtcgaaagattgactttgacttcgatgcagtcagtggctcaggaagtctaagttcttccatggataaagaaagtaattgatcgttctgcccttcttgattgacaatgacaagtaatgaactgtgcattttgggactgaatgaagcatcgtgatgatcttccccaggaacagctttaatctgcatatttgcatctcatgtatcagtatcctatgccgttgtggcaccttagctaaccctgatgctttggggattattgctgatggtagacaagtacttaagtagcaagcagtttatgttatacatgtaatctatctctggttttcttttgtaactggccttgtgctaattacctcctagatttatatcagttgattcgagctctgaccata

SEQ ID NO: 106924 - DNA, 344 bp, Zea Mays
ttttttttcttcatgattatgtgcattccaatccttgctgcctgctgttaaggacacaattatatagagtttcactgcagaggctcgtaacatgtttgaaagacaatttgacgtgttctgctactctctgttttagtccaatgagctggagaaaacatttgttcctatacagacatatcattgtgatcatgagttgccttgcttattgtagcaatgaagacaacgttactcttattttgaagagcattggtaatacatacagatgcagcatgtgtacttgagcacctctatctgccaataactaaattctattgctgcaataactaaaaaactccaactgaatt

SEQ ID NO: 106925 - DNA, 2987 bp, Zea Mays
tagcaggtagcagcagtcgcttccgtcccccttcctcttgtattcgcttcgccgcccaacccagcctccaccgctgccttcccgaccgttctcgccgccgctgtctcctcgcccaccaccccgcacggccggcgaccagcgcccacgcggccgctcgatccaaggccagaacgagcccaccacgatccgcatcacgccgatatttttcaggttgttggtacggatctagggttttcctgctgcggattcgttcgattcgctcatggccgctgggcgccatgggggttacagggactacgaggagagggagcgggagctcgacgcggaggcctccaggaggagcaaggagcagcaccaccatctcggcggccgccaccgcgacgtggaccgccgccgcgatggcgggcgcagcaggggtggtagagactttgccaacggccacggtcgccgacgttcgcccccgcccaggagccgcctcgcgggaaggcttggtgaccgtgagcctggcgaggtgctgagcggtagcgcatctgatgactccggtgggaggtcggatagagggagggaaaatggcgtgcgcagttctagcagggagggcgacatggtggcaggcactgggatctcgtcaccgatcaagaagaggaaattctcaccgataatttgggacagggatagcccaaagccaccgcattctggtgcagccagggacaagaaatcggtagaatctgttccttctgagctccctccgccgccgccgctgccacaagaccacatcccactgagcttgtctgtggagaagtcacctatggatgtagaaactactgttggtacagagagtgctgagcagttgccggaacatgaggtcaataaggtgatagagcaggaagaggactatccaagtccaacaatgaggaacatatcgacttcaagatgggcgggtgcaaatgatgatgaggaaggtggggcagctccaatgaagaagagaagtgtttcacctgcagactcctctgtaccaggtcagtggaaacgagcaagcccagaacctggtgaagtctctggaggaagggcaatgtctaggtcatctgattcagggaaaataggtaatgatgagaaagaagattccgaggtcgataaagatgactatatggatgttgacagggagcatgctagtgacagtggtacagaaaactgtatgtcggatactgactcagacaatgaaatgtgcaggcctgaaacccctgaaccagagaggccaccacacaggtgtatcaatatgcttcaaggttgcagaagtgttgatgagtttgagaggctcaacaaaattaatgagggaacatatggtgttgtatacagagcaagggataagaagacaagtgagattgttgcattgaagaaggtaaagatggagagggagcgagaaggtttcccattaacctctcttagggaaataaatatcctcttgtctttccaccatccttcaatcgtggatgttaaggaagtagtagttggaagtagtttagatagcatttttatggttatggagtacatggaacatgatcttaaaggtgtcatggagaccatgaaacaaccatatacacaaagcgaggtcaaatgtttgatgcttcagctgctagagggtgtaaaatatctacatgacaattgggtactccatagggatctgaagacctcaaatcttttgctgaataaccgtggtgagttaaaaatatgtgattttggactgtctcgtcaatatgggagcccattaaaaccttatactcaactggttgtgactttgtggtacagggccccagaactgttgttaggaacaaaggagtattctactgctattgatatgtggtccgtgggctgtataatggctgagctccttgccaaagaaccattatttaatggaaaaacagagtttgaacagctagataagatttttagaacacttggcacacctagcgagaagatttggcctggctatgctaaattaccaggcgtgaaagtaaattttgtcaaacaaccgtataataggctaagggataagttcccagctgcatctttttctgggcgaccaatcctgtctgaagctggttttgatctattgaatagactgctaacttatgatcctgataagcgcatatcagcagacgatgctctgaaacacaaatggttctctgaagttcctctgcctaaatcaaaagacttcatgccaacatttcctgctcttaatgaacttgacaggcgtaccaaacgttatctgaagagtcctgatcctctggaagagcaacgtctgaaagaactgcaagggaacataggcaaccgtgggctttttggctgaactaagagtacttgattggattcctgtccgtactaactgttatgcttcaccctgaatccacgaggtcagatgtcttctgaggcttggtgccggtttgagtggataaggtttctccttgtggcccatcatagaaattttgttgcaggattaacactccatccagattgatcataaaagcaaatataaaccgtcttcatcgtaaggtgtgacatgttggctttgaatgggtacaccagtttcacctttggaacttctgtatgtaaaatattccagattggtacgttgtaaacaatccccagtgtgtcggatttaaatttaaataaaacatcatcattattagttttcttcatgctccttgtgccttttcttttgatctttgcattttgtttgcaagagacgaaagaagcgcaggggaaggaagccttttgcttttatcaggaaatcaatgacattaatacaacttagaagctaagctgtggctgcttcaagataggaaagtgacaatttgtggagggccttcaaaagtgttttactagtgaaccatggtggttgttgcttatcttcagctgacagttataacattgctcacagaaaaacatgaagcgattggtttccgcaataaacaaagtgaaagttagcatgt

SEQ ID NO: 106926 - DNA, 3136 bp, Zea Mays
tagcaggtagcagcagtcgcttccgtcccccttcctcttgtattcgcttcgccgcccaacccagcctccaccgctgccttcccgaccgttctcgccgccgctgtctcctcgcccaccaccccgcacggccggcgaccagcgcccacgcggccgctcgatccaaggccagaacgagcccaccacgatccgcatcacgccgatatttttcaggttgttggtacggatctagggttttcctgctgcggattcgttcgattcgctcatggccgctgggcgccatgggggttacagggactacgaggagagggagcgggagctcgacgcggaggcctccaggaggagcaaggagcagcaccaccatctcggcggccgccaccgcgacgtggaccgccgccgcgatggcgggcgcagcaggggtggtagagactttgccaacggccacggtcgccgacgttcgcccccgcccaggagccgcctcgcgggaaggcttggtgaccgtgagcctggcgaggtgctgagcggtagcgcatctgatgactccggtgggaggtcggatagagggagggaaaatggcgtgcgcagttctagcagggagggcgacatggtggcaggcactgggatctcgtcaccgatcaagaagaggaaattctcaccgataatttgggacagggatagcccaaagccaccgcattctggtgcagccagggacaagaaatcggtagaatctgttccttctgagctccctccgccgccgccgctgccacaagaccacatcccactgagcttgtctgtggagaagtcacctatggatgtagaaactactgttggtacagagagtgctgagcagttgccggaacatgaggtcaataaggtgatagagcaggaagaggactatccaagtccaacaatgaggaacatatcgacttcaagatgggcgggtgcaaatgatgatgaggaaggtggggcagctccaatgaagaagagaagtgtttcacctgcagactcctctgtaccaggtcagtggaaacgagcaagcccagaacctggtgaagtctctggaggaagggcaatgtctaggtcatctgattcagggaaaataggtaatgatgagaaagaagattccgaggtcgataaagatgactatatggatgttgacagggagcatgctagtgacagtggtacagaaaactgtatgtcggatactgactcagacaatgaaatgtgcaggcctgaaacccctgaaccagagaggccaccacacaggtgtatcaatatgcttcaaggttgcagaagtgttgatgagtttgagaggctcaacaaaattaatgagggaacatatggtgttgtatacagagcaagggataagaagacaagtgagattgttgcattgaagaaggtaaagatggagagggagcgagaaggtttcccattaacctctcttagggaaataaatatcctcttgtctttccaccatccttcaatcgtggatgttaaggaagtagtagttggaagtagtttagatagcatttttatggttatggagtacatggaacatgatcttaaaggtgtcatggagaccatgaaacaaccatatacacaaagcgaggtcaaatgtttgatgcttcagctgctagagggtgtaaaatatctacatgacaattgggtactccatagggatctgaagacctcaaatcttttgctgaataaccgtggtgagttaaaaatatgtgattttggactgtctcgtcaatatgggagcccattaaaaccttatactcaactggttgtgactttgtggtacagggccccagaactgttgttaggaacaaaggagtattctactgctattgatatgtggtccgtgggctgtataatggctgagctccttgccaaagaaccattatttaatggaaaaacagagtttgaacagctagataagatttttagaacacttggcacacctagcgagaagatttggcctggctatgctaaattaccaggcgtgaaagtaaattttgtcaaacaaccgtataataggctaagggataagttcccagctgcatctttttctgggcgaccaatcctgtctgaagctggttttgatctattgaatagactgctaacttatgatcctgataagcgcatatcagcagacgatgctctgaaacacaaatggttctctgaagttcctctgcctaaatcaaaagacttcatgccaacatttcctgctcttaatgaacttgacaggcgtaccaaacgttatctgaagagtcctgatcctctggaagagcaacgtctgaaagaactgcaagggaacataggcaaccgtgggctttttggctgaactaagagtacttgattggattcctgtccgtactaactgttatgcttcaccctgaatccacgaggtcagatgtcttctgaggtgaggtgccatggacatgaagtatcacatcttctcggtgtctagcagcgactgatagtgttctttagcaggcttggtgccggtttgagtggataaggtttctccttgtggcccatcatagaaattttgttgcaggattaacactccatccagattgatcataaaagcaaatataaaccgtcttcatcgtaaggtgtgacatgttggctttgaatgggtacaccagtttcacctttggaacttctgtatgtaaaatattccagattggtacgttgtaaacaatccccagtgtgtcggatttaaatttaaataaaacatcatcattattagttttcttcatgctccttgtgccttttcttttgatctttgcattttgtttgcaagagacgaaagaagcgcaggggaaggaagccttttgcttttatcaggaaatcaatgacattaatacaacttagaaggtaatatatcaaaagccaattgctgcaagtgacgtgttgctaactagaaactaatgaacgagggagttctttactgaaaaatcagctaagctgtggctgcttcaagataggaaagtgacaatttgtggagggccttcaaaagtgttttactagtgaaccatggtggttgttgcttatcttcagctgacagttataacattgctcacagaaaaacatgaagcgattggtttccgcaataaacaaagtgaaagtt

SEQ ID NO: 106927 - DNA, 2969 bp, Zea Mays
tagcaggtagcagcagtcgcttccgtcccccttcctcttgtattcgcttcgccgcccaacccagcctccaccgctgccttcccgaccgttctcgccgccgctgtctcctcgcccaccaccccgcacggccggcgaccagcgcccacgcggccgctcgatccaaggccagaacgagcccaccacgatccgcatcacgccgatatttttcaggttgttggtacggatctagggttttcctgctgcggattcgttcgattcgctcatggccgctgggcgccatgggggttacagggactacgaggagagggagcgggagctcgacgcggaggcctccaggaggagcaaggagcagcaccaccatctcggcggccgccaccgcgacgtggaccgccgccgcgatggcgggcgcagcaggggtggtagagactttgccaacggccacggtcgccgacgttcgcccccgcccaggagccgcctcgcgggaaggcttggtgaccgtgagcctggcgaggtgctgagcggtagcgcatctgatgactccggtgggaggtcggatagagggagggaaaatggcgtgcgcagttctagcagggagggcgacatggtggcaggcactgggatctcgtcaccgatcaagaagaggaaattctcaccgataatttgggacagggatagcccaaagccaccgcattctggtgcagccagggacaagaaatcggtagaatctgttccttctgagctccctccgccgccgccgctgccacaagaccacatcccactgagcttgtctgtggagaagtcacctatggatgtagaaactactgttggtacagagagtgctgagcagttgccggaacatgaggtcaataaggtgatagagcaggaagaggactatccaagtccaacaatgaggaacatatcgacttcaagatgggcgggtgcaaatgatgatgaggaaggtggggcagctccaatgaagaagagaagtgtttcacctgcagactcctctgtaccaggtcagtggaaacgagcaagcccagaacctggtgaagtctctggaggaagggcaatgtctaggtcatctgattcagggaaaataggtaatgatgagaaagaagattccgaggtcgataaagatgactatatggatgttgacagggagcatgctagtgacagtggtacagaaaactgtatgtcggatactgactcagacaatgaaatgtgcaggcctgaaacccctgaaccagagaggccaccacacaggtgtatcaatatgcttcaaggttgcagaagtgttgatgagtttgagaggctcaacaaaattaatgagggaacatatggtgttgtatacagagcaagggataagaagacaagtgagattgttgcattgaagaaggtaaagatggagagggagcgagaaggtttcccattaacctctcttagggaaataaatatcctcttgtctttccaccatccttcaatcgtggatgttaaggaagtagtagttggaagtagtttagatagcatttttatggttatggagtacatggaacatgatcttaaaggtgtcatggagaccatgaaacaaccatatacacaaagcgaggtcaaatgtttgatgcttcagctgctagagggtgtaaaatatctacatgacaattgggtactccatagggatctgaagacctcaaatcttttgctgaataaccgtggtgagttaaaaatatgtgattttggactgtctcgtcaatatgggagcccattaaaaccttatactcaactggttgtgactttgtggtacagggccccagaactgttgttaggaacaaaggagtattctactgctattgatatgtggtccgtgggctgtataatggctgagctccttgccaaagaaccattatttaatggaaaaacagagtttgaacagctagataagatttttagaacacttggcacacctagcgagaagatttggcctggctatgctaaattaccaggcgtgaaagtaaattttgtcaaacaaccgtataataggctaagggataagttcccagctgcatctttttctgggcgaccaatcctgtctgaagctggttttgatctattgaatagactgctaacttatgatcctgataagcgcatatcagcagacgatgctctgaaacacaaatggttctctgaagttcctctgcctaaatcaaaagacttcatgccaacatttcctgctcttaatgaacttgacaggcgtaccaaacgttatctgaagagtcctgatcctctggaagagcaacgtctgaaagaactgcaagggaacataggcaaccgtgggctttttggctgaactaagagtacttgattggattcctgtccgtactaactgttatgcttcaccctgaatccacgaggtcagatgtcttctgaggcttggtgccggtttgagtggataaggtttctccttgtggcccatcatagaaattttgttgcaggattaacactccatccagattgatcataaaagcaaatataaaccgtcttcatcgtaaggtgtgacatgttggctttgaatgggtacaccagtttcacctttggaacttctgtatgtaaaatattccagattggtacgttgtaaacaatccccagtgtgtcggatttaaatttaaataaaacatcatcattattagttttcttcatgctccttgtgccttttcttttgatctttgcattttgtttgcaagagacgaaagaagcgcaggggaaggaagccttttgcttttatcaggaaatcaatgacattaatacaacttagaagctaagctgtggctgcttcaagataggaaagtgacaatttgtggagggccttcaaaagtgttttactagtgaaccatggtggtcagtgtactatccttgtacattaatgtaaccgttcatctaagttatttggagactatttgccttttttttgttgt

SEQ ID NO: 106928 - DNA, 463 bp, Zea Mays
tgagaacaatgttcatactaactcactgtgacatggttgaacaaattttattacaggaaatgaaattgtcagctatgaaaacccaaagccatctgctggaatacatcgctttgtctttgtactcttccgccagtctgtccagcaaaccgtttatgcaccaggatggagacaaaatttcaacacgagagacttttctgcgctctataatcttggacctccagtggctgcagttttcttcaattgtcaaagggagaatgggtgtggaggaagacgatatattagataaataccatctcactgactgtgcactgcaagaaggaatattaattaaattttaaaaaaaacatggccagccacttcacaaagccatgataaatgctgggccttgaaatgtagcttcatttgaaaattacttcgccacatctgcaagtgcaatgaatttagcttacagtttcaccatctt

SEQ ID NO: 106929 - DNA, 1658 bp, Zea Mays
gcaactaaaaagaagaacttgtataaggacaaaaccgcaacataccaccttatcatcattatctaacacagcagtgctgttttatggtcttcagaggatgaacaagacttgattctgagttctagatgccgccgtgcactgaaataagccacacagctgtaccactaatttgcttcccccaagcatatctatcttagtaaaagcggtaccaagtgaattaaagaaatcgttatgttgggagcaggcagagaacaagtgtcgataaaatctcttaccactttttatcgttgaagtctaatattcccatcaaataatgtttcgcttgaggccctccaccatttgtaatgagaaggcaatcttcatcacagcaacattagagtggaagctttaatgagcacgctctaagttctagcctgtacatatcaaagacatagaagattaccaaccaagtactagggaattccggctcgctttcctcattcacctagtttattgaaagggtgagggaatgttcatgctgcaaggaaagaggatgaggtgtcaatctgacagacaagtcaaaaggcagaccacttttcaggagcatatcatgtctagctagggtaacactgtaacagatatagggaataagtgagtgcagtcatcagattttattcaccaatgtggggttaccatggacactcctgtttttttttctgtaagcccagatagtggacatacaggcctacactgtccagtagtgacgaccgatataaatatatgcatcttaaagctgagattctaaggcatctagagcacacgactcctgatatcatgaaagccttcagcacttcaggttacaagtataaataggacacgtacctgcacccatcagtgcacccaacttcacatttgaggccaaatcagcttctttgttctctagagagcgggcctcaaaatagcattcttgactaaccatgtcaagggacccactagtagtaggacatgtagtaggtgacattctggacccatttattaaaacagcctcacttaaggttctgtacaacaacaaggaactgaccaatggatctgacctcaagccatcacaagtagcaagtgaaccaagggttgaaattggtgggcgcgacatgaggaacctttacactctggtgatggtggatccagactccccaagtccaagtaacccaacaaatagagaatatcttcattggttggtgacagacatcccggaatcagcaaatgctagctatagaaatgaaattgtcagctatgaaaacccaaagccatctgctggaatacatcgctttgtctttgtactcttccgccagtctgtccagcaaaccgtttatgcaccaggatggagacaaaatttcaacacgagagacttttctgcgctctataatcttggacctccagtggctgcagttttcttcaattgtcaaagggagaatgggtgtggaggaagacgatatattagataaataccatctcactgactgtgcactgcaagaaggaatattaattaaattttaaaaaaaacatggccagccacttcacaaagccatgataaatgctgggccttgaaatgtagcttcatttgaaaattacttcgccacatctgcaagtgcaatgaatttagcttacagtttcaccatctt

SEQ ID NO: 106930 - DNA, 3809 bp, Zea Mays
ctccttcactagggtttaggccgttatgcccacctccggcgccccaaaacctccatggccggggcttcaattcccgccgcctcctcgtcccttctttccacctccacctccgtatccctttattggaccacctccaccccatgattagccgccgcgcggcggccacggcagccctacgcgcctctgtgcggcgtgcctgctcttcctcctcccgcgccgccgaccctgacgaccaactgcttggcctcttagaagcccctgagccgcagcgcggaccccgcctctcatccaaggacttcgcctttcttcaggtgcccacccctgtcctccacgccgcggccctcccgccgccggaggctgttcttatatccaaggcgatccgagcctacgcctccgactttgacgggaaggcggagcggttcctgcggcggcaccgggacttcctgaacgacgccgtggtagttgcggtgctcaggtcggtgcgcaccccggagctctgtgtcaggttcttcctttgggccgagcggcaggtgggctacagccacaccggcgcctgctacaacgcgctggcggaagtattgcattttgacgatcgtgctaggaccaccgagaggctgctgagggagattggggaggatgatcgtgaggtactcggcagattgctcaatgtgatagtacggaaatgctgccgccacggagcttgggccaaggcgctggaggagctcgggagactgaaggattttgggtacaggccgtcaggtgcgacctacaatgctctggtccaggtgcttgcaaccgccggacagatggacatgggttttcgtgtgcagaaagagatgtcagagttggggttctgcacggataagttcacagttgggtgctttgcacaggcgctatgtaaggaggggcgatggtctgacgcacttgtcatgatagagcgggaggatttcaaacttgacacagtgttgtgcacccagatgatcagtggactgatggaggcctccctttttgatgaggcaatttcattccttcataggatgcggtgtaactcttgcatccctaatgtggtcacatatagaacactgcttgctggatttttaaaaaagaagcagcttggctggtgcaagaggataatcagcatgatgatgaacgagggttgcaatccaaacccctccttgtttaattctcttgtgcatagttattgcaatgccagggattatccatatgcttataaacttttaaataggatggctggttgtggttgccctcctggctatgtcgtatacaacatttttattggaagcatatgtagtggagaagaattgccaagccctgacttgttggcattggcagaaaaagtttatgaggagatgctggcttctagttgcgttcttaataaggtgaacactgcaaattttgctcgatgcctttgcggtatggggaaatttgataaagcatttcagatcattaagttgatgatgagaaaaggctttgtacctgacacgagcacatactctaaggtgattacctttttatgtgaggctatgaaggtagaaaaggctttccttttgtttcaagagatgaagagtgttggtgttattcctgatgtttatacatacacaattttgattgatagcttttgtaaggttgggctcattgaacaggcgaggagctggtttgatgaaatggagagtgtcggctgctccccaagtgtagtaacatacactgccttgcttcatgcttacctcaaaacaaagcaggtacctcaggctagtgacatttttcatagaatggttgatgctggctgtgctcccaataccattacctacagcgcactagttgatggcctctgtaaggcaggtgaaagccaaaaggcttgtgaagtctatgccaaaatgattggaacatctgacaatgtgggatctgatttttactttgaaggcgagcacacagactccattgctccaaatgtggtcacatatggtgcactcatagatggtttgtgtaaggcacacaaggtggttgatgctcaagaattgctagatgttatgtcatcgaatgggtgcgagccaaatcacattatatatgatgcattgattgatggcttttgcaaagttggaaagcttgataatgcacaggaggtattttttaggatgtctaagtgtggctacttgcctacggtgcatacatacacctccttaattgatgcgatgtttaaggacagaaggcttgatctagccattaaagttctctctcaaatgctggagagttcttgcactcctaatgttgtcacttacacagctatgattgatgggctttgcagaataggcgaatgtcaaaaggccttaaagttgttgtcaatgatggaaaagaggggatgcaacccaaatgttgtgacttacacttctctcatagatggattgggaaaatctggtaaagttgatatgagtcttcagctttttacacaaatgatcacacaagggtgtgcccctaattatgttacctacagagttctgataaaccattgctgtgctgctggtcttttggatgaggcacattcactgctaagtgaaatgaagcagacttactggccaaaatatgtgcaaggatactgcagcgtagttcaaggttttagcaagaagttcattgcttctcttggattgttggaggagctggagtcacatggcatggtgtcaatagctcctgtttatgggttgctcattgatagtttctccaaggctggcagactggagaaagccttggagttgcacaaagagatgatggaagtctcatcatcactaaacataaccagcaaggatacatacacttcattgatccaggcactttgtttggcatctcagcttgaaaaagcatttgaattatacagtgaaataacaaggaaaggtgttgtgccagaactaagtgcctttatttgcctcataaaggggctaatcaaagtaaataagtggaatgaagccctgcagttgtgttacagcatgtgtgatgagggtgtgaactggcagagcaacaactcttttgatggaggctagagctttgttttcttacatggttactccagatgaaagcattgtcccataagagcttattttgattggggtgatttggttcaaattcaaaccaaagttattttaatgattcctgttccgaacatcgctctagggagtcattcatttctgacatcttactggaagattacagtatgaagtggttaccaaggagatacggattaaaatgtgcttttgtgcaactcattgatggattgggaaaacagcactatgttttgattaaaactgtatatgttcatatataacctttctgggtgctgaaggataaagtgaagaccttcaaaaaactatgtgcagtcaagctcactcattatggattatcaaattctctctttcagtgctgcacgccattttacattgtcagtgggtgatgaccgaagtaatttctgacttaccttcagatggacaaaggatcatctcaatgtctatcaacttctgtatataagttgctgatggttagacacaagggtgaaatatgtggtgaaagagaacttctgaaatccataattctctattcatcagttcagtgattcatccttatagctccttccagtgtttttgctctcgtaatagagcaataaagatatgatgaaatcacaaaaatgtagtcaaatgtactgcagttcactacttcactgtacaaatgtaaaaattacttcaagttaaaatttatttatttaacctgttgatatccggtgatattctatcaaagcaaatcatttc

SEQ ID NO: 106931 - DNA, 3740 bp, Zea Mays
ctccttcactagggtttaggccgttatgcccacctccggcgccccaaaacctccatggccggggcttcaattcccgccgcctcctcgtcccttctttccacctccacctccgtatccctttattggaccacctccaccccatgattagccgccgcgcggcggccacggcagccctacgcgcctctgtgcggcgtgcctgctcttcctcctcccgcgccgccgaccctgacgaccaactgcttggcctcttagaagcccctgagccgcagcgcggaccccgcctctcatccaaggacttcgcctttcttcaggtgcccacccctgtcctccacgccgcggccctcccgccgccggaggctgttcttatatccaaggcgatccgagcctacgcctccgactttgacgggaaggcggagcggttcctgcggcggcaccgggacttcctgaacgacgccgtggtagttgcggtgctcaggtcggtgcgcaccccggagctctgtgtcaggttcttcctttgggccgagcggcaggtgggctacagccacaccggcgcctgctacaacgcgctggcggaagtattgcattttgacgatcgtgctaggaccaccgagaggctgctgagggagattggggaggatgatcgtgaggtactcggcagattgctcaatgtgatagtacggaaatgctgccgccacggagcttgggccaaggcgctggaggagctcgggagactgaaggattttgggtacaggccgtcaggtgcgacctacaatgctctggtccaggtgcttgcaaccgccggacagatggacatgggttttcgtgtgcagaaagagatgtcagagttggggttctgcacggataagttcacagttgggtgctttgcacaggcgctatgtaaggaggggcgatggtctgacgcacttgtcatgatagagcgggaggatttcaaacttgacacagtgttgtgcacccagatgatcagtggactgatggaggcctccctttttgatgaggcaatttcattccttcataggatgcggtgtaactcttgcatccctaatgtggtcacatatagaacactgcttgctggatttttaaaaaagaagcagcttggctggtgcaagaggataatcagcatgatgatgaacgagggttgcaatccaaacccctccttgtttaattctcttgtgcatagttattgcaatgccagggattatccatatgcttataaacttttaaataggatggctggttgtggttgccctcctggctatgtcgtatacaacatttttattggaagcatatgtagtggagaagaattgccaagccctgacttgttggcattggcagaaaaagtttatgaggagatgctggcttctagttgcgttcttaataaggtgaacactgcaaattttgctcgatgcctttgcggtatggggaaatttgataaagcatttcagatcattaagttgatgatgagaaaaggctttgtacctgacacgagcacatactctaaggtgattacctttttatgtgaggctatgaaggtagaaaaggctttccttttgtttcaagagatgaagagtgttggtgttattcctgatgtttatacatacacaattttgattgatagcttttgtaaggttgggctcattgaacaggcgaggagctggtttgatgaaatggagagtgtcggctgctccccaagtgtagtaacatacactgccttgcttcatgcttacctcaaaacaaagcaggtacctcaggctagtgacatttttcatagaatggttgatgctggctgtgctcccaataccattacctacagcgcactagttgatggcctctgtaaggcaggtgaaagccaaaaggcttgtgaagtctatgccaaaatgattggaacatctgacaatgtgggatctgatttttactttgaaggcgagcacacagactccattgctccaaatgtggtcacatatggtgcactcatagatggtttgtgtaaggcacacaaggtggttgatgctcaagaattgctagatgttatgtcatcgaatgggtgcgagccaaatcacattatatatgatgcattgattgatggcttttgcaaagttggaaagcttgataatgcacaggaggtattttttaggatgtctaagtgtggctacttgcctacggtgcatacatacacctccttaattgatgcgatgtttaaggacagaaggcttgatctagccattaaagttctctctcaaatgctggagagttcttgcactcctaatgttgtcacttacacagctatgattgatgggctttgcagaataggcgaatgtcaaaaggccttaaagttgttgtcaatgatggaaaagaggggatgcaacccaaatgttgtgacttacacttctctcatagatggattgggaaaatctggtaaagttgatatgagtcttcagctttttacacaaatgatcacacaagggtgtgcccctaattatgttacctacagagttctgataaaccattgctgtgctgctggtcttttggatgaggcacattcactgctaagtgaaatgaagcagacttactggccaaaatatgtgcaaggatactgcagcgtagttcaaggttttagcaagaagttcattgcttctcttggattgttggaggagctggagtcacatggcatggtgtcaatagctcctgtttatgggttgctcattgatagtttctccaaggctggcagactggagaaagccttggagttgcacaaagagatgatggaagtctcatcatcactaaacataaccagcaaggatacatacacttcattgatccaggcactttgtttggcatctcagcttgaaaaagcatttgaattatacagtgaaataacaaggaaaggtgttgtgccagaactaagtgcctttatttgcctcataaaggggctaatcaaagtaaataagtggaatgaagccctgcagttgtgttacagcatgtgtgatgagggtgtgaactggcagagcaacaactcttttgatggaggctagagctttgttttcttacatggttactccagatgaaagcattgtcccataagagcttattttgattggggtgatttggttcaaattcaaaccaaagttattttaatgattcctgttccgaacatcgctctagggagtcattcatttctgacatcttactggaagattacagtatgaagtggttaccaaggagatacggattaaaatgtgcttttgtgcaactcattgatggattgggaaaacagcactatgttttgattaaaactgtatatgttcatatataacctttctgggtgctgaaggataaagtgaagaccttcaaaaaactatgtgcagtcaagctcactcattaatttctgacttaccttcagatggacaaaggatcatctcaatgtctatcaacttctgtatataagttgctgatggttagacacaagggtgaaatatgtggtgaaagagaacttctgaaatccataattctctattcatcagttcagtgattcatccttatagctccttccagtgtttttgctctcgtaatagagcaataaagatatgatgaaatcacaaaaatgtagtcaaatgtactgcagttcactacttcactgtacaaatgtaaaaattacttcaagttaaaatttatttatttaacctgttgatatccggtgatattctatcaaagcaaatcatttc

SEQ ID NO: 106932 - DNA, 423 bp, Zea Mays
tgttatatagtcatgtttgtggtgatcaagtgcgtgcaaagaagcagccaagcagaacaacagtgcagcttagctagccatgctggaaggcgtaaacaggccatacgatgaaacccatcttgaaattgttgaggagagcaatggggaaggtaaccttaggccggctgtgtaatagaactctgtcacatactctgtcagcaggacgcaaacaactgctgctaaaacatcattcacccccaaggtaccgaaagagagctagattgtctgtgcaacgtaaaagctgccaagcagcgagatgccaccaaaaggagctcgcctcggtcggcttttaaaatagtcccttatgagttctggaatgattcggattatgtcaagcggccttcaacgacgcccatcatttccctacactgcaccgattctgaa

SEQ ID NO: 106933 - DNA, 1807 bp, Zea Mays
cttcttcgtccccaaggcaccgagggcgccgaggcccgcataaatcccccgctctccaccgaatcctcgaatcgaatcgcgaccaaaccaaatccccaccccggcgcgctgccccatcaccctccccgctgcgctcacgcaccaaaccccactccgttcctcactgcaatccaccgccccagctctttcgcgcaatggcggccgtcgcggcgccggcgccgccaccgccgcggcagctgagcctggaggacctcaaggtggtgtccgtgctcgggcgcggcgccaagggcgtcgtgtttcacgtcgtgcacgctcccggggaactggacggcgagggcgagggcggcgccgcggccgcggccatggcgctcaaggcggtctcgcgggaggccgcgcggcacaagaaggcggccagcggggacggggacggccaccgccggatctggttcgagcgggacgtgctcctggcgctgcgccacccgctgctcccctccctgcgcggcatcctcgccaccgacgcgatcgtcggcttcgccatggaccgctgcggcggcggggacctcaactcgctgcggcggcggcagaccgagaagatgttctccgactccgtcatacggttctacgcggcggagctggttctggcgctcgagtacctgcacagtctcggcgtcgtgtaccgggacctcaagccggagaacgtcctcatccaggacagcggccacatcatgctcgtcgacttcgacctctccacgcggctcccggcgcagccgcaggagccggacgcgccggccaccagtcccaagccggcgcctccggtcgccgcgccgtccccgatccgcggcagagcaaggaagccggcgggcgccgccctgtgcttcccattccgcaccaccggcagcgctgcgaagcctgccgcggactcgccgtcgccgctgtccacctctcggacggcctcgtcgtcgtcctcgtcctcgacggcgaccacggcctcctcctcagcggcgtcggccggcgcgcggactcccgcgaagtcgaactcgttcgtggggacggaggactacgtggcgccggagatcatcgccgggcgcggacacgacttcgccgtggactggtggggcctgggcgtggtgctctacgagatgctctacggccgcacgccgttccgggggcagaaccgcaaggagaccttctaccgcgtcctcgccaagcagccggagctcgtcggcgagcagacgccgctgcgcgacctcatcgcccgcctcctggagaaggaccccgagaggcgcatcggcgcgcgcggcgtcaaggcccaccccttcttcggcggcgtcgactgggaacgcatcctgcaggtggcgcgcccgccgttcatcccggcgccgccgcaggacgaggacggcgacgaggcgctcgacgtcgagaaggtcgtccgcgaggtgttcgcgtccaaggagggcgagggagggaaggcttcgcctgtggcagacggaggccctgtgggcggcgacggcgacgggaggagagatcattccaaagatggtgatttctcagtgtttttctgagctatttattttctttagatttgttctttctttttctttagatttgtactgtatgaacatgatggcatttagcaactgaggttaggagtgagtacggcgcaatggccggtggagtacataaattaaagaggtgcaggtgctcccgctcaatggggtatagccaatatataggtttttttttgctgtgtactttgcttgatcataataaataataatgatagcgcagttgtgctcaaacgtaaata

SEQ ID NO: 106934 - DNA, 310 bp, Zea Mays
tccccgccttcatgtgctcgccccacgcctccccttcctgttgcgcgcaaagaacacgccgccgacatctatcctcatcgacactggtgttctcggccaccttccaccgccagaggactgctctgaagacccacatcgatctccgtcgccggtatctagctctgcagcgccgcccgccgccaagccgagctcaacgccgttctttccctctcctattcgacgttgctgcgagaagctgatttcgtggtagaggacctgaactcgtttgaggaagacccacaataaatgtttgagcaaggcaagtggattc

SEQ ID NO: 106935 - DNA, 315 bp, Zea Mays
atggagcttgggacggagagcagggaggaccagcgacgaggatccaaggagcgtgcacgccacagtgacgacgagcaggcgcgaccgagtccacacagagctccagatcgaaatgagaagaggccgcgcaggatgagcctgtcgtcgagcggagcagggaagcatggacgcgcgcactcgaggaaattcgacggtcggcgaggtggggcactgggcgagtccaagacgaacaccaggcagcagcacttcaagattgaagaagaggaatgtctggtggaggaaccgagcgctagggagctggcacggccaagctga

SEQ ID NO: 106936 - DNA, 315 bp, Zea Mays
atggagcttgggacggggagcagggaggaccggcgacgaggatccatggatcgagcacgccacagtgacgacgagcaggcgcgaccgagtccacacagagctccagatcaaaatgagaagaggccgcgcaggatgagcctgtcgtcgagcagagcagggaagcatggacgcgcgccctcgaggaaattcgacggtcggcgaggtggggcactgggcgagtccaagacgaacaccaggcagcagcacttcaagattgaagaagaggaatgtctggtggaggaaccgagagctagggagttggcacggccaagctga

SEQ ID NO: 106937 - DNA, 90 bp, Zea Mays
gcacatcaaggcactcatgccatggcttgtcatatctcactctttgaatgcagaggaacctcaaacaatatggagcaacaaatacttgta

SEQ ID NO: 106938 - DNA, 2040 bp, Zea Mays
atggcttgtttctggcatggtgtcacatggcccaacccacggcccaactcggaagatgggtacaagagcagcatcagagaaatgaggaagcagagaagaaaagaatcggatcttattcccttctgtcgccgtcttcaggcgcgattcagctcgccaacgctcgacggcggccctgcggtgcgctcacgtcccggtggtggctcaccggaggctacggccccatcacagatggtattcagagccgttccaatccctggagaaattttttgccatcctaccctaccctatttctctctcgattccgctcaaatccgagcagtcgggagaaccatattcgaccgggagctgttccacgtcgacctcgacgatgcacccgtcttcgacgccgacactgacaacctcagcgtcgaacccatctttgacgacgtggtgttcgaggacattgagcccaacttcgacgacctcgatgacgagcccctcttcgacaccaagttcgacgagctcgacaagggatcagtattcgacactgagtcgatccccgaccatgtcgccgtctccgtgttcgagttcgtcaggccggagtatgatgctgagctcaccgtcttcgacaccgactcggacagcctcaacgacctgccggtagtcgacatggggccggtccatgacgccgagctcgccgtgttcaaccaaggaaacgacggctcctcgactgcacacaccggcgtcctcgacgggcaccctgtctttgacgtggagctcgtatttgatgaggagcctctcatcgaaatcgattgcagcatctttaacactaatgcgcccttcatgtgtttgacagattgtctgagctacgtcgatgacatggtgtctgctacttttaaggaggggcatatctttgataaggagactgtagtagaagcagtacagaaggaaagtggcagggattactatactgctcacggtgagaatgccatgtttattgcaaggacatactatcacacaatttctgctttacgtcatttaggcagcaactctggtggaatctcaagtgtcggtgtgagcgaggctatgtttgagaccattgtccgcaagatcttattagataggactgactgtactttagatttctacgagggtagtagctctgattggaggttatcaaaatctggaaaacctggaaatattggtggatttgaagacattttgtttataaacaatgacatgcaagagtcaccagtcatgaccaacaggaagcttgggttggctgaattccgtgaagatagccgattcacaaatgttggatcagcacttcttgcattatgtctcacagcagattgtgagaaatccatcaattcacattctcttcaagatgccattactaaatgcagtattctgttgactgagagaaaaaagtctaacttcaaatcaaaggatcttgtgcaagatcttgaaaaaatcagaagttctgttaaactagttcatgatctgatatctcaatttgactactctcttggtgcccttggagctctactatcttatgctgagttgctagcaaatgatactaattatgggaattacacaattgaaaagtacaatttggactgctacatgagacttgattctgctgcggtgcgagcattgaccattcatgaagaaaaaactgatgtaaacaaaaacttttatttgtttggcttggtgaacagaacgtgtactgttgagatgggaaagatattgcttaaccaatggctgaaacaacctcttttagatgtgaatgaaatcactagcagattatatatggttcaggctgctatatctacttttgataccaaaactactattagaacagttgtgcaaatacacatgtgtgaacctgctggtgcttctcgaaatgttgaacacatgagtcagctacaaaagccttgggatcctggtggttttcatattgggcttgtttctagagcgcagcgtgttggtttcaatttcagagaatatattgagctgctggagaggtacaacaaggcaccattctctctgaagacttag

SEQ ID NO: 106939 - DNA, 1280 bp, Zea Mays
catccttccactcaaacgatcgcaacacgatccaaagaacgacgtgggggagcgagcgatagagccagaacaagaggagcgatccagaggagaagacgaaagagtcaggggagctgctaaggaccgatggccgaccccagctattggatagggatggacatcgaaacctccgtcacgatgctcgtcatctgtctcgccgccgccgtcgtgagcgtgtgcctcttcttcattttcatgtgcatcgtgcaatggttggactcgccacggatgcgcgtcttcaggctcggcggcgtcaccaccctgaggcagaacctggactacacctgcaccctgtgccaaaacagcatggaggccggcgagaaggtccgcacgctctcctgcgaccacgtgttccactgcggcggcagcgtcaagtgcgagggaatcgaccactgccttcgcaccggaccgatggagcgctgcccgacctgtgaccgggttccccatcccgtgccctggaagcggacaccgccaccgtcgccaccagcacctacaccttcacagggagcattggcggcagcgctaccacctttgcggctcccgttgtcgacgcgggatttggacgaggcgctgctgcgttgggagcaaatccagaaactagcggaagcgtcgtcatcagcatcgctgcatcggcgccacccgcggacgtcgacgtcggacaaggaggaggtgttgccgcttccggcggacgacgagatactacctgaggcgccgtcatcgcagtagacacgcgtgcgtgatcaagcctggatgggacggtgttgacacagcacgtcctgtgtgcggcgatctcgaactgggtcagttcgtggagatgttcttctaggattctttcgtcattttgttttctgcttcgttgaaactgatcgagggtagtgcgtctttctgatggtcagagactcaggaccagttcttcaagtactccttagttgtttccggttttgcttccttcgaactcatcgagcttagctgcgttcctgctcttttgttcggacttcagagttgagtccaccttagggcttgttcggttattttcaatccatatggattgaaggggattgatacggattgggagggattttgacttgctagggattgaaaccctctcaatccccctcaatccatatggattggggtagaaccgaacaagcccttaatgaaccaaatgtctgaatgccaatgaacgatgacttgttagttcttacatcagcatgaatagatccttggttttcattgctctt

SEQ ID NO: 106940 - DNA, 288 bp, Zea Mays
atggcccgcgctggctacaggggtgagctcggtcggccgcgcgccgctggccgcgagccgctgatcgccggccgcgcgccgcgagctgcgccaggccacgcccagcaggggcgagcgcgcgccacgctggccagggtgcggggctgccaagccccaggggctcggtcgcggacctgcctgcgcgggcgctggtcgtctcgttcgccgatccgcaggagcacagggcgcgagggagagaacagtgggggaggggagcgtgtcgtgcagggagagacgccggtgctctag

SEQ ID NO: 106941 - DNA, 2477 bp, Zea Mays
ccaccatcacccccgcccggccgcccgcaacaaagcacgcagtctcccaactggtcaaaccgctccccccaccggcccacccccaccccacccccaccgtaccccgtccccaatccgcgtgcatccgtccaccatgcctcctcccatcctcctgcccccgatcttcctcctcttcctcgtcgcccctttggcggcgccgcagcccgcgccgggatcggcggcggcgccgcaggaggacgacctgcgctgcctccgaggcgttaagcacgacctcgccgaccccaacgagcgtctcgcagactgggacttcaagaacacctcgggcggcgctgtctgcaattacaacggcatcggctgctggaacctgcaggagtcccgcgtcctctcgctctcgctctccgggttcggcctcgtcggctccatcccctcctcgctccagtactgccgcgccgccaccacgctcgacctctccagcaacgcgctcgtcggcacaatcctgccagccctctgcgactggctccccttcctcgtcaccctcgacctctcctccaaccagctcaatggcccaattcccgccgagctcgccaactgccgcttcctcaactcgctcaggctctccgggaaccagctctccggccagatccccgcctccctcgcgcggctcgaccgactcaagtcgctcgacctctcggggaacaagctcgacggccagatcccgtcccagctcggcgacaacttccccatggactccttctccgggaactcgggcctctgcggccgccccgtatcctctcgctgcggccgcgggctggggagcaccggccttggcatcgtcatagccgcgggagtcttcggcgccgccgcctcgttgctcctcgcctacttcttctggcggtgcaccgggaagggcaaaggaggccgccgccgccacaggcgcggcaccagcgagtcgggcggtggggaagacgggagctggtggaccgagaggctgcgggcggcgcacaaccgcctggtcccggtctcgctgttccagaagcccatcgtgaaggtcaagctcgctgacctgatggccgccacccatgacttcagcactagccacatcgtggtcgccgggagctcgcgggcggggacagcttaccgagctgtgctacgggacgggtctgcactgacggtcaagcgcctgcactcgtgcccactttcggagaaggcgttcagggcagagatgggtcggatggggcagctgcggcatcctaacatcgtgccactgctgggcttctgtgttgtcgaggacgagaggctgctggtgtataagcatatggagagtggggctctttcatcggtgatgaagaagccaggggaagcgccgctggattgggcaacgcgacttaggatcgccgtgggggcagcaagggggcttgcgtggctgcaccatgggttccaggttccgcagattcaccagaatttgagctcgagtgcagtgcttctcgacgaggattatgatgctcggatcacggatgttgggctcacaaggttggtccggatggcgcctggcgagggtggtgataccagtcctttcctgaacggggactttggggagtttggctatgttgctccagagtatgctagcaatccagttggtacgatgaaaggcgatgcgtatgcatttggggtgatattgtttgagcttgttagcgggcaggaggctgctgctgtggttactgacgtgacgggtgaaggattcaaggggacattggtggactgggttaaccagctcaaggcttctggtcgaatcagtgatgctattgataaaccattgcgtggaaagggccatgaggcagagattcaggagttcttgaagatagcttttgcttgcacccagccccgtgtgacggagaggcattcaatgtatcgggttttccacgctctgaagagcatcggagagggctgcgatgtcacggagcagtttgatgagttcccattggcctataacaaggatgattcagacgctatttagctgatgatgctgattgccaattcgattgtggaaatgtttggtcaggcttattgatgatatatatatttagccttgctatggacagaccggaagcataaatgagtgataagagaacaatatcgaggcaccaaatctagcgccggatgccgggtggtcaattacatcgttgcatcgacaggggatgtgataaccatgtaagctgtaatatcagtttacaattctgtatgttgttttaaagttactgttagtgcctgtagtatctgtgtggaactgcaattcttgatggccaaaatcctagtgtcacctttcgaagttccttcttggaacaaccagcatgttgttcagtcattggattggcactcaatgtttcattaccttcttggaaacttatagcagggtcctgggtagttaaaaatgttctaatgtctctttagcttataccttcttggaaacttaagctttc

SEQ ID NO: 106942 - DNA, 1686 bp, Zea Mays
cgccgatccaacgggaatgtcaccgacgcgacgcgctccagtcccctccatcgctgcgtccaccttctgtagtccagttgtagccgcttgccgatggcgcggccggcggcgaaggcgcgggtgccgaagcacttggtggcgctcgccgtcgtcgccatcctcggcctcgtactcgtcgctgactacctctgggcttcgtcctccgcgtcgtcctcggccgtctggtcctccaggcttaatctccacaccggacccgccggttcgacgccgcccgtcgcgaagaagattaaggaggacaagaaatctgtaggttcgactggcataaatgcaacttttgcggacttgccagctccagaactgaaatgggaggagatggctgaagcacctgtggcccgtttggatggcgctgctatacagattaagaatctcttatatgtatttgctgggtatggcaccattaaccatgtgcattctcatgttgatatatacaatttctcggataatacatggggtggaagatttgacatgcccgaagacatggcacattcacatttggggatggttactgatggaagattcatctatgtggtaactggacagtatggtccacaatgtaggggaccaacaactcgaaattttgtattggacacagaaacaaaagaatggcgtggcatgccaccattgccagttcctagatatgctccagcaacacaactttggagaggcagacttcatgtgatgggtggcagcaaggaggataggcatgaacctgcgcttgaacactggagtctcgcggtaaaggatgggaaagcattggagaaagagtggaggagcgagaaaccaataccgcgtggaggtcctcatagggcttgtgtagttgcaaatgataaactccttgttattggtggtcaagaaggtgatttcatggccaagcctgggtctcctatatttaaatgtgttagaagaagtgaggttgtgtatagtaatgtttatatgcttgatgatggaacgacttggaaggaacttccacctatgccaaaaccagattcacatatagaatttgcttgggtgaatgtcaacaattctcttgttattgctggaggaacgacagataagcacccaataactaaaaagatggtgttggttggtgaagtatttcggttcaatctgggtacgctggaatggagtgtgattgggcggttacctttccgaatcaagaccacattggtaggatactgggatggctggctgtatttcacttctgggcaacgagacaaaggaccaaaagacccgtctcctaaaaaggttgttgggtgcatgtggagaactaaattgcacttgtgatttcctttaaaagaactaagccgttctttggttttatggtttacaaaactgtttcaatcccctcatgggcgagttctttcttggttatatatcgtaggtgaaatgggtggcgttggggactgtctgccattgccaccggtgtgttgtatgtttattcttttagttaggatcaccaacttttgcaccattttgtacagagagaatcgatctgtccaggtgctgtcgcaatcttgtaagttgtagcgtgtacctttttttttattgagctcttacactcatcttctaaaattaatcacaacttcaacttgagccaagctaaaattaaattaaaaaaaacacaaa

SEQ ID NO: 106943 - DNA, 1395 bp, Zea Mays
cgccgatccaacgggaatgtcaccgacgcgacgcgctccagtcccctccatcgctgcgtccaccttctgtagtccagttgtagccgcttgccgatggcgcggccggcggcgaaggcgcgggtgccgaagcacttggtggcgctcgccgtcgtcgccatcctcggcctcgtactcgtcgctgactacctctgggcttcgtcctccgcgtcgtcctcggccgtctggtcctccaggcttaatctccacaccggacccgccggttcgacgccgcccgtcgcgaagaagattaaggaggacaagaaatctgtaggttcgactggcataaatgcaacttttgcggacttgccagctccagaactgaaatgggaggagatggctgaagcacctgtggcccgtttggatggcgctgctatacagattaagaatctcttatatgtatttgctgggtatggcaccattaaccatgtgcattctcatgttgatatatacaatttctcggataatacatggggtggaagatttgacatgcccgaagacatggcacattcacatttggggatggttactgatggaagattcatctatgtggtaactggacagtatggtccacaatgtaggggaccaacaactcgaaattttgtattggacacagaaacaaaagaatggcgtggcatgccaccattgccagttcctagatatgctccagcaacacaactttggagaggcagacttcatgtgatgggtggcagcaaggaggataggcatgaacctgcgcttgaacactggagtctcgcggtaaaggatgggaaagcattggagaaagagtggaggagcgagaaaccaataccgcgtggaggtcctcatagggcttgtgtagttgcaaatgataaactccttgttattggtggtcaagaaggtgatttcatggccaagcctgggtctcctatatttaaatgtgttagaagaagtgaggttgtgtatagtaatgtttatatgcttgatgatggaacgacttggaaggaacttccacctatgccaaaaccagattcacatatagaatttgcttgggtgaatgtcaacaattctcttgttattgctggaggaacgacagataagcacccaataactaaaaagatggtgttggttggtgaagtatttcggttcaatctgggtacgctggaatggagtgtgattgggcggttacctttccgaatcaagaccacattggtaggatactgggatggctggctgtatttcacttctgggcaacgagacaaaggaccaaaagacccgtctcctaaaaaggttgttgggtgcatgtggagaactaaattgcacttgatcaccaacttttgcaccattttgtacagagagaatcgatctgtccaggtgctg

SEQ ID NO: 106944 - DNA, 1385 bp, Zea Mays
cgccgatccaacgggaatgtcaccgacgcgacgcgctccagtcccctccatcgctgcgtccaccttctgtagtccagttgtagccgcttgccgatggcgcggccggcggcgaaggcgcgggtgccgaagcacttggtggcgctcgccgtcgtcgccatcctcggcctcgtactcgtcgctgactacctctgggcttcgtcctccgcgtcgtcctcggccgtctggtcctccaggcttaatctccacaccggacccgccggttcgacgccgcccgtcgcgaagaagattaaggaggacaagaaatctgtaggttcgactggcataaatgcaacttttgcggacttgccagctccagaactgaaatgggaggagatggctgaagcacctgtggcccgtttggatggcgctgctatacagattaagaatctcttatatgtatttgctgggtatggcaccattaaccatgtgcattctcatgttgatatatacaatttctcggataatacatggggtggaagatttgacatgcccgaagacatggcacattcacatttggggatggttactgatggaagattcatctatgtggtaactggacagtatggtccacaatgtaggggaccaacaactcgaaattttgtattggacacagaaacaaaagaatggcgtggcatgccaccattgccagttcctagatatgctccagcaacacaactttggagaggcagacttcatgtgatgggtggcagcaaggaggataggcatgaacctgcgcttgaacactggagtctcgcggtaaaggatgggaaagcattggagaaagagtggaggagcgagaaaccaataccgcgtggaggtcctcatagggcttgtgtagttgcaaatgataaactccttgttattggtggtcaagaaggtgatttcatggccaagcctgggtctcctatatttaaatgtgttagaagaagtgaggttgtgtatagtaatgtttatatgcttgatgatggaacgacttggaaggaacttccacctatgccaaaaccagattcacatatagaatttgcttgggtgaatgtcaacaattctcttgttattgctggaggaacgacagataagcacccaataactaaaaagatggtgttggttggtgaagtatttcggttcaatctgggtacgctggaatggagtgtgattgggcggttacctttccgaatcaagaccacattggtaggatactgggatggctggctgtatttcacttctgggcaacgagacaaaggaccaaaagacccgtctcctaaaaaggtgaaatgggtggcgttggggactgtctgccattgccaccggtgtgttgtatgtttattcttttagttaggatcaccaac

SEQ ID NO: 106945 - DNA, 108 bp, Zea Mays
ctgtctttttgtgttctgccattctgcgatctcagccgtccattctaccgttctacaatctcagccgtccaatcccgcacaccagttttccgcgcgcagaaaaaaaaa

SEQ ID NO: 106946 - DNA, 426 bp, Zea Mays
atggccggctcgccgtcgatgaggatgtgcgcctcggggaggtgccagccgcggggccggacgaagagcttggcggttcggtcgttgagctcgtacgtccgcccgcgcgccgcgtcgcggaagctgatggtgccagccacggcgtcccgcaggttcacctgcccgtgcatcaggttctcccacgtcggcgacagcgcgtcctcgaagtcagccatgaagaccttggcgccggagttgagcgcgttgatgaccatcttccgcggctcggcggggcccgtgatctccacggtgcggtccgcgacggccggcggcacgggcgcgcacgtccagtccccctcgcgcacgagcgtcgtggccgggtcgaaccgcggcagctcgccggcgtcgtaccggcgctgggcctcccgccgctgctccatggcgtag

SEQ ID NO: 106947 - DNA, 1116 bp, Zea Mays
aagaataaacggcgagccgcccgtcaaacaatcgttaaacccagaagcctcctcgtcctctctctgactctctctcaccctctcccctccctcggggtcgcggttgcttcctcgcggccgattcgtatcttccgtggcagcagggagggtacggtactcctccggccggcgggaggagaagaggagcttcgagatgggggcgtccctcgcttccgcgggcttggtgaactacccgcttgtcgcggcgctcctcgcgttcgctctcgcgcagtcctccaagttcttcaccacctggtacaaagaaggtcggtgggatgccagacaacttatagcttctggcgggatgccatcatcccactcagctacagtgacagcactttcagtggcagtgggaatccaagaaggctttcgtagtgcaacatttgcaactgcactagtctttgcatgtgtggttatgcatgatgcttttggagttcggttacatgccggaaagcaggcagaggtgctgaatcaaattgtctatgagctgccagaggaacacccattatcagagacaaagccactgcgtgaaatccttggacatactgttcctcaggtcgtggccggttgcatccttggaatcctcatggctgtcgttatgcttttggctctcgggaggtcttagtcaagtgttgttcaccctatatctcactggtgatggctacaaagcataaaaacatgatctccccatggttctggctgtccaagtgttcgatagtacaaagttctaaccgaatttagatctggactgtaggtttcaggttgtagctcgagttggttgctgtaaatctgaaagggtcacttttaattccaaccacggtgtaatggaagctttgttatacaatcagcagcggtaagatcattttgcggatcagtatggtcgataccatgccgtcgcatttgctttatactcctttaattgaaaactgcgagtcattttggctcttccagacatgttgtttttgctacgtatttaaaagcaatgtatttgaatatacattatatctagatatatagttagagtcatgtatttagaaaaggacaaacattgatatggagggggtaagcggttcattg

SEQ ID NO: 106948 - DNA, 1396 bp, Zea Mays
aagaataaacggcgagccgcccgtcaaacaatcgttaaacccagaagcctcctcgtcctctctctgactctctctcaccctctcccctccctcggggtcgcggttgcttcctcgcggccgattcgtatcttccgtggcagcagggagggtacggtactcctccggccggcgggaggagaagaggagcttcgagatgggggcgtccctcgcttccgcgggcttggtgaactacccgcttgtcgcggcgctcctcgcgttcgctctcgcgcagtcctccaagttcttcaccacctggtacaaagaaggtcggtgggatgccagacaacttatagcttctggcgggatgccatcatcccactcagctacagtgacagcactttcagtggcagtgggaatccaagaaggctttcgtagtgcaacatttgcaactgcactagtctttgcatgtgtggttatgcatgatgcttttggagttcggttacatgccggaaagcaggcagaggtgctgaatcaaattgtctatgagctgccagaggaacacccattatcagagacaaagccactgcgtgaaatccttggacatactgttcctcaggttgagttaaatgcttcatattatctctcttgatgttttaactattctgtggcctttccggttaggaaaaacagtcaatactcaatgaagatagagtgattgggatataggcccgttctttttcagggcatcgtataatgaacttatttagtgacactcaaataatgaatatatgagatgctagatgcactatggtaactataggctacagcattcctagcctgtgatctacaatcagtttcagcgtgtaaaaaccttactatcctgaaaattgcttaaattgcaaacaaacttaagaacatgttcgcatgtgcagataacaagatgtgcctatttcctttatcctatgtaccatgttatcacctctgatgattgaacttctcttccaaatctgacacaacagtttgacagcagacacaatcagatagtacatgcaacattctaggtgtaacactataacatattcttcctttggacatgtcaggtcgtggccggttgcatccttggaatcctcatggctgtcgttatgcttttggctctcgggaggtcttagtcaagtgttgttcaccctatatctcactggtgatggctacaaagcataaaaacatgatctccccatggttctggctgtccaagtgttcgatagtacaaagttctaaccgaatttagatctggactgtaggtttcaggttgtagctcgagttggttgctgtaaatctgaaagggtcacttttaattccaaccacggtgtaatggaagctttgttatacaatcagcagcggtaagatcattttgcggatc

SEQ ID NO: 106949 - DNA, 1445 bp, Zea Mays
gccgcgttgcttctccgtcccactgaaccatcgccgccggctagccgcaggagaagttcccgccgcgccgacgccgaaaccgccgtcgcgtgttttgaagctctcgaaaaaagggcgcgcagcatgagagcggccgtgaactcgccacctccgcactgctactcgcgccgccgcgccagcgccacgctgctggatgcgcgccatgtgttcgaccacgtgccgcagcagcgcctaccgaacctggccgcgggactccgcgcgcggcctgtcgccgcggccgcctggaggcccgcgcggcgctcggccgcatctgcggctgcccgcacctgtggcaccgtttcagctcctcgtttgtttaggacattcctgcaaatcccaacatcctcttcttcagcttatcgcgcactagtagcttcgtctgcattcttgccatcaagacggagctttgaaggctacattcctcgtagctgctccagctcatcgctccagatctacagccggtcaccgctgttaaatctatcgccgtcttcagctctcatggtatcctcccagctcacgggctcctccgacgtagcccaacgttcagaggaatggtttgctcttcgcaaggacaagctcaccacaagcaccttcagtactgctttgggtttctgggctggcaacagaagaccagagctgtggaacgagaaagtcttcggagcgacagagatcaagctagcagatgccgctagatctgccatggactgggggacgcatcacgaaagcgtagccatagagcagtacacgagcatcacaggaagaccggtgggcaccctcggcttcgcggtgcacaccgaggccagcttcggatggctcggagcctcgcctgatggggtcctcgggtgcgagccacacgacgggatcctggaagtgaagtgcccgttcaacaagggcaagcctgagctcgctctgccctggcgcgccatgccgtactactacatgccgcaggtgcaggggctgatggaaatcctgggcagggactgggtggacctctactgctggacacccaacgggagcagcctgttccgggtgccgcgggactgcgcgtactgggagctcatccacgaggcgctgcgcgacttctggtggggcaacgtggtgcccgcgcgggagctggcgctcctggggaaggacgacgaggcgaggtccttcgagcctcagcccaagcaccggctcacgaacctcgtgctgtataggagccggaagctggcctccgaagcgaagctactttgtatggatgttggcggccatgtagaattcttccaatgaggagtcctgccgccgtttattgtacactgtattatgactattctttaattaacttatgaattcgttaccttcccagcgccatgttcttttttgttctgttctgttctgtttaacaaagagtgtaagtataatcttcc

SEQ ID NO: 106950 - DNA, 2115 bp, Zea Mays
aacgaacccaagcgacagacgggcagcgtggggaggccgccgccgttgcggtatataaacggacgctcgccgttgggggaccaaccgaagcagcgacagagctcttccctcccacacgctcggcgctctgtccgccagaaatctcgtcgctgcaggtagaagagaatcgtgccatttgtcatgtcaggaggatcttcaccatcatcaaggcgaaacagctttaattctttgtctaaggacctagaccttccttcagagcaaggttgtctctccattgttgtacttggggcttctggtgaccttgctaagaagaaaacattcccagccctctaccacctctttgagcagggattcatacaatctggagaagtccatatatttggttatgctagatcaaatctttctgatgatgggttaagagaacgcattcgtgggtatctcaaaggagccccagaagatctttcagaatttttgcaactaataaaatatgtcagtggttcctatgatactggagaaggatttgagaaactgaacagggcaatatcagagtatgaggtgtcaaagagttcaggaagctatcgcaggctcttttatttggcattgcctccatctgtctacccttcagtgtgcaaaatgatcagaacatattgcatgaatccatcttctcaccctggatggaccagagtcattgttgagaagccctttggaaaggacttggattccgctgaagaattaagtgcccaacttggggagctattcgaggaacaccaactatacaggatagaccattacctgggaaaagagttggtccaaaacttgcttgttcttcgttttgccaaccgattattcttgcctctttggaaccgcgacaatattgataatatacagattgtattcagggaagactttggtactgaagggcgtggaggatattttgaccaatatggaatcattcgtgatatcattcagaatcatttactgcaggttttctgtttggttgcaatggaaaagcctgtctcccttaagcctgagcacatcagagatgagaaagtcaaggttctgcaatctgtgaaccctattaagcctgaagaggtagtccttgggcaatacgatggctacaaggatgaccctacagtgccagatgactcgaataccccaacttttgcatctgttgttcttcgggtacacaatgaaagatgggaaggtgttcctttcattcttaaagctggtaaagcattgagttcaaagaaagcagaagttcgggtgcaattcaaggatgtccctggtgacatttttagaagcaagaagcaaggaagaaatgagtttgttatacgcctccaaccatcagaagccatgtacatgaaactaactgttaagaagcctgggttagaaatggctactgaacaaagtgaacttgatctgtcatatgggatgcggtaccaaaatgtcaaaattcctgaggcatatgaacgccttatcttggatacaataagaggtgatcagcagcactttgttcgcagagatgagctacaggctgcttggaagatcttcactcctttgctgcatgacattgacgacggcaagctgaaggccctcccgtatgaacctggcagccggggacccaaggaagccgacgaattgagcgcgagagttggatacgtgcagacccacggttacatatgggtaccgccgacccttgcatagaagagaatacgaattgtttgtacctaggaagatccgagtgtcctacaataaagctgtgcgtatatgctcattttcgctatatcgcctgccgttgtaataatgttgtgctggatatgaaataaaattgcgtgttccattcagtatatgcaatggccagcgatggaatgttgttttaccctgcaataccgatgaactatatagaaaaaacatgacgggagatcatgtcatgctcatgcctcattttgaaggataaaaccaaatgataattatacgtgtatgatgatcaaccaatggccataagccagggcaagcaaaagaaacgaggagagaaaacaagagatgcaacagtttctctttcctattttcaagaggtgttttcttgttttaggctagtttggcaactctattttt

SEQ ID NO: 106951 - DNA, 1877 bp, Zea Mays
aacgaacccaagcgacagacgggcagcgtggggaggccgccgccgttgcggtatataaacggacgctcgccgttgggggaccaaccgaagcagcgacagagctcttccctcccacacgctcggcgctctgtccgccagaaatctcgtcgctggtagaagagaatcgtgccatttgtcatgtcaggaggatcttcaccatcatcaaggcgaaacagctttaattctttgtctaaggacctagaccttccttcagagcaaggttgtctctccattgttgtacttggggcttctggtgaccttgctaagaagaaaacattcccagccctctaccacctctttgagcagggattcatacaatctggagaagtccatatatttggttatgctagatcaaatctttctgatgatgggttaagagaacgcattcgtgggtatctcaaaggagccccagaagatctttcagaatttttgcaactaataaaatatgtcagtggttcctatgatactggagaaggatttgagaaactgaacagggcaatatcagagtatgaggtgtcaaagagttcaggaagctatcgcaggctcttttatttggcattgcctccatctgtctacccttcagtgtgcaaaatgatcagaacatattgcatgaatccatcttctcaccctggatggaccagagtcattgttgagaagccctttggaaaggacttggattccgctgaagaattaagtgcccaacttggggagctattcgaggaacaccaactatacaggatagaccattacctgggaaaagagttggtccaaaacttgcttgttcttcgttttgccaaccgattattcttgcctctttggaaccgcgacaatattgataatatacagattgtattcagggaagactttggtactgaagggcgtggaggatattttgaccaatatggaatcattcgtgatatcattcagaatcatttactgcaggttttctgtttggttgcaatggaaaagcctgtctcccttaagcctgagcacatcagagatgagaaagtcaaggttctgcaatctgtgaaccctattaagcctgaagaggtagtccttgggcaatacgatggctacaaggatgaccctacagtgccagatgactcgaataccccaacttttgcatctgttgttcttcgggtacacaatgaaagatgggaaggtgttcctttcattcttaaagctggtaaagcattgagttcaaagaaagcagaagttcgggtgcaattcaaggatgtccctggtgacatttttagaagcaagaagcaaggaagaaatgagtttgttatacgcctccaaccatcagaagccatgtacatgaaactaactgttaagaagcctgggttagaaatggctactgaacaaagtgaacttgatctgtcatatgggatgcggtaccaaaatgtcaaaattcctgaggcatatgaacgccttatcttggatacaataagaggtgatcagcagcactttgttcgcagagatgagctacaggctgcttggaagatcttcactcctttgctgcatgacattgacgacggcaagctgaaggccctcccgtatgaacctggcagccggggacccaaggaagccgacgaattgagcgcgagagttggatacgtgcagacccacggttacatatgggtaccgccgacccttgcatagaagagaatacgaattgtttgtacctaggaagatccgagtgtcctacaataaagctgtgcgtatatgctcattttcgctatatcgcctgccgttgtaataatgttgtgctggatatgaaataaaattgcgtgttccattcagtatatgcaatggccagcgatggaatgttgttttac

SEQ ID NO: 106952 - DNA, 1843 bp, Zea Mays
cttttgctttgccgcgtaatcccgcacctcatttttatctccacgcccagccgcctgctttcggcgactccgaggtttctccgtccggttccgtcgtcgtcacagctacctttgctccggcccggtagaagagaatcgtgccatttgtcatgtcaggaggatcttcaccatcatcaaggcgaaacagctttaattctttgtctaaggacctagaccttccttcagagcaaggttgtctctccattgttgtacttggggcttctggtgaccttgctaagaagaaaacattcccagccctctaccacctctttgagcagggattcatacaatctggagaagtccatatatttggttatgctagatcaaatctttctgatgatgggttaagagaacgcattcgtgggtatctcaaaggagccccagaagatctttcagaatttttgcaactaataaaatatgtcagtggttcctatgatactggagaaggatttgagaaactgaacagggcaatatcagagtatgaggtgtcaaagagttcaggaagctatcgcaggctcttttatttggcattgcctccatctgtctacccttcagtgtgcaaaatgatcagaacatattgcatgaatccatcttctcaccctggatggaccagagtcattgttgagaagccctttggaaaggacttggattccgctgaagaattaagtgcccaacttggggagctattcgaggaacaccaactatacaggatagaccattacctgggaaaagagttggtccaaaacttgcttgttcttcgttttgccaaccgattattcttgcctctttggaaccgcgacaatattgataatatacagattgtattcagggaagactttggtactgaagggcgtggaggatattttgaccaatatggaatcattcgtgatatcattcagaatcatttactgcaggttttctgtttggttgcaatggaaaagcctgtctcccttaagcctgagcacatcagagatgagaaagtcaaggttctgcaatctgtgaaccctattaagcctgaagaggtagtccttgggcaatacgatggctacaaggatgaccctacagtgccagatgactcgaataccccaacttttgcatctgttgttcttcgggtacacaatgaaagatgggaaggtgttcctttcattcttaaagctggtaaagcattgagttcaaagaaagcagaagttcgggtgcaattcaaggatgtccctggtgacatttttagaagcaagaagcaaggaagaaatgagtttgttatacgcctccaaccatcagaagccatgtacatgaaactaactgttaagaagcctgggttagaaatggctactgaacaaagtgaacttgatctgtcatatgggatgcggtaccaaaatgtcaaaattcctgaggcatatgaacgccttatcttggatacaataagaggtgatcagcagcactttgttcgcagagatgagctacaggctgcttggaagatcttcactcctttgctgcatgacattgacgacggcaagctgaaggccctcccgtatgaacctggcagccggggacccaaggaagccgacgaattgagcgcgagagttggatacgtgcagacccacggttacatatgggtaccgccgacccttgcatagaagagaatacgaattgtttgtacctaggaagatccgagtgtcctacaataaagctgtgcgtatatgctcattttcgctatatcgcctgccgttgtaataatgttgtgctggatatgaaataaaattgcgtgttccattcagtatatgcaatggccagcgatggaatgttg

SEQ ID NO: 106953 - DNA, 2274 bp, Zea Mays
tgtttaggccgtcgagcgttggccgcgcgtcgtatacgaagtccgagcccgacccgcaacccgaaacccgtctcgcctcgccaaggcaaggcttcctttcctctcccttcccgtccaagatggaagcagagtacccccaccagcaggcggccccctcttactccacgaccgccaccgtcttctggccgtacgcgactcgccgcagaaagagagccgaggacggcagcgacctctcgctggcgtcggatatggatctcgacgccgacgcgcagcgcgccgcagataagctgaaagcagtgtcagaggaacttggacatgagatccgggttttttcaagtgagaactttgctctacaaccgagcaagctgcctagtgcagatcatgaggaaggtgacgacttttatgagcttcagcctgctgattactacaacttgatttcaaacaggatgggagagctatctaaaatgctaaagactcgcaagatgcgggaagcagaacttgctgctcagcgagcaaagcgaacaaaggcagtaatgagggtgcgattccctgatggctacatacttgaggctgactttcttccatcagagaggattcatagtctagtggacctgctcatgaaagtacttgctagaccagatctgccattctatctctatacagtacctccaaagaagcgaatactggacacatcacaggacttctatacatctggttttgttcctggagctaatgttcatttttcttatgatctgcccgaaggtatgcatcatcataatgactagtggcaagttaagaaataaacaacaattacctctcagctctatgtttgaaatatatgttgtatcttaacagaagtcaattccagtgccatgcctttctccccaccccatccacacacacacaaaacaaagacaaacaacactatgacccaagctcgcggcccgcccacccaacacacatgcaaatacatgaaataatttgtcactggcgcctatgacaaattatttatttcacccctgttattatacagaagcatcatggttgtcactttgttagacattcagatacgagttcttgaaatgagtgggtaccaaatggtttgggcatgcaggtttgttgttaaatgcagatgatctaaaagcaggacccttcctccgtgaaggaattctaagtttggatggattgtcacttctgctgaaacctgctagtcaacctgatgattctagaatgaactcttctactcatcaatctggtgcatctcaatctgaccctgtaccaacaacaaataagaagcctggcagaccaaagtggctgaaaaggtaaaatccagaataatcttcttgccattgtggtacaatagttaaaaggagaaaaacttgtcaagtttctggggataattccaattccttatcaatcttcttaagcaatgatacacagctctcatgcgtatttgagaagaataattccttatcgtcttttggtaagttagcatatgcccttgctatccactgtttcagaacattgttagaacttgcaaggagcttttaaattgcagtttcattttagtgcgtgcatctcatactatcttgattgttgaaccaaccccacccaccatagggttatgtctcgtgataattctgtttgcttgaactccatttcccatctagctattttgtttcggaacatcttttgcctttgcaagaccacgacaaaataactggtacccacttgttgcaggtgataccactccaggcgtcaggtgtgtgctttcaacacagaatcagtctgtaaacactattcatggttgaacaagtttaaagtttggacagactacactgctgcagtacaaggattggaccctctgcccactgaagctgttgggggcattataattggggccccacctttttgtaggtgggagacaagtagcatgtaaacttgaatgtgttgctgactcaaacagaacagtgctctgctctggctaagcacctggccatcttacacatcgtgtaagccccatagtaacttgaatgtgttacacatcgtgtgcctgtctttgctatccagtctttacacagcatttcaggaaacagaaagtgcttgaaagtgtaccaagtgtggccgtgtggggtttcagttcgcccatgatattgtggcaagtcgctttcttgtgattgatggtgatggtgccctcaccagcgactaatttgtcgccaaatggcatgtgttttcttcttatgatggtgacttgctgtccagctataccctgtg

SEQ ID NO: 106954 - DNA, 1469 bp, Zea Mays
tgtttaggccgtcgagcgttggccgcgcgtcgtatacgaagtccgagcccgacccgcaacccgaaacccgtctcgcctcgccaaggcaaggcttcctttcctctcccttcccgtccaagatggaagcagagtacccccaccagcaggcggccccctcttactccacgaccgccaccgtcttctggccgtacgcgactcgccgcagaaagagagccgaggacggcagcgacctctcgctggcgtcggatatggatctcgacgccgacgcgcagcgcgccgcagataagctgaaagcagtgtcagaggaacttggacatgagatccgggttttttcaagtgagaactttgctctacaaccgagcaagctgcctagtgcagatcatgaggaaggtgacgacttttatgagcttcagcctgctgattactacaacttgatttcaaacaggatgggagagctatctaaaatgctaaagactcgcaagatgcgggaagcagaacttgctgctcagcgagcaaagcgaacaaaggcagtaatgagggtgcgattccctgatggctacatacttgaggctgactttcttccatcagagaggattcatagtctagtggacctgctcatgaaagtacttgctagaccagatctgccattctatctctatacagtacctccaaagaagcgaatactggacacatcacaggacttctatacatctggttttgttcctggagctaatgttcatttttcttatgatctgcccgaaggtttgttgttaaatgcagatgatctaaaagcaggacccttcctccgtgaaggaattctaagtttggatggattgtcacttctgctgaaacctgctagtcaacctgatgattctagaatgaactcttctactcatcaatctggtgcatctcaatctgaccctgtaccaacaacaaataagaagcctggcagaccaaagtggctgaaaaggtgataccactccaggcgtcaggtgtgtgctttcaacacagaatcagtctgtaaacactattcatggttgaacaagtttaaagtttggacagactacactgctgcagtacaaggattggaccctctgcccactgaagctgttgggggcattataattggggccccacctttttgtaggtgggagacaagtagcatgtaaacttgaatgtgttgctgactcaaacagaacagtgctctgctctggctaagcacctggccatcttacacatcgtgtaagccccatagtaacttgaatgtgttacacatcgtgtgcctgtctttgctatccagtctttacacagcatttcaggaaacagaaagtgcttgaaagtgtaccaagtgtggccgtgtggggtttcagttcgcccatgatattgtggcaagtcgctttcttgtgattgatggtgatggtgccctcaccagcgactaatttgtcgccaaatggcatgtgttttcttct

SEQ ID NO: 106955 - DNA, 1828 bp, Zea Mays
tgtttaggccgtcgagcgttggccgcgcgtcgtatacgaagtccgagcccgacccgcaacccgaaacccgtctcgcctcgccaaggcaaggcttcctttcctctcccttcccgtccaagatggaagcagagtacccccaccagcaggcggccccctcttactccacgaccgccaccgtcttctggccgtacgcgactcgccgcagaaagagagccgaggacggcagcgacctctcgctggcgtcggatatggatctcgacgccgacgcgcagcgcgccgcagataagctgaaagcagtgtcagaggaacttggacatgagatccgggttttttcaagtgagaactttgctctacaaccgagcaagctgcctagtgcagatcatgaggaaggtgacgacttttatgagcttcagcctgctgattactacaacttgatttcaaacaggatgggagagctatctaaaatgctaaagactcgcaagatgcgggaagcagaacttgctgctcagcgagcaaagcgaacaaaggcagtaatgagggtgcgattccctgatggctacatacttgaggctgactttcttccatcagagaggattcatagtctagtggacctgctcatgaaagtacttgctagaccagatctgccattctatctctatacagtacctccaaagaagcgaatactggacacatcacaggacttctatacatctggttttgttcctggagctaatgttcatttttcttatgatctgcccgaaggtttgttgttaaatgcagatgatctaaaagcaggacccttcctccgtgaaggaattctaagtttggatggattgtcacttctgctgaaacctgctagtcaacctgatgattctagaatgaactcttctactcatcaatctggtgcatctcaatctgaccctgtaccaacaacaaataagaagcctggcagaccaaagtggctgaaaaggtaaaatccagaataatcttcttgccattgtggtacaatagttaaaaggagaaaaacttgtcaagtttctggggataattccaattccttatcaatcttcttaagcaatgatacacagctctcatgcgtatttgagaagaataattccttatcgtcttttggtaagttagcatatgcccttgctatccactgtttcagaacattgttagaacttgcaaggagcttttaaattgcagtttcattttagtgcgtgcatctcatactatcttgattgttgaaccaaccccacccaccatagggttatgtctcgtgataattctgtttgcttgaactccatttcccatctagctattttgtttcggaacatcttttgcctttgcaagaccacgacaaaataactggtacccacttgttgcaggtgataccactccaggcgtcaggtgtgtgctttcaacacagaatcagtctgtaaacactattcatggttgaacaagtttaaagtttggacagactacactgctgcagtacaaggattggaccctctgcccactgaagctgttgggggcattataattggggccccacctttttgtaggtgggagacaagtagcatgtaaacttgaatgtgttgctgactcaaacagaacagtgctctgctctggctaagcacctggccatcttacacatcgtgtaagccccatagtaacttgaatgtgttacacatcgtgtgcctgtctttgctatccagtctttacacagcatttcaggaaacagaaagtgcttgaaagtgtaccaagtgtggccgtgtggggtttcagttcgcccatgatattgtggcaagtcgctttcttgtgattg

SEQ ID NO: 106956 - DNA, 1199 bp, Zea Mays
tgtttaggccgtcgagcgttggccgcgcgtcgtatacgaagtccgagcccgacccgcaacccgaaacccgtctcgcctcgccaaggcaaggcttcctttcctctcccttcccgtccaagatggaagcagagtacccccaccagcaggcggccccctcttactccacgaccgccaccgtcttctggccgtacgcgactcgccgcagaaagagagccgaggacggcagcgacctctcgctggcgtcggatatggatctcgacgccgacgcgcagcgcgccgcagataagctgaaagcagtgtcagaggaacttggacatgagatccgggttttttcaagtgagaactttgctctacaaccgagcaagctgcctagtgcagatcatgaggaaggtgacgacttttatgagcttcagcctgctgattactacaacttgatttcaaacaggatgggagagctatctaaaatgctaaagactcgcaagatgcgggaagcagaacttgctgctcagcgagcaaagcgaacaaaggcagtaatgagggtgcgattccctgatggctacatacttgaggctgactttcttccatcagagaggattcatagtctagtggacctgctcatgaaagtacttgctagaccagatctgccattctatctctatacagtacctccaaagaagcgaatactggacacatcacaggacttctatacatctggttttgttcctggagctaatgttcatttttcttatgatctgcccgaaggtttgttgttaaatgcagatgatctaaaagcaggacccttcctccgtgaaggaattctaagtttggatggattgtcacttctgctgaaacctgctagtcaacctgatgattctagaatgaactcttctactcatcaatctggtgcatctcaatctgaccctgtaccaacaacaaataagaagcctggcagaccaaagtggctgaaaaggtgataccactccaggcgtcagactacactgctgcagtacaaggattggaccctctgcccactgaagctgttgggggcattataattggggccccacctttttgtaggtgggagacaagtagcatgtaaacttgaatgtgttgctgactcaaacagaacagtgctctgctctggctaagcacctggccatcttacacatcgtgtaagccccatagtaacttgaatgtgt

SEQ ID NO: 106957 - DNA, 1053 bp, Zea Mays
tgtttaggccgtcgagcgttggccgcgcgtcgtatacgaagtccgagcccgacccgcaacccgaaacccgtctcgcctcgccaaggcaaggcttcctttcctctcccttcccgtccaagatggaagcagagtacccccaccagcaggcggccccctcttactccacgaccgccaccgtcttctggccgtacgcgactcgccgcagaaagagagccgaggacggcagcgacctctcgctggcgtcggatatggatctcgacgccgacgcgcagcgcgccgcagataagctgaaagcagtgtcagaggaacttggacatgagatccgggttttttcaagtgagaactttgctctacaaccgagcaagctgcctagtgcagatcatgaggaaggtgacgacttttatgagcttcagcctgctgattactacaacttgatttcaaacaggatgggagagctatctaaaatgctaaagactcgcaagatgcgggaagcagaacttgctgctcagcgagcaaagcgaacaaaggcagtaatgagggtgcgattccctgatggctacatacttgaggctgactttcttccatcagagaggattcatagtctagtggacctgctcatgaaagtacttgctagaccagatctgccattctatctctatacagtacctccaaagaagcgaatactggacacatcacaggacttctatacatctggttttgttcctggagctaatgttcatttttcttatgatctgcccgaaggtatgcatcatcataatgactagtggcaagttaagaaataaacaacaattacctctcagctctatgtttgaaatatatgttgtatcttaacagaagtcaattccagtgccatgcctttctccccaccccatccacacacacacaaaacaaagacaaacaacactatgacccaagctcgcggcccgcccacccaacacacatgcaaatacatgaaataatttgtcactggcgcctatgacaaattatttatttcacccctgttattatacagaagcatcatggttgtcactt

SEQ ID NO: 106958 - DNA, 1274 bp, Zea Mays
acctttccatcctatcattcatcctactcgctccctctccaactcgaccgccccgccgccggccgccggccgccatctcccgccgccgaccacccccgacccaccggccgcgcccagccccaactcgcccccgttgctgtccttgtgtcgctgtccccgcccgcgttgcgcctggattgcactcagccttggccgcaatccatccgtgctttccggcgctacccaccacacatcgagttgtttgattttcgattgattcgcccgaagagggcaggccggccgacgaggtaagggtgcggtgcgaagcgttggtcagatgccccagtaccttgcggtcggcgtgctacacggagtgtgtgaactgtgaagccgccggcgcagctagctttggcatgagcacaaccgcacgaggcaagctcaggtaatcagctatccatgttgttacgtctgcacgtaggtttcgatagtccagcagctactgctccacactcaggatgtgcgaaggacatgctaattcgactgtgttttcaaaccctgagaaaaactaagctatctactgggcattatgaaaagcgagaaacaaaatgtgttttgataacattttgatcaaatcttcgattgatatcatttgtcatgctggcgctattattatttcttgggcaaggttgagcaaaaaagagccgcaagacttgctgcgggagggtgcgagattgctatttcgagctgctaatgctgggatggacaatcagctcataaactctattgcgggtgataaagattatgctccaccttaagaagactaatgatatgatgtcatggagttctttacaattcttgtttgtgtgggtgctgatatcgttagtgagttgtgtctcctattttggtaggatgtgcatgaacttgttatgttctcacgcatgttttccttgtggtagtcctgaactaggcttctgccatagaaactatcctcccctccctctcttctcacctgttgtgtggaaaaattggcaaacaaatgtatttctgttacatcagtaattgaaatggggttcactctggtaaaaaatgcttgaatatcaattataagtattaaatgtagacttaactaggtctaataaatttgtttcgtcttttagtcttcatcgttgtcattagttttataattagactatatttaatatttttaattatcgttcaaacattcgatgtgacatggactaaattttagctgatcaaatttttatttagattaataatatttataaaaaagaaaa

SEQ ID NO: 106959 - DNA, 1146 bp, Zea Mays
acctttccatcctatcattcatcctactcgctccctctccaactcgaccgccccgccgccggccgccggccgccatctcccgccgccgaccacccccgacccaccggccgcgcccagccccaactcgcccccgttgctgtccttgtgtcgctgtccccgcccgcgttgcgcctggattgcactcagccttggccgcaatccatccgtgctttccggcgctacccaccacacatcgagttgtttgattttcgattgattcgcccgaagagggcaggccggccgacgaggtaagggtgcggtgcgaagcgttggtcagatgccccagtaccttgcggtcggcgtgctacacggagtgtgtgaactgtgaagccgccggcgcagctagctttggcatgagcacaaccgcacgaggcaagctcagctatctactgggcattatgaaaagcgagaaacaaaatgtgttttgataacattttgatcaaatcttcgattgatatcatttgtcatgctggcgctattattatttcttgggcaaggttgagcaaaaaagagccgcaagacttgctgcgggagggtgcgagattgctatttcgagctgctaatgctgggatggacaatcagctcataaactctattgcgggtgataaagattatgctccaccttaagaagactaatgatatgatgtcatggagttctttacaattcttgtttgtgtgggtgctgatatcgttagtgagttgtgtctcctattttggtaggatgtgcatgaacttgttatgttctcacgcatgttttccttgtggtagtcctgaactaggcttctgccatagaaactatcctcccctccctctcttctcacctgttgtgtggaaaaattggcaaacaaatgtatttctgttacatcagtaattgaaatggggttcactctggtaaaaaatgcttgaatatcaattataagtattaaatgtagacttaactaggtctaataaatttgtttcgtcttttagtcttcatcgttgtcattagttttataattagactatatttaatatttttaattatcgttcaaacattcgatgtgacatggactaaattttagctgatcaaatttttatttagattaataatatttataaaaaagaaaa

SEQ ID NO: 106960 - DNA, 1191 bp, Zea Mays
acctttccatcctatcattcatcctactcgctccctctccaactcgaccgccccgccgccggccgccggccgccatctcccgccgccgaccacccccgacccaccggccgcgcccagccccaactcgcccccgttgctgtccttgtgtcgctgtccccgcccgcgttgcgcctggattgcactcagccttggccgcaatccatccgtgctttccggcgctacccaccacacatcgaggtaggccctccatgcatttccgatcccccgccctgagctctagctcccatgcactctcgctcgcccatttgctgaagtgcggcggctgggctgctcgatgatgcatggtctgggcgtgtgtacagttgtttgattttcgattgattcgcccgaagagggcaggccggccgacgaggtaagggtgcggtgcgaagcgttggtcagatgccccagtaccttgcggtcggcgtgctacacggagtgtgtgaactgtgaagccgccggcgcagctagctttggcatgagcacaaccgcacgaggcaagctcaggtaatcagctatccatgttgttacgtctgcacgtaggtttcgatagtccagcagctactgctccacactcaggatgtgcgaaggacatgctaattcgactgtgttttcaaaccctgagaaaaactaagctatctactgggcattatgaaaagcgagaaacaaaatgtgttttgataacattttgatcaaatcttcgattgatatcatttgtcatgctggcgctattattatttcttgggcaaggttgagcaaaaaagagccgcaagacttgctgcgggagggtgcgagattgctatttcgagctgctaatgctgggatggacaatcagctcataaactctattgcgggtgataaagattatgctccaccttaagaagactaatgatatgatgtcatggagttctttacaattcttgtttgtgtgggtgctgatatcgttagtgagttgtgtctcctattttggtaggatgtgcatgaacttgttatgttctcacgcatgttttccttgtggtagtcctgaactaggcttctgccatagaaactatcctcccctccctctcttctcacctgttgtgtggaaaaattggcaaacaaatgtatttctgttacatcagtaattgaaatggggttcactctggtaaaaaa

SEQ ID NO: 106961 - DNA, 1041 bp, Zea Mays
acctttccatcctatcattcatcctactcgctccctctccaactcgaccgccccgccgccggccgccggccgccatctcccgccgccgaccacccccgacccaccggccgcgcccagccccaactcgcccccgttgctgtccttgtgtcgctgtccccgcccgcgttgcgcctggattgcactcagccttggccgcaatccatccgtgctttccggcgctacccaccacacatcgaggtaggccctccatgcatttccgatcccccgccctgagctctagctcccatgcactctcgctcgcccatttgctgaagtgcggcggctgggctgctcgatgatgcatggtctgggcgtgtgtacagttgtttgattttcgattgattcgcccgaagagggcaggccggccgacgaggtaagggtgcggtgcgaagcgttggtcagatgccccagtaccttgcggtcggcgtgctacacggagtgtgtgaactgtgaagccgccggcgcagctagctttggcatgagcacaaccgcacgaggcaagctcagctatctactgggcattatgaaaagcgagaaacaaaatgtgttttgataacattttgatcaaatcttcgattgatatcatttgtcatgctggcgctattattatttcttgggcaaggttgagcaaaaaagagccgcaagacttgctgcgggagggtgcgagattgctatttcgagctgctaatgctgggatggacaatcagctcataaactctattgcgggtgataaagattatgctccaccttaagaagactaatgatatgatgtcatggagttctttacaattcttgtttgtgtgggtgctgatatcgttagtgagttgtgtctcctattttggtaggatgtgcatgaacttgttatgttctcacgcatgttttccttgtggtagtcctgaactaggcttctgccatagaaactatcctcccctccctctcttctcacctgttgtgtggaaaaattggcaaacaaatgtatttctgttacatcagtaattgaaa

SEQ ID NO: 106962 - DNA, 870 bp, Zea Mays
acctttccatcctatcattcatcctactcgctccctctccaactcgaccgccccgccgccggccgccggccgccatctcccgccgccgaccacccccgacccaccggccgcgcccagccccaactcgcccccgttgctgtccttgtgtcgctgtccccgcccgcgttgcgcctggattgcactcagccttggccgcaatccatccgtgctttccggcgctacccaccacacatcgaggccggccgacgaggtaagggtgcggtgcgaagcgttggtcagatgccccagtaccttgcggtcggcgtgctacacggagtgtgtgaactgtgaagccgccggcgcagctagctttggcatgagcacaaccgcacgaggcaagctcagctatctactgggcattatgaaaagcgagaaacaaaatgtgttttgataacattttgatcaaatcttcgattgatatcatttgtcatgctggcgctattattatttcttgggcaaggttgagcaaaaaagagccgcaagacttgctgcgggagggtgcgagattgctatttcgagctgctaatgctgggatggacaatcagctcataaactctattgcgggtgataaagattatgctccaccttaagaagactaatgatatgatgtcatggagttctttacaattcttgtttgtgtgggtgctgatatcgttagtgagttgtgtctcctattttggtaggatgtgcatgaacttgttatgttctcacgcatgttttccttgtggtagtcctgaactaggcttctgccatagaaactatcctcccctccctctcttctcacctgttgtgtggaaaaattggcaaacaaatgtatttctgttacatcag

SEQ ID NO: 106963 - DNA, 1335 bp, Zea Mays
gacctggaaatgagagctgttcatgctacgggcaatctgacggaagagtggaaccatgcatctttggaactctgcaagctgtgttgcctctaaaacctcttctaactcacccaagaacatcacctcctttgagctgtttgtcacaggccaatatttaagtaagcctctaataactgtgtcagcaagtttgcaatccttctcaacaaactgtgtgatgcaatatgatagctgctgatggtacatagatacacattttggcttgtgaagagggatcaatgcacgaacaaggaataatttgtgctcttccttaagcggaagggcaaacccattgataatactgcccaggatctccaacaactctgcaacaccattatgtttctctgtttcgaatataaacctgtagaatatgttgttaattgctttcctgatgaatggtcgatgaaccatgaatttaccatatattcgatgaagtatcgtctttagataatccctttccctggggtcctccgagtcaaaaaggtctagcagcctaagaatgaaggaatggtctatatacctcttggccagctttgcatctgtctcctgtgatgctacaaatctcaagaaaacctcatacacgatctgcaggtgcgaccatgcaggatccatgagaggctcgtcctcctccagatcaaccccttcaatggccttgttctcacgaggggtggggctggagctccggaacaaattaatcgacaccatctttgtgatctccagcatgacaacctctgagaacttgccattcgcagaagtgatgtaatcaacaagctccataagtgtctgacgcttcacctccttctccttgaggttcttagttggatccgcgaagtcatacacagcacagcataggttcaccttcttgacaaacaaattctgcttctctgatgccggcacatccttgaatgccggtaacggctcactggagtgatacaccacagccccattcatcactgggttagaagttagaccagatggaactggatagtctccatttccagccctcttgttccctgggtccatgcccctcacaacactgtaggaattcgacggctcagttccattccccgcagcagcagcttcccggctatccccagccttccccggcttcctcggcagcctgccaaggatctgcttaatcatgttccaccagactcaaaccaaaaccctaaacaaatccgccacggaatcgaagaggggatctacgcagacctgcggcccgtgcgctgaaccagaaaccctccagatctcaccagacccaagccgacaaatccaccagccggccaacaaaccacagcc

SEQ ID NO: 106964 - DNA, 1756 bp, Zea Mays
gtttttgaacaacaattacagaaatcaaaaaatggaatgttattttttgttacaattcgaaagtatgaatgaaccattttttatattattatatgtaaaaatattgaatacatttttttatcatccttacaatttgatgaaatgggtacaaataaaagaaaacaaaaaaagaaatggaaaaaggaattctgttaacactgtagctttaggggaccgaatttaggggacgttgctggagacacagaatatataggggacagaatcttttagagtgttcccatcttcttcttgcagccgaagcaaagtgagggcggcgagatgaacggcggcggggaggacgggaagcagcagccgcacctggtactggcgcacaagctgttcctcctgtcgcactccgacgtcgacgacctcgccaaggtcgacctacgcgctgacgtgttcgcggcagtcaaatccgatgacatggcagctctgtacgagtcgttggcggcggacggcgtactggagacggacgcggcgctgctggccgagatgcgcgccaggatcgacgaggagatccggaagctcgacgagaagattgctgatgcagaggagaacttgggtgagagtgaagtgcgtgaggcccatctcgccaaatccttatatttcataagggttggggagaaggagaaagcactggagcagcttaaagttactgaaggaaaaactgtagctgttgggcaaaagatggaccttgttttctacacactacaaattggattgttctatatggactttgatctcatctcgaagtccattgacaaagcgaaaaacttgtttgaggaaggtggtgattgggaaaggaagaacagattgaaagtatatgaagggttgtactgcatggcaactagaaacttcaagaaagctgctagtttattcttggattcaatttcaactttcacgacatatgagctattcacatatgatacattcatcttctacacagtcctcacgagtgttatatctctggaccgtgtatctctgaaacaaaaggttgtagatgcgcctgagatcttagccgtaattggcaaagtacctcacctctcagagtttctcaattccctctacaattgccagtacaagtcattttttattgcattctctggcttgactgaaccaatcaagttagagcgttacttgcagcctcattttcgctactacatgcgtgaagtgcgcactgttgtctactcacagtttctggaatcgtacaagagtgtgacaatggaagccatggctgctgcatttggcgtcacagtcgactttatagaccaggaactgtcacgcttcattgccgctgggaagctccactgcaagatagacaaagttgctggcgtcttggaaacgaaccgacctgatgctaggaacgccttctaccaggcaaccatcaagcaaggagacttcctgctgaaccgcatccagaagctgtcacgagttatcgacctgtaggggagagcccttcatgcaggacaggagcttgccttggttcctggagtgtacgagcggtgcttgactttcaatgggtctcagttgaagaagcttttagggatatttgtgttctgagaaattgtgttttgcactttttagcctaactacatgaagcccccaaaaaaatttcatggcgttgcttgtagacgtttcttcattgatgaattcatcccttgttttttcttgctggatattgttttgctactaagagcctagcagatggtagacaagc

SEQ ID NO: 106965 - DNA, 1612 bp, Zea Mays
gtttttgaacaacaattacagaaatcaaaaaatggaatgttattttttgttacaattcgaaagtatgaatgaaccattttttatattattatatgtaaaaatattgaatacatttttttatcatccttacaatttgatgaaatgggtacaaataaaagaaaacaaaaaaagaaatggaaaaaggaattctgttaacactgtagctttaggggaccgaatttaggggacgttgctggagacacagaatatataggggacagaatcttttagagtgttcccatcttcttcttgcagccgaagcaaagtgagggcggcgagatgaacggcggcggggaggacgggaagcagcagccgcacctggtactggcgcacaagctgttcctcctgtcgcactccgacgtcgacgacctcgccaaggtcgacctacgcgctgacgtgttcgcggcagtcaaatccgatgacatggcagctctgtacgagtcgttggcggcggacggcgtactggagacggacgcggcgctgctggccgagatgcgcgccaggatcgacgaggagatccggaagctcgacgagaagattgctgatgcagaggagaacttgggtgagagtgaagtgcgtgaggcccatctcgccaaatccttatatttcataagggttggggagaaggagaaagcactggagcagcttaaagttactgaaggaaaaactgtagctgttgggcaaaagatggaccttgttttctacacactacaaattggattgttctatatggactttgatctcatctcgaagtccattgacaaagcgaaaaacttgtttgaggaaggtggtgattgggaaaggaagaacagattgaaagtatatgaagggttgtactgcatggcaactagaaacttcaagaaagctgctagtttattcttggattcaatttcaactttcacgacatatgagctattcacatatgatacattcatcttctacacagtcctcacgagtgttatatctctggaccgtgtatctctgaaacaaaaggttgtagatgcgcctgagatcttagccgtaattggcaaagtacctcacctctcagagtttctcaattccctctacaattgccagtacaagtcattttttattgcattctctggcttgactgaaccaatcaagttagagcgttacttgcagcctcattttcgctactacatgcgtgaagtgcgcactgttgtctactcacagtttctggaatcgtacaagagtgtgacaatggaagccatggctgctgcatttggcgtcacagtcgactttatagaccagtaagtgcagtgtcagccatgcccatgtcaaagttctaaatgttagtacaagcttaacttttattatcatgtcactccaatacagggaactgtcacgcttcattgccgctgggaagctccactgcaagatagacaaagttgctggcgtcttggaaacgaaccgacctgatgctaggaacgccttctaccaggcaaccatcaagcaaggagacttcctgctgaaccgcatccagaagctgtcacgagttatcgacctgtaggggagagcccttcatgcaggacaggagcttgccttggttcct

SEQ ID NO: 106966 - DNA, 2087 bp, Zea Mays
gaacagagggagtactatgttgtgttgatgaatgatattgtgatcctatctgtgcagacctttgtttatggtgatctttatcgctatgatgtagagaaaaatgaatggaaattggtatctagccctaacagtccacctccacgaagtgctcaccagacagtagcctggaagaataatatatacatgtttggtggggagtttacttcaccaaaccaagaacgttttcatcattacaaggacttttggacattggatctgaaaacaaatcaatgggagcagattcttgcaaagggctgcccaagtgcacgttcaggacacaggatggttctttacaagcataagattgttctatttggtggcttttatgacactcttagggaagtgaggtactacaatgatctgcatgtttttgatttggaccatttcaagtgggaggaaatcaagcctcgacctggatgcctatggccaagtccaagaagtggctttcaacttgctgtttaccaagatcagatatatctatatggtggatattttaaagaagtttcttctgacaaagaaaaaggaacagttcatgcagatatgtggtctcttgatcctcgtacttgggagtggaataaggttaagaaggctgggatgccgcctggtcccagagctggtttttcaatgtgtgtgcacaagaaaagggctgttctttttggtggtgtggtagatatggaagttgaaggtgatgtcattatgagcatgttcatgaacgagctgtatggtttccaattggataaccaccgatggtacccgctagagctcaggaaagacaagcctgctaaaatcaaggcaaggaatatcaaaagaaaagaatcaacgaatgatgtagaagctaatattattgatgatgagggtgatgaggtcatggtggacgtagaagaagctattgaaggacaacctgaagtcaatggagtttccaatcagttgatcaaaactctgaatatcactaaagatggctcaagcagaagcattgatgttctctctgattcaacagcacaagaatcatttttggaggcggtgaagcccagtggtcgtatcaatgcatgcttggccgtagggaaagatatgctctacttgtatggaggaatgatggaagtgaaagatagagaaattactcttgatgatctatattcacttaaccttagcaaacttgatgagtggaagtgtatcatatccgcctcagaatctgaatggttagaaatttctgaggaagaggatgatgatgatgatgatgagactgatgatgatgaaaatgaagagggggatgctagccagacagatgaagatgaagaagagtctgatgaagatgctgcaaagaacgtgtccagtgctgtgtctctgctgaagggtgaaagtaagaccatgcgtagaaaagagaagcgtgctcggatagaacagatcagggtcatccttggcctttctgattctcaaaggactccagtgcctggagaatcactgagagatttctacaagaggacaaatatgtactggcaaatggctgcctatgagcacactcaacacactggaaaggagctccgcaaagacggttttgatcttgccgaaactcgattcaaggaactgaaaccgatacttgacgagctggctgtgctggaggccgagcagaaagctgaggaagaggccagtgcgtcgactagttccaagagggacaccaagaaacccaagcagaagagcgcacgaaggtagctttggttctgaacgagtgtgtaagcggaagccagctttagatgaagttgctccaggaagaggccagtgcgtcagctagtcccaactcccaaggtgtgaagaggggacaccaagaaaatccaagcagaagagtgcagggagatagttttggttctgaacgagtgtttaagcgtaagacggttttaaacgattgctcaaatgctcaagttcctttgaggggatttccattttctttttgaacccaagtagacaaaattgatatttgttgttttataatagtgtatgtatatactcgtacgttgaaatttgattcatgtgcaatcttgaccgtatattctccc

SEQ ID NO: 106967 - DNA, 908 bp, Zea Mays
gaacagagggagtactatgttgtgttgatgaatgatattgtgatcctatctgtgcagacctttgtttatggtgatctttatcgctatgatgtagagaaaaatgaatggaaattggtatctagccctaacagtccacctccacgaagtgctcaccagacagtagcctggaagaataatatatacatgtttggtggggagtttacttcaccaaaccaagaacgttttcatcattacaaggacttttggacattggatctgaaaacaaatcaatgggagcagattcttgcaaagggctgcccaagtgcacgttcaggacacaggatggttctttacaagcataagattgttctatttggtggcttttatgacactcttagggaagtgaggtactacaatgatctgcatgtttttgatttggaccatttcaagtgggaggaaatcaagcctcgacctggatgcctatggccaagtccaagaagtggctttcaacttgctgtttaccaagatcagatatatctatatggtggatattttaaagaagtttcttctgacaaagaaaaaggaacagttcatgcagatatgtggtctcttgatcctcgtacttgggagtggaataaggttaagaaggctgggatgccgcctggtcccagagctggtttttcaatgtgtgtgcacaagaaaagggctgttctttttggtggtgtggtagatatggaagttgaaggttactcataatcaagctctctgcacctgtgctacatgcttagctatatattagaaatgcatgtattttctgttgcttatgtttggtcattaaatgattaaaaaatcatctattttggtaattagggtgttctgttgttcacctgaatatttcttgttcatggtttaattcctaatggaatgac

SEQ ID NO: 106968 - DNA, 398 bp, Zea Mays
cgttttccttctcccgttcacctcgcgccgccgccgacctacgccagttgcacaggtcttcgtcggccgctttccggcgaagagcattcgcgcgaggtatgcctgccgccttgcgaattctatccccttgctgctgtactaagctgaacacccgagcccatgtcccctgcagggaggggatggggaagaagcagaagaagcctgggaaggggaaggagaagacggagcggaagacagccaagggcgaggagaagcgtgcccgccgggattcccgcaaggtcggcgaggaggacgacatcgaagccatccttaggagcatacagaaggaagaagcgaagaaggaggttcatgtggaggagaatgttcccgcaccatctcctcggtccaattgctcggta

SEQ ID NO: 106969 - DNA, 914 bp, Zea Mays
actgctgctatctgctccgcacactccattgctagctgtaacgcactgcaagaaagagctagctagctcaccgtcgttacgaagatgatcaagctgaggtaccctaagaagctgttcaggaggagctcctccaagggcagcagcactaccagcagcagcagcagcagcgacggcgatgccgccggcagcgcccgcggcggggagatcgagtgggaggtccggccgggcggcatgctggtgcagaagagggacgacggcagggggcacgtggacgtcatcaccgtgagggtcgccaccggcttctcctggcacgacgtctccgtcgtggctacctgcacttttgtgtgggcgtgcaaaaaaacgattgcaggtgagctgaaggcggtgctgtggaagatgacagggctggagcctcgggagcagaggctcctgttcaggggcaaggagagggaggacggcgaccacctccacatgatcggggtgagggacatggacaaggtgctgctcctggaggaccctgccctcaaggacatgaagctccgggccgggctcacggcggcgtatcgtcagactttcatcagggtgtaatagtaggcttaggcttgccgcccccgccccctaattaactgtgatgcatgatagagagagagagagagagagagagtaaacgaaccagtatcgtgttttcggctgctcagctgggtcggtgaacgactgcctgcctgttgaagagaagccactgcttgtttttgtttatgtttagctgtgtcttttgtcatttttgcagggtagagagatgaatcacgtacgctgagtttttactggcctagctagcaagctccacacacgtacagtttcgacttttgattgaagggcttcccagtcccaggctccagcagcacctgatatgtgga

SEQ ID NO: 106970 - DNA, 2812 bp, Zea Mays
aattcctatgaaagaccaaaacttgcaatgccagataagtctgacgaagaggtgaaaatgccaggctgctccaaatccaggagcaagtcttctgctgcaatgagccgtgttgggagcccctgcatgtcagccagtgaggcacgctcagttgggtcaagaagaagcactttggggcatggaaccgaggatacacgactgaggtcaaatgatgtcgtgggatccaatttcagtggctgtggtataagctactgctggtcaggagcgtcaaagtaccgggagctttattctgacagcgatggtccagaccaacctctcttatccacagatgggattgaggcagcattccaaggcaatgtaccatacactgagacactgaggtgtctaagccagaagttccgccctcgttccttcagtgaactgattggcctaaatgtcgttgcccagtccctcctatattccacttgcaaaggaaaagttgctccaatgtacttgttccatggcccccggggtacaggcaagacatccacggcaaggatttttgccgcggcactgaactgtgtatctcttgaggagcaaaggccgtgtgggttctgtaaagagtgtgtcattcttttctctgggaagagcagagatgtgaaagagcttgacgctgcgaaaatggatcgtctaggccgagtgaaggcacttctcaagagcgcatcgctcgtgccatactcctcgcgcttcaaggtcttcatagtagatgagtgccacctcttgcgagaagatgcatggtcagcaatactgaagagccttgacgagccataccggcacacggtgtacattatgatcacttctgacatagaaagcctgcctcgcgcttccatcacacattgtcagaagttccattttccaaagataaaggtggcggatattgtctacaggttggagaggatctgtatagaagaaggattggaatttgaccatgatgggttgtacttcattgctgcaaagtctaatggttctcttagagattcagaaataatgcttgatcaactcagtttgcttgggaagaaggtcacaatttctcttgtgcatgaacttgtaggatctgtgtctgatgatgagttgattgaattgcttgatctagcgttgtcatccgacacaaccaataccgtaagacgagctcgagaacttatggggtcagcaatcgatcctctgcagctggtgtctcagttggccaaccttattatggacattctctcagggagatgtcaatctgcagtcacggaagtcagcaaaagtttcttgggtagatatgcattatcagaggttggaataaagaaactaagacatgcactgaagatactatcagaaactgaaaaacaattgagaacatcaaggaatcaggctacttgggttacagttgcgcttttgcagtttagcaccaatgaacctaaccctgttgctgaaacaaatgatatgcatgcacattcagtaactggatatacagatgactgggtttccaaggtgcactcaagtgccaatttttgccaggcatgtaacagcagcaagtccaactgttctgagagacactgtaggcggcttaagctcgagaacatatggaggagagccattggaaagtgtcgatctaggtcagctaaaagtttcctcaggaaagaaggcttcttatcgtcggttcacgtcaccgaagagctggccatagcagaagttggttttgaacacccagatcacctgtcaagagcggagaaaatgcaaagcctaatagaatcctctttgcaacacgttcttgggtgcaatgtggagatcagattcaaactcgtgccatgcccagtgagcaaagatgctaggttgaagagacagccgttcagctttctcaactgctctggccggaagcaagagctgtcagattcagtcgtgactgatgaagacgaagctgcgagggggcctggagcaagagagacaccgcttaaaggctacacctctagccagcaggaatcaccatacaccatgcgacgtgtcgattcgaaaccaacaacggtccacggttgcgaggatgacgcccggagtaccttgacgtcaagcagatccacggcagatgacctgacaaggacgtgcaggtcggagactggctacccaaagggtgtgcgtgagcagggccgctctgatggcacgcagcaggagcctgacctacagccgaactgcttctcgcgaacgctcaagcttcagaagaagctgctgtcttctggcgcagcgcacaccatctgtctgagggtccagccacataacaagatggatttcctgcctaagaaagagttcgatacgtacttctgcgcgtatgagccctacgagcagtgtccaagatcagattcaagagctacttacagttcaagagacgatgacttgtggagcaagaattcacgctttggctcgaatctactctgctggagagccccaaaacagtccatgtaatggaggaaagaacgagtgaactgggtggaacaaatcgattctgctacgagattttaccaattttgcccgaagctggagacatggacaccacccgcagctgcggggacaaattttgaagggaagtctaggaggggtctgtgctattcttgatcttggtaggcagctgaggattgaggaactatttagtgatgttttcttggaaatgcagatcctttataatgctagtgggcagttgtacagcgcgccagcgacgaaaccctgtgaattgttctgttattctgaattttgtaggacgatttgatgctctctctctgaatttacatgatctttttattagctg

SEQ ID NO: 106971 - DNA, 252 bp, Zea Mays
atggtcatgaacgctaacagctgtggcaaagcactcatagcagacaagaaagatggcagtgaggttccatacacttcggacaaggagcatgagccacgactgttgattgctgacaagaaggatggtgttacagaggcttcatctgcaacctacaatgatgtttatcaacctcgtagggccagctctgctcaaactgcaagcaaggtttgcggcaaggctctgcctcagtcagctacacccaagggtcgttaa

SEQ ID NO: 106972 - DNA, 371 bp, Zea Mays
atgcattattgcattcaaacaaggcatgagttggtaaggtttgttaaactgaatgctaaactttcctccaagagtactcttgtgttttcctttggtgattgcagagctagcatttataggaaaacatgtatgcgcctagctacaatagcagatgtcgtccacagcaccaagttcgtccattgaaaagggacctcaactctggtggctaccctaataaaattgtgctccttcctagaacaccaactccaggccatgacaagggttgcggagaagaggttgctgcctcacatgccatcatgtcatgcagcacgtcatctctccttctgcagaagaaagacaaaagcctgaacaagggagttctccaacctgac

SEQ ID NO: 106973 - DNA, 714 bp, Zea Mays
atgcagcacagttcattcacggcgtcttcggtgctccggacaggggtcggtcggtactcaaccgtagcagcggatgggatcgctgcagcccttcttggcggactgcccgcccttctcgaggtactgctggtggtactcctcggcggggtagaaccgtcgcgccggcaggacctcggtgacgatcgcgtcctgccactccttctgcttcgcagccagcgactcgcgcgccagcgtctcctgctctgccgtgtagtagtagatgcccgaccggtactgcgtcccgacgtcgttgccctgtctgttgagcgtggtggggttgtgcttggcccagaagacgtcgaggaggacgtcgtaggggcaggccttggggtcgtagtgcacgcggaccacctcggcgtggcccgtgccgttgccgcagacgtcgcggtaggtgggggcgtggcggtggccctgcgagtaccccacctccgtgcgcgccacgcctgggaggcgctggtacaccagctccacgctccagaagcagcccgcggcgaactgggccagggccaggccttcgcccgccggcgcgtcccagtccggcgccagggccgggctcgccgcgtcagcggtggacatggcggcgcccgtggtcggccgatgtgtttgggttgggatggtggtggctttgtttgtggaggagctgagtcgaggaggacccgactcccgagtgagtga

SEQ ID NO: 106974 - DNA, 1662 bp, Zea Mays
ataattctaacatgtgtgactagtatgatctttatttatactgataaaaacgtgggcagtcaattattcgaccaaatgatatattttttccaaaaagaaagaaaacatggacatgatgataaaacagcccccgaagcgtgcaacgggtgagcccgcaggctccacgcggacgcggccatgctgtgcactccgcctccgccccagccgccgctgcagtcatcgcggcgcccgcgcccgctcccgctccgggccgcgccacgatgctccaagcccaacgacgccgagccctcgccgtccccaccgtccaccgcggccgccggcggcgtccggcgccaggtgctctcgcccgagggccgcgcgaagctggacccgcggccggaccgcgacttctacgcgctcccgcgcctggtgacgcacgtggacgacggcttcatcgccacgctcacgggcctctaccgggagcgcctccgcgccgggtgggacgtgctggacctcatgagctcctgggtcagccacctgccgccggaggtccggttccggcgcgtcgtcggccacgggctgaacgcgcaggagctcgccaggaacccgcgcctggacctcttcttcgtcaaggacctcaacaaggagcagcggctggagctggagagcggcaccttcgatgccgtgctctgcaccgtcagcgtgcagtacctgcagtcccctgaaaaggttttcgcggagatcttccgggtgctgaagccagggggcgtgtgcatcgtcagcttcagcaaccggatgttctacgagaaggccatcagcgcgtggcgggacgggaccgcgtacagccgcgtgcagctcgtcacgcagtacttccagtgcgtggaggggttcacgcagcccgaggtgatcaggaagctgccgtcggccggcggatcgccgtcctcgccgctggacgccgtgatgaggctgttcggcgtggcaggctccgacccgttctacgcagttatctcgtacaggaacttcaagccaatgtgacaccctgattgacagaacccgtgcagcattgcgatatgcagtgcatacgatctatagaatcactactggtgcaaagctagtttgtacttgtacatgcacacttcagcattagctgtctagctcagcggcgggcagatgcaagttcgttcagaagctcaaaacatcatccaccgaccatctgattcagaaacatgctagcgatccttcttattacagaaagaaccactcttttttcaccgtcgtcgttcgtgaaacacgaacggactgagaccacctagctactcagaagaagaaacacgaacaggtaagaacgtagcgaccaccatatatatatatgtacaggcatttcgaggtacagagcatagagaaccttatttaggggccctgcaactgcgcggcgcggctggtcagtgggacgtagcgcacagccgcgtcgctccggacgctgaatgatccatccgtgttcttgtccaccacctgcaggtcctgggagtaggtgccaaccggtatcaccatccggccgccaggctttagctgatcaagcagaggctgagggatctcaggtgccgctgcaccaacatggatagcgtcgtagggtgccgcgtctggaaagccaagcctgccatctgcagttttcatagcggccag

SEQ ID NO: 106975 - DNA, 498 bp, Zea Mays
gatgctgctaggccgttcctcctcggccgaacgcgtcgccgaggtggaggcgagctcttcctggcctcggatctcaacatggaagcctacaacaaactgcgtgtccagaggtttagggagtccagctctcatctaacaagagagcaagatgcactgcctcgcttgaggagcactacatgtatttcctgtgtaacgacacggactgtgatgagatgtagtagtgatctgcgatttctttttctttttttggcaacatgcgtccttgttaatccctggtactatgctgcctttttttttagcctggccccgattactagagagttcactatacaacctaatgatcacatgaaacatacatagcagtggcgaacttgtttgattttttttaataaaatagaaaagaaaaaactaagggatgaacttcggatttgaagctgttgaagaacagtaaaacattgttatagggcacggataataattgcactctcaaaaggctct

SEQ ID NO: 106976 - DNA, 2663 bp, Zea Mays
actcgaggtgtactccagtcctacatcgaaatggtgtgctggttgctgaatgcaggcaggcaggcacggcatcggcatcactggaaattgaagcccaagaggggggaggtaggtggccattcaactccaaccctctaccggccgggctggcctccgatttgtttttcccagcctctgatgcgaattaggagcgcagcactggtctcattactcgccacaatgaccttcctttaagcatagattatatccgaacagttgttgctgccaagcctttactttaaccatcggcaagagtaagatccctgtgcgcacgcatacgcatgtccaggcccagcggcgcctgctataaaaatctccacgtccaccgcccggctccgtgtccctccctcgtcacatctgccgtccgtcaccatggggtgttcgtgtcctccgctcgccgacgccgcgtgcctggccctgcttcttctggccttgtcgttggcgtgtcgccaccaccacgggtgcgcggcggccacgctgtcgacggcgtcgcggtgggtgctggacgagagcgggagccgggtgaagctggcgtgcgtgaactggccgtcgcacctggagccggtgctggcggaggggctgggcaagcggcccgtcggcgccatcgccgcggacgtggccgccatggggttcaactgcgtcaggttcacgtggcccacgttcctggtcaccgacgcctcctactccgacctcaccgtcgcgcagtccttccagcggctcaacctcaccgagtcgctcgccggcatcagggtcaacaaccccggggtcgtcgacctcaagctcatcgacgccttcaaggccgtggtgagcagcctgggcgagcacaacctgatggtcatcctggacaaccacctgagcaagcccgggtggtgctgcagcaacaccgacggcagcggcttcttcggcgacacctacttcgacccggacgtctgggtcgacggcctcaccaagatggccaccatgttcgccggcgtccccaatgtcgtcggcatgagccttcggaacgagctcaggggccccaggcagaacgtgaacgactggtacaagtacatgcagcgcggcgcggaggcggtgcacgcggcgaacccgcgcgtgctggtcatcctctcgggcctcagcttcgacaacgacctggccttcctcaactcgcggccggtgaacctcagcttcaccgggaaggtggcgttcgaggtgcactggtacagcttctccaacggtcccgagtggagctcgggcaacgccaaccaggcgtgcgcgcgcatcacggccggcatcacccgccgcgcgttctacctgctcgacaggggctggcccgtcatcctcagcgagttcggggtcgacaaccgcggcgtcaacaccaacgacaaccgctactacggctgcgccgccgccgccgcggccgacctggacctggactgggcgctctgggcgctgcaggggagctactacctccgcgagggcgtcctggggctcgacgaggtctacggcgtcctcgactgggcctggtgcaggccgcgcaacgacaccgcgctgcgcagggtccaggccctccagcgcccgctcagggggcccggcctcgcggaggcggcgccgtacaccgtgctgttccacccggtgtccgggatgtgcgtggtgcgccggtcgccgacgccgtcgctgacgcagccctttcagctgagcctgggcccctgcaacgagacggaggcgtgggagtacagcgcgcagcagcagcgactggcgctgcgggacgctgcgctgctgtgcctccgcgccgagggcgccggcaggcccgcgagcctcgccgtgagctgcggcgacgccatggcaaggtggggcttcgtgtctgactccaagctgcacgtcgccgtcaacgccacgtcgtcggccgggagcgtcggcgacggcttgctctgcctggacgtgggcgcggacggccggagcgtcgtgaccaacccgtgccgctgcctgagcgcggacaacagctgcgacccgcagggacagtggttcaagctcgtgagcagcacgaggagcgtggtcaccaagcagaccatgctcgcgcagctgccgctcaagctcaaagactggaagatcaggtcgttttgagcgtttccccggtagaatatagtgcgtcagctaggctcaacacgtacgtaagctgtagcacgtgacgtcgtgtggaacggcgggaatagaggagcactgacctagaacttgaacaatgttctcgaggagactgatcagcattcagcagcatgtccatacctttctctgcgagactttctaaaagaatataattcttaaatacatgtataagatatgctgtaaaatttggggaaatgataataaaaaatatattatgtagaattataaaagaatgtgatatcataatgcgaatgtcttgtggtggataaactaaaaataataattacatttagtgagagataatgtggcaccagaggataatgtgacaccgggtttgacttgtggtccgtagagtggaaatgaatatggtttgtttttttgttataagagatgtagattacttccttcatctccgaataaatcaatttatggagagatatattacttccttcgtatccaaataaactaatttatagagttgt

SEQ ID NO: 106977 - DNA, 968 bp, Zea Mays
cacatcagcagcggagcagatcgagccatggcgcttctctcgctcctcgccttcctgctggcaacggctgcagcccccgccgcagtcgccgccgtgggcaacgcaacatacgacggtagcaagacggacgcgtccccggcggtcctatgcaacggcgaggggtgtgagccaccggcgcagccgctgccgatctacgggtacccgtcaccggcggcaccgtcgctgccttccgcaccgccggcgccgccatcggccccggggtcacagacgccgtgcccgccggtgaccgtcgtctgctgcggcggtgccggggggcagctgccacagcaaccgaaccgcgagcctcctggcgccggtggctacgtgccctattacaacacctcagctgcctcgcctcctgcgctgctgctcgctcccgttactggtggttactacgtgatggctatggcttgcatctttttactgtggactctggtgtagttactctggcatctaaaacggtatagattctatcttgggttaatatataaaactcctgatgaaggagatgtatactcgacgtatatttggggttccagggtaaataatgtcttatatgtaaatggactttgttggcgtctccattatcctctgataatgcaataaggtggaccaagctgcgtgtcctcttgattgtgaaactgtaacacccacttggtaatttgctagaaataataccaatagggaaacaatttctcttcatgtgagtttgatctttatgcatcatcttatgtgaacatcatgcccaaaaacaattaataaaaaaatatatatactaccaaattatgcatcatgctcgattttcttgtgtgtgcattacttgtgacaatgtaaaaatattataaaaatgaatatgttaaatccaaagtggaatttaaaactgtgaagaaatgtggggggaggaaaaggagtacaaaaataaaataaaa

SEQ ID NO: 106978 - DNA, 1005 bp, Zea Mays
tcggcctttccactttccagcccccagttacgaacaaccccctcatgaagtcatggtcatggcgaagagcgaaggcccgtccgccgccgcggggctccgcccacggcagcggggcgccttccttctgggggagccaacctgggaggacaccggcagcgggcggtggcggtgcgcggagacggggcacgagctgccggagcgggagaaggaggcctacgcgcggtcccgcgcctgccgcctcgcgctcattgaccacgccgtcgcgcacaagaagccgccgctcaacgccttcaagccccaccccgagcacaaaaaaacaagaggaccagatgacttctggtgagatggctgatggacaatctgtgaagtcaaatgaagaagtggcaaagaagagcaagccaagcaagaagtacaagaagaaaactaatgtttccagtccattgccaggagaacctaaaccagagatggatggttcagatgatcgcaatttctgggtgcctcctgtcgagggtcgctgggatgatgatgacgggaaaaaaagatgggagttgtcaccgggaaagcacacattagcaaagaatgaaggtggttctgatgctgctgctggtggtggtgataacgacggtggtgatgaaaatgttacggctgagaaggatgacgctgaatcaagggaacttgcctcaatgacaaagcaaatttcttcctggctgcagctaaagcaacagattcgggcacccgtgagcgcagcctcctttcaaagttcaacgaaagggcctaaaagtcagcaggtagaatctttagaatgtcagcaacaagttattaccagggccggccctgagattttgggggcccagagcaagacttaaacctgaggccctctcttattacaacacatatatacatcttgtatcacttattagtttaggtgctaagcaattgttacaataccggtaagaaaaaaatttcatcctcgaagataaaaacaatatctcagaaatttcaaaa

SEQ ID NO: 106979 - DNA, 2334 bp, Zea Mays
actgcccaccgcaggccgcaagtcttgcggctcctgcccggcccagcccggccattgctctttcccagttccgaccgcccgagcccgaagccagaccacgccttaaaccccgtcaatccgagatccgacggcccagatctttcgtctctgcctctccccgtctgaccccatcttcccgtccccccgccatgtcgccgccggctgccggcgcggccgccaactccggcgacgggacgcctccgtcgccgcgcgagctctacaccatcccggcatcatccggttggttccggtgggacgggatccacgagacggagcggcgggcgctgccggagttcttcggaggggcaggcggcgctgggttcgggacggcgacgcggaacccgcggatctaccgcgagtaccgcgacttcatcatcgccaaataccgggaggacccggcgcgccgcctcactttcaccgaggtccgcagggcgcttgtcggggacgtcacgctcctccggaagctctttgccttcctcgactcctccggcctcatcaacttctcggcctcctcgtcctcggtccccgcgtcgcggcagcaggaggtgggggtcgtcgtggaggcgcccgtgggtctgcaggtgacgccgcgtcctccagcgtcctacttcgccgaagagaagcgtgtagcggcgggcggggagaaggagaacgaattccggttgccgccgctgacctcctacagtgatgtgttcggggaatgggcacctgggaaggcgcctatatgcggtttttgcggtgaggagtgcaatggtgcggatgttgagacgctgcaggatggttttaaagtatgttcaaaatgttccaaaagcaataatgataatatcaaggaagaggcgaataaatgtcctggtgacaaaaaagagaatatggaaaatcatgcttccagtgcatggacagacactgagacgttactccttttagaaggagtcctaaaacatggagatgattgggatcttatcgctcagcatgtccgcacaaagaataaatcagaatgcatagcaatgcttattcaattaccttttggcgaacatatgctgggcacaataaatggtaaattcgttagcaggctccacataaaccagacagatgatggaaaaacgaaccagcacattatggagtcttcaagtcactcaaccgaaatggctgatggcatgcagattgatggaagtgaagatagtgctgataaatcagttgaagaatatcctacaaaacgcagacgattgtttttttcaatggatgctaccacttcattgatggagcagttagctatcctgaccacagcagctagcccagatgttgctgctgctgctgctgatgccgcaattaaagcatttggcaatgaaaacccgcaagcaaggaaagcctttcgcctcaacgagcaagaatataagactaaggcttttgcttctaatcatgtccaacagattgaccacaaagttagcaataaggatacggcgatgcatggccagagtggttctgataagcaggaaaagaagttcattgctagcgcatatcaattgagggcagctgttgctactgctgttggtgtagctgctgcccgtgctaaaatgcttgcagaccaggaggagcgagaaatggagctcctaatggcgtctgtaattgaaactcagctaagaaagatgcaatacaagatcaaacactttgaggagctagattcactcatggatcaagagtacaccgctatacagcaaatgaagggatccctcatgaatgaatggataaaggtccttgagcatgcattccgggctggagtgtctctaccgagagatgaattgctcaccaaactgttgctgaactagccgcccatcccatgaggacctggctgtagtcgagtagttctctgatatgcgtcacccccttgactgttgctggtagatagcttcctgcgtgggtgcgtctgtaaaggtgccgattgtgctttcgatttctcagaattttggggatcagaacaacccttcgtaactctttgccctgttgtaccaaactaggttagatggcaaaattgctgaaattttcttgtagctgttgacatgtatggtttcgttcgtatggatgtgaaaatggtacctcagttttggagtttcaaatcactggtttagaacatcaaatcgtccagagcattcaatctagattcgatggtgtttactcttatctacatttcatagataaaatagataaaggatgatgtggaaggcagagaaaatagatagagggtgatgtagaagattagaaataaaaaatggtactccctccgtttctttttatttgtcg

SEQ ID NO: 106980 - DNA, 1160 bp, Zea Mays
cacccacgcgcggatttatatggcgaccgcgcgcgcaagttcacctcgtcacacaccacaggctgtgtagagcgcgcgcctggcatgacgatggctcgtcctggggcggctttgccgctgctgctggtcgtggtcggcgcttgctgcgcgcgcctggcggcggcagtgcacctctccgcgctcggcaggacactcatcgtcgaggcgtcgccgaaggccggacaagtcctgcacgccggcgaggacacgataaccgtgacatggcacctcaacgcgtcggcgtccagcgtcgggtacaaggcgctggaggtgaccctctgctacgcgccggcgagccaggaggaccgcgggtggcgcaaggccaacgacgacttgagcaaggacaaggcgtgccagttcaggatcgcccggcatgcatacgccggcggccaggggacgctccggtacagggtcgcccgcgacgtccccaccgcgtcctaccacgtgcgcgcctacgcgctggacgcgtccggggcgccggtgggctacggccagaccgcgcccgcctactacttccacgtcgcgggcgtctcgggcgtccacgcgtccctccgggtcgccgccgccgtgctctccgcgttctccatcgccgcgctcgccttctttgtcgtcgtcgagaagaggaggaaggacgagtaggccgtaagcggcacacgcgatatataccagggaggcgccaccgtgcgagctagcgcttggtgagccgtcatgttgtgtagtgcagttgtaacacaagtattaagctaagcacaagtcgtaccatgtatccagctccagcatgaatccaaacccagcgtcagtcacaagctggacctgcatggtgcctgtcaaccaaaattcttcttggatcatactaatactatcgtctacagcatatagaacttgtatcatactaatttacatggcaccttctgcttcatgaacagtgactgctagagctaagccttccttctttcatggcccgatattattacatgcatgtatgtagtagccattgtggaaccactaaatcaaaaatagagaaccgccccttgctctacatgtgggtaacttatcagccaccagccaatctcccacatataaacccgtgataaagcattcccgcagtctgaaactaatac

SEQ ID NO: 106981 - DNA, 2300 bp, Zea Mays
aaacaaacgctggcacaaacgaatcggccgagcaaactgcacaaacgagtactgaactctccgctctcgtctcggtccttgtccgtgatgaagctcatgaggctcggcacgcggccggactccttcttcacttccgggcccgtcaggtccgtctacacggaggtggccaccgacctgcaaatccaggtggatcactgcttgtttcgactccacaagttccctctgctctccaaatgcctgctgctacaggctctgtgcgcgggctccgacgccgccgagctgccgggcttcccgggcggcgcagaggcgttcgaggcctgcgccaagttctgctacggcgtggccatcacggtcggcgcgcacaacgtcgtgcccctgcgctgcgcggcggcgcgcctcggcatgacggaggccgccgaccgcggcaacctcgccgccaagctcgacgcgttcctcgcctcctgcctcctccgccggtggaaggacgcgctcgccgtgctccgctccgccgccggccgccacgccgccgagtgcgaggagctcggcgtcacgtcccggtgcgtcgaggccgtcgcgacgctcgtcgtctcggaccccggcggcggcgacgccgccgccgcgccgtccagctccgcgtcgccgtggtgggcgcgcgacgtctccgacctcggcgtagacctcttctggcgcgtcatggtggccgtcaaggcggccggcaccgtcaaggggagagccgtcggcgacgcgctcaagacctacgcgcgccggtggctgccggccgttgccaagagcgggtacctggtgctggagcaaaccgacatcagcacagccgagtggaacagccggcttcttgtcgaaaagatggtgagcttgctccccgccgagaggaacgccgtctcctgcagcttctttctcaagcttctcaaggcagccagcgtcctgggcgcctctcccgcgtccaaggcagagctcacgaggagggtggcgctgcagctggaagacgccagcgtgagcgacctcctgataccgtcgtcgtgcgcgggcgagacgctgtacgacgtggacgccgtgacggccatccttgaagagctggcgctgcggcaagcggcggcggcgggggtcccggaggcaagcccgccgcacgcgcgcggacacaggcggtcgcggtccgccgagagctcggagtacgagggagcgcgtcggtccgcgtccgccccggcgtcgcacggcgcgatggtcaggatcgggaggctggtcgatggattcctgatggaggtcgccaaggatcccaacctgcccctggacaagctgatcgccattgccgaggcagtgccggactgcgcccgcccggagcacgaccatctgtaccgagccgtcgacacttacctcagagtgcacccggagatagacaagggttcgaggaagaagctgtgcagggttctcaactgcaggaagctctccgagacggcgtctatgcacgccgcccggaacgagctgctgccgctccgggtggtcgtgcaggtgctcttcttcgagaacgcacgcgcggcggcgctgtccgtccgcggggctaacggccgcgccgccgccggtggcgtcaaggcgctgcttgccaagacaaggagggaggagacagacggcgaggagaaaaggctccggggcctcgccgtcgccggcgcgcctggcgacgacggcaacgactggagcgtggaggggctgaagcgcgcggcgtcgagggtgtcgaccctgaggatgaggctggaggaggacgcggacgacgaggcgttcgtgcacagggcgcgcgcgggggcggggctggtccggagcgcgtccgcccgcgtcagggcgctctgcgcgatcccggccgggaagcccaggcggatgctgagcaggctgtggccgtcgagctccagcagcgccgtcactgagaggcgttgaattgaaagacctgcacgagagcaatgcggaatgcggtggcagattgatcgatccaggcacaccattctggtcgcgaaggctgtgcatgtgtaaaaaaaaaggaaaagagaacgctgtgttggcagtgttgccatgtttacgtttgattccaaaattcactgaaaggagtttggatatatatagagagagagagtagtaaaatcaaccaaaaagttgtaaaatctttcgaaagttcacgctcggcggcatcagtagagctgcaaaacatccttggacggcggcgacgggtggtcaagcggttctctccgtggaagacgtgagccggaaggaggggctttactgtgccagcaataagggccaac

SEQ ID NO: 106982 - DNA, 264 bp, Zea Mays
atgagcagcgatagcgtcggcagcctcgcgctcgcgctcccatacgagggccgcttcccgcaagcgggcctgtcgcgccgcgtgctccgcacggtcagcagtgagagcggcgacggtgtatccctggtgggtgatcggtggaggaggtggctgatcgacgaccggaggcggatcaacgaccagcgacgggggaattggtgggggagggtcctccggaccggcaaccctcgcgggaactgcatccgccacagccgcaagggctga

SEQ ID NO: 106983 - DNA, 2618 bp, Zea Mays
atgcggctctacgtgtacgtgctcgaggcgcgcgggctaccggcgccgcgtcagcgccgcggcggcgtcgtgctgttctacgcgaaggtgacggtggggaagcagcggttccggacgcgggcggtggaggcgtcggatctgggcggcgcggcagtggcggcggcgtggaacgaggagttcgtgttcgcggtggggtcggacggagctgctgggggcgaggagctcgaggtcgccgtggcgcggcggggagcgagagggagggaggtggtgggcacggtcaggctgcccgtgccggccgccaccgctgctgctggtgccccgggggagaggcggtccgtgccgccgacgtggttcacgctgcagctgcagcgacggcggaagggcgttgtcggcgtcgacggtggcgacgaagccgcggcggattgcgggaaaattctcctcagcttttcactctacggagaaaacaacgtcaactctgtcgtccacaccgatgccgaagtggagagatcacttgacatggaacattcaagttgtaacaatggtggggtggttgattctcccaggagccatgacacagataactctgagcatttcacacaagaagattgcaattcaattactgaagttgatgacctagcggagactagcactacggcaacagcaaacggtgcgagtgacaccgaacgtatggtcccagatgctgctgctagcttcttcgaagaagctatggagatcatgaaatctagaagaagcacaccagaattgccacaagatctcgacggcggcatcatatttgagcacgcttatcttgtggggtcgaaagagctgaaccatcttctgttcagacctgactctcagttcttcaaagacgtgcgcgagcttcaaggtaccatggactacgaggagcagccgtggacatggaagagcgcggatcctcctagcttaactaggacatgccgatacaccacaggcgcatctaataagtttatgaaagccgtcaagaccagtgaggagcagacgtaccttagagcagacggcaagagttttgtggtcacggctcgtgtccgtactcccgaagtgcccttcgggaactgtttcgcagtcgtcctgctctacaagatagtccacaggaccggcgaagaaggcgcgcatctgactgtatcatacaacgtagacttccttcagagcaccatgatgagaagcgtgatcgaggggagtgttcgagacgggctgagagaaaatttccagggtttcgctcaagtattgtctaggcatgttgttgaagtggccggttctgtcgggatgagcaaagagcagttgctggcgccattgcaggtagaacaccgccagtcagatatcaggctcgcttacaggtacttttgcaatttcactgccgtttcgacggtgctgtttgcactgtatgttcttgtgcacatctttctgtcaggaccagcaggccttgagttcagtggtctagatctacctgactcattcggagagctgatcacagctggcgtactagtcctccaattgcagcgcttactgaatatggtgacccattttgtagaggcaaggttacagagaggaagtgatcatggggttaaagcaaatggtgacggttggctgttaactgttgccctgctagaggccacaagcttgccacctggatcggttgacccttatgttgtgctcagctgtaatggcataacaagaacaagttctgtccagcttcagactctggaacctcaatggaacgagataatggagtttggcgccatggaagaagcacctgccgtgctggacgttgaagttttcaatttcgttggtccattcggtgtggcgatttccattggacacgctgaaattaacttcctgaaacacacatcagtagagctggcagacatatgggtgccgttgcaaggaaaactcgcgcagacatgtaagagccggttacatctgagagtatttctagagaacacgaaaggaccggagacaacaatgagagaatacatgagtaagatggagaaggaggttggtaaaaagttgcatgtgcggtcgcctcacaggaattctacattccagaagctctttaatctgccacaggaagaattccttatagcggattacgcatgctctttgagaagaaagctgcctttgcaggggaggctgtttgtgtccgccagaatagttggcttctacgctaatctgtttggacacaaaacgaaattcttctttctatgggaagacgtggaggagatccaagtgctacagccatctttcacaacggtaggcaccccgtctctgctgttcattctgaagagtggccggggactcgacgcgaagagtggtgcaaagtcccaagacaaggaagggaggctcaagtttcagttccactcctttgcatcgttcagcaaggctagcaggacaataattggtctgtggaaatcgaaatcgtcggccgttgaacagagggaagagcatcatgaagaagatgcgagctcacttgatcttgattgacgatgttcaagcggtgttgagcattattaatggagatgtacctctctcggaaggagtatactttggaacacccgattggtgctgatctgctcatgggtata

SEQ ID NO: 106984 - DNA, 2950 bp, Zea Mays
ccatgtgctgatgcaatggacacccttcatagcgacccttattccaggagcagcttgcaactgcaaattagggatggctccatgtcctttgagaacaacagtgcagttttggataaacatgaggttgtcagccctcgagttggcatgacctttgagacggttgatctggcatatcaattctacttagagtatggctatcgtgcaggctttggggtctcaaagagaacttcccacagtgttgatggggttaaataccgtgctacatttgtttgttacaaaggtggcatagctaggattaagcctggcctcaaagctcgaaggaggcttgttgcaaagactggttgcaaagcaatgatggtagtgaagtttaatgccagtgagaaccattgggaagtggtttttgtcgagttggaacataaccacccatgcaatcctgagatggtcagattcatgatgtgctttaaagaccttcctgactggcaaagggagcaccgcccattcaatgccaaaactcgattgaacccgaagattcactctggtagaggcaggccacccaaccaaaacaaagatttcatggtgagatccttctcccagtcaaattattccatcgatggggcagggaagactggaaagttaaggtttgcagagggtgacgttgaagcactcttagttttttttgataagatgcaagctcaaaactccaacttcttctataactgggacatggacgatgaaggtcgtctcaagaacgtttgctgggttgatgctagatccagagttgcatatcaacacttctgtgatgttatttgctttgatactgtctatttgacatatcagtttgtcattccattggtcgcatttttgggaatcaaccatcatgggcagtttgtgttgttaggatgtggtctacttggagacgagtctccagagacctttgcgtggttattcaaaaaatggctaaaatgtatgaatgataaatcacctgaagcaattgttacgactcattcaaggccagtagtcaaagcagtcagtgaagtatttccaaatactcggcacagatacaacctttggcatataatgaaagaacttcctgaaatgtctggaagagttgaggataaagaagcagtcagtctgagaatgaaaaaagtagtctatgatacaattacatcagctgattttgagagggagtgggctgaaatgatcaaccaatataatctccatgataaccagtggcttacaaccttgtttgaagagagggcaaaatgggtaccagcatatgtaaaggatactttttgggctggtatctccactgttcgccgtagtgaacgattggaggccttttttgatggatatattacaccagaaaccacaataaagacgttcattgaacaattcgatactgctatgaagctcaggtctgatcgagaagcctatgatgatttccgttcatttcaacaaaggccacaagtcctgtctggtcttctgtttgaggagcaatttgcaaatgtttatacaataaatatgttccagaaattccaggatcagttgaagcagctgatgaatgtgaattgcactgaagtcagtaggaatggttcaatagtgacatacacggtgacagtaattggaaaggagaggaagtttgactacagagtgatgtataacagtgctgagaaagaagtgtggtgcatctgcaggtcattccagtttaaaggtattttatgtagccatgctcttgctgtcttgaagcaagagcttgtgatgctaatacctcccaaatatattcttgatcgatggcgaaaggactacaaatgccctgaggaacctaaggaaacccccatttcacagaaagctgctaaagatacagggaagggctcaaaaccagaaaacattcgggaagatcaagtggacaatctctacaagcatggacaccagtactttgctgacattgtggaaatgggagctactgaccctgatgcgatggaatacgtcctttctgtgatgaaagaagctaaagagaaagtgcgcaagtttgaggagtctcgaaaagagaagaggcctggagagggtccagtttctgctggtaaaaaaggggcgaagttttcgaagccatccacacaagaagttggcaatacaacatcagtttcgactccgactgaagcagtggcttcggtcacagtggtgtcatctcctccaatggcggcagccccaacaatgatggctatggcgccaccttcagcagctgtggccggaggaatgtttttagtaccaatgcacccgcatcccttggtgttcccacccttcccccctgcagtcccaccagcggtagctcctgtagcaccacctgctgcaccagcaaccaatgttgtctccaacacctcaaagaagcgaaagaaaagaaaggggaataattgatcttctgatgctgatgaaatgatgaatctaaaacaagatcagatcggcgaagtagaaaatgagtttgatctcacactacgcatcaggcctcgacatgagagtgagctatcgatttatctcttctgcgcgggttggtctttcgagaaaaatctcttctgcgcgggttggtctttcgagaaaaatctcttctgctggctgtgctactgctacctatgagactacctactgcagtctgcatattcctggggtgttggcttcactgcttcagctagatgctctgctgtggctgacgcagttcagtctaaggagagatgcattttgggctcagcacactgatcttgattactgtagattactagattagattgcctgtagtgtacattatcgtcctcagtgccggaagtaatctaacatgtagtccagcttatgaatgtaaagatctgtttctgattatggattgcatttatggggaaggatctggatcttattaagaaattctgatttacaagcatttgccgtcatttgagtttattggact

SEQ ID NO: 106985 - DNA, 80 bp, Zea Mays
atcaagccctgccctctacttgtgataacttatctatcaagtgtctgtgtcactacaaatgaaatttcactcataattat

SEQ ID NO: 106986 - DNA, 102 bp, Zea Mays
atcaagccctgccctctacttgcgataacttatctatcaagtgtctgtgtcactacaaatgaaaataccgtgctacatttgtttgttacaaaggcggcatag

SEQ ID NO: 106987 - DNA, 1226 bp, Zea Mays
gtatttatttccatgcgcctgcgaatgaataatcatcagcaacaacttcaggcttggagaaagaagaaaggcatagcagcgggcagcggcatgggcaccagccccgtcatccctgcgacgatgctcttcgtcgctcttcttgtcgctgtctgcttcggcgccaccgccgccaggtccagccacgcccgccacaccgacgccgacgacgcgattcgtctccccagcagctttggcgctggtggtcgaccgtggaattgctgcgactccgctatcaaggacgcctccctgccggcgtggcgctgcaacgacgtggtggacaagtgctccgccgactgccaggactgcgaggcgtcgccggccggcgacggcttcgtctgcggtgactttatcttaagcctgaccgagcccccggtctgcacaccgaggccgtgggactgctgcgacagcgtggcctgcacaagggactacatccccaactgcatgtgcctggacaaggtggagtcgtgctcgagcaactgcgaacggtgcgagtttctgtatcattcggaccctcctcgcttccaatgccgagacatcttccacggctatcctggtcccaagtgcaggacatggatcagtacgagcaactagctcagctcagctacttgctaaaagtagcgtagcgcagcgcgcgcggctacttgctagtatacgtacgtccacaaataaaaataaaagtggctagcgtacaaagctaacatctggttgttcgtcccgacatggacgattagcctagctcgatcgctagctgctgccactctcgttcgatttaatttcatccccatgtgtggcggtgtagggagtgtggatatgatcatccaataaagtagtctactgaaaatgaatagtcgttgatcatattaatatacatccatctcattttgttcactatgttattcgaaaataatactccctccatttcattttagttgtcgttggatagtgcaaattgaactatccagcgacaactaaaaaaacggagggagtaattttttcgttgttccaggatcagctcagcgttgagggtgtttattactagttcggaaccgactatagagccaattagtgcacgtaaaacctgaaactgctgcacggtactctaaatataagatacaattaaaatacaatataatatagtggatgtgtgtaatatccaatttgtaaacaataagaaaagagttgatctc

SEQ ID NO: 106988 - DNA, 935 bp, Zea Mays
ggcccgattcccagctgcgagctggactgaccaggaaccacacatgcaaccaaaccactcgcttggagaaagaagaaaggcatagcagcgggcagcggcatgggcaccagccccgtcatccctgcgacgatgctcttcgtcgctcttcttgtcgctgtctgcttcggcgccaccgccgccaggtccagccacgcccgccacaccgacgccgacgacgcgattcgtctccccagcagctttggcgctggtggtcgaccgtggaattgctgcgactccgctatcaaggacgcctccctgccggcgtggcgctgcaacgacgtggtggacaagtgctccgccgactgccaggactgcgaggcgtcgccggccggcgacggcttcgtctgcggtgactttatcttaagcctgaccgagcccccggtctgcacaccgaggccgtgggactgctgcgacagcgtggcctgcacaagggactacatccccaactgcatgtgcctggacaaggtggagtcgtgctcgagcaactgcgaacggtgcgagtttctgtatcattcggaccctcctcgcttccaatgccgagacatcttccacggctatcctggtcccaagtgcaggacatggatcagtacgagcaactagctcagctcagctacttgctaaaagtagcgtagcgcagcgcgcgcggctacttgctagtatacgtacgtccacaaataaaaataaaagtggctagcgtacaaagctaacatctggttgttcgtcccgacatggacgattagcctagctcgatcgctagctgctgccactctcgttcgatttaatttcatccccatgtgtggcggtgtagggagtgtggatatgatcatccaataaagtagtctactgaaaatgaatagtcgttgatcatattaatatacatccatctcattttgttc

SEQ ID NO: 106989 - DNA, 749 bp, Zea Mays
tttggaaattcctagatggcaaatcggaagtgaaggccgccaagggggaagagaagcctgtccttgtgggcgacaaggaggcgtccggttccgactagaaggcagtggccgcggcaaacatgccgtgcatggatcggctccgggaggagctctcttgcgcgatttgcctggacatctgctttgagccgaccactacgccttgtggacacagcttctgcatgagatgcttaagacatgctgcagccaagtgtgggaaacggtgtcccaaatgcaggcagttcatcagcagctcgaaatcgtgcaccgtcaacactgtgctctggaacaccattcagctcttatttcccagtgagtttgaggcaagaaagggtttgggctcatcaccttcaccatgcgacaaggacgatgtgagagctaataggttctcacaaggtggctccggtatgagaactaggagcaggagcagcggcagcggcttcatcagcagcgagggtaggacaagaagcagcttcatcgaacccggcgccagtgcgaacttcatcgtcagcacacatggcagcacaagaaacagtaacaacaggaggggcttcatccctgcctcgcagctgctgttgacaagattagagcaatctgaagatgccgcagcgttggcgtacatgttgcaacaggaggagttcgtgaatgcctttgaggagcctgagcaggagaggcagccacgcgacgccgtgtccacagcacgagacaccctg

SEQ ID NO: 106990 - DNA, 1431 bp, Zea Mays
gcggcaaaaccctacgactgcaggactacgcccactgacttcccgcgcgcgcgctcccgctcccgctgccgggccggtttcagccccatcaggcaatcccctctccccctccgccccccagccgaagcagacccaatgtcctgcggtagaggcagcaccggcgaagtcgaaggaggcaaatcggtcgccgcgatgacgccgtggcacgacagcttggcgccgccgcctcgcgtcctcatttcccaccgcccttctgatgccagcggtcaagggattgttctgtcacttcaacatccaagatcaggagatgaagtagggtatctatttattgatggccaactacaagagatcaactggtttaaggagcgttatggtgcttggttcttgggagattatgtttgtgaagatggtggcctttattattgcacccctgttgatcccatcttcattttcctaccaacttttgaagctgcacgtatgtcgaacgataaggatccaggaaaattcagacaattggatgaaatattgtatgttgagggatatcctggttatcagcagctaatgaatgtagctaaccaccatatggaattggtttgtgaagtaaaagaagtatctaacatgaagttctttaggctggacaactccaaggtcttatcttggttgtgctgcaaggtatacgacctaaaggaggtcttccccaagttgggtaaaaattatgccgcccaaacagaaaaagaaaaattgaaggaggctgtccaaatgatccgtgaatatctgaaggacgaaccatggttagcattactatgcaagaagctgcagctggatatcaatgcgatcactgttgatgcgaccaccaaaactgctgaagcttcggtttatgcggacagttgtccggcacctgccctcccctctgagagtaagactgcgaatggtggtgccaagtcaagcaaagggaggccagcgaagaaagcaaagacagaggtaggatccaagaacatcaaagatatgttccgaagggtcacgaggagtggatcaggatcatgatgccttcctggaactttcgtgtgactgacgcctgttttgatgcatttggtccagcattcccttgttgaaaatctatgtatctgagttgctgtgtctaacaacagattgggattatattgtagcgttaattgttgattcaggcagtgaactctgctagtgtacaaccctccctcccgtcccggatgtatttgtaccacagttgcttgtagtgccgttgtctgcagtagtctatccaaagtttattaaaaaacatctgttctacattttagactgcactgttcggagagtataagctgctgaagatgacctaagcggcttgtattgcttgagtcgagaccaaatgggagagcatctctgagaaaattctcttttcctatatctctactg

SEQ ID NO: 106991 - DNA, 1428 bp, Zea Mays
gcggcaaaaccctacgactgcaggactacgcccactgacttcccgcgcgcgcgctcccgctcccgctgccgggccggtttcagccccatcaggcaatcccctctccccctccgccccccagccgaagcagacccaatgtcctgcggtagaggcagcaccggcgaagtcgaaggaggcaaatcggtcgccgcgatgacgccgtggcacgacagcttggcgccgccgcctcgcgtcctcatttcccaccgcccttctgatgccagcggtcaagggattgttctgtcacttcaacatccaagatcaggagatgaagtagggtatctatttattgatggccaactacaagagatcaactggtttaaggagcgttatggtgcttggttcttgggagattatgtttgtgaagatggtggcctttattattgcacccctgttgatcccatcttcattttcctaccaacttttgaagctgcacgtatgtcgaacgataaggatccaggaaaattcagacaattggatgaaatattgtatgttgagggatatcctggttatcagcagctaatgaatgtagctaaccaccatatggaattggtttgtgaagtaaaagtatctaacatgaagttctttaggctggacaactccaaggtcttatcttggttgtgctgcaaggtatacgacctaaaggaggtcttccccaagttgggtaaaaattatgccgcccaaacagaaaaagaaaaattgaaggaggctgtccaaatgatccgtgaatatctgaaggacgaaccatggttagcattactatgcaagaagctgcagctggatatcaatgcgatcactgttgatgcgaccaccaaaactgctgaagcttcggtttatgcggacagttgtccggcacctgccctcccctctgagagtaagactgcgaatggtggtgccaagtcaagcaaagggaggccagcgaagaaagcaaagacagaggtaggatccaagaacatcaaagatatgttccgaagggtcacgaggagtggatcaggatcatgatgccttcctggaactttcgtgtgactgacgcctgttttgatgcatttggtccagcattcccttgttgaaaatctatgtatctgagttgctgtgtctaacaacagattgggattatattgtagcgttaattgttgattcaggcagtgaactctgctagtgtacaaccctccctcccgtcccggatgtatttgtaccacagttgcttgtagtgccgttgtctgcagtagtctatccaaagtttattaaaaaacatctgttctacattttagactgcactgttcggagagtataagctgctgaagatgacctaagcggcttgtattgcttgagtcgagaccaaatgggagagcatctctgagaaaattctcttttcctatatctctactg

SEQ ID NO: 106992 - DNA, 854 bp, Zea Mays
gcggcaaaaccctacgactgcaggactacgcccactgacttcccgcgcgcgcgctcccgctcccgctgccgggccggtttcagccccatcaggcaatcccctctccccctccgccccccagccgaagcagacccaatgtcctgcggtagaggcagcaccggcgaagtcgaaggaggcaaatcggtcgccgcgatgacgccgtggcacgacagcttggcgccgccgcctcgcgtcctcatttcccaccgcccttctgatgccagcggtcaagggattgttctgtcacttcaacatccaagatcaggagatgaagtagggtatctatttattgatggccaactacaagagatcaactggtttaaggagcgttatggtgcttggttcttgggagattatgtttgtgaagatggtggcctttattattgcacccctgttgatcccatcttcattttcctaccaacttttgaagctgcacgtatgtcgaacgataaggatccaggaaaattcagacaattggatgaaatattgtatgttgagggatatcctggttatcagcagctaatgaatgtagctaaccaccatatggaattggtttgtgaagtaaaagaagtatctaacatgaagttctttaggctggacaactccaaggtcttatcttggttgtgctgcaaggtatacgacctaaaggaggtcttccccaagttgggtaaaaattatgccgcccaaacagaaaaagaaaaatgtatgtcctagataatcttcattttattcagtatatagtacttgggtagtttactatggccggtgttaatctccatttattcagtatatagtacttgggtagtttaatatgg

SEQ ID NO: 106993 - DNA, 2695 bp, Zea Mays
gagtgtctgtcacctaccctaccctgctcgacaaggcaatctgaaaatgctctccgcaatctccacctccgcaatctccacctccctactagtagtactcttcggtgcagtccgcatccccacatctgaccgactctcaaagttcacagctccaatcctggtgcaagcgcacagtagcggagcaagatgcggggaggagaccggccatcggcgtcgctccagctcctctcgctgggcctcgtgctcctctacttcttcacctcaggcagcaccgttggtctcgtggagggacaggtacggcctttggctcttgacgctctatctatctataagacgtggtgcatcgcgaagccgtcggcgtcgaacgagatcctggcgcagaacctggactacgcgtgctcccaggtgagctgcgccgtgatccagaagggcgggccgtgctactacccggacagccccgtgtcccgcgccgccgtcgccatgaacctctactacgcctacagcggcaggcacccctggaactgctacttcaacaactccgcgctcgtcgtgcagtccgacccaagctatggctcctgcacatactactgaggaggagtgtgaggaggagtggagagacgaggagaggagagagatccattcgtgcctggcggtggcggctccactgcatctgtatgcagagtcttggttttctagtctcgactgccaatttaccaaatgcacattgttgtgttgtgttgtgttgtgtagccgtgctgcagctgacatttcgcagcgaactcgtggatactccgtttcgcattcatgtgctttgaagtacattgcagcggcgctgcacaaatttccccccttgtttttctcgccacttgcgttcaaacgttggaatcgatggatctgatctgcctgcgtgtgatttgttcattccagcggccgtagaaacaaaacaacacaaacgatctacgatccactctcattctcgtctcgtactcgttcaccgtgacctacctaaacgcgtcgccgccagaaaaactaaaagcaacccccaacccacgcggcgcggcgccgcccgacaccaccgctccggtccccggcgacggcacgatgcggcggcagcctttctcgcggcacgccggcttcttctcctgcctccagcgggtggaagaccggctggcgtcggagtcggagcagcaacatcaggagcagaaggagagcccgccgccgccagctacagcaaaggcaacggcaacgacgcgccaaaccgaggcgtcgccattctcggacaccatgaccgcctccccactcctcttcctcgacccagcagcacccgcaccagcgcccggcagcagcagcggcccggcgctggacttcctcaccgccgccacccaggagggcaagcacatccaacaggaagacgacgacaacgatggcggcggcgacggcgatgaggaggacatcgcgcggctcatggagctgctcggcctgtcatccggcggcggtggcagcagccgccgcgacgacgacggaggcgggtgcgactgcagcggcgccgacgggttcctggccaaggtcgtgggcgtggtcggccccaagtgcgacagggagaaggggaggctggacgcctggatccgccattaccaccgtgggggaggcagggagcccgcgaggctggcgcacctgctgctcgccagggctgccgccgacacggcagccgttgcgttcccggccagcgtgaaggacttcttggaccacgatccgccacggcagttgacggacgagtcggagtggagtgatgcaaacggagacaataatagagattgacagacatgttttctggaactgattgaaaaggcaggcaataatagagattgacagacatgttactgttcgcatttttgtgcacaaaggtggagacattcaaataataggtcggcgaaatgtaactgaacgcacgaacagggaggcaaaatatatgcaatgtggtgttaagcaagtccaaacagtactttattagaacgcgagcaatgtaaacagtacttcacatcccgctgatcgataattatagcaaacagaacggtattaccaagcaacaaacaaaaggacatcgagcagttttcctttttactcgcggaatacgataaaaaaatagtagggagagcagccgcgcgcggatcctttttcctcggcagaacagcaaagctcacagcttcgatatgaggctattctggatggccttgggcgactcggcttccttgacatccgcatcggacgagctgggaggcacgtcgaccgcaggcgagcagttgaagaatccatgtggctgcagggcagaaacatcattagccattagaaacgaccaaagttaggctaaccatctctttgcgaagaagcaacaaagggtcccgatggttcactgcctatgacaggatatactgaaaaaaaaaaagtaaagctgataccatgagcatgaagcctatgtgctccaccggcatgactggccaatcttctagcctggggatatgggtgagcccgaacacgtacctgcagatgcagaacaaggttttatcagtttttgtaagatgtaatctgaacagcagttccaaattcttcataacagcaaatggtctgttatgaagtaccagagaacaatgtcggtttcctccagaggcctatcattcttgacccatgttggcagacc

SEQ ID NO: 106994 - DNA, 2725 bp, Zea Mays
aattcacgctgtcacatgcgtgtaacgtgcacgcgcatgcatcccagcaagcaatctgtgtggtgtgagtgtctgtcacctaccctaccctgctcgacaaggcaatctgaaaatgctctccgcaatctccacctccgcaatctccacctccctactagtagtactcttcggtgcagtccgcatccccacatctgaccgactctcaaagttcacagctccaatcctggtgcaagcgcacagtagcggagcaagatgcggggaggagaccggccatcggcgtcgctccagctcctctcgctgggcctcgtgctcctctacttcttcacctcaggcagcaccgttggtctcgtggagggacagaagacgtggtgcatcgcgaagccgtcggcgtcgaacgagatcctggcgcagaacctggactacgcgtgctcccaggtgagctgcgccgtgatccagaagggcgggccgtgctactacccggacagccccgtgtcccgcgccgccgtcgccatgaacctctactacgcctacagcggcaggcacccctggaactgctacttcaacaactccgcgctcgtcgtgcagtccgacccaagctatggctcctgcacatactactgaggaggagtgtgaggaggagtggagagacgaggagaggagagagatccattcgtgcctggcggtggcggctccactgcatctgtatgcagagtcttggttttctagtctcgactgccaatttaccaaatgcacattgttgtgttgtgttgtgttgtgtagccgtgctgcagctgacatttcgcagcgaactcgtggatactccgtttcgcattcatgtgctttgaagtacattgcagcggcgctgcacaaatttccccccttgtttttctcgccacttgcgttcaaacgttggaatcgatggatctgatctgcctgcgtgtgatttgttcattccagcggccgtagaaacaaaacaacacaaacgatctacgatccactctcattctcgtctcgtactcgttcaccgtgacctacctaaacgcgtcgccgccagaaaaactaaaagcaacccccaacccacgcggcgcggcgccgcccgacaccaccgctccggtccccggcgacggcacgatgcggcggcagcctttctcgcggcacgccggcttcttctcctgcctccagcgggtggaagaccggctggcgtcggagtcggagcagcaacatcaggagcagaaggagagcccgccgccgccagctacagcaaaggcaacggcaacgacgcgccaaaccgaggcgtcgccattctcggacaccatgaccgcctccccactcctcttcctcgacccagcagcacccgcaccagcgcccggcagcagcagcggcccggcgctggacttcctcaccgccgccacccaggagggcaagcacatccaacaggaagacgacgacaacgatggcggcggcgacggcgatgaggaggacatcgcgcggctcatggagctgctcggcctgtcatccggcggcggtggcagcagccgccgcgacgacgacggaggcgggtgcgactgcagcggcgccgacgggttcctggccaaggtcgtgggcgtggtcggccccaagtgcgacagggagaaggggaggctggacgcctggatccgccattaccaccgtgggggaggcagggagcccgcgaggctggcgcacctgctgctcgccagggctgccgccgacacggcagccgttgcgttcccggccagcgtgaaggacttcttggaccacgatccgccacggcagttgacggacgagtcggagtggagtgatgcaaacggagacaataatagagattgacagacatgttttctggaactgattgaaaaggcaggcaataatagagattgacagacatgttactgttcgcatttttgtgcacaaaggtggagacattcaaataataggtcggcgaaatgtaactgaacgcacgaacagggaggcaaaatatatgcaatgtggtgttaagcaagtccaaacagtactttattagaacgcgagcaatgtaaacagtacttcacatcccgctgatcgataattatagcaaacagaacggtattaccaagcaacaaacaaaaggacatcgagcagttttcctttttactcgcggaatacgataaaaaaatagtagggagagcagccgcgcgcggatcctttttcctcggcagaacagcaaagctcacagcttcgatatgaggctattctggatggccttgggcgactcggcttccttgacatccgcatcggacgagctgggaggcacgtcgaccgcaggcgagcagttgaagaatccatgtggctgcagggcagaaacatcattagccattagaaacgaccaaagttaggctaaccatctctttgcgaagaagcaacaaagggtcccgatggttcactgcctatgacaggatatactgaaaaaaaaaaagtaaagctgataccatgagcatgaagcctatgtgctccaccggcatgactggccaatcttctagcctggggatatgggtgagcccgaacacgtacctgcagatgcagaacaaggttttatcagtttttgtaagatgtaatctgaacagcagttccaaattcttcataacagcaaatggtctgttatgaagtaccagagaacaatgtcggtttcctccagaggcctatcattcttgacccatgttggcagacc

SEQ ID NO: 106995 - DNA, 2882 bp, Zea Mays
actagtagtactcttcggtgcagtccgcatccccacatctgaccgactctcaaagttcacagctccaatcctggtgcaagcgcacagtagcggagcaagatgcggggaggagaccggccatcggcgtcgctccagctcctctcgctgggcctcgtgctcctctacttcttcacctcaggtgagctcggctcgactccatctatcattatgagatagatagatagatcattgcgctcaagcagaaccaccacgccgttcgtctgaaaagaatgggccaccatctctctctctctctctcgggtgttttgcaggcagcaccgttggtctcgtggagggacaggtacggcctttggctcttgacgctctatctatctatgtatgtatgcccgccaactcgcaaatgaatgaatacttaagtactgatctggttggacttggttgccaacgacgagctgcagaagacgtggtgcatcgcgaagccgtcggcgtcgaacgagatcctggcgcagaacctggactacgcgtgctcccaggtgagctgcgccgtgatccagaagggcgggccgtgctactacccggacagccccgtgtcccgcgccgccgtcgccatgaacctctactacgcctacagcggcaggcacccctggaactgctacttcaacaactccgcgctcgtcgtgcagtccgacccaagtaagtacccccattcattctctctaataagctctcagatccttcgtccgtccatctgtcttctcatcgaatgccgcttccctctcgtttcgcacaggctatggctcctgcacatactactgaggaggagtgtgaggaggagtggagagacgaggagaggagagagatccattcgtgcctggcggtggcggctccactgcatctgtatgcagagtcttggttttctagtctcgactgccaatttaccaaatgcacattgttgtgttgtgttgtgttgtgtagccgtgctgcagctgacatttcgcagcgaactcgtggatactccgtttcgcattcatgtgctttgaagtacattgcagcggcgctgcacaaatttccccccttgtttttctcgccacttgcgttcaaacgttggaatcgatggatctgatctgcctgcgtgtgatttgttcattccagcggccgtagaaacaaaacaacacaaacgatctacgatccactctcattctcgtctcgtactcgttcaccgtgacctacctaaacgcgtcgccgccagaaaaactaaaagcaacccccaacccacgcggcgcggcgccgcccgacaccaccgctccggtccccggcgacggcacgatgcggcggcagcctttctcgcggcacgccggcttcttctcctgcctccagcgggtgggccccgaaccgttttcccctcctcctcttctcttctctcatcgcagacaaagccgccgccctccctcggccctgacgccggtagctctcttcgtctgcgctcctccaggtggaagaccggctggcgtcggagtcggagcagcaacatcaggagcagaaggagagcccgccgccgccagctacagcaaaggcaacggcaacgacgcgccaaaccgaggcgtcgccattctcggacaccatgaccgcctccccactcctcttcctcgacccagcagcacccgcaccagcgcccggcagcagcagcggcccggcgctggacttcctcaccgccgccacccaggagggcaagcacatccaacaggaagacgacgacaacgatggcggcggcgacggcgatgaggaggacatcgcgcggctcatggagctgctcggcctgtcatccggcggcggtggcagcagccgccgcgacgacgacggaggcgggtgcgactgcagcggcgccgacgggttcctggccaaggtcgtgggcgtggtcggccccaagtgcgacagggagaaggggaggctggacgcctggatccgccattaccaccgtgggggaggcagggagcccgcgaggctggcgcacctgctgctcgccagggctgccgccgacacggcagccgttgcgttcccggccagcgtgaaggacttcttggaccacgatccgccacggcagttgacggacgagtcggagtggagtgatgcaaacggagacaataatagagattgacagacatgttttctggaactgattgaaaaggcaggcaataatagagattgacagacatgttactgttcgcatttttgtgcacaaaggtggagacattcaaataataggtcggcgaaatgtaactgaacgcacgaacagggaggcaaaatatatgcaatgtggtgttaagcaagtccaaacagtactttattagaacgcgagcaatgtaaacagtacttcacatcccgctgatcgataattatagcaaacagaacggtattaccaagcaacaaacaaaaggacatcgagcagttttcctttttactcgcggaatacgataaaaaaatagtagggagagcagccgcgcgcggatcctttttcctcggcagaacagcaaagctcacagcttcgatatgaggctattctggatggccttgggcgactcggcttccttgacatccgcatcggacgagctgggaggcacgtcgaccgcaggcgagcagttgaagaatccatgtggctgcagggcagaaacatcattagccattagaaacgaccaaagttaggctaaccatctctttgcgaagaagcaacaaagggtcccgatggttcactgcctatgacaggatatactgaaaaaaaaaaagtaaagctgataccatgagcatgaagcctatgtgctccaccggcatgactggccaatcttctagcctggggatatgggtgagcccgaacacgtacctgcaga

SEQ ID NO: 106996 - DNA, 2379 bp, Zea Mays
gtctgtcacctaccctaccctgctcgacaaggcaatctgaaaatgctctccgcaatctccacctccgcaatctccacctccctactagtagtactcttcggtgcagtccgcatccccacatctgaccgactctcaaagttcacagctccaatcctggtgcaagcgcacagtagcggagcaagatgcggggaggagaccggccatcggcgtcgctccagctcctctcgctgggcctcgtgctcctctacttcttcacctcagaagacgtggtgcatcgcgaagccgtcggcgtcgaacgagatcctggcgcagaacctggactacgcgtgctcccaggtgagctgcgccgtgatccagaagggcgggccgtgctactacccggacagccccgtgtcccgcgccgccgtcgccatgaacctctactacgcctacagcggcaggcacccctggaactgctacttcaacaactccgcgctcgtcgtgcagtccgacccaagctatggctcctgcacatactactgaggaggagtgtgaggaggagtggagagacgaggagaggagagagatccattcgtgcctggcggtggcggctccactgcatctgtatgcagagtcttggttttctagtctcgactgccaatttaccaaatgcacattgttgtgttgtgttgtgttgtgtagccgtgctgcagctgacatttcgcagcgaactcgtggatactccgtttcgcattcatgtgctttgaagtacattgcagcggcgctgcacaaatttccccccttgtttttctcgccacttgcgttcaaacgttggaatcgatggatctgatctgcctgcgtgtgatttgttcattccagcggccgtagaaacaaaacaacacaaacgatctacgatccactctcattctcgtctcgtactcgttcaccgtgacctacctaaacgcgtcgccgccagaaaaactaaaagcaacccccaacccacgcggcgcggcgccgcccgacaccaccgctccggtccccggcgacggcacgatgcggcggcagcctttctcgcggcacgccggcttcttctcctgcctccagcgggtggaagaccggctggcgtcggagtcggagcagcaacatcaggagcagaaggagagcccgccgccgccagctacagcaaaggcaacggcaacgacgcgccaaaccgaggcgtcgccattctcggacaccatgaccgcctccccactcctcttcctcgacccagcagcacccgcaccagcgcccggcagcagcagcggcccggcgctggacttcctcaccgccgccacccaggagggcaagcacatccaacaggaagacgacgacaacgatggcggcggcgacggcgatgaggaggacatcgcgcggctcatggagctgctcggcctgtcatccggcggcggtggcagcagccgccgcgacgacgacggaggcgggtgcgactgcagcggcgccgacgggttcctggccaaggtcgtgggcgtggtcggccccaagtgcgacagggagaaggggaggctggacgcctggatccgccattaccaccgtgggggaggcagggagcccgcgaggctggcgcacctgctgctcgccagggctgccgccgacacggcagccgttgcgttcccggccagcgtgaaggacttcttggaccacgatccgccacggcagttgacggacgagtcggagtggagtgatgcaaacggagacaataatagagattgacagacatgttttctggaactgattgaaaaggcaggcaataatagagattgacagacatgttactgttcgcatttttgtgcacaaaggtggagacattcaaataataggtcggcgaaatgtaactgaacgcacgaacagggaggcaaaatatatgcaatgtggtgttaagcaagtccaaacagtactttattagaacgcgagcaatgtaaacagtacttcacatcccgctgatcgataattatagcaaacagaacggtattaccaagcaacaaacaaaaggacatcgagcagttttcctttttactcgcggaatacgataaaaaaatagtagggagagcagccgcgcgcggatcctttttcctcggcagaacagcaaagctcacagcttcgatatgaggctattctggatggccttgggcgactcggcttccttgacatccgcatcggacgagctgggaggcacgtcgaccgcaggcgagcagttgaagaatccatgtggctgcagggcagaaacatcattagccattagaaacgaccaaagttaggctaaccatctctttgcgaagaagcaacaaagggtcccgatggttcactgcctatgacaggatatactgaaaaaaaaaaagtaaa

SEQ ID NO: 106997 - DNA, 876 bp, Zea Mays
gagtgtctgtcacctaccctaccctgctcgacaaggcaatctgaaaatgctctccgcaatctccacctccgcaatctccacctccctactagtagtactcttcggtgcagtccgcatccccacatctgaccgactctcaaagttcacagctccaatcctggtgcaagcgcacagtagcggagcaagatgcggggaggagaccggccatcggcgtcgctccagctcctctcgctgggcctcgtgctcctctacttcttcacctcaggcagcaccgttggtctcgtggagggacagaagacgtggtgcatcgcgaagccgtcggcgtcgaacgagatcctggcgcagaacctggactacgcgtgctcccaggtgagctgcgccgtgatccagaagggcgggccgtgctactacccggacagccccgtgtcccgcgccgccgtcgccatgaacctctactacgcctacagcggcaggcacccctggaactgctacttcaacaactccgcgctcgtcgtgcagtccgacccaagtaagtacccccattcattctctctaataagctctcagatccttcgtccgtccatctgtcttctcatcgaatgccgcttccctctcgtttcgcacaggctatggctcctgcacatactactgaggaggagtgtgaggaggagtggagagacgaggagaggagagagatccattcgtgcctggcggtggcggctccactgcatctgtatgcagagtcttggttttctagtctcgactgccaatttaccaaatgcacattgttgtgttgtgttgtgttgtgtagccgtgctgcagctgacatttcgcagcgaactcgtggatactccgtttcgcattcatgtgctttga

SEQ ID NO: 106998 - DNA, 134 bp, Zea Mays
tttatcttttattttttttattaaatctatttagaattttaggctctgacatgaatttcggtcctaatgtgaatttcaggctagaaatcaaatttcatgatttttataatttcgggtctttcaaaataagcttg

SEQ ID NO: 106999 - DNA, 1438 bp, Zea Mays
cgtacgtgcgccggagtaaaggcagctccctgacaaactcgtccgtcctcggtggccgccggctgggcgagttggaaggaggaaatcccgaacgcttgccataaatacgccaatcccgcaggcattgattgcgcgacggacacgctagcccgttaattccgtgccgcccttcgcctctttcaaattccacgccccctccattttcattccaaaccagcacgagcgcggggcgagcagtggctctggaaacgactagaatcaacggagatcagaggcgacactgctcttcccgatgcacgcgtgcttccatggcggcggtggcggcaacagcaggatcaccaagtccgtcggcttcatcgtcaagagcatgaaggccctgtccctcctaaaagtgaagacggcgggcgacggccatccgcacgcgccgcgtcgtcggcggcggcggcatcggaggcgctcccccgaggcagacgagctgcaggacaaggacgtcgcggcggcatcgtcgtccgcgtcctcgtccgccaagatcgcgccggcgcagccgcacgaagccgccgacggtgaccttcggagagaccgcctcccccaggacgaggagctgcggcggcaaggaggagctaaacacgggcactgcgacaagtgctgctcgccgttggaagacgacgacgaggaggccgccgcgggtacggcggacgcggcaggcgacggggagtgggcggcggagccggagcccggcgtgctgatgacgctgtggccgcgcggcgacggctccaactacctccgcaggatccggttcagcgaggagtacttcggcgacgcgtgggcggcgcagacctggtgggcggacaactgcgaccgcatcgtcgagctctacagcgtcgtcgtccagcccgaacacccctcgcaggacggcgacgacgatgacgacgacgacgatccggctgcgcccgtaactccgtgccagtccgaggacgacgagcaccaacggcaggatggggctggggacctggactactcggcgtcgtgctcggcgtcggcgtcgggaggctccacctccaacttctccgggccgtccagcggcagcggcagcgggtctgccaacaaggtggactctccgattctcggcctcgtcaccgaggccgacagcatcacaagaacagcccggccgcagcacagccatacggcaacgggacaataacagtgtgacactcacgaatatacttgctcgcccgtcttacaccattgtttgacagtttttacaatgcttaactttttaggtgagtggttgtttgctgggaatgtacagtatttggctcaaaattcaaaatgtttcagaagctcaatccaatgaaacaggccttgtttttttagtttccagttggttgggtctatatttcatactcctgtttaaaagtcaaacgcttgatgtgacccg

SEQ ID NO: 107000 - DNA, 101 bp, Zea Mays
tgctcggtaaaactgttcaacggttgtgtgtgtgtctaatcgcagctagccgtcaatgccattcgtcgcgcacgcgtgttcgatacaagaccggtcgggtg

SEQ ID NO: 107001 - DNA, 115 bp, Zea Mays
gttatctctagtagcttacatatctatatatctatatttaaattttactatagaaacaacgcagtctaaaataatgttttagtcaaaaatatagataaactctaagaggagaagg

SEQ ID NO: 107002 - DNA, 2961 bp, Zea Mays
ccttgaccctgcatcacatcacatgacctcatctttattctctccatatctcgcaaaccttttccatcacaacccgtacgctgtactcgcattcgcttcaagcttctgcaacgaagcgcatgtactccttcgtgccaccttgcatgcctttccttgccggcgacggggaagccgaccggttaactaacaggcgggcacgttcatcggcggccggcgccgccatcttgccagcctcgccatccatggcgtacgcgtatccgtacgtcttccgtgctcaggcgccaccagtgagtgtggaggatcacaaggcgaaggacgccgcgcctgctccgcaggtcaaggagcagtggccggccggcggcagcagaagcgctagcccacgcggcgcaggaaccgggtggccggacggtcttggctcggggtcaggtgagagccagaggctggcgagcgcctacgacctcgtggagacgatgcactacctgtacgtgcgcgttgtcaaggtgcgcgggctcccggcgagtgccgtgaccggcgggtgccgcccttacgtcgaggtccgcgtcgacaactaccgcggcgccacgcggcattgcgaggggaaggaaagccccgagtggaacctggtgttcgccttctccagggaccgtgtgcaggccacggtgctcgaggtgttcgtcagggacagggacgccctggggcgcgacgactgcgtcggcagagtcgcgttcgacatcgccgaggcgcccgtgcgcgtgccgccggacagcccgctcgcgccgcagtggtaccgcctcgagggtagtgctggtggcagaatggtggccaacggtgaggtcatgcttgccgtctgggtcggcacgcaggccgacgaggcgttcccggacgcgtggcacgccaccgctgcctccgttctcggcggtgacggcggcgcggccgtgcacaacacgcggtccaaggtgtatgttacgcccaagctgtggtacctccgcgtgggcgtgctcgaggctcaggacgtcgtgccgcccggtgcctgcgccactccggacaaaggccggcacgccgaggtcttcgccaaggtgcaagtcggcggcacggtgctcaggactcggccctgcaccacgaggggtccgaccaacctcgcgtggaacgaggagctggtgttcgccgtggctgagccgttcgaagacccggctgtccttatcatcgaggcccgcgtgcaccccggcaaggacgagatcgtcgggcgcgccttgctgccgctcacgatattcgagaagcggttggactgccggccggtccagtcgcagtggtttagcctggagcacttcgggcgtccagctccggccgtcttcgccggccgcgtgcacctccgtgcgtgccttgagggcgcgtatcacgtcatggaggagccaaccatgtacgccagcgacacgcgcccaaccgcgcggcagctgtggcgcccgccgattggcgtgctggaagtcggcgtcctcggcgcgcaggggctaacgccgatgaagactgtcgacggccggggcatgaccgacgcgtactgcgtcgccaagtacgggcagaagtgggtgcgcacgcggaccgtggtggactcttgcagcccccggtggaacgagcagtacacgtgggaggtttacgacccgtgcacggtgctcacgctcgccgtgttcgacaactgtcacctcggcagcgccagcgctggcaacggcgccctcagagaccagcggatcggcaaggtcaggatccgcctctcgacgctagagatggacaagacgcgcactagcgcgcacccgctcgtcgtgctgcacccgtccggtctgcgcaagaacggcgagctctgtctggccgtgcgcctcacctgcctcacgctcggcagcgtcgtgcgcatgtacggccagcctctcctccccaaggcgcactacgtccagccgctcaccgtcgtgcagctcgacagcctacggcggcaggcgatgagcatcgtggcagcgaggctgagccgggccgagccgccgctgcgtcgggaggtcgtggagtacatgctcgacgcggactcgctcgtctggagcatcaggcggagcaaggccaacttcttccgcgttacggcgctcctctcaggcgcggccagcaccgtgcggtggctcgccgacgtttgccgctggaagaacccggcgacgacggtcctggtgcacgtgctcttcgtcaccctcatgtgcttcccggagctcatcctgccgaccatgttcctgtacatgtccacggctggcctctggaactaccgtcgccggccgcgccggccgccgagcatggacgcggggctctcgtgcgccgaggcgacccaccccgacgaactcgacgaggagctggacacgttcccgacgtcgaggcccaacgccgtggtgcggctgcgctacgaccggctgcggagcgtggccgggcggatccagacggtggtcggagacgtggcgacgcagggagagcggatccgatccctgctcacatggagggacccgcgggccacggcactgttcacggcgttctgcctcgtcgccgccgccgtgctctacgtcacaccggtccgggtcgtgtcgctcgtcgtcgggctatacgtgctccgccacccgaggttccggggccggatgccgtcggctgccggcaactttttcaagaggctgccgtcccaggcggacactatgctgtagcctgcagtttcagtgcgacttttgcgagagtattggtgttcagttcaacaatagtagtactggaaaaacttaaggtccaaaactgtttggaagaagactagtttttaagaattcagttttatcttcagtttttagaaactggtttatggtatttggaactgtctcagtttttataaactggttttagctagagaaaactagcttcttagtctttaagtaaactggaatataaattgatatgtttaaaacc

SEQ ID NO: 107003 - DNA, 1862 bp, Zea Mays
ggaagtgaaaacgttcaagtcacccgcctcctcccaaaatcgcctccatctcccctcaaaatcctctgctcctccctccattccaaatcctccgggaaccatttgcgcggctacgattcgctcctgcaactgcagcatagaaagtgacgtcgccgtcgccgcattcgcgccgccctgggctccgtccaactaccgttgcaaacccaggcttgcctgacaccagaagctgctcccctctccgatccagcggcgccctgttcgactgcggcggcggcggctaccatcccgatccggtggcgccccggccttgctcgattcctacagctgctatccttttctacctgcggcgccctgctccactctagtggctgctcccctcccaatctgagccccgagatgcctgagtccagggacggcaggagtgaggacctagctgacctttctggtggtgttggtggtggagggttctttatcaggagggtggcctcgccgggagccctagcggtgaggggtgtcaggaagccgttggcgcggcgttatatttcaccctcgaggaacaaggagaacctgctgccggtttgggcgttgagggtcacaccgacaaagaggagcccgcttcctggatggtaccccaggacgccgctccgtgatattacggccattgcaaaggctattcagagaagtcgttcaaggattgctgcagctcagcagcgaagccaaaggatcgagcagtcttcacaatctgtgaacgtgactactccagcacaagcagagcaggatgctcacattgctgaagcctcccatgctgttgcatctggctccggctcaactgaaagagaagctgtagcaaaccctgctactgttttggctgatgacaatttgaatgtgtcttctttggcagcagaaggctcattgaatactccatccaaaccaatggatcctgcccttgctgacaagaaactttccggttcaatagagaaggtagagaagttggtgaggaaaaacctgaagcgaacatcgagggctgcccaggcctccaggagggccacccaaaggcgcaatcttatgtccatgcgatgaatttattgctgtactttgctgggggaagagaaagtccacctcaggcttgtcctccttcctcttgtctgtgctgctcttcttccaatacttgccgtggcgtgatgctcacggtcattccttgttcccttctcgaggacaagaatatggaagccattggctctctgcttgaggttctaggactgcagctactagtgtgagtgcattctaggctggtagcccttgtacaacagaagctcaatggcaccaacgaggactgagaatcctgaccaattcaccttcctgtcgtgcacatgatagctcagaagatcgacgggacatcaggaagcacagcaaatgatgggccgtgctgttatgacttaaaagggaagaccagagcaagcaatcgcttgcagaacaaaacattcagttttgcaatttgaaacatagcccggttgtttttctcatgtccccgtcaggactcaggaggtaacagaagcccatttaaattagaggaaaaacatccgaataccgttaatatgatctatcactaaactaccgcactgtagagtctgtagtgcagagagaacgtgtgctctgattcacatggtacaccctaagctggtcgttgttaaacgccaaaagtggtggacagtccgtgcctcccttatcagattgacttgggcgattattcttattttgtgtgtggttatctatctaattatgtaagtctatcgtatagaaatgggtctagaccttccctacatatatgaatgagtatgattgattgagaatctctgaacata

SEQ ID NO: 107004 - DNA, 1766 bp, Zea Mays
cctcaaaatcctctgctcctccctccattccaaatcctccgggaaccatttgcgcggctacgattcgctcctgcaactgcagcatagaaagtgacgtcgccgtcgccgcattcgcgccgccctgggctccgtccaactaccgttgcaaacccagcggcgccctgttcgactgcggcggcggcggctaccatcccgatccggtggcgccccggccttgctcgattcctacagctgctatccttttctacctgcggcgccctgctccactctagtggctgctcccctcccaatctgagccccgagatgcctgagtccagggacggcaggagtgaggacctagctgacctttctggtggtgttggtggtggagggttctttatcaggagggtggcctcgccgggagccctagcggtgaggggtgtcaggaagccgttggcgcggcgttatatttcaccctcgaggaacaaggagaacctgctgccggtttgggcgttgagggtcacaccgacaaagaggagcccgcttcctggatggtaccccaggacgccgctccgtgatattacggccattgcaaaggctattcagagaagtcgttcaaggattgctgcagctcagcagcgaagccaaaggatcgagcagtcttcacaatctgtgaacgtgactactccagcacaagcagagcaggatgctcacattgctgaagcctcccatgctgttgcatctggctccggctcaactgaaagagaagctgtagcaaaccctgctactgttttggctgatgacaatttgaatgtgtcttctttggcagcagaaggctcattgaatactccatccaaaccaatggatcctgcccttgctgacaagaaactttccggttcaatagagaaggtagagaagttggtgaggaaaaacctgaagcgaacatcgagggctgcccaggcctccaggagggccacccaaaggcgcaatcttatgtccatgcgatgaatttattgctgtactttgctgggggaagagaaagtccacctcaggcttgtcctccttcctcttgtctgtgctgctcttcttccaatacttgccgtggcgtgatgctcacggtcattccttgttcccttctcgaggacaagaatatggaagccattggctctctgcttgaggttctaggactgcagctactagtgtgagtgcattctaggctggtagcccttgtacaacagaagctcaatggcaccaacgaggactgagaatcctgaccaattcaccttcctgtcgtgcacatgatagctcagaagatcgacgggacatcaggaagcacagcaaatgatgggccgtgctgttatgacttaaaagggaagaccagagcaagcaatcgcttgcagaacaaaacattcagttttgcaatttgaaacatagcccggttgtttttctcatgtccccgtcaggactcaggaggtaacagaagcccatttaaattagaggaaaaacatccgaataccgttaatatgatctatcactaaactaccgcactgtagagtctgtagtgcagagagaacgtgtgctctgattcacatggtacaccctaagctggtcgttgttaaacgccaaaagtggtggacagtccgtgcctcccttatcagattgacttgggcgattattcttattttgtgtgtggttatctatctaattatgtaagtctatcgtatagaaatgggtctagaccttccctacatatatgaatgagtatgattgattgagaatctctgaac

SEQ ID NO: 107005 - DNA, 1496 bp, Zea Mays
cctccctccattccaaatcctccgggaaccatttgcgcggctacgattcgctcctgcaactgcagcatagaaagtgacgtcgccgtcgccgcattcgcgccgccctgggctccgtccaactaccgttgcaaacccagagccccgagatgcctgagtccagggacggcaggagtgaggacctagctgacctttctggtggtgttggtggtggagggttctttatcaggagggtggcctcgccgggagccctagcggtgaggggtgtcaggaagccgttggcgcggcgttatatttcaccctcgaggaacaaggagaacctgctgccggtttgggcgttgagggtcacaccgacaaagaggagcccgcttcctggatggtaccccaggacgccgctccgtgatattacggccattgcaaaggctattcagagaagtcgttcaaggattgctgcagctcagcagcgaagccaaaggatcgagcagtcttcacaatctgtgaacgtgactactccagcacaagcagagcaggatgctcacattgctgaagcctcccatgctgttgcatctggctccggctcaactgaaagagaagctgtagcaaaccctgctactgttttggctgatgacaatttgaatgtgtcttctttggcagcagaaggctcattgaatactccatccaaaccaatggatcctgcccttgctgacaagaaactttccggttcaatagagaaggtagagaagttggtgaggaaaaacctgaagcgaacatcgagggctgcccaggcctccaggagggccacccaaaggcgcaatcttatgtccatgcgatgaatttattgctgtactttgctgggggaagagaaagtccacctcaggcttgtcctccttcctcttgtctgtgctgctcttcttccaatacttgccgtggcgtgatgctcacggtcattccttgttcccttctcgaggacaagaatatggaagccattggctctctgcttgaggttctaggactgcagctactagtgtgagtgcattctaggctggtagcccttgtacaacagaagctcaatggcaccaacgaggactgagaatcctgaccaattcaccttcctgtcgtgcacatgatagctcagaagatcgacgggacatcaggaagcacagcaaatgatgggccgtgctgttatgacttaaaagggaagaccagagcaagcaatcgcttgcagaacaaaacattcagttttgcaatttgaaacatagcccggttgtttttctcatgtccccgtcaggactcaggaggtaacagaagcccatttaaattagaggaaaaacatccgaataccgttaatatgatctatcactaaactaccgcactgtagagtctgtagtgcagagagaacgtgtgctctgattcacatggtacaccctaagctggtcgttgttaaacgccaaaagtggtggacagtccgtgcctcccttatcagattgacttgggcgatt

SEQ ID NO: 107006 - DNA, 1388 bp, Zea Mays
aattagatcccccgccaccacagcctgaagcacccaaatccatgagatttgccctaggtctattactggatagcaagtgctagttccatcaggggtcccaggtgcctaggttggatatccagacgacctaatcgtgaggaagttttaggattcagccccttcccctcccatttcttggtgttctgatgcgattcagggtgctgcttcccgtgaacctagtggcaggagcagtagtagtatttggaccagagccccgagatgcctgagtccagggacggcaggagtgaggacctagctgacctttctggtggtgttggtggtggagggttctttatcaggagggtggcctcgccgggagccctagcggtgaggggtgtcaggaagccgttggcgcggcgttatatttcaccctcgaggaacaaggagaacctgctgccggtttgggcgttgagggtcacaccgacaaagaggagcccgcttcctggatggtaccccaggacgccgctccgtgatattacggccattgcaaaggctattcagagaagtcgttcaaggattgctgcagctcagcagcgaagccaaaggatcgagcagtcttcacaatctgtgaacgtgactactccagcacaagcagagcaggatgctcacattgctgaagcctcccatgctgttgcatctggctccggctcaactgaaagagaagctgtagcaaaccctgctactgttttggctgatgacaatttgaatgtgtcttctttggcagcagaaggctcattgaatactccatccaaaccaatggatcctgcccttgctgacaagaaactttccggttcaatagagaaggtagagaagttggtgaggaaaaacctgaagcgaacatcgagggctgcccaggcctccaggagggccacccaaaggcgcaatcttatgtccatgcgatgaatttattgctgtactttgctgggggaagagaaagtccacctcaggcttgtcctccttcctcttgtctgtgctgctcttcttccaatacttgccgtggcgtgatgctcacggtcattccttgttcccttctcgaggacaagaatatggaagccattggctctctgcttgaggttctaggactgcagctactagtgtgaggtgtgatctggttcatgctattgctgatgtatgcatacttttctgtgtatccctgtgggccgttgaacaaataaatctttaatttacttttctgccgcactaagccactaataccataaccactagtgtatgaatattttctgttgtggccgcttgtattatatgaacttcaatatgtaagccagtcggcaccatgagaaatttagcatagtatctatgcatgacataggtgtttggtcatgatctct

SEQ ID NO: 107007 - DNA, 1330 bp, Zea Mays
gtgaaaacgttcaagtcacccgcctcctcccaaaatcgcctccatctcccctcaaaatcctctgctcctccctccattccaaatcctccgggaaccatttgcgcggctaccatcccgatccggtggcgccccggccttgctcgattcctacagctgctatccttttctacctgcggcgccctgctccactctagtggctgctcccctcccaatctgagccccgagatgcctgagtccagggacggcaggagtgaggacctagctgacctttctggtggtgttggtggtggagggttctttatcaggagggtggcctcgccgggagccctagcggtgaggggtgtcaggaagccgttggcgcggcgttatatttcaccctcgaggaacaaggagaacctgctgccggtttgggcgttgagggtcacaccgacaaagaggagcccgcttcctggatggtaccccaggacgccgctccgtgatattacggccattgcaaaggctattcagagaagtcgttcaaggattgctgcagctcagcagcgaagccaaaggatcgagcagtcttcacaatctgtgaacgtgactactccagcacaagcagagcaggatgctcacattgctgaagcctcccatgctgttgcatctggctccggctcaactgaaagagaagctgtagcaaaccctgctactgttttggctgatgacaatttgaatgtgtcttctttggcagcagaaggctcattgaatactccatccaaaccaatggatcctgcccttgctgacaagaaactttccggttcaatagagaaggtagagaagttggtgaggaaaaacctgaagcgaacatcgagggctgcccaggcctccaggagggccacccaaaggcgcaatcttatgtccatgcgatgaatttattgctgtactttgctgggggaagagaaagtccacctcaggcttgtcctccttcctcttgtctgtgctgctcttcttccaatacttgccgtggcgtgatgctcacggtcattccttgttcccttctcgaggacaagaatatggaagccattggctctctgcttgaggttctaggactgcagctactagtgtgaggtgtgatctggttcatgctattgctgatgtatgcatacttttctgtgtatccctgtgggccgttgaacaaataaatctttaatttacttttctgccgcactaagccactaataccataaccactagtgtatgaatattttctgttgtggccgcttgtattatatgaacttcaatatgtaagccagtcggcaccatgagaaatttagcatagtatctatgcatg

SEQ ID NO: 107008 - DNA, 1490 bp, Zea Mays
aaacgttcaagtcacccgcctcctcccaaaatcgcctccatctcccctcaaaatcctctgctcctccctccattccaaatcctccgggaaccatttgcgcggctacgattcgctcctgcaactgcagcatagaaagtgacgtcgccgtcgccgcattcgcgccgccctgggctccgtccaactaccgttgcaaacccaggcttgcctgacaccagaagctgctcccctctccgatccagcggcgccctgttcgactgcggcggcggcggctaccatcccgatccggtggcgccccggccttgctcgattcctacagctgctatccttttctacctgcggcgccctgctccactctagtggctgctcccctcccaatctgagccccgagatgcctgagtccagggacggcaggagtgaggacctagctgacctttctggtggtgttggtggtggagggttctttatcaggagggtggcctcgccgggagccctagcggtgaggggtgtcaggaagccgttggcgcggcgttatatttcaccctcgaggaacaaggagaacctgctgccggtttgggcgttgagggtcacaccgacaaagaggagcccgcttcctggatggtaccccaggacgccgctccgtgatattacggccattgcaaaggctattcagagaagtcgttcaaggattgctgcagctcagcagcgaagccaaaggatcgagcagtcttcacaatctgtgaacgtgactactccagcacaagcagagcaggatgctcacattgctgaagcctcccatgctgttgcatctggctccggctcaactgaaagagaagctgtagcaaaccctgctactgttttggctgatgacaatttgaatgtgtcttctttggcagcagaaggctcattgaatactccatccaaaccaatggatcctgcccttgctgacaagaaactttccggttcaatagagaaggtagagaagttggtgaggaaaaacctgaagcgaacatcgagggctgcccaggcctccaggagggccacccaaaggcgcaatcttatgtccatgcgatgaatttattgctgtactttgctgggggaagagaaagtccacctcaggcttgtcctccttcctcttgtctgtgctgctcttcttccaatacttgccgtggcgtgatgctcacggtcattccttgttcccttctcgaggacaagaatatggaagccattggctctctgcttgaggttctaggactgcagctactagtgtgaggtgtgatctggttcatgctattgctgatgtatgcatacttttctgtgtatccctgtgggccgttgaacaaataaatctttaatttacttttctgccgcactaagccactaataccataaccactagtgtatgaatattttctgttgtggccgcttgtattatatgaacttcaatatgtaagccagtcggcaccatgagaaatttagcatagtatctatgc

SEQ ID NO: 107009 - DNA, 1310 bp, Zea Mays
aaacgttcaagtcacccgcctcctcccaaaatcgcctccatctcccctcaaaatcctctgctcctccctccattccaaatcctccgggaaccatttgcgcggctacgattcgctcctgcaactgcagcatagaaagtgacgtcgccgtcgccgcattcgcgccgccctgggctccgtccaactaccgttgcaaacccagagccccgagatgcctgagtccagggacggcaggagtgaggacctagctgacctttctggtggtgttggtggtggagggttctttatcaggagggtggcctcgccgggagccctagcggtgaggggtgtcaggaagccgttggcgcggcgttatatttcaccctcgaggaacaaggagaacctgctgccggtttgggcgttgagggtcacaccgacaaagaggagcccgcttcctggatggtaccccaggacgccgctccgtgatattacggccattgcaaaggctattcagagaagtcgttcaaggattgctgcagctcagcagcgaagccaaaggatcgagcagtcttcacaatctgtgaacgtgactactccagcacaagcagagcaggatgctcacattgctgaagcctcccatgctgttgcatctggctccggctcaactgaaagagaagctgtagcaaaccctgctactgttttggctgatgacaatttgaatgtgtcttctttggcagcagaaggctcattgaatactccatccaaaccaatggatcctgcccttgctgacaagaaactttccggttcaatagagaaggtagagaagttggtgaggaaaaacctgaagcgaacatcgagggctgcccaggcctccaggagggccacccaaaggcgcaatcttatgtccatgcgatgaatttattgctgtactttgctgggggaagagaaagtccacctcaggcttgtcctccttcctcttgtctgtgctgctcttcttccaatacttgccgtggcgtgatgctcacggtcattccttgttcccttctcgaggacaagaatatggaagccattggctctctgcttgaggttctaggactgcagctactagtgtgaggtgtgatctggttcatgctattgctgatgtatgcatacttttctgtgtatccctgtgggccgttgaacaaataaatctttaatttacttttctgccgcactaagccactaataccataaccactagtgtatgaatattttctgttgtggccgcttgtattatatgaacttcaatatgtaagccagtcggcaccatgagaaatttagcatagtatctatgc

SEQ ID NO: 107010 - DNA, 1431 bp, Zea Mays
ggaagtgaaaacgttcaagtcacccgcctcctcccaaaatcgcctccatctcccctcaaaatcctctgctcctccctccattccaaatcctccgggaaccatttgcgcggctacgattcgctcctgcaactgcagcatagaaagtgacgtcgccgtcgccgcattcgcgccgccctgggctccgtccaactaccgttgcaaacccagcggcgccctgttcgactgcggcggcggcggctaccatcccgatccggtggcgccccggccttgctcgattcctacagctgctatccttttctacctgcggcgccctgctccactctagtggctgctcccctcccaatctgagccccgagatgcctgagtccagggacggcaggagtgaggacctagctgacctttctggtggtgttggtggtggagggttctttatcaggagggtggcctcgccgggagccctagcggtgaggggtgtcaggaagccgttggcgcggcgttatatttcaccctcgaggaacaaggagaacctgctgccggtttgggcgttgagggtcacaccgacaaagaggagcccgcttcctggatggtaccccaggacgccgctccgtgatattacggccattgcaaaggctattcagagaagtcgttcaaggattgctgcagctcagcagcgaagccaaaggatcgagcagtcttcacaatctgtgaacgtgactactccagcacaagcagagcaggatgctcacattgctgaagcctcccatgctgttgcatctggctccggctcaactgaaagagaagctgtagcaaaccctgctactgttttggctgatgacaatttgaatgtgtcttctttggcagcagaaggctcattgaatactccatccaaaccaatggatcctgcccttgctgacaagaaactttccggttcaatagagaaggtagagaagttggtgaggaaaaacctgaagcgaacatcgagggctgcccaggcctccaggagggccacccaaaggcgcaatcttatgtccatgcgatgaatttattgctgtactttgctgggggaagagaaagtccacctcaggcttgtcctccttcctcttgtctgtgctgctcttcttccaatacttgccgtggcgtgatgctcacggtcattccttgttcccttctcgaggacaagaatatggaagccattggctctctgcttgaggttctaggactgcagctactagtgtgaggtgtgatctggttcatgctattgctgatgtatgcatacttttctgtgtatccctgtgggccgttgaacaaataaatctttaatttacttttctgccgcactaagccactaataccataaccactagtgtatgaatattttctgttgtggccgcttgtattatatgaacttcaatatgtaagccagtcggcacc

SEQ ID NO: 107011 - DNA, 94 bp, Zea Mays
atcagcagttcagcatgcctttcacaaaattggaccctaccaacaatccaaaactgcattagcagtcaacaccaagatttcgatccgaaaaggc

SEQ ID NO: 107012 - DNA, 3120 bp, Zea Mays
cgccgcttccgcccggtatcccccactcgcgcggccgtaggacacggccacgtgcgccgcctcaaactgggggctgtggctggggcgggaggagcggcggcgttagggtttccccatggacggtggcgaggatcggacgttcaaggcgaactttaccagcgagggggtgacgatgctgcaggaccgcgtcaaggagaagctcagtgagctcatgggcgactactccgacgacactcttgccgagtatgttgtagtattgctaaggaacgggaggcacaaggatgaggctgcaaaggagctacatgtttttttaggcgatgacaatgatgcatttgtatcctggttgtgggatcatctgtcctcaaatttgcacctttatgttcaacctaaagctgcctcttctaaggatgacactagaagcagtcacaatgctgccagaggattgcctgttcacagtgtgataagcagcacacaagttaatcatgaacctgaagctgaaacccagaagacagtgataactcataaaaaaaaagattggggtcatcgaaaaagagattggggaacaatcggtcgaggtcaatcagaaacagttcctcttagaagcgttgtcgacaatgtttctcttgcaaaggagaaggatcttcatgagtcacatgcagatgaaaaggcttttcataaatcacattctgtaagacgaacccgctctcctgacatgcataaccacagaaagaggagcagagaggcagatgtgcggtctactaagagtgcaacacacccagttaatggtgcaccacgtcggcttcttcagtttgctgttcgtgatgctgtcagaactgtgcccccagttacttctggttcagaatcagcttccaagcgactttgttctgtagtgtctacattggcttcagattccacacttgatattactcatattaggttacagaaaacaaattcagatttgagaataccagttgccacagcagcactaagagctgcagctgaggctgctgaagatgctctcaaggatagcttttgtggaagtgtttttagtagattgggcagaatgcccacaataaattctagtgaacaatcacctgatcgtagatcacaagatcttgaaggcaaagaatatgagaatatagataacatacaagctgaaaatcaagttgaattttatggaagaaatcaacatggtggcagtgatgtttacatgcgtgatcggagaacagaggaagccacaggttctctttctaatattgatgagtatggtcacaacagttctgttaggtataatggattgggttctctccgaagtgcattgcctgctagtggaggtaaagagtcattagtactggggtacgtaagaggagcttctgaagtacgaagcggaagattgatagctcaggggccacctgctggttcaggaccaagatcatctgaaaagatcctaaatgtttctggtaacactaagacacagaagcttcgaactcatgtaactagggatgcccttgcatttgaccctcaagtgccaatggagaaggtttctggtgcaaggaagtcgataggtcaggggccacatgctggttcaggaccaagaccatctgaaaggattctaaatgtttctggtaacactaacacacagaagcttccaactcatgtaactagggatgaccttgcatttgaccctcaagtgccaatggagaaggttgctgatgcaaggaaatcacatgtgaagattgcacatgctaacgatatgtccatgacaactgataagtccaaagatttgatacagtcaagttcaatgctggaggcacaaaaggctacatcaggtgctgctggatcaaatactacaggtcaacccgaaggtggctctgattctagaactgtctttgttagcaacgtaagtgctcctctgcttttctgcttatgaacatatagacttggatttcactagtttttgtttctttttaggtacattttggtgcaacaaaagatgctctttctcgacacttcaataagtttggagcgatcttgaagacccatattgtgaccgatggtgtcactggtcagtcaactggctcagcgtatattgagttcttgcacaaagaatcagcagagcaggcgttaaccctgaacggggcatcatttatgttacgcattttgaaggtcgttcggaaaaactccactgaagcaacccgatcgcctggcttgcttcgtgtttcgcggggatcaccatttgcttcaaggctcattagaactgcatacccaaggccaacgtttcctggtgcaatccgtggacgactgccactcaggggtgttgcccagagcttacagtggaagcgcagtgccacagattcctcaaatgctgtaaaaccaagtcaggctgcaccttcagctcctgggaatcagttggtcaccccgaccccacgaagcttcacctacacacgcacggagccaaaaccaaatgacggtgcgatggcttgactgctcagctgcagcatgccgcagctcctgatgaatctcgcagaaagagttcgtgatactgttacgtggttcattcagctgcttttggtaaatatttaagtagctgcagatgttagtttgtagcaggctggtttttgtggaccaaaacctttgagcgatattctgtgaggttttctgtgctgtttttcaccgtcagcacatattctgtgctggctggctgttcggagttcgtggatggagagtaaaatatatataaaaaaagtggtagtaaaggaaaacacggacgcgataaaaacgttgcaacatttgttattattttttgatggattatttagcctccacggtttccttgtcaaggggggtgatctgtgagattgatcataatatccaaactaccggatggtcttgctgtctcagttttgtaaatagaaaaaccttcacctgtggggtatggttgcctactgcacgtctgcacattagcaagtgatggtgcgtgtttcgactcaaatgtttttttgcatcctgtcttgtgtagaaaaagaaaactgaagacctgtctgttctgggtgtctgctgtatctattttctcagagagaagtgcattttatcttggaatcagcgggactcacgggtggc

SEQ ID NO: 107013 - DNA, 288 bp, Zea Mays
atgatcgccggatggcgaggctccaccccggcccctttccttgtaagaaatgggaagtgtctcctgattcggcgacggctccagtccaccgatggcccaagaaaaaaaaagcgcaacaggaacgaagcacaaggatcagggacaaatgatgggctgcagcaggcacaggggggagtcaggaaaagaaggttccccccctgccattacttggctccctcactctctttctctcccatcgttctcacagcacgattgttttacgccggagagagaagaggagtagaataa

SEQ ID NO: 107014 - DNA, 147 bp, Zea Mays
atgtggaggaggtacataagagctggagttcccccacaattcattcaactagagctacgctggccttctccagagacaacatgtgtttctcaacaacaacaacaacaacaacaacaacaacaacaacaacaatatcttcacaaataa

SEQ ID NO: 107015 - DNA, 331 bp, Zea Mays
aaatttaagcataaaacatgtcatttctctagaaatttaagcattccatccaattctcgatacatttttttcaaaaatttaagcatgtaatagacttagtataagctagattttatccagaaatttaagtatgccatacaagtcttgcaacaaccttccttcagttctattacatgctgagcccaaacatggagaaatgcaacatatatatagctcatactggcacatgcagactcagaatgctgtgcagaactgtctccatatgaccaatatttcctgtctgcaaagtttaaataaggaatcaaaagcagaaatcaacagataaaaaatg

SEQ ID NO: 107016 - DNA, 126 bp, Zea Mays
gcgacatggtttgttttaatcgaaactaaatcggattcatctgaatcttatttattttggcgaaacaaatttcagacgtccgggttttggtattatgatttggacgtggtctaatttagtcggacc

SEQ ID NO: 107017 - DNA, 138 bp, Zea Mays
atggacctcaagcccgacaccatggactccgtgcgctcgggccccttcggccagatcttccgccctgacaatttcgtcttccagtccggcgccggcaacaactgggccaagggcctctacaccgatggcgccggctag

SEQ ID NO: 107018 - DNA, 181 bp, Zea Mays
gtcgtcggggactagcggtgggtagctatagagcaaggatcactatcaaatcttatagcccgaacgtacatatagatgttagtgactaaaaattaattaaaacaagtaaacattgatcactaaattgtagtaaagaaaaaaagaattgtagaaaagaaaaaaataattatggaaaagaaaa

SEQ ID NO: 107019 - DNA, 1078 bp, Zea Mays
ctccgttctccgattggatccacgcgcctcccaacctgctgccgccgccgcggcgagatggagatccattctaatccgcttgcccgctcgcgatgacgctgacggccttcctctgcttgcctttgctttgctgcaggcgtcggtaagtcgtgcctgctgctgcagttcaccgacaagcgcttccagcccgtccacgacctcaccatcggcgtcgagttcggggcccggatgatcaacatcgacaacaagcccatcaagctccagatttgggatacggctggtcaagagtcattcagatccataactagatcatactacagaggagctgctggtgctcttttggtctatgatatcactaggagggagactttcaatcaccttgcaagctggctggaggatgcaaggcagcacgcgaatgctaacatgacgataatgcttgttgggaataagtgtgatctgtctcacaggcgtgcagtgagctatgaggaaggcgagcagttcgcaaaggaacatggtcttatcttcatggaggcctctgcaaagaccgcgcagaatgtcgaggaggcatttgttaagactgctggagcaatctacaagaaaatccaagatggcgttttcgatgtatctaatgagtcttatgggatcaaagttggatatgtagtccctggccaatctggaggtgctggtagctcttctcaaggtggtggctgctgcagctaatctgctaacgcccttatgtacaaaggcatatctgcggtgtagctgcgttatctctatgttgctgagcgtaaaatagttactgctccagggtgctttgttatttgatgcaccaacgggtggcagtgcctgaacgatttgagacattcagttttatttatgtcaggtgttcataaacattctgtaaatcactagattcttcaccgtcattcgtcattaagcgctcacaaattctgtccgtttgcgcgtgtaaataagatacctcgatgcatcgtttggtgcgatgttagtttgtcttttttgaatatgttggaacttggaactccatgttttgacaaatactctgctttcagagggacaa

SEQ ID NO: 107020 - DNA, 1178 bp, Zea Mays
gaaggaacaagaacaaaccgcccccaaattagctgtcaacccgtcgcttccttcacgtaatcacgtctcctccgccgcccttgctaagcaaacgcaacctgcaactgcaaacccctcctccgattcctcccccgcacgcggaagccccccgcagctcttcgtccccggaggaccaagaccaccaccggagatgtcgtacgcctacctcttcaagtacatcatcatcggcgacacaggcgtcggtaagtcgtgcctgctgctgcagttcaccgacaagcgcttccagcccgtccacgacctcaccatcggcgtcgagttcggggcccggatgatcaacatcgacaacaagcccatcaagctccagatttgggatacggctggtcaagagtcattcagatccataactagatcatactacagaggagctgctggtgctcttttggtctatgatatcactaggagggagactttcaatcaccttgcaagctggctggaggatgcaaggcagcacgcgaatgctaacatgacgataatgcttgttgggaataagtgtgatctgtctcacaggcgtgcagtgagctatgaggaaggcgagcagttcgcaaaggaacatggtcttatcttcatggaggcctctgcaaagaccgcgcagaatgtcgaggaggcatttgttaagactgctggagcaatctacaagaaaatccaagatggcgttttcgatgtatctaatgagtcttatgggatcaaagttggatatgtagtccctggccaatctggaggtgctggtagctcttctcaaggtggtggctgctgcagctaatctgctaacgcccttatgtacaaaggcatatctgcggtgtagctgcgttatctctatgttgctgagcgtaaaatagttactgctccagggtgctttgttatttgatgcaccaacgggtggcagtgcctgaacgatttgagacattcagttttatttatgtcaggtgttcataaacattctgtaaatcactagattcttcaccgtcattcgtcattaagcgctcacaaattctgtccgtttgcgcgtgtaaataagatacctcgatgcatcgtttggtgcgatgttagtttgtcttttttgaatatgttggaacttggaactccatgttttgacaaatactctgctttcagagggacaa

SEQ ID NO: 107021 - DNA, 1955 bp, Zea Mays
ctctccttcccctgccttctgctactatatagctccccctcaccttccgttctagagagagagaagggagaggcgagggagctcaccaggagagaggggcctgtgtgagcattgagcaaagcaaacgaagcagtacatacatctctcgctcgcagaggcccggccggccggctccatgcaacaagggacgacgagcggtggcggtgggcgatgatgatgatgatggcgggggagcacgtgctggccgctctggccaccctgcttctggcctcgctcctgaccctggtgctgaaccacttcctgcccttgcttctgaaccccaaggcccccaggggaagcttcgggtggccgctcctcggcgagacgctcaggttcctcacgccgcacgcctccaacacgctgggcggcttcctcgaggatcactgctccaggtatgggcgggtgttcaagtcccacctgttctgcaccccgacggtggtgtcctgcgaccaggacctcaaccacttcatcctgcagaacgaggagcggctgttccagtgcagctacccgaggccgatccatggcatcctgggcaagtcctccatgctcgtcgtcctgggcgaggaccacaagcgcctcaggaacctcgccctcgccctcgtcacctccaccaagctcaagcccagctacctaggcgacatcgagaagatcgcgctgcacgtcgtcggcgcatggcgacggcacggcggcgtcagggtcgtcgcattctgcgaggaggcaagaaagttcgcattcagtgtgatagtgaagcaggtgctggggctgtcgccagaggagccggtcactgcaaggatactcgaggacttcctggccttcatgaagggcctcatctccttccccctctacatcccagggaccccatatgccaaggctgtccgggcgagagagaggatatccagcactgtgaagggcatcatcaaggagcggaggagcgctgggtcatggaacaagcagggcgacttccttgacgtgctgctgtcaagcaacgagctatctgacgaggagaaagtgagctttgtgctggactccctgctgggagggtatgagaccacctcgctcctcatctccatggtcgtttatttccttggccagtctgctcaagatctggacctggttaagagggagcacgacagcataagatccaacaaaggcaaggaggagtgcttgacttcagaagactacaagaagatggaatatacccaacaagtcatcaacgaggcgctgagatgcggcaacatcgtcaagttcgtccaccggaaggcgctgaaagacgtcaaatacaaagagtatctgattccatctggctggaaggtcctaccggtcttcactgccgttcatctgaacccctcacttcatggagacgcgcagcagtttcagccctgtaggtgggagggcacaagccaagggacaagcaagaggtttacaccgttcggtggtggcccccggctctgcccaggatcagagctcgctaaagtggagactgctttcttcctccatcaccttgtcctcaattatagatggagaattgatggcgatgacattccaatggcatacccgtatgtggagtttcagagaggtctgccaatagaaatcgagccaacgtcccctgaatcttgactgtcctggagctacagccatcagttatcacaccagagagaaaaggggaaggtgcatggagtatacatgaatggtcagtgacagatctcacaagtgaaggaacactgagggcgcgtgctagtagctagcatatgaggcagctgagactgtaatttaatgtacatggtgtagatatattttgtccatggcaattgcttgaagtggctgattcacttcaccctgtaaaacattctccagtggtttcaactgctatcctataaaaaagaagggcccctgtgtttaatgaaaaaagtaaaaaa

SEQ ID NO: 107022 - DNA, 1912 bp, Zea Mays
agtttatggattcttttcccggttgaaggaggtttggactaggctgaaacgagacggcggggccccatcgttgtcacagccagtctactccggcggcccagcccacgtacagtcgagcaggcgatctcgcacccctggtcgcctggtcagcagtgagcagtcagcggctgcgcgccgcctcgtcgggactcgggggcagagctggggctatctcttgagctggtggtcaggtactcaggaggtcatccatgatccatcctgattctccctcgtcctgctcccctttccttggccggccggcgcgcggagtggaggtcgaccgacattgaattccctctttccttctttgccgctcaattgcccccttgctccgcgggaagctggccaccggtcctgcctgcgcaatccattttgttcgtactattattgtgtaaccattgtgctccgtggagccgtagaggtggagatctgggttgccatttccagaccctggccgcgtccgctgcgatgggtcgaagcgtctgggcggttccgttggcttcccttcttgcgtttggtttggtgctcggctccgtcgaggccagcctcggggatgttgatccgcgttacagaacttgtgtgagggagtgtcaaactacagggattattggggagaacgtgatcagccattgtcagttcaaagaggacaacacttctgttggaggctcttggtataaccaggagcaaatttatatccagtggaaagaactgaactgtatgacagactgtcgctacttttgcatgacgcggagagaaggggaacggcaggcacttggtctgagccccgttaaatatcatggaaagtggccgttcttacgcgtttctgtgttccaggaacccctttcagctgcactttctgctgtcaacctactgatgcacttcactggctggctttcattttttcttctagtgaattaccaattgcctcttagaccccaggccaagagaacttactatgaatatactagcttgtggcatatctatgcaatcttatcaatgaacgcatggttctggagctctattttccatactcgagacattgacttgactgagaaattggactattcttcagctgtggccctgcttggctactcgttgatcctttcgttgctaagggctttcaatgtcaaggatgaggctagcagggtgatgtttgcagcccctattttggcattcgttacgacgcacatcttgtatcttaacttctatgagcttgactatgggtggaacatgaaagtttgtgtggtgatggccgcggttcaacttctgacgtgggcagtctgggctggtgtaagccggcatccgtcgcggctgaaggtctggacagttgttttcggaggagcactcgccatgctacttgaactctacgacttccctccatacatgggttacgccgacgcccattcgctgtggcacgcaagcaccattccgctcacctgtctcttgtggagcttcatcaaggacgatgccaagttccgcacggcaacactcgtcaagaaggcaaagtaattaagcaaagggccacactgttaagatatagggtctgggacccatcgtgtacacgaggagcggtttggggcacacgtgttataccggacatcatgaaacctccagtatatttgctcccccccccccccatgatgctcctgtgtcctgtcctgtctcccctccactcacgaattttgtccacaaactcagcgtattctttagggcgcatgttctgccattacgatccgccttcttacctgaatgtgtaaaactcagggaattttagaatgtgttggtgggctttgctagattttgtcatcgccgaatcagttttgcattgtggaatcagacaggacaatggacatcatcggtgtgtttgagtgtt

SEQ ID NO: 107023 - DNA, 2050 bp, Zea Mays
agtttatggattcttttcccggttgaaggaggtttggactaggctgaaacgagacggcggggccccatcgttgtcacagccagtctactccggcggcccagcccacgtacagtcgagcaggcgatctcgcacccctggtcgcctggtcagcagtgagcagtcagcggctgcgcgccgcctcgtcgggactcgggggcagagctggggctatctcttgagctggtggtcaggtactcaggaggtcatccatgatccatcctgattctccctcgtcctgctcccctttccttggccggccggcgcgcggagtggaggtcgaccgacattgaattccctctttccttctttgccgctcaattgcccccttgctccgcgggaagctggccaccggtcctgcctgcgcaatccattttgttcgtactattattgtgtaaccattgtgctccgtggagccgtagaggtggagatctgggttgccatttccagaccctggccgcgtccgctgcgatgggtcgaagcgtctgggcggttccgttggcttcccttcttgcgtttggtttggtgctcggctccgtcgaggccagcctcggggatgttgatccgcgttacagataaatttggggatcggggtgagcaaatgtctcatcgaagaactggcaccgccaacaaaaggttctgggtgaagtggcatctctgaactggttgcatggactttggaaccttttggctatctagggcttgtttggattcagcatttcagcctccacatgtcctgtcattagatatacaaatcaaggtccatgtcgattatgttttgacacaagatgtaatgatatattgggcccacatgtcatatatattcaaggtacttttggcaggcatgattacaatgcaaacagccctccgttgccaaaatcgtagatatggctagtcttggtcatgaccaaatcttggaaggattaattggggctcaagaccaaacatgcctgtgacctaaggcgcaatgcttgtgaccaagaattttgaaaactttggtcaatgttatattcttacaatctccagatttagtttctctaagaagatatatgtcatatgttgtggggcaggcatattaacttgtgtgagggagtgtcaaactacagggattattggggagaacgtgatcagccattgtcagttcaaagaggacaacacttctgttggaggctcttggtataaccaggagcaaatttatatccagtggaaagaactgaactgtatgacagactgtcgctacttttgcatgacgcggagagaaggggaacggcaggcacttggtctgagccccgttaaatatcatggaaagtggccgttcttacgcgtttctgtgttccaggaacccctttcagctgcactttctgctgtcaacctactgatgcacttcactggctggctttcattttttcttctagtgaattaccaattgcctcttagaccccaggccaagagaacttactatgaatatactagcttgtggcatatctatgcaatcttatcaatgaacgcatggttctggagctctattttccatactcgagacattgacttgactgagaaattggactattcttcagctgtggccctgcttggctactcgttgatcctttcgttgctaagggctttcaatgtcaaggatgaggctagcagggtgatgtttgcagcccctattttggcattcgttacgacgcacatcttgtatcttaacttctatgagcttgactatgggtggaacatgaaagtttgtgtggtgatggccgcggttcaacttctgacgtgggcagtctgggctggtgtaagccggcatccgtcgcggctgaaggtctggacagttgttttcggaggagcactcgccatgctacttgaactctacgacttccctccatacatgggttacgccgacgcccattcgctgtggcacgcaagcaccattccgctcacctgtctcttgtggagcttcatcaaggacgatgccaagttccgcacggcaacactcgtcaagaaggcaaagtaa

SEQ ID NO: 107024 - DNA, 104 bp, Zea Mays
attctattttcttgttaatccagccaaccaaacatcgtccttcctcatcttggcccatcgcatacaaccaaatcaatcatatgtgttctaccaaaccaacatgg

SEQ ID NO: 107025 - DNA, 118 bp, Zea Mays
ggttttgtttttttgctagtctgctagttgccttgccgttttgccttgttgggctaggacctggggcctggtgcgctgtcgtgctaggcttggtggccagctcggcctcaactcattc

SEQ ID NO: 107026 - DNA, 303 bp, Zea Mays
acttataatatttagtcgatgacacagacgagtgcactttccgagctttccaactatatgtgtcgaatcatatcaaattccttatgctctataccattgtctgcaggataattgattttggagacattgacaagttttccgtgcacgagctgataattttggatgagaagaatgatgaagtgcgcaagatttctagcagagtaaatgatcttgatctgcaactaatgaagaattgaaaaggttatcttgcttcgatgaagtcctatatgaatctccagcttgcctacactgaggagtacattg

SEQ ID NO: 107027 - DNA, 402 bp, Zea Mays
atggccgcaacattggtgatggtggagaggatgactacacaagggctggcgcttgatgtggtggggtacaataccctggttgccaggttttgccactccggtgatgctgatgctgcatgggaggtagcagagaggatgaaggcggatggagtggagccgagtgtggtcacacacactgcactcattggggagtgttgtaagatgaagcagatcgaggaggcgttcactctgtacgagggtatggtcaggtctggtgtgctgcctgatgtggtcacgcttagtgctcttgttgatggcctctgcagggatggccggttctcagaggcatatgcacttttcagggatgtgcagaatgatgatgctattcggagggaacttgcatcctatactagagcaatctag

SEQ ID NO: 107028 - DNA, 272 bp, Zea Mays
gttttttttgttttgttttgagaaagcatttttcgtgaacagggacaaatagtgttacaaagtgaccggaagcaaatggccgcgttcttccttgtttagctttgctcctatatatatgctagaggttacactggacaatcaatttttgtttttttttggttttgagaaagcatttttcgtgaacaggacgggacaaatagtgttacaaagtgaccggaagcaaatgaccgcgttcttccttgaattacgtcgtcccagtcaagcagtaaagc

SEQ ID NO: 107029 - DNA, 3354 bp, Zea Mays
atggcccgcccggctgccggagcgcacgacgtggggatggcgctgcgcaaggccgaggaagccgctgcgcggaggtgcgaggcggcgcgatggctgcggcagatggagcccgccgcagcagagtccctgccggagaggccttccgaggaggacttctgcgcggcactgcgcaacggcctcgtcctctgcaaggttctcaaccgcgtcaatcctggcgccgtccccaaggtcgtggagaatcctgtcatcacggtccagacgttcgatgggccggcacagtctgcgatacagtacttcgagaacatgaggaacttccttgtcgcagttagtgcgatgaacctgttgacgtttgaaacctctgatatagagaagggaggttcgtcaatgaaagttgtcgactgcatactctgcctcaagggataccacgagtggaagatctcaggtggcattggtatatggcggtatggtggcatcgtgaaaattgcatcctccagtaaaaggcctgcttcacatttaaacagaggtggaggctcagaccaacaaatgctggaatttgtgcatcttctctctgaggtctctcttgaggaatcaagagttgaagaagcccagcattctctttttcagcgctttgttcttcaagttgtacgagcattccttctggaatggggtgaagctgaagatttgcctcttgatgatatggtcatcgaaacagtactcgaacaagcttgtaaagaatttaccattttgcttgcttctcacagaaatcaggtgaggtcacttctaaggaagatgatgaaggatgacaatggaactctttctaaaatggatttgatcgaaactattacaaaatgtcttaaggagaatggtgagtgcatgtcctcttcattgcgattgcctcgtggcagccatggacacttggatgatgtgggattacttgaaaaccaacaagaaggactggagaagttaaagatgtcattcaatgaaatgaagcttcaagttgaatcgactcgtgctgagtgggaggaagacttgaggaggctagaaagctactttgaggctcagaatcataatgcttaccaaaagttgctggaggaaaatcgtaagctctataatcaagtacaagatcttaaaggtagcattagagtttactgcagagtgaaacctttcccaaaggcacaatctgatcaaaggtctactgttgatcatattggggaaaacggagaaatcctgattgcgaatcctcaaaagcaagggaaggatggacggaaaatattcacattcaacaaaatatttggacctagtacttcacaatctgaagtttttgctgatacccaaccattaattagatctgtcatggatggatataatgtatgcatatttgcatatggtcaaacgggatctgggaaaacttacacaatgagtggtccagatgtaacagcagaggaaacctggggtgtaaactacaggtcgttgaatgatctgtttgaaatttctcaaacaagagcagattccattacatatgatgttaaagttcagatgattgaaatatacaatgagcaagtgagggatttattaatgactgatggtgcaaacaaaagattagagatacgcaataattctcatgtaaatggactcaacatcccagatgccaatattgtgccagtcaagtgcgcacaagatgttttggatctgatgaaagttggccagagaaaccgagcagttggatcaactgctcttaatgaacgaagtagccgctcacacagtgtgttgacagttcatgtacaaggaaaggaggtaatttcaggctcaactctaagagggtgtcttcatctagtggatctcgcgggaagtgagagggtagacaaatctgaagcgactggagaaagactaactgaagccaagcacataaacaaatctctgtcagcacttggtgatgttatatctgcacttgcccaaaagagttcccatgttccatatagaaatagcaagttaacacaagtgctgcaggatgccttaggtggtcaagcaaaaacattgatgtttgtgcatgtgaaccctgaaacagactcttttagtgaaacaatgagcactctcaaattcgctgagcgtgtagctacaatagaacttggtgccgcccgtgcaaacaaggaagcaggccaggtcaaagacctaaaggaagagatcgccaagcttaaattggcattagatgaaaaggaaaatgaagtggcacagtttaaagatcttgctaaccgtgtgacttctgagatgagaaatgcaagaacaagatcacctttaaccgccagcatgtccttgaaacctgaagtcagtcaagaatccagtgtagacacctgtacaagtgagataagaagttcatcatctggcaagcaaagaaggttccgttcaccgttgtcagtgagagagctagacgataagtcacctgtcatcagcagggaactgtacctgagtgcgcgaaagtacaagactccctctcctccggttagaagctcactctctgtcgagagaggcagctttgccaaaatcgtggagaacactggaagcatcgactgcacaccgatatccaaggtcgaagtgcctccaaaagtgtggtccagcaactcgaagaccacaccttcatctgtcctgacagctcagagcctacggaaattccgggactccgaggagaacagaaccaaaattccgcccgctgtccggcagagcatggcgaagaacaggtctgagagtacgccaaagactcacaatgaagagaaaccggcgaacaggcaccactcgggtaccaaagcgaggtcagaggccaggaacacgagggactcgtccgaaatcgagaacgagtttgcgggcgatgaacctactttccacttcaaccgaactgcgaagaagttaccgacaaaggtgatgtcaagacagtcccagaacatagatgtcagtgtcagggcctctgtccggggggagatggagcctctgaccgaaggaaggcaacgccggaactggagcaagccgccgcacgccgagaggaccaatatgccgttgccggacatccggcgcagtgtctccctgccgcgcgggaagaaccctcttgtgtgaatctagctcgtttcgccaaccaggcattctttcattggttgtttgtttctttatcctgcggttcgatccgaatgtaggctctacggctgtgtagaacacttcatccggatgcataacacaaagtctgtcgagttgcttccaccaggctcccatgaaaacgcaaagttcacgctcttatacgcgatgtaaaaatgtatgggttaatgttgcactgcaggctgcagcatctcgttccagtggtgattccgtacc

SEQ ID NO: 107030 - DNA, 617 bp, Zea Mays
tcaacaaattcttcttcctagcttgcaactaagggcatatatcacacacacacacacacgcgcgcgcacacagaaaaacaaccacacaagggagcaatcgaactgatgtatgcgtagtttgcagggagaaacttcacaccatgatgagctgcaccagaagaacgagtgcgatgaatcttgttgtagttaccttgctcatcgtttccttgctcactgttcacctccccgccgtcgcctgtgcccggcaagttgccgtgctaaacccatacaagaatgaactggacaacagaggaaataagaacctcggcgcggcgttggcggccaccgcgtcaaccgacgacgacgatggtttagctgccagcggcaaggtgttcccagggcggaagctcggtgcgccgaacaaagagggaaccaaagccaccgtgggagcgacaacgacgacttcggcagcaggctcacggccgcggacggtgaagatgcgcgcagcggcgaggcacggcggcgacgaggccaccgagatgtacgacatgctcaggagggactacacatccaaggcgaaccgccgccggcccatcaacaacggggccacgccgctgcaggtgaataagaagccctag

SEQ ID NO: 107031 - DNA, 228 bp, Zea Mays
atgggagggaggtcgttcttctgcatcttcagcttctcacgcaagtccaggcgctactccgtcgacgacgaggaggcgggcgacgccgcctgggaggtcccggggaggctgcgcaaggtgcgctccagcgacgaggacaacggctggtgggtcggcgagcgcgacgttgaccagaaggcctccgacttcatcgccaccttccaccgccagaggcgcctcgtcgtctag

SEQ ID NO: 107032 - DNA, 666 bp, Zea Mays
cgttcacttagcgcacaaaaatgcttaagcatggtcatgtaaacatcaagggtcttaaggattacacataatagctatgcaagggattcgacaatgctaatgttgttgtgttttgcatcatctctcatggatatctcaagagccttctcaagtcttgacacaacttgctccatggatggccgttgcttcttgtggccagtgcataacagagcaagcttcaaactgaggtcaaatgcctccgttgaatactctccattcaacctaggatcagcaaactctgatacattgccatcttggataagtgtagaagcctgggaacaaaagtgacattggcatagcagtattcatgatgttgattgctcgtcttcctgagaggagttggaggagcaccatgccgaagctgtacacatcccctgcagcattcaccctgtggttgtggcggtattctggatcaacatagccaaatgttcctctgacttcagagcttacgtgcgacacacctaagtcgatgactctagagagtccaaaatctgacagcttgggttccatatcaaccccaagaagtatattggttggctgtcatagaaagtgtgagtttgactaaacatgaatctatagatgcactgaagactttcagatcatgcaacaaaccttgatgtcacggtg

SEQ ID NO: 107033 - DNA, 1255 bp, Zea Mays
gcagaaaatcgtgtcccgagtccgccgccctacgcctactgctcctcccaccaccaccaaacaaacaccacaccgcgcgccacgcctccgtctgccggcggtgaccgagccagctcatcagcggccaaggagcgggatgccggggccaggagcgcacctgctgtacgctctgtcgggcggtgcggcgctgtctcggctcgccggcccggaccgccgcttcgggccgcaccactgcgccgtctacgcagcgaacgcgttcctcggcccggacctcggctccttcgccgagtggctctgctccttcctcccctcggcctccgccgcgggggacctcgccatggccgccgtgcaccaccccttctactacccgctcctcctcggcctcccgctcgcctgggcctacgcctggctctcccgccgtctgcttcgcgccggcgtcctcgactctccctccggggtaccattaagaaagaggcagtgtttcttgctgatctctgccggctcgctctcccactttttcttggatcacttgtttgaggagaatgggcattctacaatgtacacttggatactgagcactggttggtggaaaggtcgtgctcctatcaatccagatgcagtgctcgtcgtaggacttctttgcacttgcctcatggggggatatgtgtacatcaacagagtgaatcatggaaggtctgcagcagaaaaatcaaaaccaatctttctttctcattctgatgatagccaccctgtactgtatgtggtgtgccagtcagatatacctgcggcaaccccctcaacctgccataggtgaagaagctgatctcggagtgataatatttcttgcgatttatctttttctcccacatggcctgtgcgccctttcgatgaatcaaaaggattatacagatgcactgaatgaattgccacttcaataatgcgtgtcgttattattcatttttcttccagtctgtgcagaatatcagtttggtaacagtctggtttctgcattatgttgtaattagatttagttactacctgaatgattactagtgcacttatgtatagccctgtaattctggaagcatatattattgtggaacaaagctgtatggatggtgctgacttctggtgaaaaagaatttcatctttttcattggtcgcagaggtggatcatatggatttgtattcaaggcacacatgactatatttttcatttggcactagttggtatatgctataaagtgatgatgtc

SEQ ID NO: 107034 - DNA, 3644 bp, Zea Mays
ccgtgacatcgccgggatcccgcccggacctcacccggcgatatgtcgacggcggctcccgcgccgggctccacggccacggtgcgggtatccaacatcccggcctcggccatcgccgcagagctgctcgccttctttgactccgccgtcaccatcgctggcgcgaccttcgcctgcgagatagtcgccgctcaccgcggctggctcagccgcggccacggtttcgtccagtttgattcctccgccgccgccacccacgccatcgacctcgcctcctctggccgcctgccccccttcctcggctcctgcctatccgtctcccccgcccgcgctgacctcctgccccgcgcgcccgacctctccctccgcgctgccagcgcgagcctcattctaggcaaccgcgtcgccgagcgcgagctggaggtggcctactcctgcgacggcgtgcgggccgaggtcatcccgaggatgcggcgtgtggacctctacctgaagcacgattcccagagctacaagcttgaggttctctttgaggacatcaatgagtgctttgggtgccacctcgatgggacgggcgccatcttgctgcagctgacttatgcaccaagaatacacattgcaatttctgggtctacagttaaatcaaggtttacagatgatcgctttcatgcatgcaaggaggacgccaaatttgcatgggtcagagcactagatttcacacctaatagctcttttggcgagtgttccactcttgtcctgaaactgagcaaaggtgcatcagtatcatatattcttgaaagtttacccttctcaggagaattaggggaattggccattgcttcgatggatgtgtttggctcctcctccaatgtggttcctcttgttgactgcccaaatggcttttctgtgccttatgaagtactttttcgtctgaactctcttgttcacatggggaagctagttgccaggcatgttaatgctgatctgtttaaagtccttgaagatctgtcaatcgatactttaaggagaatatttgagaaaatgagcaaattaaaatctacctgctatgaacctttgcaattcatcagacatgaggctcatagcatgaatatgagaaagaaagccttgtccaacaagagggagagtggaaaattgatgaggtgttacagaattcacatcacaccatcaaaaatatactgcttggggcctgaggaagaagtttcaaattacgtggttaagtaccattctgagtatgcttctgactttgctcgagttacttttgttgatgaagattggagcaagctttctcccaatgcattgtcagctagaactgaacaaggtttcttttctaaacccttgaaaactggcctgtatcatcgtattctctccattctaaaagaaggattttgcattggccccaaaaaatatgaatttttggccttttcagcaagtcagcttcgtggtaattctgtttggatgtttgcttcaaatagttctctgactgctgagaatataaggaggtggatgggccactttgaagatatccgttcagtctccaagtgtgcagctagaatgggccaactgtttagctcatccaggcaaacatttgaagtctcatcatatgatgtagaagtaattccagatattgaagtcacaactgatggcactaaatacatattttcagatggtatcgggaagatttctactagatttgccagacaagtcgccaaattaattggcttagacccagctcatcctccttctgcttttcaaataaggtatgggggctataaaggagtcatcactattgaccctacatcctttttcaatctttctctgcgacctagtatgaagaagtttgaatcgaagagcactatgctgaacattacaaattggagtaagtctcagccatgttatgtgaaccgtgaaattatctctcttctttcaacattggggataaaggatgaagtatttgaatcgatgcaacaagatgacatgcacgaatcagatggaatgctaacaaataaagaagctgctttgtctgtcctagggaaaattggtggcggtgataccaagacggcagctgatatgcttctgcaaggctatgaaccaagttcagagccttacctattaatgattcttaaagcccatcgggctaataggctgaccgacataagaactcggtgtaagattcatgtccagaaaggccgtgttcttattggttgtttggatgaaacttgcaaattagagtatggccaagtttacatcagaattacaaagaatcacaaggagcagaagtacagtgaacagccgttcttttgcaacgatgatggcaaaacagctgtaattgtaggaaaagttgcaatcacaaaaaacccttgtctccatcctggtgatgtcagagtacttgaagctgtatatgaccctggattggatgctaggggtcttattgattgtgttgtatttcctcagagaggggaaaggcctcatccgaatgaatgctccgggggcgatttggatggcgacctcttctttattacttgggatgacaaactgattccggagaaggttgatgcacctatggactacactgcaacgaggccacgcataatggaccatgctgttacacttgaggaaattcagaagcacttcgtcagttacatgataaacgataccctcggtgccatctccaccgcccacttgatccacgcagaccgtgatccactgaaagctcgcagccccgagtgcgtccagctggccgctctgcactccatggcggtcgacttcgccaagacgggagctccagccgagatgcccctggcgctgaggccccgggagtttccggacttcatggaacggtgggagaggccaatgtacgtctccaacggcgtcctcggcaagctctaccgcgctgccctgcggcacgaggaggacgcagaagcgctcctgcctgcgggcccaccgagctgcgtgtacgacccggacctcgaggtcgccggtttcgacgagttcctggacgcagcggaggagcggtacgaggcgtacgccgagaggctgggcgccctgatgacctactactcggcggagcgcgaggacgagattctgacaggcaacatccggaacaagctggtgtacctgcggcgggacaacaagcgctacttcgagatgaaggaccgcatcatcgccgccgtcgacgcgctgcacgcggaggtgagggggtggctcagggcgtgcaaggaggacgacgcgtcgagggtggcgtcggcgtggtaccacgtgacctaccacccggaccgccgcggggagaagcggttctggagcttcccgtggatcatctgcgacaccctgctggccatcaaggcggcgcgcaggtgccggaagcgggtggaagacgccgccgtgcccatggactgcgacggttcctagacggaggtgccactgtggcagtgaagtgagcctgtgatgcgagtggaaactgtagtaataagatgcagtaccgctgagcgctgattgctgtaaaaagaagttagcgcgggttgtcttgagctcctcctaacaggcgtacgtatggtggaaccgtggaatcatgatttgccgcccttgctgatgactagaagcaggtacggttagctaagccgttacgt

SEQ ID NO: 107035 - DNA, 880 bp, Zea Mays
gctggctctgtatatatacaaggtctggggcgaggtctcaccatcgccagacacactatagaccacagccagtcagccacatcactagctatctgtgcagaggcaatggcgtccaaggttgagctggtggtggaggtcaagtccccggctgacaagctgtgggcggcgctgcgtgactcgacggagctgttccccaagatcttccccgagcagtacaagagcatcgagaccgtcgagggcgacggcaagtcggccggcaccgtccgcctcctcaagtacaccgaggcggtgccgatgctgacgttcgccaaggagaagcttgagacggcggacgacgagaacaaggtggtgtcgtacagcgtggtggacggcgagctggcggacttctacaagaacttcaagatcacgctgaaggtgactccggccaaggcggagggcgagggcggcgccgtcgtcagctgggccatggagttcgacaaggccaacgaccaggtgcctgacccggacgtcatcaaggagaccgccaccaagacgttccacgacctcgacgactacctcctcaagaactagatggagcgagaactggagatggtccagtacagtacagttccagtccattcatcgacgcgtcacagtttactagtgcacgtcgctggtgtggtgtggtgcccgtgctggttccttaatttgcttactagctagctacgtaccgcggtccgtgtccttgtctctggctgatgtttgctgcctgcgtccgtcgtgcatccgacgacgtgtcgttgcgttgcgcaccggtcctccgagtcaataaagctctccgtgttcattgcgcatcgcttcgaacctatcgtacacagttgctttgtcgattgtctaaatc

SEQ ID NO: 107036 - DNA, 1126 bp, Zea Mays
tcttaatgtaaccctattgcaattgacatgcaatttagaattagcttgccctcagttcatcactttagttaccactcacgccccattttccaagtacagagaaagaagagcctctcatatcccgtaatcgaattcgaagccttacaacgatcgaccgacccaatggcacaacaagcatcgcgacactcagtcgagcgcgtcgcagcggcgcctgacgacgccctggcgccccgtcttgacgccgacggcgccgagcctctgcatcgcggcggcgaagtcctcgaagaaggcggtgcggttggcggcgtagcgctgggcgaagaccctggtgggcgggtactcccagatggcggcgtcggaggcgagcaggccgaggccgtggggcaggttcttgtagtaggtctcgtcgaagtcccggggcgtgacgatgtcgttgaagatggagacggtggggtcggtgcggtatcccgcgcaggagcgctgcagcgcgcgcgcgaactccgggttgagccgcgggtcgtggctggcgccccggtagccgtagatgcggggcgcgaactcggcgcagtgggagaagccgacggtgtgggcgccggccagcgccaccatctcccggggcgagaggcccttgcgggcgaagaggcgcaccatggctcgcgccgacatgttggtgcggggcaggttgccctcgacgtcgcgcgcgtcggagcggcgggagtcgcggcggcccagcgcgacggggaaccggggcccgcccagggcggccacgaggtcgcgcgccgccagcgccagcgcgtcggcgcaggagacgacgcccgggcactcggcctccagcgccgccttggcgcgggccacggcgtcgaaggcgtccccgggcagggagaggttgatctccgcggcgcgctccggcgcggcgccggaggaggagagcggcgagaccagcaccgaggcgtcgcagccgttgacgaagcagtcgtggaagaagagccgcagcgtgcccgccgccgtggacgggttggcgcgctgcttggcggcgacggcgtccgacacgatccgctccacgcgcgggcagctgcggcggtagtagttgggcgacagcctgggcgccgcccccgccgcgcagcag

SEQ ID NO: 107037 - DNA, 939 bp, Zea Mays
ctgcattaggatttttcttctttgaaaattgtcacccatgatgttattaattgaagctgcatcgtatctccccaaagtaaaatggttccctgtgcttgtcgtacatctaccgagtgcatctcagaaatgaatctatcaaagaggccttttcgttgtagtcaacagtattctccagtttattggttttcttgccttaaaacagggaacatgattcagcaagcaccaacattcttcaggtgcaaacgtgtttgacacagaccactgttttcaggaaaacaaagttttgtatgtgtttctattttctatattagtctgccttgtcctcccatgtattttcgtggcaaaccgaaatcctccggttgattcttttctaaccttatgtctagaaatattgaacaatttctcaaaaaaccatcttggctgagccatttgtttgtattacctttcgtatagtttaacatgattgtgaaggatgttttttttttgttttactcagggcccgaggaagaagattctccttgcagttggccctcagtccaaataacgccaaagatgagcaaacagggtgtgggtctaagaacatttgttggcaaccgaaaatattggtgtaagaactccagatataagatattgtatacccaattatccatagtggcggtcttaatccacccttttgttgccgatgacgtttcgtgccgtagttgacatgtaagtctgttcggtcagctgttaatccaggttctatcgttctcggtctgtccggtgcctgccttactgtttttttctttttctttttttaaacagcctgccttactgttattattgcttcgaaatgggacgatacgccatatgcttggtgtacccattgatagttggcttgggaattgatgatccattcagttcttgtgtcagaaatcacaaggcgacgatactttacat

SEQ ID NO: 107038 - DNA, 1703 bp, Zea Mays
ttccgttccgtccccggcgccggtaaacgacgtctcactttcaacgcacatccccaatcttcattcccctgaaaccctagccgctccgtccggtcgcgccactcccttcgcctctctaaggttccggcggaagccgtcctctgcgtgactgcgtcggctgcggtggagatggcttcctcgtcggcgtcttcgaggcaccaggtcaccatcaccctcggccgcagcggtcaggttgtcaaaaggagggctatgtctgatgatattaatgacggtgaattgcctttgttggggaaaaagcgatctgtgagggataggttaggaagtaatgtgtctgattctgatttttatgaaagccagcagagaaacaaacggcgacaattagaaagtaatagctcacatggagatgatggttcaggtgatgataaaccttaacttgtcaattctctagggcttgaactgaagatatctggcactacttactctgttgaattggcgtgcaaaatatttgaagaccgcctggttgggaagggtgatctgagactgaaactcatgaggaaaggcttgttgccgaggagcaatggtagtgcagaacagaatgacatagatctccgtgaaaagctttctcgaaaccataagttaccaaattatgattctagaggtcatgctgcagaatcaagggctagttatgatatgagagatgagcctccagagttaagttccagatattcttcgagggaggatgtcctagggtcgaggcactcttctgttgtaagtcgagttccttatgcaagaagtgtggatgatttgttaaagttggattattcaagaaaatcctacccgtcatggacagatgatggtttgaggcacagatcacctgaaaggatgttaaaagttcggagcgatatgtatccacggatagcttatgatcagattaggcccatgccaccccttaggtctgctggttcctcgagacctcaaagttttattacaagagatgctcctgacacgtcaaggagccaaccatatgctggcaaatccaccatttctattgatacagtacagaggactaatggaatcactccatctactgcagctctgcctaaggcccctgttatggatgaagccccgcttacagttactggattgctgaactcgttgggtcttgagaagtatgttgttctctttcaggctgaggaggtggatttgtctgcattgaggcaaatgggagagagcgacctcaaagacatgggggtaccaatgggcccgaggaagaagattctccttgcagttggccctcagtccaaataacgccaaagatgagcaaacagggtgtgggtctaagaacatttgttggcaaccgaaaatattggtgtaagaactccagatataagatattgtatacccaattatccatagtggcggtcttaatccacccttttgttgccgatgacgtttcgtgccgtagttgacatgtaagtctgttcggtcagctgttaatccaggttctatcgttctcggtctgtccggtgcctgccttactgtttttttctttttctttttttaaacagcctgccttactgttattattgcttcgaaatgggacgatacgccatatgcttggtgtacccattgatagttggcttgggaattgatgatccattcagttcttgtgtcagaaatcacaaggcgacgatactttacat

SEQ ID NO: 107039 - DNA, 1607 bp, Zea Mays
ttccgttccgtccccggcgccggtaaacgacgtctcactttcaacgcacatccccaatcttcattcccctgaaaccctagccgctccgtccggtcgcgccactcccttcgcctctctaaggttccggcggaagccgtcctctgcgtgactgcgtcggctgcggtggagatggcttcctcgtcggcgtcttcgaggcaccaggtcaccatcaccctcggccgcagcggtcaggttgtcaaaaggagggctatgtctgatgatattaatgacggtgaattgcctttgttggggaaaaagcgatctgtgagggataggttaggaagtaatgtgtctgattctgatttttatgaaagccagcagagaaacaaacggcgacaattagaaagtaatagctcacatggagatgatggttcagaccgcctggttgggaagggtgatctgagactgaaactcatgaggaaaggcttgttgccgaggagcaatggtagtgcagaacagaatgacatagatctccgtgaaaagctttctcgaaaccataagttaccaaattatgattctagaggtcatgctgcagaatcaagggctagttatgatatgagagatgagcctccagagttaagttccagatattcttcgagggaggatgtcctagggtcgaggcactcttctgttgtaagtcgagttccttatgcaagaagtgtggatgatttgttaaagttggattattcaagaaaatcctacccgtcatggacagatgatggtttgaggcacagatcacctgaaaggatgttaaaagttcggagcgatatgtatccacggatagcttatgatcagattaggcccatgccaccccttaggtctgctggttcctcgagacctcaaagttttattacaagagatgctcctgacacgtcaaggagccaaccatatgctggcaaatccaccatttctattgatacagtacagaggactaatggaatcactccatctactgcagctctgcctaaggcccctgttatggatgaagccccgcttacagttactggattgctgaactcgttgggtcttgagaagtatgttgttctctttcaggctgaggaggtggatttgtctgcattgaggcaaatgggagagagcgacctcaaagacatgggggtaccaatgggcccgaggaagaagattctccttgcagttggccctcagtccaaataacgccaaagatgagcaaacagggtgtgggtctaagaacatttgttggcaaccgaaaatattggtgtaagaactccagatataagatattgtatacccaattatccatagtggcggtcttaatccacccttttgttgccgatgacgtttcgtgccgtagttgacatgtaagtctgttcggtcagctgttaatccaggttctatcgttctcggtctgtccggtgcctgccttactgtttttttctttttctttttttaaacagcctgccttactgttattattgcttcgaaatgggacgatacgccatatgcttggtgtacccattgatagttggcttgggaattgatgatccattcagttcttgtgtcagaaatcacaaggcgacgatactttacat

SEQ ID NO: 107040 - DNA, 1265 bp, Zea Mays
agatcacgggtataccgaacagccgggttccgccaccaacccaaccgtgggggtgccttacggcctacgggccggagcagcgctcgggagccgcggcacggaggcatcgacgccgttgagctcgaggcgaccggcggctcgcggccccgccacagcggtgctgtggcagtgtggcttcttctggtttctgcgggctcagcgcggaggatatgcccaatgcacggaagtaccaaagcaagagctttccattgcttgactcactagaactgttatttgatggtcctattcctgaaggggcacaaaaatcaccttccagcatacctcagaatgttggtggaaacgttggtgatggaggcaacaatatcagcacagccccagacttgtctgaaagacctagtggaacaattaacacaagcgttaatgaggcatggaataatatcagcctacttaagcaaacagcattgggaccccaaggtatagacaatctcgacacgctgcaaaatcgtgatgaagaggtgctggaacggctacagcatggctcggaccggaggccgcagagagctgatgaacaggcacagtcaagttcttgcgtagaactgcagagagacaggcgcaagaagcggaaggccccagacatccagcagatcatggagacctatatgaatttcagaatgaagcaacctcgcgtcaaacaacgaagagcaaaggacgctgaccagttcacgatttcaaggtattagcctctgatgttttcaaggaccctgagaacagggagacctttctttcgtatgaacccaggctgcgcaccttgtggctgaagagggaagttggcaagctactctccttatagaagtggcagcccttgcttgttttgtttgctacccgtgcctaggcttcatttaacaaactctactagtgacttaacttgttccatgcacagtacgtcactacgctgcttagtcattcatgatcaatgatgtgcttgctgcgtgtagtgcttccaaaattttgcatctgtgtcaatacactgttaaaaatgcgacagaatgcttgtttcttgacagcagatatttaggatcgttctgcatgactgagcgtcaacagcagaggttgtagagccactcaagcgcagtatatactttcggcctaaactttctgcaacaatatcgttcttagcaaactgtctattcattctcaacaatcagctcaaacaaagcgtctagacttggcaccgcaaaaaaaaacatttcaagaaactgaaaata

SEQ ID NO: 107041 - DNA, 1329 bp, Zea Mays
agatcacgggtataccgaacagccgggttccgccaccaacccaaccgtgggggtgccttacggcctacgggccggagcagcgctcgggagccgcggcacggaggcatcgacgccgttgagctcgaggcgaccggcggctcgcggccccgccacagcggtgctgtggcagtgtggcttcttctggtttctgcgggctcagcgcggaggcctattgcaggattaaatggcaaataggccaagatggatgatgaagtacgaaaagggtcttgttgatatacttcatgagaacaacacttcacattatcgtacccaaaacggttggagaacagaggggtggaggaaaattgttagggatttcaatgtacggtaccttgaagcaaagtttagtaaaatgcaaatccaggaacatgagaccagtgttcttaaggcgcctaggcgagcaagtaaaccagaaaaccgccttagcgcctaggcggcgcctaggcgggtatggcgagcaaggcgaccagttttgcccgggcgcctggacgcctaggcgccgcctagcgacgccttaagaacactgcatgagactcaattgaagaaagactataggtcgataaaatctatcctccaacgtgatggtgtctcatgggaccagagtgcgtccatgtttagaacaacagatgaaatctgggatgagattatcgaggatatgcccaatgcacggaagtaccaaagcaagagctttccattgcttgactcactagaactgttatttgatggtcctattcctgaaggggcacaaaaatcaccttccagcatacctcagaatgttggtggaaacgttggtgatggaggcaacaatatcagcacagccccagacttgtctgaaagacctagtggaacaattaacacaagcgttaatgaggcatggaataatatcagcctacttaagcaaacagcattgggaccccaaggtatagacaatctcgacacgctgcaaaatcgtgatgaagaggtgctggaacggctacagcatggctcggaccggaggccgcagagagctgatgaacaggcacagtcaagttcttgcgtagaactgcagagagacaggcgcaagaagcggaaggccccagacatccagcagatcatggagacctatatgaatttcagaatgaagcaacctcgcgtcaaacaacgaagagcaaaggacgctgaccagttcacgatttcaaggtattagcctctgatgttttcaaggaccctgagaacagggagacctttctttcgtatgaacccaggctgcgcaccttgtggctgaagagggaagttggcaagctactctcc

SEQ ID NO: 107042 - DNA, 121 bp, Zea Mays
tctattccaaataggacttataaaagcccaggttccggtacttttccaggtagatttatccaaagaaattaggatcttctagaagacgatgtgaccatcaaagggatcaaacagttcttcc

SEQ ID NO: 107043 - DNA, 228 bp, Zea Mays
atgatactgtttaaaataagggacgagggagatagtctcagcctctcagggcataaatcctccgcacgcccggcctgcgtgcggcacgtaaccaacatagaaacgcctgatggttattactccggtcttgctaccgccagaactcagacaaaaatgtgccaatgcctcccatgccgaaaatcaccggatatattcatctatagagcaccaacaccggtgcttatttga

SEQ ID NO: 107044 - DNA, 2426 bp, Zea Mays
ggcgaggcggatcctctcgtcgtcgcggcgtccgagattgcgctcggcctccccttccacccagcgccgctcccggccgccgcgcccgcgcccttgctccgcctcctcccggccttcacccccactcactttctctccctacttcgccgcaacccgctcgccctccagccgctcccgctcctttccctcttccgcgtcctcctcgcctcgccgccgggcctcttccgtcacaccccagcctccttcctctccatgtctcacctcctcatcgcccaccgcctctctcaccttgcactccccctcctccgccttctcgtctcccgccttggccgcgactccccgccgcggctactcccgctacttgtctccgcagcctcaaccgacgacccggcgcctctcgtgtccgctgtcgccaaagtatacgccgatgagggcctcctacccgatggatgctccctcctcctcctcgcgctccgccgtggcatccgcgtccccatgccagcgtggtccgatctcatgaatcggctcccatctgttcccgaagcctacgccttctacctgcacctgctcgacgccggcgtgcccccggaggccaggcagtttaacatgctaatgcgtgacatgattagatcaggcaaacttgccagtgcgcggaacgtgttcgatgaaatgttgaggaggggtgtgcagccaacggtagtgaccttcaacaccttgatgtctgggatgtgcaaggcgtccgatctgaacaacgcaaatgctctgcgaggcctaatggcaaaggcaggaatcgcaccagatgtgtacacctatggtgcttttatacaggggctgtgtaagacagggaggatacaagatgcaatggagatgtttgaggaaatgtgtgagagaggtttgaaccccaacactgttgtgctcactacattgatagatgcacattgcaaggagggggatgtgacagctgggttggagttgcgctgggagatggccacaaggggtgtcaaggcggatttggtggcatacaatgctttggtgaatggtttttgccgagtgcgtgatatgaaagcagccaatgacattgtggaggagatgagaaaggatggtctcaagccggacaaggttacttacaccaccctcatcgatggttgctgcaaggagggggagttagacacagcaatggagatgaaacaagagatgtcagacgaaggggttgcgttggatgatgtcacatacactgcgctcatctctggactgagcaaggctggccgttcagttgatgcagaaaggatcctatgtgagatgatggaggctggtttgcaacctgacaacacgacatacacaatggtgattgatgccttttgtaagaatggtgatgtgaagacaggctttaaacatctgaaagagatgcagaataagggcaaaaatccaggaattgtgacatataatgtggttatgaatggcttctgcagtctggggcagatgaagaatgcggacatgcttctgaatgccatgcttaatattggggtgtgcccaaatgatataacatacaacattcttttggatgggcattgcaagcatggaaaagttagagatactgaagaactgaagagtgcaaaaggaatggtttcagattttggggtttatacttcactaatcaatgaatttgtcaagaaaaagtcagctaagagttaccatgataatggatagcttggtgggtaaagatacttattttgcttcctacctgtgacaacatcagagcttcaaggttgacaaggcaacatgaatatgatttccacactcagattgatatatatggtaaaagtaccttattgggcagtgagcacacatactcggcttggaagtttactgtcagggagggggaaagcggatattctagcaaatcaagttttatgaattactgcaaagccattcagaagtgtagccaagcttgagggtttcccctaccgtcgatgacagggccatactcctgaggttcaagcccatactgcaacatggtctctccaatctcagtagcctctataacggatgaccaaatcaaggattcagaacaccaacgggtcagaatggcagtcatatgcacacacaccaactgtcatgagaaacgctacataatgaactgacctccatgtaccagtgtctgggacggtgatggtctcctcctgctcccttttcatctccacatggcgcgggcgcagatcagaaattcagaatcatgcattaatgcacacctttttttaattgaaaaaaatgtggtgtttgtcatgttctcagatttgcaagtagagctcgtgcacatgtccatatcggctgcacagtgcaacatacaggctcatggctttccagtttagcgatcgctatgctatgagtactgttgctatactcagattctcattttctgcaaaaga

SEQ ID NO: 107045 - DNA, 1599 bp, Zea Mays
ctacggcaagctattccagtgattaccaaagcaaagccttccctgttcccaagcgcttcgcctccaatatctccacgccgttcgcggtgcttccgctcgcccactcctgtgccgctgcgcgccgctgcagctcccggcaccgtcctacgaaccaacacggccccagatttcttccagctcctccaaccgattcgaccggaaccgccgcacgagccccccaaagctcgcatcctttcctgcgtttatttatttcagttcaaattccggagtgttcgttctgtttttgccctaacttggtcacaatgggcggcaataatgacggcgtttccggtgccgcttgcttgaagccgctcaacggcgtctcccctacctacgtacccagcgccggcgccggcgccctgtacttccttatcggctccgggctcggcgtcgtggcggtgctccacgcatctgggttggcggaggtcagcggagagtgggcctccgcggcgcggtggaccgaggtaagcagagagtggccctccgccgcgcggtgggctgcccaactggccggatcggtcggcgcccagcgcctgctcctcgcaacgtcgcttcttttcctggccgtcagcgtctggcgcctcgccaggcgctgcgccgccgtggaggggcgcgtcggcagcacggactccgcggtgcgggcgttgcacgtcgggggagtcgtctgcgccgtgtgcgggtcgaagattcgggccctcaagagaggctgccgtggcgtggagcgcacccgctcggtcgactcgagcaagccggtctcgaggtcgctggctgctgagttcgaccaggaggctgacggggaggaagaggacaatgctggagagaccagcgatccagatgacggcagtgtgcagtacctgaggaggaggctcaaggaggagatgctgctgaaggaggttgcgctcgaggagctggagaaggagaggcatgccgcagcgtctgcagccgacgaggccatgtccaagattgcgtgcctgcgtagcgagaaggcgctggtggagagggaggcgcggcaattccaggagatgatgcagcagaagcagatgtatgaccggcaggtgatcgagtcacttcagtgggtgatcatgaagtctggaatgcaaggctgggagccagaggccataactgatcgagccttgtcggagacaagcgaggatgacagagataagaagtagctagctcttggttattggagttgaatggaaccactgaggaaggccctgttgtttgctttgagttcatcgtcctctgatcagctcttagtaaccaaacagagaatgccaagttacgaaaactcggatgttccttgaccatgcaaagctcttcaggggaaatatctgaaatccacctgtaaatataccatcttcttttaaactacctgtgtacttatctaataagaacaacatctgtacttgatcgctctaccttgcaaatgttcattgctatttatctgcaaatgttcattgctatctatctgtgaccttgtgtgtgatacatattttgacattacaagctggatttcagcactaggggtgtctgatatccgtcataccgtgttcgtgc

SEQ ID NO: 107046 - DNA, 889 bp, Zea Mays
cctcttctctattttttccccccttcgagaattgatgcacgcaacatgccgtcggttcgtggtcggcaggcaggtacggcccagaaggggtactacgactacgagcgcggccatgttcgcgtttgcttgctcggcaatctctcctgtgtctcgcagtgtacaaccagcgttacgtcattcggttcgcgtctggtctgtcgtcttcgcccgactcggtcgcttgttcaggaacaagtcgtctgtggctctggatgatgcctgcgagcgagcagtggtactgggcagagaagcaactccgagttccgtggtgcaggtggcaggtgaacatgacacgcacgcacgatcggacatgaaaaatctgctgaggcaggactcgaggctaaacttttcaatcgaacacccttcaggtactagaagcaattacacattgcattactatcaccaccaattcacacaccatcagcgcacactcatcaccgctgctaaaacgaaagaattcatctgagggcgaacaagcgtcaagagacgcatgaaagaataaacagcacacgacaacgcccctacgacaagcgcaagaagacagaacagaaagatctcttctttttttcccccttgttcagaaccttccgtcagtgacaataacacaagtgatcggacgcggacggacctcagctctgacggatcgatccggtggtcctcagcggccggtcgtccgcctcgtccacggacgcactccggccggaccgcgccgtcgccgtcgacgtcgacgccgtgccgccgagcccctcgatgcgcgccacgatctcgggcatggccggccgctggtccggagcgggctcggtgcagtccatggccagccgcagcatctccaccatctcgtcctcggcgc

SEQ ID NO: 107047 - DNA, 396 bp, Zea Mays
atggacgcgccgcagcgcgcgcagctggagtgggcgatcggggcgaccaccatcgtgctcttcgtcgccaccgtgtcgtacgtcgcgctcagcgccatcttcagctgcctctgcaccggcggagggtcgtcccgacggcggcagcaacccgacggtggcgataccgggccgcagctgaagattgcctcgtctcgtcctgcgctgggtcgttgccaaagccactcggcggacgcggtcctgacttccgttggcggcgattgcctcggcggacggcagtcggcggctgctcctctgcccgtcggtgttggattggatagcggcggcgcgacacaacgcagtcgaggaaactggatccggtcgtttcttctagagcgcgcgcgtggttgcgtcctctag

SEQ ID NO: 107048 - DNA, 1463 bp, Zea Mays
atgtatatttgcagatccggcgtactgcaaattttgaaaactgaactgtaagatggcatcagcagagctttcccgtgaggaaaatgtgtacatggcgaagctcgctgagcaggcggagaggtacgaggagatggttgagttcatggagaaggtagccaagactgttgactcggaggagctcactgtggaggagcgaaacctcttgtctgttgcatacaagaacgtcattggagcccgccgcgcctcatggcgcatcatctcctccatcgagcagaaggaggagggccgaggcaatgaggaccgagtaacactcatcaaggattatcgtggcaagattgagactgagctgaccaagatctgtgatggcatcctcaagctgcttgagacccatcttgtgccgtcttccactgcccccgagtccaaggtcttctatctcaagatgaagggtgattactacagataccttgctgagttcaagactggagctgagagaaaggacgccgctgagaacacgatggtggcatacaaggctgcccaggacattgctctggctgagcttgctccaactcaccctattaggcttggactggcacttaacttctcagtgttctactatgagattctgaactcacctgatcgcgcctgcagtcttgcaaagcaggcttttgacgaggccatctcggaactggacaccctgagcgaggagtcctacaaggacagcactttgatcatgcagctccttcgtgataacttgaccctatggacctctgacatctcggaggaccctgctgaagagattagggaggcgcccaagcgggactcgagtgaggggcagtaaagccggctttatgtgcctagaaactagtagctagtgtttgctgctgtcgaatgacactatgcaatgtgatctggaacctggtttcttgggtgcgacgcttgtagccgtgttatgactgtcgtccgtaaaatttgggggctccccgtaagggatgctgcctggcaaggcctcggtgtcccacctcgtctgtggcgtggggcgctggagcccggtctggttgggttgggaagccctttaaactgttgtcacttgcattttaccttttccatcgctgtttattgtgagtggtcctatatcaatggctggtctcagtggtctatacgtatgctttttggttctcttgattcctcacagggtgagtgggggcatgagcatttctctgtctcatctcaatgatgtaagttttctgtttggtgtctcgttccaagatgacttcagaatccgtaaatctctgaagtctaaacgctctatctaaacctttggattcgattacaattgtagatatagaaatctgtagaagggtgcaattcagaatactttgccatgaaatgaatatccttcttgtgagactctgtattaagactaaaacagctcaaattgatagagattctgtgattccttccct

SEQ ID NO: 107049 - DNA, 1574 bp, Zea Mays
accatatcattgggccgcgggactcggcgacaggccttttgtagaccgcagccggcaccatctcttgccgcaccccccattcgaacgccggagctcgacaaggacgaccgacgacgcacgcggagatccggcgtactgcaaattttgaaaactgaactgtaagatggcatcagcagagctttcccgtgaggaaaatgtgtacatggcgaagctcgctgagcaggcggagaggtacgaggagatggttgagttcatggagaaggtagccaagactgttgactcggaggagctcactgtggaggagcgaaacctcttgtctgttgcatacaagaacgtcattggagcccgccgcgcctcatggcgcatcatctcctccatcgagcagaaggaggagggccgaggcaatgaggaccgagtaacactcatcaaggattatcgtggcaagattgagactgagctgaccaagatctgtgatggcatcctcaagctgcttgagacccatcttgtgccgtcttccactgcccccgagtccaaggtcttctatctcaagatgaagggtgattactacagataccttgctgagttcaagactggagctgagagaaaggacgccgctgagaacacgatggtggcatacaaggctgcccaggacattgctctggctgagcttgctccaactcaccctattaggcttggactggcacttaacttctcagtgttctactatgagattctgaactcacctgatcgcgcctgcagtcttgcaaagcaggcttttgacgaggccatctcggaactggacaccctgagcgaggagtcctacaaggacagcactttgatcatgcagctccttcgtgataacttgaccctatggacctctgacatctcggaggaccctgctgaagagattagggaggcgcccaagcgggactcgagtgaggggcagtaaagccggctttatgtgcctagaaactagtagctagtgtttgctgctgtcgaatgacactatgcaatgtgatctggaacctggtttcttgggtgcgacgcttgtagccgtgttatgactgtcgtccgtaaaatttgggggctccccgtaagggatgctgcctggcaaggcctcggtgtcccacctcgtctgtggcgtggggcgctggagcccggtctggttgggttgggaagccctttaaactgttgtcacttgcattttaccttttccatcgctgtttattgtgagtggtcctatatcaatggctggtctcagtggtctatacgtatgctttttggttctcttgattcctcacagggtgagtgggggcatgagcatttctctgtctcatctcaatgatgtaagttttctgtttggtgtctcgttccaagatgacttcagaatccgtaaatctctgaagtctaaacgctctatctaaacctttggattcgattacaattgtagatatagaaatctgtagaagggtgcaattcagaatactttgccatgaaatgaatatccttcttgtgagactctgtattaagactaaaacagctcaaattgatagagattctgtgattccttccct

SEQ ID NO: 107050 - DNA, 2206 bp, Zea Mays
accatatcattgggccgcgggactcggcgacaggccttttgtagaccgcagccggcaccatctcttgccgcaccccccattcgaacgccggagctcgacaaggacgaccgacgacgcacgcggaggttacctctcgccccccctctcctccgtccctcggagtctcctcctgtcttgatttcgggtcgctgctgtttcgatcccctttcctccctgacgatttgcttatttttgcgttggatttgtaacctaaacatctcgtttccgcaccgttttggggccgcgtctactggtggttgggtccctttagatcgagtaggcgcgaggatggggacacatccccgattgatctgacgtgatacgcgtacggatccgtcaaagcctctactccagtttaaccagatgattatgtgtcatgcttattaagcggcgtgttttttaccgctggaagttcgtacataggtactcagatctgtcccttttcaaggttagaggaagtgttggaagctaggatacatggtttcagctaggtttagtttgtggtttattgcaggcaaaattcgccaagcaaatactctagtactcttttttcatacagttaatgataaattgccgttacctgaccatgaatttccgtgatttatgctgagaattttgcattacccctggaaatcccccgtctgaatttgactagctagtacctattcgtgccacagatcaataaagtgttgtcccatatattgatgtatatttgcagatccggcgtactgcaaattttgaaaactgaactgtaagatggcatcagcagagctttcccgtgaggaaaatgtgtacatggcgaagctcgctgagcaggcggagaggtacgaggagatggttgagttcatggagaaggtagccaagactgttgactcggaggagctcactgtggaggagcgaaacctcttgtctgttgcatacaagaacgtcattggagcccgccgcgcctcatggcgcatcatctcctccatcgagcagaaggaggagggccgaggcaatgaggaccgagtaacactcatcaaggattatcgtggcaagattgagactgagctgaccaagatctgtgatggcatcctcaagctgcttgagacccatcttgtgccgtcttccactgcccccgagtccaaggtcttctatctcaagatgaagggtgattactacagataccttgctgagttcaagactggagctgagagaaaggacgccgctgagaacacgatggtggcatacaaggctgcccaggacattgctctggctgagcttgctccaactcaccctattaggcttggactggcacttaacttctcagtgttctactatgagattctgaactcacctgatcgcgcctgcagtcttgcaaagcaggcttttgacgaggccatctcggaactggacaccctgagcgaggagtcctacaaggacagcactttgatcatgcagctccttcgtgataacttgaccctatggacctctgacatctcggaggaccctgctgaagagattagggaggcgcccaagcgggactcgagtgaggggcagtaaagccggctttatgtgcctagaaactagtagctagtgtttgctgctgtcgaatgacactatgcaatgtgatctggaacctggtttcttgggtgcgacgcttgtagccgtgttatgactgtcgtccgtaaaatttgggggctccccgtaagggatgctgcctggcaaggcctcggtgtcccacctcgtctgtggcgtggggcgctggagcccggtctggttgggttgggaagccctttaaactgttgtcacttgcattttaccttttccatcgctgtttattgtgagtggtcctatatcaatggctggtctcagtggtctatacgtatgctttttggttctcttgattcctcacagggtgagtgggggcatgagcatttctctgtctcatctcaatgatgtaagttttctgtttggtgtctcgttccaagatgacttcagaatccgtaaatctctgaagtctaaacgctctatctaaacctttggattcgattacaattgtagatatagaaatctgtagaagggtgcaattcagaatactttgccatgaaatgaatatccttcttgtgagactctgtattaagactaaaacagctcaaattgatagagattctgtgattccttccct

SEQ ID NO: 107051 - DNA, 792 bp, Zea Mays
accatatcattgggccgcgggactcggcgacaggccttttgtagaccgcagccggcaccatctcttgccgcaccccccattcgaacgccggagctcgacaaggacgaccgacgacgcacgcggagatccggcgtactgcaaattttgaaaactgaactgtaagatggcatcagcagagctttcccgtgaggaaaatgtgtacatggcgaagctcgctgagcaggcggagaggtacgaggagatggttgagttcatggagaaggtagccaagactgttgactcggaggagctcactgtggaggagcgaaacctcttgtctgttgcatacaagaacgtcattggagcccgccgcgcctcatggcgcatcatctcctccatcgagcagaaggaggagggccgaggcaatgaggaccgagtaacactcatcaaggattatcgtggcaagattgagactgagctgaccaagatctgtgatggcatcctcaagctgcttgagacccatcttgtgcctagaaactagtagctagtgtttgctgctgtcgaatgacactatgcaatgtgatctggaacctggtttcttgggtgcgacgcttgtagccgtgttatgactgtcgtccgtaaaatttgggggctccccgtaagggatgctgcctggcaaggcctcggtgtcccacctcgtctgtggcgtggggcgctggagcccggtctggttgggttgggaagccctttaaactgttgtcacttgcattttaccttttccatcgctgtttattgtgagtggtcctatatcaa

SEQ ID NO: 107052 - DNA, 877 bp, Zea Mays
tagtttcttcacccgtgctctctccctcatcccctgcgcataggaagccagctccttcacgtcgcctcctccctaggcggcgatcctacagagcctcgccggtcatccctgctccctcggcgtctctcccatggcgccctccctgctccttcacatggtgtggacgccagccccctctcttgttgccatggatagcccctctcccatctccttccccaagcacaagtcccatggtcgcccaaccccagctcgccctgccccagccatggacgctgtcgagccacccgtttcctatctcccctcgccttcatcctctggctgccgcccctccctggatttcgccctctctactcgtcgatcttctctgttgtggcgcgcactggctgtcttccacctccatcggaccacgccgagctccctccttgctccagtcttctccatggtcgctcctctcctttccctgattaatactaggcgcagcagcaacatgccagatctctgtagcccaggaaatttagatgagaagaaagctttagcgaggcgcttgccaagtgcttggtgaatcgcctcaaccggatatggttgtcgatctcgcggagtcgagtcgagtttagtcatggttgtaattttgttctgttgtggatggtgctaagtgccggtgggttcggccttcttatataagtatatcccatctttagcttctttattgaggattgtcacttaagctagcatgtattttaaaacctataaatattttatacattttaaattgtaattcttttgaatcactttcttttgtaatcactccgataattgtataatgtaaacttattgtaacatgtaatcattttgcaataaagaatttatttccgctgca

SEQ ID NO: 107053 - DNA, 930 bp, Zea Mays
gagcaaatcaagaaaacagttgtctccagtttccatgcagagcagaaaagatcagctagcgagagaagcaatggcgtcggctcctgcgttctacgtcgcgctgctgctgctgctggcttccgtcgctgccgtccatgcggtgccgccccaggccggcacgtcgtccacctgcagcactgacctcctccgcctcctcccctgcctgcccttcatcgagggcaccgccaccgtgccggcggacacctgctgcgccaaccttggcagcatggtgcacgacgagccgcagtgcctctgccaggctctcagcaaccccagcacggcccccgtcgccgtcaacatgacgcgcgtgatggccatgcctcggctctgccgcctcgacctcccgcccgccaccggcgcctgcgcagttgccggtcttcttccccatggaccatcaccgccgctgccaccgccgccgccgccgcccgcggcggcggtcactccacacgcaagcgccaactccagtgctccagcgaccctcaccacgccagcgacgccaacgccgacgacaccacgtatgataccgtcaccgtcggtgagcagccagacgccgccgcgatacagccgggggtccaagatgatagctcacggcttctctgtcactcttggtttcgtggcattggtgtcagtcctagctttctgaagaattgagcggcattcgtcaggcagttagaattatgtcttagagaaaattagttgcttttctgatgggcttgtttcctagagagactagccgcccaggaaaaaaaatactgtatgtccatcccggttgttcttgttcggctacaagatttgtgttttcagttgcaaactcactgccaccaagtacataatccactcaactgcacactgatcaacgatccaaatgatcacaaaaaatatataaaaaaa

SEQ ID NO: 107054 - DNA, 2364 bp, Zea Mays
gtttttcgggtcatgttgcagcatcccatgtctcaccatgagaagaaacggcaaattgcccgtcggatgaacaatgggcaatttttggtggttgccatcgttctacgtagttggacttttggtggttgccatcgttctacaaaggctcagacagatttaaccaaattaggccaaggtttacagcttagaaccaagatagggtaggaatgccatttttttcctgcctacatcgtaccatctcttgtaggacttaaactgaagccctttcatccaaggtctggtgactctggtccgatagaatatgccatcttttctaggatcagagtatacccttctgtactctggaattgcttagacagctctgaagattatcggaaaacaaaggttagtgctgcccgcaggacgcagacaactggtctacatcgaagtcatcctgacataagttatttatagagaagataaaataccaaacaaatatgcaggactaaattagtttgtgtgggttatttcctctttaaagatccaaatggtcaagtttttatataaactatcccattagcaaagtcagcatacaccttaatacagtcaaatttcatttgcaaaatagaaaacaatgtatggtaggatttacggtttcaaaaaaagtggctgcaaatgtgcaattaatacaaactagtactctgaacattaagcacaaaacacagatggttcatatgccaaaagtggccctccaagcaattttttttttactggaggaagccaaaacctcaggctaatttcaaccctgaaatacaaacatcctgagacaaaagtgataggagatacgaaaagacacagtggtcagcaggaaacacagtacctggtctaagctcccataatcccatcctctgaactggagagatcttggaagatcagcagccatacttcagtctatagtccaagaatttatattgaacctttgaagattattatagcctttagctaaatcctaaaaaggttaaaaccatcagcagtttcatgcataagcttgttccagcaagttcatcaccaatctctgacttgtcctgtttcgtccctcaagacgcatgcgtcattaggatttcacatgctctgggattatttagctccattgagatgtcagcacttgtatgtgagaagtgtagataacagcaataaattacataatcaaagcatgccaatacacgtccagcttcatatcattagataaaattgtttcttaatttaagtatgtgtctgaaataaaatatcaacacaagatgaagaggttttgtatttgccttaattgagttcatacagtcatttctcgtcttgttattttgtactccctccgtcccaaaatattagtcgttttagcattttactagattcatacaatacttaatgtatgtgttttatattatatatagattcattgtcattcatttaaatatagacataatttcaagggctaaaacgactaatattttgggacggagggagtatataatatcatttcttgattcaaacaatagcatgccaacatatctacttcagttatttcataaaggcatacaatttactccgctaaaagttccaccacttattagcaactttttatatcagcaaccttttggattctctgggcgtggcattacttaactgtgctttcacattcaatagttctggcaaagggaggcagcaagcttgagacaacaactgcacaacttgcaagaaaatcatcggcagttgatgggacaagatctttctggactaggtgtcaagggacttcaaaatctagaaaatcagctagagatgagcatttgttgcatccggacaaaaaaggaccaactcttggttgacgaaattcacgaactgaatcgaaagggaagtctcatccaacaagacaacatgggattacacagaaaggtcaacctaattcgtcaagaaaatgctgaattatataagaagctctatgagaaagaagcagaaggtgaagtcaaccgagattcaacaactccgtacaactttgtagttgcagagggtgccaacgttcctatccatcttgagcttaatattccactgcaagaaaatggtgttgagcaacctgtggctcctaaattagggttgcaattaaatcaatgaagacatgcaggacattgcctttgttctcattgtccttgtagtctgcaactcaaagcagcctaaaatgattggttgtaacaggcctaaaaacatagcaagacaaataaagtatgcatgccagagacagtggcaatggtagtgcaaatctatctcaaataacttgtgttatattgaataatccagcaaatggtttgttttttacacgttatgcaagtttgtttg

SEQ ID NO: 107055 - DNA, 3216 bp, Zea Mays
ttcccatctccctctttccttctcggttactatccgtgaagtctgcttgcgccgtgtgtgcgtgtgagaccggacgcagcttaacgatggggcgtggcaagatagtgatccgccggatcgacaactccacgagccggcaggtgacgttctccaagcggcggaacgggatcttcaagaaggcaagggagctcgccatcctctgcgacgcagaggtcgggttggtcatcttctccagcaccggtcgtctctatgaatacgccagcacaagcataaagtcagtgattgatcgatatggtcgagcaaaggaggaggagcatgtagcagaccccaacacagagcttaagtaacgctatgttcttgatttttcttatgttccttagaattagaattttctattaacaatttagcaaataaagatgataataaagagagtgataaatcataactaatatactgcaaatcatttaaataaaattttggcacaagtcggatatctataccactatataacccacccgtttaaactttgcaaaacctacccaaccaaatcacccccgcatgcataacctccactaaatccaccaaacaaattacacccagacttaatagacaatcaaaaccaacagttcagatcgatgtaccctctcttccttacttaaatccaatgaacaatattatttagatcgtcccctatccttcgtccctccccatcgtccctgccaccccccttcactcgtgccgccgccaccgtcgaacccttccctcctctccccggaatcatagcgttagcacgtgttgtatgctagtataatatatcaacctcgatgttaagtgtatgtgtttcatgaacaacatcaatcaccatgcatgagtgagaatgttcatgcattttaatccccactatatctagtctagtaaattttaaaaatgattaagaacaagctccaaaacaagttgcacacatcaaatgcatattgtttcaccaacagacttaaaagacccttcagttaacctcactaagaagctagtatatcatattctctaacaacataaggttagtgcaaaaatatctaacatgaatggttattaatatgtcattttaagggcaagtaaccgcttatttcaattaaacgcttaccaaagttcaaagataaaagttgtagcactaaactctagctttagtttgacatagatctcgttggtaatccaagtgatcccaaagtctatatgagtggtatactcagattgtatggaactctaattttgtgacaggagatataaatgcataaatatatgagcaaacacattttgattccatgtggaaacttagtaagaagttgaaccaagatttatagagctttaggtacaaatggcatacaaaggtatcccaacttaatttagttggagttgttcaaatttaaaactttcgtttagacatatcgataaaattttattcttgatcatgagaagaatagagaagttgtgaagtctggaaccataataaaaatgattcaatcatttggtcatttaactaggttagttgttcacccaactagatgctcgacatactcggaactttagtgccacatgttgtcacatatccttcctctttgccatgttgtgcccatgtgcacaaggaaatgcttcatatcatgtgttgtcgtcgtgtatgacaccccactgctttagttatgtaattgtaccacaccattatttcctcctagaacttgtcttcttcctccattcttcttgctatcattcatagagagaacgcatgccaatttctctatcgtagttcaagccctcatagccattgtttcacctagcattgtgtttcacaaccaaccaaaccacattagaattttccatgagtgaagaccttccctagtggacccttgaatggttggccaccattagtgttagtgcttgagtccatctagtatagctccgtcgtcctatgcttttccctttacaatcttgcttgttccatcataatccttggtcgcttaaacttgcataatcttggtggtggttgtgacctttgttagagtcttagggtcattctctctataatagtacatgaccgcaagctacacaagttgaaggatccattctaggactatcggatcttggagttactatttagcttcaccataaccaagacataggtaagcaacttatgcttatgtgtcattttgttgtgtacatatgctaccaaccctattcataccctgcccgtttttcggacaccttagatctagcttcaccaagaatccttagtggaactaatgtgcttgcacgttcactagagaactactgcaaccactgaaagatcaagtacattgcaaccagccttgtcgactaccatgccttataaatagatattataagcttttgtcctcttaacgagattaaacattgaagaataggtgttatcctctctgcttgtcaactgaagtatcgagcaacctactatatgagtcatactgatcaccctaactagactgccatcagtttttaatcatatacatcttgtctgaccaacatgaggtagttgaacccttaaggtaagcaattcactaagtattatactctaaaatctagttaaccaagttgaattaaaaattataagtcctctccatccttgccaacttttcttttaagtcttgatatgaatcttgcatttcaccgactagaatgccaaacaatcttaccaatgaacggatgattcttcattggcatagtgacctagactatcatagtcaaaggcaataatatagccaaccacaacactcatgtccccattcctaatccaaattgtcatgagttcaatctaggagacctaagtatgcattgtataaatagatcccaatagaaaccactggaatatagtcaaactaataagttacccaatattttaagtattccacagtaaaatctagttagggggacttgataaatgtagtgtaaggcctttgaacatatatatcggcgagtgaagaaaagtcttaacccatagaacttagaacctagtcaaactccaccctgtcctactcagcgctaaggaaacgaataggtcaactaagataatatcgaccctagtgccttacccagaataagaaaacctagaattaaaagttgtagcttatatattatgtatcactagtcggttgcccgtgcatagcgacgacttacaataatacccacgtaaactat

SEQ ID NO: 107056 - DNA, 261 bp, Zea Mays
atggggcgtggcaagatagtgatccgccggatcgacaactccacgagccggcaggtgacgttctccaagcggcggaacgggatcttcaagaaggcaagggagctcgccatcctctgcgacgcagaggtcgggttggtcatcttctccagcaccggtcgtctctatgaatacgccagcacaagcataaagtcagtgattgatcgatatggtcgagcaaaggaggaggagcatgtagcagaccccaacacagagcttaagtaa

SEQ ID NO: 107057 - DNA, 824 bp, Zea Mays
ggcacaagtttgttgttcctcttatccgcggaggaagaacgttggctcgacaccatgctcccaatggccgtccaccccacgagcacgccgtccctgtcgccgcgcgcccgcgtctccccgcccaggccttccacctctctggccgccacctcgtcctcgccctgctctcgcatcgtcagtttcaagagcaggaggctgccacttcgctctgtccgcagcgtcgtcgccgctgccgctgccgccgctgcagaggaagaagaggtacaactaggtgcaggtgtggatgcggtcgactaggaggaggcggagaataaggtggtggtacctgagaggcaggacccgatgctggtgctcaagttcatctggatggagaagaacatcggcatagctctcgaccaattggttcctggctatggaagcatcccgttaagcccatactacttttggccgcgaaaagacgcgtgggaggagcttagagcgaagttggaagagaaagagtggatctcacagaagcagatgatcatccttctcaaccaggccaccgatatcatcaacctctggcagcagggtggcgggagcctctcgacatgagttcctccccaccctgttctttcttcaaccttgcaagcttgtgttttgttggttaattggtttccttacatgccctctctgttgttaattttgaagttatggtacataatgtagatcagtcgaatctgttctcacgtatggtttttttacatggaaatgatcttgtgatttatcttagttattacgtgtatcagtcggttttttgttgggaaaatcaagaaacacaaataaaa

SEQ ID NO: 107058 - DNA, 1447 bp, Zea Mays
ctcacagtgcccccccgccctgctgccagagaaccagaaggaaaggaggatcccgagcagtcaattgccctgatcctcccccccaccctggggtagtaagagaaagagcgaggctgaattgctgtgaggcaggcgagggtggttgtgtgtgtgtgtgttgctgcgctgcgcaggctcagtgcgggcgatggggcgatcgccgtgctgcgacaaggaggggctcaagaagggcccgtggacgccggaggaggaccagaagctgctcgcctacattgagcagcacggccacggctgctggcgctcgctgcccgccaaagccgggctgcagcggtgcggcaagagctgccgcctccggtggacgaactacctccggccggacatcaagcggggcaagttcagcctgcaggaggagcagaccatcatccagctccacgctctgctcggcaacaggtggtcggcgatcgcgacgcacctcccgaaacgcaccgacaacgagatcaagaactactggaacacgcacctcaagaagcggctggccaagatgggcatcgacccggtcacgcacaagccgcgctccgacgcgctggggacgggcggcgggggaggcgccgcgggcgcgcagcacgccaaggccgcggcgcacctcagccacacggcgcagtgggagagcgccaggctcgaggccgaggcgcgcctggcgcgcgaggccaggctgcgcgcgctcgcggcctccgcctcggcgccgccgcagatgcccgccgccgccgcgcaccggctcgactcgcccacgtccacgttgagcttctccgagagcgccgcgctcgcctcggtcctgcaggaggcgcacggcgccgcggcggcggcggccgcggccgcgcgcgccgccatgcagcccatgcaggcgtacgaggaggcgtgcaaggagcacgagcagcagcagtggggcgatcacgtcgtcgatgtcgccgacgcaggcttcgccgcggcggggttcacgggcctgcttctcgacggctccttgagccagcatgatctgaggccggcgccggcgacgacgacgagggacgacgaggcggacgccggcctgcacgagacggaggaggagaagagctactgggacagcataatgaacctggtgaactcgtcgtcgttgccgacgacatccgtggcagtgcccgctcccgagccagcgtacccgtcctcggcgtcgctgcacacgtcggtggctatgcccgcgctcgtagcgtacccgtcatcggcgccgctgcagacaccggtggcgatgcccacggtcgaggcgtactcgtcatcgacgtcgctgcagcagacgtcggtcatcgcgatgcccgcgcccgaggcgtactcgtcgtcggcctcgttctcgacgtcagtcgctgtgcctgtgcccgcgcccgaggcgtactctccggcgatggagttctgctga

SEQ ID NO: 107059 - DNA, 1571 bp, Zea Mays
ggagaggtgttccttggcgccacgtctctttctgctaaaaggacgccgtgccgttccagtatttaaaccgggaacctccaccctcgcattggtttctcttgatcgcttcgtcacttgaatccgtgcctgctctaatagaggctctgcaatggagcaggagccgcaccggcccatggagctgcccccgggcttccgcttccacccgaccgacgaggagctcatcacgcactacctggcccgcaaggccgccgacgcccgcttcgccgcgctcgccgtcgccgaggccgacctcaacaagtgcgagccctgggacctgccatcgctggcgaggatgggggagaaggagtggtacttcttctgcctcaaggaccgcaagtacccgacggggctgaggaccaaccgggccacggaggccgggtactggaaggccacgggcaaggacagggacgtcttcaggggcaaggcgctcgtcggctccaagaagacgctcgtcttctacacggggagggcgcccaggggagagaagtccggatgggtcatgcacgagtaccgcctccacgccaagctccacggccacggccacggccacggccaaggcgcagccgtcgtcgtcgtccccaaggccgccgggaccaagaacgagtgggtgctgtgcagggtgttcaagaagagcctcgtcgtaggtggtgcagctgcagcagcagcaccaaccgcaggcaagaggggcggcacggagacgtcgtccaactccaagacgggcgacgtagcggccatctcccacctccctccgctgatggacgtgtccggctccggctccggcgccgccgccgcggcggcggcacacgtgacctgcttctccgacgcgctggagggccagttcttggaccagacgacgaccacgccgccgccagaagccgccgccgccgccacggacgacgacggccacctcggcgccctcgccgccgcctcctcctcggccttccagctgcccggcttcgcgcactactactacggcgggggggcgccgcacctgcaccagcaccacggcgccgccagcctggtgcagctcctggagggcagcgttccgccgtgcaataagggcggcgagcgggagcgggagcgggagcggctgagcgcgtcgcaggacacggggctcacctccgacgtcaaccccgagatctcctcctcctccggccaacgcttcgaccacgaccacgaccaccacctctgctgctggggctactgatcgattcgatgagcctacgactaccgatccagcgcgcatcatgcatgcggtcgcgttattactagcgattagtgtatagcactgctgtaaataaaacacctactagtactacatctgcgtgaggtcgacgatcggccgtgtggtgcgtggcaattggcatgcatgcgtcgagctgcctacgttccattatttgctcgtgtgatttgttactgtagacgagtgtgggggtgtgtaattagcattgttgatgtattattattcacgatttggtggaatatctccatggttaaatgacgccgccaaagcatgcatgatatcattacct

SEQ ID NO: 107060 - DNA, 1557 bp, Zea Mays
ggagaggtgttccttggcgccacgtctctttctgctaaaaggacgccgtgccgttccagtatttaaaccgggaacctccaccctcgcattggtttctcttgatcgcttcgtcacttgaatccgtgcctgctctaataggtattagaggctctgcaatggagcaggagccgcaccggcccatggagctgcccccgggcttccgcttccacccgaccgacgaggagctcatcacgcactacctggcccgcaaggccgccgacgcccgcttcgccgcgctcgccgtcgccgaggccgacctcaacaagtgcgagccctgggacctgccatcgctggcgaggatgggggagaaggagtggtacttcttctgcctcaaggaccgcaagtacccgacggggctgaggaccaaccgggccacggaggccgggtactggaaggccacgggcaaggacagggacgtcttcaggggcaaggcgctcgtcggctccaagaagacgctcgtcttctacacggggagggcgcccaggggagagaagtccggatgggtcatgcacgagtaccgcctccacgccaagctccacggccacggccacggccacggccaaggcgcagccgtcgtcgtcgtccccaaggccgccgggaccaagaacgagtgggtgctgtgcagggtgttcaagaagagcctcgtcgtaggtggtgcagctgcagcagcagcaccaaccgcaggcaagaggggcggcacggagacgtcgtccaactccaagacgggcgacgtagcggccatctcccacctccctccgctgatggacgtgtccggctccggctccggcgccgccgccgcggcggcggcacacgtgacctgcttctccgacgcgctggagggccagttcttggaccagacgacgaccacgccgccgccagaagccgccgccgccgccacggacgacgacggccacctcggcgccctcgccgccgcctcctcctcggccttccagctgcccggcttcgcgcactactactacggcgggggggcgccgcacctgcaccagcaccacggcgccgccagcctggtgcagctcctggagggcagcgttccgccgtgcaataagggcggcgagcgggagcgggagcgggagcggctgagcgcgtcgcaggacacggggctcacctccgacgtcaaccccgagatctcctcctcctccggccaacgcttcgaccacgaccacgaccaccacctctgctgctggggctactgatcgattcgatgagcctacgactaccgatccagcgcgcatcatgcatgcggtcgcgttattactagcgattagtgtatagcactgctgtaaataaaacacctactagtactacatctgcgtgaggtcgacgatcggccgtgtggtgcgtggcaattggcatgcatgcgtcgagctgcctacgttccattatttgctcgtgtgatttgttactgtagacgagtgtgggggtgtgtaattagcattgttgatgtattattattcacgatttggtggaatatctccatggttaaatgacgccgccaaa

SEQ ID NO: 107061 - DNA, 1680 bp, Zea Mays
ggagaggtgttccttggcgccacgtctctttctgctaaaaggacgccgtgccgttccagtatttaaaccgggaacctccaccctcgcattggtttctcttgatcgcttcgtcacttgaatccgtgcctgctctaataggtattaggtactactaggcaattggcaggactaattttccctctctgttataacaacgacttcttcagtgctagctctatctatctatctatctattggtctcgtgtattgattactctacttgtcggctgtggcgcacagaggctctgcaatggagcaggagccgcaccggcccatggagctgcccccgggcttccgcttccacccgaccgacgaggagctcatcacgcactacctggcccgcaaggccgccgacgcccgcttcgccgcgctcgccgtcgccgaggccgacctcaacaagtgcgagccctgggacctgccatcgctggcgaggatgggggagaaggagtggtacttcttctgcctcaaggaccgcaagtacccgacggggctgaggaccaaccgggccacggaggccgggtactggaaggccacgggcaaggacagggacgtcttcaggggcaaggcgctcgtcggctccaagaagacgctcgtcttctacacggggagggcgcccaggggagagaagtccggatgggtcatgcacgagtaccgcctccacgccaagctccacggccacggccacggccacggccaaggcgcagccgtcgtcgtcgtccccaaggccgccgggaccaagaacgagtgggtgctgtgcagggtgttcaagaagagcctcgtcgtaggtggtgcagctgcagcagcagcaccaaccgcaggcaagaggggcggcacggagacgtcgtccaactccaagacgggcgacgtagcggccatctcccacctccctccgctgatggacgtgtccggctccggctccggcgccgccgccgcggcggcggcacacgtgacctgcttctccgacgcgctggagggccagttcttggaccagacgacgaccacgccgccgccagaagccgccgccgccgccacggacgacgacggccacctcggcgccctcgccgccgcctcctcctcggccttccagctgcccggcttcgcgcactactactacggcgggggggcgccgcacctgcaccagcaccacggcgccgccagcctggtgcagctcctggagggcagcgttccgccgtgcaataagggcggcgagcgggagcgggagcgggagcggctgagcgcgtcgcaggacacggggctcacctccgacgtcaaccccgagatctcctcctcctccggccaacgcttcgaccacgaccacgaccaccacctctgctgctggggctactgatcgattcgatgagcctacgactaccgatccagcgcgcatcatgcatgcggtcgcgttattactagcgattagtgtatagcactgctgtaaataaaacacctactagtactacatctgcgtgaggtcgacgatcggccgtgtggtgcgtggcaattggcatgcatgcgtcgagctgcctacgttccattatttgctcgtgtgatttgttactgtagacgagtgtgggggtgtgtaattagcattgttgatgtattattattcacgatttggtggaatatctccatggttaaatg

SEQ ID NO: 107062 - DNA, 1184 bp, Zea Mays
aaccagagccaacagagcaacgcccaggccccaggcacacactacacgaaccaggcaaccagctgggaggaaccctagcggaacactgtgcaggtgacagcggcgcgctaccggtgacgggggatacggcggcatcgtccccctcggtccctcctccatcccccgcgcggcggcgccagcagccggcctgcagaaccatagcaacactttggtgcgcttaagatgtccatcctccgatcctttctcccaatagtagcaagatcaaatggttggagatgcttttctactgggattccttctgatatgatagcggaccttaataaggaaatggagtcaatatttggcgaacctccatcatccagtcctttgggctcaagtccgtccccccagcagccagtggaggattcaccactagtgcttacccatactgatagcagcggacaggccaatatggttgacgtctctcccaaagaagacagtaagagagtcgctatagctagctgcagggttttgctaggccaaaaggtgttcaatttggtggcatctaacgagatttcgaaaggtgatgtccttactgttgcaaagattgctggaataactggtgcaaagcaaaccagcaatcttatacccttgtgccacaacattaatctttcacatgttcgtgttgatctcactctaaatgaagaggactctagtgtcgtgatagaaggggaagccacaaccagcggaaagacgggggttgagatggaagcattgagtgctgtagccattgctggccttacagtttatgacatgtgcaaagctgcttcaaaggacatttgtataacagatgtctgtctccaacataagtctggagggaagagcggaagctgggccaggaattaaaaggttaaattgttgctctgaggatatgaactgcaagcatgattccggcatctatagggcttctaggtcacttggataatttgacaccggtgcatggtgtttcgaaccgcatatcgtaattaccatgtaatgttattttgtagtatttgaagaaattgatgaagatgtcagacacagaatcaaagcaagctagatgaaacagcgttaagcatctagtaatgttttatatgacaaaatggtaccatagatgataaaaagaacaagttttatacaatggcaattagatttgttatgttgta

SEQ ID NO: 107063 - DNA, 1104 bp, Zea Mays
aaccagagccaacagagcaacgcccaggccccaggcacacactacacgaaccaggcaaccagctgggaggaaccctagcggaacactgtgcaggtgacagcggcgcgctaccggtgacgggggatacggcggcatcgtccccctcggtccctcctccatcccccgcgcggcggcgccagcagccggcctgcagaaccatagcaacactttggtgcgcttaagatgtccatcctccgatcctttctcccaatagtagcaagatcaaatggttggagatgcttttctactgggattccttctgatatgatagcggaccttaataaggaaatggagtcaatatttggcgaacctccatcatccagtcctttgggctcaagtccgtccccccagcagccagtggaggattcaccactagtgcttacccatactgatagcagcggacaggccaatatggttgacgtctctcccaaagaagacagtaagagagtcgctatagctagctgcagggttttgctaggccaaaaggtgttcaatttggtggcatctaacgagatttcgaaaggtgatgtccttactgttgcaaagattgctggaataactggtgcaaagcaaaccagcaatcttatacccttgtgccacaacattaatctttcacatgttcgtgttgatctcactctaaatgaagaggactctagtgtcgtgatagaaggggaagccacaaccagcggaaagacgggggttgagatggaagcattgagtgctgtagccattgctggccttacagtttatgacatgtgcaaagctgcttcaaaggacatttgtataacagatgtctgtctccaacataagtctggagggaagagcggaagctgggccaggaattaaaaggttaaattgttgctctgaggatatgaactgcaagcatgattccggcatctatagggtatgtagtccttacaccaaaaggtttctgctttgaatgtaggctccttgactctttttgtaacatcatttgagcctgtgcactcctgagttgtatatacgctgttcaaggactttataataaatggctctatcaatttattttcagatttgtagttggtt

SEQ ID NO: 107064 - DNA, 897 bp, Zea Mays
aaccagagccaacagagcaacgcccaggccccaggcacacactacacgaaccaggcaaccagctgggaggaaccctagcggaacactgtgcaggtgacagcggcgcgctaccggtgacgggggatacggcggcatcgtccccctcggtccctcctccatcccccgcgcggcggcgccagcagccggcctgcagaaccatagcaacactttggtgcgcttaagatgtccatcctccgatcctttctcccaatagtagcaagatcaaatggttggagatgcttttctactgggattccttctgatatgatagcggaccttaataaggttaagcatttgactttcttttggatattgtcattttgtgcaactatcttgccttcacttacttaactaagtatgagacatgtcatgtacattggcacattctacaaacttaatgaaactgaatacagtggtaggttcagtactccaggttccagatatgtagctgtatgacgatttcaattaaagttataacattacctgacagtttacaatggcttctgatgatgtcccaagtatgtttgtttgatgcctctattagaacaacatatgtgtgattcttgatgttgacaaccaaaagttacgcactattatattcgtgagtagaaacacatgtaaaactaccacaatgccaaatagagagatcagactggtgttcacaattctaaagtcatgcccccttttactttacaagttgtgatcatgagtttgaaactatgaattgtcacttaagtttacacccttgcagctgctgcattataatgcaatatccagaaaaagctaaacaagtaaacatttgtttgtagatttgtcctgtgcaatgttgcatgaatgtgtgtttaaatatttgttatt

SEQ ID NO: 107065 - DNA, 993 bp, Zea Mays
atgatgaaggacgcggtgatcgagcacggggagagctccatggcgcccctggtggcggcgtcagtagcggcgggcggcgtcggccgcgcggtgtccatcgccgacgtcttcctcaggttccttgccatcgtggccaccatcggcagcgccgtctccatgggcaccaccaacgagacgctccccttcttcacgcagttcatccagttcgaggccaagtacagcgacctcccgtccttcaccttcttcgtggcggcgaacgcggtggtgtgcacgtacctcgtcctgtccatcccgctgtccatcgtgcacatcgtcaggcccagggctcactacagccgtctgatcctcgtcttctttgacgcggtaattcgttcatttcattcacgtcgcttgcatatttattaggcgaggaagaacttgcttaacgcctgctgttcggattattactaggcgatgctggccctgctgacggccggcgcgtcggcggcggcggcgatcgtgtacctggcgcacaagggcaacgtgcgcgccaactggttcgccatctgccagcagttcgactccttctgcgagcgcatctcgggctcactcatcggctccttcgccgccatggtcctgctcatagccctcatcttcctatctgccctcgcgctcgcccgacgccactgatgatcaggccccgtctatcagcgctgggcatgcatgatcgcaatgaaggccgagaggatttgttgttctcctctggtcgatttgatcgtgcatgcaccaatactaatgcttgcatttgcttctgctgtgtggtctttttttttctttcgtttttattactcgtttgctctttgatctgaattgctagtagatctctcttccactctttcaaactgtgtggtcctccaactataaaggacgagtttcaggtttgtagtgtcatggtaatgatcggaaagaaaaaggaaaactatacaatgcaacttcatctcgatctgtcgcgga

SEQ ID NO: 107066 - DNA, 643 bp, Zea Mays
ttttcatgtagtactctaacttggtgtacaaaagtcaaacgagcgagtattaagatacatcaattcccatatacagcagactcttcagccagcaagaatcattcatgtcacatgactcaaccaagcactacataaatgttaacatcacagtgtttttccaaaaacctgaggagcacagccgcagctgcggggctgaactagcaagcagcggagacgaagacgaagggcgatgatgcctcccgagtcccacatggctggggcgcatcagagattcagagggaaaggaaaccttccttgacgaagagggcgaagaggatgacgacgaagcccgcggcgacgcactgcgtgctggtcaccgccgtctgctggtacgccagcagcgtcacggcggtgcccacgcacccgatcaggaacccactcaggttccggtccatgccgtcgacgccgacgccgacgccgcttcttcttgcctcctgccctcgctggctcgctgccaattgctctctggcttctctctgctcgggtgctgttgcgtgtggagacgagacgaaggattcgggagctggggatggggaattaaagcagaaaagtcaacggccgcggtgctggtgacaggccacggagtcagctcatgaagggctcg

SEQ ID NO: 107067 - DNA, 1466 bp, Zea Mays
ccgggagttggcatgccaacgctgtttgttggagcgtttttttctctcggtctctcactttctctctctctcccaggcgtcgggctgctgtccatcccgtacgcgctgtcggagggcgggtggctgagcctggcgctgctgctcctcgtcgcggccgtctgctgctacacgggcctgctcctgcagcggtgcatggacgcgtccccagccgtgcgcgggtacccggacatcggcgccctggcgttcgggcgcggcggccgcctcgccgcgtccgcgttcctctacgccgagctctacctcgtcgccatcggcttcctcatcctggagggggacaacctggacaagctgttcccgggcaccagcctcagcctcggcctccgcggcgccgccctcgtggtctccgggaagcagctcttcgtcgtcctcgtcgccctcgtcatcctgcccaccacgtggctccggagcctcggcgtgctcgcctacgtgtccgccagcggcgtgctcgcgtcggccgtcgtcgtcgtctgcgtgctgtggaccgcgctggccgacggcgtcggcttccgggccagggggaggatgctcaacgtcagcggcctccccactgctctcggcctctacaccttctgctactgcggccatgccatcttcccaacgctctgcatctccatgaaagaaaagaaaaggttctccagggtgcttgtgatatgcttcgccgcatgcactctcaactacgcatccatggcgatcctcggctacctcatgtacggcgacgacgtcaagtcccaggtgacgctgaacctgcccgagggcaaggtcgtctcgaagctagcgatctacaccacgctgatcaaccccttctccaagtacgccctgatggtgacgccgctctcaacggcagtggaggagaagctgctcgccgccggccgcggcggcaagagtagtaggtccgtcagcgtgctggtcaggactctgctggtcgtcaccacggtcgtcgtcgcgctcgcggtgcccttcttcggccacctgatggcgctcgtcggctcgctgctcagcgtcatggcctcgatgctgctcccctgcatcttctacctcaagatctttggcgcggcgcgctgcggcagggcggaagtcgcgcttgtcgccaccattattgttctgggttccgtggttcttgcgactgggacgtacgcctctgtgaagaagattgttcaggattactgaagacgagatgtctggaaatgtcggtggcagtgtcacagtcattgttggcgttcttttgccgcgatcgacagtcccatatctcaacatcagcagattaggtgaaccaattagaaggtgttctttaaaaaatcagttagaagatgtttgtagacaaagtaaggagagacggaaggaacagtgatgtactgaaaacataatagggtgatacgcttctatattggcgtgagctactattttatctt

SEQ ID NO: 107068 - DNA, 321 bp, Zea Mays
tgttctgttcgcttctgctcccaccgcgtgcttgcgtggcgctgccccagcctgctagctagcctgcaacggaaggggccggataagatggcagatggtggggcggcgtcgcgcggccctcccgacggctcgccgccggccgcgctgctgctgctgcagcagcccctcctccacgcctacgaggcccgcaaggacccggcggcgtgcggccgggaggcgcacgggcacggcttcggcccggaccccgacggcgccggcttcggcggaagtccgatcttcgtgcggacctgcttcaatggcctttacggcctctccggtgaa

SEQ ID NO: 107069 - DNA, 1967 bp, Zea Mays
gaccatgagtcataataaaaatgctttaaaatagaaacattgagacataaaagaatatattgtcaagaatgatatagaaacgcttcaaaatcaaatggaaaaatagaaaaaaaaaatcaaaaccatgaggtgataataaaaatgtttcgaaatggaaacttagaaattaaaaagaacattgtcaagaatgatatagaacattagaaatgcttccaaaacaaaatgaagaaaaaataaaactttaaaagttttattgtcaagaatgctatagaaatgattcaaaaatcaaaatcaataaataagggattcgaaatggaagggacttagaaattaaaaataattgtcaaaaatgggatttgaaccaatgccctttcagttcggtacctaaaactgatactttaaacactcgaccatcttaactagttgacttacatgcagattattaaaataatagtatattacatcattacgtttggcaaaacatctgttctcctacttaaacagaaaggacagaaccctgagccggaacaaaatggcggcgctcataaaccctatataccgccgactcgccgccttcgcctgccgccggatctctgcaccggcggtagagaagcccgtgctgcccctcgtgtatcaccggaacttgcagcaaagacacaattccagtttggtggatgcgagtggaggattcagcgagatgcttgcctctacacggaggtgctatgtatttggaggcaaaggtggtgtggggaaaacaagcatggcggcgtcgcttgctgtgaagtttgccaaccatggtgaaccaacagctattgtttcgacggaaccatctccgtcactcggtgatttatttgaacaagacatgggtgttggcggcaaaactgtacgcatcactggatttgactctctttttgcagttgaggctggtcagttcaagataaagggagaacctgaagatcttggatcttttatcaacaatttacttggaaagatggggcttggaacacattctgatattatgtctatgattagagagatgctggatggaatgccccctggacttgaagaagcgcttgtactatcaaaggtgataaaatctattgacgtgcaagaggccgatatacttcggcgtttagtgctggatgctccatccactggacatacacttaagcttctgtcagcttctgattggattgaaatgttccttactttgagcattaagggcataaaagtggcttcgtccatgccatcgtttaatatgtatcttgaggacgtgcaattcatctctgccaggctagaggaactaaggcagcaggttcgcagagtgcgtgagattttgtttgatccacaatcaacagaattcatcgttgtgacaattccaacgatgatggcagttactgagtcatcaaggtttcacgagtcattaaagaaggatggtgcacacacaagaaggctcgtcataaatcaggtgttgccaccgtctgcgtcggactgcagattctgtgctgcaaaacggagggaagaagcacgtgccttccgtgcgatactggaggaccgagaactcggcggcctgaagctgatccaggctccgctccttgatatggaggtgaaaggcgtccctgcactccgattcctcagcgattcagtgtggaagtagcgagaaacactaggtcaaataaaagattaatctctgtcggtctgttcggattctttcatttggttggagttagaatctagttcatgaatttggcctagaatctggcattcgaccacgttctatcactcttctcaagtatagacctgtgtcaaattcagagggcaagaaatggtagtagtttttttttttttggtcacagcttatactagttcacaacagcacaccaatggataaccctcgcttgacgcttgtgttagtatctgttttctgaaatgccgagggataagatggaatgaactcagcattcagt

SEQ ID NO: 107070 - DNA, 1245 bp, Zea Mays
gatcttctctttattgatattgtgacctgagataaatggagatgcttgaactttcctcggggttattagtttcatatccttgtttttgttctttagcacgtatcaccttatatcagttccttagcattgttgcttagtggtcagttgatccagcataacacttacatttttcgtttgatgctgtctaatgccaaggatattgtcccaaataaagtatttattttctgttgctcgagaagagaagttttctttcttttaaattatttatagatcacattacctgtgcatgcatttgtcctttcatggttgcaaagtctatgattagagagatgctggatggaatgccccctggacttgaagaagcgcttgtactatcaaaggtgataaaatctattgacgtgcaagaggccgatatacttcggcgtttagtgctggatgctccatccactggacatacacttaagcttctgtcagcttctgattggattgaaatgttccttactttgagcattaagggcataaaagtggcttcgtccatgccatcgtttaatatgtatcttgaggacgtgcaattcatctctgccaggctagaggaactaaggcagcaggttcgcagagtgcgtgagattttgtttgatccacaatcaacagaattcatcgttgtgacaattccaacgatgatggcagttactgagtcatcaaggtttcacgagtcattaaagaaggatggtgcacacacaagaaggctcgtcataaatcaggtgttgccaccgtctgcgtcggactgcagattctgtgctgcaaaacggagggaagaagcacgtgccttccgtgcgatactggaggaccgagaactcggcggcctgaagctgatccaggctccgctccttgatatggaggtgaaaggcgtccctgcactccgattcctcagcgattcagtgtggaagtagcgagaaacactaggtcaaataaaagattaatctctgtcggtctgttcggattctttcatttggttggagttagaatctagttcatgaatttggcctagaatctggcattcgaccacgttctatcactcttctcaagtatagacctgtgtcaaattcagagggcaagaaatggtagtagtttttttttttttggtcacagcttatactagttcacaacagcacaccaatggataaccctcgcttgacgcttgtgttagtatctgttttctgaaatgccgagggataagatggaatg

SEQ ID NO: 107071 - DNA, 2032 bp, Zea Mays
gaccatgagtcataataaaaatgctttaaaatagaaacattgagacataaaagaatatattgtcaagaatgatatagaaacgcttcaaaatcaaatggaaaaatagaaaaaaaaaatcaaaaccatgaggtgataataaaaatgtttcgaaatggaaacttagaaattaaaaagaacattgtcaagaatgatatagaacattagaaatgcttccaaaacaaaatgaagaaaaaataaaactttaaaagttttattgtcaagaatgctatagaaatgattcaaaaatcaaaatcaataaataagggattcgaaatggaagggacttagaaattaaaaataattgtcaaaaatgggatttgaaccaatgccctttcagttcggtacctaaaactgatactttaaacactcgaccatcttaactagttgacttacatgcagattattaaaataatagtatattacatcattacgtttggcaaaacatctgttctcctacttaaacagaaaggacagaaccctgagccggaacaaaatggcggcgctcataaaccctatataccgccgactcgccgccttcgcctgccgccggatctctgcaccggcggtagagaagcccgtgctgcccctcgtgtatcaccggaacttgcagcaaagacacaattccagtttggtggatgcgagtggaggattcagcgagatgcttgcctctacacggaggtgctatgtatttggaggcaaaggtggtgtggggaaaacaagcatggcggcgtcgcttgctgtgaagtttgccaaccatggtgaaccaacagctattgtttcgacggaaccatctccgtcactcggtgatttatttgaacaagtacctgaaagcctctgtcagcttgtcgaaaaaaatctctttagtatctttgttgaatgtcttgcttgtgctgtttataggacatgggtgttggcggcaaaactgtacgcatcactggatttgactctctttttgcagttgaggctggtcagttcaagataaagggagaacctgaagatcttggatcttttatcaacaatttacttggaaagatggggcttggaacacattctgatattatgtctatgattagagagatgctggatggaatgccccctggacttgaagaagcgcttgtactatcaaaggtgataaaatctattgacgtgcaagaggccgatatacttcggcgtttagtgctggatgctccatccactggacatacacttaagcttctgtcagcttctgattggattgaaatgttccttactttgagcattaagggcataaaagtggcttcgtccatgccatcgtttaatatgtatcttgaggacgtgcaattcatctctgccaggctagaggaactaaggcagcaggttcgcagagtgcgtgagattttgtttgatccacaatcaacagaattcatcgttgtgacaattccaacgatgatggcagttactgagtcatcaaggtttcacgagtcattaaagaaggatggtgcacacacaagaaggctcgtcataaatcaggtgttgccaccgtctgcgtcggactgcagattctgtgctgcaaaacggagggaagaagcacgtgccttccgtgcgatactggaggaccgagaactcggcggcctgaagctgatccaggctccgctccttgatatggaggtgaaaggcgtccctgcactccgattcctcagcgattcagtgtggaagtagcgagaaacactaggtcaaataaaagattaatctctgtcggtctgttcggattctttcatttggttggagttagaatctagttcatgaatttggcctagaatctggcattcgaccacgttctatcactcttctcaagtatagacctgtgtcaaattcagagggcaagaaatggtagtagtttttttttttttggtcacagcttatactagttcacaacagcacaccaatggataaccctcgcttgacgcttgtgttagtatctgttttctgaaatgccgagggataagatggaatg

SEQ ID NO: 107072 - DNA, 686 bp, Zea Mays
atgagagccctcgccctcacgctgccagctcttgtccttgctgctctcctaagctgcacccccgagatctctgccgtcagagtcccggcggccactctcgccgaccagacgagcaaccggcggggcgcctcgtcgccaccggcggcagccgagcagccaacaaggaaggcggcgagcgacgatgacgctgccgccgccgccgccgccgcaagcagcgccagggccagcaggctcgacgacgcgtccgccagctggaaggcgcccgcggttgccggcggcgcctcgtattcccctcctccgtcggccgtgttcgaccccgataggatgagcaagcgccgcgtccgcagaggctccgaccccatccacaacaagtgctagctgatcccgagtgtgcgtccgtggcgagttctcgtcaagtgtcgattctctcgctttgtttcctccgcctctccatttctctaatctgctccttcgctttattttttttttcttcttcttctttcgttaccactttttttttctcttctctttgaggtttgaccgtttgagcgcgcagttctgctgcctaccgtgttgtagggcgcagtcggttttgtgctacagaaatacttgtacagagatgcatgcatgccaatgaaaggcgaatgccggtcgaatggacacgctgccgcaccttgcaagccgac

SEQ ID NO: 107073 - DNA, 1581 bp, Zea Mays
atgcagtgcctaccctgcggaccgtccaccaacgcgcccgctgcgcatgccgcggccaggagcgtcagccgtcggagggttgtcgtcgaagggcgtcacctcggcaacccacgacagcgaggaagcgcctccaaggtcaatgagggcaacaggtgaccgtggtgcaatgtcaagcaaaaccttatggctcgtgtcaaagaggaagcttattgctttgtcagccttttgtcttagcttacattcttcaaggtactttccagcatttgctttgggtgatacgtctgtcaaaatcgaggatgtgactcctaagatttttccatctgggccattatttccaactgagaaacggattgcagagctatttgaaataaatacttactcagttgtgaacatttttgatgcaacactacggccgcagcttaatgttactggtgttgtggagatccctgaaggaaatggttctggtgtagtgtgggacgattttggacatattattacaaattatcatgttgttggcagtgctctttcaaaaaatccgaagcctggtgatgttgttgcacgcgtcaacattcttgctgctgaagggatacagaaaaattttgaaggcaaattggttggtgcagatcgtgctaaagatcttgctgttcttaaggttgatgctcctactgatcttttgaagccaattaatgtgggacaatcctcggccctaagagttggtcagcaatgcttagcaattggaaatccttttggttttgaccatactctaacagttggtgttatcagtggtttaaatcgagatattttaagtcaggctggggtgacaattggaggcggaattcaaacagatgcagctattaaccctggtaacagtggtggtcctttgcttgactcaaaggggcatatgattggtattaatgcagcaattttcacacagacagggacatccgctggtgttggcttcgctatcccatcatcaaccgtacttaaaatcgctcctcagttaatccagtttggaaaagttcgccgtgctggcttgaacgtggacttcgctccagatccaattgcgtatcagcttaacgttcgcaacggagctcttatactcaaggtacctgggggcagcgccgcagccaaagcagggcttgctccgaccagcaggggttttgccggtaacatcgttctcggtgacatcgttgtcgctgtggatggcaagcctgttaaaggcaaatctgacctgctgagggttctagatgactacggtgtcggagaccaggtgagcttgacgatccggcgaggctccgagaccctggaggcgacgctgcctttagaagaggcagacatgtgagcagtttgtggaaaatagaacccacgtataccgagctgtccacgactgtcgtcccattggaaacaattccatttcactaggaaatattgaagtgtccttttcgctctggacattcccttccatgcacgtgtatgagcatgatcatgagcttcacttctcgtgcttgtagttgccttaagatcagacagcctgatgttggagaacaagctgacctgttagttggattctgttgtcatctc

SEQ ID NO: 107074 - DNA, 1748 bp, Zea Mays
ccctccagctcctatccccaaactcgattgcagctcgtgcaccacacacggacacgaatcctcctccgggtcctccctctggaaaaccaggactacctcggatcagatgcagtgcctaccctgcggaccgtccaccaacgcgcccgctgcgcatgccgcggccaggagcgtcagccgtcggagggttgtcgtcgaagggcgtcacctcggcaacccacgacagcgaggaagcgcctccaaggtcaatgagggcaacaggtgaccgtggtgcaatgtcaagcaaaaccttatggctcgtgtcaaagaggaagcttattgctttgtcagccttttgtcttagcttacattcttcaagcatttgctttgggtgatacgtctgtcaaaatcgaggatgtgactcctaagatttttccatctgggccattatttccaactgagaaacggattgcagagctatttgaaataaatacttactcagttgtgaacatttttgatgcaacactacggccgcagcttaatgttactggtgttgtggagatccctgaaggaaatggttctggtgtagtgtgggacgattttggacatattattacaaattatcatgttgttggcagtgctctttcaaaaaatccgaagcctggtgatgttgttgcacgcgtcaacattcttgctgctgaagggatacagaaaaattttgaaggcaaattggttggtgcagatcgtgctaaagatcttgctgttcttaaggttgatgctcctactgatcttttgaagccaattaatgtgggacaatcctcggccctaagagttggtcagcaatgcttagcaattggaaatccttttggttttgaccatactctaacagttggtgttatcagtggtttaaatcgagatattttaagtcaggctggggtgacaattggaggcggaattcaaacagatgcagctattaaccctggtaacagtggtggtcctttgcttgactcaaaggggcatatgattggtattaatgcagcaattttcacacagacagggacatccgctggtgttggcttcgctatcccatcatcaaccgtacttaaaatcgctcctcagttaatccagtttggaaaagttcgccgtgctggcttgaacgtggacttcgctccagatccaattgcgtatcagcttaacgttcgcaacggagctcttatactcaaggtaaactgcatgtatcagatgttcgcttgcactagcatctccctttcctaccggacgttggctcctccgtaggtacctgggggcagcgccgcagccaaagcagggcttgctccgaccagcaggggttttgccggtaacatcgttctcggtgacatcgttgtcgctgtggatggcaagcctgttaaaggcaaatctgacctgctgagggttctagatgactacggtgtcggagaccaggtgagcttgacgatccggcgaggctccgagaccctggaggcgacgctgcctttagaagaggcagacatgtgagcagtttgtggaaaatagaacccacgtataccgagctgtccacgactgtcgtcccattggaaacaattccatttcactaggaaatattgaagtgtccttttcgctctggacattcccttccatgcacgtgtatgagcatgatcatgagcttcacttctcgtgcttgtagttgccttaagatcagacagcctgatgttggagaacaagctgacctgttagttggattctgttgtcatctc

SEQ ID NO: 107075 - DNA, 1687 bp, Zea Mays
ccctccagctcctatccccaaactcgattgcagctcgtgcaccacacacggacacgaatcctcctccgggtcctccctctggaaaaccaggactacctcggatcagatgcagtgcctaccctgcggaccgtccaccaacgcgcccgctgcgcatgccgcggccaggagcgtcagccgtcggagggttgtcgtcgaagggcgtcacctcggcaacccacgacagcgaggaagcgcctccaaggtcaatgagggcaacaggtgaccgtggtgcaatgtcaagcaaaaccttatggctcgtgtcaaagaggaagcttattgctttgtcagccttttgtcttagcttacattcttcaaggtactttccagcatttgctttgggtgatacgtctgtcaaaatcgaggatgtgactcctaagatttttccatctgggccattatttccaactgagaaacggattgcagagctatttgaaataaatacttactcagttgtgaacatttttgatgcaacactacggccgcagcttaatgttactggtgttgtggagatccctgaaggaaatggttctggtgtagtgtgggacgattttggacatattattacaaattatcatgttgttggcagtgctctttcaaaaaatccgaagcctggtgatgttgttgcacgcgtcaacattcttgctgctgaagggatacagaaaaattttgaaggcaaattggttggtgcagatcgtgctaaagatcttgctgttcttaaggttgatgctcctactgatcttttgaagccaattaatgtgggacaatcctcggccctaagagttggtcagcaatgcttagcaattggaaatccttttggttttgaccatactctaacagttggtgttatcagtggtttaaatcgagatattttaagtcaggctggggtgacaattggaggcggaattcaaacagatgcagctattaaccctggtaacagtggtggtcctttgcttgactcaaaggggcatatgattggtattaatgcagcaattttcacacagacagggacatccgctggtgttggcttcgctatcccatcatcaaccgtacttaaaatcgctcctcagttaatccagtttggaaaagttcgccgtgctggcttgaacgtggacttcgctccagatccaattgcgtatcagcttaacgttcgcaacggagctcttatactcaaggtacctgggggcagcgccgcagccaaagcagggcttgctccgaccagcaggggttttgccggtaacatcgttctcggtgacatcgttgtcgctgtggatggcaagcctgttaaaggcaaatctgacctgctgagggttctagatgactacggtgtcggagaccaggtgagcttgacgatccggcgaggctccgagaccctggaggcgacgctgcctttagaagaggcagacatgtgagcagtttgtggaaaatagaacccacgtataccgagctgtccacgactgtcgtcccattggaaacaattccatttcactaggaaatattgaagtgtccttttcgctctggacattcccttccatgcacgtgtatgagcatgatcatgagcttcacttctcgtgcttgtagttgccttaagatcagacagcctgatgttggagaacaagctgacctgttagttggattctgttgtcatctc

SEQ ID NO: 107076 - DNA, 1950 bp, Zea Mays
tattgataggacctgatgttttgtctcaaggtccagaagctcaacaaaattttttgcagaaccccttggtattcccattgcgatgccaacacgacggctatgagaatagttggtggcaaatcttaaaagatggtacatggcttttggatcccttatatttaccggagcaaagcaaaaattatagcgatccttgaggcatagcccctgcaccctctcaagcatattagcaaccttcttgatactgtcctgctggcacatgaagtatgttttatcgatgcgacaactatcacggaatttatccaacagatcattaaaagaaaggttagggaattggctggcaaacatttcaacttgctcaaagcaaggaaaaataccagctttttgtgcctcctcaaatggctgctgcaggcactgaatcaaataatctaaatcatctttcaagaaagttgttgtgagtccatctggatagacactgcccctccgaccagcacgaccagcaatctgctttacctgcgaagcgggaactggaaccatcctttccccattgtattttgccaagctatagaacacaactctcctaatgttaaggttcagccccataccgactgcatcacttgctataagcacatcatactcattatcctgctcgttgaacaactttgcttgttgtcgtcgtgtctctggtggcagagctccatagataacacaacacttgtgctttgtaaacttctcaattgccagcttcacctcgaatatctccttgcgtgagaaagcaacaacgcagtcaccagagcggatattcttgaggtccccaagaagtgtctttgcttcaacaacaagaggcttgaatctctcatattgatgcaccactaaatcatccccagtatctgcacaaatcttctggacaatcttgagcacgctagggtcaccgcagaggtgtatctcatccgccttgagcccaagcacagcgcgcgaccacgcaaagcccctgacagggtcagccatcatctgtatctcatcaaccacggcgacttcgtagagctcctcagtggacatcatttcaatggtacatgcgacatggttggagaaaggcacttccttaacctcttgtccagtgcgcaggctgcagtagacaccgagcgcattgaccttgtcgaagatctccatggcgaggagacggagcgggctgcagtagaccccagacttggctgcggcaaagcgggtgagcgcgttgtgcgtcttgccgctgttcgtgggcccgcagtggtacacgatacggcggcgcatagcgcgcgcgaaggggtaccaggtgtgcggggccgtgaggtcggccgcggccatgaccgacctgtgctgcctcagcttgtctgcgaagttggagaagcagaactctgcgaaggccgggaggaggagctcgtgtgcgtcctcagcggggagcgagaggagatgcgccgcggactcccgggagagtcgcgggaggatgaacgcgcggaagcggcggacgtaggatgggaaggcagaagaggggacgtagagcgcgagcgcctggtcggatatggccggacttttggcgaagccgcggacgaggcctacaatggcatcccacgtggccttcggcaggcggcaggatccgacggcggggtccgaggcggatagctcgcgccatagcttcttcgggtcaagagaagacgtcggtttctgggtgggatcgccggctgattcgccggtggagaagaagcggtgttggggtgggagccatggggacgagggttgcggaaaggtgcggtggaggtgagagaggagaggtaatatgagacggtggtgcgaggtggagcggcggagaagcgccgcggcaatggcggcggccatgaggttggttggttaggccggcggcatgaggctggggcttgggggaagaacgactgaacgagggatccaaatcctgtgaac

SEQ ID NO: 107077 - DNA, 450 bp, Zea Mays
cattgtcgagggacggattataatcgacttccagcaaaggaaatcgcaacgttgtatgatgtgggtttgtatgtaatgtaaactgttggtcgcagcttctcacgtatagatcccaactctttattcagagatgacagaattatcaaaattggacccgacattatttcttgggaacgagcagagtttgctttaccgatgaagcgacacagaccatctgcgtacaatccactagtagaatctatcatgacaaactcagctaatgttccagaggtagtagtcttccgtatgtcaaccagatgctctacatctgattttggagagattatccactctggttcaagggccaccatcgaaaaggttccaatcacgcacattgaaattcgtcactgcaagtttgaagacctcagacattggcaagcaccctacttgttcagcaggatgatgtcttga

SEQ ID NO: 107078 - DNA, 1609 bp, Zea Mays
tgctatccgaaatctgatccctccccgaatcccgacctcacgatccccgatcgcggccacgcgcaccacaaacgcgcgcgcccccaatccgccaactcgtatcgtatatacgcgcccgcttgttggctagcatcgtcatcttgtcttgatcctctggtccgtggccatggcgtcgtccatgctctccgctaccaccgtgccactccagcaggggggcggcctgtccgagttctccgggctcaggagctccgcgtcgctgcccatgcgccggaatgccacctccgacgacttcatgtccgccgtctccttcaggacccacgcggtcggcacgagcggcgggtcgcggcgggcgccgacggaggcgaagctgaaggtggccatcaacgggttcggccgcatcgggcgcaacttcctgcggtgctggcacgggcgcggcgacgcctcgcccctcgacgtcatcgccatcaacgacaccggcggtgtcaagcaggcgtcccacctgctcaagtacgactccacgctcggcatcttcgacgccgacgtcaagcccgtcggcgacaacgccatctccgtcgacggcaaggtcatcaaggtcgtgtccgaccgcaaccccagcaacctgccgtggggcgagctcggcatcgacctcgtcatcgagggcaccggcgtcttcgtcgaccgcgagggcgcggggaagcacatccaggcgggggccaagaaggtgctcatcacggcgcccggcaagggcgacatccccacctacgtcgtcggcgtcaatgccgaccagtacaaccccgacgagcccatcatcagcaacgcctcctgcaccaccaactgcctcgcgccattcgtcaaggtgctcgaccaaaagttcggcatcatcaagggcaccatgaccaccacccactcctacaccggcgaccagaggctgctggacgcgagccaccgcgacctgcgccgcgcccgcgccgccgcgctcaacatcgtgcccacgtccaccggcgccgccaaggccgtctcgctggtgctccccaacctcaagggcaagctcaacgggatcgcgctccgggtgcccaccccgaacgtctccgtcgtcgacctcgtcgtgcaggtctccaagaagaccctcgccgaggaggtgaaccaggcgttccgcgacgccgcggccaacgagctcacgggcatcctcgaggtctgcgacgtgccgctcgtgtccgtcgacttcaggtgctccgacgtctcctccaccatcgacgcctccctcaccatggtcatgggcgacgacatggtcaaggtcatctcctggtacgacaacgagtggggctactcgcagagggtcgtcgacctcgctgacatctgcgccaaccagtggaagtgaagcgttgcattgtaatagcactttgtaactcctcaccctccacagggctttgggattcaccccgaaatgactcactttcggtgaaattcacccgtttcggcgaggtcgtccgaatataccggccaaatgtttccattggatttcaattattagtcaactctagagttgaaacaaacatacaagttcttcattcaataatcaatatagaagtgcatatctgtttcctcttca

SEQ ID NO: 107079 - DNA, 1776 bp, Zea Mays
tgctatccgaaatctgatccctccccgaatcccgacctcacgatccccgatcgcggccacgcgcaccacaaacgcgcgcgcccccaatccgccaactcgtatcgtatatacgcgcccgcttgttggctagcatcgtcatcttgtcttgatcctctggtccgtggccatggcgtcgtccatgctctccgctaccaccgtgccactccagcaggggggcggcctgtccgagttctccgggctcaggagctccgcgtcgctgcccatgcgccggaatgccacctccgacgacttcatgtccgccgtctccttcaggacccacgcggtacgtgcctgccccggccgatcgatccaccctcatgcagccgcgtaggaaagtagctttgtatcgtattgcacgtacggccggctttggggattcacacgtgtgtgtatgcgctgctgctgcctggcttgctcgctcgctcgctcgtgcatcacatcaacaaccaggtcggcacgagcggcgggtcgcggcgggcgccgacggaggcgaagctgaaggtggccatcaacgggttcggccgcatcgggcgcaacttcctgcggtgctggcacgggcgcggcgacgcctcgcccctcgacgtcatcgccatcaacgacaccggcggtgtcaagcaggcgtcccacctgctcaagtacgactccacgctcggcatcttcgacgccgacgtcaagcccgtcggcgacaacgccatctccgtcgacggcaaggtcatcaaggtcgtgtccgaccgcaaccccagcaacctgccgtggggcgagctcggcatcgacctcgtcatcgagggcaccggcgtcttcgtcgaccgcgagggcgcggggaagcacatccaggcgggggccaagaaggtgctcatcacggcgcccggcaagggcgacatccccacctacgtcgtcggcgtcaatgccgaccagtacaaccccgacgagcccatcatcagcaacgcctcctgcaccaccaactgcctcgcgccattcgtcaaggtgctcgaccaaaagttcggcatcatcaagggcaccatgaccaccacccactcctacaccggcgaccagaggctgctggacgcgagccaccgcgacctgcgccgcgcccgcgccgccgcgctcaacatcgtgcccacgtccaccggcgccgccaaggccgtctcgctggtgctccccaacctcaagggcaagctcaacgggatcgcgctccgggtgcccaccccgaacgtctccgtcgtcgacctcgtcgtgcaggtctccaagaagaccctcgccgaggaggtgaaccaggcgttccgcgacgccgcggccaacgagctcacgggcatcctcgaggtctgcgacgtgccgctcgtgtccgtcgacttcaggtgctccgacgtctcctccaccatcgacgcctccctcaccatggtcatgggcgacgacatggtcaaggtcatctcctggtacgacaacgagtggggctactcgcagagggtcgtcgacctcgctgacatctgcgccaaccagtggaagtgaagcgttgcattgtaatagcactttgtaactcctcaccctccacagggctttgggattcaccccgaaatgactcactttcggtgaaattcacccgtttcggcgaggtcgtccgaatataccggccaaatgtttccattggatttcaattattagtcaactctagagttgaaacaaacatacaagttcttcattcaataatcaatatagaagtgcatatctgtttcctcttca

SEQ ID NO: 107080 - DNA, 926 bp, Zea Mays
tgctatccgaaatctgatccctccccgaatcccgacctcacgatccccgatcgcggccacgcgcaccacaaacgcgcgcgcccccaatccgccaactcgtatcgtatatacgcgcccgcttgttggctagcatcgtcatcttgtcttgatcctctggtccgtggccatggcgtcgtccatgctctccgctaccaccgtgccactccagcaggggggcggcctgtccgagttctccgggctcaggagctccgcgtcgctgcccatgcgccggaatgccacctccgacgacttcatgtccgccgtctccttcaggacccacgcggtcggcacgagcggcgggtcgcggcgggcgccgacggaggcgaagctgaaggtggccatcaacgggttcggccgcatcgggcgcaacttcctgcggtgctggcacgggcgcggcgacgcctcgcccctcgacgtcatcgccatcaacgacaccggcggtgtcaagcaggcgtcccacctgctcaagtacgactccacgctcggcatcttcgacgccgacgtcaagcccgtcggcgacaacgccatctccgtcgacggcaaggtcatcaaggtcgtgtccgaccgcaaccccagcaacctgccgtggggcgagctcggcatcgacctcgtcatcgagggcaccggcgtcttcgtcgaccgcgagggcgcggggaagcacatccaggcgggggccaagaaggtgctcatcacggcgcccggcaagggcgacatccccacctacgtcgtcggcgtcaatgccgaccagtacaaccccgacgagcccatcatcagcaacgcctcctgcaccaccaactgcctcgcgccattcgtcaaggtgctcgaccaaaagttcggtgcgtatcgatcttcttcactcaactcgagtcgagcgccgcaaacttgat

SEQ ID NO: 107081 - DNA, 111 bp, Zea Mays
ctgtaactaagattatgttgaagaggctaggtagtcgtacatgtctttcagccacgaatttcctaccagttctcagatacttttaattgaaattttcctactcaagttgac

SEQ ID NO: 107082 - DNA, 1571 bp, Zea Mays
agagccgagtgccccgacgatcgaccgaccgacgtacaccccctttctcttcgctcttcgcccttccttcctacctgtgctgccttcctggcaacctgtctcagcaattaagctaattccttggcccggcaatggctagggttgagctcctcgcgctgctgtgcctcgcgggcaccctgggcgcgcaggccaccgccggcccccgccccgatgcgagggtcggcgtgtacgagctcaagctgggggatttctccgtcaaggtcaccaactggggcgcccgattaatgtccgtcgtccttcccgactgcaaagggaacttggctgatatcgtcctgggcagagataccgtcgctgaatactttaacgacacttcttactttggaccgataaccggccgcgtggctcagcggatatcgaggggccggttcgtcctcgacgggaaagtctaccacctgcaacgaaacgacggcaggaacacgattcacggtggtggcacagcgttcagcaaaagcgtctggacggtgaaggagtatgtcggcggcggcgactccccatacgtcaccctgtactaccacagcttcgacggagagcaaggtttccccgggaacctcgacgcgtacgtgacgtaccgggtgtcgggcccgtacacgctgggcgtgcacatgagcgcgacggcgctggacagggcgacgccggtgaacctgctgctgcacgcgtactggaacctgggcgggcagggcagcggggacgtcctgggccacgagctccggctgcacgcgtcgcggtacgccgtgctggacgaggagctcctgccttcgtcggggcgcgtcgcgcccgtcgccggcacgccgctggacttccggacgcccacgcccatcggcgcgcgcatccgccaggtcacgggcgggaaggtcgtcgggtacgacgccaactacgtcgtcgacggggaagggatgcggcccgtggcgcaggtccgggacggcgcgtccggcagggcggtggagctgtgggcgaaccaggccaccgtgcagctctacaccgggaactggctcaaccacacccaggggaagggcggcggggtgtacgaccagtacgccgggttcacgctggagaccatggggtacgtggacgcagtgaaccaccccgagttcccgtctcagaccctgttgcccggacaggagtacaagcacgacatggtcttcaagttctcgttctagcaggtgcatggtttggtttgatgtacaacgttcgttattggtgtttgagacgtacctaggcgaatactgagggtttgatcagctgccctgcaacaacagagtcagtggatttttttaaaacacacaaactatgcattaatcaatgacgcaacagatcactgtccaaaatatttttcgtttcctgaaaattttcaccaagagaaacaaccaaaggaatcaaaaagaaaagaaaaaaagggtaaaggtacaaacgttagccctcctgtcctgcgacacctcaggtacaaacatgtatgtaccacctccctagcgtgtgctgtatataccatgccatgcatgcggtctttagaactt

SEQ ID NO: 107083 - DNA, 966 bp, Zea Mays
gcgagaccgtgcaagtgtcgatacgcatcatgtgaatggagcctatggctatggcacgctgctgaatttttcaacacacaacagcggcttaaagttgttcttcccacgcagaacgacacttcttactttggaccgataaccggccgcgtggctcagcggatatcgaggggccggttcgtcctcgacgggaaagtctaccacctgcaacgaaacgacggcaggaacacgattcacggtggtggcacagcgttcagcaaaagcgtctggacggtgaaggagtatgtcggcggcggcgactccccatacgtcaccctgtactaccacagcttcgacggagagcaaggtttccccgggaacctcgacgcgtacgtgacgtaccgggtgtcgggcccgtacacgctgggcgtgcacatgagcgcgacggcgctggacagggcgacgccggtgaacctgctgctgcacgcgtactggaacctgggcgggcagggcagcggggacgtcctgggccacgagctccggctgcacgcgtcgcggtacgccgtgctggacgaggagctcctgccttcgtcggggcgcgtcgcgcccgtcgccggcacgccgctggacttccggacgcccacgcccatcggcgcgcgcatccgccaggtcacgggcgggaaggtcgtcgggtacgacgccaactacgtcgtcgacggggaagggatgcggcccgtggcgcaggtccgggacggcgcgtccggcagggcggtggagctgtgggcgaaccaggccaccgtgcagctctacaccgggaactggctcaaccacacccaggggaagggcggcggggtgtacgaccagtacgccgggttcacgctggagaccatggggtacgtggacgcagtgaaccaccccgagttcccgtctcagaccctgttgcccggacaggagtacaagcacgacatggtcttcaagttctcgttctag

SEQ ID NO: 107084 - DNA, 1594 bp, Zea Mays
agcagcagcagctgtcgccagtcgcccagtaagtcagtcagtcagtcgtccctcctgttctgctcctgcctccgctcgtcgtccttcttaaggcgcaggccgcgactgggcgcgcacggcacggccacagctgactgactcctcctgcgttggctgataatcatggctagagctccgctgctcctcgcgctgctgtgcgcgtgcgccgccgccgccggctccgccaatgcggcggggaggaagatggtcggcgtgtacgagctcaaggcgggcgatttctccgtcggcgtcaccaactggggcgccaccatcacctccgttgtgctgccggactccaaaggggattttgctgacgtcgtgcttggctacgacaccattggaggatacgtgagtggtaaaagctacttcggagcgcttgtcggacgagtggccaacaggatcgccaacgcgcgcttcgtgctcgacggaaaggcttaccatcttttcaagaacgatggcaacaacacgcttcatggtggccatagggggttcagtcaggttgtatggacggttaaagagttcgtcggtggcggtgactcgccctacatcacgttgtactaccacagcttcgatggagaacaaggtttcccaggcgacctggacgtgtacgtgacgtaccagctggcggccccctacgtgctgcgggtgcacatgaacgcgacggccgtgaacaaggcgaccccggtgaacctggcgcagcacacgtactggaacctgggcgggcagggcagcggcgacgtcctccgcaacacggtgcagctgttcgcgtcccggtacacgcccgtgggcggcggcctcatcccgacgggcgcggtggcgcccgtggccggcacgccctacgacttcctcgcgccggccgcggtgggctcgcgcatccgccaggtctccggcggcaaggccggcgtctacggctacgacaccaactacgccgtggacggggagcccggggcgctgcggaaggtggccgtcgtccgggacggcgcgtccggccgggcgctggagctgtgggccaaccagcctggggtgcagttctacacgggcaacttcctccaggacgtcaaggggaagggcggcaaggtgtaccagcagtacggcgcgctgtgcctcgagacgcaggggttcccggacgccgtcaaccaccccaatttcccctcccagatcgtcaggccggggcaggtgtacaagcacgacatggtgttcaagttctccttctagccgctctctgtataggcaacaacaccctggtccctggctaatcaatctactagtacctgttatgattgtcactggcaaagtggcaactgggccttattgggactggagacacacgttacatgatttcaagtcaatttgttttgcggaccgtaattaatgtttatcgcaaagattatgtactaaccaatccaatcaaatcatgcacgaaccgaagtcaatttcataagtcacttcacttcgctggtcctattttataaattataagttattctaattttgtttaaaacgcaagtcatctcaaatctaataaaaattataaaaaatgatatcaaatacataa

SEQ ID NO: 107085 - DNA, 1497 bp, Zea Mays
gcagcagcagctgtcgccagtcgcccagtaagtcagtcagtcagtcgtccctcctgttctgctcctgcctccgctcgtcgtccttcttaaggcgcaggccgcgactgggcgcgcacggcacggccacagctgactgactcctcctgcgttggctgataatcatggctagagctccgctgctcctcgcgctgctgtgcgcgtgcgccgccgccgccggctccgccaatgcggcggggaggaagatggtcggcgtgtacgagctcaaggcgggcgatttctccgtcggcgtcaccaactggggcgccaccatcacctccgttgtgctgccggactccaaaggggattttgctgacgtcgtgcttggctacgacaccattggaggatacgtgctcgcttcactcttcagagtggtaaaagctacttcggagcgcttgtcggacgagtggccaacaggatcgccaacgcgcgcttcgtgctcgacggaaaggcttaccatcttttcaagaacgatggcaacaacacgcttcatggtggccatagggggttcagtcaggttgtatggacggttaaagagttcgtcggtggcggtgactcgccctacatcacgttgtactaccacagcttcgatggagaacaaggtttcccaggcgacctggacgtgtacgtgacgtaccagctggcggccccctacgtgctgcgggtgcacatgaacgcgacggccgtgaacaaggcgaccccggtgaacctggcgcagcacacgtactggaacctgggcgggcagggcagcggcgacgtcctccgcaacacggtgcagctgttcgcgtcccggtacacgcccgtgggcggcggcctcatcccgacgggcgcggtggcgcccgtggccggcacgccctacgacttcctcgcgccggccgcggtgggctcgcgcatccgccaggtctccggcggcaaggccggcgtctacggctacgacaccaactacgccgtggacggggagcccggggcgctgcggaaggtggccgtcgtccgggacggcgcgtccggccgggcgctggagctgtgggccaaccagcctggggtgcagttctacacgggcaacttcctccaggacgtcaaggggaagggcggcaaggtgtaccagcagtacggcgcgctgtgcctcgagacgcaggggttcccggacgccgtcaaccaccccaatttcccctcccagatcgtcaggccggggcaggtgtacaagcacgacatggtgttcaagttctccttctagccgctctctgtataggcaacaacaccctggtccctggctaatcaatctactagtacctgttatgattgtcactggcaaagtggcaactgggccttattgggactggagacacacgttacatgatttcaagtcaatttgttttgcggaccgtaattaatgtttatcgcaaagattatgtactaaccaatccaatcaaatcatgcacgaaccgaagtcaatttcataag

SEQ ID NO: 107086 - DNA, 1268 bp, Zea Mays
tgcagacctgcacattactgctgtgtgcttgctaacagttgacccatggctagagctgcagcgctcgccagttctttggtcctgctgtgcctagcattggccggcagcacagacgcggcgaggaagacggttggggcgtacaggctccggaacaagaagggggacttctccatcaaggtcaccaactggggagccacactcatgtctgtcatcgttcccgactccaaaggaaacctggccgacgtcgtccttgggtacgacaagctcgcacagtacgtggacgcttcttccgccttcggaaccgtggtcggacgagtagccaatagaatcgccaacggcagcttcgtgcttgatggcaaaaccatccgtctgaacaaagacggcaccaccacacttcacggtgggcaccgggggttcaacagagtcatctggacggtgaaggagtacgtgcccggcggcgactccccgtacatcacgctctactaccgcagcttcgacggggagcaagggttcccgggggacctagacgtgtacgtgacgtaccagctgtgctgcgggccgtacgagctgagagcggtgatgaacgcgacggcgctggacaaggcgacgccggtgaacctggcgaaccacgcgtactggaacctggccggcagcggcgacgccctcggtcacctagtccaggtgctagcgtcgcggtacacgccggtggacgcggccatgatcccgacgggggaggtcgcgccggtcaccggcacgccgtacgacctgcgcgcgccaacgctcctgggctcgcgcatcaagcacgtctccgccgccggcatggccgggttcgacgtcaactacgcggtggacggggacgggttccggttccggcgggtcgcgcgcctccgtgacccggcgtcaggtcgagcgctggagctgtgggccaaccagcccggggtgcagctctacaccagcaactggctcagcaacgtcgagggcaagggcgggagggtgtacgggcagtacggcgcggtgtgcctcgagacgcaggccttcccggacgccgtgaaccaccccaacttcccgtcggagattgtgaggcccggcgggacgtaccagcatgacatgctcttcaagttttccttctagttaatgcccttctttctttcgtcagcagatgcagatcagatcagccatctcgtacgagtgagctctaataataaatcagcatacagagatgtagtgtcggcgctatgatgcccctattcccattccacgaagacttg

SEQ ID NO: 107087 - DNA, 2764 bp, Zea Mays
ccccaccccaccccacccgcgccgagacggattggaggaggaaccctaccatatcaatctcgcttctcgcctcgtttcgtctcagctgcattccaattccacctgtaagcggagagccttcgtggtccctgctcggttcatcagaatacaggaggctccggaggtagtccaccaaaacaaaacaccactccatctctcctcttcccagcgatttcctcttcccctcctcgcccgccgaggccgcccgtcctccgtccgccgtcccagcgagagctttaagattgtgcagacacataatttggatgctcctgcctatgcaagatgtcaaccaccagagatattgtttagtgctgggaaagttatgcagttttggatcataaattctaaatagacaagataattatggaccgtgcagacacatcagggtttgtcagtggtggttgctttggtactacactcctgctgatattctttcatttcgtctattctacagtccgtgtctgaaaaatcgtcagtaacgctgcagctgcctgggcagaaatatcatcagccccccccccccccccccccccccctgttctttgagatctctggtttttatctcattttcttttccaccatcgttatattgtcttaactgtgatggataacggcttcatggacatcccccatccgcccctgatgaatgacccctttgtgttagtgggatgctcagcgccaagctctacggtggagaacatgggccaaagcacactctgtatggatggcctgaacccagcaattgttagttgcagccatgttaatggaaatacacagataatgaatgacataacagcgagagatgatggcagcaggttagtccttggtttgggtccaacaccgaatttttattctgcagtgtccactggctcaaaacaagctcagagattgtcaggccagagttcaactttcactgattcagggatgctgaggcttggccttcacaccgatggtgggggagcaattcaatgtctgcaaggaccgaatggagcactccattctttaggtattgtcgacgaggcttcgacatctactactgtaaggagcatgggtggttacatgccatccctactctttgctccccgctccaatcctactgtcaacgagacacaagtagaaatcccagattctctaaacctcacgcacagcaccagcaacagtcagcatattcaacgtcacctccagtttagccctgaaccctctgcaatgaccgagtcttcatttggtgtgagttctgatgttgtcaccgcaacaactacatcagaacgtagccattctcgacatcctaagaaatgcaggttcaagggatgttccaaaggtgcaagaggcgcatcaggattgtgtattgctcatggaggtgggcagagatgtcataaacctggatgccataaaggagccgagagcagctctgcatactgcaaagcccacggtggcggtcgtcggtgtgaggaacttggttgtaccaaaagcgcagaaggaaaaacagattattgcattgctcatggtggaggccgccgctgcgaacatcctggctgtcctaaagctgcccggggtaagtctgggcggtgcatcaagcatggtggtgggaagaggtgtttggttaaaggttgcattcggagtgcggaggggaaggctggattgtgcatttctcatggcggtggtcgacggtgccagtatccagattgtggcaagggggcacagggcagcacattgtactgcaagggacatggtggtggcaagaggtgcgtcttcgatggttgcagcaaaggcgcagagggtagcacacctctgtgcaaagcacatggtggcgggaagcggtgcatgtttgaaggaggtggtgtctgtgcaaaaagtgtgcacggggctactgaatattgcgtggcgcatggaggaggaaagcgctgttccgtgcccggctgcaccaagagtgctcgtggccgcactgactgctgtgtgaagcacggtggcggcaagcggtgcaaggttgagaactgtggcaagagcgcccaggggagcacggacttctgcaaagcccatggcggaggaaagcggtgcacatggggcacaggctgtgaaaaattctcccgtggcaagagtggcttctgtgcggcacatggtaccttgatggccaggcagcgagaacaagaggcggcgaagaatgtaggaagcatgattggaccaggtctcttcagcggcattgttgtgtcatctgccaccgcagcaagcagcatgacgaacgagcactcgtcctctggtgtcagcaccgcttccgactgcgacggcactgtgaggagccaatcaatgattcctccacaggtgctggttcctcgctctatgatgccttcttggtcgactgagcctgtagatggaggcagagagggaggtcatgttgttcccgaggggagggtccatggtggtggcctcctgtcactcatcggtggcagcttcaggaacgccgatttggagaagcttcaaagctagtgcttttccatcagcagattcggtcagtttgtttgtacataaacaggccgcgtttcggcctattgtattcttattgtaccttttcttgtctagataaacatttcaaccttcatgtactggtttaagtccattgtaaatggtgactgccaattgttgtgaacgcttttggcttgttggttcagctgtagtcagtactgcaataatttcgtgtgttgtttaagctgctcttatttgtttgtgcata

SEQ ID NO: 107088 - DNA, 2654 bp, Zea Mays
ccccaccccaccccacccgcgccgagacggattggaggaggaaccctaccatatcaatctcgcttctcgcctcgtttcgtctcagctgcattccaattccacctgtaagcggagagccttcgtggtccctgctcggttcatcagaatacaggaggctccggagctttaagattgtgcagacacataatttggatgctcctgcctatgcaagatgtcaaccaccagagatattgtttagtgctgggaaagttatgcagttttggatcataaattctaaatagacaagataattatggaccgtgcagacacatcagggtttgtcagtggtggttgctttggtactacactcctgctgatattctttcatttcgtctattctacagtccgtgtctgaaaaatcgtcagtaacgctgcagctgcctgggcagaaatatcatcagccccccccccccccccccccccccctgttctttgagatctctggtttttatctcattttcttttccaccatcgttatattgtcttaactgtgatggataacggcttcatggacatcccccatccgcccctgatgaatgacccctttgtgttagtgggatgctcagcgccaagctctacggtggagaacatgggccaaagcacactctgtatggatggcctgaacccagcaattgttagttgcagccatgttaatggaaatacacagataatgaatgacataacagcgagagatgatggcagcaggttagtccttggtttgggtccaacaccgaatttttattctgcagtgtccactggctcaaaacaagctcagagattgtcaggccagagttcaactttcactgattcagggatgctgaggcttggccttcacaccgatggtgggggagcaattcaatgtctgcaaggaccgaatggagcactccattctttaggtattgtcgacgaggcttcgacatctactactgtaaggagcatgggtggttacatgccatccctactctttgctccccgctccaatcctactgtcaacgagacacaagtagaaatcccagattctctaaacctcacgcacagcaccagcaacagtcagcatattcaacgtcacctccagtttagccctgaaccctctgcaatgaccgagtcttcatttggtgtgagttctgatgttgtcaccgcaacaactacatcagaacgtagccattctcgacatcctaagaaatgcaggttcaagggatgttccaaaggtgcaagaggcgcatcaggattgtgtattgctcatggaggtgggcagagatgtcataaacctggatgccataaaggagccgagagcagctctgcatactgcaaagcccacggtggcggtcgtcggtgtgaggaacttggttgtaccaaaagcgcagaaggaaaaacagattattgcattgctcatggtggaggccgccgctgcgaacatcctggctgtcctaaagctgcccggggtaagtctgggcggtgcatcaagcatggtggtgggaagaggtgtttggttaaaggttgcattcggagtgcggaggggaaggctggattgtgcatttctcatggcggtggtcgacggtgccagtatccagattgtggcaagggggcacagggcagcacattgtactgcaagggacatggtggtggcaagaggtgcgtcttcgatggttgcagcaaaggcgcagagggtagcacacctctgtgcaaagcacatggtggcgggaagcggtgcatgtttgaaggaggtggtgtctgtgcaaaaagtgtgcacggggctactgaatattgcgtggcgcatggaggaggaaagcgctgttccgtgcccggctgcaccaagagtgctcgtggccgcactgactgctgtgtgaagcacggtggcggcaagcggtgcaaggttgagaactgtggcaagagcgcccaggggagcacggacttctgcaaagcccatggcggaggaaagcggtgcacatggggcacaggctgtgaaaaattctcccgtggcaagagtggcttctgtgcggcacatggtaccttgatggccaggcagcgagaacaagaggcggcgaagaatgtaggaagcatgattggaccaggtctcttcagcggcattgttgtgtcatctgccaccgcagcaagcagcatgacgaacgagcactcgtcctctggtgtcagcaccgcttccgactgcgacggcactgtgaggagccaatcaatgattcctccacaggtgctggttcctcgctctatgatgccttcttggtcgactgagcctgtagatggaggcagagagggaggtcatgttgttcccgaggggagggtccatggtggtggcctcctgtcactcatcggtggcagcttcaggaacgccgatttggagaagcttcaaagctagtgcttttccatcagcagattcggtcagtttgtttgtacataaacaggccgcgtttcggcctattgtattcttattgtaccttttcttgtctagataaacatttcaaccttcatgtactggtttaagtccattgtaaatggtgactgccaattgttgtgaacgcttttggcttgttggttcagctgtagtcagtactgcaataatttcgtgtgttgtttaagctgctcttatttgtttgtgcata

SEQ ID NO: 107089 - DNA, 120 bp, Zea Mays
tttttttttgcctcaggcaccaccgagccacctgtggaccggaaatcaaattgtccttccacttgtttttatataaattcttctagaatttaagtggatctagatcggtctcgattggag

SEQ ID NO: 107090 - DNA, 1343 bp, Zea Mays
taaaccatgcatctgtcaatgtgtcctgtttcaatagggtcttattataggacgtgatggcactgaattaggatgtttgttcttttgctacctttgttaaacaacatcagatcattcgtattgtatccttcctcggattgcttcttttgttctactacaaatatgcccaacatggcagggagaggtatgctcctaaatttcttattttgtgcattgtgaaatgattgttctaacaacatcaagtttgtgttcttcatataatctatctcagattgctctgtgttttgcaggtctcgaggtcaagcctggacccactgtcaagtgtgtgcttggacatgactttatcctgcactttccactgctgcacttggggaatcaaagaaaagtgaaagtaccatgtcaaagttgatgaccagaagcttgctattggaaccctctctattgaaaaatacccctagatagaaattgatttggttttcaataaagagtgtgagttgtcacacacatagaaaactacctgtgtatttttctttggttacaaggttgagcaaccaatcgaggaagatgaatatcctttttaacattgatttttttagttttatttcatgtaagactgatctaaacaatttctttgtggagtattttgtttccttgatctcatttttgcttcttgcctcttacataatggatcttgattctgaagatgaagagaaggagctaaacattccagtaatcaaggaaaatggtatatatatcttctcttttgttctttgtgggttttttctagcattgttggggttgaattatggattgtttggatcatgaacatatctaattaggcaaaggtgatgggaaggcagttgctgcagcttcaaaatcaagtcttgggcttgaaaaaaagcaaggatgagtatgagtctgatgattctgatgagggtgagtgattatctcctgaagaaggaaatgttgtgatttgaagggtatggtgcagaaaagttttgtctgcatgtcatgacagtttcatacaacgcacgggcgaacgcactgggagcctaccacctcccgtgctcaccattgccgtgtttgatacctgactgctactgatgttacttcgaatctctggggtgctcatggagtcatggtgcatatgctcatgtttgcagggtgtcagtttttttcatcgtctacttctagagataacaactttagcatgttggttaaagattcttggtgtgctaagcttttcttttttgcttcatttgaaactcaactatatagatggtgccctactttacattttgcaaacacaaactgctccaaaataaatggaagcttatgtcttc

SEQ ID NO: 107091 - DNA, 833 bp, Zea Mays
catgtcaaagttgatgaccagaagcttgctattggaaccctctctattgaaaaatacccctagatagaaattgatttggttttcaataaagagtgtgagttgtcacacacatagaaaactacctgtgtatttttctttggttacaaggttgagcaaccaatcgaggaagatgaatatcctttttaacattgatttttttagttttatttcatgtaagactgatctaaacaatttctttgtggagtattttgtttccttgatctcatttttgcttcttgcctcttacataatggatcttgattctgaagatgaagagaaggagctaaacattccagtaatcaaggaaaatggcaaaggtgatgggaaggcagttgctgcagcttcaaaatcaagtcttgggcttgaaaaaaagcaaggatgagtatgagtctgatgattctgatgagggtgagtgattatctcctgaagaaggaaatgttgtgatttgaagggtatggtgcagaaaagttttgtctgcatgtcatgacagtttcatacaacgcacgggcgaacgcactgggagcctaccacctcccgtgctcaccattgccgtgtttgatacctgactgctactgatgttacttcgaatctctggggtgctcatggagtcatggtgcatatgctcatgtttgcagggtgtcagtttttttcatcgtctacttctagagataacaactttagcatgttggttaaagattcttggtgtgctaagcttttcttttttgcttcatttgaaactcaactatatagatggtgccctactttacattttgcaaacacaaactgctccaaaa

SEQ ID NO: 107092 - DNA, 1271 bp, Zea Mays
cgcctccctctcctccgccccaccctcctccccacgccatcggcaccgccatcatcagatccggcccaagacgcctctgccccacgcgcccgagtcgtcgaggcacactcctgcccgcctccggcgtccacgcacatctccgcctcacctcggcgcccgagtcgtcgcacgcgttcgaggtggcgtccatcccggcaccggcctcacgcaccatctacagctcccaactctgctcctctcagttctccctctgcattccaccttctctcccttcctctccaagcaccgtcctcctcgcctagatccgtacaagctgcaaataacctctccggtggcaagacagatggagtcgatctccggcgaggatgctccgaagcacaacctgatcctgtccgcgctcgtctccaacctacagtgcatgctcgccgcccgccgcccgttcacggcagaggtcagcaccgccgccacagctagcgaggctgaggccttggctcaggaagcagaggcgtccgatgcccccacgggagatgggacgctggcgaggcccatcgtgctgctgacctgtgccggaggggaaccggtcggcgggtctcgcggcgctcgtcgacgccctcgttgccgccggccgctgcgatgtccacgtgtgtgcccccgaatcgtacatgctgtgacttagaaaaccaaaccacagcgggaccggtgctcggatagggtccaacggcgatgcaagcaaggagtggcatgcggccggaggggcgcagatcggctcctgcacgtgcagcgcagccgcgtgacagtgaagcagggaggccgcgataggcggcacagggagggtgcgacggaggcaaagtgcaagcacctggggacttcagaaagaaagagtacaagtctactactgcagaaagcaaggaggatgccaacagaagcagatttcatgtttggatcggataaaatcttaagcaaaatgggagaaggtttgggttttctgcaatctgtcgtctcctcttctgctgggtatctccgttattattctaatgaagagggctatgagttggattttcgtaggtacatttgagcgtgttttggaatgctgggaccgtgaaacacatgaatatgttgccataaaagttgttcgcagtatccacaagtactctgatgctacaatgattgagatagatgtgctcaatcgccttgtagaaaatgaaaaatatagatctctgtgagtatctcagagacctaattgcttaaagtataaccctattctatttttg

SEQ ID NO: 107093 - DNA, 661 bp, Zea Mays
atgggagcttgccgtggtgcttccacgcctcgtgcaggccggcgatctccccgggaacggctatggagagcgcgccccgcgctttcagcgactcgttgccgccgtacatgtccctggaggcggcgaggggcgcggtctcgcgggagtcgtacacgacggccgtgccgtcggcgagcctgacgagcatgaaggcgccgccgccgacgccgctggaggccgggctgacgacgccgaggcagaaggcggaggccacagccgcgtccacggcgctgccgccctcgcggagcgcgtcccggccgatcctcgagcaccgcaagtcgtccgccgccacggcgccgtgcggcgacgtcaccgcctccctgcgccccgctggcgctgccgaggcagcagccgctcccgcggcggcgagtaggaggaagaggaggagagcggcggtgctgactggctcccattggagttggagacgtcgggctgcagagctcaagatggggaaggcttagaaaaaaatgaatggatagtgttacgaatacaccgtccagaaggaaagaccgaaagattgggcacctacccgccatggcgcgggagaacgagagtagagggagcctatgagcaaagcctactcctagatggctatattgattggaaggacgagttaccggtt

SEQ ID NO: 107094 - DNA, 1892 bp, Zea Mays
caccatcttttctcagtcatatcagtcactacacgcacgagtgagtacacgatcgtagccaaaccacattatcatggagaactactgcgaaagcatcgactactatcagaagccttcccatcctcccaacaagccaacgaccatggacgaagacaaggacgacaacaatgacacgggcaagggcaaggccgtcctgggcgccggtccttaccaccaccaccaccatgctaccgccgctgaccagcaggaacccgaaagccaggaggagttcttcagcgactccgagtcgggctccgagtccatcgagatcgctgacctcaagaagcgcatgtggaaggaccagctgctgctcatgaagctcgagggccgctcgggccgcgaccgcgaggcccagctcccgctccatctccatccctttgctgacgaccacccggcgacggcgtctgccctgctccagcaggccaaggaccaccaggagtcgcccgagagccggtaccggcgcaaggcgatgctccgggcgcaggacggcgtcatccggcacatgctgaagatgatggaggcgtgcaacgcgcgcgggttcgtgtatggcgtggtgaacgagtccggcgtgcccgtgtccggctcctccgacagcctccgcggctggtggaaggacgaggtggggttcgagcgggcgggcccgctggcgctgtccgtggccgccgccgccggcctggacgaccccgggagcccgatggcggcgtccttcctgcacggcctccacgacatccaggacagcacgctggggtccctgctgtcggcgctcatccagcactgcgagcccccgcagcggagcttcccgctggaccgcggcctggcgccgccgtggtggcccacggggcgggaggcctggtggggcacgcagggcgaggcgcaggcgcaccagggcccgccgccgtaccgcaagccccacgacctcaagaaggcctggaagatctcgctgctcagcgccgtgatcaagcacctcagcccgcgcttcgaccagatgcgcaagctcgtctggcagtccaagcggctgcagcacaagatgagcgccagggacgccgacacctggtccaaggtcatcacccaggaggaggcgctggaccgccacgcgcagcgcgcgctgcagatcacaccgctcgaggaggaagaggacgacgacggtggccccgacaccgacgccggtggcgattctccgatggcggcagcgcacgtcgagaagcgcaagcgcaaggtcggcggccccgggcacacgggcagtagcggcgtcgacgtcggcaaggagttgctgccgcttccggacatagattgcgtgccctacgccgaccgcagctcgatcgaggagctcatgaagctctattaccgctgcctgcaggggaccgatgatggcgagcacgaggcgaaagacgcggtggcagtccgagacggagggcagcataatagcagtatcgccgtcgctgagaccacacagcctccgccggtggcgcacgatagcatgctccaaggtttacagcgcggcgggaccacgctgcccgacgggtcggcggtgcacgacgatgacatgctcagcagtcttctgggaatcgctgatgtcgtggacatgactgacttcccaaacagtccgatttggcagtggggggtttacgactgatgattatagagcggtgactggtgagtcggttagcaactactccaggtattagattcgtacaagtctagctacagcaagtgttgtgctatgttgattattttatgcctgttttaattattacctccaacaaataagtcggatctgtatattaccgtgctctctgtaagaatcgactaaaatcactccaccagaaactttaaaacattggaactgaagaacc

SEQ ID NO: 107095 - DNA, 285 bp, Zea Mays
atgcagcgatggggagagaccatggacgagcagaaaggcatggcgagcttaccatggggggccatgggaggaagagcagggagcagaggaaagcgtccttgctgcagggagtggagacgccagccatcagggagaggagggcgacatccatgggaagctggggctgatccacgccatggagagggatccagggggagccccatgggagggagcaaggggcagccagcaggaggggctggtgtcagtgtgcaagaaatgagaatgaaggagaacgacggtggatag

SEQ ID NO: 107096 - DNA, 255 bp, Zea Mays
atgacgcagagtacggagacacgctatacaaatttgaagctgctggccacggcgaagttaaagctggacgaggagccgatggcgttgcggcatgaaggtgaggccgagggcgagtggccggaccaccagcaagctgcgcgagctgaggggcgcggtgaccatcagaagacctcgacaacgatggaagggacacagatggcgatgtcgcggatgtggacacgattgccacaccccacgcgaggacaaagaaactaa

SEQ ID NO: 107097 - DNA, 258 bp, Zea Mays
atgacgcagagtacggagacacgctatacagatttgaagctgctggccacggtgaagttaaagccggacgaggagccgatggcgttgcggcatgaaggtgaggccgagggcgagtggccggaccacctgcgcgagctgaggggcgcggtgaccatcagaggacctcgacaacgatggaagggacacagatggcgatgtcgtggatgtggacacgattgccacaccccaccgaggacaaagaaactaaagcaacaatag

SEQ ID NO: 107098 - DNA, 1393 bp, Zea Mays
cctcagggccggccctgtccccatatcaaatctatcactgtcctgtggggccgtcgccggtcgacccccatatagttctccaccaggccgccgcccacggctagacagcctcccattcatcagattcagatcagatcgtagcagccaaggattccgcgctccgggggtgccatgaagctgaagctcctctctccctgccttctcctcctcgccttctttgccaccgcggcgtacgcggcgtcggcgtcggcgtcgcgcgcggcggccgtcgtcaggggcgcgggcgccccgtcgcagtcggagttggagtcggacccggagaaccagtgcgtgtacacggtgtacgtgcggacggggtccatctggaagggcggcacggactcgaccatcggcgtgacgctgctgggccccgacggcacgggcatccggatccgggacctggcggggtggggcggcctcatgggcgccggccacgactactacgagcgcggcaacctggacatcttcagcggccggggcccctgcatgagccaggcgccctgcgccatgaacctcacctccgacggcaccggcgcgcaccacggctggtactgcaactacctcgaggccacggtcacggggccccacctcgggtgcgcgcagcagctcttcaccgtcgagcagtggctcgccaccgacgcgtcgccctaccgcctgtacgcggtcgtcgacaagtgcaagacgaagcggcaggagccgcgacgctcgccggccggcgaggccgaggccaccgtgaccgcgctctaggtacgaccagtagtaaatcatcgacagaggctagctcctgcctctgctgtgtgtaattactgtatgtgagtgaccgatcccatcggattgcgttcgtcttgtggagacgctgcgtgatcgcgcgattggtttcgctttcgccgccttgtttttgcacgaggaggttctgctagtgcgtacggggagaataaaagcagcattcctgctgtccaaggcctgtcctatattatttctagctgagtttgactcagctggtggggtgtcgacgtgtggtaggttggttatgtgtctgcatcagctcacttgccaccggatggcggtcatttgccacttggcattggtttctccgtgcctagctatcgttaatatgtgattgcgagtgattgcgaaggccgtgtttggttcagttattttttctgaccaacttttctgaaaatttgactgtgggaagaatctggctgtgaggagaatctgagtatcattacgattacgtgtggaggaagataaagttgtccatggggcttaggatctataaagtggcggattactactattgcgacgactcaaccgattatatgtttatgttgattttgaatggtttttaccc

SEQ ID NO: 107099 - DNA, 561 bp, Zea Mays
atggcaataaaaccttcatcaatcgtcatccttgaactccctgcggtcaagatagcgtggttggattccggtgccttggcatgtagtgcatgtcaaagagccgatgccctcgcagttgacacactgcgattcttcagtctcgcctgcaccaagtactacagtaacaatgccctttccactgcaaaacctgcatacctgcgcgccagaaccactgcaggggaagcatggctgtgtattatccctcttggcggcattgtcgatttgagtctcgtagaacacagggacacctattcccacggcgatgctgacgacgcccaccgaaatggccacaatcgtgttctggtcgaggtcaatggcccggatgcgagggtaccgcgctccggcccttcgccgtcggggcagcgccgccatgtagggcgaggaaggggtgggagagaggaagcgggagtggagcgttgtgagcgacgaggaggaagtggccatggctgcgtgtcctccctacgtcacgcgttggctgcggaccgggtctccggcgggcgggcgggcgcggcggtggcctga

SEQ ID NO: 107100 - DNA, 375 bp, Zea Mays
atggcaataaaaccttcatcaatcgtcatccttgaactccctgcggtcaagatagcgtggttggattccggtgccttggcatgtagtgcatgtcaaagagccgatgccctcgcagttgacacactgcgattcttcagtctcgcctgcaccaagtactacagtaacaatgccctttccactgcaaaacctgcatacctctggaaaatcaacagattcagttcaatattcagaaccattggacactgtttagagaagaaaaagagaagatgcatagttacaaggcagtactgtatgcattttgtgcaacataccaccatgcccagcccattatctatttccatcatggctagttgtctaattcgcagaagcacatag

SEQ ID NO: 107101 - DNA, 1335 bp, Zea Mays
ggaagaactgcgcctgcaagaagttgagccccaggttgagcgccacggccgcgccctgccccgccgaccgcacctccacggggtatatctcgccggggatggtccagtacagcgcgccccacgaccagctgaagctcgccgagaagatcagcgccaccaccagcaccgtcaccgcgtaccccttgggcatcttgctcccgttgccgagaatgtgacatgtgcgatgcctggcacgtgaacatgagcgcgccaccgatcatgaagagcagcttccggccgtagcggtccatggcgaagcccgacgcgaggatgccgccgatgttcatgaggcccaggatgacggcgcccatgagcgcggcgtcgctctcgaagccgacggtccggaacagtatcggcgagaagaaggcggtgacggccacccctgtgaggttgaggaacaccgggaacgccacggccatcaccaggtagggccggtactcccggcgcaggatccggcggaacgcgccctcctcgttccggcggtcgttctccgccgcggcgaggatgtccgcgaactcggggccgatgtccacgcccttgccgcgcacccgctggagcgcggcgcgggcgtcgtcgtgcttcccgcgcaggacgaggctgctgggggtgtccgggatgaacgcggcgccgaccaccatgacggcggccgggacggaggcgaggccgagcgagaggcgccagccccagcccgggatccgcgaggtgccgtagttgatgaggttggccaccaggtacccgacgctgatgaagagggggaaggccgagatgaagccgccgcgccagcgcgggggcgacacctcggcgaggtacaccggcgtggcctggccggagaagccgagccccaggccgagcagcatcctcccgacgatgagcatggcgatgttggccgcggcggcgttgacgagggcgccggccaagaacaggccgccgccgatcagcatgacggcctgccgccccagccgccgggtcacgcggctcgccagcagcgtccccaccatgccgaacgcgtacagcgacgacgtgaaggccgtcagcgcctggttgttgtaaatgcagtacacgtccttgttggcgcgcgccgtcctcttgagcaacccggggaagaacttgttcaggaaatcctccatctccgacacacctcctgatcgggagcaacagagctaatgaagttgcggtgaaatataatgatctttattctcctttttcttctttctaaatatactagatttacacttatatggttgcgatgactatttcggtgtaatttctaactggaatgtggcaacacattatctg

SEQ ID NO: 107102 - DNA, 1742 bp, Zea Mays
caggcgacggacggggtgcaaaacgcacctggttgcctctcagctctgctctcgccggcccaaccgaagaggaaagagcccggccggcccctcgggtacaagtagtagaacctgcctgccctgccttgccctgcgctgcgctccgatgaccggaggcgggttcgccgcggcggagggcggccacgcgcgcgacgactacgggggaggcgtcacggtctccgtcgtggtcacctgcctcatggccgcctcctgcggtctcatcttcggctacgacattggcgtctcaggtggcgtgacacaaatggagtcgttcctggcgaagttcttcccggaagtgtcgagcgggacaaaggacgcgaagcacgacgcatactgcaaatacgacgaccagcggctcacggcgttcacctcgtcgctgtacatcgccgcgatgctgtcgtcgctggtggcgagccgcgtgacgaggacggtgggccggcaggccgtgatgctgatgggcggcgtcctgttcctcctaggctccgcgatcaacgccggcgccgtcaacgtcgccatgctcatcctcggacggatgctgctcggcttcggggtcgggttcaccacgcaggccgcccctctgtacctcgcggagacatcgccggcgcggtggcgcggggcgttcaccgcggcgtacagcatcttccaggtgctgggcgcgctggccgccaccgtcactaactacctgaccaaccgcgtcccggggtggggctggcgcgtgtcgctcggcctcgccgccgtcccggccgccatcgtcgtcctcggcgccctgctcgtcccggacacccccagcagcctcgtgttgcgcggcgacgccgacggggcccgggcctcgctgcagcgcctccgtggcccgggcgcggagaccgacgcggagctcaaggacatcgtccgcgccgtggagcgcgcgcggcgggacgacgagggcgcgtacgggaggctgtgcgccaaggggtacggccactacctggtgatggtggtggccatcccttccttcttcgacctcaccggcgtcatcgtcatggccgtcttctcgccggtgctgttccggacggtcgggttcagcagccagaaggcgatatttgggtccgtgatccttagcctcgtcaaccttgcctcgtcattgctctcctccttcgtcttggaccgcgccggccgcaggttcttgttcatcgtcggtggcgcggcaatgatgatttgtcagttggccatgtcgtgcatcctggcgggccacctcggcaagcagaacgcggtgacgatgccgcgggactacgcggtggccgtgctggtgctcatgtgcctgtacaccttcagcttcggcgtgtcgtgggggccgctcaagtgggtggtgccgagcgagatctaccccgtggagatcaggtcggcggcgcaggcgctgacggtgtccatcgcgctctgcctctcattcgcgcagacgcaggtgttcgtctccctgctctgcgccatgaagcacgccatcttcctgttctacgccggatgggtcctcgtcatgactgccttcatcgccgcgttcctgccggagaccaaaggcgtgccgctggaggccatgcgcgccgtctgggcggggcactggtactggaggaggttcgtcagggacgccaagcaggaggttcaggtgaactgcatgtagggaaaagtaaagagtggtaaaactcaagtgtttgctggtaaattatgatggttca

SEQ ID NO: 107103 - DNA, 1875 bp, Zea Mays
atgccggcctctgaagaggaattgtcgaactggaaagggctctctcgctgcaggagggggacgaataggatggccggaggcgtcatagttccgagcgatggtcctgccgccgaccacggcgggagcctgacgctgtcggtgttcatgacctgccttgtggctgcctcgggcggcctcatcttcggctacgacatcggcatctcaggcggcgtctccgagatggagccgttcctgcggcgcttcttcccgcgcgtcctggagcggatggcgtcggccagggggaacgagtactgcctctacgacagccagacgctgacggccttcacgtcgtcgctgtacgtggccgggctgctggcgtcgctcgtggccagccgcgtgaccagggccatgggccggcaggccgtcatgctcatgggcggcgccctgttcttcgccgggggagccgtgaccggcgccgccgtcaacatcgccatgctcgtcgtcggccgcatgctgctcggcttcggcgtcgggttcaccaaccaagccgcccctctgttcctcgccgagatggctccgccgcggtggcgcggctccctgaccgcgggctaccagttcttcctcgcgctcggggtgctgatcgccaacctcgtgaactacgcgacggcacacgcctcctgggggtggcgcgtctcgctgggcctggcgggcgcgtcggccgtcgccatcttcgtgggcgcgctcttcctcaccgacacccccagcagcctcgtgatgcgggggcgcgccgacggggcccgggcggcgctgctccgggtgcgcgggcccgacgccgacgtggaggccgagctcagggacatcgccaaggccgtggaggccgcgcgccgcggcgaggacggcgcgttccgccggatggccacgcggcgcgagtaccgcccgcacctggtgctcgccgtggccgtgcccatgttcttccagctcacgggcgtcatcgtgctcgccttcttcgcgccgctcgtgttccggaccgtcggcttcgggagcagagccgccctcatgggcgccgtcgtactcggcgccgtcaacctgggctcgctcgtgctctccaccttcgtcatcgaccggtacggacggaaggtgctcttcatggccggcggcgtacagatggtcgtctgccaggtcgcgattgcttggatcatgggggcgaagatcggcaagggcggcgaggcggcaatggcgcacccgtacgccgtggcggtgctggtgttcacctgcctgcacactgccgggttcgggtggtcgtggggcccgctggggtgggtgatcccgagcgagatattcccggtggacatccggtcggcagggcaggccatgaacgtctccatcggcctctgcctcaccttcgtgcagacgcagtcgttcctcgccatgctctgccgcttcaagtacgccaccttcgcctactacgccgcctgggtcgccgtcatgaccgtcttcatcgccctcttcctgccggagaccaagggcatcccgctcgagtccatgggcaccatctgggtgaaacactggtattggaagaggttcgtccacgacggaaagcagagcaacgtggcactgacctaaggacgaaccggtgggaaatgtggacctgtaagatttttgtgactggcatgccaacgtgtatttatatactcgtcgttgaaatttgtgaatttgtggttattgaaagcactctttttctaatatttactatgtactcttttaaagcacgagtttcgtgcattcccccatggcacacccagaacatggggccagaaattgcagaggagctggatccgaagcggtggctgctataagcatggaatattccaaagcattcgcttctgacagaatttg

SEQ ID NO: 107104 - DNA, 555 bp, Zea Mays
catcagggggcctcatcttcggctacgacatcggcatctcaggcggtgtctccgagatggagccgttcatgcggcgcttcttcccgcgcgccctggagcggatggcgtcggccaaggggaacgagtactgcatctacgacagccagacgctgacggccttcacgtcgtccctgtacgtggccgggctggtgggctcgctcgtggccagccgcgtgaccaaggcgacgggccggcgggccatcatgctcatgggaggcgccctcttcttagccgggggcgctgtgaccggcgccgccgtcaacatcgccatgctcatcgtcggccgcattctgctcggcttcggcgtcgggttcaccagccaggtcggtgaggtcatttaaaagtttttcatattaattggattatatacctatatattccctctgtttctttttagttgttggcttgttgctagatagttcaattttacactattcagcgacaactaaaaagatgaagtaattattaaagtcgcgaggatatatacatgatagacacaagcgcgagtgctggact

SEQ ID NO: 107105 - DNA, 2702 bp, Zea Mays
cagcctctttctccactggacgagaactgtcccagcagaaaccagaagcaccaactgcaaacatcagagaagagaagagtaggggggaaattactactctacgactcgtgcgcccactcctccactgttcttgggaatctcgggggagaagaggaagaaagcagtgggtctcagcgcaccactcattattcctggctccatggcttcctgacgtccctgtgcggcggggacccggcgatgaggatcgtggtgtggttccggagggacctcagggtggaggacaacccggcgctcgcggcggcggcgcgtgccggtggggaggtggtgccggcgtacgtctggtcgccagaggaggagggcccttactaccccggccgcgtatcccggtggtggatcagccagagcctgaaccacctggacgcctcgctccgccgccttggggcgggaaagcttgtcacgcggaggtcggccgacgccgccgtcgcgctgctccagctggtccgcgacaccggcgccacgcacgtctacttcaatcatctatacgacccgatctcactggtcagggaccgccggttgaaggagatgctggcggctgagggcatcgttgtgcaatctttcaattcggatctgctgtacgagccatgggaagttgtcgatgatgaagggcagccattcaccatgttcgacccgttctggaacaggtgcctcagcatgccgtatgacccccctgcaccgcttctgcccccgaagaggatcaattcaggtgacttatcgatgtgcccatcggaggatctgatctttgaggacgagtcagagaggggaagcaacgctcttctggcccgagcgtggacgccagggtggcagaacgcagacaaggcgctgacggccttcctcaacggcccactggccgactactcagtgaaccgcaagaaggccgatagcgcgagcacgtccctgctgtcgcctcacctgcacttcggcgagcttagcgtgcgcaaggtcttccacctagttcgcatgaagcagctcgtgtggagcaacgagggcaaccacgctgccgaggagagctgcaccctgttcctccgttccatcggcctgcgggagtactcccggtacctgagcttcaatcacccgagcagccatgagaggcccctcctggcgcacctcaggttcttcccctgggtggtggacgagagctacttcaagatttggaggcagggaaggaccgggtacccgctcgtcgacgctggcatgagggagctgtgggcgacggggtggctgcatgaccggatacgtgtggtggtggcaagcttcttcgtcaaggtcctccagcttccatggcgatggggcatgaagtacttttgggacacgttactggatgctgatcttgagagcgatgcgctgggctggcagtacatcactggctctcttcctgatggccgggagcttgaccgcatcgacaacccccagtttgaaggctacaagttcgacccgcatggggagtacgtccggcgatggattcctgagctcgcaaggctgccgacggagtggatacaccatccatgggacgcgcctgtctccgtgctgcaagctgcaggaatcgagctgggctctaactaccctctccccatagtggagctggacgcggccaagggcaggctgcaagcggccctgtcagagatgtggcagctggaggcggcgtcgagggccaccatgaacaacgggacggaggaaggcctcggcgactcctcggaggtcctgttccctcaagagctgcagatggaggtcgaccggcagccagccccagccgaggcagcagccaacgtgcacgtgcacgtgccgatgcctgcccggaggcgcggggaccagatggtgcccaccatgacgacctcttcgctgaacagagctggaacagaggtctccgccgatctagtagtagcgaacagcgaggaggaggacaccagggcgcaggttccgttccacgcgcatctccatctccacccccgagccgaagccccgccagctgcgcgtagaaccaacaacggcgctcgccagcacgacgtcttccagcagcgtcggaaccacaggcgagatgctctgcttgctccgtcggcgtcggaggcttcgagcagctggaccggcagagagggcgccgtggtcccggtctggtcgcctcctgcggcgtcgggccattcggacgccttcgccgccgacgaagctgacgtctctagtaggagctatctgggtaggcatccgcagtcgcaccgcctgatgaactggagccaactatcgcagtcatcgtgagctcggatgcacggacagcagcagaagattctgtgcggccaaacttaatcgagctgaagattctcgtatgtagattgtccactgaactactcatccatagtctgatgggatggaaaccaggcggcttttcctggttgtggtggctatagctgtgtaaatctcgtcttctagaacgtgtgtggtcgatatagtgcggttggctttacaaccaaaaaaaaaggtcgctattattgatcagacgacaaaggttttccgtatttttttagccttttttgggggaggtatgtgatgtatgtaaccgtaactgtacattcccttgtgctgaccatattgttagttgtagtttccatgcgtcttgtattgctgttttgggctgaggagtgatgaaccatggacca

SEQ ID NO: 107106 - DNA, 2508 bp, Zea Mays
gcgcccactcctccactgttcttgggaatctcgggggagaagaggaagaaagcagtgggtctcagcgcaccactcattattcctggctccatggcttcctgacgtccctgtgcggcggggacccggcgatgaggatcgtggtgtggttccggagggacctcagggtggaggacaacccggcgctcgcggcggcggcgcgtgccggtggggaggtggtgccggcgtacgtctggtcgccagaggaggagggcccttactaccccggccgcgtatcccggtggtggatcagccagagcctgaaccacctggacgcctcgctccgccgccttggggcgggaaagcttgtcacgcggaggtcggccgacgccgccgtcgcgctgctccagctggtccgcgacaccggcgccacgcacgtctacttcaatcatctatacgacccgatctcactggtcagggaccgccggttgaaggagatgctggcggctgagggcatcgttgtgcaatctttcaattcggatctgctgtacgagccatgggaagttgtcgatgatgaagggcagccattcaccatgttcgacccgttctggaacaggtgcctcagcatgccgtatgacccccctgcaccgcttctgcccccgaagaggatcaattcaggtgacttatcgatgtgcccatcggaggatctgatctttgaggacgagtcagagaggggaagcaacgctcttctggcccgagcgtggacgccagggtggcagaacgcagacaaggcgctgacggccttcctcaacggcccactggccgactactcagtgaaccgcaagaaggccgatagcgcgagcacgtccctgctgtcgcctcacctgcacttcggcgagcttagcgtgcgcaaggtcttccacctagttcgcatgaagcagctcgtgtggagcaacgagggcaaccacgctgccgaggagagctgcaccctgttcctccgttccatcggcctgcgggagtactcccggtacctgagcttcaatcacccgagcagccatgagaggcccctcctggcgcacctcaggttcttcccctgggtggtggacgagagctacttcaagatttggaggcagggaaggaccgggtacccgctcgtcgacgctggcatgagggagctgtgggcgacggggtggctgcatgaccggatacgtgtggtggtggcaagcttcttcgtcaaggtcctccagcttccatggcgatggggcatgaagtacttttgggacacgttactggatgctgatcttgagagcgatgcgctgggctggcagtacatcactggctctcttcctgatggccgggagcttgaccgcatcgacaacccccagtttgaaggctacaagttcgacccgcatggggagtacgtccggcgatggattcctgagctcgcaaggctgccgacggagtggatacaccatccatgggacgcgcctgtctccgtgctgcaagctgcaggaatcgagctgggctctaactaccctctccccatagtggagctggacgcggccaagggcaggctgcaagcggccctgtcagagatgtggcagctggaggcggcgtcgagggccaccatgaacaacgggacggaggaaggcctcggcgactcctcggaggtcctgttccctcaagagctgcagatggaggtcgaccggcagccagccccagccgaggcagcagccaacgtgcacgtgcacgtgccgatgcctgcccggaggcgcggggaccagatggtgcccaccatgacgacctcttcgctgaacagagctggaacagaggtctccgccgatctagtagtagcgaacagcgaggaggaggacaccagggcgcaggttccgttccacgcgcatctccatctccacccccgagccgaagccccgccagctgcgcgtagaaccaacaacggcgctcgccagcacgacgtcttccagcagcgtcggaaccacaggcgagatgctctgcttgctccgtcggcgtcggaggcttcgagcagctggaccggcagagagggcgccgtggtcccggtctggtcgcctcctgcggcgtcgggccattcggacgccttcgccgccgacgaagctgacgtctctagtaggagctatctgggtaggcatccgcagtcgcaccgcctgatgaactggagccaactatcgcagtcatcgtgagctcggatgcacgcagaagattctgtgcggccaaacttaatcgagctgaagattctcgtatgtagattgtccactgaactactcatccatagtctgatgggatggaaaccaggcggcttttcctggttgtggtggctatagctgtgtaaatctcgtcttctagaacgtgtgtggtcgatatagtgcggttggctttacaaccaaaaaaaaaggtcgctattattgatcagacgacaaaggttttccgtatttttttagccttttttgggggaggtatgtgatgtatgtaaccgtaactgtacattcccttgtg

SEQ ID NO: 107107 - DNA, 351 bp, Zea Mays
tttgtttctcattacctgactttgactttgaggaggtgcaggtgcagagccaatggtttgggatccatgacgtgggctaccgctcataggtaaatctcttggcaattcagctatcaatctcttggcctgtatggttttctatgaatttctatgcactacactgctccaggaggaggcttgggctgctttgtggcagcaacgtgttgcacaagaccacaaacaaagggaagagctgggtgcactacaaggctgtcgccgccaacctctaccccgtcaagcaacgacggcatgttgcttcggggtcttggctgaacgatcagacatcctatgtatatatgtggccaacaaacg

SEQ ID NO: 107108 - DNA, 494 bp, Zea Mays
cagcatcagctagctcctcagcagcctcacccatggccttggatgcgaaagccctgcaggaggcgagggaggcagcagcagtccctgttggtgttgccctcgacgacgacgctggaaccgtgcggcggcgaagaaggtcgtcgtcctggaacggcggcgcttcgcctgcgccggtgccggtgccggtgccggtgccggtggtagtactcctccgtagcgacgacgacaggagggtgaagcgggaactggtcgcgtgggccaaggccgtggcgtccgtggctgtcagggagtctatggattgctgctgaggcgtgctgctttactggagtatatcatctaggcgatgcactttgcatttattttctatcgatcgatgccccttccaaatgaggtcagcctagaacttacgatgtgatcatcggaactgtatcccgtacgcctaacgtgtgtgtatatgtggagtagttttcatcagctgtccatcaccaaactat

SEQ ID NO: 107109 - DNA, 2197 bp, Zea Mays
ccatattatactacatcagtctcgtgcctcatctaacaagtaatcgtcacagtggtagatttgcgctgttacacatcactgcactgcacaggcacagatccacatgggctccatcgttgccgacgccgatcgccggccacacgccgtgtgcgtgccgttcccagcgcagggccacgtgacgccgatgctgaagctagccaaggttctccacagccgaggcttccacatcaccttcgtcaactcggagttcaaccaccgccgcttgctccgctcccgcggcgccagcgcgcttgacggcctcccggacttccgcttcgccgccatcccggagggtctgcccccgtccgacgccgacgccacccaggacgtgccgtcgctctgccgcgccaccatggagaactgcctcccgcatttcaggagcctcctcgccgagctcaactcctccccggacgtgccgccggtcacttgcgtcgtcggagacgacgtcatgagcttcaccctggaagcagccagagaggtcggcgtgccgtgtgcgctgttctggacggccagcgcctgcggctacctgggctaccgctattaccgcgacctcatggagaagggcatcttcccgctcaaagacgccgagcagctgacgaacgggttcttggacacgccgacggactgggcgctggggatgagcaagcacacgcggctcaaggacttcccaagtttcgtgcgctcgacggaccccgacgagttcatgttccacttcgccctgaaggtgacagagcagatagtcggcgcggacgccgtcatcctcaacactttcgacgagctcgagcaggaggcgctcgacgccatgcgcgccatgatcccgtcgtccgcgtccatccacaccatcgggccgctcgcgttcctcgccgaggagatagtgccccgcggaggcccgaccgacgcgctaggctccaacctctggaaggaggacgtgtcctgcttcgagtggctccacggcagggcgcccaggtcggtggtgtacgtgaactacggcagcatcacggtgatgacgaacgaggagctggtggaattcgcgtggggcctggccaacagcggccacgacttcctgtggatcatccggccggacctggtcaacggcgacgccgccgtgctgccgccggagttcctggaagccatcaggggccgcggccacctggcgagctggtgcccgcaagaggtggtgctgaggcacgaggcggtgggcgtgttcctgacgcactgcgggtggaactccaccatggagagcctgtgcggcggggtgccgatgctgtgctggcccttcttcgcggagcagcagaccaactgccggtacacgtgcgtggagtggggcgtggccatggagatcggccaggacgttcggcgggaggcggtggaggagaagatccgagaggcgatgggcggggagaagggaatggagatgcagcgccgcgcgggggagtggcagcagactggtctccgcgcgacgcggcccggagggcgctcatacgccaacctcgacaagctggtcgccgacgtgctcctctcgggtactagcggcaagagttcttaaaatctcaggagggtttcacttcgcacaccgccaccgtccaatgattcggactgaacatggatggtatggtagtacaccaaaagagaagtttgtgtgaatgtcgaggcaaacccgtaaatcatggagcatgtgatggaatggaaggaccgaaggagccagtagcggaagaagttacttctcgtagcaggcaaaaattggaatatgaaaatctggaagccaagagggttaatccctaattactatattttctatctgctagctgtattcgttgcaaatgcacacggtctgctgtttgtacgagtgtctggtaggcacctctacgcttaattaggttttgtccaatttttatttagtaattacattaaaaaatcgaagatcgaagttaatactaggtgtaatttatgggggtcttaatatgatctaactgatgatggtttgataagggttaggtacatattatcgtgttgtttggttggtccattttactatataaaccattaaaatatccaataacagtagtttctgtttgtttttgattcactgtaatcaaatcatggtgggatttgttaccggcatgtgtaaatttgataccgcctctatttcctagagtta

SEQ ID NO: 107110 - DNA, 640 bp, Zea Mays
accactgtagtaagctagcgccagtcgaaaagcagtgctggttgcacagccgcggagccttctgtccccagtccggcggcgcccccccccccccccccccccccggcctgttgcaagaacgtgcgtcgtgctgccgatcggccggctcttgcggactcggttgtgcgcgccatggcactggacgcgacgtcccttccggtgctgtccgtccccgccctcgaagtctgctcgggaacgcgaagaaccgggaacggtggcggcgtttcgtccgcgccgggcgcggaggtgtccgtggacgtgccggtgctgtggagtgacgaggggaggatgaagcgggagctggtcgcgtgggccaaggccgtggcgtccatggccatcagggagacgatgcgcgcggagctgactgccgattaataaggcggaacttcccttcgtgcatagagcgagccacaagtctgtgtgcttttgtctcctatttccttgtgctgggtcttttctttgccgagcaaacctattcacgcaaccaagcacggcggccgcggcggcggctttgtagcgtggtggtggcatgtacaagtttttttccccagtcgtggtctgttgatcatttcggcatgtacatgattttttttcccgaaaa

SEQ ID NO: 107111 - DNA, 1738 bp, Zea Mays
ccagtatcgcgccgtttacacttgcacaaggcgcacttcgacatgggctccgttgctgccgacgccgccggcaagccgcacgccgtgctcgtgccgttcccggcgcagggccacgtcacaccgatgctgaagctagcaaagatcctccactgccggggcttccacgtcaccttcgtcaacagcgagtacaaccgccgccgcttgctccggtcccgcggcgcggacgcgctcgacggcctcccaggcttccgtttcgccaccatcccggacggcctgccgccgtccgacaccgacgccacccaggacgtgccgtccctctgccgctccacggaggagacctgtctcccgcatttcagggccctgctccagtgtctcaacgcctcctcccctgacgtgccgccggtcacctgcgtcgtcggcgacgacatcatgggctttaccttggatgccgccagggagatcggcgtgccgtgcgctctgttctggactgccagcacctgcgggtacatgggctaccgctactaccgcaccctcatcgacaagggcatcttcccgttgaaagaggagcatctgacgaatgggttcttagacacgccggtggagttcgcgccgcccgggatgagcaagcacatgcggctcaaggacttcccaagcttcatgcgctccacggaccccgacgagttcatggtccactacgccgtcagggtgacggatcacacagccggcgcggacgcagtccttctcaacaccttggacgagctcgagcaggaggcgctggacgccatgcgcgccgccgtgatcccacctgccgcgtccatcaacaccatcggcccgctcgccctcctcgccgagcagatcgtgcccagaggcagccaactggactcgctgggttctaacctctggaaggaggacgcctcctgcttccgctggctcgacggccggaagcccaggtccgtggtgttcgtgaactacggcagtgtgacggtgatgaccagcgcggagctggtggagttcgcgtggggtctggccaacagcggccacgacttcctgtggatcatccggccggacctcgtaagcggcgacgccgccgtgctgcccccggagttccaggaggcgatcgaggggcgcggcctgctggcgaactggtgcgcgcaggacgcggtgctgcgtcaccaggcggtgggcgtgttcctgacgcactctgggtggaactcgacgctggagagcctctgcgccggggtgccaatgctgtgctggcctttcttcgcggagcagcagaccaactgccggtacacgtgcgcggagtggggcgcggcgtgggcgtggaggtcggccacgacgtgcggcgggaggccgtggaggagaggatacggccatacgggaggccatgggcggggagaaagggaaggagatgcgtcgccgcgcggtggagtggcgggagaccgccgtgcgcgcgacgcggcccggcgggcgctcgtacgccaacctggagaagctggtgactgacgtactcctctcgggtggcaataattattaaacctccttgctatcgtcaggcatcagcagttcagcactgctccatatgcatgcataaaccatctaatacactttagctcagttttaagatctacgtgtcgttgcactctctagtacgtgttgtattatgtacccgtctattgttgtactatttgggtatggattctggaaatgagtgtgcacaataaacgagtgaggtaat

SEQ ID NO: 107112 - DNA, 1914 bp, Zea Mays
cttttatttccgctctcctccattctctgtttgctactttgcaagtctcgaacaaaacctgaagcaactcgaagcgaagccgcgatactgcgagaagcggaagcggggagggcgaggaggagcagcaatggaggcgctgctggagctcgagaagatgcagagggtgctgtccctcatgagttcacgcggcctctcccacaccgactccagctgcggcggcgctgccgctgaccgcttcctcgcccaattcctcctcttcatgtgtaggtcgtactttatgtttcatggtttggatgttaacaagccacaagccattttcaagtatctacctgttctttctttcacagagagttacatatatcagttagatgcttcaaatgaagactgtttacatgtagtcccagatgacaacacttcaaaagtgttgggaaagaaagaagaatctctcaatgagacatccttgtctcaaatgattgaaccccttgaagggcttcttcagtgccaaggattaatgacagaccgattgcgaactgaactcaaatcaggcattcagtattggtctctagagaggaagctctgccaagcattactaagaaatgagaagatctcgattgaagatgttatgatggcaatccatctgaaatcatttgactatcgagttcttaacctgttgatgtttcaacttactggtcagcatgtcaatgaattgcatatggacttcttgtcagtttcagaatttttggttgagatatctgatgacctgtatgattatgaggatgacgttatgaacaatacgttcaatatccttcgcatgtttgctgcaatatatggaccattagaggcaccgaatatgctggccaagtgcataggcgaggctgaagagaaatacgagagcttctccaagaaactggatcctagtctctcaggtagttactggagaagatgtgaggaagcgacgaaggaaggcggaaaaacatcaggccatgcatatggaacatggaatatccctcgtgtgataagcaacgaagatgctttccgacgtgaaagacggagcaaacacgatgcttgtgctgtgatcacttgataggcaaatttcatgttccagacttccaggcatcttcaaaattgaatgaagctaggtacactgctagacagtgtcttacttacctgtatgcacgtttccattcttgccaggtgaaatgcagaaatgacctgcaaccgttgatgtaaggtgctaggggtctgctcagtgggaactccttgaggatatagtggtccttggcctaccttgggcccctttgatgctcacaaatgtacccattttcaagtcaaattttcacaaatgcagaaatgacatgctgaatttagtttctgtaaggctgtctccatcggataccccatctcatctcttttcaaacttatctgtaaataatgtcaaacagtatagttttttactgagtccaagaagggaacaagtcggtctggactctggagtgcgccttgtggccacgtgagagcatctgattcacgacgggctacagtgacagatggatatgtatcggtgtatcctgctactcctacccctatactcgtggctgcgcctgctacagtgacagacgggctacagtgattcacattccatgtgattggttgttaggatcagcagatcctggtcgaagccgagatgcaggttgggcttaacctgtatgcattgatgcaaaccaaaataagttctcttgtttggttgtttgtcctcaattagttaggatcaacactgttttaggtaagttgtatggatttagctttaagttgcacgactcaactatatttctaaaattacaatgccataaattataacgccataaattacacaaaatccaaatttatacaattataaattacaataacttatcc

SEQ ID NO: 107113 - DNA, 2169 bp, Zea Mays
cttttatttccgctctcctccattctctgtttgctactttgcaagtctcgaacaaaacctgaagcaactcgaagcgaagccgcgatactgcgagaagcggaagcggggagggcgaggaggagcagcaatggaggcgctgctggagctcgagaagatgcagagggtgctgtccctcatgagttcacgcggcctctcccacaccgactccagctgcggcggcgctgccgctgaccgcttcctcgcccaattcctcctcttcatggtgcaaccgtttgattctcttaccctggagaataagttccttttgatctctgagctattaagaaaggctactcctaatactttggaagaagtgcagcatctcacccatctggaagctaataaagatatatgttctggaggttcactccagccaattaagaagtttaagatgcatgccgagaaatcaaccgttcaagctatgccgatggttggttttgatgcgatggcaagagctaagtctacgcttgaagatttttgtaggtcgtactttatgtttcatggtttggatgttaacaagccacaagccattttcaagtatctacctgttctttctttcacagagagttacatatatcagttagatgcttcaaatgaagactgtttacatgtagtcccagatgacaacacttcaaaagtgttgggaaagaaagaagaatctctcaatgagacatccttgtctcaaatgattgaaccccttgaagggcttcttcagtgccaaggattaatgacagaccgattgcgaactgaactcaaatcaggcattcagtattggtctctagagaggaagctctgccaagcattactaagaaatgagaagatctcgattgaagatgttatgatggcaatccatctgaaatcatttgactatcgagttcttaacctgttgatgtttcaacttactggtcagcatgtcaatgaattgcatatggacttcttgtcagtttcagaatttttggttgagatatctgatgacctgtatgattatgaggatgacgttatgaacaatacgttcaatatccttcgcatgtttgctgcaatatatggaccattagaggcaccgaatatgctggccaagtgcataggcgaggctgaagagaaatacgagagcttctccaagaaactggatcctagtctctcaggtagttactggagaagatgtgaggaagcgacgaaggaaggcggaaaaacatcaggccatgcatatggaacatggaatatccctcgtgtgataagcaacgaagatgctttccgacgtgaaagacggagcaaacacgatgcttgtgctgtgatcacttgataggcaaatttcatgttccagacttccaggcatcttcaaaattgaatgaagctaggtacactgctagacagtgtcttacttacctgtatgcacgtttccattcttgccaggtgaaatgcagaaatgacctgcaaccgttgatgtaaggtgctaggggtctgctcagtgggaactccttgaggatatagtggtccttggcctaccttgggcccctttgatgctcacaaatgtacccattttcaagtcaaattttcacaaatgcagaaatgacatgctgaatttagtttctgtaaggctgtctccatcggataccccatctcatctcttttcaaacttatctgtaaataatgtcaaacagtatagttttttactgagtccaagaagggaacaagtcggtctggactctggagtgcgccttgtggccacgtgagagcatctgattcacgacgggctacagtgacagatggatatgtatcggtgtatcctgctactcctacccctatactcgtggctgcgcctgctacagtgacagacgggctacagtgattcacattccatgtgattggttgttaggatcagcagatcctggtcgaagccgagatgcaggttgggcttaacctgtatgcattgatgcaaaccaaaataagttctcttgtttggttgtttgtcctcaattagttaggatcaacactgttttaggtaagttgtatggatttagctttaagttgcacgactcaactatatttctaaaattacaatgccataaattataacgccataaattacacaaaatccaaatttatacaattataaattacaataacttatcc

SEQ ID NO: 107114 - DNA, 1348 bp, Zea Mays
cttttatttccgctctcctccattctctgtttgctactttgcaagtctcgaacaaaacctgaagcaactcgaagcgaagccgcgatactgcgagaagcggaagcggggagggcgaggaggagcagcaatggaggcgctgctggagctcgagaagatgcagagggtgctgtccctcatgagttcacgcggcctctcccacaccgactccagctgcggcggcgctgccgctgaccgcttcctcgcccaattcctcctcttcatgtgtaggtcgtactttatgtttcatggtttggatgttaacaagccacaagccattttcaagtatctacctgttctttctttcacagagagttacatatatcagttagatgcttcaaatgaagactgtttacatgtagtcccagatgacaacacttcaaaagtgttgggaaagaaagaagaatctctcaatgagacatccttgtctcaaatgattgaaccccttgaagggcttcttcagtgccaaggattaatgacagaccgattgcgaactgaactcaaatcaggcattcagtattggtctctagagaggaagctctgccaagcattactaagaaatgagaagatctcgattgaagatgttatgatggcaatccatctgaaatcatttgactatcgagttcttaacctgttgatgtttcaacttactggtcagcatgtcaatgaattgcatatggacttcttgtcagtttcagaatttttggttgagatatctgatgacctgtttgttttgtaggatgacgttatgaacaatacgttcaatatccttcgcatgtttgctgcaatatatggaccattagaggcaccgaatatgctggccaagtgcataggcgaggctgaagagaaatacgagagcttctccaagaaactggatcctagtctctcaggtagttactggagaagatgtgaggaagcgacgaaggaaggcggaaaaacatcaggccatgcatatggaacatggaatatccctcgtgtgataagcaacgaagatgctttccgacgtgaaagacggagcaaacacgatgcttgtgctgtgatcacttgataggtgaaatgcagaaatgacctgcaaccgttgatgtaaggtgctaggggtctgctcagtgggaactccttgaggatatagtggtccttggcctaccttgggcccctttgatgctcacaaatgtacccattttcaagtcaaattttcacaaatgcagaaatgacatgctgaatttagtttctgtaaggctgtctccatcggataccccatctcatctcttttcaaacttatctgtaaataatgtcaaacagtatagttttttac

SEQ ID NO: 107115 - DNA, 1601 bp, Zea Mays
cttttatttccgctctcctccattctctgtttgctactttgcaagtctcgaacaaaacctgaagcaactcgaagcgaagccgcgatactgcgagaagcggaagcggggagggcgaggaggagcagcaatggaggcgctgctggagctcgagaagatgcagagggtgctgtccctcatgagttcacgcggcctctcccacaccgactccagctgcggcggcgctgccgctgaccgcttcctcgcccaattcctcctcttcatggtgcaaccgtttgattctcttaccctggagaataagttccttttgatctctgagctattaagaaaggctactcctaatactttggaagaagtgcagcatctcacccatctggaagctaataaagatatatgttctggaggttcactccagccaattaagaagtttaagatgcatgccgagaaatcaaccgttcaagctatgccgatggttggttttgatgcgatggcaagagctaagtctacgcttgaagatttttgtaggtcgtactttatgtttcatggtttggatgttaacaagccacaagccattttcaagtatctacctgttctttctttcacagagagttacatatatcagttagatgcttcaaatgaagactgtttacatgtagtcccagatgacaacacttcaaaagtgttgggaaagaaagaagaatctctcaatgagacatccttgtctcaaatgattgaaccccttgaagggcttcttcagtgccaaggattaatgacagaccgattgcgaactgaactcaaatcaggcattcagtattggtctctagagaggaagctctgccaagcattactaagaaatgagaagatctcgattgaagatgttatgatggcaatccatctgaaatcatttgactatcgagttcttaacctgttgatgtttcaacttactggtcagcatgtcaatgaattgcatatggacttcttgtcagtttcagaatttttggttgagatatctgatgacctgtgagtttgaggatgacgttatgaacaatacgttcaatatccttcgcatgtttgctgcaatatatggaccattagaggcaccgaatatgctggccaagtgcataggcgaggctgaagagaaatacgagagcttctccaagaaactggatcctagtctctcaggtagttactggagaagatgtgaggaagcgacgaaggaaggcggaaaaacatcaggccatgcatatggaacatggaatatccctcgtgtgataagcaacgaagatgctttccgacgtgaaagacggagcaaacacgatgcttgtgctgtgatcacttgataggtgaaatgcagaaatgacctgcaaccgttgatgtaaggtgctaggggtctgctcagtgggaactccttgaggatatagtggtccttggcctaccttgggcccctttgatgctcacaaatgtacccattttcaagtcaaattttcacaaatgcagaaatgacatgctgaatttagtttctgtaaggctgtctccatcggataccccatctcatctcttttcaaacttatctgtaaataatgtcaaacagtatagttttttac

SEQ ID NO: 107116 - DNA, 1603 bp, Zea Mays
cttttatttccgctctcctccattctctgtttgctactttgcaagtctcgaacaaaacctgaagcaactcgaagcgaagccgcgatactgcgagaagcggaagcggggagggcgaggaggagcagcaatggaggcgctgctggagctcgagaagatgcagagggtgctgtccctcatgagttcacgcggcctctcccacaccgactccagctgcggcggcgctgccgctgaccgcttcctcgcccaattcctcctcttcatggtgcaaccgtttgattctcttaccctggagaataagttccttttgatctctgagctattaagaaaggctactcctaatactttggaagaagtgcagcatctcacccatctggaagctaataaagatatatgttctggaggttcactccagccaattaagaagtttaagatgcatgccgagaaatcaaccgttcaagctatgccgatggttggttttgatgcgatggcaagagctaagtctacgcttgaagatttttgtaggtcgtactttatgtttcatggtttggatgttaacaagccacaagccattttcaagtatctacctgttctttctttcacagagagttacatatatcagttagatgcttcaaatgaagactgtttacatgtagtcccagatgacaacacttcaaaagtgttgggaaagaaagaagaatctctcaatgagacatccttgtctcaaatgattgaaccccttgaagggcttcttcagtgccaaggattaatgacagaccgattgcgaactgaactcaaatcaggcattcagtattggtctctagagaggaagctctgccaagcattactaagaaatgagaagatctcgattgaagatgttatgatggcaatccatctgaaatcatttgactatcgagttcttaacctgttgatgtttcaacttactggtcagcatgtcaatgaattgcatatggacttcttgtcagtttcagaatttttggttgagatatctgatgacctgtttgttttgtaggatgacgttatgaacaatacgttcaatatccttcgcatgtttgctgcaatatatggaccattagaggcaccgaatatgctggccaagtgcataggcgaggctgaagagaaatacgagagcttctccaagaaactggatcctagtctctcaggtagttactggagaagatgtgaggaagcgacgaaggaaggcggaaaaacatcaggccatgcatatggaacatggaatatccctcgtgtgataagcaacgaagatgctttccgacgtgaaagacggagcaaacacgatgcttgtgctgtgatcacttgataggtgaaatgcagaaatgacctgcaaccgttgatgtaaggtgctaggggtctgctcagtgggaactccttgaggatatagtggtccttggcctaccttgggcccctttgatgctcacaaatgtacccattttcaagtcaaattttcacaaatgcagaaatgacatgctgaatttagtttctgtaaggctgtctccatcggataccccatctcatctcttttcaaacttatctgtaaataatgtcaaacagtatagttttttac

SEQ ID NO: 107117 - DNA, 1056 bp, Zea Mays
cttttatttccgctctcctccattctctgtttgctactttgcaagtctcgaacaaaacctgaagcaactcgaagcgaagccgcgatactgcgagaagcggaagcggggagggcgaggaggagcagcaatggaggcgctgctggagctcgagaagatgcagagggtgctgtccctcatgagttcacgcggcctctcccacaccgactccagctgcggcggcgctgccgctgaccgcttcctcgcccaattcctcctcttcatgtgtaggtcgtactttatgtttcatggtttggatgttaacaagccacaagccattttcaagtatctacctgttctttctttcacagagagttacatatatcagttagatgcttcaaatgaagactgtttacatgtagtcccagatgacaacacttcaaaagtgttgggaaagaaagaagaatctctcaatgagacatccttgtctcaaatgattgaaccccttgaagggcttcttcagtgccaaggattaatgacagaccgattgcgaactgaactcaaatcaggcattcagtattggtctctagagaggaagctctgccaagcattactaagaaatgagaagatctcgattgaagatgttatgatggcaatccatctgaaatcatttgactatcgagttcttaacctgttgatgtttcaacttactggtcagcatgtcaatgaattgcatatggacttcttgtcagtttcagaatttttggttgagatatctgatgacctgtgagtttgctctgaatcttattcccatgcatcacagcataacaaaatggtaggaactgcctacttcttaaaaatctgtcattaatgttttggtaaatttgtaaaatctgaggcaaggtagtgcatgggttaagatggaactagtgcttctattgagatgtcggtgttgtatgtaaatggaaaacaataattttaatttaaatgaaattgtgttttagttatcatgtaatctaactattaaaggatctgcggatatagaaacccaaaaacttatgcacttttgtagtgtacctt

SEQ ID NO: 107118 - DNA, 892 bp, Zea Mays
cttttatttccgctctcctccattctctgtttgctactttgcaagtctcgaacaaaacctgaagcaactcgaagcgaagccgcgatactgcgagaagcggaagcggggagggcgaggaggagcagcaatggaggcgctgctggagctcgagaagatgcagagggtgctgtccctcatgagttcacgcggcctctcccacaccgactccagctgcggcggcgctgccgctgaccgcttcctcgcccaattcctcctcttcatggtgcaaccgtttgattctcttaccctggagaataagttccttttgatctctgagctattaagaaaggctactcctaatactttggaagaagtgcagcatctcacccatctggaaggtagtggtaatagttgtgaagtaatgatgatcttacattaaccttatgagtttatccggaaattttcttgttgattgggtctggaactctgataagacataggaccctttcaaacgcagctaataaagatatatgttctggaggttcactccagccaattaagaagtttaagatgcatgccgagaaatcaaccgttcaagctatgccgatggttggttttgatgcgatggcaagagctaagtctacgcttgaagattttgtatgtattctttgtagttggtactcgtaaaaatccttaatggaaacactgccatgaattaatcctggagtgacccaggtcttctgggctgccttttagtttttcttcttttatttttctcaagagaaacctgtttaccttttcttttctcacatcaataaaatcttagcacattaggggattcctttactgtttttgctaaaaaaacactgtcatactgccttttgttgagattttgcaatgcaagtgctacaaa

SEQ ID NO: 107119 - DNA, 774 bp, Zea Mays
acgcgctgcgactccaccagcctggtgttctcctgccgcgcccggctcgcgtcgccctcggacgcgcgcacgcagtcgaggagcacgcgctccttgtcgccccaggccgccgcgcactcgtcggcctcgagcctgtagcggtcgcgctcgtcggacgcgccgcgcagcgccgcgcgcagccgcccggcctcggcgttggcggcctccagctcggcctgcgcctcggagagccaggccttgacctgcctggcctccgcggtcacgtccgagagcgcggcggagaggtcgtccagcgccttgcggctcctctcctcgccctgcaccgccgcccggagctccgcgcgcaggaccatgatctcctcgtccgcgccgccgaacatgaggtccctgacgctcctctgctccagcacgccgccgcgccgggctgacgcgaggctcttgctcgcctgctgctgcagcgtggccatctccagcttggcctcctcgagcgatatcttggtctgctccagctgcttggtctggtatatcagcgactccagcatcttgcgctccgactgcttggacttgctcacctcccgctccagaaggtgcaccttgtccgcgacacccttggcgccgccgtcccgcctcaggtcctcgaggtccctcacggtccgggccttctcctcccgctccctccggagctcctcctccagctgcgccacccgctgctgcatcgcgcccacgccgcgccgcctctgccgaacaggaaaccaagagccgccgccgttagaa

SEQ ID NO: 107120 - DNA, 889 bp, Zea Mays
tacccctacccaaccgccgccatcaatagccagttctaatctcaggtttggggggaaaaggcctcgcgggtcgcaaaccgctctctgttgatttgggatttgggaggcgctcgaggtaaaccatagtttagtgacccatggctcgtactaagcaaactgctcgcaagtccactggagggaaggctcctaggaagcaacttgccaccaaggctgcccgtaagtctgcacccacaactgggggagtaaagaagcctcatcgttaccgccctggaactgttgctcttcgtgaaatccgcaagtatcagaagagcactgacctgctcataaggaagcttccgttccaaaggcttgtcagggagattgcccaggatttcaagactgatcttcgtttccagagccatgcggtgcttgcgctgcaggaggctgcggaggcgtacctggtgggtctattcgaggacactaatctgtgcgccatccatgccaagcgcgtgaccatcatgcccaaggacattcagctggctaggaggatccgtggtgaaagggcctagattctctgtttactgctactgggagtggctccgtagtatggtttgcatctgttcgatgcttgctttttgtggaagttacatttgtgggtgttcgaattcgtaatattcatccgtagtggacgagtggtaggaagttctgcaatctgactatgttttaaaatttataattgttgtcaattagtgttggtgttggtttcgcccatcaacggatcaaccttattggttatctgaacgacgaattgatatgttaactcgtgaacttcgttatatttaggcagcatcggttacattgttttgtcctgagatctgtgtgtctgcatgttgtcgtctgctgcggtatt

SEQ ID NO: 107121 - DNA, 853 bp, Zea Mays
acccaaccgccgccatcaatagccagttctaatctcaggtttggggggaaaaggcctcgcgggtcgcaaaccgctctctgttgatttgggatttgggaggcgctcgagttttcaggtaaaccatagtttagtgacccatggctcgtactaagcaaactgctcgcaagtccactggagggaaggctcctaggaagcaacttgccaccaaggctgcccgtaagtctgcacccacaactgggggagtaaagaagcctcatcgttaccgccctggaactgttgctcttcgtgaaatccgcaagtatcagaagagcactgacctgctcataaggaagcttccgttccaaaggcttgtcagggagattgcccaggatttcaagactgatcttcgtttccagagccatgcggtgcttgcgctgcaggaggctgcggaggcgtacctggtgggtctattcgaggacactaatctgtgcgccatccatgccaagcgcgtgaccatcatgcccaaggacattcagctggctaggaggatccgtggtgaaagggcctagattctctgtttactgctactgggagtggctccgtagtatggtttgcatctgttcgatgcttgctttttgtggaagttacatttgtgggtgttcgaattcgtaatattcatccgtagtggacgagtggtaggaagttctgcaatctgactatgttttaaaatttataattgttgtcaattagtgttggtgttggtttcgcccatcaacggatcaaccttattggttatctgaacgacgaattgatatgttaactcgtgaacttcgttatatttaggcagcatcggttacattgttttgtcctgaga

SEQ ID NO: 107122 - DNA, 942 bp, Zea Mays
tacccctacccaaccgccgccatcaatagccagttctaatctcaggtttggggggaaaaggcctcgcgggtcgcaaaccgctctctgttgatttgggatttgggaggcgctcgagttttcaggtaaaccatagtttagtgacccatggctcgtactaagcaaactgctcgcaagtccactggagggaaggctcctaggaagcaacttgccaccaaggctgcccgtaagtctgcacccacaactgggggagtaaagaagcctcatcgttaccgccctggaactgttgctcttcggtgggcgatacatgattcttttgattgtttactgtttattacacttcaaataatatgacaattgttctccctgactttgcagtgaaatccgcaagtatcagaagagcactgacctgctcataaggaagcttccgttccaaaggcttgtcagggagattgcccaggatttcaagactgatcttcgtttccagagccatgcggtgcttgcgctgcaggaggctgcggaggcgtacctggtgggtctattcgaggacactaatctgtgcgccatccatgccaagcgcgtgaccatcatgcccaaggacattcagctggctaggaggatccgtggtgaaagggcctagattctctgtttactgctactgggagtggctccgtagtatggtttgcatctgttcgatgcttgctttttgtggaagttacatttgtgggtgttcgaattcgtaatattcatccgtagtggacgagtggtaggaagttctgcaatctgactatgttttaaaatttataattgttgtcaattagtgttggtgttggtttcgcccatcaacggatcaaccttattggttatctgaacgacgaattgatatgttaactcgtgaacttcgttatatttaggcagcatcggttacattgttttgtcctgaga

SEQ ID NO: 107123 - DNA, 1105 bp, Zea Mays
ggcatcggcatcggctacatagaagaagacagcaacacaagcttagtcgtcctcgtccccccaatcttcagcccttgttcatcaacaaaccacatggccgcgctcggtcctgcttctgttacctccacgggcttggcgctgcacacccctgcgattcctcatcgtcggcgtcgccacgggaatgcagtggcctgtgcgtcgtcgtctcaacaccagcgaagccttaatggcttggcgatgagttcttcaggcacgaacaatgccttgcccatcaaaggaattaccactacacgggttcctgcagtcggtcgttcggtccctgcagcgaatccgtcgccgtcaggagggaacaacctcccggtgcccaagattcctccgtgggtcaagtgggtggctggcgccgtcatatttgcagtgcccatgtacaggaggttcagagctttagaagacaagatagagaagacggcggaggtggcgatcgaggtgatcgacaaggtggcggaggcgacggagaaggtcgccggcgaggtcgccgacgagttccccggcaacgagagcatcaaggaagcagcctccaggatcaagaaggtcatgcacgtggtcgaggaagacgccgacaaggctgaggccctgatcgagaaggtcgacgagataaagaaagatgtggattcgattgtcgatcctataatcggcaaggttgccaaggataaatcgcggagaatgaaccaaaaaggatgacagcagtcggtgaattgaaaggagcgcaaacattgctcggacggaaagggaagcaacaggacgcgtctcgtttcgtctcatgtttatctcgtgccatggcttcctacgtacaaacaggagatgaggcatatgatggtgtaaaacactcttttatattgtagattgtactaagagagaagttcgaaataagagatgagataagatgagagatgtcatgaataagttgttgcactaccggaataaacgaactaaatctaccagctatagaaaacactgttataattgtccccaaaacggtacatgtaggtctatatagtgtagaaacatagcataaaaaatttagttggcaaaataaaaaaaataaaaa

SEQ ID NO: 107124 - DNA, 1718 bp, Zea Mays
ggcatcggcatcggctacatagaagaagacagcaacacaagcttagtcgtcctcgtccccccaatcttcagcccttgttcatcaacaaaccacatggccgcgctcggtcctgcttctgttacctccacgggcttggcgctgcacacccctgcgattcctcatcgtcggcgtcgccacgggaatgcagtggcctgtgcgtcgtcgtctcaacaccagcgaagccttaatggcttggcgatgagttcttcaggcacgaacaatgccttgcccatcaaaggaattaccactacacggtaaaaaacgcctccctttcctacagagctcctcgtgtacagatccaagcaagtcttttccagacctcagtagcagccttcagcttgcatccgcacagcggcttgccggctttgtgtgcaaagtttcacttgttgttctggttcagggttcctgcagtcggtcgttcggtccctgcagcgaatccgtcgccgtcaggagggaacaacctcccggtgcccaagattcctccgtggtgagcgaagaacacagctgacacttgcgtcgttgcttgtttctgaatgtatctgatcgatggattttttcttctcgctcctcgatcagggtcaagtgggtggctggcgccgtcatatttgcagtgcccatgtacaggaggttcagagctttagaaggtaaacagatatcgatcgatcgatggatcgcgtattcatcggttcgcgagaccatttcctactacagtacagcacatagcgcgtgccgtcatgtttttgatcgcggtgcgcgcatgacagacaagatagagaagacggcggaggtggcgatcgaggtgatcgacaaggtggcggaggcgacggagaaggtcgccggcgaggtcgccgacgagttccccggcaacgagagcatcaaggaagcagcctccaggatcaagaaggtcatgcacgtggtcgaggaagacgccgacaaggctgaggccctgatcgagaaggttggtttagttacgtacgcaagctagtctattattgccagtagtagttgctaatataatattttggatgctgagactgactgacagcatcttcatgagatctgaccgtaaagaagtggatggctctataaccagccttattagatctatgatctatctaaataatggatggccctgaaccgtagaaaacgtctcatctttattacacatacaaacataaagaggataactgttgttgtgctcgcttaccatgagcaggtcgacgagataaagaaagatgtggattcgattgtcgatcctataatcggcaaggttgccaaggataaatcgcggagaatgaaccaaaaaggatgacagcagtcggtgaattgaaaggagcgcaaacattgctcggacggaaagggaagcaacaggacgcgtctcgtttcgtctcatgtttatctcgtgccatggcttcctacgtacaaacaggagatgaggcatatgatggtgtaaaacactcttttatattgtagattgtactaagagagaagttcgaaataagagatgagataagatgagagatgtcatgaataagttgttgcactaccggaataaacgaactaaatctaccagctatagaaaacactgttataattgtccccaaaacggtacatgtaggtctatatagtgtagaaacatagcataaaaaatttagttggcaaaataaaaaaaataaaaa

SEQ ID NO: 107125 - DNA, 1210 bp, Zea Mays
ggcatcggcatcggctacatagaagaagacagcaacacaagcttagtcgtcctcgtccccccaatcttcagcccttgttcatcaacaaaccacatggccgcgctcggtcctgcttctgttacctccacgggcttggcgctgcacacccctgcgattcctcatcgtcggcgtcgccacgggaatgcagtggcctgtgcgtcgtcgtctcaacaccagcgaagccttaatggcttggcgatgagttcttcaggcacgaacaatgccttgcccatcaaaggaattaccactacacgggttcctgcagtcggtcgttcggtccctgcagcgaatccgtcgccgtcaggagggaacaacctcccggtgcccaagattcctccgtgggtcaagtgggtggctggcgccgtcatatttgcagtgcccatgtacaggaggttcagagctttagaagacaagatagagaagacggcggaggtggcgatcgaggtgatcgacaaggtggcggaggcgacggagaaggtcgccggcgaggtcgccgacgagttccccggcaacgagagcatcaaggaagcagcctccaggatcaagaaggtcatgcacgtggtcgaggaagacgccgacaaggctgaggccctgatcgagaaggttggtttagttacgtacgcaagctagtctattattgccagtagtagttgctaatataatattttggatgctgagactgactgacagcatcttcatgagatctgaccgtaaagaagtggatggctctataaccagccttattagatctatgatctatctaaataatggatggccctgaaccgtagaaaacgtctcatctttattacacatacaaacataaagaggataactgttgttgtgctcgcttaccatgagcaggtcgacgagataaagaaagatgtggattcgattgtcgatcctataatcggcaaggttgccaaggataaatcgcggagaatgaaccaaaaaggatgacagcagtcggtgaattgaaaggagcgcaaacattgctcggacggaaagggaagcaacaggacgcgtctcgtttcgtctcatgtttatctcgtgccatggcttcctacgtacaaacaggagatgaggcatatgatggtgtaaaacactcttttatattgtagattgtactaagagagaagttcgaaataagagatgagataagatgagagatgtc

SEQ ID NO: 107126 - DNA, 1319 bp, Zea Mays
ctattccagttcttgccattagcttgcctcagccactcttccatgaaactgtagttctttctagattgcaggttccaaatgagacaccagggaatactgcgattgacctggctgaacagggtgctctgttctacgactggcccgttcctttggcgtgtgtgcttagccttagccagagttgtcatatcaaaacaggatacttttcttttttctcctctggcgatttggattttgtgttcctagtttaacgcgtaacgatttgttcaacctccttccacagtcagcctcttgtctcttctttacaaaaagcaataaactaccagtcaaggttagcttcttgtacaaatggccgccttcattctccttacaagagtagatttcaaggaggcaaccacatgttctcaccactgccccccctaagcaacagactcgctggatatcaccaaagagtaggttaagaagcagctcgagccgcccttccttcgagtcccatggccgcgcccgcttcttcggttacctccagaggcttggcactctgtagtgcctccgtgggttttcatcgcccccgcgggaataatccggtgatcagccccgcgtcttctcgtcgccgacgaagccttactggtggatcaacgatgaactcctcgggcatgaacggtgccttccctcctatcaaaggaagtacacgaatccccgcagttggtcctggccctgccaacagtccgtcaggaggaaacctgccgatacccaacatgcctccatgggccaagtggctggtcggcgccgccatagtcgtcgcgataccaatctacaggaggttcagaacactagaagataagatagagaagacggcggaggtggcgatcgaggtggtggacacggtggcggaggcggcggagaaggtggccggcgaggtcgccggcgcgttccccggcaacgagagcctcagggaggcggcgtcgaggatcaaggcggtcacggatgagatcgaggaggacgccgagagagccgaggccctgatcgagaaggttgacgagataaaggaacaagttgattcaatcgtcgatcccttaatcgacaaggttgtcaaggataaagaaacctagagagaaggaaccaaggaggaggcaatgacatgatgtagattattgaaggtataaagattggttaagcggtgccgcggtggtaaccggaagaaaatacctaccgcatgtaaacaaatcactaaatataaatctaagaagttttcgagaaaaagctattctctaacagttatataatacatgttcttaaatttacttacttcttataaaactcaa

SEQ ID NO: 107127 - DNA, 2268 bp, Zea Mays
tagaaaaacttgccccgcgaggccgccagccagtgaaataacctttcctttttcttttccctccccgttcgctttcgtcctccgtttacccggctggcttggtgaccgctgcttggggttggaggagggacacgataggcctgacggcacgatgaccggaagagtgacgttgctgaggatatggtgaccgtgatacctgttcagagcagcttgccctgaccaaacagcaagcaaacagccgccgacggctctcgttcgtgtacaggcagtcgctcgccctgtgtggctgcgctgttttcgaatttcgaccttcgcgagcaccggaagccaacgctccccccactaccactacacactacacagaagccgcactgcgcatcaactcaacgacgtccgtccgattgggtcaggtggtccacaggctttgagtagttcgcaacgagaaagcctcgtcagacggcctacttccagcccgctttcgctttcgcgtgttcgttgggccaagaaaatatgtttcttccggcccaaacgtctgcctcttctcgttcgttccttgtaacccatcctggcggggcggcggccgtgcggcacggcacgcaggcgcgtagcagccagtcaaccgaccgaagctcccgctcttccctgcgaccgccgccgttcgtggtggtaggctggtgggcggtggcccatctctcctaccgctgagtaccaagccatagtccaccgcccaacgccggtggcgacctcatggcggcggttgtgagctggtacgggccactgatcgacctctcggcggccgccagccatgtcggcggattcgtgcagcttctggcggtcgttcgccggctccttccccaccaggagcagaatgctgcgaccggaaggacgtatcagagaaccattgccgaagtcggcgacgatacacggtccagcttctctgtctccctgtggtcctccaagcataattcgaccataatcgctggtgatgtcttactgctgcaaaatattaagatagtgcaatttagaaatggcctggagggaagagcttctcagatgtcgtcagtccaagtattgttgaactctaaagacttgctggacactgagcctgaaggaatatgtgaactaataagcagttgcaaagtcgggaacgctacaaaatcaaagttaagaaaagtggcagaatggatcatacacactaaatgtgctcttggggaaagtcatcatcagatgcaggtggtgtctaagaactggaaactagcaaaagaaaatgaatcagcacattttttgtctatatcagagctaatctctcagagaaagttatgtaatataaacatttatgcatgcatcggcaagatggttctagtgagttctccgacctcccctttaaaggtaaacttgtcggtcatcgacagacgttctttcaaagagcacagtgatattgtcagagatttggttactgctggatgtaagctgtgtggttcgcctctctatcacaaaaaccttcatgaggaaaacacgtttgcacttgattgtcctaataacccaaaatatctccatgttcctggtcagatatacaggccatttctggtatatacggatccttcaacctttcaacaacctcatccgtttcaggcttcaatccccgcagttggtcctggccctgccaacagtccgtcaggaggaaacctgccgatacccaacatgcctccatgggccaagtggctggtcggcgccgccatagtcgtcgcgataccaatctacaggaggttcagaacactagaagataagatagagaagacggcggaggtggcgatcgaggtggtggacacggtggcggaggcggcggagaaggtggccggcgaggtcgccggcgcgttccccggcaacgagagcctcagggaggcggcgtcgaggatcaaggcggtcacggatgagatcgaggaggacgccgagagagccgaggccctgatcgagaaggttgacgagataaaggaacaagttgattcaatcgtcgatcccttaatcgacaaggttgtcaaggataaagaaacctagagagaaggaaccaaggaggaggcaatgacatgatgtagattattgaaggtataaagattggttaagcggtgccgcggtggtaaccggaagaaaatacctaccgcatgtaaacaaatcactaaatataaatctaagaagttttcgagaaaaagctattctctaacagttatataatacatgttcttaaatttacttacttcttataaaactcaa

SEQ ID NO: 107128 - DNA, 749 bp, Zea Mays
cttctttcccatcgtggaagaattatgttcttcgactcgtgttgtttatacgaaatcaggaacaagtgctaatgtcgacatcatgccaaaaataattatacttcacacatatgtataaattatcgtgaatatatgcggtaagttgtacgtggaaattgaaattctatgttaaataatgttcaaaaaaaaatatttgcgcgctccatcgcaagaaattctccgtcaagcacatctctctaaggcataccttagagagaagctgactcaagaaaccttaagggcatacccttgtccccgtcaagcacctctctctaaggcataccttagagagaagctggctcaagaaacctcaagggcatacccttgaggaagatcgcgttgatcgctcgtacacgccattatagcctgctataaaagtctgctgcaagggctattaattaaataaaggaaaagaaagaaaatacatacattgctacatgtgtcttccacgatgtgtgcaaaattcggctacaaaataaacgattccccatacccataaaaatgtctatatctgaccaatcacaataaataaattctctacacaattgattttgtccccaccaaattaatcaactttatatatcttaatgaagttcgacataagctagtcgtacttgtaacagagtaagtccaggtactgtcaaataaatccagacactcttaaataacaaaaaaaatcatcatctacagtaaggaaaccaaaaaaagaa

SEQ ID NO: 107129 - DNA, 1595 bp, Zea Mays
cacggctgctttgatagcccccgaaacctcagaatactcccggtcccggcccggtgtcaaacactcggcacacgcctgcctgccatccgccgctccttcggcacagtcgcgctcgcgcagatgtaaaacgtgccaaccctgcgtcaaagatccacccagatgcaggaactgaactaggcgggtctgggatcggcaagaaagagagaggggcaagcaagtatttcgcccaactcacgagtcacgacgtgggatgtaggcatccgcagcaccaccagcgcgcgtctagctagcaacaccaatcggtttctcactttctcgtgccgtcaaagcaggattcgctccacagcagacagaccggcggcagaagtggtgccgtttccccaaatctgtgcctctgcgtgcgtgcttcgcgaggagcgatggagacgcggcagctgctcctcgtgttctgcctcctcggcgccggcatggccgtcgtcgtggacgcgcaggcgcagtcggcgccggcgccgccgcctcggcagacgccttctgcgccgccgcaacagacgcagttcggccgcaccatgtcgaccttcatcacggtggccatcagcgtcttcttcttcttgctcttcgtctgcgcgtacatcaaccagtgccgcctagcggaccccggggcggcggcggcggcagcggcagcggcagcggcagccggcggcgggggcgggggcccgtccaggagggggaagcgcgggctggaccccgcggtcgtcgccacgttcccgattgtgtcgtacagggaggtcgtggagcacaagatcggcaagggcgtgctggagtgcgcggtgtgcctgacggcgttcgaggacgacgacgacctccgcctgctgccgcactgctcccacgcgttccacccggagtgcatcgacccctggctgcagtcgcgggtcacgtgcccgctctgccgcgcgaacctcgagaagccggcgccggcgccggcggtggcgcccccgtcgccttcgccgcggctagcgccgcgccagccttcgccgccgccggaggccgtggcgataccggtgtcggacgacggatcggaggggggcagcagcagctgcgaggacgacaggaaggaggaggccgtcgagctggagacgctgcgcagcgcgcggcgcgccgccaggatgccgcggtcgcactcgacggggcactcgctgttcgcggcggcggcggccgccgccgccgcggaggaaggcgaccacgagaggttcacgctgcggctgccggagcacgtgcgggagcaggtgctccggtctcgccgcctgcgccacgccaccagcctgctcaacctctcggacatgagttccgaggggagctcccgaggcggaaggggcgtagcaggagcaggaagctttggcaacggcggggggagcagccacggcgggcgccggtggcaatcgttcctggccaggacggtctcctgggcgcgaggcggcggcgacggctcggtgcggagaggctgggacgggtccacgaggagggggagggacggcggtgagtcaagctggaagggcgtggcgtcgccgccgccgacgggccggccgtgatcgaggccg

SEQ ID NO: 107130 - DNA, 1504 bp, Zea Mays
cgctgccggcacggttcgctcgctcgaacggggttacagccgcacagggtaacgagatggcggcggtgcttacccgagccggcggccgctccaagcgatccgtctccggcttccacctccgctctgttctcgcggggcacgggaccttctcatctgaagccgcgtcgaccgccgtgggcgatcgcgtggtcgcggctacgggcgagcacgatggggacgacctgcgcagccgcatcttccgactgggcctggcgaagcggagcgcgacggcggcactcgagaagtggtccagtgagggacgcgacgcacccacggcggagctccgccgcatcgcgcgcgacctcacccgcgtccgtcgctacaagcacgcccttgaggtagcagactggatgaagacacatcacgagtctgatctatcagagaacgactacggaatgcgcatcgacttgattaccaaggtcttcggtgccagtgccgcggaagatttctttgagaagctcccaccgggagccaaatcgctagaagcctacacagcacttctgcactcctatggccggtcgaagatgacggacagagccgaaaggctgttcgagaggatgaaagacgcgagcctgcctatggacgccctggtctacaacgagatgatgaccctgtacatctccgtgggggagctcggtaaagtggaggccgtcgcagaggagctgaaacggcagaacgtctctccggacctgttcacgtacaacctccgtgccagcgcggccgcggcgtccatggatctcgagggcttcagagcagtcctcgacgagatgtccagagacccgaagtcgtccacagaaggagggtgggcgctgtaccgggacctcgcgtccgtgtacgtcgacgcgggccagcttctgggctctgtgaattcgccgccggtggaggccggggaggcgaggatcagccagagggaatggatcacctacgacttcctcgtcatcttgcacgccggcctcggcaggccagagaggataagggacatctggaggtccatggtggcgacctcgcagtcgcagtcgcagcagcagcagcgcatgacgagccggaactacgtctgcgtggtctcgtcctacctggcgtgcgggcggctggaggatgccggggaggtcgtcgaccagtggcagcgctctaaggcccccgagttcgacgtctccgcctgcaaccggctgctggacgccctcctgcgcgccggtctcgccgacgccgcgggtaggtttcgggagctgatgctgcagaagcgttgtatactgactagcagcagcagcagcagggcggcagtggtcgagtgattacgggttggtttcgagtctgttctttttgttgttgttgtcttgtgtgaaggaataaacaatggacagcccaagcactctgcacgttacgttattctctgacatgattgatgtgatcatgtctggttagtgggttacgtacgtacatagtgccaggctcgtggcatgacgaagca

SEQ ID NO: 107131 - DNA, 997 bp, Zea Mays
tccctcttccaatggaagtagcagggagatgccagctgcggcagctcgtctcatccaaggctccatccgctctcggtccacggtcaacgctgcctcggcgcctagccaccttcgcagcggcgtcgtcctgctcctgctcctgtcccttgcgcgatggcaaccgccgcgcgcacggcgtcagggcctccgagtccaccgacaccgacgcgcctgcgttcgggccaccacgaccacgacggccgccgcggttcctgtgcctgcacgggttccgcaccagcggggagatcatgcggcgccaggtggtgggcaggtgggcgcccgaggtgaccgcgcgcctggacctcgtcttcgcggacgggccgttcccggccgagggcgcgtcccccgtggccggcgccttcgacccgccctactacgagtggtgccagttcgtcggcgaggatttcctcagctgcaggaacttggataggtgcttctcctacctcgaggagctgatggctagagaagggccgttcgacgggctgctgggcttctcccagggcgccggcctgtctgccgtgcttgcagggctccaggagcaggggctggccctcactggggttgctcaggtgaagtgcgtgatagttatagcgggggccaagatcagggcgccggcggcggtcgcgagggcgtttgacaccaagattacctgcccatcgcttcatttcattggtgaagaggactttgtgaaggttcacagcgaagagcttgtccgagcatttgcggacccacttgtcatacgtcatccccgaggccacactgttcctaagcttgacgagaagggtctccaaactatgctcacttaccttgacaagattgagagggagatatgggagcattcgtcaactgatgctgagatcgtgggctcaaattaaacattctgcagttatgaaaaattcacgaatttacagtatatgctcaacaatataaaaggttaatgggagtttcagttctattt

SEQ ID NO: 107132 - DNA, 983 bp, Zea Mays
attgatttgttcgcgtcatattaacgccagggagggccttttctctctcctgtgaacgccaaacagtgtctcttttccaattccagacctgaagaaactccgaccggtggcggcaggtgcgccaccccgaggccccgacccatccctctctctgccggaaccttcagatccgcataaaacctcgctccccttttggtttgtgccacgtgacaggatctgtgccgcgatggcgacgtcgaacaccgcgcggatggaggacggcggcggcgacctgagaagcaccatcaagaagtggaacatcatctaccctgtctacctcaactccaagaagacggtcgccgagggccgccgcatcgccgctgccaaggcctgcccggaccccacctgcatcgagatcgctgactgctgttcgcacctcaagatcccccacgccatcgagttggataaggcgtaccctcgggatttcttccaggtggggagggtcagggtgcagcttaagaaagatgacggctcccccgtcaatcctgctattaaaacgaagaagcagctgatgatccaagtagcagagctagttcccaagcatcacggaaggacaaagaagcaggagccagcgcccaatcccggtggcagttcaaagaacacaaaaggcgggaaaaagaaaaagtgatgcagtatcattgtgttgttttttattctgttcgtcatcatacactaagcttctgtgaaaaaggaaaagtcttggacgttgttgttatgttgccattatgccattttttcatgtataagaacttactaagaatcttccattgactcggtaaaatgcaacttaaaaaaatttggcgtcgctagattaaagggccctttgacaaggcttcaccttctatggctattttgtaattcgtttgacaaaataggttctcctatgttttgcaagttgcaagttgtagacggtggcaaggaccataatttcaaaaaaaaaaata

SEQ ID NO: 107133 - DNA, 893 bp, Zea Mays
tttttctattgatttgttcgcgtcatattaacgccagggagggccttttctctctcctgtgaacgccaaacagtgtctcttttccaattccagacctgaagaaactccgaccggtggcggcaggatctgtgccgcgatggcgacgtcgaacaccgcgcggatggaggacggcggcggcgacctgagaagcaccatcaagaagtggaacatcatctaccctgtctacctcaactccaagaagacggtcgccgagggccgccgcatcgccgctgccaaggcctgcccggaccccacctgcatcgagatcgctgactgctgttcgcacctcaagatcccccacgccatcgagttggataaggcgtaccctcgggatttcttccaggtggggagggtcagggtgcagcttaagaaagatgacggctcccccgtcaatcctgctattaaaacgaagaagcagctgatgatccaagtagcagagctagttcccaagcatcacggaaggacaaagaagcaggagccagcgcccaatcccggtggcagttcaaagaacacaaaaggcgggaaaaagaaaaagtgatgcagtatcattgtgttgttttttattctgttcgtcatcatacactaagcttctgtgaaaaaggaaaagtcttggacgttgttgttatgttgccattatgccattttttcatgtataagaacttactaagaatcttccattgactcggtaaaatgcaacttaaaaaaatttggcgtcgctagattaaagggccctttgacaaggcttcaccttctatggctattttgtaattcgtttgacaaaataggttctcctatgttttgcaagttgcaagttgtagacggtggcaaggaccataatttcaaaaaaaaaaata

SEQ ID NO: 107134 - DNA, 486 bp, Zea Mays
gctgcataatgctgtcaagaaaggttcaagaaacctgtgtccaccattaaaaaaaacccaattgaatatatgccaactttgatttccgcatggaaaataatgtgaaaacgacttcctgaaagtccatggtgaaaagctgatagaatcatgcgtggacccattcgtaatccgtcacccaaagggccacacagttccgaggctcgatgacgagagtttagtggtcatgcaccgtttccttgagaagattgagggggaggtacttgagtattcgtccaaagatgtcaacgaaaccgaagtgggcatgtgataaagactttagaccattagtacttgatgttggcgaaaaggctatacttgtactatttatttacagaatgaacatgtgatgtaacctcgattttcatgaggcatgattatgaaaaatacagaataattgttttatattctatattacttgaatcagaatatctatgtacctttggttca

SEQ ID NO: 107135 - DNA, 766 bp, Zea Mays
tttttttttgtggtgcgcgtgtcgctggctcgtgcgacgcacttaccaacttgacctttataagcacttattactaccaaattccttatgtactgtacaacgcaaaacagagttttatggagtacaggaatttcgacaagtgcctggcctacatcgaagagctgatgataaaagacggccccttcgacggactgatgggtttctcccagggttccattctgtcggcggcgcttccggggctccaagaacaagggctggccctgactagagtcccgaaggtcaagtacctcatcatcatcggtggcgctaagttccagtcacccacggtggccggcaaggcgtacgccaacaagatcgcatgcccctcgcttcacttcatcggtgaaaacgacttcctgaaagtccatggtgaaaagctgatagaatcatgcgtggacccattcgtaatccgtcacccaaagggccacacagttccgaggctcgatgacgagagtttagtggtcatgcaccgtttccttgagaagattgagggggaggtacttgagtattcgtccaaagatgtcaacgaaaccgaagtgggcatgtgataaagactttagaccattagtacttgatgttggcgaaaaggctatacttgtactatttatttacagaatgaacatgtgatgtaacctcgattttcatgaggcatgattatgaaaaatacagaataattgttttatattctatattacttgaatcagaatatctatgtacctttggttca

SEQ ID NO: 107136 - DNA, 1163 bp, Zea Mays
atggcctattgtaagcctctcattttactctacagctattcatcgttggggcctttcaatttccagaaccgcaggcagcaggataccgtagctcctctgcatggcggctaccggatacccaaatgccgccgcatggacacggccagccggaacacccgacaacccggaccagaacagccgcgtcgaggcggccctcgagacccccggccccgacccatcccaccaccacccccacccccacctcgcctcccggatccgcacccgatgggcagcctcggcggcgacgcggagccgcagggcgcgaggcggcggccgcggttcctgtgcctgcacgggttccgcaccagcggcgagatcatgcgcaagcaggtgctcgggaagtggcccgccgacgtcacggcgcgcctcgacctcgtcttcgccgacgcgccgttccccgccgagggcaagtccgacgtcgagggcatcttcgaccctccctactacgagtggttccagttcgacaagagttttatggagtacaggaatttcgacaagtgcctggcctacatcgaagagctgatgataaaagacggccccttcgacggactgatgggtttctcccagggttccattctgtcggcggcgcttccggggctccaagaacaagggctggccctgactagagtcccgaaggtcaagtacctcatcatcatcggtggcgctaagttccagtcacccacggtggccggcaaggcgtacgccaacaagatcgcatgcccctcgcttcacttcatcggtgaaaacgacttcctgaaagtccatggtgaaaagctgatagaatcatgcgtggacccattcgtaatccgtcacccaaagggccacacagttccgaggctcgatgacgagagtttagtggtcatgcaccgtttccttgagaagattgagggggaggtacttgagtattcgtccaaagatgtcaacgaaaccgaagtgggcatgtgataaagactttagaccattagtacttgatgttggcgaaaaggctatacttgtactatttatttacagaatgaacatgtgatgtaacctcgattttcatgaggcatgattatgaaaaatacagaataattgttttatattctatattacttgaatcagaatatctatgtacctttggttca

SEQ ID NO: 107137 - DNA, 1832 bp, Zea Mays
atggcctattgtaagcctctcattttactctacagctattcatcgttggggcctttcaatttccagaaccgcaggcagcaggataccgtagctcctctgcatggcggctaccggatacccaaatgccgccgcatggacacggccagccggaacacccgacaacccggaccagaacagccgcgtcgaggcggccctcgagacccccggccccgacccatcccaccaccacccccacccccacctcgcctcccggatccgcacccgatgggcagcctcggcggcgacgcggagccgcagggcgcgaggcggcggccgcggttcctgtgcctgcacgggttccgcaccagcggcgagatcatgcgcaagcaggtgctcgggaagtggcccgccgacgtcacggcgcgcctcgacctcgtcttcgccgacgcgccgttccccgccgagggcaagtccgacgtcgagggcatcttcgaccctccctactacgagtggttccagttcgacaagagttttatggagtacaggaatttcgacaagtgcctggcctacatcgaagagctgatgataaaagacggccccttcgacggactgatgggtttctcccagggttccattctgtcggcggcgcttccggggctccaagaacaagggctggccctgactagagtcccgaaggtcaagtacctcatcatcatcggtggcgctaagttccagtcacccacggtggccggcaaggcgtacgccaacaagatcgcatgcccctcgcttcacttcatcggtacgttacgtcaatggcaacgccgcgcatcattccattgtcatgccaagtttgtttgtccggttgcgttcaagcgttgcgttggtggaaacgttatggcgtactcacgtcgtctccgtattcgttgctcttgcctgccggcttctcttgttaattgaaagagacagggcttgctttcggcaatgtgctgcataatgctgtcaagaaaggttcaagaaacctgtgtccaccattaaaaaaaacccaattgaatatatgccaactttgatttccgcatggaaaataatgtacgctttcgccctccatcatgtccactgttctagaatgcttcgattaggtttattataagatgcacatggtccaattctctagtcatttctgttcgttatttgtcttggtaccttttatttaaataggcgaaccggtgtatagctgactacgaggcaccactcaagtctgaacacgtttccaaatttggttgatgcaggtgaaaacgacttcctgaaagtccatggtgaaaagctgatagaatcatgcgtggacccattcgtaatccgtcacccaaagggccacacagttccgaggctcggtaagctcctcttcttcggtctaatcccgcgtttgagacccccttcttcagccaaacgagaaactacgtaccttgaaccaaaaccctgggtcatctagcacaaatatattttttttccttttcgcctcgatatatacgaacggcagtcagccaaactaattccacaatgtatggctgttccatggcgtgcagatgacgagagtttagtggtcatgcaccgtttccttgagaagattgagggggaggtacttgagtattcgtccaaagatgtcaacgaaaccgaagtgggcatgtgataaagactttagaccattagtacttgatgttggcgaaaaggctatacttgtactatttatttacagaatgaacatgtgatgtaacctcgattttcatgaggcatgattatgaaaaatacagaataattgttttatattctatattacttgaatcagaatatctatgtac

SEQ ID NO: 107138 - DNA, 965 bp, Zea Mays
ctcccccgtgcctcacggtcgacagctacctggccgagccaccatcaaagcgccagtacaccagtacctatgcattgctagcagctagctcgagtccgctcccaccgtactcactgccagtgccacaccacgcgtacgccatggcgccgtcgccggtggcgggcgcgcacggcgagggcgcgagcgccggcgccgtgtgctgcatgtgcggcgaccgcggcctgccgggcgagctgttccggtgcaggtgctgccgctcccggctccagcacaggtactgcagcgacctgtacccgagggcggccgcgtaccggcggtgcaactggtgcctgcgggagccggggccgggggtcggccaagcgggcctgggccatgcccatgccgcggcggtatttgcggctaacaacaagcccgaggatgataaacaacggaagaccacggcggcggcgtcggacgaggagcggcggctgcgccacgaccacgatgggtgctccccctccccgaagaggttgtcgccgccgcggccgcctgcggagctcggacacccggtgaagaagaagcacagggccgaggagaagacgccgcagccgccgccggcggtggcggctaacaacaggcccgaggatgataaacggaagaccacggcggcggcgtcggacgaggagcggccgcggcagcgccacgaggggtgctccccgaccctgaggaagtcgtcgccgccgcctgcggagctcgtacacccggtgaagaagaagcacagggccgaggagaagacgccgccggctgtcgcggggaaggtgcgggtgaacagggtctgcagggtgcggcggtacaagctcctcgctgaagtcatcagctgctgataagctagtactcctgccgacaaaacatcgagaattaaccatgtctgtatagatgaccaataaacacgagactcgcgagcccggcacgaagcccgctgtttg

SEQ ID NO: 107139 - DNA, 386 bp, Zea Mays
ttattatgtatttttttaattgtcataacgagaggatggtacaccggcaccagcctaattacagcgttgtatcatgaagactgtagggcaagatacattctacaataggccaggctacgttgttgacctctagtttgaggtctgcccagacgaattacagggtcccaatagctaatcctagctcagaattacaaaaccgtggctaattgtcacttgcacctctatacgatgaacaatttacatgaccattggccgctgtcgacattcttcgctaacagtcccttgtcatcactacctgcatgagctactgctacaagccttgccgaagacgccgtcgccggtgtggtacctagaggcgattgaatttggccgacggtccattaccg

SEQ ID NO: 107140 - DNA, 1275 bp, Zea Mays
ccgttggatcacttttgctcggtccagattcactcagattgggcttttagaaaacccaacccacgccgcgccgcggggcctcttaccagcttcccaaatcccaggggcaatgtcagcccacgccgacgccggcgccggcgccggcggccgccgccgcgggacccttgctaaggtcgccctctcgtcagtgtcggccgccatggcggaggcctccacctaccccttagacgcagtcaagacgcgcctccaactccaccgcaaccccggcggcgcgcccgggcgcggcgtaatccgggtcgcggccgagctcgtccgcgatggcggggtttatcggggcttctgccccgccgtcctccgccacctgatctacaccccgcttcgcatcgtggggtacgagcatcttcgctccaccctcgctagcgaggggcgggaggttggactttctgaaaaggcgctcgctgggggactctccggcgttgccgcgcaggtggtgtcaagccctgctgatctcatcaaggtaaggatgcaagcagacagcaggatgttgagccaaggcattcaaccacgttacactggaatggcagatgctctcactaaaatcatacgagcggagggtttccggggactttggaagggggttgttccaaatgcacagagggcatttcttgtcaacatgggtgaattgacgtgctacgatcatgcaaagcatctcatcattcacaaggagatttgctctgacaacctttatgcccacacattggcctctgtcgcgtcggggctgtctgcgacaactttgagctgcccagcggatgtaatcaaaacaaggatgatgaaccaggggaaggagggtaaagctatgtacaggagttcttacgattgcttggtcaagactttgaggcatgagggcgtaacggcactgtggaagggttttttgccaacatgggcaaggcttggcccgtggcagtttgtgttctgggtttcctacgagaagctgcgccaagcatcaggcatttcgtcattttgataatggagggtttttgtttcattccagaggcttttagatcacagaaatgttcattcctgcaacttcatggtagctttataggatcgaacccttttcatgctggtttactggactgcgggcttttatccttcgctgttttcaaggggggaaacagacgaagttgctatgcctcattgtatttttgagtttttgacaatatacaggactcttggacagttggattccacaaaaaaccgatactctcatctttg

SEQ ID NO: 107141 - DNA, 2934 bp, Zea Mays
ctccgctccactcagctgcaaattccattcttctccggcaccggccatgccaccaacataaaattcgcgatcttggcaggcgcatccatcgaagcacctttctgctctagagcttcagagacaacagacaactaactagcttcctcttccagttcccgactctcccgtcagtctgcccgagaatcaatgactaaccgcaaatacactaaaggcagaaggcacgagctagcacacagtcctctgctgaggactgaggttgactccagctaccgcgctcagtgactgtgactgaccggcgataaagcagtagcagactagcagtagaccagctgctcaatcagaggaaagcttccacaccaccagcccaccaccatgctgagcacaacgtgggcatcgccgaaggcgacccccatcccctcgtctccggcctctcagacggcgacccggctccatcccgcctccagcagcaaccgaacgctccgccttgtcgcgcttccctccccgtccgcgccgcggcggaggcggaggcccggccttcctcctcctgcgcgcgcggggctcgtcgccaccgcggcaatgccggcgccggagcccaaggcgcgggtcctggtggccggcggcggcatcggcggcctggccttcgcgctcgccgccaagcgcaaggggttcgaggtgctggtgctggagcgggacatgagcgcggtccgcggggaagggaggtaccgcggcccgatccagctgcagagcaacgcgctcgccgcgctcgaggccgtcgacgccgccgcggccgacgagatcatggacagcggctgcgtcacgggggaccgcgtcaacggcatcgtcgacggcgtttctggctcctggtacatcaagtttgatacgtttactcctgcagctgagcgggggctcccagtcacaagggtcattagccgcatgacactgcaacaaatccttgctcgagcagtcggcgatgatgcaatattgaatggaagccatgtagtcgattttatagatgatggcagtaaggttactgccatattggaggatggtagaaaatttgaaggtgaccttttggttggcgccgatggaatatggtcaaaggtgaggaagacactattcgggcattcggatgccacctattcaggttacacttgctacactggaattgcagattttgtgccacctgatatcgatacagttgggtaccgagtatttcttggccacaaacagtacttcgtctcttcggatgtcggtgctggtaaaatgcaatggtacgcttttcacaatgaagaggctggtggcactgaccctgaaaatgaagcagttcttcgccgagatatatacgaccgcccacctactatgaattgggggaaaggtcgtgtcaccttgcttggtgattctgtccatgctatgcagccaaatctgggccaaggtggctgcatggctattgaggatggttaccagctggctgtagagctagagaatgcctggcaagagagtgtcaaaactgaaactcctatagacatagtttcctccttgaggcgctacgagaaagagagaaggctgcgtgttgctattatacatggactggcaagaatggcagcaatcatggctaccacctatagaccgtacttgggtgttggtctagggcctttatcgtttttgaccaagttgcggataccacaccctggaagagtcggtggcagattcttcatcaagtatggaatgcctacgatgttgagctgggtgcttggtggcaacagctcaaaactagaaggaagacttttaagctgccgactttctgacaaggcaaatgaccagctttatcaatggtttgaggatgatgacgcactggaagaagctatgggtggagaatggtacctcatcgcaacaagtgaaggaaactgcaatagcttgcagcccattcatttaattagggatgagcagaggtcactctttgttggaagccggtcagatcctaatgattcagcttcttccctatcattgtcctctccacagatatcagaaagacatgctactatcacatgcaagaataaagctttctatctgactgatctcggaagcgaacatggtacctggattaccgacaatgaaggtagacgttaccgcgtgccaccaaacttcccagttcgtttccatccctccgatgtcattgagtttggttccgataagaaggctatgttccgggtgaaggtgctgaacacgctcccgtatgaatctgcaagaagtgggaatcggcagcaacagcaagtccttcaggcagcatgaatggagacactggctaccaccactatcatcagccacactgtactgtacagcatccggtaaagacacaacactgcatcacggaaaggatacactcgttctcgaatatttgtcgtctgctagttcaattttaaactaaaacgtgacaaatgaaaaaacgaaggaagtagaagatatgtcaaaacacatgcaatttttgcatccatgaagatgccaaacaggatcttgaatactagcacctagcggattgaaataatgaagttgcagttctgcgtgaactggattgtacgatagggatagacaatttagctgttgtcggactgtgtacatcgttgtaccatcaccggaaatattgtacaccgagaagccatattgtaattacggcatgagaacagtaacactttgatcatgtaatacagtatatagttgtttagcaattagctgagtcagataagatatgatttgttcttccacaagtgccagctcctcgaactgttgaaatttccttaaaatttctgcaggaattgaaaaacttgttcctataaaattatttcatgatccaattaaaaattttactatattatgttggatttaattgggcctagcccattttgaattagtaattaaataaaaaaaataaaaccatag

SEQ ID NO: 107142 - DNA, 2838 bp, Zea Mays
cgcctcaagagtctcagaccaacggcaaagttctagaagcacggttgcacgggcagcacggcataacacctccctccactgatccagttccagtcgcccaacgccccaacgtcttctcttgcaaatcgcaagcaaacttcctgttcagctgagctcagccgaaggttgccgtgctcgcgcgccatggcgctgctctccgccacttcacccgccaaggcgcacctgccgacgctcctcgcctaccacgacgagccgcagcagcaccagcacgctctcccgcctgcacacccgcagtgcttcggcggcggcgggggcaaggccaggcaacgggcgcggggccggtgcgcggcggcaatgcggcctctggacgcggccgtcgctcccgctcccacgcccgcggccggtgaggcgccgcggaagaggccccgggtgctggtggccggcggtggtatcggcggactcgttctcgcgctggcggcgcgacgcaaggggtacgacgtgacggtgttcgagcgcgacctgagcgcggtgcgcggggagggccagtaccgcggacccatccagatccagagcaacgcgctggctgcgctggaggccatcgacatgtccgtcgccgaggaggtcatgcgcgtcggctgcgtcaccggcgaccgtatcaatggcctcgtcgatggcatgtccggctcctggtacatcaagtttgatacgtttactcctgcagctgagcgggggctcccagtcacaagggtcattagccgcatgacactgcaacaaatccttgctcgagcagtcggcgatgatgcaatattgaatggaagccatgtagtcgattttatagatgatggcagtaaggttactgccatattggaggatggtagaaaatttgaaggtgaccttttggttggcgccgatggaatatggtcaaaggtgaggaagacactattcgggcattcggatgccacctattcaggttacacttgctacactggaattgcagattttgtgccacctgatatcgatacagttgggtaccgagtatttcttggccacaaacagtacttcgtctcttcggatgtcggtgctggtaaaatgcaatggtacgcttttcacaatgaagaggctggtggcactgaccctgaaaatggcaaaaagaaaaaattgcttgagatattcgacggatggtgtgataatgttattgatttgataaatgcaactgatgaagaagcagttcttcgccgagatatatacgaccgcccacctactatgaattgggggaaaggtcgtgtcaccttgcttggtgattctgtccatgctatgcagccaaatctgggccaaggtggctgcatggctattgaggatggttaccagctggctgtagagctagagaatgcctggcaagagagtgtcaaaactgaaactcctatagacatagtttcctccttgaggcgctacgagaaagagagaaggctgcgtgttgctattatacatggactggcaagaatggcagcaatcatggctaccacctatagaccgtacttgggtgttggtctagggcctttatcgtttttgaccaagttgcggataccacaccctggaagagtcggtggcagattcttcatcaagtatggaatgcctacgatgttgagctgggtgcttggtggcaacagctcaaaactagaaggaagacttttaagctgccgactttctgacaaggcaaatgaccagctttatcaatggtttgaggatgatgacgcactggaagaagctatgggtggagaatggtacctcatcgcaacaagtgaaggaaactgcaatagcttgcagcccattcatttaattagggatgagcagaggtcactctttgttggaagccggtcagatcctaatgattcagcttcttccctatcattgtcctctccacagatatcagaaagacatgctactatcacatgcaagaataaagctttctatctgactgatctcggaagcgaacatggtacctggattaccgacaatgaaggtagacgttaccgcgtgccaccaaacttcccagttcgtttccatccctccgatgtcattgagtttggttccgataagaaggctatgttccgggtgaaggtgctgaacacgctcccgtatgaatctgcaagaagtgggaatcggcagcaacagcaagtccttcaggcagcatgaatggagacactggctaccaccactatcatcagccacactgtactgtacagcatccggtaaagacacaacactgcatcacggaaaggatacactcgttctcgaatatttgtcgtctgctagttcaattttaaactaaaacgtgacaaatgaaaaaacgaaggaagtagaagatatgtcaaaacacatgcaatttttgcatccatgaagatgccaaacaggatcttgaatactagcacctagcggattgaaataatgaagttgcagttctgcgtgaactggattgtacgatagggatagacaatttagctgttgtcggactgtgtacatcgttgtaccatcaccggaaatattgtacaccgagaagccatattgtaattacggcatgagaacagtaacactttgatcatgtaatacagtatatagttgtttagcaattagctgagtcagataagatatgatttgttcttccacaagtgccagctcctcgaactgttgaaatttccttaaaatttctgcaggaattgaaaaacttgttcctataaaattatttcatgatccaattaaaaattttactatattatgttggatttaattgggcctagcccattttgaattagtaattaaataaaaaaaataaaaccatag

SEQ ID NO: 107143 - DNA, 1831 bp, Zea Mays
ctccagcagcaaccgaacgctccgccttgtcgcgcttccctccccgtccgcgccgcggcggaggcggaggcccggccttcctcctcctgcgcgcgcggggctcgtcgccaccgcggcaatgccggcgccggagcccaaggcgcgggtcctggtggccggcggcggcatcggcggcctggccttcgcgctcgccgccaagcgcaaggggttcgaggtgctggtgctggagcgggacatgagcgcggtccgcggggaagggaggtaccgcggcccgatccagctgcagagcaacgcgctcgccgcgctcgaggccgtcgacgccgccgcggccgacgagatcatggacagcggctgcgtcacgggggaccgcgtcaacggcatcgtcgacggcgtttctggctcctggtacatcaagtttgatacgtttactcctgcagctgagcgggggctcccagtcacaagggtcattagccgcatgacactgcaacaaatccttgctcgagcagtcggcgatgatgcaatattgaatggaagccatgtagtcgattttatagatgatggcagtaaggttactgccatattggaggatggtagaaaatttgaaggtgaccttttggttggcgccgatggaatatggtcaaaggtgaggaagacactattcgggcattcggatgccacctattcaggttacacttgctacactggaattgcagattttgtgccacctgatatcgatacagttgggtaccgagtatttcttggccacaaacagtacttcgtctcttcggatgtcggtgctggtaaaatgcaatggtacgcttttcacaatgaagaggctggtggcactgaccctgaaaatgaagcagttcttcgccgagatatatacgaccgcccacctactatgaattgggggaaaggtcgtgtcaccttgcttggtgattctgtccatgctatgcagccaaatctgggccaaggtggctgcatggctattgaggatggttaccagctggctgtagagctagagaatgcctggcaagagagtgtcaaaactgaaactcctatagacatagtttcctccttgaggcgctacgagaaagagagaaggctgcgtgttgctattatacatggactggcaagaatggcagcaatcatggctaccacctatagaccgtacttgggtgttggtctagggcctttatcgtttttgaccaagttgcggataccacaccctggaagagtcggtggcagattcttcatcaagtatggaatgcctacgatgttgagctgggtgcttggtggcaacagctcaaaactagaaggaagacttttaagctgccgactttctgacaaggcaaatgaccagctttatcaatggtttgaggatgatgacgcactggaagaagctatgggtggagaatggtacctcatcgcaacaagtgaaggaaactgcaatagcttgcagcccattcatttaattagggatgagcagaggtcactctttgttggaagccggtcagatcctaatgattcagcttcttccctatcattgtcctctccacagatatcagaaagacatgctactatcacatgcaagaataaagctttctatctgactgatctcggaagcgaacatggtacctggattaccgacaatgaaggtagacgttaccgcgtgccaccaaacttcccagttcgtttccatccctccgatgtcattgagtttggttccgataagaaggctatgttccgggtgaaggtgctgaacacgctcccgtatgaatctgcaagaagtgggaatcggcagcaacagcaagtccttcaggcagcatga

SEQ ID NO: 107144 - DNA, 2483 bp, Zea Mays
caccttgccgcgctcgttcgaggacctggctggctcgtgcttgccaaccacgacacgcagcatatagcctctggctggcctcaaccggcgccatggagctgcttgtgctactcctgctcttcctcgccctcccagtcctcccggcgcgctgcggctcggtgactccgcggcggtcgctccacctcgagctggcgcgcgtggacgccgcggcggccgccaacctcacggaccaggagctcatccggcgcgccgtgcagcgcagcctcgaccgaccggggatcgtggcgcgctctggcggcggagccgcggacgaggcgggcaaggccgtcgcgagcgaggccccgctggtgcccgggggcggcgagtacctggtcaagctcggcaccggcacgccgcagcacttcttctcggcggccatcgacacggccagcgacctcgtctggatgcagtgccagccctgcgtcagctgctaccgccagctcgacccggtcttcaaccccaagctctcctcctcctacgccgtcgtgccatgcaccagcgacacctgcgcccagctggacggccacagatgccacgaggacgacgatggagcgtgccagtacacctacaagtacagcgggcacggggtgacgaagggcaccctggccatagacaagctggccatcggaggcgacgttttccacgccgtggtcttcggctgcagcgactccagcgtcgggggccctgccgcgcaggcgtcggggctggtcggcctcggccgcgggccgctctcgctggtatcccagctctcggtccatcggttcatgtactgcctgccgccgcccatgtctaggacctcgggaaagctcgtgctcggcgcgggcgcggacgccgtccggaacatgtcggaccgggtcaccgtcaccatgtcgtccagcacgcggtacccgtcctactactacctcaacctcgacgggctggccgtgggcgaccagacccccggcaccaccaggaacgcaacgtcgccgccctcgggtggtgctggtggtggaggaggaggaggaggaggcggcatcgtcggcgctggcggtgccaacgcgtacgggatgatcgtggacgtcgcgtcgacgatctcgttcctggagacgtcgctgtacgacgagctggcggacgacctggaggaggagataaggctgccccgcgccaccccgtcgctccgcctggggctggacctctgcttcatcctgccggaaggcgtggggatggaccgggtgtacgtgccgacggtgtcgctgtcgttcgacgggcggtggctggagctcgaccgggaccggctgttcgtcacggacggcaggatgatgtgcctgatgatcggcaggacgagcggggtgtccatccttggaaacttccagctgcagaacatgcgcgtcctctttaacctgcgccggggcaagatcaccttcgccaaggccagctgcgactccttgccatagatagataggttccgcctggactggaaacttcgtctcatgatcttgcactcagggccagggttttagagaatttgcacatcggagattagatactggtgctctgtattagcttctgacagaaattcctgaactgtatatgcagaaacgcgtaaccattcagtaatcagagtagcaaatggaaggaccatcgtctttcactccgatactagtttatgcaaattataaacggaagcagcatgaaccctagaagcctagacttcatggacacaaaaaagtatttaagcgaagaaacagaattcagtagacagtgccatcaatttctctagttccaacctttcaatccggcgaaataccagaagtatttgaagagacttttcagatgataaaagctaccacaagaacattcagaaattgtctcatgtcaggaaccacctctatttcccccacggctcctatattttacttttatactcttaattaattaagcttatttgcttctcagcgcaagcgtataagcacaatcagtatagcgtagggtatgcattagcaatggacatgaagggtagatgtgccgccgggcatcaaaatacaataccgaaactacctcagaatcatcgactgaaaccaaaacttgagcccgcagcacctctccacgacgtcgccttcaagcctgacgttccagcagcccgagtatgtccagggtctgcagcagccggcactcggtaaggatgacgctgagcccaacgttcgcgactgccagcgcctcttcttcagccaccaccttagctgctgctgcgttgaaggcaagccctgaggaaggtctggagggggcatgttcctcttcagctcaacgagcagcttgcagtgccggcctagcgcctcgatccctttggcagagatattcaggcagttgctgacgtccagcactttaagtgcaggaagacattctgcgtgcttctccacggtttggtcagtgatctcgctcattgggacctgcaggacattcaacaa

SEQ ID NO: 107145 - DNA, 2559 bp, Zea Mays
gtaactattgtgttctcgcattgaagggtttacctaaaggaaagggcctacttttgcttgctgaaatgagctcagctggcaaccttgcttggactacactactgcggttgtaaagagtgtcgagcaacatcctgctttgtaataggatgtagatcagtaaatcctgcatcttggtctccagcgccgtcgagcccagcattcatccatgccactcctggagtttagatggctgttggaggagatgcccttgggcaacaatataatactcccatttttgtgagtgcatttttgccattcggttctcgttggatggctcacttgcttcttgtcgactggggattaggtgtgttgggttgtggccactggccggcgacagctaggaacaacaacctgtagtaggtgtcaattgaggcgacattgcgtcaggaagcagaagacatgcacacaattggtgaatgacaactttgcatctgtgatttggcccaagaaagtatgttctcctttgcgtccaaaatatgtaagtttgctgaatttcataaactccttttatccttgacgcagatttgttcttaacacttggtgggaataaaaaggaacagagagatagtgatggatggccaggagaggcgagggccacctcaccgtagatggagcccacggcgcacgcaaggagtggcgcaccttctccggctccttgctctgctccaatggcgtcaatgtccacgtgccacgtcatggagcggatgcagcacaattggctagctgtatacatgcatctgttcaatccatggcttctcgacgctctcctaggttttggacttcaaaactttgtcatggtcaaagctagaagctaaatcacaagcagaaccatccgaattagctggagcagtttcattttcagcaagtgctggtcattcactggtaatcaccaaaagctcttttcactcgagtcttattccagtttgttagcatataattgtatagtgtatttgcatctggctttaatatctttcatattcaatggggaaataagatcctatgtcttgcaggacatactagaaaacctgcataagtcttagtggttaggctaatatttcactcatcttttgctatttatttattagtgtcttagttattattaattatgtgcattttatgacagttaaggagtttgatccacaaacctgcacttggtctaccttgtgtacttatggaaggtcacttgtatgacagtaaagacacgaccacctaactgaacatgccctcaaaggttgcagttcagtttgcatctcttcatttttacagttccaggttgcagtttttcatagcctacttgagacattacagtgtcctacagctgaacctgaaattatcttcaacttgcatttctttagtcatggtttgactgcctatatgtgcctaaaacaacacaccaatttcggcatccatccattcatgtgactgctcgcagaactaacgagctaagattcctcccctcaccggcgcttgttcccatggtctcccaacaccgagccgccaattattcccactgtctcctcaccacgagatgctgcccttgtgctctgcatgcagatgcaggtgctaccgaggaagaggaggcgctcccggtcctggcttctaaacgttgtgaaccagatcttggtgcggttgcccgagtagtttactcgtctagaggaggggtttggttgtcgacccgatttggtgggggcttcgccactgggataaggggacagtttggcctactggatctttattgccagttgttggttctgtcctttccattgggctggtactttcttgacggattggttaagcgctgtctgtggggttgttgtgctgctcctcccttcatctcgttttgtggtgattggtggagggggaggaggaagagctaggaggattctctcgcttgttcttgggtcagttcttggcgcggcaggatgaagtatatgaagcttggatcaaagccgaatgtcctttagggcttattcggttattttcaatccatatggattggaggggattgatacggattgaaggggattttgacttactagggattgaatccccctcaatcaccctcaatccatatggattggggtagaaccgaacatgcccttagacggaggggagcaatatcaggtgccttcctggtcatcaggcgacgctcttgatggtacatgttttgatggttttcattacataggacatgtgaaatactattagaagaacatccgcgtataaataattatcttttagattttttgtcttgttagcatgagctctctcaaacattgtctctgcagaggactatgatgctgattataaattatgtgttgtttttcttactataatcattgttggctaatattttaacgaatagtttgcgctccgttgcaacgcacgggcactcacctagtatatatataaaccaataaagaaacagagacattcgactcatccactttcacccgtttcggttttactctaaacacgctatcagccactcacttctccaaagaggaaaaaaggcaacga

SEQ ID NO: 107146 - DNA, 1388 bp, Zea Mays
gtccttcgctcaccctatgccctgccacctccgccgtgacagcctcactcacctcggatatccatgggacggcgcagtgcgaccccgacctcagcgttccatggaaggcgcgatccactctgctgagctcctcgtccttgcataggcgtacgcgcaggccgaggagctctccatcgagcgcgagcatctcatcgctgagctccagttctttgcagagcgccagccgcgagcgcgagatctcccaggcccacctccagcagaaccttctcatcagcgatgggggaactagatggtgaggaggaggaggaagtggagcgcatcctgtgacggcgatgcgggtagcactagggaaatccagccgcatctactcgccttcgctcaggcttttcccgctggccacaactctgggaccatccacatctacatctgggacaagggtttacctaaaggaaagggcctacttttgcttgctgaaatgagctcagctggcaaccttgcttggactacactactgcggttgtaaagagtgtcgagcaacatcctgctttgtaataggatgtagatcagtaaatcctgcatcttggtctccagcgccgtcgagcccagcattcatccatgccactcctggagtttagatggctgttggaggagatgcccttgggcaacaatataatactcccatttttgtgagtgcatttttgccattcggttctcgttggatggctcacttgcttcttgtcgactggggattaggtgtgttgggttgtggccactggccggcgacagctaggaacaacaacctgtagtaggtgtcaattgaggcgacattgcgtcaggaagcagaagacatgcacacaattggtgaatgacaactttgcatctgtgatttggcccaagaaaatttgttcttaacacttggtgggaataaaaaggaacagagagatagtgatggatggccaggagaggcgagggccacctcaccgtagatggagcccacggcgcacgcaaggagtggcgcaccttctccggctccttgctctgctccaatggcgtcaatgtccacgtgccacgtcatggagcggatgcagcacaattggctagctgtatacatgcatctgttcaatccatggcttctcgacgctctcctaggttttggacttcaaaactttgtcatggtcaaagctagaagctaaatcacaagcagaaccatccgaattagctggagcagtttcattttcagcaagtgctggtcattcactgttaaggagtttgatccacaaacctgcacttggtctaccttgtgtacttatggaaggtcacttgtatgacagtaaagacacgaccacctaactgaacatgccctcaaaggttgcagttcagtttgcatc

SEQ ID NO: 107147 - DNA, 3400 bp, Zea Mays
gtcaacactgtacaaacatctctttttaagaaaatataataatgttaaggtttttaaaagaaatatagatatagactatatcatccatctaaaactaataatgtacaaaaaaaaaaagtacaacgcgtccgctgccgagacgacgaagagataaacccaaatggaatggaccaccagaaaccaaaccgtcgtcaagaggatcggagggagggccggatcggaggggcgggcgctggaagccacggtctgcttttagggtttctctcccctcgccgagacagacaagtactccaccacacacacgcgccctacccacgaaattcacaaacccaccggaggcacagaaatttcccaggcaaggaaaaatcccgtccgaaatccagcgctccaaatccgttcgtctcctaggcgctcccccgaacccgtcacgaatccctcagatccccgctgaaatccctcaatcctccgtgctcgccgccgccgcctcctccctgcgacagccgcggccgcggatttccacccgagggtttcgtctcgctctcgctctctccgctctactgcctccacagattggcgcgaccgacccgtcatcgaggaccttcttccgcccgagaggccggggctcctcccgcggaaattcactctcgttcagaggcggcgctctcctcttcatcgccgcccccgcgctctgcttgtactggagtggcgcggggtggagatccacccgggcgtggatcgattcctcttcgtttcttcgttcggtggcgcggaataccaatctatagaagtgcacgaggagtttttatatccccgatttttagggggttcaactgaactcccatgccccacgctaagtccgcccctggtggtggtggactgaattggtggacactgttgattttgtcgtgggcatggagcgaagtgagccctcgttgaagccagaatggctgctgcggcccacagtacctgccacgacccataagccggtgacttcgccccgcgcagatgatcacggcaggggtgcttcatcaagaaaccgttcatcgggacgagatcgtgatcggagctcccaacagtcctcgtctcggaggggttcaagctctagtggttcaaggaggaatgatcgcgatggtacagggaaatcaagaggctatggtaattttggaaagcacagcaaggataggatacaagaaaaggacttggattttcgtgaacgggagagtaggttggttcaaccagatgatcctttacgtgatggctttgagtcctttagctcatgcagatctgaaaaggacaggcttaaccgtactcgttcaaaggtggccataccaaatcgggcaggagtaagtttagacaatggtaatgtatctaaaaaagataatggtgtcatctcctttgagcgggaatttccacaccttggttctgaggacaaaaatggaaagcaagacataggtcgagttccgtctcctggaattagcacgccaattcagaacataccattggtagtatctgatggctggaattcagtgcttgcagaagtacctgccttagtagatccaaacattaactctgtttcctcttcctcatcacccgctggttctagtaaaccgattgaagtgtccaactctgggagtgcgttaagcatggctgaaacagtgatgcagtcaccgttaaatatttgtaccacacctcagttatcaattgatgctcagaagattgaagaaagaactatgaggcagtgcattttaagacctctaacaccatcgtcaaacaaaatatctgcatctatttccttggataagttattaaaatccaaaggtgcaagagctggagagtctaatggacctatcaaggttgctccacagctgtcaatacagccatctagcaactctgttcgcactccagtcaaaactgagctcgtaaagcaatctcaatcaggcagccttcaagtccttagccgtgagcagaatggtactgtaaatactgctgccaaagacatcaccagcaacaatcctgtgagccctgttttgggtcgatcttcttcaatggaacctatgagaaagtctattgtcaacccaaagcttaaggttggtactaatggccgttctttgcatcctctgcaaggttcatttgcagacagaaaagcaagtgcaaaagacaagtacaaattttttgagttgttgcgaagtaagtctgtaaatggttcaagcgctgctattgagtctccatctagcctgactgatgatcagcagaactctagtcctgaattgcctttcaagtttattgaaaatgggaacagttcctgtgaagaagcaaattcttgtgagggatcacagcgacacttgtcggacaatgaggaaattattccaccttcagaatctcatgacgttttagatgagggatctctggggattcaagttgacgacaagggttccagctcttcaccagtacttggcacacaagatatatcttccaagaagccccaggaagacaatgttgatattgttgtacctgtttatgtaaatgatggttctgtgatgcccaattctgttgacaatgaagcaagattgctgttggaggaagccaatcctgctcaagtgttacagcacattgatgcaagggaggagaatccctgtcctgctcaagagttcgagtccataggggcaggtggggaggaagagttgaacctcctgagatctatgggctgggatgagaatgaagaggttcagcctcttcagcaggaggagattgctgattgtgtaaggcagaacgtcaggctgcagcagaagcttcaggaatgcaggggctgatcgccgaatcaatggagcaacgtcactgtgcgtcaccatgctgagaagatgtgggccgcgtggagggagctgggttttggacttttggtaccttccgggcaaccgatcagataatgattgtctctagcttagcaaatggagagttttgtttttgttaatgcttgttcagcattgtgggggaaggtttcctggtagagctgacaattttcccccattgagaagaggttttagggtttctcttcctcattttcccagaaggaatacaccaaatggaagtcttgtctggtgttggaggcacataggtgtgcgttgctctcaaagaagaataggttgtctcttacttttcgccgctatgttttcttttttggaaaaaagggaaaaaagaatgatccagcttaacatgaaaaaggtgcacagggattgccttggtctttaatcttgctttatttgcgatctttaaagagaacgatcgagcttaacacttaaatagatgactgtcgaaatgatagcagcttgagttgctcaccgaaccaacacattcgtatattgtgataagaagctcccccatgaaaggttctctacttttgttc

SEQ ID NO: 107148 - DNA, 1512 bp, Zea Mays
atggcggacacgccgtcgccgtcgccgacggcggccgccggggcggagccggggtccgcgtcgacgccgctgctgcggcggaggggctcgtacacgcggaccgtgtcgcacgcgcgcgacgagctcagcagtttccgctccggcctgcggtggatgtgcgtcgaccactcggacgcctccagccccgccgtgtcctggctcgtcttcgccgcgctcggcgtggccgtccccgccgccgcgcacgcggcggcggcgccgcggcgcgcctacgacacgcaggtgcaggtctcgctcacgctctccgccgcgctggcctacaccaccctctactccctcgtccggcgccacggcctgcgccggctgctctacctcgaccgcctccgccacgactcgcaggacgtccgcgccgggtacatcgtccagctcgcggggtccttccgcctcctcgcctgcttcgtgctcccctgcttcctcgccgacgccgcgtacaaggccttctggtactgcgccaaccgccccttcccgctctggtggtcggccgcggcgtgcgcgctggagatggcgtcgtggatgtaccgcacagccatgttctgcatggcgtgcgtgctgttccgcaccatatgctacctgcagatcctccgaatgacggggttcgcgcgggacttcggccagtgcgccgacgtcgccgccgtgctgaggcagcaccggcgcatacgcgtccagctccagcggatcagccaccgctaccgaagcttcatactctactctctcatcctcgtcaccgccagccagttcactgcgcttctcgccgccaccagaccccacgcgcgtgtcaacttcgccactgccggcgagctcgcgctctgctccatgagcctcgtcacgggactgctcgtctgcctccatagcgcggccaagatcacgcacaagacgcagtcgatcaccagcgtcgccgcggcgtggcacgccgacgccaccatcaacagcctggaccgtgaccaggagaaccccaggacgcccagcaaagcgtgcctgcagcagcaaacgcccacgagtcccttcccgatggcgggcgcgtcgtccggcgaagagtccgacgacgacgagtggcggagcgaggacggcgtggacacctcaaggttcacgcctttccacgccaccaacgtctccttccagaagaggcaggcgctagtgacgtacttggagaacaaccgggcggggatcacggtgttcggtttcgtcgtcgaccggacatggctacacgcgctgtttatgatcgagttctcgctggtaatgtggctgctagggaagacgatcggcatatcttgaggaggagatgcatttacttgtgaatgatacaaccaagaatttatcattctgccctttactgtaaaggtccaagtagattatgtcgttctaaatgtacaaatttgagctcagatagtagtttttttgtttgttgtttgtctgatccccaagaatatcgactctacaaaatttgccttttgacaa

SEQ ID NO: 107149 - DNA, 83 bp, Zea Mays
agataatggaacaaaatccggctttcgcctctttcgagggtagggccaaggtcacacaccatatgacaactccaagtactcgc

SEQ ID NO: 107150 - DNA, 1739 bp, Zea Mays
ataatataatatgctcgtagatcgtacacaaaccaagctcttgcaaggagaaaaaaaaaggaggggcaaggaacgcgctggctgagagacatggttctgacgcacgttcacgaccttgacgaggcatccgccgcatcggccgtcgtcttcgcctcgagatacgtgcaggacccgcttccaaggtatgagctgggagagaagtccgtctccaaggacgcggcgtaccagatcatccacgacgagctgctgctggacagcagcccgcggctgaacctggcgtcgttcgtgaccacgtggatggagcccgagtgcgacaagctcatcctcgagggcatcaacaagaactacgccgacatggacgagtacccggtcaccaccgagctccagaaccggtgcgtgaacatcatcgcgcggctattccacgcgccggtgggcgccagcgagaaggccgtcggggtcggcacggtggggtcgtcggaggcgatcatgctggcggggctggccttcaagcggcggtggcagaaccggcggagggcggcggggcagccctgcgacaggcccaacatcgtgacgggcgccaacgtgcaggtgtgctgggagaagttcgcgcgctacttcgaggtggagctcaaggaggtgaggctgcgggaagggtgctacgtcatggaccccgacgaggccgtgcgaatggtggacgacaacaccatctgcgtcgccgccatcctcggctccaccctcaccggcgagttcgaggacgtcaggcgcctcaacgacctcctcgcggccaacaacaggcgaacggggtgggacaccccgatccacgtggacgcggcgagcggcggcttcatcgcgcccttcctgtacccggacctggagtgggacttccggctgccgctggtcaagagcatcaacgtcagcggccacaagtacggcctcgtctacgccggcgtcggctgggtggtctggaggagcaaggaggacctccccgacgagctcatcttccacatcaactacctcggcgccgaccagcccaccttcacgctcaacttctccaaagggtctagccaaatcatcgcacaatattaccagtttcttcgattaggtttcgaggggtaccgcaacgtgatggagaactgcatggagagcgctcggacgctgcgtgaggggctggagcgcacgggccgcttcaccatcatctccaaggagcagggcgtgccgctggtggccttcacgttcaaggccaaggacgaaaccccgctggccttcaagctgtcggcggagctgcggcggttcggctggatcgtgccggcgtacacgatgccggccaacctggagcacatggccgtgctccgcgtcgtggtccgggaggacttcggccgcccgctggccgagcggttcctgtcccacgtccggatggcgctggaggagctcgaccacgcggccaagggcgggcccgtgcccaagatgcggctcaccatcgagctcggccctcccgccaggggctccggcgaggaggcctccgccagggtcgtcaagcgggaggccgtcgtgccggtgcatcgcagcgtgtcgctcgccggcgggaagaccaagggcgtctgctagactggccggtccatggcccgaaactctctgtagtggtatggcgaggcactgaataaacatgtgtcgacaaaaggcaacctctcgagcaccccgtcatcgcgatgcaatcatgcaaataaagctaaaatttatgt

SEQ ID NO: 107151 - DNA, 1917 bp, Zea Mays
ctccccgcacgcgcatcgttgctccctacaaggcccccaggcagtggaccgcttctctctcccatgttcctggcgtggcattactcatccattctagcactgtttgttaccgtagccgtggacccgctagtaattgttagtagaagaaaaattgatattttatggttgtaatgtggtatagaagaagaaaatagaggaaccactgagggagattaaaaagtagagaacgtaatgttgatgaagtgacgcaaaaaatgatataggagaagaaatttagaggtaatagctagtccgctacagatagcctaactcgtgacgccaaaaactctaatactgcgatcgagtccacatcgcctgtccaccagtccagagtccaccaccacgtttggccgtttgcaatagactagtgcataaatcgaccggcacgggctcatcaccgctcaagcagtcgccgcaccccctctctgtctctcgcatctagtctagacgttgtactgcagcggcagcgcaccacatctgaccctaccaacatggcatccgcggggacgacggcggtggtgcccgaggtggccctgcggtcgggcaacgcgaggacggcgatgccgatggtcggcatgggcacggcgtcgttccctctggtgcacgaggccgtcaaggacggcgtgctctccgccatcgaggtggggttccgccacttcgacacggcctccatgtacggcaccgagaagccgctgggcgacgccgtggccgaggcgctccggcgcgggaccctgcggtcccgggaggatctgttcgtgacgtccaagctgtggtgctcgcagaaccacccggacctcgtgctgccgtccctccgggaaacactcaagaacctgcagatggagtacgtggatctgtacctgatccactggccggtgtgcctgaaaccggggccgcccgagctcccgaccaggaaggagaacgccgtgccgctggacctcgcgggcgtgtggcgcgccatggaggagtgccagcggctgggcctcgccaaggcgatcggcgtgagcaacttcaccaccaggcacctcgacggggtcctggccgtcgccacggtcccgcccgcggtgaaccaggtggagctgaacccggcgtggcagcagcggacgctcagggcgtactgcgccgacaggggcatccacgtcgcggcctactcgccgctgggagggcagaactgggacgggcagggcagcgccgtgctggactccgaggtgctcgccgcgatagccaaggcgagggggaaaaccgtcgcgcaggtggcgttgcgatggatacatgagcagggagtgacatgcatcgtcaagagttacagcaaggagaggctgaggcagaaccttgggatattcgactgggagctgaccgacgaggagcggctcaagatcagccagatcccgcagaggaaggttgtccagactagtagcttgttctcgcaagagggtgagttcacggctgttgatccagcggaacttaatattttagaggaatagggggaaaatgacccgccacacatacactgcatcagtgttgctgcatacaaaagtgtatttcgtagaccatttgaataaggctgttggaaacggtgacatctagtgctgtttggtttcgttgccgggacggtaacatcaacagttaatgctgcaatccattaacggaacggaggggaatggatagcgctcgtttatgagtggtttcattactgtataaggccttgttcgtttgtatcggattggtgggtcggaacgattccgagccggattgcttctctaatttatataaactttgattagtcggaacgattccgggtacaatccgatgtaaacgaacaaggcctaagactgtttcagcaacatttactaaatttcattttctaaggtttagtttgag

SEQ ID NO: 107152 - DNA, 1350 bp, Zea Mays
cgggctcatcaccgctcaagcagtcgccgcaccccctctctgtctctcgcatctagtctagacgttgtactgcagcggcagcgcaccacatctgaccctaccaacatggcatccgcggggacgacggcggtggtgcccgaggtggccctgcggtcgggcaacgcgaggacggcgatgccgatggtcggcatgggcacggcgtcgttccctctggtgcacgaggccgtcaaggacggcgtgctctccgccatcgaggtggggttccgccacttcgacacggcctccatgtacggcaccgagaagccgctgggcgacgccgtggccgaggcgctccggcgcgggaccctgcggtcccgggaggatctgttcgtgacgtccaagctgtggtgctcgcagaaccacccggacctcgtgctgccgtccctccgggaaacactcaagaacctgcagatggagtacgtggatctgtacctgatccactggccggtgtgcctgaaaccggggccgcccgagctcccgaccaggaaggagaacgccgtgccgctggacctcgcgggcgtgtggcgcgccatggaggagtgccagcggctgggcctcgccaaggcgatcggcgtgagcaacttcaccaccaggcacctcgacggggtcctggccgtcgccacggtcccgcccgcggtgaaccaggtggagctgaacccggcgtggcagcagcggacgctcagggcgtactgcgccgacaggggcatccacgtcgcggcctactcgccgctgggagggcagaactgggacgggcagggcagcgccgtgctggactccgaggtgctcgccgcgatagccaaggcgagggggaaaaccgtcgcgcaggtggcgttgcgatggatacatgagcagggagtgacatgcatcgtcaagagttacagcaaggagaggctgaggcagaaccttgggatattcgactgggagctgaccgacgaggagcggctcaagatcagccagatcccgcagaggaaggttgtccagactagtagcttgttctcgcaagagggtgagttcacggctgttgatccagcggaacttaatattttagaggaatagggggaaaatgacccgccacacatacactgcatcagtgttgctgcatacaaaagtgtatttcgtagaccatttgaataaggctgttggaaacggtgacatctagtgctgtttggtttcgttgccgggacggtaacatcaacagttaatgctgcaatccattaacggaacggaggggaatggatagcgctcgtttatgagtggtttcattactgtataagactgtttcagcaacatttactaaatttcattttctaa

SEQ ID NO: 107153 - DNA, 2063 bp, Zea Mays
gtgaggtaaaaaatcgaatcacacgtacgcagacgtaaaccgaaaacgaaaacgtgtgagaacatctcgcatcacgaatgttattgcgttattcctccgcagagcgcccatcagctagcacaccatgctgctcttcttcttgctattggcgaccagcctccgccagaaggtggtgacctccttctcgatgtcgtgcaccgacttcttgggctgctccggcgcctgcttcctgccggcgtgcgcgtccatgtcggccatggtcttgcccaggtccgcgatgaggcgctcggcgagcccgcggctgaagtcctcgcggatgaccacgcgcatgacggccacgtgctcggcgtcggcgggcatggtataggccggcacgatccagccgaaccggcgcaggctctcggccacctcgaacaccgtgtacttggaggagtccttgagggagaaggcgaccagcggcacgcccgagtccttggacaccacgtcgaagtagcccatcttgttgatgccctcgcgtagtaccgccgcgttgtcgcggcagttctgcatcacgtccttgtagccctgccagcagaccgtggcacatcatcagttccaagcccagcgaatgccatccgcagcatgatcataatgcaagttagttgttacctcgaatccgaggcggatgagctggtaatactgcgcgataatctggctggaacctgtatgtcgtccaaaagagagaaggaaggcagagaagatgaagtcactgtaatttgtttgctcagtggaaatataatctgcgaacaaatccatcagacaggaacaacagctagagttaccgtacctttggagaagttgagcgtgaaggtgggctggtcggcgccgaggtagttgatgtggaagatgagctcgtcggggaggtcctccttgctcctccagatgacccagccgacgccggcgtagacgaggccgtacttgtggccgctgacgttgatgctcttgaccagcggcagccggaagtcccactccagctccgggtacaggaagggtgcgatgaagccgccgctcgccgcgtccacgtggatcggggtgtcccacctggcggaaacgaagccgtcagtttaattaggcctgagaaagcgagaattaatgagatggcgcacccaccctgtctcggcgttcttggccgtgagcaggtcgctgagcagcttgacgtcctcgaactcgccgttgagcgtggagccgaggatggcggcgacgcagatggtgttctcgtccaccatctccgcggccttctctgggtccatcacgtagtacccttccttgagcttcacctccttgagctccacctcgaagtacctggcgaacttctcccagcacacctgcatgcgcgtttggtggttcagcagctcgtggcatcgcatggcccatggccagtagacagacgttttgcacgcaatggaccggacgtacctggacgttggcgccggtgacgatgttgggcttgtcgtagggcttgcccgccgccttcatcttgttctgccacttcctcttgaacgccagcccggccagcatgatggcctccgaggagccgacggtccccaccccgaccgccgtctcgtcgtcgccgatcggggcgttgaacaggtgcgcgatcatacagaagcgtacctggagctcggtggtgacggggtactcatccatgtcgacgtagttcttgttgatggaggactggatgagcttgtcgcactcgggctccatccaagtggtcacgaacgacgccaggttcagccgcgggttcccgtccagcatcagctcgtcgttgatgatctggtacgccgcctccttggggatcgactgctccgggatcttgaacctggccggcgcggtgcgcacgtagcgcgacgcaaaggtggagcagtgcagctgcgactcggcggcgttcgtgttcgtcgtggacagcgccatttcgtcctctccttcttggggctcaacggctgcggacctctggctttcgctgtacgttgccggtaaatttgccgtgtccgagatgagaggaggagatcagaggacgggggggc

SEQ ID NO: 107154 - DNA, 1169 bp, Zea Mays
tcgctcaaatcttgctatgtttccatttcaaatatccttcggtcccaatcaataatacgtttaatttttttttgccatgtttgaccgatacgagcttgctgtgtacaactttcaagcgttctatttgtatacaaaagagctgacaaggcctgtgtatacaagctctcaagtcgtgctaaaccagaatctttgcccgattgaattcactaaactaacatccatttgtatacagtactcttaatgattcccaaaattgaatttagtttgtccctgaaacgaagaaatttactcccaaaactaaagataatttattaaaacctgagtgccaaactgccaagattttagacgtttattctacttacaaaattttgagtaaacaataattaaccaagattcctggaaatcgacagatgggtgccaagatcttgccaggtgatctagttaatttattcacaaactgtcgggaagtcgaatgcacaagccataagaatagatggaagtgccagaatctttgcccaattgttctaggcaacgtacagcgctgaagacgctactgaaacaagcgcaacagagactctaatttattgccgagttaattcactttcgtttactcattgaatatgtagactatctgggtcaaatcaaaatcacaaatatttcttttagtgcagaagacactgttcggaagggcaaaaaaacacaagtctcttgaaatatttgtattgaacgatagaatagaagagggatcttgcggatcaaataactgtaagggcgagtagaatgcacaagacatacagagagacgtcccgtgccagaatctgcgcccaatcactctcggcaacgtacagcgctgaaaacgctattggaagaagcgcatcagagactctaatttattgcctcgggaaaaaattaattcagaaaacaaagaaacagaaaatggaagaaaacaaataaacaaaaacaggattagagccagatggcatcggactcacggaagctttgtgcaatcaacatagcgtatgattgttcagagtttgatggtatatatgagcaaatcatcatcgtccaacgcagaacaaaagctccaaatattgaaacgagaagaaagagagaacataagggtcgaaagagaaatctgtacacggagaagaaacaacatggcggcggcg

SEQ ID NO: 107155 - DNA, 692 bp, Zea Mays
gaagataagatcaccaaaacttaagtactgtctgaacagttgaatgcgccataagctgatagtaaaaaaaattaggtatacttattcattatttgttgtgctagttctctaggtaaaccatgtcatcatgcatgactgtttccttatgctttatctttactcaaccactgttttctgaatgtatctggtacaacaaagacaattggcataaccagacaaccaagacacatgtattaaggtgcaaagacctttttaaaaacatcgtttttaaagaaactctccgaacaaggcgatatatcgtaaaatctgacggatataagctatcccatattcttttggataagtcatccatattccaatacgatataagaactataatatccgaatatgatgtggatatccaaataaaatatccaatcgaatacttaacctctaaagatgcacggataatatcacacctctctaatatttttttaaaaatatcctcccgcctccattctttcggttcatgctcaaattgatcggctggctgaatagctgttcgaactgcgatcgagacaaagcaagccacaaccaacagcagtgtgccactttgtggtcaacagttcaattgtgctaaggctggctccaataaaaccctataaagggtgctataccctaaatttagataaaaggacatcctcttgctgtgt

SEQ ID NO: 107156 - DNA, 3430 bp, Zea Mays
gcacaaacagagactagtccaaagcaccataacgagagagagggagagagagaaagagagaaaaaaaaacactcggaaacgatccgcgaactagtccaccggcgatttgttgttttgttcttcagtgcgtcagccaaccttaactgctacgatcggtcgatcaagggggaggaagtttctggagctctgcccatggcgtcggcgatgaagctgctggggagatcttccttggcgagccctgctgccgcggcgcccggacgggagcggcgaggcgggccctgcttcgccgcggtcggaagggaggggagcgcgcacaggaggaggtcgtcgctgaggtcgaccgcgccggtgggcgcgctggccgagcgggtcgtggtgacgccggcgccaccggagagggccggggcgggccccccggagccgcacccccagagcgtggccgcgcgggccgtggtcaccgtgcggcggaggcggaaggaggacgccaagcgccgggtcgccgagcagctggacgcgtacgccgaccgggttggccgcagtgtcctcctcgagctcatcagcacggagaccgacccaactggtgcgccttgacgtctggtgcctttgtctccgagtcatcatttccaaatggaccatcacgtggagctgtctctcttgatttgaatatttgatttgtgcccaaagccgccgtctttaccatctcgtctgcgtcgaaacgaagatggagttagtacgcaattacgccaggcgaggcatcgatcttaccgaatcatcgttgaatcggtggcaggaaaggggggccccaagaagagcaggcgctcggcgctggtgggctggttcgagaagaaggacgtcaagacggagcgggtggtgtacacggcggacttcaccgttgacgggtccttcggcgagccgggcgcggtcaccgtgctcaaccggcaccagcgcgagttcttcatcgagagcatcgtggtggagggctttccctccggccccgcgcacttcacctgcaactcgtgggtgcagcccacccgcgtggaccgcaacccgcgcgtgttcttcaccaacaagccgtacctgccggccgagacgccgccgggcctgcaggagctccgccgccagcagctcagcgacctgaggggcgagggtgccgacaccggcgagcgcaggatcaccgaccgggtgtgggagtatgacgtgtacaacgacctcggcaacccggacaagggcgccgagttcgcgcgcccggtcctcggcggcgagcagcagctgccgtacccgcggcggatgcgaacgggccggcccaagaccatcacagacgaccgcgcggagagccgggtggagtacccggagcccatctacgtgtcccgggacgaggagttcgaggacgggaagaacgagatgctgtcggagggcgcgctcaaggcgctgctccataacttcatgccgctgctggtgagctccgtgtcgcctgacatccgcgacttcgccggcttccacgacgtggacaacctcttcaaggagggcctccgcctgaagcaggccctgcaggaccagctgttccagaagatccccttcgtgcgcaagatccaggagaacagcgagggcctcctccgctacgacactcccgacatcatcaagaaggacaagtttgcttggctgcgggacgacgagttcgcgaggcaggcgctggctggcatcaaccccgtcaacatcgaacgtcttcaggcgttcccgccgatgagcaagctggacccggccgtgtacggcccgccggagtcggccatcacggaggagcacatcatcggacagctcgacggcatgtcggtgcagcaggcgctgcaggacgacaggctgtacatgctggactaccacgacatcttcatgccgttcctggaccggatcaacgcgctggacgggcggaaggcctacggcacgcgcacgctcttcttcctgacggccgcgggcacgctgaagcccatcgcgatcgagctgtgcctgccgccgatgaccgacgggtgcgcgcgcgccaagcgggtgttcacgccgcccgccgatgccaccagcaactggctgtggcagctcgccaaggcacacgtctgctccaatgacgccggcgtccaccagctcatcaaccactggctgaggacgcacgcggccatggagccgttcatcatcgcggcgcaccggcacctgagcacgatgcaccccatcttcaagctgctcaagcctcacatgcggtacacgctcaagatcaacgcgctggcgcggcagatcctcatcaacggcgacggcgtcatcgagtccgggttcacccctggccgctactgcatggagatgagctcgttcgcgtaccgggagctctggcggctagaccaggagggcctccctgccgatctcatcagaagaggaatggccgtggaggacccgacgcagccgcacggtctccggctgctcatcgaggactacccgtacgccaccgacgggttgctgctctggtcggccatcaggcggtggtgcgacgcctacgtggccatgtactacccgtccgacgagtccgtgcagggcgacaccgagctgcagtcgtggtacagggaggccgtgcacacggggcacgcggacaagcgcgacgcgccgtggtggccgcgcctgtcgacgcccgcggacctggcgtcgctgctgacgacgctgctgtggctcacctcggcgcagcacgcggcgctcaacttcgggcagtacccgctgggcggctacatcccgaaccggccgccgctgatgcggcggctggtgcccgccgagggcgacccggagtacgcgcacctggtggccgacccgcaccgcttcttcctgtcggcgctgcccagcctgacgcagaccaccacgttcatgaccgtcatcgacacgctgtccacgcactccgccgacgagcagtacctcggggagcggcctgatgaggcgtggacggccgacccggcggcgttggcggccgcgcgcgagttcgcggacgaggtgcgccgcgccgaggaggagatcgaacggcgcaacgctgacactggccgccgcaaccggtgcggcgctggcgtgctgccgtacgagctcatggcgcccacgtcggggccgggcatcacctgccgcggcgtccccaacagcgttaccatttagcctctcagtaccgacagacagccatgggcgcatgacagagatgatctgaaaggagaatttttttccactcattatagtcgggtggggagaaatctaagcagaagcaaatgaattttgcattatttctccccccattgccaaattgccattgatttggtggtccgaacaggtaaaatttgatttttgactaggggcaagactgtgaggaactgaatgggtgtaaataatttgttatatacaaaaatcaatggaatataatcattataga

SEQ ID NO: 107157 - DNA, 2335 bp, Zea Mays
cttgggcggctagctgttggacgccagccagagccgctggctgcaagcggcgcgcccggcgcccacacggccacagccacggtccatcgcatcccgagcgccgaaatccaaacgcacaatgacttcgccgcccccgcccccgccccccaccgtgtgcgttctcctccccttctctccctcgtccgccggccgccctcaccactcgcgccaccccgcgcgccgccgcctgtgcgtccgcagctcaaggcccagcccaccgggcatccccaacaccagcaccaggccgcctccgctgccgccgcgccgactgcacggagcagaccgccgcctcagcgccctgatccaccggggcgacctagacgcggcgctccgcctcgtgggctcctcgccgcgcccgcccgacgttccgctcgccaaccggcttgtccgcgacctctgccggcggggccgccccgccgacgccgcgcgcgtcgtcgaggcgtgcgggcccgaggccaccgccgccacctacggcgcgctggtcgacgggtactgccgcgcgggcctgctcgaggacgcgcgccgcgtcgtgggcggaatgcccgcgcacgtgcaggccagcagcgcgtacgcccacaacccactcatccacgcgctctgcgagcgcgggcgggtcgcggacgccctcgtggtgctcgacggcatgctctgccgcgggtgcgcgcccgacgtggtcacctacaacatcctgctccaggcggcgtgcaaggggagaggataccggcaggccctggagctcatcgatttcatgcgcgcagaggggtgtgagcccaacaacgtgacgtacaatgtcatcatcgatgctatgtgcagagaaggtgatgtagaccaggcacgcgagcttctgaacagcttgccttctagaggttgcaagcccaacactgtcaactacaacactgttttgaagggtttctgcagcatcgagcgatgggtggatgctgatgagattctagacgagatggttcgtgagaactgcccaccaaacgaagcaacactcaatgtgatcatcaataccttgtgtcgaaaaggattgctccagaaagttactctgtatctagagaaaatgtcaaagcatggatgcacggcaaatgttgttacatacaatgctgtaatcagtgggatgtgtgagcaaggaaatgtggatagtgccttggagttactcagcaacatgcaatcctttggttgtaaacctgatattgtcacctacaacactgtgctaaagggtttgtgcagtgctgataggtgggaggatgccgaggagctaatgattaagatgtcccagaatgatcgcctcccagataactcgacattcaatactattattagtttctggtgtcaaaagggattgattttgcaggcctttgaagtctttaagcaaatgcctgagaaaggctgcaatcctaattcaactacttacagtacaataataggtggactaaccaaggctggcaagatggaacaagcccttgagttgttgaatgaaatggccaacaaaggattcaacacagataagatgtaccgggtgttaactgagagtctgaataaagaggataaaattgaagaggtagtccaggtggttcataaactgcaagattcaggcatatcaccccagacagtactctacaatacagtactgttagggctttgcagaaatgggaaaacagattatgctattgatgtgcttgctgatatggtgtcatgtggttgtatgcctgatgaatcgacctacattatactcatagaaggtttgttttatgagggctattcgaaggaggcaagagaattgctaagcaggttgtgctcaagagatgtactttctaacagcttgatcaagaatgaagctttgttgttagatcaaaatattcgatcttcttgagtcacgattaattcaagagcatgtgtgcacttttaacatcattgtatgtagtggtggagtaggttagcacttacacattgcttcaattttgattgtaagtcctctttgcttctggcatattgtagcgtagagcttagttctctgtctttttttattgttatttctctaacaatgttaaatatcatgcctgtttggctgattgtagttgcaattttttatgcatatttacaggatgtgagcacattggattgtacacatggtttgatgtttactttctggattcacgtttagccaaggcatcctcatatccaaaatataagtcgtttcaggcctgtactttggatcagtattctctatttctgtctggaggtacttgcctctgaatttaggttaagatggaatgtgtagccaagtttaagg

SEQ ID NO: 107158 - DNA, 1074 bp, Zea Mays
agtatacgatgatttgagggtgtgagctgaaaaatctccacatcaccagattacggccggcggcggcccgctctgttccatcgcccccaagcggcgggccttggctgcgccgcctaaatccaccggcgagagtaaagggcgcccctctctcacacgatggcctcgagctccgcaagcggcgccggggtggagggcggggtcggggaggggccgacgacgctggacgagctgtaccagatcaacgtagtgccggccgagctccacttcaagttccgcaaggagctgcagggcctccgcgtcggcctcaacctcgagttctacaatcttgaggtcaatgactttgaggcaaagatagtactgaagcctctagattacgagcggaaatggaagttccagtacaagcccatcagtggcgacatacagctgctttccaagaagataccagtcacaaagtttctaaatctacaggttggcattggccacaattttcaactgaatgcaactggatggaagtggaagctttctacttgcctggggggagatggtgtgtctcagataagaaacaagtcaaaactcagcttgttcccagggtttgatttgaggattggatggaaagcagagtatgtgcttcctgagattcatggggctgttggcacaggagaaccagccttcagtatgaactatggaaggttgcatgcatcgatagatcgggtcgaggctatcgttactcagtcagatcagtattgatcttccagtgcggaaaggcaagggagtttcttgatcaataacaaacacgttgagtagatcccagggttacaagaagcattctgaagctccgtgcctgatgtacagcaaataccaaagtttaggaccacgctttgagaagctgtttgagttctccaaagcttttgactttgagcggcttctgttgcttctgaaagcgtaactataaataatgtttatcctgcttgtgtacgaaacaccagagtatcagtaattcagtatagtgagcgacgtcaaagcatgatctctatgcatcaagatttgtcttctaagctattcggaagtacgctt

SEQ ID NO: 107159 - DNA, 115 bp, Zea Mays
atatacatccaattagtatatgcgatgggtatcacggcgaaggcataacacatctagactcgactcataaccgggggggaactacttggtcacgtcaccacttcattacccaaac

SEQ ID NO: 107160 - DNA, 681 bp, Zea Mays
gaggcaaggcagacaaacagaaacaggggttcagatacaagtaatctctctctctccaattcgtgagctacatcaagcaaaatggacaagagcattcctgtagttagcaagattttttgctcaggcactccaacaatgctgatgataaggatgagacctattgtagtgaacggtggtggttttgttgttactgacctcagtcataacattgtattcgtcgtagatggttgtggaatacttggatccaagggagagcttatggtcaaagacggtgaaggagaaccaatattattcatctctaaaaagggaggaattgtccaggcgctaagcacaaggaacaaatggaatggatactccatggattaccaagggaaaaacaagttggtttttagcctaactgatccgaaattatgcacagcacaaggtgctccaattagaattcatattgaacctaagaggcactgcaaaaattgggatttcgaaattggtggatcttttgcagatagagactgtacaatagttgattgcaccagaaaaatagtagcccagatgggcacgaaagagccaataggaggcaaggacttctaccatgtggaagtgcagtcaggatatgaccaagctttcatcattggggtgatggcaattcttgacaacatacatggagaatccactagatgctga

SEQ ID NO: 107161 - DNA, 510 bp, Zea Mays
gaggcaaggcagacaaacagaaacaggggttcagatacaagtaatctctctctctccaattcgtgagctacatcaagcaaaatggacaagagcattcctgtagttagcaagattttttgctcaggcactccaacaatgctgatgataaggatgagacctattgtagtgaacggtggtggttttgttgttactgacctcagtcataacattgtattcgtcgtagatggttgtggaatacttggatccaagggagagcttatggtcaaagacggtgaaggagaaccaatattattcatctctaaaaaggctagctcttaaattttgaagagatgtgggaattcctttctgtttcagctcacatttatgataatgagactagctctagacaacaaaataacaaggacacagaactactttttcttgagaaatggaagaaagataagttgtgaaaaacacatgacatatttgccctacaatgtcttcatttcctgttttttttgtgtgtgctca

SEQ ID NO: 107162 - DNA, 943 bp, Zea Mays
agaggttcgtctctatcaagggagtaccaaacccttttatctgcttcgtcccctcccctgtgcgtgggggtataaagcaccgggctctgcttccgtcacgcgagacggcgagagcacaacattagcagcggttgtaccttgggggccgctaaagcagcttggtccaagctgtctgtagaacttaagcaactccgatcccagccacgggacacggcagattgaagccatcagctccggtttctggcgccggatttgggatccgcgcgatgtcttggtccgcgcccgacgacatcctcctctccacctcactcgcgggcttcctggacaagaaacttattgtcctgctaagagatggacggaaacttcttggcaccctctgctcatttgatcagtttgcaaatgttgttcttcagggtgcttgtgaacgagtaattgtaggggaacaatattgtgatgttcctcttggtctgtatgtgatccggggagagaacgttgttttaatcggagaattggatcacgaaaaggatgaactccccgctcacatgacatgtgttttagaagcagaaattagaaaggctgagaaggcggagcgggaagcaagggatctgaaaggcacgatgaggaaacggatggagttcctagacttcgactgataataaacccgttcccgtggtggttgctgctcccctcccattgcggccgcggagtttttagtggcggcctgtgccatacctgatgactagcagtgatgttttctacgtacttttgatgccacatcagatcctttgagcgcctcctgatacggctgtcacttctctctgattattactactgcctggggagatgccatgtgctctcctccgtcgtcgtttgcaacagtgcattcgccctatctcgtgatttatttatttatttatttatataactggtattactgtactac

SEQ ID NO: 107163 - DNA, 1071 bp, Zea Mays
aaaaactatttttcttgggtttagaaggcactctgagattggatatagatattggatcatagaattaggaattggaatcagcttttctaaattatattgtttggttgcacgtggaattggatttggtatcagaggctcaattccatggaattggactataactagaaacacactctcccaatacaaagcctcacccctcggtattgcgtggaattagaccgcacaattccaaactccaattcagtgacatccaaacaatagaattggaattatatcccatttcaataccatgcctgattcggtattcaaccaaattcaatttcatcctctccaatatcgacatctaaacggagcattagttcaatttggacaaaaccaattttgcttctgacaaaaagaaaggaatactcatacaaacctgggaacaacatgggagcaaaacaaatgttttacttaccctattccagaacgcagttcctaggagaaacagtctgtcttttctgtcccccaaaaaaactgctcctaggctataaagaattcgaaagggacttaaggttcctggctcctcatactctagtagtagcaatcagccggtgaaatatgtgtgtatggcttaccttttacgcgtagacaaaggaacctgactctctccatccacgttgtcactgtgtcttactagtggtatctgttttctccttccatcatccaggctgagaaggcggagcgggaagcaagggatctgaaaggcacgatgaggaaacggatggagttcctagacttcgactgataataaacccgttcccgtggtggttgctgctcccctcccattgcggccgcggagtttttagtggcggcctgtgccatacctgatgactagcagtgatgttttctacgtacttttgatgccacatcagatcctttgagcgcctcctgatacggctgtcacttctctctgattattactactgcctggggagatgccatgtgctctcctccgtcgtcgtttgcaacagtgcattcgccctatctcgtgatttatttatttatttatttatataactggtattactg

SEQ ID NO: 107164 - DNA, 932 bp, Zea Mays
agaggttcgtctctatcaagggagtaccaaacccttttatctgcttcgtcccctcccctgtgcgtgggggtataaagcaccgggctctgcttccgtcacgcgagacggcgagagcacaacattagcagcggttgtaccttgggggccgctaaagcagcttggtccaagctgtctgtagaacttaagcaactccgatcccagccacgggacacggcagattgaagccatcagctccggtttctggcgccggatttgggatccgcgcgatgtcttggtccgcgcccgacgacatcctcctctccacctcactcgcgggcttcctggacaagaaacttattgtcctgctaagagatggacggaaacttcttggcaccctctgctcatttgatcagtttgcaaatgttgttcttcagggtgcttgtgaacgagtaattgtaggggaacaatattgtgatgttcctcttggtctgtatgtgatccggggagagaacgttgttttaatcggagaattggtaataacctgttacatcaaaagtgagcatggccaaacttatgtctccacgttgatgttatagatctggtacattgcattgagcaggatcacgaaaaggatgaactccccgctcacatgacatgtgttttagaagcagaaattagaaaggtattcgcggaccctcaatctattcttgttttgaagcctttttctggtgtttagctaaatcttttctgcattcatgcatgttgatatcctagtgatacagattgttcatgaacaaccctgtgttttcccgaagataattctaactgtggctctaaaaagtttgttgtcttgctcctttactgggtgtttcactggtaagttgttatggccacagtttcagccttaaagaaatacataaactttttattagctgaaaatacagatgatttat

SEQ ID NO: 107165 - DNA, 818 bp, Zea Mays
agaggttcgtctctatcaagggagtaccaaacccttttatctgcttcgtcccctcccctgtgcgtgggggtataaagcaccgggctctgcttccgtcacgcgagacggcgagagcacaacattagcagcggttgtaccttgggggccgctaaagcagcttggtccaagctgtctgtagaacttaagcaactccgatcccagccacgggacacggcagattgaagccatcagctccggtttctggcgccggatttgggatccgcgcgatgtcttggtccgcgcccgacgacatcctcctctccacctcactcgcgggcttcctggacaagaaacttattgtcctgctaagagatggacggaaacttcttggcaccctctgctcatttgatcagtttgcaaatgttgttcttcagggtgcttgtgaacgagtaattgtaggggaacaatattgtgatgttcctcttggtctgtatgtgatccggggagagaacgttgttttaatcggagaattggatcacgaaaaggatgaactccccgctcacatgacatgtgttttagaagcagaaattagaaaggtattcgcggaccctcaatctattcttgttttgaagcctttttctggtgtttagctaaatcttttctgcattcatgcatgttgatatcctagtgatacagattgttcatgaacaaccctgtgttttcccgaagataattctaactgtggctctaaaaagtttgttgtcttgctcctttactgggtgtttcactggtaagttgttatggccacagtttcagccttaaagaaatacataaacttt

SEQ ID NO: 107166 - DNA, 1290 bp, Zea Mays
ataaatgtaggaaaatcctctggccaaggtttcaacatcccaacatggctacaaaacccatccaaattttgcaggcaaagcggcaacaacgcacaccaacctggcacaagcagtagtagcagcacacacgcaccctctcccagcaaagcaaacgatggcggcgaggctcgtctccgttgcccacctcctcctgctcctcgttgtcctggccggctcccgccgcgtggcgctggcctcggagaccgtggagcagacctgcgccaaggccacgtcgggcgcgggccgcgaggagctggcgcccttctgcgtgtcgtcgctgcaggcggcgcccggcagcgacggcgccgacgcgcgcggcctggccgccatcgccaccaacctgacgctggccaactacacggccgccgtggccaccatcaaggcgctggagcggcgcgggggctggtccgagcagtcgcgtgccgcgctggccacgtgccgccagcggtacatcgaggcgctcaacgtcgtgcacagcgccgtccacgcgctggccacggggaacctccggggctacgtgtccgacatggaggtcgtcgggaaggcggcgaccgactgcgagcacgcgttcggcggcgccgggagcgggccgctgcggaaggtggacgaggacgccggcaacctcgtcgtggtggcgacgctcatcgtcagatccctccagtgattaaggccggaggcgcagtttggtgtcgcattaattacctcgcggccgtaggcaaatctctactacctattaagacggtaaggggtaggctgccccattccgtgttctgccattcccattccgtcctcactgcaaagcccattcccattcccagctgtatgtctttctcattccccctccctgcaaagcccattcacatttccattcccggctatcacgtgtctttctcattccccctcccacaaagcctattctcattcccacgtgcatcccacgcctagctaaaattaaattaaaaaaacaggctccaaggggattcaaacccgcgacctctcaaataaatgtgtttgtagctaccactacaccacatgtgtgtttatgtctacatctattatagtaaaaacatataatacatctctcccgaagcccacctgctacccttgcacaatgtgtagtagtagataagtatcactgagattattaaattatatttttggattgagggagtagtatttaaagaagagccttgcatgcaatttcttttgtttgaacaatgttttcaacttaaatactttttttgcatgtgt

SEQ ID NO: 107167 - DNA, 1058 bp, Zea Mays
atgacccctttcagcatggttcccaagagaaaggagcattgttcctcaaatgttttgccattatattcatttgttatggagagattcaaggtgtctggttggttatactttattgcactactcgaacaacagatgcaacgcacgagaggatggctcctggcccttgtcatgctttcaagcgtccctccgattgccattgccagtgcaattgtttcaaagttgatgacatggctctccacccgaatgcaagcaaactacagtgaggctggaaacgtcgtggagcaaactcttggtgccattaggacggttgtttcattcaatggcgagaatcatgctataaagaatataacatgttcataagaaaggcgtaccggtcttctctgcaagaaggtgctgtaaatccccttggactcggttttgtgatgccaaccttattttcaagttatggcttggctgtttggtatggatctaagctgatagtcgagcgaggttacgatggtggcatggtcatttatgttatcatgtctgtcatgatcggagtaatgtccttaggccaggcaacacgatcagtgacagctttcgcagaaggccaaggagcagcacatagaatgttcaagataattgaacgcaatccagatattgacatagatgataacacaggtatcatattggaggatgtcaagggtgatgttcaactgaaggacgtgtacttcagctatcccaccaggcctaaattctcgttgcaagtaccaagtggaacaacaatggccctggttggtgacagcggcagtgggaaatcgatcgtgatcagtttggtggaaaggttctatgacccacatgctggagaagtcttgattgacggggtcgacattagaagaatgaagcttggatggatgagaggaaaaattggtcttgtaaaccaagaaccagtgctattctcaactacaatcagggaaaacattgcatatgaaatagaaaagccaacacttgaagatatcaagagagcgatatagctcgctaatgctgctatattcatcgagaagttaccaaaggtacaa

SEQ ID NO: 107168 - DNA, 493 bp, Zea Mays
cggcgccccctaggtggcgctcgtcttctctctcacgccagatctggaggagcactgttctccccccacgctgcttcgcggggagcactgttctcggcggcgctgcgcgcgctcaagctgctcggcgtcgacggcgtggagctgccggtgtcctgggccgttgcgcagcccgggcccgggggatggttcgagtgggtcgggtaccgcggcgtcgctggtcatggtccgcgacgcggggctcgacctccgcgtctcgctccgcaccgacggcgacgcgctccccggatgggtgacagacgcggcggccgccgaccccgacgtcctcttcaccgaccgctccggccaccgccgcgtgggctgcctctcctttgccgtcgacgagctccccgtgctcgtcggcaagtcgccgctccaggcctacgaggccttcttccgcagcttcgctgaagagttcgatgacttgttcggatcaacgatcacgagggatatatag

SEQ ID NO: 107169 - DNA, 992 bp, Zea Mays
accatcgcgaagacacactgggtaggaagagcgcagaaaaaggaagcagcagctttgatcgggtggagtttcttgctcactgatcgtcgagttcctgttcgatcgaagttccaggtgcgcacgtacgcactgaagcctttggggtccgtgacgatgtcgaggagagccgcagcgttgttgctcgcgtgcctcgtcgccgtgacagcggcggcgctggcggacggcgcgctgctcccgtggttcggcggcggccggcgcgggctcgacgaggcagcggtgtccgacgtgggcctcctggcggccgacccgttccggatcctggagcacgtcccgttcggcttcgaccgggacgacgtggccatggtctccatggcgcgcgtggactggcgcgagacccccgacgcgcacgagatcgtggtcgacgtgcccgggatgcgcagggaggacctcaggatcgaggtcgaggacaacagggtgctgcgcgtcagcggcgagcggcggcgcgcggaggagcgcaagggcgaccactggcaccgcgaggagcgctcctacggcaggttctggcgccggttccgcctccccgagaacgccgacctcgactccgtcgccgccagcctcgacagcggcgtcctcaccgtgcgattcaggaagctggcgcccgagcagatcaagggcccgcgcgtcgtcgggatcgccggaggagacggtggcgccgaggcgaaggagagcatcggaactggcgccggagatggtcatcagaccaagaaggtggagctctgaacagtgaggtgggaattgggatgactcaatgacggagatggctctgcgcgtgtgcgtagttttactagtttatgtgttcgcgtttttcttttttgtgacagcgtatatgcacttgtatggagtggaagtgtgccatgttttactgaggaataaaaacctacagtactagtgtactacgatcttccttccgctgaaaaacacagttgctgatg

SEQ ID NO: 107170 - DNA, 551 bp, Zea Mays
gtccttggccagaacgtctgctccgaagccgacgagcatgctggcgacgaggtgcaggccctcggcggcagcgacgtggagcggcgtcctctggtcgtagttcctgcagttggggtcgacgccggacctgagcagcctgctgagcaggtcgaccttgccgtccgtgacgaccctgcacagcaacatgctgtaataaggagagatttttttttgggtttactcggatctgctcctgcactgaccagtcctttcagacgggacagatctccatggtaagcggcgttgttcactccaaggaccagctccgcttcttgccttgatatcagatctgcaggatgctggtcagggactgcttgtcgattctcaggaggctacaaagatcacagaccctgactgtgtgtggctgtgggacgttgcaaactacggagacgtcgccgacgatgtcgtagggcagaagctctgagatgatgtcctccgatccaccttctccagtggccacctcttcctgcgacagccacagaccgcaataggatggctcagggttagttctt

SEQ ID NO: 107171 - DNA, 2595 bp, Zea Mays
ctgtgtccagggctccagcgcgctctcctcgtccctgttcttccctagccgccgcaggctgcagagcccccggcgagctgccgcccctgccacatatactcagcctccgtccctcgccggtcccaataccctgtcgtccccagacgaagccgacgagcgtgaccctcgcttgcctgaatctgacgcctccgggctcgggctatagttcaatcggtgccggcggggcaagaggaatggcgtggcggatgatgcgaaggaaggattttcacacgggccttgtgactttggcgttccgaaaggatcttgggttcaaaaagtttttctccagtggaaaaatcggaaatctgtcccaggtctacggcagtgataagcccaaatactctgctaattgcatgccctctaaccatttcactatcaggaattttaatgcaggtgtttatttgttagcatggagtcagaaaagggaggatgttgtaggtctgaaagctcccaaaaaggagaagcgagtgaagaaagaaaatagaacacaacctcctgtagaagcaccatatgttgcaccaaaaacgaagatatctatcaaacctgtaccagataaaactgttgagatttttgacgggatgactttgcttgacctttctaaacgaactggtgcgtatattagtacacttcaaggcatacttgcagatcttggtgaaaaggttgaatctgagtttgactctatcagcattgatcttgctgagttggttgctatggaacttggcgttaatagcagaagaatgcacactggtgaaggcaagaatgagccacgccctgctgttgtgacggtaatgggacatgttgaccatggtaaaacatcacttttggatgctctccgtcaaacatctgttgctgccaaggaagctggtggtatcactcagcatataggtgccttcgttgttgagatgtcgtcaggagcatctataacattccttgatactccaggacatgctgcatttagtgccatgcgggctaggggcgctgctgttacggatattgtagtccttgtggttgcagcagatgatggtattatgcctcagacactagaagctatgtctcatgcaaaagcagcaaatgttcctattgtagttgcaataaacaaatgtgacaaatctggagctgatcctgagagggtcagaattcaacttggttcagaaggtttacttttggaggatatgggtggggatgtgcaggttgttgaaatctctgcagttacaaaaactggtttggataaattggaagaggctttgctccttcaagctgagatgatggacctgaaagccagaatagatggccctgctcaggcttttgtggtggaggcaagggtggacaggggcaggggtccactcgcaacagctatagtcaagtatggcacattagttagtgggcaacacattgttgtgggagcagagtggggaagaattaggtctcttagagacacagcagggaatataacgcagtctgcaaaacctgcaatgcctattgaaattgaggggttaaagggccttccaatggctggggatgacgttgtagttgttgactcagaggagagggcaagaatgctaagtcatgggcggaagaagaagcaggagaaagacaggcttcgaaaaattgatgaggggatggcagaggagctagaaattaaagaagagactcctgaaagagttgaaatgaccattattgtcaaagccgatgtacaaggcagtgttcaagctgtcacagatgctttaagaagtcttaatagcgcacaggtgttcgtgaatgttgttcatgtaggtgttggcccaatcagtcagcatgacattgatctggcacaagcgtgtggagcatatatagttggtttcaacattcgcagtccacctagtcctatcactcaagcagcagcaagagccaacataaaggttttgcttcacaaggtcatctatcaccttcttgaggagatgggaaaggccattgtggagaaggcaccgggaactgctgaaacccaggtttcaggagaggctgaggttctgaacatatttgagctgaaagggcgcagcaagtcaaaaggaccggatgtcaaaattgctggctgccgtataactgatggccacttcagcaaatccggaaccatgagactgttgaggagcggagatgttgtctttgagggtccatgcgagtctctgaagcgggagaagaaggacgcagaaacagtcgaaaagggtaacgactgtgggctggtgattcaggattgcgatgatttccaggtaggggatatcatacagtgcgtggagcaggtgattaggaagcccaagttcatctcgacgcagagtggttcggttcggattgaatgctgaaatgtagtaatggttgtggctgacactactgttccatttccctattaattcagctagttgtgctttactgaccaaaggtttcgagtgtaacaagattttgttggctagcaacttgttgcaactgcaaccaaacccctttctgatatgagataattaggacaaaacaacagagttaagttgcttttttttggggtcatgttaaacaatgtatgcagtattgctc

SEQ ID NO: 107172 - DNA, 678 bp, Zea Mays
ctgtgtccagggctccagcgcgctctcctcgtccctgttcttccctagccgccgcaggctgcagagcccccggcgagctgccgcccctgccacatatactcagcctccgtccctcgccggtcccaataccctgtcgtccccagacgaagccgacgagcgtgaccctcgcttgcctgaatctgacgcctccgggctcgggctatagttcaatcggtgccggcggggcaagaggaatggcgtggcggatgatgcgaaggaaggattttcacacgggccttgtgactttggcgttccgaaaggatcttgggttcaaaaagtttttctccagtggaaaaatcggaaatctgtcccaggtctacggcagtgataagcccaaatactctgctaattgcatgccctctaaccatttcactatcaggtacgtttatttatgtgctttgcatgactatacatgttctaaaactatacaagacatatctgaagcatccaacacatgtatttcagtttggttctattagaaatcggtaaaagtgtgttagatacatcagaaatcatcttggacgaaatttacttcggctttattgttcttccaaacttctgagtggtgtctgatggctgcaacttgtgtatgcaacaattcccatgtcatattgtttgacctttcatgtgaccacaaat

SEQ ID NO: 107173 - DNA, 2926 bp, Zea Mays
cgcaactttcacctgtgaataacgttcttgcataatcgcacgggcgaagccttcagaagcacacgttggttgtgtggctcactggcaccgcgccactcagctcagcaacgatgcaaccacctgacaatggcatctctttgcgcgccctcggcgctcctcgaccacccccatcgccgtcggagacgagacgagcacctatacctagccgtataaaggcggcagggcttagacaagctagtgcaggcttcccgggcccctagattctctctcgcgcttccgctttccttctcctggtcctggccatggcccacgaacgggagccgctcctgcagcaacgacagaccggcgtcggcaatgcctgcggtgccaaggactcgtcctcggcgccggcgccgtcggctgccgcgctgccgtcgctggctaggaccgtgctcaagttcctgatgtgggcggtgttcctcacctgggccgcggggatcttcctctacccgaccaagcccgtgcaggccgtgttcaggaagtgggtcgggctcaccagggactccatgttcggcatcgccgggggtattttcctgaccttcagcgcgccaattctgatcattgcgcttctcgcatatgtgtacatctccttcttcccgagtgagcatgtggtggagaaaaggaagctgcgctcactgagtttcaggctctggactttccctgttcttgtagacggcccctttggagttgtctctgcagttgagttcatcggaattgtcttgtttatagtttttgttgtctactcaatgacctattatgccgtggaagctgtgagccttgtctcgaaatttgatatcccatcaatgactgagagtgaattgatactggatgtcattggcctccgtttaggggcggttgggttgttctgcatgctcttcctcttcctgccagtcgcccgaggctcggttctcttacggcttatcgatattccatttgagcatgctacaagataccacgtctggttggggcatctcacgatggctctatttacattgcatggcttgttctatgtgatctcatggtccatgcaagggcgcctccgtgaagaactgagacagtggaaggaaattggagtagcaaacctgcctggtgtgatcagcttggcagccggcctacttatgtgggtgacatcacttcacccagtgaggaagaggttcttcgagctcttcttctacacccaccagctctacgtcgtcttcgtcgtgttcttggcgtttcatgttggtgacttcatcttcagtatttgtgccggagctgtgttcctcttcatgctcgaccgctttttgaggttctggcaatcaagggccaaagtcgacatcatttcagccgcctgccgcccgtgtgggacggtggagctagtattctcaaaaccagcaagcctccactacaatgctttgagtttcatcttcattcaagtgcgcgagctatcgttcttgcagtggcacccgttcagtgtatcttcaagtcccatggatgggagataccacatgtcggttctcataaaagtactcggcacgtggactgaaaaactgaggagcatcatcaccgatgtacaggagaagaacgggggtgactctgagctgcaatgcgggcgcatgacagcctgcgtggaaggcccatatgggcatgaatcaccctaccacttgatgtacgagaatctcgtcttggtcgcaggaggcattggaatatcgccattcttggcgatcttgagcgacataatccacaggatcgaggagggcaagcaatgcatgcccaagaacgtgctggtcctttggtcagttaagaagtccaaggagctttctctgctgtccgccgttgatgcccagaccatcagctcatctgtctcggacaggttgcaactggatatccaggccttcgtgactcaagaaccccatcctcctttggaggatggcatcgtcggggacgaccagaaagtccctggcatgttcgtcaagaacggtacagccatgtctgggctggtcggcaccggggacaacttctgggcggccatgtacttcctggcgtccacgctcggcttcctcctggcgtacgccctggtgcaggtgtactacgtgaagccgcacaacgtggtggcgtggtggtacctgggcctcctgttcatgctgtgcatggttgccggcgtcgctctacccggcgggctcgtggtcctcctgtggcatctgtcggagaagcagaggttggaggacgacaagtgggacgcctctcagtcaccgcgcgccgagcagacaggccccttggctgcggcgggtggtggtgacgacgacgctgctcccagcgtcagcctcgccgccctgcggacgacccggtacggctgccggccgaacttcgaagcggagttcgcggcgttcgcggagcgcgccggggacgcggcggacgtgggcgtgctggtgtgcggaccgcaggggctgcagacgagcgtagcgagggagtgcagggcgcggaacctccgccgcggcggcttgggggcggccaagagcaggagcggcgcggtcttccatttcaacagccacagcttcgacctgtaaactacgtacgtctcgtttggtcggttcaacgatcatcagtacatgttgcacagcacacacgcacagacgatagttggatgtacatgttgatccgtcataatttgatatcgtgtatatatatgtatagctgatagttaatatagttaagttatataagagatgtataaatctgtatgcgtatactataggtgtagcatatgcatgcatgatagaagcacgaaggttaaatgctgacgaatcacgtgaaatcatgtcatgtttcgcgtctaatgcgtgaatttgtatttttcttatgcgtttgtgagtacgtcaaaactacgttgcaacgcaagatttatctt

SEQ ID NO: 107174 - DNA, 588 bp, Zea Mays
tgcagccgcacaagaataggaccgaactggtcttcatctccgacgtggcacaactggcggtgcgggtgcggctcccagcgcagcctggccccggcgcgactgcaggagcgggcgctgctcctggcgcgactgccagcacgacacgactgtcggcatggcctgcaccggcacgactgctagggccgcgcgactgctggcgtgggtgcggctcctggcgcggcctcaggcctcaactcaggcgcatggccttcggcgcggcgtgagcatctctaatgtgcgggcgagcggtgcagctctggcgcgcggtcgcgacaccaaggcgagcacaaactctggtgctcgggcgagatcgagtggagccccaccggatttggtggagcgattacgagattccaccaacattaggtctaaaaaaattataccgttcaattgcgtagaggaggaatcgtagttgtcgcgtaggatagtccggctaggccgagggacctgccgatttgatggagagttgccggtttgatggagagttggtgcagatctgatccagcagcaacgtcgaggtagagcatgctgataacgtgttgagaacta

SEQ ID NO: 107175 - DNA, 387 bp, Zea Mays
caattcataaaagatttagcagcgcaaacgtcaggtttcatgcccagggacatacttgcattggtcgcagatgctggtgtgtcttttgcgcataaaattgcagcagggaaagatagcaaagcaataagtaagcatacggaggtccttccagaaagctcttctgccactcaaaatgaggaacaccatttcagcaaagaagatattatgtcttccttggaacgagccaagaaacggaatcgtgctgcactgggcacacccaaagttcctaatgtcaaatgggaggatgttggtgggctagaggatgtgaaaaaggttattctagatactattcagttcgactacctcatcccacctatggggatggacaaatgcagcgcgaatggataa

SEQ ID NO: 107176 - DNA, 1281 bp, Zea Mays
atgtcttcttcaatggaatcgtcataccttcctgctacaactgagtcattagcccaagctcaagaggctaaggatgcttcagagtccatttcaatcctttaccgtgtcattcaggacccatcttcttctgctgatgcactgagaacaaaagaagttgcaattacaaatcttacaaactacctcactaaagaaaacagagctgaggagctgcgtaatcttttgacccagctcagaccattttttgcagttattcctaaggcaaagactgcaaaaattgtccgtggaataattgatgctgtcgccaagatacctggaacatcagatcttcagatttcactctgcaaggaaatggtagaatggacccgtgcagagaagcgtactttcctccggcaacgtgtggaggcaaggttggcagctctcctgttagagaatcaggagtatactgaagcccttaccctgcttactagtcttatcaaggaagtcaggagacttgatgacaagttacttcttgtggacattgaccttttggaaagcaaacttcacttctccctgagaaatctgccaaaggccaaagcctccttaactgctgctagaacagcagcaaatgccatttatgttccacctgctcagcaaggcactattgatctccagagtggaatcctccatgctgaagaaaaggattacaagactgcttacagctacttctttgaagcatttgaagctttcagtgcactggaggacccgaaggccatctttagcctgaagtacatgctcttgtgtaagataatggttaaccaagctgacgatgttgcaggaataatctcgtctaaggctggcctaaaatatctgggtcctgatgttgatgctatgaaggctgttgctgatgcatactctaaaagatctctcaagtattttgaaactgcccttcgtgattataagtcccagctggaggaggaccctattgtccacaggcatctttcttctctgtatgatacactgctggagcagaatctctgcaggttgattgagccctactcaagggtggagattgcacatatagcggagatgattgaattgccgattgaccatgttgagaagaagctgtcgcagatgatcgttgacaagaaatttgctgggacactagatcaaggtgctggctgcctcattatctttgaggattctaagaccgaggaaatcttccctgccactctcgaaaccatttcgaatgtcgggaaggttgtggacagcctttatgtgaggtcggccaagatcatggcttga

SEQ ID NO: 107177 - DNA, 117 bp, Zea Mays
cctactatttttttatttggattatctttgcatggtgtagtttcattgctattttgtttgaatttaagtagttatatagtgtgtagttttggtcgataatgacaataaaagcacttg

SEQ ID NO: 107178 - DNA, 744 bp, Zea Mays
gttcacttctctttggcccgaaaccgagagctagtgcttgattcggtcgtttttgggcaccgaacacgttcttgggaccgccgccgccgccctacttccagtcccagctgctcaggtctccatcggcctcgagccctttgccggcgacgagcactcacaacaccagttttgtaagaggggatctgtaccagtcaggctgagcagcagcagcagtggtgtgttctggcttgtgtgggacctagaggaagcttacacaacagggaagagtattgtgttaggtgagttagaaagtaatggaatgcatgcagtgactcacattgatttctcatcggctcccttatttttatttatttatttacgtatcatctctcaattgtgtatctcatctatgcattgcctaaatccagtttagataataacaaactgattcatttccacaaactttggcactattgagtgaaatatccaattcggtatctgtataaagagggcttgcactttgaatcagcatcctgcagatgcacaagccttcttgctaggtgcttggcatcagttctgattaaacattgctttgtcgatttgttggatttattggtcacattacagtcttgttggaaatcttttttttgagtgtattgttggaaatctttttgatccttaatatgatctgtacacaagggtaggcctggtgcagtggtgagaattgtatcactgagtcattaggtcgcaggttcgaagcagcct

SEQ ID NO: 107179 - DNA, 1591 bp, Zea Mays
atgtggccggggctgcaagggcggtggttggcggcgaggtggttcttggcgggatgccgccgaatcctggcatcccatacggaaaacctggagggttgggaaccgacggcgttgaagaagaggccccttccattgcagccatccgagctgttagggatgacatctgttgcaccatctgacgatggaaatccatcatcatccgcttcaaatccgccatctcgctggtctggacggccgccggtggaagatctccggcttctgtgtccccgacggtggctgctggtgacacttctgagcccggcatctccgataccaggttggtacgaccggtactgcgcaggttgtactggtgggaaactggagggcgcggcgtggtggctcgtcgcctggaagatggtccaggcgccgtggctgcccgagaggagaggctgcttgaatctctatcttaacaaactcccctatagcagacttatcccttcaggcggcctaggactcgccatccttatcccttctcttgtgtttgctgacacgttggttaagcaagcatatgctgattggatcaatgttctagaatatgatggcaaggcgctattaaagttcaaccagaaaaagaaatatgttacaactagaagtgaaacagcgaaagcttcagcaagctaccctgcatcaaacggtttagtgaactcacagaaagaactgcctggaggtcctgtgaatgctgagcaatcttccctgaacaatgctagccaagatagaactagaatcccatccatgtccatggggaaccaggtagcaagagagtatgcaggcaatcctcagcacatgacaccaagtattaccatgcaatgcgacacgaggtcattgatccccggaggccagttcagtggtggttcctccgtgcagactcaaacttcacgaagctccaacatgcttgcgctgcggccaacgcagcagcctcaaaacttggacttctctgggctaggtcagtccacacagccttcagggaccaaccctttcgccgactggtctcggttgcaggagagcagcgtcgatgagtacttgatggatgagataagggcgaggagccacgagctattggagaacgatgagatgcagcatatgctgcggttcctgagcgtgggcggggcgccgaccggcctgaacaacgttgacggctttctttcatacccgtctcctgccccagccttcggatttgatgaggacgaccgcgctcgctcgtccggcaaagctgttgtcgggtggctgaagatcaaggctgcgatgcggtggggtatctttgtcaggaggaaagctgccgagagacgggctcagcttgttgagctggaagactagcagtcgcaggtgcttgggctcggtgttgcacatatttatgcggaagggttactagaactgcaaaatattgtataatacgcttcccttttggctgatctttttaatttgcacaatagccccgttggtattgtatattactgggtacagacgtacagtacatgtacatgggaggacgatcaggatcggggcttttttacgaatgaagtcacgttggttgtatacgtgtctgatacgcttg

SEQ ID NO: 107180 - DNA, 1137 bp, Zea Mays
atgcagaggcaggggagacacctggagcggtccaactcgaagcgagccctcgaccatggcggcggtggtgacgacgacgaccgcccgtctaagcgcccgcgcgtccccgccctcgccagtgtcattgtagaagcactcaaggtagactgtttacaaaagctttgctcatcactggaaccaattctgcgcagaattgtcagtgaagaagtagagcgtgctttagccaaattgggccctgcaggtcctgctaggatccaaggaaggggctcacccaaacgaattgaaggccctgatggtagaagcctccagcttcagtttaggactaggttatcccttccgctctttactggagggaaagtagaaggcgagcagggagcagcaattcatgttgtgctgcttgatgcgaacactggacatgttgttacttcaggacctgagtcatctgtgaaactggatattctggtgcttgagggtgattttaataaagaggaagacgagggctggactgaagaagactttgaaagtcacattgttaaagaacgagaagggaagaggcctattttaactggggacctgcaggtaacccttaaagaaggtgttgggactataggagagcttattttcactgataattccagctggataagaagccgaaaatttagacttgggttgagagtctcgtcagggttttgtcaaggaattcgtgttatggaagcaaaaacagaggcttttactgttaaagatcacagaggcgaattgtataagaagcattatcctcctgcactaaaggatgaggtatggagattagaaaagattggaaaggatggttcattccacaagagattaaactcaagtggaatctatacagttgaacactttcttcaattccttgttagagaccaacagaaattaagaagtattcttggcagtaacatgtcaaataggatgtgggaaagtcttattgagcatgcaaagacatgtgttttgagtggcaaccattatatatattactcaagtgatgcaagaaatgtgggtgcaatattcaacaacatatatgagttcactggtttgattgctgatgatcaatttatttcagctgaaaatctcactgaaaaccagagggttagtgtattttga

SEQ ID NO: 107181 - DNA, 950 bp, Zea Mays
ggggcgctgccacattcctccacccggaggatcacctcgcgtgtccggccggcacctgccgccttcctcctccggtcctccccgttgctgcattggctagcttagctccgagcctccgactcgatccatcctgctgacctgagaggcgcggtacgtacggtaccagcagctgcaggtcagttagttagctagcccgtccccccgtcccctccaggctccagtagttagccccatggacagggggatggcggacaggcggctcctcgcctcctgtattccgggcatggaggcggcggcggagagggaggacgaggggctggagctcagcctctcgctgcacccgtcgtccccgtcgtcgccgcccaggttccaggcggtcttcgcctgctgctactgccccaggaagttccgcagctcgcaggcgctcggcggccaccagaacgcgcacaagctgcagcgcaacctggcaaggcgaggccgggaggccacctcggcgccacccgcgccgccgccgccgccgccggtagccgaccagggcattggcagggcgtccggcagcgacagcgcgccgccgccgcgctccagggtggagcccgcggccgccggtgcgtggggggaggggaggcaccaccaccaccgccgtccgcaccagcaccacctttatcagcagcgcccggccccggcggggggcgcggaagcctcgtccggtgcgtcaaggggcggcggagaggatgcggaggagattattgacctgtccctcaagctatgaactgatccatccatgagctctggctagctagctagctcagcaggccagcactactagcagcagcagcagctcctcctccgatcctcttggtcctcttccattagcttattaattgcttagtcgtttcttcatcacgccattattatttcttgtttgatgatctaccgtacgtacgcgtgtt

SEQ ID NO: 107182 - DNA, 1343 bp, Zea Mays
ctgagttgctctactctcgccgatgcctctagccccttccatgatcagatcacagcgtcacacacagttgggttcgagtccgagaaaaacaaaagctgctcgacaattaacaagccccctacatcagcatcagctcaagctgctcaattcaggttaacacactgatccccacacccacgccatcagccatcataccaactccatccaaccggctgcacctaaacctctccaagaacgcgccaataaacatcccctaaatctcagccacaagtcaccacacaagatctcacgccgaggggcgatccaaggcacgagagaccatgtcagcgtcgccggagaacgtcgtcgcaggcggcagtggcccgccggtcgcgtggtggagcgcggcctcgccggtgggcggcgacgtcgtcctctgcagcgtagccctcctcttcgtcgccctggccttggcgttcgtcctgtaccactactccacggccacggtcagtcgccgcggcggcggcgcgggggtgggggcggcgccaacgagcgcccagcagcaccagcagcacggcacgctgggacgaggacgcgacgccaccggcggccttgacccgtcggtgctccgggcgctgccggtgacggtttacgaggcgaaggacgaccaccgggcaggcgaggcgctggagtgcgccgtgtgcctcgccgagctcgccgacggcgagcccgccaggttcctgcccaggtgcgcgcacggcttccacgccgagtgcatcgaccagtggctgcgcggccactccacgtgcccgctctgccgcgtcgacgtcggcctgctccctgcgccggcgccggcgccgccgtcctcggccctccctccggcgctcccggcgcccgccacctaccccacggacctgccgacgaacgtcctgttctggggatcccagggcgcggtcaccgtggcgagggcggcggtccgcagcggcccgagcgctccccgtggagcgccgccgccgctggtcatccatgtcagggaaacggcaccggcaccgccaccgcctccgccgccgcgtgaaggcggcgcggcaaaagcggagggcttggcgcggctgagttctctcaggcggctgtggagccgagggaggcatgacgacgctgcggctgcgacctcccgttcctgccgccgcgccactgccacggcaactgcctaacgcgctacacctacagcacgtgttactgatgtgcaggtgcactgcaccgatcctcaactggagacacgacacgcttccatggcaacagtccacctagtatcagtcttcggtttgttgcagtgatcttggtttttatgcacacagctattaatc

SEQ ID NO: 107183 - DNA, 927 bp, Zea Mays
atgactgttgaagaaaagaatgagaaaaataggaagcgtcgtgaagcacgtcaacgaaataaaggactatcgatagagccactctcatccagagccttttgtaaatgggtgatatatgaagaagactttaatacggaccaggcatgtgaggtggttagctttccagatgactgtagcaccattgatttcacaaatttgtcaacacaagacattgcaggtggagatgaacaagtaaatctggatgcatatgatgacagcgattggttgcataggaatgagacattccaggcaaacaacattgtcacaagtaaagaccttctgacaccaggttgtgtgcatgaaactgttgataacatacctaagcatactatgaaaagggccgcctactttagtgagcggtacaaaaacatgacccccgtcgagagggagtctagacatgtacgccttaggttgtataataagacaccaagacggaaagatgctaacaaagagtgcagcagaaaacgtagagcactacagggtgacactttgaatcaggagtccatcgccatggaggacccagtatatacccctgaggttgtacgtcctacaacatatggaattgaaccatatggatcctcagttaccacttgcgactgggttatccctgaattcgccgtgacacctttcctgccaacttcaacacagactaaggatgttggttcacttgatatgtctactgagccactaagacgtagacatcatgtgctatctgggataagaccagctaccttaggccgtcgaaaccaacaatttgaagacgacattggaaggaatgtggctacagtgaccgaggatactatttgtgacgctatggaaggagacgattggacacagccccatccgactgcagagatccacaccaatggtaattacaaccaattttaa

SEQ ID NO: 107184 - DNA, 116 bp, Zea Mays
tttatttgttttatggatcaatgttcttatcatcatagagtgtggtctattattgcactagagtggcttttctggttgaaatcatctaagaatcaatgtgtcactccaaatgttgc

SEQ ID NO: 107185 - DNA, 1681 bp, Zea Mays
ggagggccaggcaatgcaattgaatctgtgggtttgctccaaagttcgcgaacccggctaggcgtcctcctatctcggttgcaatggatgacctcgtcaccatgttccctcacctctcccactctagatctgtcacgctgttgttcctcttcctcaccacggcttttctccttgtcggctgcagccgtaaatcgggcgccgtcatgttggccgtgctgcggtggctcgctgcgccggtgcttactctgccgtggcacagagcttcgggcgggcggggcacgcggcgcgggttgtccgtccaggtgacggaccgcgccgtggcccgccgtgcgctggtgcagcacagtgccgcgttcctggaccgcccgacgggcgccgtcccgagcaccatcctcacgcgcaaccgccactacaacatcctctcggcaccgtacgggccctactggcgcgccgcgcgacgcaacgtggccactggagtgctgcacccgtcgcagctccgcatgctcggaggcacccgcgcacgcgtgctcggggacctcgtgcgcgcgctcaagtccggcgccccggctggcgagagcctgtacttcgccgtctactccgtccttgcagggatgtgcttcggcgaggacgtcgtcgccgagctcggggaaactcgcctccgtgccatgcaaaagttccagcgtgacatcctcctcgcgttgccgtccttcggggtgttcgtgaggtacccaaggatcggcaggttcctctaccggtcacggtggcacaggctcctcgctctccggcgacagcaagaagagtccttcctccctctcgtcgccgccatcaggaaccggcgggaggcgagccgcggtaacacaacgttgacgacttacgtggagtccctcctcgatctacgtatccatgaagatggtggcagggcagtcaccgacggcgagctcgtcagcctcatctcggagtttctcggtgctggcacggagtccacggccgcggcgctggagtggaccatggccaaccttgtcaaaagccccgacctgcagcaaaagcttcggctcgaagccaacgccatggcctgcggcaagcgagtcatcgaggaggaggacctggcgcgcatgccgtacctcagggccgtcgtgctagagagcctccgtcgccacccgcctgtgccattcgtgatacgtcgcgtagacggagacgatgccaagaaggtgatcggcgtgtcccgcctgccggacggtggcgcgaccgtgaacttcctcgtgggcaagatcggccgcgacccggcagcgtggtcggacccgatgtcgttcaagccggaacggttcatgcccggcggggaaggcgacgggacggacctgacatgcacgaccgagctcaagatgatgccgtttggcgctgggaggcgcgtatgccctgggctcgcgacagcgatgcttcacctgaaatatttcgttgccaacctgctgacggagttcgagtggtgggaggcggaagatgacaaggtcgatctcaccgagttccgcgggttcttcttcaccgtcatgaaccggccgctccaggcgcgcctcgtgccgaccgatgccgcggccgcgccatggctgtcgaattgagcgtcttcaactcgacgcatgtacatacgtgtacatccaatagcgcgtgtaaatgtgattggatagtgtgg

SEQ ID NO: 107186 - DNA, 105 bp, Zea Mays
tggaaaaggcatgttatattttgcttaccagagaaagcatacctgttccagatagaagttataggttgtgcaaatcagcttgttagtaagtgaccatgcgaaaac

SEQ ID NO: 107187 - DNA, 459 bp, Zea Mays
atggtttattcgtctaatattttactggtacaccaaccagttactacacaatctaaaaagcagattgctgaaaagagaacatttatacatctgacgaaagaaatgggtagtcaggtatccaataaccggatcagggatgtaaaacgtgtctctgttgtacttgttaaggggagcgtctacttcgaacctccgaggcaggtcaggattagccaagaacacgcgcccgaacgcgaccaaatcagcatacccagtggagatcgcgcgattcccatcctccctgccgtagccgccggcaacgatgaacgttcccctgaaagcgtcccttatcgggcgaaggctgtagggggtttcgaacttttcaccgagtttcaccatccgcggctccaccatgtggcagtagagaatcccgaactcgttcagcgcgttcgccatgtacatgcccagagcttccgggtctga

SEQ ID NO: 107188 - DNA, 755 bp, Zea Mays
gcaacggtaatacgcaattcagtcaaatattattagttgcacctgatggctgatgctgcatgcttcaacagtgggacacagcagggcaggagcggttcaggaccatcacgagcagctactacagaggagctcacgggataattattgtttatgacatcacggacatggagagcttcaacaacgtgaagcagtggcttgacgagatcgaccgatacgccaacgacagcgtgcgcaagcttcttgttggtaacaaatgtgatctggccgagaacagggctgtcgatacttcagtagcacaggcttacgctgaagaggtaggcatcccgttcctcgaaacgagcgctaaggagtcgatcaacgtcgaggaggcgttcttggcaatgtctgctgcaattaagaaaagtaaagcagggagtcaggcagccctggagaggaagccctccaatgtagttcagatgaaagggcggccgatccagcaagagcagcagaagagtagtagatgctgttcaacatgaggcacagcaatgtctgtctttggagaatcagtaaaatgattatctgctagactagatgtgtttctctgtcttcgtttgttttgagacacatatatatagttgcgaaaatgcggtggtgagaaactcgaaatgaatctgagccagaactcggaccgccaaatttcatcatttttactcacaaatttctaccatattgaacagcgagataatccaaccttgaaaaggtagtttatttacaca

SEQ ID NO: 107189 - DNA, 1096 bp, Zea Mays
atcggatcggttggtttatgcaccagcgcccagcggtttctcgaggtgcgtgcgtgcgtgcgtgagagagaggcgacttcccggaggtttagcatcttcttctctctctctcagtctcaccctgtccctcgcaaaagcatctccatccttcgctcctctcttcccgcactgttctcggaatcgctcttctcctccgcgctgttcttggaatcgaaaggtgggaagcgcaatgagcaacgagttcgattacctgttcaagcttctcctgatcggcgactcctcggtgggcaagtcctgcttcctcctccgcttcgctgacgactcctacgtggacagctacatcagcacgatcggcgtcgactttaaaatccgcacggtcgaggtggagggcaagaccgtaaagctgcagatttgggacacagcagggcaggagcggttcaggaccatcacgagcagctactacagaggagctcacgggataattattgtttatgacatcacggacatggagagcttcaacaacgtgaagcagtggcttgacgagatcgaccgatacgccaacgacagcgtgcgcaagcttcttgttggtaacaaatgtgatctggccgagaacagggctgtcgatacttcagtagcacaggcttacgctgaagaggtaggcatcccgttcctcgaaacgagcgctaaggagtcgatcaacgtcgaggaggcgttcttggcaatgtctgctgcaattaagaaaagtaaagcagggagtcaggcagccctggagaggaagccctccaatgtagttcagatgaaagggcggccgatccagcaagagcagcagaagagtagtagatgctgttcaacatgaggcacagcaatgtctgtctttggagaatcagtaaaatgattatctgctagactagatgtgtttctctgtcttcgtttgttttgagacacatatatatagttgcgaaaatgcggtggtgagaaactcgaaatgaatctgagccagaactcggaccgccaaatttcatcatttttactcacaaatttctaccatattgaacagcgagataatccaaccttgaaaaggtagtttatttacaca

SEQ ID NO: 107190 - DNA, 2037 bp, Zea Mays
ctggctgccatgctgccgctcgcacactccgccggctgcagccatctccacctccctcccgctccgagtcgagcttaccttcccaatcgccgccgcgtccgatccctcgtccgagcgcgccctcccagcgcgggggcgtccggaactgaaaccacctctaccactagcggcagcgttatgtcgttcctgtgcccgctcctcaaactcctcgggggaggcgatccttcgcagcaacggaacgacgttgtggaggtcacgacatcttcaatttcaagtttatccagactgccatggggatcaaaagtggctactagcagcggggagaacatcgattcagcaataagcattccaactcttcaactgtatgagtttgaggcatgtcccttctgtaggagagttcgggaggccatgaccgagcttgacctttctgcagaggtttatccttgtccaaaagggtcgctaaggcacagggacatagtcaagaaaattggagggaaggagcagtttccactccttgttgacgccagtactggtatctcaatgtatgaaagtggagatattgtgaagtacctgttcaggaactatggacaaggaaggagtccttcacctggtctccttgagagtacgattttcacaggatgggtgcccactcttctcagagctggaagagggatgacactgtgggacaaagccggtgctgtacctgcagagaagctggagctcttctcgtacgagaataatccctgtgcaaggatagttcgagaggctctctgtgaactggagcttccttatgttctccagaacgtcggagagggatcgtcgaggacggatttgcttctaaggaagtcgggctctaagcaggtgccatatctgatcgaccctaacactggattccagtcgggcgaccataagaagatactaccttacttattccagcagtacccagttagtagtatctagcagaaaaagcagacgtccacaactttaactgtgtatggtttatgtgatcttacatatgtatctgcgggtttagcatcttcttctctctctctcagtctcaccctgtccctcgcaaaagcatctccatccttcgctcctctcttcccgcactgttctcggaatcgctcttctcctccgcgctgttcttggaatcgaaaggtgggaagcgcaatgagcaacgagttcgattacctgttcaagcttctcctgatcggcgactcctcggtgggcaagtcctgcttcctcctccgcttcgctgacgactcctacgtggacagctacatcagcacgatcggcgtcgactttaaaatccgcacggtcgaggtggagggcaagaccgtaaagctgcagatttgggacacagcagggcaggagcggttcaggaccatcacgagcagctactacagaggagctcacgggataattattgtttatgacatcacggacatggagagcttcaacaacgtgaagcagtggcttgacgagatcgaccgatacgccaacgacagcgtgcgcaagcttcttgttggtaacaaatgtgatctggccgagaacagggctgtcgatacttcagtagcacaggcttacgctgaagaggtaggcatcccgttcctcgaaacgagcgctaaggagtcgatcaacgtcgaggaggcgttcttggcaatgtctgctgcaattaagaaaagtaaagcagggagtcaggcagccctggagaggaagccctccaatgtagttcagatgaaagggcggccgatccagcaagagcagcagaagagtagtagatgctgttcaacatgaggcacagcaatgtctgtctttggagaatcagtaaaatgattatctgctagactagatgtgtttctctgtcttcgtttgttttgagacacatatatatagttgcgaaaatgcggtggtgagaaactcgaaatgaatctgagccagaactcggaccgccaaatttcatcatttttactcacaaatttctaccatattgaacagcgagataatccaaccttgaaaaggtagtttatttacaca

SEQ ID NO: 107191 - DNA, 461 bp, Zea Mays
atcggatcggttggtttatgcaccagcgcccagcggtttctcgaggtgcgtgcgtgcgtgcgtgagagagaggcgacttcccggaggtttagcatcttcttctctctctctcagtctcaccctgtccctcgcaaaagcatctccatccttcgctcctctcttcccgcactgttctcggaatcgctcttctcctccgcgctgttcttggaatcgaaaggtgggaagcgcaatgagcaacgagttcgattacctgttcaagcttctcctgatcggcgactcctcggtgggcaagtcctgcttcctcctccgcttcgctgacgactcctacgtggacagctacatcagcacgatcggcgtcgactttaaaatccgcacggtcgaggtggagggcaagaccgtaaagctgcagattgtaagtggcctcctcaacgcttgtacatgtaccatctgtgacaatgttt

SEQ ID NO: 107192 - DNA, 1202 bp, Zea Mays
gccagtggtcacgctcacgccgactcccagctccagggcgccctcaaaccagcgctggctgccatgctgccgctcgcacactccgccggctgcagccatctccacctccctcccgctccgagtcgagcttaccttcccaatcgccgccgcgtccgatccctcgtccgagcgcgccctcccagcgcgggggcgtccggaactgaaaccacctctaccactagcggcagcgttatgtcgttcctgtgcccgctcctcaaactcctcggggtaaccagtcagagtcggatttgtcggctgcccgacttcgggcttggttaggctggggattgctaaaactggtgtcgctctgtgtgagtttgtgcgcagggaggcgatccttcgcagcaacggaacgacgttgtggaggtcacgacatcttcaatttcaagtttatccagactgccatggggatcaaaagtggctactagcagcggggagaacatcgattcagcaataagcattccaactcttcaactgtatgagtttgaggcatgtcccttctgtaggagagttcgggaggccatgaccgagcttgacctttctgcagaggtttccactccttgttgacgccagtactggtatctcaatgtatgaaagtggagatattgtgaagtacctgttcaggaactatggacaaggaaggagtccttcacctggtctccttgagagtacgattttcacaggatgggtgcccactcttctcagagctggaagagggatgacactgtgggacaaagccggtgctgtacctgcagagaagctggagctcttctcgtacgagaataatccctgtgcaaggatagttcgagaggctctctgtgaactggagcttccttatgttctccagaacgtcggagagggatcgtcgaggacggatttgcttctaaggaagtcgggctctaagcaggtgccatatctgatcgaccctaacactggattccagtcgggcgaccataagaagatactaccttacttattccagcagtacccagttagtagtatctagcagaaaaagcagacgtccacaactttaactgtgtatggtttatgtgatcttacatatgtatctgcgggtacagtgttaccagacgtggtttgtacgtatactttggctgctgcacttgtgttcctcacatggcactacgtttcttcccagctaaaaa

SEQ ID NO: 107193 - DNA, 1599 bp, Zea Mays
ggccgccacacgccgggtgccagtggtcacgctcacgccgactcccagctccagggcgccctcaaaccagcgctggctgccatgctgccgctcgcacactccgccggctgcagccatctccacctccctcccgctccgagtcgagcttaccttcccaatcgccgccgcgtccgatccctcgtccgagcgcgccctcccagcgcgggggcgtccggaactgaaaccacctctaccactagcggcagcgttatgtcgttcctgtgcccgctcctcaaactcctcgggggaggcgatccttcgcagcaacggaacgacgttgtggaggattcagagttcagaactcaaatttggatgctcgctcagatggctagattaagtacactgggtaataaattcacaaaagggtcccatgtatttcctgcttctgacattcattagttttcatttcacgtctagtaatccagtctggtccatctactaacagtgcaagtgtttctggttatatctggttgttcctttataggcgcagcgcaatcttcctttctgcttgccatccatgacttgtgtatatgtggctacttccgctcccaggtcacgacatcttcaatttcaagtttatccagactgccatggggatcaaaagtggctactagcagcggggagaacatcgattcagcaataagcattccaactcttcaactaggcatgtcccttctgtaggagagttcgggaggccatgaccgagcttgacctttctgcagaggtttatccttgtccaaaagggtcgctaaggcacagggacatagtcaagaaaattggagggaaggagcagtatgtcttgacttgctaagtattataatatttactaatagatgtggcaatgcttcaagtgaatatatcttggaaagtttcagggttctatgtttgtttattaaccttctgatgcattgcttactatcactgaactgtagtgtctgtacggcaggtttccactccttgttgacgccagtactggtatctcaatgtatgaaagtggagatattgtgaagtacctgttcaggaactatggacaaggaaggagtccttcacctggtctccttgagagtacgattttcacaggatgggtgcccactcttctcagagctggaagagggatgacactgtgggacaaagccggtgctgtacctgcagagaagctggagctcttctcgtacgagaataatccctgtgcaaggatagttcgagaggctctctgtgaactggagcttccttatgttctccagaacgtcggagagggatcgtcgaggacggatttgcttctaaggaagtcgggctctaagcaggtgccatatctgatcgaccctaacactggattccagtcgggcgaccataagaagatactaccttacttattccagcagtacccagttagtagtatctagcagaaaaagcagacgtccacaactttaactgtgtatggtttatgtgatcttacatatgtatctgcgggtacagtgttaccagacgtggtttgtacgtatactttggctgctgcacttgtgttcctcacatggcactacgtttcttcccagctaaaaa

SEQ ID NO: 107194 - DNA, 1289 bp, Zea Mays
tgcgaccaaaaagcccattgcgctggtccgagagggggccacgacgactcagtggcctggtccacagagccagccgaactgcccgtccgcctcccgcgacggccgccacacgccgggtgccagtggtcacgctcacgccgactcccagctccagggcgccctcaaaccagcgctggctgccatgctgccgctcgcacactccgccggctgcagccatctccacctccctcccgctccgagtcgagcttaccttcccaatcgccgccgcgtccgatccctcgtccgagcgcgccctcccagcgcgggggcgtccggaactgaaaccacctctaccactagcggcagcgttatgtcgttcctgtgcccgctcctcaaactcctcgggggaggcgatccttcgcagcaacggaacgacgttgtggaggtcacgacatcttcaatttcaagtttatccagactgccatggggatcaaaagtggctactagcagcggggagaacatcgattcagcaataagcattccaactcttcaactgtatgagtttgaggcatgtcccttctgtaggagagttcgggaggccatgaccgagcttgacctttctgcagaggtttatccttgtccaaaagggtcgctaaggcacagggacatagtcaagaaaattggagggaaggagcagtttccactccttgttgacgccagtactggtatctcaatgtatgaaagtggagatattgtgaagtacctgttcaggaactatggacaaggaaggagtccttcacctggtctccttgagagtacgattttcacaggatgggtgcccactcttctcagagctggaagagggatgacactgtgggacaaagccggtgctgtacctgcagagaagctggagctcttctcgtacgagaataatccctgtgcaaggatagttcgagaggctctctgtgaactggagcttccttatgttctccagaacgtcggagagggatcgtcgaggacggatttgcttctaaggaagtcgggctctaagcaggtgccatatctgatcgaccctaacactggattccagtcgggcgaccataagaagatactaccttacttattccagcagtacccagttagtagtatctagcagaaaaagcagacgtccacaactttaactgtgtatggtttatgtgatcttacatatgtatctgcgggtacagtgttaccagacgtggtttgtacgtatactttggctgctgcacttgtgttcctcacatggcactacgtttcttcccagctaaaaa

SEQ ID NO: 107195 - DNA, 1443 bp, Zea Mays
tgcgaccaaaaagcccattgcgctggtccgagagggggccacgacgactcagtggcctggtccacagagccagccgaactgcccgtccgcctcccgcgacggccgccacacgccgggtgccagtggtcacgctcacgccgactcccagctccagggcgccctcaaaccagcgctggctgccatgctgccgctcgcacactccgccggctgcagccatctccacctccctcccgctccgagtcgagcttaccttcccaatcgccgccgcgtccgatccctcgtccgagcgcgccctcccagcgcgggggcgtccggaactgaaaccacctctaccactagcggcagcgttatgtcgttcctgtgcccgctcctcaaactcctcgggggaggcgatccttcgcagcaacggaacgacgttgtggaggtcacgacatcttcaatttcaagtttatccagactgccatggggatcaaaagtggctactagcagcggggagaacatcgattcagcaataagcattccaactcttcaactgtatgagtttgaggcatgtcccttctgtaggagagttcgggaggccatgaccgagcttgacctttctgcagaggtttatccttgtccaaaagggtcgctaaggcacagggacatagtcaagaaaattggagggaaggagcagtatgtcttgacttgctaagtattataatatttactaatagatgtggcaatgcttcaagtgaatatatcttggaaagtttcagggttctatgtttgtttattaaccttctgatgcattgcttactatcactgaactgtagtgtctgtacggcaggtttccactccttgttgacgccagtactggtatctcaatgtatgaaagtggagatattgtgaagtacctgttcaggaactatggacaaggaaggagtccttcacctggtctccttgagagtacgattttcacaggatgggtgcccactcttctcagagctggaagagggatgacactgtgggacaaagccggtgctgtacctgcagagaagctggagctcttctcgtacgagaataatccctgtgcaaggatagttcgagaggctctctgtgaactggagcttccttatgttctccagaacgtcggagagggatcgtcgaggacggatttgcttctaaggaagtcgggctctaagcaggtgccatatctgatcgaccctaacactggattccagtcgggcgaccataagaagatactaccttacttattccagcagtacccagttagtagtatctagcagaaaaagcagacgtccacaactttaactgtgtatggtttatgtgatcttacatatgtatctgcgggtacagtgttaccagacgtggtttgtacgtatactttggctgctgcacttgtgttcctcacatggcactacgtttcttcccagctaaaaa

SEQ ID NO: 107196 - DNA, 1566 bp, Zea Mays
tgcgaccaaaaagcccattgcgctggtccgagagggggccacgacgactcagtggcctggtccacagagccagccgaactgcccgtccgcctcccgcgacggccgccacacgccgggtgccagtggtcacgctcacgccgactcccagctccagggcgccctcaaaccagcgctggctgccatgctgccgctcgcacactccgccggctgcagccatctccacctccctcccgctccgagtcgagcttaccttcccaatcgccgccgcgtccgatccctcgtccgagcgcgccctcccagcgcgggggcgtccggaactgaaaccacctctaccactagcggcagcgttatgtcgttcctgtgcccgctcctcaaactcctcgggggaggcgatccttcgcagcaacggaacgacgttgtggaggtcacgacatcttcaatttcaagtttatccagactgccatggggatcaaaagtggctactagcagcggggagaacatcgattcagcaataagcattccaactcttcaactgtatgagtttgaggcatgtcccttctgtaggagagttcgggaggccatgaccgagcttgacctttctgcagaggtgctcaaccttgtcttacattgttccttcatttctgcattcgaagcaaccatgaaaccattttacctgtaccggctctacttgcattccagttagtgctggccattgatgtagcattctgacgctgtcttcttagtggcgccaatttttattcctaactgtttcaggtttatccttgtccaaaagggtcgctaaggcacagggacatagtcaagaaaattggagggaaggagcagtatgtcttgacttgctaagtattataatatttactaatagatgtggcaatgcttcaagtgaatatatcttggaaagtttcagggttctatgtttgtttattaaccttctgatgcattgcttactatcactgaactgtagtgtctgtacggcaggtttccactccttgttgacgccagtactggtatctcaatgtatgaaagtggagatattgtgaagtacctgttcaggaactatggacaaggaaggagtccttcacctggtctccttgagagtacgattttcacaggatgggtgcccactcttctcagagctggaagagggatgacactgtgggacaaagccggtgctgtacctgcagagaagctggagctcttctcgtacgagaataatccctgtgcaaggatagttcgagaggctctctgtgaactggagcttccttatgttctccagaacgtcggagagggatcgtcgaggacggatttgcttctaaggaagtcgggctctaagcaggtgccatatctgatcgaccctaacactggattccagtcgggcgaccataagaagatactaccttacttattccagcagtacccagttagtagtatctagcagaaaaagcagacgtccacaactttaactgtgtatggtttatgtgatcttacatatgtatctgcgggtacagtgttaccagacgtggtttgtacgtatactttggctgctgc

SEQ ID NO: 107197 - DNA, 1618 bp, Zea Mays
tcggaatcgggcgttctgggctcctctgtttcctttcgtcaccgtcctcgccgttgtgttcctctctcagtctcggggcttcttctcgcgggcacctccggctgcttcctttgccaccgcagcaccagcgctgtccatggagcccccgccgctctcctcgttgcaggaggagggggaggaggggcctaccgtcgaggactcgtccgtcttctccgccgccgttgtgccgcctcgccccgccacgcaccactcgctccacaagtacgcgcctctggactggtccgcctacttcgacgaggagcgccgcgtagccatccccgacaccgacaacgttttcaatgcgtacacgaccggatcggaggggcccgtcgtgttctgcctgcacggaggcggttattcggggctttcatttgctctagcagcaagtcaaatgaaggacaaggctcgtgttgttgccatggatctaagggggcatggaaaatcaacaacgaatgatgatctggatttgtccattgaaactcttaccaatgatgtcatagctgttatacgtacaatgtatggagatttgccaccagcaattatacttgttgggcatagcatgggcggttcagtggctatacatgtggctgcaagaaaagaaattagaaatcttcatgggcttgttgtcgttgatgttgtcgagggaacagcaatggcttcattagttcatatgcagaagatcttagcaaaccgggcacagcattttcctagcattgaaaaagcaattgaatggagtgtcaaaggtgggccattaaggaacatcgagtctgctcgtgtgtccattccatctaccctgaaatacgatgaatcacgagaatgctatacatatcgcactcctcttgagcaaacagaaaagtactggaaaggatggtatgaaggtctttcagacaagttcctatcttgcccagtgcaaaagatcctgttgttagctggtaccgacagactggacagagctttaacaatcggtcaaatgcaaggaaaatttcaaatggtggtgattcggcacactggacatgctatacaggaagatgtacctgaagaatttgcatcgcacatactgaagttcatatcccgcaacaaaatagggcctaatggtgtcgagatacctgggctcattaaaaaatggcagcagtagacataatgtacaagttaccgttctggaaaatgttcaggaaaatgatgagtaggtctgcctatccgagttctcttcatatcgaattaaaaaaaggttcaagatgatcatgcgatcgttaacaatcagtcattggtttcgtcatctgttggcaactctcccatgtcgcttgagttgctttgtttctgacatcactctgcgacctgccggcgtcttttgtacgagggttcttgtatgtttttaggtagagctgagtgcagtgcgttgtaatgctttccgtgaggttactatactgctatcaagcaggatcagctcgttatgacagctctgtttcgaatttctgctggcctcggcaagcttgatgggagtaaatcgaagaagcctttgataattatctatttatcttccgcttcaacggagccgagatgtgcaaaaaaaaaacaaaca

SEQ ID NO: 107198 - DNA, 1613 bp, Zea Mays
tcggaatcgggcgttctgggctcctctgtttcctttcgtcaccgtcctcgccgttgtgttcctctctcagtctcggggcttcttctcgcgggcacctccggctgcttcctttgccaccgcagcaccagcgctgtccatggagcccccgccgctctcctcgttgcaggaggagggggaggaggggcctaccgtcgaggactcgtccgtcttctccgccgccgttgtgccgcctcgccccgccacgcacagccactcgctccacaagtacgcgcctctggactggtccgcctacttcgacgaggagcgccgcgtagccatccccgacaccgacaacgttttcaatgcgtacacgaccggatcggaggggcccgtcgtgttctgcctgcacggaggcggttattcggggctttcatttgctctagcagcaagtcaaatgaaggacaaggctcgtgttgttgccatggatctaagggggcatggaaaatcaacaacgaatgatgatctggatttgtccattgaaactcttaccaatgatgtcatagctgttatacgtacaatgtatggagatttgccaccagcaattatacttgttgggcatagcatgggcggttcagtggctatacatgtggctgcaagaaaagaaattagaaatcttcatgggcttgttgtcgttgatgttgtcgagggaacagcaatggcttcattagttcatatgcagaagatcttagcaaaccgggcacagcattttcctagcattgaaaaagcaattgaatggagtgtcaaaggtgggccattaaggaacatcgagtctgctcgtgtgtccattccatctaccctgaaatacgatgaatcacgagaatgctatacatatcgcactcctcttgagcaaacagaaaagtactggaaaggatggtctttcagacaagttcctatcttgcccagtgcaaaagatcctgttgttagctggtaccgacagactggacagagctttaacaatcggtcaaatgcaaggaaaatttcaaatggtggtgattcggcacactggacatgctatacaggaagatgtacctgaagaatttgcatcgcacatactgaagttcatatcccgcaacaaaatagggcctaatggtgtcgagatacctgggctcattaaaaaatggcagcagtagacataatgtacaagttaccgttctggaaaatgttcaggaaaatgatgagtaggtctgcctatccgagttctcttcatatcgaattaaaaaaaggttcaagatgatcatgcgatcgttaacaatcagtcattggtttcgtcatctgttggcaactctcccatgtcgcttgagttgctttgtttctgacatcactctgcgacctgccggcgtcttttgtacgagggttcttgtatgtttttaggtagagctgagtgcagtgcgttgtaatgctttccgtgaggttactatactgctatcaagcaggatcagctcgttatgacagctctgtttcgaatttctgctggcctcggcaagcttgatgggagtaaatcgaagaagcctttgataattatctatttatcttccgcttcaacggagccgagatgtgcaaaaaaaaaacaaaca

SEQ ID NO: 107199 - DNA, 746 bp, Zea Mays
ggccaaatactcacaatgtgcctagaaaatgtatgtactcatccttatatgggacttataatttaggaattggagatcacggattaggacctacaactagttatttaatactaataaattctcgacgtaattacaacactaagattcaaccatcatgtgtttatccattttggcaggtgaagcatccaagggtaacgatgtcgacatggaggtacggcgcccctgccctatgacttgagttaatttggtttcgttagtaaaactccatgtgcttgagacctcgcaatgtatgtgaaagaatgaattggtccaaatgcacaaagtagtacttttctgccaaatccgaagtttgtttgtgtgcatgttttaagatggtatatatgctctccatgtttgggcagggttgattgattggtatatatgctctcaagtaaggaaacacagaacgcatgcaaaaatatccaggctgtgatgctagcgaacctgggtcctcaagttttttctgcatcggaactcagaagagccttgtgtattttttctgaagtttctgtccctctcgggttttttggaggtctgttcctctcttttggccatcgtttggtcctggagtcagtcactcactaccaagtgtttcagaggtctgaactggtgagcatccagatctgttgttgctttttattttcttcttctgtgctttagaggcatctttgtacaacgatggacttgtgtgaatttgtgatatgaac

SEQ ID NO: 107200 - DNA, 1388 bp, Zea Mays
ctaggaggttacttgtgtttataatgcttatcatcattttttgtgattattgcaagtcatagcgttagcccaagatattttgacaattgcaaagcaaaccgagagtgtcgagaatgttgtaggtctatcaccactaggttattcagctagagtccagtctgaggtagctttattcttcgttactcgttagatgagttcttttcttagctagaattctgaataagcgataaatacatggcaattgttccattgataaaagggattgtcctgactaattacaatttacattgcttatattaagacataatggcttgcttacctactctactctgacagtcttgtggcagggagtggatgatctttcacattcccataggtttgtcgttggtatgagagttcaagctgggtggagtgaagatggagaatgtgtataaagcaacagttggagctatagcacaaaatggatactatgtagcctatgatggctggggaaacagggaagagtgacacgaccttgacagtcaagatgctctttcaggagatggtcccagttactttacatggttctgttggacacaatgaagccatccagatatgctattaaaattcttgctagtcattatggctttaaactgtaccatgtatgttctattttcagctaggcagagcatgttctatttacagcaggccagcagacaccaggcagtaaggtgatgtatgagtcatttgtatctgccgcattttacctgtatacatgagatacttaccctgccctgctcttgttacactgtaatgtatgctttgtcacttgaatgagatttggttttatgaaagccacttctgcttgagtgcattttgagaaggataaggctttggctcacagattccagccagtattggtgaatgagcctagccaggttctgaagcgagatattctatgggagcattacatgtcaactaagcttatctccgaaacgtgccttcagcttttacggcgatatgaccacaaaccggagagccagcgagctcctttgcttgaggagttcaagctctgcaaggtgaggtctgttcagtttagccagaaaggcatcccctatctgagcacctacgacgaccgcaccatccgctaccccgaccctctcatcaaggtcaacgacaccatcaagatcgatctagagaccaacaagatcatggacttcatcaagttgtatttgccctttcatggacttcaccaagctatatacttagttaggctcaatgttagcacaaacagttgatgagcaagtttaaatttagagtacacttatgtatgagttatttgacaatgcttatttatgagatattgaatgttatttatctataatatattaattatagtgttattaaat

SEQ ID NO: 107201 - DNA, 135 bp, Zea Mays
attcattttgggagcagtaacttccaaattatgaatatctttaaggaaaggcgttttgatttaaaaccttttggggaattttccttattttcgccaaattggactttagggtgttacatatttataggtactcga

SEQ ID NO: 107202 - DNA, 2579 bp, Zea Mays
atggacgcgcccaaccctggagcggctgctggcccaggaatgcctagtgacgccctgtaccaggagctgtggcatgcgtgtgctggcccgttggtcacagtacctagacaaggcgagcgtgtctattacttccctcagggccatatggagcagctcgaggcgtctgcacaccaccagcagcttgatcagtacttaccgatgttcgatctaccacccaagatcctatgcagagtagtcaacgtggaactacgggccgaagctgattcagatgaagtttatgctcaaattatgttgcagccagaagctgatcaaaatgaactcaccagcctggacgctgaaccacaagaacgtgaaaaatgcactgcccattccttctgcaagacactgacagcttcagatacgagcactcacggcgggttttctgttcttcggaggcatgctgaggaatgtcttcctcagctggacatgtctcaaaatccaccttgccaagaactggttgccaaagatctccatggcactgaatggcattttcggcacatttttcgagggcaacccaagaggcatctccttaccaccggctggagtgtctttgttagctcaaaaagattggtttctggggatgcattcatcttcatgagaggtgaaaatggtgagctacgggttggtgtaaggaggctcatgagacaagtaaatagcatgccgtcatctgtcatatcaagccacagcatgcatcttggagtattggccacagcctcccatgccatctccactggaaccctcttttctgttttctacaaaccaagaactagtcgctctgattttattgtgagtgtgaacaagtaccttgaagctaagaagcagaaaatatctgttggaatgaggtttaagatgagatttgaaggtgatgatgctcctgaaagaaggttcagcggaacaatcattggcatcgggagtttgccggcaatgtcaaaatctctgtgggcagattctgactggagatctctaaaggttcaatgggatgaaccttcatccattcttcgtccagatagaatctcaccatgggaagtggagccactggatgcagctaatccacaatcccctcaacctccactaagggctaagcgtccacgacccccagcttcaccttgtatggtttcggaactgccttcaggttttggactctggaaatccccaattgaatcatcctgtacactctcattttcggaacctcaacgggctcgagagttatttccttcaatccccacgtcaaccttgtcatcttcatcaaatgtcagttttaattcaaagaatgagccgtccatgctaaccagtcagttctactggtcagcaaggcatacaagagctgactcctgcgctgctagcaccaacacagtcgtaattgaaaagaagcaagagccaagttctggtggttgtagattgtttggaattaatatatgctcagctgaggaagaagtattacctgaggttactgctccaggtgttggttatgagcagactgctgcctctgtagagttgaactcggataagctctcacagccatctgatgtcaacaattctgatgccctagcagctagcagtgaacgttcacctcttgaatcccaaagccggcaagtgaggagctgtaccaaggtaattatgcaaggaatggcagtaggaagggctgtagacctgacaaagcttagtggctacagcgatctttgccagaagctggaggagatgtttgacatccagggggagctgggttccacactaaagaaatggcgggtcattttcactgatgatgaggatgacatgatgcttgttggagatgatccttgggatgagttttgcaggatggtgaaaaggatttacatttacacatacgaggaggcaaagaagctgacatccaagtcaaagttaccggttagcagtgacagcagcaagctgagcgctgcgaactcactgtctgaatgactatgaacaaaaactgcagagtgctaacgtccctctaattttgttatttccatcatttgattatgggggtgaatgctcacggttgctccgtgggctgaagttgtggttggcattcaactgccttgagttttggaggcttttggactgccttgccagcatgagcctcctggaagaggcaccctggcatctgcgtgccatttcccatttgttcgtgccgtttggtaggagtatccattggcttatttagcaggtccctggtttgaagaaagaagcggtcagctgcaagatggacggtgccttgcctcttcttcgactacttagctagtaattaggactatgtatgtaatgaatgtatatagtgccattaagacgcccatgccctggtattgaggtcccggcatttgtatgaatcaattgttcggaaattgttacctttagcagcaacgaacctgagggtgtagggtggccaggtgggagaagttgtatgtttctttcagtaacaatctttgtgcaagtgatctgtatatagtctactgttttaataagcaatgttgtgcaacttgcgctcctacaccctacagtacagtggggcttttcttgtgctt

SEQ ID NO: 107203 - DNA, 1110 bp, Zea Mays
atggacgcgcccaaccctggagcggctgctggcccaggaatgcctagtgacgccctgtaccaggagctgtggcatgcgtgtgctggcccgttggtcacagtacctagacaaggcgagcgtgtctattacttccctcagggccatatggagcagctcgaggcgtctgcacaccaccagcagcttgatcagtacttaccgatgttcgatctaccacccaagatcctatgcagagtagtcaacgtggaactacgggccgaagctgattcagatgaagtttatgctcaaattatgttgcagccagaagctgatcaaaatgaactcaccagcctggacgctgaaccacaagaacgtgaaaaatgcactgcccattccttctgcaagacactgacagcttcagatacgagcactcacggcgggttttctgttcttcggaggcatgctgaggaatgtcttcctcagctggacatgtctcaaaatccaccttgccaagaactggttgccaaagatctccatggcactgaatggcattttcggcacatttttcgagggcaacccaagaggcatctccttaccaccggctggagtgtctttgttagctcaaaaagattggtttctggggatgcattcatcttcatgagaggtgaaaatggtgagctacgggttggtgtaaggaggctcatgagacaagtaaatagcatgccgtcatctgtcatatcaagccacagcatgcatcttggagtattggccacagcctcccatgccatctccactggaaccctcttttctgttttctacaaaccaaggtttgatgttgttttgctttatctatacatatgtctgcagtgcacttcttattaatggatgtgcaactgtcctgatttgactgtactttctgtttgctaatttcactctgtttcaaatttcaaagtcagttctgtactctgctttagttgtaaacaagctttttgattgtagctactgcatccattgagtgatgtcttatcccttgccccttcctttgcaccaaagatacacactatggttgtcctagttagcattatcgtgtgcatgttttgtttccttcataatcttgctcgctaaactttatgc

SEQ ID NO: 107204 - DNA, 371 bp, Zea Mays
atggctgctaaaagacgaactggaaacgtaattgtgacagtgtgtgcctgttcgcccgctgctctagacaaaagactatcgtgtcccttgttacacgccttatcttatggtcagcacgtctcggtaagacaagaccgcaagagtccagcatccagtttcagcaaagaaatttcacgcccgctgggaaggcagatgttgcagagatgtatgcttgtatttggatgatcaaaagattggagatcacttggttttcttgtcctccgtactcgtctcggacccggcctccgttagctggggtgctgcagctgaatcacttccttccacagcctcctgggctgccggttcgtcctcgcccccgaagccaaactcgt

SEQ ID NO: 107205 - DNA, 261 bp, Zea Mays
atgtgtccatgcttttattgaccatgaaatgaaactacaggtgatggtgatcaggtcttaaaggctgttgatatccttaatgagatgaacatattaggggtccatccaaatgagataacatactcagtcttatttgttgcttgcgaaagaaatggtgaagcacaactaggtttggatttgtttgaacaattaaaaatggatggcattgacatcaatccgaccataattggttctcttactggtaagttgtttccttgcttt

SEQ ID NO: 107206 - DNA, 189 bp, Zea Mays
ccgctccggttgcccgccctcaggaccggccctgatcacacgggaggggggttaacatatggcgaactgtcagtcgtactccaccatcttcgtcttcccactggtgctagctagttgtttacaacaaccttcttcttctctatctctctctatctctctctctctctctctctctctctctctctctct

SEQ ID NO: 107207 - DNA, 390 bp, Zea Mays
tttttttctttattttcctgaatttttttgacaattttaacgaaaccaaacaggccgtaaaaatttcagattttttggacacccgagcgaaaagttatgcccggtttaaggaaggtacctcaagttatgtttttgggaggcacgactagaaagcggcggttagggcaaaacttccctatctgcaatcacagcagaacacaaatctttcgtggaaaaaataggttgtgccagatgaataaggaagggctgcggtgcaggcagaagactcaaagcggctcgcaacctatctaggtctggcgtggcgagaagtcacacaaggcgtctagcgagggcaagtcgattaatggggtggattgacttgtgatctgggtaatggtggatgggatagcg

SEQ ID NO: 107208 - DNA, 279 bp, Zea Mays
gagtctcgctctggagcccaggctggagtgcagtggccggatctcagctcactgcaaagctctgactcccgggtttacgccattctcctgcctcagcctccagagtagctgggactacaggcgcccgccaccttccccggctagttttttgtatttttttagtagagacggggtttcactgtgttagccgggaggatcttgatctcctgcccccgtgagccccccccctctgcctcccaaagtgctgggattacaggcttgagccactgcgcctggcct

SEQ ID NO: 107209 - DNA, 1264 bp, Zea Mays
tatccagatgatgcaacagatcataaaagagtcggctggggttgagtacctgcagaaggcttttgctgatcgctatggacctcctgagacagcaccagcttctcttcccctaactctgcaatggattttgacatcgaagaacattgcggaagaagaatggagtgaacattcagactgtctttcagtaatgccagcagcagggcaggctcctgctcttgttccggtactccgatctggtcatggagctccagtagggcaaccatctccttctgcaggagacacctctggtcaaccagagtgcaagggtgagaagcttgacaagctaataaggattggcctgttgcaactcattagtagtgtggagggcttgcaattgcagtcaactcctgaaagttttcagattaatctgctgaggctgagggctgtgcagagccaattccaacaggtgatcgtgatcgccacaagcatgctcgtcctgcgccaagttctgatgagcgagaactcgagggccactcctctggaactggaaaatgccatctcagaactcgtcaaggctctcgcggacatactgcacagctcacccgattccggcacggaagagattgtgcaggcgatggtcaatgcatcagcctcagttggctcaccatcagaggagaaggttcaggccaggatgcagatgatcacccgggtgttcctcaagagcctccagcccggtgacgtggtcttcaagaaggtatcccgtgcggtctactgcgccttccgtggcatcatcttaggtggcagtggtcccaagggccagaagctggcggacgctgcattgcgccgcatcggcgccaccaatgttgtcgacagggtgttgaaggctgctgaggtgctgatcaaggtggcaacggtatcagagaaggtccacggcccctggtacaaagctctgatagtctgatgtgagcatgaatgtgaatggtttggcttttgtgaatacagacggtgaaagtgtaaatccttgttccactgggtgggatgggagatatggtgttgtacagcaatttatagttgttggtcagtaggcagttcaggatgtgaagaattctggtgagctgggcgaatatggatgctctttcaccaggatttagtcaggctcgatggatggatgctaaaacgcgtctggaaatgtaaattgtggcaccttgtttgattttcgaactgaaataatgtaaataattgattgcaagttatttgtgctctgcacatattggttgtttcggcc

SEQ ID NO: 107210 - DNA, 1591 bp, Zea Mays
tctgtctcaggtacttgggtcaggttcccaggatgcacaatacttggggcagattttggagtattctctggatatggttcgcaagctctctgctgctgcaaaggaggatgagatgaagaaaaaccatgataaattattgagtgaattgtctacgaattctgaagttaacggcgatggcatcaactcatttgtcattgctgttatcaagggccttcgtttcatcctggaagaaataaaggaactgaaagcagaagtgagtaaagcacgtatccagatgatgcaacagatcataaaagagtcggctggggttgagtacctgcagaaggcttttgctgatcgctatggacctcctgagacagcaccagcttctcttcccctaactctgcaatggattttgacatcgaagaacattgcggaagaagaatggagtgaacattcagactgtctttcagtaatgccagcagcagggcaggctcctgctcttgttccggtactccgatctggtcatggagctccagtagggcaaccatctccttctgcaggagacacctctggtcaaccagagtgcaagggtgagaagcttgacaagctaataaggattggcctgttgcaactcattagtagtgtggagggcttgcaattgcagtcaactcctgaaagttttcagattaatctgctgaggctgagggctgtgcagagccaattccaacaggtgatcgtgatcgccacaaggtaaattatttgatcctttggcctcggctgttagaaaggttggattctttgatgtgtcatattgatccatccaaactgtattatttgtgcagcatgctcgtcctgcgccaagttctgatgagcgagaactcgagggccactcctctggaactggaaaatgccatctcagaactcgtcaaggctctcgcggacatactgcacagctcacccgattccggcacggaagagattgtgcaggcgatggtcaatgcatcagcctcagttggctcaccatcagaggagaaggttcaggccaggatgcagatgatcacccgggtgttcctcaagagcctccagcccggtgacgtggtcttcaagaaggtatcccgtgcggtctactgcgccttccgtggcatcatcttaggtggcagtggtcccaagggccagaagctggcggacgctgcattgcgccgcatcggcgccaccaatgttgtcgacagggtgttgaaggctgctgaggtgctgatcaaggtggcaacggtatcagagaaggtccacggcccctggtacaaagctctgatagtctgatgtgagcatgaatgtgaatggtttggcttttgtgaatacagacggtgaaagtgtaaatccttgttccactgggtgggatgggagatatggtgttgtacagcaatttatagttgttggtcagtaggcagttcaggatgtgaagaattctggtgagctgggcgaatatggatgctctttcaccaggatttagtcaggctcgatggatggatgctaaaacgcgtctggaaatgtaaattgtggcaccttgtttgattttcgaactgaaataatgtaaataattgattgcaagtta

SEQ ID NO: 107211 - DNA, 650 bp, Zea Mays
tgtcatttctcattcagtagcatcttcatcagtagaaaatgttgatcatcttctgaaacgccttggttctcccccaaggaggaaggctcctcctagcagagaaggaaaaactcgggcagtggtaaaaagaccagctaaaagttctgaggcaagcatcaaattgcccagatactcactgagggtggtgctctgtgcttacatgatactggctcatcccagtgctgttttaagtgggcaaggtgagcgggagaaacagcttatcgagtcggcagcaaactttatcaaggagttcgagctgttgattaaggtaattcttgatggaccagggcagtcatctggtgttactggccagaggaagttcagggcacagttggctaattttgacaaggcgtggtgttcgtatctttacagctttgtggtgtggaaggtaaaagatgcaagattattggaggaagatcttgtcagggctgcatgcaagcttgagttgtcaatgatgcaaacatgcaagctaactgcagacaggcactcgcaaaacaatcttacacatgacatgaaggcaattcagaaacaggttattgatgatcaaaagcttttacgagataaggttcaacacctgagtggcgatgctggccttgagcggatgaactctg

SEQ ID NO: 107212 - DNA, 1769 bp, Zea Mays
gggggttcattaatgtatgtgatttgatgcgctgaggcatcgacatcacgggtgtaagcagctagctgctgaggtctgccttgccttatcgtcgcgattaataaagctgtttctttctctgcttgcattgccaaagccgcggtttgggctctgcagacgtaacgtaacgatgccaaccctatattttgaaaagccaacgagagcggtttgagctcctagtaaagtagtaatagcgtgcctgtttctacagggcttcccgtactgacactgatacctgcctggatattattagtaggatatagtatatattatggtctcaagggctgctaccgattggagggtcaggtcttcattcgcaaaacacagacatttgacttgcgctctccctttctctctctctctctctgtgtatgtgtgtgtgtctcaggttctcagcaaagagcagggaggataagcttggaatgccttggcagtgagagctgcaactgcaacaaagcaaccggcgtccatggtggagagggaaaggggcgagggagaagccagggccctggccagcgggccagggcagcagcagcagcaggaaggagcagcggagggcgagagggtcgagaaagaaggagacgagcgggaggaggaggatcgagacgacgaagccgtggagtggtccgagatacggctcgccatcgaggagctgtccccggcggcccatctcaagcgcgtcgacggcgatggcaaggcggccgcgtcgtccctgcccacgctccgcttcctggcgctgtcgcacctcctcgttcgagtgctcgataagatcgggccgaccatggccgtgctgaggctcgacgtccaacggaacatcgagaggctgcaggagctgtacctgctggacccagccacgtactcgaccctgacggggatagtggagaaggaagtgaaggagggcacagcgaggaaggtcgacagctgcgcaagggcgatcctgtggcttgctagatccatggatttcacagctgcgctgttacagaggctggaggaggactctacgcagcagcagcagcagagcctcgcgcagctcgtggaggccgcgtacgaggccaccctgaagccgtggcacggctggatctcctcggcggcgtgcaagatagcgtggaagctcatccccgagaggaaggtcttcaccggcatgctgctggggacgggccaggactgctctgcacttgaagacgagatcgggcggctcgcgctgttgcttcggcccttccttgatgacatccactccatgatggccaagttcagactggacaggctcaagtcgacgtgatccatggcgaacccgacgcaagcccaagccatggacatggacatggtccgatccccgtccttcgctgtgaatactgcctgccctggcttccgtcttcgagtcgcatttgcttgcggttaggtctagtttagacgctgctgctctctagtctgtacataggtcttttgcttgtagaatagactcccaagatctgcatgcggtgcccttttttcgtggtaggctacgtttggacagcgcccctcctcaattgcctctgcctgtgccaatacgttggccggccaaactttggctgcccaagaaacggccaactttggcagggaaaatgaactagcaagttgttcacgatgccaaactttggcaggcagcaaccatccaaacatacaagatgccaatagtcaacgaccttttattggtttggctggctggtaatgggctctaaattttacgctat

SEQ ID NO: 107213 - DNA, 1705 bp, Zea Mays
gggggttcattaatgtatgtgatttgatgcgctgaggcatcgacatcacgggtgtaagcagctagctgctgaggtctgccttgccttatcgtcgcgattaataaagctgtttctttctctgcttgcattgccaaagccgcggtttgggctctgcagacgtaacgtaacgatgccaaccctatattttgaaaagccaacgagagcggtttgagctcctagtaaagtagtaatagcgtgcctgtttctacagggcttcccgtactgacactgatacctgcctggatattattagtaggatatagtatatattatggtctcaagggctgctaccgattggagggtcaggtcttcattcgcaaaacacagacatttgacttgcgctctccctttctctctctctctctctgtgtatgtgtgtgtgtctcaggttctcagcaaagagcagggaggataagcttggaatgccttggcagtgagagctgcaactgcaacaaagcaaccggcgtccatggtggagagggaaaggggcgagggagaagccagggccctggccagcgggccagggcagcagcagcagcaggaaggagcagcggagggcgagagggtcgagaaagaaggagacgagcgggaggaggaggatcgagacgacgaagccgtggagtggtccgagatacggctcgccatcgaggagctgtccccggcggcccatctcaagcgcgtcgacggcgatggcaaggcggccgcgtcgtccctgcccacgctccgcttcctggcgctgtcgcacctcctcgttcgagtgctcgataagatcgggccgaccatggccgtgctgaggctcgacgtccaacggaacatcgagaggctgcaggagctgtacctgctggacccagccacgtactcgaccctgacggggatagtggagaaggaagtgaaggagggcacagcgaggaaggtcgacagctgcgcaagggcgatcctgtggcttgctagatccatggatttcacagctgcgctgttacagaggctggaggaggactctacgcagcagcagcagcagagcctcgcgcagctcgtggaggccgcgtacgaggccaccctgaagccgtggcacggctggatctcctcggcggcgtgcaaggttggggcgaccacgccaccgcgaatccttttttgtggccgcgcggatagcgtggaagctcatccccgagaggaaggtcttcaccggcatgctgctggggacgggccaggactgctctgcacttgaagacgagatcgggcggctcgcgctgttgcttcggcccttccttgatgacatccactccatgatggccaagttcagactggacaggctcaagtcgacgtgatccatggcgaacccgacgcaagcccaagccatggacatggacatggtccgatccccgtccttcgctgtgaatactgcctgccctggcttccgtcttcgagtcgcatttgcttgcggttaggtctagtttagacgctgctgctctctagtctgtacataggtcttttgcttgtagaatagactcccaagatctgcatgcggtgcccttttttcgtggtaggctacgtttggacagcgcccctcctcaattgcctctgcctgtgccaatacgttggccggccaaactttggctgcccaagaaacggccaactttggcagggaaaatgaactagcaagttgttc

SEQ ID NO: 107214 - DNA, 1441 bp, Zea Mays
tatctcccctccagacctccacacgccgcgatggcctccgccgaaatccccaactccagccctgatgccaccaaccccgccgccgccgccgccaccgccaccgccactgccaccggccccgacatctcctcttcgccgccactcccgccgcggaagcgccgcctttcgccttcctcatctcccacgcgctccgcgtcacgctctcggtcgccccgctcccgctccccgcgcggccgccgctcccgctcccgcagccggagccggagccggagccgcagccgcagcccgcagtacccgcccgacggcaagcggcagcggcacaacgaccttaccgtggaggcgtgccgcgacttcctgcgcgataggtgcacccgctccgacctcgagtgcagatacgcgcaccctcacaactcagcttccgtcgaccgggacaacaaggtgacggcgtgcgcggattctcttaggaacaattgcttccgggggatgacatgccgttactaccacccccctccacaaatccaggagcaattgctgagatcaattggtatggaagatccaaatgtgaagacgcagatctgcagagattttacacgtgggaagtgttcaaggtcagcaaatgagtgccgattcttgcaccattcatctgttgaagatgctgcaattgtttgccaagattttttgcgtggacaatgcaatcgcatagcatgtaggtactctcatgtagtagcacatccggtgccaccaatgagccatgttcctatgccataccctgagatgctttacatgccaccaccaccaccaccacctcttggagtaccaatgatggggcctccgccttcaccatttgctgataataagaacagggttgaagtttgtagggacttcttgaagaacatgtgcaatagagaatcctgccggtttttacaccctgggacacatacagcggctgcgagcgccaatgttgaagtatgccgtgattttaaacgaggagaatgcaatcgacctgcctgtcgctttttgcatccatatacaagttgaagttttctgttagctaaacttgagtgctctgcccaccgccgccgctactgctgtgctgctgctgctgccgccgccgccgccgccgctgctgcgccaccaccacccattctgcttctgccaccaaagagctgctgcgctggctgttgcgtcgctaaggtgccatagagcaaggaagccatagaaggcgctatgtatgcatcgaataaaagattctaatatcctgggatattcagatggttgcttgaacttgctttactcaatgcttgagcagtgcccccttcactataggggctgtgtgtggttttgtatttgttgtcataaaagatattttttgactctagctaatttgatgtctacgctattgccttccccttagcatcacactttattgtttgtataagtt

SEQ ID NO: 107215 - DNA, 1201 bp, Zea Mays
tatctcccctccagacctccacacgccgcgatggcctccgccgaaatccccaactccagccctgatgccaccaaccccgccgccgccgccgccaccgccaccgccactgccaccggccccgacatctcctcttcgccgccactcccgccgcggaagcgccgcctttcgccttcctcatctcccacgcgctccgcgtcacgctctcggtcgccccgctcccgctccccgcgcggccgccgctcccgctcccgcagccggagccggagccggagccgcagccgcagcccgcagtacccgcccgacggcaagcggcagcggcacaacgaccttaccgtggaggcgtgccgcgacttcctgcgcgataggtgcacccgctccgacctcgagtgcagatacgcgcaccctcacaactcagcttccgtcgaccgggacaacaaggtgacggcgtgcgcggattctcttaggaacaattgcttccgggggatgacatgccgttactaccacccccctccacaaatccaggagcaattgctgagatcaattggtatggaagatccaaatgtgaagacgcagatctgcagagattttacacgtgggaagtgttcaaggtcagcaaatgagtgccgattcttgcaccattcatctgttgaagatgctgcaattgtttgccaagattttttgcgtggacaatgcaatcgcatagcatgtaggtactctcatgtagtagcacatccggtgccaccaatgagccatgttcctatgccataccctgagatgctttacatgccaccaccaccaccaccacctcttggagtaccaatgatggggcctccgccttcaccatttgctgataataagaacagggttgaagtttgtagggacttcttgaagaacatgtgcaatagagaatcctgccggtttttacaccctgggacacatacagcggctgcgagcgccaatgttgaagtatgccgtgattttaaacgaggagaatgcaatcgacctgcctgtcgctttttgcatccatatacaagttgaagttttctgttagctaaagtaaagtaaattgtaccttgttttcctcttcataatacaaatggctgccaaatacatatagatgaaagaacgctcccctaagaacacatagttatagagttaacttcaacgtcaacttgtggatcttttgtccattcaaaccagc

SEQ ID NO: 107216 - DNA, 89 bp, Zea Mays
gttatggtttctagcttccaatggacacttacactcattatattactatttctagcacggaaagaaatatttcctaatatttgctaatc

SEQ ID NO: 107217 - DNA, 423 bp, Zea Mays
ttgtcaaacaacacatacataagtgtactctaaatctaaactaaaatacaactgtttgcactaatgttaagcctaactttatatgaattcaagtctccacattttgcggccaccaaatttgaattccattctatgttttcctatacaacaaataggagaaaactagacatagcaaaaagctctaagcagcacgtggatggtctcgaagctgcccttgtgcttctccctgttcttgatcactcctacacgcctggtgttcctcccaccggtcatcatgaccatgttgccgatgtcaaacttgatgaagtccatgatcttgttggtctccagaccgatcttgatggtgccatttctgcaaacttttagctatacagaagggagattgtgtttggagtaaagaacgaccaacctcaccacatatgg

SEQ ID NO: 107218 - DNA, 1959 bp, Zea Mays
ctctctctctcttcttcgatcgaggagagcccatacacatccagccagcacagtagcctgcctgcgtgcctagtccatctcgtgtgcagcaacttcaactactagtacatcgcggcagctcctgctgtttcggccggctttatggccatcacctcacctgcagcaacttcaactactagtactcgttacagccacagcggctgaccacagcgcgcgcagtaactctgctgcagtcacctccgtcacctgttacgtcgccgtcgcgtcgccatggatcatcggtccttgatggggatgatgcatcatgcatgggaatgggagtgagtgctcgaggcaatatcgagagagattttctggtaccgcgcgctgcattctcgccgccctgtttgtgagttgctcagcaggcagcagctggtgtcggtgctggctcttgatctggatcttgccatcttagatcgcggcagcgagaagcatgatacctgctgggcgtttctttattattgcatctcgttgatccggtccgtggtggtggacgactggtggtgcgcgcgcgcaagatgagcatcccgcacctgttccggtgccccatcagcctggacatcttcacggacccggtgacgctgtgcacggggcagacgtacgaccgcccctgcatcgagcgctggctcgccgccggccaccgcacgtgcccggtcacaatgcagccgctcggcgacgccgcgctcgtgcccaaccgcaccctgcgccacctcatcgagcgctggctgtccgccgaccaccagatctccgacgcgacgacgcccgccgccgccgccgccaccagcgacgacaacgcggaggagccgtcgctcgcggcgctcaagcgctgcctccagtccggcgccggcagcggcgccaaggtggccgcgctcaagaagggcgtcgcgctggcctccgagtcggacgtcggccgcgcgtgcatgctccagctgggcttcctccccgtgctgctgcagctcgtcttccacgcgcccacgacgcgggacctgtccgagcaggaggggcttgcgctgcagtgcgcgctcaccctcctgccgtcgagcccggcctcgccgcagcacggctgcctcaacatgctcaagacggaggccagcctcacgtccttcgtcgggctcctcgcgcgcggccccgccgcggccaaggcgggcctgtgccgcctcctggagacgatcgccacggccgccgcgacgcgggacctggcgctcgccgccgccgcgtcgccgcgggtgtggcaggcgcttctgccgctgcttcggcacgacgacgagcgcgtctcggtcgccgcggtgcgcgcggtggccgcgatctgctgcgcggccgagcccgcgcgcggcagcgccgtccaccacggcgccgtccccgcgctcctcggctgcctggcgtgggcgtcggcgggcaagggccgtggcgccgcggcgtggagcgcgctcgcggcgctggaggcgctcgccgcgtccgaggcagggcgccgggccgtggcgcgcgatcccggcgcggtgcggtcgctggtgaggcacgtgttcatgatgtcgtcgagtaacgagggaagcgagcacgcggtggccgcgctgctggccgtgtgcagggagtccagggcggcacggaccgaggctgccgccgcggggctggtgacgcaggtgctgctgctgctgcagagccagtgcggaaccagggccaagaccagggcgaggtcgctgctcaaaatgttcaagtccatgtgaaacaagcgcttagtttaggtgtcaatgctggatgttcttggcttcaagctgtaagtttgtgcttcaaaaacgtccgctaattaatttcatgcgtagtttcttggaagctgctcgcaaccaggtgtgatgactgatgagccgtagctatggttatttcatgcctccaagtaacgcagaatcaggcgatctgaaagagttt

SEQ ID NO: 107219 - DNA, 1197 bp, Zea Mays
caaaaccattggccgacgctacgtctctctccctcgatcctatctcccagatgatgcatatatacacgcatacggcgccggctataaatagtgcaaaaagccatcgcactactgctaagcaaagcacgcctgcttttttttttgttctctcatctcgctcatatatatcctttgcacctgcgctgatccgttccaatcgatcttgcacctcctcacctcctcagctcggcgcctcagctgatcatggggggagcttctgattctaaccttcttccccctggcttccacttcttcccgtcagacgaagagctcgtcgtccacttcctccgccgcaaagcctcgctcctcccatgccagccggacatcgtgcccacggtgtgcatgaatcaccacgatccatgggaactgaatggcaaagcgcttgaggctggtagccagtggtacttcttcagccacgcgaagcaaagtagggccacgccgaacgggtactggagctctgtttgtgctgacgagacggtgctgagcggcggcggcggctgcagcgtcgtcgtcggcctgaagaagacgctcgtcttctccactggagagccctctgatggggccgaaacaaactggatcatgcatgagtatcacttgctggatgggaggacggggggtagcagcagcagcagtagcgcttcatcaatccatagttcgagcaagaaatcgcatcacccaaacacagagttcagtaactgggtgatatgccgagtgtttgattcgacgggcggcgggtcgcaggcgaactgccatgacgacgagggcatggagctttcatgcttggatgagttgttcctatccctcgacgactatgatgaagtcagcttgtcaagtaattagaagcctagtatcaccagaaccggcagtactagtaggcgctccctacgaattttacagaagatcaaatgattccataggtgtgtttagccttaaacactgcgtctaattaaaccacagatgtggattgctctcctcatcaaattggagtcggtcgaggcacatgcatgtaacaagctgagttagttttatataaatatgggcatagtgtgtggataatctcctgtactacaaggttcgaggtatctatgttcgagcataaaaaggggatagacaaggcatgtataactctatttaatataagatctcttgagcgatctt

SEQ ID NO: 107220 - DNA, 270 bp, Zea Mays
atgaccggagtcgtttccagggtggatttcaacacgattttgcactgtctatcgcagatcatctccaagaaaaagaactgtggcaatatctgtctgtacctcttccatggaacggacataggtgttcggacaaaacatatcaaaatgttatctcccaaaacacttttctgtgcaaaagcagaagctaaacatgtctacacggtcgaatgttcccagatgatagacatggtaaagaaaattgtgaaatcaaatggatattctgatggttga

SEQ ID NO: 107221 - DNA, 175 bp, Zea Mays
tctgttttattcttttcttttctatctctttttctccatttttaaattcaatttgaattcaagtttaaattcaaactttgtgaataacttctcctcaatttgaaatgtatagtttaataatataagtgtgaaaggtatttattttgatttttattttattttatgtagtattttt

SEQ ID NO: 107222 - DNA, 860 bp, Zea Mays
atggacgacctcaccttccctgccacctcgacggcgccgcccgagccgccggctgccgtcgcaggcccactcccggcagcggcggcagcgtgccgccagctcccgtccccccggttcgcggtcgtcgccagatcgccgccgcccttgtcccctcctccccctcccgccgccgcgccaccgccggtgacaagcagcggagcacccacgctcaccgccgtggcggcgccggcgggggcgggaggcgacgccacggaggaggacaggatggacctgctgtgggaggacttcaacgaggagctggcgcggggcgcctgctgctgctgccgcgccgccgccgccgggccgtggtcgccgtcggactccgagtcggagcccgcggcggcccgcgggtgcgcgccggtgctgcggccctcatcccgggccggcgccgtccggcactgccgccgccgcgccgggacgtgggctctgctcatgcggatcttcaggaggctcttcgttgtcgagaagaccgtcgtctccaggcgccagcgccaccgcgccgctgccaaggcgagggcgcgctgacgcgacgaccacgcacccttgcgcaggcgcagccaggcaggcagttgccatttgcctccacgaatgtaatgagttgcttcctatgcgacaagggaagaagaaccatgcatgcgttgcttccttcctatgcgatcgtacggcctactagtaagttacgtattatactgctatgataatccattagacacgggagtgaggaggtctgctcttgatgctgtaaataaataggatttcagtgttgttcatcgtcagctgatacagagaaattagagcagtgccatagcaatgtcgtcatt

SEQ ID NO: 107223 - DNA, 2107 bp, Zea Mays
caggcacagcggcgcacggcgcgggcggggcggcattcgcgtgcgtctcgccgtctcgtcacatggtggtgagggtgggccggtggggcttgtacgctagccattaatacggcaggtcgcccatcccatcccatcgcggccgccgcgcccgccggtctccacccctccccccaccccctgcttaaaatcccgcgtcccggtcgcgcaccccactccgcctccgctccccgctcgccgccgcgattgctggattggctgccgccagcgccccggtgctagctcccgttcctcgcggtggtcactggactagcctggacgccgcggcccgccgcctggtcgaagagatggactcggtcatggccgcccccgactcgccgccgcagactgtcgtgctcgtctctgccggcgccagccactccgtcgcgctcctcacgggcaatgtcctgtgctcgtggggcaggggcgaggacgggcagctcggccacggcgacgcggaggaccggctcgtgcccacggtgcttagcggcttcgacgcgcccgcgatcacgtccgtcatctgcggcgccgaccacaccaccgcctactccgaggacgagctgcaggtctacagctggggctggggagactttgggaggctggggcacggcaactccagcgacgtcttcacgccccagcctgtcaaggcgctgcaggggctcaagatcaaacagattgcctgcggggacagccattgtcttgccgtcaccatggccggagaagtgcagagttggggccgtaaccaaaacggacagctaggccttggaaccactgaagactcgctgctcccacaaaagattcaggcttttgagtaactgaagacggtgacctctacggatggggttggggtcgatatggaaacttaggtcttggtgaccgtaatgaccgtttgcttcctgaaaaagtatcttctgtggaggcgtggtgcttgagccgccaaacaacagtcaggtgttcctttctttccagaccatccacctgacaagcaaaagcagggagtcaaaatcacgctggatgttgtcgtcttgaaacatccctcggttaaaaacagtgtcagggggtgagaagatggtgcttgtggcatgtggatggcgccatacaattacggtttctgactctggtaatctgtacacttatggttggagcaaatatggtcagctagggcatggtgattttgaagatcatttagttccacataaagtagaagctttgaaagatagcactatatcccagatttcaggcggctggaggcatacgatggcacttacatcagagggaaagctttacggatggggatggaacaagttcggacaagtcggagtcggcaacaacgacgaccacagctcccccggacaagtcagttttccagaggatcagaaaatctcccaggttgcatgcggatggaggcatactctggccctctccgagaagaaaaatgtcttctcctgggggaggggcactagcggacagctcggcaacggtgaaatagtcgacaggaacacgcctgtgctgatcgatgccctgagctcagacggttctgcctgcaagaagctggagtcatccacggcagccccattcgcagccaaagtttgggtgtcgccgtcagaacgatacgccatagtccctgacgagaacgtccgtaaagcaggcggaggcacggcacgaggcaacggcgccgacgcgaacgtgccggagaacgacgtgaagaggatgcgcgtgcagtcgtcgtagtaggtcttctactaccgtccactccaccacccccccgttaaccctactagtagtaagtactacgaagacgaaccggtgccccatctagcggcgcccgatttttgtgcgttacgttctgcctaaaagtgctttccgtcgacggacggacctcctggtgttgagatggtagcggtagcactgcctcgcggcgatggtgtgtgtcgtgacgtgattcacctcttagagtagagaggtggctagcccagtcgacctgtgttgtgtgtgttgttaagatgtgtcctggatcttttgtgacattgcatggagggtacaataagcgcttcgtttctcgtttcttccc

SEQ ID NO: 107224 - DNA, 2016 bp, Zea Mays
caggcacagcggcgcacggcgcgggcggggcggcattcgcgtgcgtctcgccgtctcgtcacatggtggtgagggtgggccggtggggcttgtacgctagccattaatacggcaggtcgcccatcccatcccatcgcggccgccgcgcccgccggtctccacccctccccccaccccctgcttaaaatcccgcgtcccggtcgcgcaccccactccgcctccgctccccgctcgccgccgcgattgctggattggctgccgccagcgccccggtgctagctcccgttcctcgcggtggtcactggactagcctggacgccgcggcccgccgcctggtcgaagagatggactcggtcatggccgcccccgactcgccgccgcagactgtcgtgctcgtctctgccggcgccagccactccgtcgcgctcctcacgggcaatgtcctgtgctcgtggggcaggggcgaggacgggcagctcggccacggcgacgcggaggaccggctcgtgcccacggtgcttagcggcttcgacgcgcccgcgatcacgtccgtcatctgcggcgccgaccacaccaccgcctactccgaggacgagctgcaggtctacagctggggctggggagactttgggaggctggggcacggcaactccagcgacgtcttcacgccccagcctgtcaaggcgctgcaggggctcaagatcaaacagattgcctgcggggacagccattgtcttgccgtcaccatggccggagaagtgcagagttggggccgtaaccaaaacggacagctaggccttggaaccactgaagactcgctgctcccacaaaagattcaggcttttgagagtgtttgcgtgaaaatgattgctgccggtgccgaacatactgctgcagtaactgaagacggtgacctctacggatggggttggggtcgatatggaaacttaggtcttggtgaccgtaatgaccgtttgcttcctgaaaaagtatcttctgtggagggtgagaagatggtgcttgtggcatgtggatggcgccatacaattacggtttctgactctggtaatctgtacacttatggttggagcaaatatggtcagctagggcatggtgattttgaagatcatttagttccacataaagtagaagctttgaaagatagcactatatcccagatttcaggcggctggaggcatacgatggcacttacatcagagggaaagctttacggatggggatggaacaagttcggacaagtcggagtcggcaacaacgacgaccacagctcccccggacaagtcagttttccagaggatcagaaaatctcccaggttgcatgcggatggaggcatactctggccctctccgagaagaaaaatgtcttctcctgggggaggggcactagcggacagctcggcaacggtgaaatagtcgacaggaacacgcctgtgctgatcgatgccctgagctcagacggttctgcctgcaagaagctggagtcatccacggcagccccattcgcagccaaagtttgggtgtcgccgtcagaacgatacgccatagtccctgacgagaacgtccgtaaagcaggcggaggcacggcacgaggcaacggcgccgacgcgaacgtgccggagaacgacgtgaagaggatgcgcgtgcagtcgtcgtagtaggtcttctactaccgtccactccaccacccccccgttaaccctactagtagtaagtactacgaagacgaaccggtgccccatctagcggcgcccgatttttgtgcgttacgttctgcctaaaagtgctttccgtcgacggacggacctcctggtgttgagatggtagcggtagcactgcctcgcggcgatggtgtgtgtcgtgacgtgattcacctcttagagtagagaggtggctagcccagtcgacctgtgttgtgtgtgttgttaagatgtgtcctggatcttttgtgacattgcatggagggtacaataagcgcttcgtttctcgtttcttccc

SEQ ID NO: 107225 - DNA, 1062 bp, Zea Mays
caggcacagcggcgcacggcgcgggcggggcggcattcgcgtgcgtctcgccgtctcgtcacatggtggtgagggtgggccggtggggcttgtacgctagccattaatacggcaggtcgcccatcccatcccatcgcggccgccgcgcccgccggtctccacccctccccccaccccctgcttaaaatcccgcgtcccggtcgcgcaccccactccgcctccgctccccgctcgccgccgcgattgctggattggctgccgccagcgccccggtgctagctcccgttcctcgcggtggtcactggactagcctggacgccgcggcccgccgcctggtcgaagagatggactcggtcatggccgcccccgactcgccgccgcagactgtcgtgctcgtctctgccggcgccagccactccgtcgcgctcctcacgggcaatgtcctgtgctcgtggggcaggggcgaggacgggcagctcggccacggcgacgcggaggaccggctcgtgcccacggtgcttagcggcttcgacgcgcccgcgatcacgtccgtcatctgcggcgccgaccacaccaccgcctactccgaggacgagctgcaggtctacagctggggctggggagactttgggaggctggggcacggcaactccagcgacgtcttcacgccccagcctgtcaaggcgctgcaggggctcaagatcaaacagattgcctgcggggacagccattgtcttgccgtcaccatggccggagaagtgcagagttggggccgtaaccaaaacggacagctaggccttggaaccactgaagactcgctgctcccacaaaagattcaggcttttgaggtaacaaaggggataacgaaatcttcatacagagtgatctggatcatgatagggaagttttaggactaccattttgcactagggcaaacatgctatgcataaaacatgtatgtaaaattgtaaatcatgagtagcaagtcaaagtttttgatgcgcatcttaataactatgatttggttcacaacactctattagctaaactactatactcatg

SEQ ID NO: 107226 - DNA, 1297 bp, Zea Mays
actaaacagagatagtaaacttgcctcaatgctcaactattctataatctaattctttactcagctatatccccaccagaaaaaattcagctgttgaatcatcataaccaatcttctatatatgcatcagagaatcagagatctcaaggtataattcaaagaatcagagatcacactggatacttagtttctatctatataaaagtggtagttggtgttagacgcttccctgccgatgcggaagagctcgatgaggttgtagaactggccgtggatgtcaccacacatagtgacggggcaacgcacgggctgtacgttccactcctcgatgaggatcgcctttgcttgctcgcatagcgccttgacctccaccgccggcatgaacttgcaatcccgcagctgcgagatctggtggtccagatccatgggcaggatggcgggtggatctgtcgagatcctcggttcccttgcgacggaagcggatggtgggcggcacgataggcgagaggtagagtgggcagggaaacacgaagggcgggatggcgggtggggaaacgcggagctcgacgcgagaggggcgggttcgcagagctcggtcggccgagatcctcgcatgtcggcgaggagagcgggctgtaggttggcaaggcttacaacgaggagatcgagctggtggttgcctggttggtgcggagctcggccgaccgagatcgtcacgacgaggagggtggaggttgccgagcgcatcggggacgccgtagatcctggagcgcacgaaccggtggtagaacccctcgaggtcctcctcctccaacacggagacgccgtcgagggtgaagtcacgacacccgccggcatcgccgcgcacgcgcacggccgtcccgccccacgcgaactccagcgcggacgagacacccgaggcgaggttccggatgcggccgatcacctcgaccgggtgctccgtggcgccgccgccctcgtcggccctcctccaccgccatctcccatcgcgtccaccatgtgctcagcaggcgacggagtcgccaccaggtgtcgcggagtggctggaggcggagcagaccgccccgtcttcgccatagccagggctgcgatgggaagagagagactgctccgtctgcaggaatcggatgtgcaattgggaggggaggggacgggaggcagcgcggcggttgcgggtggaagctggcaagcggcagccgggacgatggagaccgcgggtcgggtggcggttggcaagcggcgggggcgctggagaccgcgaggtgctaaagattag

SEQ ID NO: 107227 - DNA, 337 bp, Zea Mays
ccatgccactggttacgcaacatacaacttccgttctctctggcgacaacacactaatcattaagggtaatcaaggaaacccacacaaatcaattgtactatagaagttggagtccatatacaaaccaaacgctcctagaactcaccttaacaatttgctggagctgttttatagtaaaactgaaaaactaaagctgaagtttttgaagcaaagctctctcaaacaagctcttatttctagaaattttataaaaatgaattaggaactaattataataattacattttgcaaccgacattactaatcgttttttcataacgccgtctacgtacatat

SEQ ID NO: 107228 - DNA, 228 bp, Zea Mays
agctatgcggaggctgttaaggaggcaccacgctcatcaacattgctgtcaagatcaactgtaatgaaagctggtccacaacaagtcctggattcactgtttaaaattcctgaaacacgcacgtatgagccaagttctatggactggaaaaaggtagtaaagaaactgcaaacaatcaattataccgctgcatcaaacaatcacgaaaggcctaaggatggtatgtaa

SEQ ID NO: 107229 - DNA, 1448 bp, Zea Mays
cgctgcggctgtttgtctggcaccggaaagaaaaaatccttctcggctcggcacaccgctgccggccatcgccgcagccggagatggaggacatcgaggacgtgctgggcccggtcggcctctctgtcggcggagcgcctccggtgctccgcctcctgctagcctccgtcgcggcaagctcaagcgccggtcgtccagggctgcgcatgcgcggcctcagctcgaggcccggatccccggcacgcagacgattcacgtcaagactatcgggtgctcacataaccagagtgacagtgaatacatgtcaggtaagaaagaacaagtttattgagattcttcctattaatgttggatgcttgggtgcctgcacatactgtaaaacaaagcatgctcgtggacatttgggaagctatactattgacagctttggatcgtgtgaaaactgttgtcggcttgtcgctgaaggtgtccgggagatttggttgagtagccagtagcgaagataccggtgcttatggacaggatatcggtacaatcttccaaatttgttaaacacgattgttgcggagcatcctgttgaccgaagcacattgctccgcataggcatgacaaatccacctttcatactagagcatctgaaggagatatctgccgttttgcgtcacccctgggtttattcgttcctccatgttcctctgcaatctggaagtgatgctgttttaacggcgatgagtggtgaatacactgttggcaagttcagaaaggtagttgatgctttgtgtgagcttgtccctggaatgcaaattgctacagatattatctgcggctttcctgggacgccctgctgctaggatgaagaaggtatcgagcaatgaagtgaaaaaagcggagtcgtgaactgacttcagttttcgaatcattgtcaccgtaccaaggaatggtaggcaaagtagagaggatctggatcactgagatcgcgaccggtggtgttcgcttggttgggcataccaagggatacatccaggtgctggtaattgcccctgatagcatgttaggagcgtcagcaaatgtgaaggttacatctgttcggcgacgtctttggtgaagtggtggaagaaggatctgttgcggcaggagaagcaccgaagcgaactagcgcgacttgtagtggtggttcttgagcgagcgtgtcgatggtcgattttggcggtttgttttgtttactcggtctgttctgtatggcgttgcaaaattgtgctactgtacaaatacatggttgcgaacaggttaacgcggagtcttctgatgctgcgtcacgacggatcagggtttgatgaaagtgaagaacatggtgcgatttgctaccgtgttcggaaaaatttggtagtgcatcgaaacccaaggcgtgacgtgttctctgtgtcatcactttaaaaaaaaaaagaaaa

SEQ ID NO: 107230 - DNA, 1520 bp, Zea Mays
tgcgctgcggctgtttgtctggcaccggaaagaaaaaatccttctcggctcggcacaccgctgccggccatcgccgcagccggagatggaggacatcgaggacgtgctgggcccggtcggcctctctgtcggcggagcgcctccggtgctccgcctcctgctagcctccgtcgcggcaagctcaagcgccggtcgtccagggctgcgcatgcgcggcctcagctcgaggcccggatccccggcacgcagacgattcacgtcaagactatcgggtgctcacataaccagagtgacagtgaatacatgtcaggtcagctctctgcatttggatatgcaatcattgaagagcccgaaggagcagatttgtggctaattaacacgtaagaaagaacaagtttattgagattcttcctattaatgttggatgcttgggtgcctgcacatactgtaaaacaaagcatgctcgtggacatttgggaagctatactattgacagctttggatcgtgtgaaaactgttgtcggcttgtcgctgaaggtgtccgggagatttggttgagtagccagtagcgaagataccggtgcttatggacaggatatcggtacaatcttccaaatttgttaaacacgattgttgcggagcatcctgttgaccgaagcacattgctccgcataggcatgacaaatccacctttcatactagagcatctgaaggagatatctgccgttttgcgtcacccctgggtttattcgttcctccatgttcctctgcaatctggaagtgatgctgttttaacggcgatgagtggtgaatacactgttggcaagttcagaaaggtagttgatgctttgtgtgagcttgtccctggaatgcaaattgctacagatattatctgcggctttcctgggacgccctgctgctaggatgaagaaggtatcgagcaatgaagtgaaaaaagcggagtcgtgaactgacttcagttttcgaatcattgtcaccgtaccaaggaatggtaggcaaagtagagaggatctggatcactgagatcgcgaccggtggtgttcgcttggttgggcataccaagggatacatccaggtgctggtaattgcccctgatagcatgttaggagcgtcagcaaatgtgaaggttacatctgttcggcgacgtctttggtgaagtggtggaagaaggatctgttgcggcaggagaagcaccgaagcgaactagcgcgacttgtagtggtggttcttgagcgagcgtgtcgatggtcgattttggcggtttgttttgtttactcggtctgttctgtatggcgttgcaaaattgtgctactgtacaaatacatggttgcgaacaggttaacgcggagtcttctgatgctgcgtcacgacggatcagggtttgatgaaagtgaagaacatggtgcgatttgctaccgtgttcggaaaaatttggtagtgcatcgaaacccaaggcgtgacgtgttctctgtgtcatcactttaaaaaaaaaaagaaaa

SEQ ID NO: 107231 - DNA, 1450 bp, Zea Mays
cgactgcgagtgatagccaggtggaggaggcgcaggcaggggaggaagacaaacacacagacacaggctccaccccgcacgtcgggcgtgagggaagggaccagccccaccaccggaccacttggttgggtcgggagacgacgcaggacatgatggatcacctgagcctggtgccctacgatggggccggcggcggcggcgacgccgcgggcggcaagtacaaggagtgcatgcgcaaccacgcggcggccatgggcgggcaggcgttcgacggctgcggcgagtacatggcgtcctcgccggacacgctcaagtgcgcggcgtgcgggtgccaccgcagcttccaccgccgcgcgctggcggcggcgagcccgtgcgcgccgcccgtcttcttccgcccgccgccgccgcccgcgctgcccgcgccgccgcagcagcacttccaccaccatcaccaccaccaggccgcgctgcagggcttcctcccgtcggtgccggtgccggtgccagcgccgccgccgcacctcgcgctgccgtaccacgccgtgcccaatgccgccgccgcgcccccgtggctcgccgcgcgcgccggctccgagacgccgccgcgcctggacgacttcggcgtcggcctcgcgcccggcagcggcgcgggcagcggcagcggcagcttcgggcgcaagcggttccggaccaagttcaccccggagcagaaggagcggatgcgcgagttcgcggagaagcagggctggcgcatccagcgcaacgacgacggcgccctcgaccgcttctgcgacgagatcggcgtcaagcggcaggtgctcaaggtgtggatgcacaaccacaagaaccagctcgcctccaactccgtcgccgcggccgcagccgcgggcatcggcctcagccccgccgctggcgccggcaccgccaccggcaccggaaccggcgtcggcatcaccggcgacggagacgacgacgacgatgacgacaccgacgactccccgccacgcgccgctgtctcctccccttccccgtctcccatcagcgtctagcagcccagccgacgaccgaaggcactttcccactcttgcgtcttgcctcgcgcgcctaatcggctccttttaatcactcttaggttcatgtaacagttaattagctctaggtaaccgtcagccgttcactagctacgtactactactacttctgcaagtacaaccccctcgttcccatgttaaccctccttgcctcctctgacgcggccgtgtgcccgtgtcacgggtggcatatctgtcactttcttctcctgctgtctactctttattaatttcattcgtagtcttaaattattattaggctctgctgtggccgcactgtctcctcctaatctcgtactgtcacctgggactaatgatgatctgatccgtgcgggagcttcggagtcagtgcctgg

SEQ ID NO: 107232 - DNA, 2348 bp, Zea Mays
cagcttgtgtatttgcctgatcgaaagcgggaatactttgtagatgacgatgatgttagtcttgattcagaactttcgcttgaagggaaacttgatctgaacaatccagaggagtcagccaggtttggcagaaggaaccacaaacgtggaatgcttggctggtttaaactaaagaagtccgaccagttatcagggctatcatccagtgtagacggtgatagcactgctagcgtctcaccttcgtgctctaaatcatcacaacaaaaacacttgctgcttgacctgaaggatggtcgaaggaaatctatgactaggaaaggagatgacccatcacttgctgattcttttcttgaaaggactcaagccggtgatttatttagtgctgcgcccagagtacggcaccctctgccgagtggaacaaccatcgtggatcaaatagatcttctacaagagcaggtcaaaatgctggctggggatgttgcactttgtacaagctcactcaaaagattgacagagcaagcagccaacaaccctgataatttgcaaattcaggcaaattttctgattgtcctgtaaccaactacacaaatttcatgttttttataaatatttttcttccttttatttcttctgcaggagcaaattgtgaggttgaaagatgaaatcgcagaaaagaaatcacatatacatatgctagagcagcggatggtacaatcactggaaactacagaaggcccagcaattaagacagagttatcccagaccttttcaaagttgagcacgcagctgagtgagaagacatttgaactggagattatgtctgcggataataggattcttcaagaccagctacaagcaaaggtaacagaaaatgcagaactccaagaaacagttgcacacttgaggcaagaaatcagtaatttatcgaaggctgcaaaaagcgaggatagttttgctagcgtgcagtctagtgaaccatcaacagcaagcactgatactagggatcaaacaaatgaaatctcaaaccgtgcaaatatgtcctctagaacaacggacttaaatgagtcaggatttatatctcaagtgctcaaacaggcttcagaaattgaaagtttgaaacaagaaaatctgaggttggtggaagagaaggatggactggaaattcatagtcaaaagttggcggaggaatcatcctatgctaaagaattggcttctgctgctgcaattgaacttaagaatttggcagaagaagtcactaggctttcttatgaaaacgcaaagctgaatgcagacttagctgcggcaagagagctaaatgcatcgatgtcaagaagtaacatccaccctgacccaaagcgtcgtgatcatgagagcggaattttagttgaggagttgcagaaagagttggttgctagttgtcaaagggaggccgtattagaggacacactatctcaaaaggaccgaagagagagtgagcttctaaagattattgatgatgcaaaatgccgtgagcatgagttgaaaaatgaactggcaagcatgggggcccttctttcgaagataaagaaagaaaactctcaacaggatgtatttgaatttaaagcaaagcaaaacggctttcactcatccaagactgatagtggtagactggtaagtgaaatgcaagcatcggataatgggtgctgggatggcctcagtacttttgaagaagcaagagctgcatacaattttgaaagaatgcgctgcaaggaattggaaagcatcgtgtccaaactaaagggtgaggacctcaggggcctagatgttaaagttcttgaagaactacaaaacttccatgtagaagcactgtcaaggatctgccaagaaaagatggcaagtcaggcgctatagcaaaaacctttcctgagacgagtagccgctttcatgcaggccagagcttatttctcagatgtcccttcaacttcatgcccatctctctgaagttccactcacaatttcacatagttgctgctactgcaaccgggacaaccttgattagtccgcctttggacactgattcctgcgtttaaccgacagaaaacgaagcaaaatgcggttagatagcaggcgctaatggtcactgagtagttagcatgcagatactcccctcctgtacagctttttattaaagatagtagcagtggtattgtaggagtacccggattgtatttatactggtaatatatgagccggtaaaacccgaaggtggtgtttctgttatacctggaccgtgctctgcccttcaaaaactgtagtaaacccgaacggacgctgatgtagctttggcaaacttgctgttgatgtgatgc

SEQ ID NO: 107233 - DNA, 158 bp, Zea Mays
gatccaacagggcagaatctcagaattcgagaagatgcacagggaacttatgtggaagggatcaaagaagaggttgttttatcacctgcacatgcgctctctctaatagcatctggagaaggtatttgtttctagctagagaagatcattcatcttta

SEQ ID NO: 107234 - DNA, 648 bp, Zea Mays
atgtcgtcgtcgaggccgacgcgttccagtatatccccattccgatcccgccgctcggctccggcggtgtcggcagcgggacctcctccgccggcgaggacctcatctgggggtcgcccgtccaccccctcttctactgcctctgggcgacccaccaccccctcgtcctccggtggtcgccccgctaccccgtccgccgcgttcgcgcgtcccgccaccccttcgtcgtcatcggcgcggcccgccacgccgtcctctaccgcctccgcgcggcccaccacgccctcgtcgatctcctcgcgcgttgcggtgagggcgccgctcgtggacgcggccaatgccaaggagaacatcatggtcaccgtccgcttccggcccctcagtcctagagagatcaacaagggggacgaggtggcgtggtacgcggatggtgacaacatggtgcgcaacgagtataacctcagcatcgcctatgctttcgataaagtgtttggccctgctactacaactcgccatgtatatgatattgctgctcagcatatttcaattcctatgctagccagtagaaacatatccgatgaacttcataaacaacagatatgggctgtggacaatgcggaaaaggaactgtttttgcatatggagtaa

SEQ ID NO: 107235 - DNA, 2426 bp, Zea Mays
gcccctcctctctccaagagccgccgcggctgctccccccctagcaaacccgccgccaccccattcgcccgccgcgcggcgccggccaaccgcgccttcttctcgccttcgctagctcgcgcgcgcgtcggcctccgcgccgcgccctcttcgctcccacagaaggcgagggcagtgaggtgcgcggctgtggcgatggcgtctgacgcggctcaggtgaaggccgcacgcgaggacatcagggagcttctcaggacgactcactcccaccccatcctggtccgtctaggatggcatgatgctggtacgtatgacaagaatattgaggagtggccacaacgaggtggagctaatggaagtttaagatttgatgttgagttgaaacatggagccaatgctggtctgataaatgctctaaagcttatccaaccaatcaaggacaagtaccctagtatcacttatgcagatttatttcagttggcaagtgctacagcaattgaggaagctggtggcccaaagattccaatgaaatacggacgagttgatgttacaggacctgagcagtgcccccctgaggggaaacttcctgatgctggcccaagttcacctgctgaccacttgagggaggtattctacagaatgggccttaatgacaaggaaattgttgccttgtctggagcacatacacttggaaggtccaggcctgaacggagtggctgggggaaaccagaaacaaaatatactgtatgttcttatcttctttatgtgaggtgtaaagcaggaacaccagctaggaagtctgttttgagcatgaattgttccatacggtgtctttatcaaggattgcattcaacaacaacaacaaaaacttttagtcccaagcaagttgggataggttagagttgaaatccaacaaagaccacaagtcaaggtttaggcacatggacagctgtttttcatacacttatatttaaggctaaatttttgagtaaattctatcctttctagtatttcaagtctcattttactgtctctttccatatcaactttggccttctactgtctcttttaccattgctatcgtgccttaggatttgaccatgcactagtgtctttggagttgtacattgatcatgttcaaaccatctcaaccggtatttgacaagcttttcttcaattggtgctacctctagtctatcatgtatatcattgttctggactcgatctttcttgtatgaccacaattccaacacaacatacacattttcgtaacacttttatctttttgtaggccaatattctgcatcatacaatatagcgggtctaatcactgtcctataaaacttgtattttatcttctgtggtcctctcttgtcacatagaacgtcagatgtttggcgccaattcatccattctgctttgattttatggctaacattttcggcatcatcgctctctttgtagcattgatcctaaatattgaatggtatccttccgggttactacttgaccttccaaactacatgaccaaggattgcgttgcatttataattttgcaataagaggaacattgcaatttcttaatgctttggtacattgcacctgcacaactccaagaattgtctttaacctttctgggatgattttgtgcaatatttatgtaccgcctaagctctgtgcaacatgtattgtctctttgtcttcttacttcgcttgcttgattaagtcaaatttgttgcattgtgtatgtgaataaattgagcttgtcttgtttatcttatgagctcatctactatgtcttgttactctttacagaaaaatggtcctggtgcacctggtgggcaatcatggacagttgaatggctgaggtttgataacagttacttcaaggatatcaaagagaaacgagatcaggatcttctggtcctacctacagatgctgctttatttgaggacccaaagttcaaggtctatgcggagaaatatgcagaggaccaagacgcattcttcagagactacgctgaggctcatgctaaactgagcgaattgggtgcaaagttccaaccaccgcagggattctctttggatgattagtgcggcaccagaaccacagtccgtgaaacaggaaaaccctgtccttgaaaaggatcaagagggagcatacaattcattgttcttctcatatcatcgtacaagatggactggtcccccttttcatgatgctatatggagtcttctaatttagctagatttctgaaccgagcttgcaaataaaaaagaaccgacacagtggcactacataattttcagatccattgggagaactgacacagtgctatcagatttggttttatcccttccacatgacgctctgcgctgctgtcaattttctactattagcaccatggttgttgcttccctcctgc

SEQ ID NO: 107236 - DNA, 1455 bp, Zea Mays
gtggaatcgagtcaaatcgaccacttctctggcaagcccgcaggccgcagcccctcctctctccaagagccgccgcggctgctccccccctagcaaacccgccatggccgagcgcctcgcagcatccgccgccaccctccgcgcctcggccgccgccaccccattcgcccgccgcgcggcgccggccaaccgcgccttcttctcgccttcgctagctcgcgcgcgcgtcggcctccgcgccgcgccctcttcgctcccacagaaggcgagggcagtgaggtgcgcggctgtggcgatggcgtctgacgcggctcaggtgaaggccgcacgcgaggacatcagggagcttctcaggacgactcactcccaccccatcctggtccgtctaggatggcatgatgctggtacgtatgacaagaatattgaggagtggccacaacgaggtggagctaatggaagtttaagatttgatgttgagttgaaacatggagccaatgctggtctgataaatgctctaaagcttatccaaccaatcaaggacaagtaccctagtatcacttatgcagatttatttcagttggcaagtgctacagcaattgaggaagctggtggcccaaagattccaatgaaatacggacgagttgatgttacaggacctgagcagtgcccccctgaggggaaacttcctgatgctggcccaagttcacctgctgaccacttgagggaggtattctacagaatgggccttaatgacaaggaaattgttgccttgtctggagcacatacacttggaaggtccaggcctgaacggagtggctgggggaaaccagaaacaaaatatactaaaaatggtcctggtgcacctggtgggcaatcatggacagttgaatggctgaggtttgataacagttacttcaaggatatcaaagagaaacgagatcaggatcttctggtcctacctacagatgctgctttatttgaggacccaaagttcaaggtctatgcggagaaatatgcagaggaccaagacgcattcttcagagactacgctgaggctcatgctaaactgagcgaattgggtgcaaagttccaaccaccgcagggattctctttggatgattagtgcggcaccagaaccacagtccgtgaaacaggaaaaccctgtccttgaaaaggatcaagagggagcatacaattcattgttcttctcatatcatcgtacaagatggactggtcccccttttcatgatgctatatggagtcttctaatttagctagatttctgaaccgagcttgcaaataaaaaagaaccgacacagtggcactacataattttcagatccattgggagaactgacacagtgctatcagatttggttttatcccttccacatgacgctctgcgctgctgtcaattttctactattagcaccatggttgttgcttccctcctgc

SEQ ID NO: 107237 - DNA, 976 bp, Zea Mays
ctcatcgtattatcctcaaattatgtataactccgagactgaacaagggagcatgcttttatccattttgtgatgtggaacattttatgccagggttgcacttggtattggggaacaagtctattcaattcttcttttaaccattttctttgttgaggtttcagtgattggttacataccttactttggcaaggcaatgaacttcctgctcctgtcattgatgtatgcctactactgctttgagtacaagtggaacttctttgcagtgagtctgcatgagaggcttgatttctttgaatcaaactgggcgttctttgctggatttggtgctccatgcgtccttccaattttcttcttctctcctcttataagctatgggtttctggctatactttatccgttgtttgtcttgactgccgcaggcactcaagctgagcaagtaattgatgcactgaaacctgcacacgaagggaaactacaaagaatacctgtgttctttgtcgcaaagcgactgacgacaaaagtactgcaactgtttccggtggcacagaaagaacaatgaaggatccacagaaacaaaccaaggagggaaggccgctgtgtgtgttgggtgtgctgctaatcacaatgccccgctcgaacgaacgttgcatccgtaaggtgcgcacgccctctccgctctccgtaacgtggaagggaggggcttgccgccttcacgctgtaaatatcctgtaacaagcatttctgtcgaatgggaactttgaaaatatagagaattgcactttgttatttagcaagtgttgatcattcaagattaggccggcgagtcggcggcaccaaccagtaatgattggttccttggtttcatcttggccatgacagaacagtagtgctctctctctcttttctttttgctgaatgtataactcaagccgcccttgagattaattattattgagaggctgctagctttcgt

SEQ ID NO: 107238 - DNA, 1480 bp, Zea Mays
cgccttctggctcagatacttcgaatccaagagtcggatgattgccgatcaaataaatcatgctcgcgaagtaaatccaaaggtgagacgcttccccttctcctcgccgatggagtcgcttgcctcgcaagcgaggccggcggcggtgctctggctcgccggcttcttccaggccgcgcgcctccaccgcgttgtctccttctgcgccagctcgagggcactatccatcaggattgcacagtgcttcctgctgaacgggcttatcttccttgggagcttgcttacacttacatcggtggtcattccaactctactgtggatactacctgagcgatgcaatcaaacagcaggacatctttgtgaacacagggcagccgtatctatctattcattcttgcgctccggccttgttgagattttttatgtattttggttttatccactttatgtcttcagcttcatattaagtacgatttggtataatgacattgccaagcatgcattggatgttgtgaaaagtaagagcctagttttgactcaatcactggatgctcacaacataactgaaacaaaagagcagcctgaaggatttgacagggttgcacttggtattggggaacaagtctattcaattcttcttttaaccattttctttgttgaggtttcagtgattggttacataccttactttggcaaggcaatgaacttcctgctcctgtcattgatgtatgcctactactgctttgagtacaagtggaacttctttgcagtgagtctgcatgagaggcttgatttctttgaatcaaactgggcgttctttgctggatttggtgctccatgcgtccttccaattttcttcttctctcctcttataagctatgggtttctggctatactttatccgttgtttgtcttgactgccgcaggcactcaagctgagcaagtaattgatgcactgaaacctgcacacgaagggaaactacaaagaatacctgtgttctttgtcgcaaagcgactgacgacaaaagtactgcaactgtttccggtggcacagaaagaacaatgaaggatccacagaaacaaaccaaggagggaaggccgctgtgtgtgttgggtgtgctgctaatcacaatgccccgctcgaacgaacgttgcatccgtaaggtgcgcacgccctctccgctctccgtaacgtggaagggaggggcttgccgccttcacgctgtaaatatcctgtaacaagcatttctgtcgaatgggaactttgaaaatatagagaattgcactttgttatttagcaagtgttgatcattcaagattaggccggcgagtcggcggcaccaaccagtaatgattggttccttggtttcatcttggccatgacagaacagtagtgctctctctctcttttctttttgctgaatgtataactcaagccgcccttgagattaattattattgagaggctgctagctttcgt

SEQ ID NO: 107239 - DNA, 1459 bp, Zea Mays
cgccttctggctcagatacttcgaatccaagagtcggatgattgccgatcaaataaatcatgctcgcgaagtaaatccaaaggtgagacgcttccccttctcctcgccgatggagtcgcttgcctcgcaagcgaggccggcggcggtgctctggctcgccggcttcttccaggccgcgcgcctccaccgcgttgtctccttctgcgccagctcgagggcactatccatcaggattgcacagtgcttcctgctgaacgggcttatcttccttgggagcttgcttacacttacatcggtggtcattccaactctactgtggatactacctgagcgatgcaatcaaacagcaggacatctttgtgaacacagggcagccgtatctatctattcattcttgcgctccggccttgttgagattttttatgtattttggttttatccactttatgtcttcagcttcatattaagtacgatttggtataatgacattgccaagcatgcattggatgttgtgaaaagtaagagcctagttttgactcaatcactggatgctcacaacataactgaaacaaaagagcagcctgaaggatttgacagggttgcacttggtattggggaacaagtctattcaattcttcttttaaccattttctttgttgaggtttcagtgattggttacataccttactttggcaaggcaatgaacttcctgctcctgtcattgatgtacaagtggaacttctttgcagtgagtctgcatgagaggcttgatttctttgaatcaaactgggcgttctttgctggatttggtgctccatgcgtccttccaattttcttcttctctcctcttataagctatgggtttctggctatactttatccgttgtttgtcttgactgccgcaggcactcaagctgagcaagtaattgatgcactgaaacctgcacacgaagggaaactacaaagaatacctgtgttctttgtcgcaaagcgactgacgacaaaagtactgcaactgtttccggtggcacagaaagaacaatgaaggatccacagaaacaaaccaaggagggaaggccgctgtgtgtgttgggtgtgctgctaatcacaatgccccgctcgaacgaacgttgcatccgtaaggtgcgcacgccctctccgctctccgtaacgtggaagggaggggcttgccgccttcacgctgtaaatatcctgtaacaagcatttctgtcgaatgggaactttgaaaatatagagaattgcactttgttatttagcaagtgttgatcattcaagattaggccggcgagtcggcggcaccaaccagtaatgattggttccttggtttcatcttggccatgacagaacagtagtgctctctctctcttttctttttgctgaatgtataactcaagccgcccttgagattaattattattgagaggctgctagctttcgt

SEQ ID NO: 107240 - DNA, 1582 bp, Zea Mays
cgccttctggctcagatacttcgaatccaagagtcggatgattgccgatcaaataaatcatgctcgcgaagtaaatccaaaggtgagacgcttccccttctcctcgccgatggagtcgcttgcctcgcaagcgaggccggcggcggtgctctggctcgccggcttcttccaggccgcgcgcctccaccgcgttgtctccttctgcgccagctcgagggcactatccatcaggattgcacagtgcttcctgctgaacgggcttatcttccttgggagcttgcttacacttacatcggtggtcattccaactctactgtggatactacctgagcgatgcaatcaaacagcaggacatctttgtgaacacagggcagccgtatctatctattcattcttgcgctccggccttgttgagattttttatgtattttggttttatccactttatgtcttcagcttcatattaagtacgatttggtacggattctcatcgtattatcctcaaattatgtataactccgagactgaacaagggagcatgcttttatccattttgtgatgtggaacattttatgccaggtataatgacattgccaagcatgcattggatgttgtgaaaagtaagagcctagttttgactcaatcactggatgctcacaacataactgaaacaaaagagcagcctgaaggatttgacagggttgcacttggtattggggaacaagtctattcaattcttcttttaaccattttctttgttgaggtttcagtgattggttacataccttactttggcaaggcaatgaacttcctgctcctgtcattgatgtatgcctactactgctttgagtacaagtggaacttctttgcagtgagtctgcatgagaggcttgatttctttgaatcaaactgggcgttctttgctggatttggtgctccatgcgtccttccaattttcttcttctctcctcttataagctatgggtttctggctatactttatccgttgtttgtcttgactgccgcaggcactcaagctgagcaagtaattgatgcactgaaacctgcacacgaagggaaactacaaagaatacctgtgttctttgtcgcaaagcgactgacgacaaaagtactgcaactgtttccggtggcacagaaagaacaatgaaggatccacagaaacaaaccaaggagggaaggccgctgtgtgtgttgggtgtgctgctaatcacaatgccccgctcgaacgaacgttgcatccgtaaggtgcgcacgccctctccgctctccgtaacgtggaagggaggggcttgccgccttcacgctgtaaatatcctgtaacaagcatttctgtcgaatgggaactttgaaaatatagagaattgcactttgttatttagcaagtgttgatcattcaagattaggccggcgagtcggcggcaccaaccagtaatgattggttccttggtttcatcttggccatgacagaacagtagtgctctctctctcttttctttttgctgaatgtataactcaagccgcccttgagattaattattattgagaggctgctagctttcgt

SEQ ID NO: 107241 - DNA, 1982 bp, Zea Mays
cgccttctggctcagatacttcgaatccaagagtcggatgattgccgatcaaataaatcatgctcgcgaagtaaatccaaaggtgagacgcttccccttctcctcgccgatggagtcgcttgcctcgcaagcgaggccggcggcggtgctctggctcgccggcttcttccaggccgcgcgcctccaccgcgttgtctccttctgcgccagctcgagggcactatccatcaggattgcacagtgcttcctgctgaacgggcttatcttccttgggaggtaccgtcgttcgtaattgattttgatcctcgattgaattttgtattttttgttactatggtgtgtggaagacttagaattattagagcatgtgagcagggtgtcacaattttttgctcttaagtgttgttcttagttgtcatgtgtactgaaactacatgtgtagcatggcaaatatcagtaaaatgctctgtggttagaatgccgccatgcatttggatgtaggtttgcacgatgaaatagcaaagtggactggatggagtttgatgtgctattcggagtcacagagcatagtgggcttttgatttgtcttagttctctatcacttcagttgtccaattacaatttcttaagcttgaggagattatattatgcatatcatgccagcacttctctgctgatatttctctgaatgttcctccttagctcttctgtgttctttacttctttcttgtgaataccatttaaatatttcttgtgcttcatagcttgcttacacttacatcggtggtcattccaactctactgtggatactacctgagcgatgcaatcaaacagcaggacatctttgtgaacacagggcagccgtatctatctattcattcttgcgctccggccttgttgagattttttatgtattttggttttatccactttatgtcttcagcttcatattaagtacgatttggtataatgacattgccaagcatgcattggatgttgtgaaaagtaagagcctagttttgactcaatcactggatgctcacaacataactgaaacaaaagagcagcctgaaggatttgacaggtagttgtattcatgtagaacttgttcgtgcctaattgcatctctgtttgctgatatttttatattagggttgcacttggtattggggaacaagtctattcaattcttcttttaaccattttctttgttgaggtatgattgatgattctatctttcccgcatgtgccactggataaccagttccacatttcatatctatttgaactttgtttctcctggtcttcttggcttgtcagttagtaattcttatatatttgcatatgtaggtttcagtgattggttacataccttactttggcaaggcaatgaacttcctgctcctgtcattgatgtatgcctactactgctttgagtacaagtggaacttctttgcagtgagtctgcatgagaggcttgatttctttgaatcaaactgggcgttctttgctggatttggtgctccatgcgtccttccaattttcttcttctctcctcttataagctatgggtttctggctatactttatccgttgtttgtcttgactgccgcaggcactcaagctgagcaagtaattgatgcactgaaacctgcacacgaagggaaactacaaagaatacctgtgttctttgtcgcaaagcgactgacgacaaaagtactgcaactgtttccggtggcacagaaagaacaatgaaggatccacagaaacaaaccaaggagggaaggccgctgtgtgtgttgggtgtgctgctaatcacaatgccccgctcgaacgaacgttgcatccgtaaggtgcgcacgccctctccgctctccgtaacgtggaagggaggggcttgccgccttcacgctgtaaatatcctgtaacaagcatttctgtcgaatgggaactttgaaaatatagagaattgcactttgtt

SEQ ID NO: 107242 - DNA, 177 bp, Zea Mays
gttgaacggatatttgctgatagggtcatcaaagctgatggagatgatctggttcctgaatatttagtcaaatggcaaggacttccttatgcagaatccacctgggaaaaagatacagatatcgattttgctcaagatgcaattgatgaatataagacaattgaaaatgagaattga

SEQ ID NO: 107243 - DNA, 1753 bp, Zea Mays
actcctcagcaccgcacccatacataggtgccggactcgtcccagcgaagaaccggacgagcgagcaagaggcctcctcctcaagcttcgaatcctccccttccgcgctttccctccccctcctcctcctcccctttccagtccccaccccagcgaagcttccaaagccgccccaaccccaacggccgcccggcccgatcgagcagacagctgccgcggccctccccgccccgcacgcgacctcggagccatggagaagtacgagctgctgaaggacatcggcgccggcaacttcggcgtggcgcggctcatgcggaacaaggagaccaaggagctggtcgccatgaagtacatcccccggggccaaaagatcgacgagaatgtggcgagggagatcatcaaccaccgctcgctgcgccaccccaacatcatccggttcaaggaggtggtgctgacgccgacgcacctggcgatcgtgatggagtacgccgccggcggcgagctgttcgaccggatctgcaacgccgggaggttcagcgaggacgaggcgaggtacttcttccagcagctgatttgtggcgtcagctactgccactccatgcaaatctgccaccgagacttgaagctggagaacacgctgctggacggcagcccggcgcctcgcctcaagatctgcgacttcggttactccaagtcgtcgctgctgcactcgaagcccaagtcgacggtcggcacgccggcgtacatcgcccccgaggtgctctcccgccgggaatacgacggcaagacagccgatgtgtggtcctgtggagtcactctttatgtgatgctggtcggtggttacccttttgaggacccagacgacccaaagaatttcagaaagacgatcgggaggatcatgtcaatccaatacaagataccagagtatgtgcacgtgtcgcaagactgcaaggagctgctttcaaggatctttgttgcaaactctgcaaagagaataacgatcagggagatcaggaaccacccctggttcctgaagaacctgcccagagagctcacggaggctgcgcaggccatgtactacaagaaagacaacagcgccccgacctactccgtccagtccgtggaggagatcatgaagatcgtggagaaggcgcggacgccgcctccttcctccacccccgtggctggcttcggttgggcggaggaggacgagcaggaggacagcaaggatccagacgaggaacacgaggacggcgaggacgagtacgagaagcaggtgaagcaagtccacgccagcggggagtttcatctcagctgctgagggttttcgccggcctgctagtctgtggtaccagccgatgatggacctgctagtctgtggtcttgttttcaagttttctttcatttttttctttcttttgctgtggtgccgcatgactgcaacagttgtaaattattgaagggggttccagcgttgcccttgtattgactcattcaagctagcatggggaacataattatggaataaaacaggtcgttgagcatgctgtcgatatgatttctgaaagcactggaatgtgctttcatgccaaccttcaagaattttccggtacaaatcacaagaactgctgatgtaatggttatcaggatacttgctgtggcgagttaagtaaattcgtggtcacttccgagggacgacaaacacataacaatataacaaaagatcttcaatcaatagaagacaatcacatga

SEQ ID NO: 107244 - DNA, 317 bp, Zea Mays
ctcctcaaacggaacaaacacagagggtgacaagcccctgctgtgggaaacagcaggcgcatctgggtcatgcgtctcatcctcctcccagccctcaacgagttctagtatgctacccttccagttttgcagttcagttgcattcactctaagcctgcaccctgcagaatgttggcgcaaatttcaaaggctaggaactggcaagaatcatcagagcctgtgcaacgtcgcaacgatttcatacaaaaatacctaaggtgcatcctgacaagcgtgcaccaccgccctggatacaggagagccatttctatctgcat

SEQ ID NO: 107245 - DNA, 3211 bp, Zea Mays
atggattgggcgcggcagaagggcgtgagcttgccgctgccgcgatccgagtacgagcccccgcggatgcattatcagcatgccggtagccgcagccgcatgccgccgttcgcacgcggcggcggcgcctacagccgcggacagaaacagttctacccgccgccacctcctcccctcccggcggccgcgctgcctctgctgccgcagaacaagcatgaggtgctcatggaagccggccgcctcgctgccgagtacctggtggcgaagggcgtgctccctcctggctccttgcagcagcgcggcagcacagtcgtcgctggtgggtggggccagctaccgcctccacctccaccgccgctttcggtgacacaggaagccccagcataccatatcgccaggaatagccggcggcagatcgatgatgagcgtggtattcgtaacgcccgctcacggcggaaccgtggtggcgactacagtagcagcaacggtagtaactataatggaagggggaaaaggaaatttggggctgacaataagtattcagattggacaaaggatagggggaggaacaggcggtattctgatatccggagttatgatgatgaggatgatgatggggctcctcctgggttcaaaagggagcgccaaagcggtggtgggattgacgaggttggtagtagcatgtcgggggtagcttgggaggggccatcatcgaaggtggaggcgatgggggagtcggagctggaggatactgggtcaaaggctagttctaacagcaatatccagcagaaagctagtgctttgcaagaggtggaggatgaaaatgaggcaaacaaaatgcaggagaacagtgtggtgtctaattcagacgtagctgagcaagcattgaatggtgaggataatagcaacaatgattcttctgctggtgttgaagaggcagggacaaaacatttgccagtatcctcaggtgaaaaggtctcagatgggaggcttgaacatagcggtgttctgaatgacaaggttgaagatgacagtactttgcatgagaagtctgaagatgacacaatgtcggaagaggtctctgttatggagagcaatttgcctaatgacgctagaaatttgctaaactattgtagttttgcaagagttccaacaagaccacgaacagtgcttgcaaacaggaatgttggaccaggtcaaagagaaattactgtgtctgaacagctcaatttggttacttctgaagaaatatccaatatggcaatggatggagaagctaacactaattccataactagcatcgaggaaggcagtaaagttgagctggttggccaagaccaagaacatgctgaacaaagcgctatctgcaatcaagtggcagaatcagtggcattccatgaaaaggaaactcgaggtgaaactgaagaaaaggaagaacagaagaacatccctcaacattatgaagttgaggataataaggagacaaacgaactgtgtcctacatttgcttcttctcagaataaccaaagcgctatctgcaatcaagtggcagaatcagtggcatcccatgaaaaggaaacacaaggtgaaactgaagaaatggaagaacagaagaacatccctcaacattatgaagttgaggataataatgagacaaatgaactgtctcctacatttgcttctcagaataacttcaatttgcaagttgagaaaggaatacaaatctacaatttagatacaccgccacaagatgaattgttgatcgatccacccgataaagggaaaacagttgattcggagttattacctaacatcaaagcagaagatgctgttacagtggaagaggaaaagattggccagtctagctcatttaaaatacgtgatctcaacctggttggtagtccagaggttgttgacatgcgaggtgaccctcgtttaggccaaagctctactgctggatgtccagtagacctacaagataatcaacaagttgagtttgaaacagctcttggtaacaacccgaataatactgacacatgtgccccctttctgttgggaaataagtcagttcaagttattgatatcgaagatgacataccaattgaagccggtgcttgtgacacgtcaaaatcaaaaggtgagatggtatattctagcatggagagcatgatgaacccgcctccggtgaacaccgatgctctacatggtatccaagatgggtatagtcttgcaatttcagattaccttggtgctgatatgtcatgctaccaatcaatacaagcagaacttcaagatgggatggacctaaacggttcagagggcattactgtgatggatgatccaatatacagttctcttagtgacataggttttatggaggtttgggaccagcaacctcaagactatgaaaagttcttctgaggcaccaactcgtgttgctgaaactgttctggagttcgactgataaataccagttatacttgcataggcagaaataaagcagtagatcgtgcctaacaaatagaatcccgtgtactcgtgcgacagcagcacctcatgcacttgtatgttccaggccatacatatgtgttcagacatatgtattcagactccctgccttgcccgacagtggtgtaaaaagtagtcgtatagctgtcatgtaattcaagggaattgacctaagcacgatagagcattcatccgaaacaattcttcatttgtaataaacagctctatattccaaattaaaagtgtttatttgttatatctatgttcttgttgtgctgtaagctgtgtgatttgtgtcttgtaaacctgtttggataggattataggaatcaatgcaaatcccttcgaataggtgtagttctttctaacaaacttcctttttaaatcaagaggtgaatgtgtgaaaaaggtctcaatggcaagaagtcagatgtaattcatgaaaaacactccccaatccaaggggtatgagtttctaaactagcccttagaggaggttctacatatcagtgtctctcgtccttttttgacaggtacaacacaattagagagagagaaaaaaaaatgaaaacgcggcacgaccgaggaggtgtgggcgagcagccggctgaggagacgcaggcacgagcgtgacctagaaacgtggccacaaagagaggcgccggaggagaaaatggtaggaagacgcgtacaggaacgaaga

SEQ ID NO: 107246 - DNA, 3039 bp, Zea Mays
cactctcaaacaaacttccttttattttctgtcaaataaaaacaaagcttatataattcaggcacaccaacccgactccgtttgacgcggctccgatggtcacaaccggcgccctcgtcgccggcgccgcagtcaacacctgagacctcgtcctgcctgcctggggttcgattcgcacgccctctgtttatttttatccattcctcatctccgattttgtttgctttatttgctctcgccgcatctgattccaccaccgcgggaatggattgggcgcggcagaagggcgtgagcttgccgctgccgcgatccgagtacgagcccccgcggatgcattatcagcatgccggtagccgcagccgcatgccgccgttcgcacgcggcggcggcgcctacagccgcggacagaaacagttctacccgccgccacctcctcccctcccggcggccgcgctgcctctgctgccgcagaacaagcatgaggtgctcatggaagccggccgcctcgctgccgagtacctggtggcgaagggcgtgctccctcctggctccttgcagcagcgcggcagcacagtcgtcgctggtgggtggggccagctaccgcctccacctccaccgccgctttcggtgacacaggaagccccagcataccatatcgccaggaatagccggcggcagatcgatgatgagcgtggtattcgtaacgcccgctcacggcggaaccgtggtggcgactacagtagcagcaacggtagtaactataatggaagggggaaaaggaaatttggggctgacaataagtattcagattggacaaaggatagggggaggaacaggcggtattctgatatccggagttatgatgatgaggatgatgatggggctcctcctgggttcaaaagggagcgccaaagcggtggtgggattgacgaggttggtagtagcatgtcgggggtagcttgggaggggccatcatcgaaggtggaggcgatgggggagtcggagctggaggatactgggtcaaaggctagttctaacagcaatatccagcagaaagctagtgctttgcaagaggtggaggatgaaaatgaggcaaacaaaatgcaggagaacagtgtggtgtctaattcagacgtagctgagcaagcattgaatggtgaggataatagcaacaatgattcttctgctggtgttgaagaggcagggacaaaacatttgccagtatcctcaggtgaaaaggtctcagatgggaggcttgaacatagcggtgttctgaatgacaaggttgaagatgacagtactttgcatgagaagtctgaagatgacacaatgtcggaagaggtctctgttatggagagcaatttgcctaatgacgctagaaatttgctaaactattgtagttttgcaagagttccaacaagaccacgaacagtgcttgcaaacaggaatgttggaccaggtcaaagagaaattactgtgtctgaacagctcaatttggttacttctgaagaaatatccaatatggcaatggatggagaagctaacactaattccataactagcatcgaggaaggcagtaaagttgagctggttggccaagaccaagaacatgctgaacaaagcgctatctgcaatcaagtggcagaatcagtggcattccatgaaaaggaaactcgaggtgaaactgaagaaaaggaagaacagaagaacatccctcaacattatgaagttgaggataataaggagacaaacgaactgtgtcctacatttgcttcttctcagaataaccaaagcgctatctgcaatcaagtggcagaatcagtggcatcccatgaaaaggaaacacaaggtgaaactgaagaaatggaagaacagaagaacatccctcaacattatgaagttgaggataataatgagacaaatgaactgtctcctacatttgcttctcagaataacttcaatttgcaagttgagaaaggaatacaaatctacaatttagatacaccgccacaagatgaattgttgatcgatccacccgataaagggaaaacagttgattcggagttattacctaacatcaaagcagaagatgctgttacagtggaagaggaaaagattggccagtctagctcatttaaaatacgtgatctcaacctggttggtagtccagaggttgttgacatgcgaggtgaccctcgtttaggccaaagctctactgctggatgtccagtagacctacaagataatcaacaagttgagtttgaaacagctcttggtaacaacccgaataatactgacacatgtgccccctttctgttgggaaataagtcagttcaagttattgatatcgaagatgacataccaattgaagccggtgcttgtgacacgtcaaaatcaaaaggtgagatggtatattctagcatggagagcatgatgaacccgcctccggtgaacaccgatgctctacatggtatccaagatgggtatagtcttgcaatttcagattaccttggtgctgatatgtcatgctaccaatcaatacaagcagaacttcaagatgggatggacctaaacggttcagagggcattactgtgatggatgatccaatatacagttctcttagtgacataggttttatggaggtttgggaccagcaacctcaagactatgaaaagttcttctgaggcaccaactcgtgttgctgaaactgttctggagttcgactgataaataccagttatacttgcataggcagaaataaagcagtagatcgtgcctaacaaatagaatcccgtgtactcgtgcgacagcagcacctcatgcacttgtatgttccaggccatacatatgtgttcagacatatgtattcagactccctgccttgcccgacagtggtgtaaaaagtagtcgtatagctgtcatgtaattcaagggaattgacctaagcacgatagagcattcatccgaaacaattcttcatttgtaataaacagctctatattccaaattaaaagtgtttatttaaaaaaaaatgaaaa

SEQ ID NO: 107247 - DNA, 2079 bp, Zea Mays
acaaatccaccaccgagcgttccactctcctcctgagctcctccagccagctcgccctcccaactcctgccgcactgagctcattgcacgctcctgtgcccctgcctcgtctagctccagcgctcggtgtccctcagcccagctgtgtctacgtgctgctcgctccgagctccctgtgccatggcgtcagccgcagttcaccgcgctcggcctcccgtcttgccgcgagtcccggctcgaatctccatggccgcaggcctctggtgccgcgcgcgtgcccttgtcatggtcctgcgcgtcctgcgtcttcttccccgagctcggccgccgagctctctgcgcgcgactctgctcttctgggtgcgcgcctgggtccctgctgagctcggcgtctatctctctatagctctagtttttccccagcacgctttcttccctgctcggccatgggagccgcgccgtcgaccctgcctgaatcccctcggccacgtcttccttcttgctccttgcgcgagccgcaaccctctgaccagtcccagccgaactccctccagtccaaccgctgctcctggctcgcccgtccgtgcggcacttcgtctatagccgctgtccgccgtcgagttcctgtacgcgcgcctctggttcgccactgctctctgcgcgcgcgctctgctcggcctctatggcgctcgacgtttagattttctgcgtgcagcttcctcaaatcaccgtgtgcctagctcgctccagctcgccggtcgagtttctccctcgcgttcagacccggccgttaacgcccagtcatgtgttctttttccccagctcggatctcatcagccaccgttctctaacccgtgtctcggtcggcatcgtggagttttggttgattggctcgccgttgacctcgtcggtgtcgtcgaacactcaatctcgttgaaccccgaatcccggacgttaggcaaaaataagcgaggtccgtgtgcatcgctcatcaagtgctcgacacaaagagctgaatcagaatccttgccgtgttcgcggatagcgcgtcagatttagaatggtacgataattaatcacgtgatgcggaagatgacccaagtcgaccccaagcgcgggctactccgcatggagatgctgatgaacgaacctgcctgatcaagtgctagaacaaggatgatcgctaagtggacgtcgtctaacaacactaacctagtgttacccaggcaagccccggtgcatgcaaccccttccttgtgtttttaaattatttttgcacactttaagtctagtgaaatgtgcattaggtttatagaagttgcttggaaaccctttgatgcattggctaccttgaaatccattccttttatagatacttctggtgaagtatcaaaatataatttacaaaaaatgcttagccctgcttataagcagatagagtttgtcctttgcacttatgcctagctcaggtttatcctgaggaaggatgacttctacctgcaagaatattttcagtgggagcatggtgggatcttactgcaaagttccctataatgctcttttcatccttaggaacacaaaacaatcctaagggtggaagtacttaactcgagacttgggctaggaacaagtgatgttccgtccgggtcaattaaggattggatgcgtatgtaggcctgatagatcaaggactatcttaactagccacatgccctggaaatgggacagggtaagcttgaacccggctattccatacgtgaaaagacaaccgcgcactgggcgtgggagatggtgggagtagcgtgtgccctcctggctagaggctggatggaggagtactgtgctcccgggtagcgcggaccggttcacgttgtggaggatctgtgggaacggttgacatatgcaagggttaagtgctacatatgtcgtgtggttagagatcctcagctgagtaaatcgattcggatcgccgttatatccccggagagtggagacttgatcactgacctgcaacctaagtcgggatgtgaacctcatgaataaaaatgatgttgtattgatgagatggtgaaattagac

SEQ ID NO: 107248 - DNA, 1227 bp, Zea Mays
acaaatccaccaccgagcgttccactctcctcctgagctcctccagccagctcgccctcccaactcctgccgcactgagctcattgcacgctcctgtgcccctgcctcgtctagctccagcgctcggtgtccctcagcccagctgtgtctacgtgctgctcgctccgagctccctgtgccatggcgtcagccgcagttcaccgcgctcggcctcccgtcttgccgcgagtcccggctcgaatctccatggccgcaggcctctggtgccgcgcgcgtgcccttgtcatggtcctgcgcgtcctgcgtcttcttccccgagctcggccgccgagctctctgcgcgcgactctgctcttctgggtgcgcgcctgggtccctgctgagctcggcgtctatctctctatagctctagtttttccccagcacgctttcttccctgctcggccatgggagccgcgccgtcgaccctgcctgaatcccctcggccacgtcttccttcttgctccttgcgcgagccgcaaccctctgaccagtcccagccgaactccctccagtccaaccgctgctcctggctcgcccgtccgtgcggcacttcgtctatagccgctgtccgccgtcgagttcctgtacgcgcgcctctggttcgccactgctctctgcgcgcgcgctctgctcggcctctatggcgctcgacgtttagattttctgcgtgcagcttcctcaaatcaccgtgtgcctagctcgctccagctcgccggtcgagtttctccctcgcgttcagacccggccgttaacgcccagtcatgtgttctttttccccagctcggatctcatcagccaccgttctctaacccgtgtctcggtcggcatcgtggagttttggttgattggctcgccgttgacctcgtcggtgtcgtcgaacactcaatctcgttgaaccccgaatcccggacgttaggcaaaaataagcgaggtccgtgtgcatcgctcatcaagtgctcgacacaaagagctgaatcagaatccttgccgtgttcgcggatagcgcgtcagatttagaatggtacgataattaatcacgtgatgcggaagatgacccaagtcgaccccaagcgcgggctactccgcatggagatgctgatgaacgaacctgcctgatcaagtgctagaacaaggatgatcgctaagtggacgtcgtctaacaacactaacctagtgttacccagg

SEQ ID NO: 107249 - DNA, 7277 bp, Zea Mays
ccattatataatgtgtgtgtgtttgtactatccactgcaccggcgagacgcgacggcgagtgctctccacttgtagcatccactcactcaactctccactccgctgatgatgatgcataagaagcggcagctctgagcccaagcgtcgattcagctcagcgcgcagctcacttcatccggcgtcgattcagctcagcgtaccagttggggccccgtcccggcggggtggaagggcgcgtgcgaggccggccaggcgttcagggcctccgcgtgcaaccggaagctcatcggggcgcgctctttcagcaagggcctcaagcagcgcggcatcacggtctcgcccgacgactacgactcgccgcgggactactacggccacggctcgcacacgtcgtccacggcggccggcgccgccgtcggcggcgcgagctacttcggctacgccaacggcacggccaccggcatcgccccgaaggccagggtggccatgtacaaggccgtgttctcgggagacacgctggagtccgcgtccaccgacgtgctggccgccatggaccaggccatcgccgacggcgtccacgtgatgtcgttgtctctggggttccccgagacgtcctacgacaccaatgtgatagccattggggccttcgccgccatgcggaagggcatcttcgtcgcgtgctcggccgggaacgacggctccgacgggtacaccatcatgaacggcgcgccctggatcacgaccgtcggcgccgcgagcatcgacagggacttcaccgcgaccgtcacgctcggcagcggcgcggccgtccagggcaagtcggtgtacccgctgagcacgccgaccgtcagcgcgagcctctactacggccatggcaacaggagcaagcagaggtgcgagtactccagcctgagaagcaaggacgtgagggggaagtacgtgctgtgcaccggcggcccgagcaccgagatcgagcagcagatggacgaggtgcagagcaacggcggcctcggcgccatcatcgcgagcgacatgaaggagttcctccagccgacggagtacaccatgccgctggtgctggtcacccagccggacggcgcggccatcgccaagtacgcgacgacggcggcagggtcagccagagccggaggaggggcgcccagggcgagcatccggttcggcggcacggcgctcggcgtcaagccggcgccgaccgtgtcctacttctccgcccgcgggccgggcctgatcagcccgacgatcctgaagccggacatcgtcgcgccgggggtggacatcctcgcggcgtgggtgcccaacaaggagatcatggagctcggaaggcagaagctctacaccaagtacgcgctcgtgtccgggacgtccatgtcgtcgccgcacgccgccggcgtggccgccctcctgcggtcggtgcaccctgactggagcccggcggccatcaggtccgccatgatgacgacggcgtacgtgaaggacagcgccagcaacgtcatcgtcagcatgccgagcgggtcaccgggaacgccgctggacttcggcagcggccacgtcagccccaacgaggccgtggaccctggcctcgtgtacgacgcggcggccgacgactacgtcgacttgctgtgcgccctacgctacagcggcagccagatatccaccatcaccgggcggccgaaccccagctgcgccggagcaaacctggacctgaactacccgtccttcacgatcatcctcaacaggaccaactcggccacgcacacgttcaagagggtactcacaaacgtcgcggccgcaccggctaagtacagtgtgtccgtgacggcgccggcagggatgaaggtgacggtttcgccgacggcgctgtccttcggcggcaagggcagcaagcagccgttcacagtcacggtgcaggtcagcaaggtgaaaaggaactcaaatgactacaactacgctgggaactatgggttcctgagctggaacgaagttggaggcaagcatgttgtcaggagcccgatagtctctgcatttgcccaatgaccggggaagacatgttagcaatgcacgaacaaaaaaataagactataaggtagaaaagataattattatatttacgattcatcctgatcaggaacattaagaaatatagatagactgaacaaaaggtggggagagcatcgacagatactgcagttgacaagtgtattttatacctgataaatcaaattataggtttctcaagtattatttttacactgataaatcaagtgtattttatacctgataaatcaaaaaaaatgcaaaatcctactcattctaaacttataccgaaggtacgaagtcattgtcagctgaacaacacgtgcaaatgattatccatatcacatcaaattcgtttgtcacccacagttaggttcttcaccatgttgttgatcatactaacactaaagaccgtcaagcatagattgggtattgttctgctgacagcatcaagtctgagatgatagtatgataccaacaggtaatgcctcaccaggtacccaaaggctcatgaagttttctgaagccttaaacactgataccagtacacctgactgatgatgacattgacagtgcactgtgcacggacccatggaatacgatataccacggtcatcaatcacatgttttcgtggttcatcatggcacattgtttcagctgttactggattcaacatcagccattaccaccataaactgtacagtcatgcactatgttagtctcagcacatgctattttgcatcagcagttacaaaacttacttgcatggttactttcctggtacccacttgatttcaaatgtttttcgagacctcttaggctcccaatgtacatgttcatatatgtcccagactagatggtataccagttgatatttatgaccaacactaccttcatgtcaattgcggaaagtgacccaatgattttcttatcatggcataagaggccagatgaagtccaagcaacagcagccatgaagtgctcgactagtcactgtggcagatggtgtccatgtactcaagaaccaagcaattttcttatgctaaggctgtatatcaggctcttaaatggtggacataacaagaaattacacagctgcaacacgtgcaccaaagaccaattccatttcagtatttcaccatgccgacttggggctgaaatggataccatgagttgtgacctcatgggcttctgctgagggaattgagtgctgaacaagatgcatggagattggtgacaccaagctgatcatccagtacacattcattctaccataaccattacaaacttacctggtgcatgtcatgcatgaaagtatgtgcagcaaccatcaagtctgccatgacaacatcatatttggtcaataatggcactaacaagatcaatagcattcgaactagagtaggcacaaccctgccatgtattgatgatagctgtgttacgttaacagttcaaccttaaattgtgcacctaatatttttagtaggagcaatgactatgacataccacaccagctccacccgtgcccaatcctgatacagagtacctttcctgatcattcttgagaagacaaaaaattaggaaaggctaaacatgatcttacagaaaatcacttaatctacatccaattaaaatatttacatgggcatccaaaccaacattaaaaaaacagtgttcagaaatatggaggcgatcaggaaaattggctttgcccgtgtgtgtcttcttaagtaatacaataggcagatcccctgctcgttcatttaaaaaatcgggaaaattagccaaaaatgtggtaatcatatagtgtaaactctaaaaaaggtatcatgtatgaccttagcagttagcacaagtagaagtattttttttttctggtatacgcaggagagctgcgcatctttgtattaatagaagaataagaaagggggagagaaccccattacagcacacacaccactagagactaactaaggatcaccgactaacatggaggaaacacaacccacaacgctgttttaagccagcaactcatcgacttggaggaaggacagggccttggctccagtcaaggaccagagcaccgcctcttccctagccaccctaagggctgtgaccaagctaggattacaaccatcaaaaacacatctattcctatgcttccaaatggtccaagcacctaggatcactaaagaattgaaacctttttctcaaaagatcagatgcacgggagctgctagacttccaccacgactaaaaggaatcctcatgagctggacacagctcctgcagccccgctgaactaaggaaatcaaaccagaactgcttggcaaaaacacatttgaccagcaaatgatttatggtttcagcctcttggtcgcacaaggggcacggatctggtcggtctagtcctcttttatgagcctgtcagcagtccagcacctattatgttccacaagccaaataaagaacttgcacttcccaggagcccaagatttccacacacgctctgctggttcgaactgaactgaaccaaggaagagagctttataagcagaactagttgtataatcacctgaagcgctgaatttccataaatgtcgatcccttattccaggctggagcacaactgcatcaagcacttcacaaagttccaggaattcagcaatgactctgactgaaattgccccattcacatcggagatccactggaaattggggagagcatctttgaccaaccgcctgttggcaagacgcaagggcacaaatcaaacattgcagtagctatgtccttaatacatctcccatccaaccatctgtccttccagaaaagggtattggctccatcaccgagcttagtaataatggctgcagcaatcagatttttaccaccttacaaacatgagtggggaagtccgtccaaggcctactgggatctgttttctgcaaccatggccaacgagctctcagagcccaacagaggctctttaactcactaatcccaagaccacccagctccttgggacgggtaaccttaggccaagcgaagaggcaatgaccaccacggaactctttcctgcccctctagaggaagaccttcctcagcttatcgattgctttaatggcccatacaggaaggtcaagtgccaaagctgcataaatcatctttgccatcatgacaaactgcacatgaaatagctctaccagccctggtcataagctcagctttccatcctggcagaaggctggccactctatcaacaatggcctgaacctggtcccttgtgagtttcttgggagacaaaggcaaaccgaggtacttacagggaaaatctgaaatattacatggcagcaagtcatgtaaacaattcacctcttcttccccacagcagattgggaacacactgctcttctggatattagtccttagacctgaagctgaaccaaataaatgaagaatatccataaccatactgatgtccagggcagtaggacttagaaataacactgcgtcatccacgtacaacgagatacggtgctgcatattccttgaagagagaggttgaagaaacccttcctcagaggctcgctgcacgagcagattcaagacatccattacaagaataaacaacataggcgatagaggatcaccctgcctcagtccgcgttgatgcccaatactttcccctggcagaccatttagtaaaatcttggtagaagaggtagctaacaacccgcttattatatcacaccagatctgtccaaaaccaagttttttcaagacctcgagaaggaaggcccacgataccgagtcaaaagccttagaaatgtcaagcttgagaagtatacgagcctgtttctgacaatgcaagaatctggtcgtctgctggactagcataaagttgtcaagaataaaccgtttcttaataaaagcggtttgattgggggaaaccatattttgcagccggcctgctaacctgttagccaacaatttagttaccaacttcgcgaaactatgaaccagacttattgggcggaagtctctcacactagtggccccctccaccttgggcagaagagtaatgaaagttgaattcagcgggcccaagtttctaaaatttctagcccaaatgcagtgaacggccgccatgaaatcagccatgattaccgaccaacaacttttgtaaaatctaccagtgaacccgtcgggacccggggatttgtccgaaggaagggccttaattgcatcccagacttcctcctccgagacaggcgcatcaagggcatcaaggtcataagatggcatccctagagcttccagatcaactgtaacatccctgacttctgcagttccaagtaacccttgataaaaattaaagaaggctgctgcctttccttcatgggcagtccagatttgcccatcctctgagtgtattgctgcaatgaaattctttttcttcctgaaccttgtttgtgcatgaaaaagagaggtattggcatccccttctttgagccacccaatccgcgatttcaaccttgccatggtatgagagatagaggacagggcaagggagtgcttcttgagcatgtttcggagccacaattcggcaggagataaggaacgattgtcctgcgccacctctaattgatgtaggagctccctagccatctcaagctgcagcttaatcttcccaacttttttgtcattccagctctgcagactcctagccgttgtctttaatttcttggccaaagtgataagtgggcaaggccctgctggaacaaacacccaagattgagctaccacatcatgaaatccctccatcctaggccaaaatgctagccatatataggtgtgataacctggaaagacacaaaactacctgcctaacaagtagaaccatgattttataaatatcccacattgaacagattgaagatggtagctaaaaaggtcatgttggcagtgcataccgtaaagatgtggctgaaaatttagccacgtatcaactataaagaagtagcaacagtagcaatcacatagtcacatggtggtgagacaaaccttttgataagaaaaaattcaaatggttagctgctgtagcatattaggtgtgatacaaagtgctacgtttagtgggaataaggatcgtgaaaactaagggcttgttcagttaatccatcccaatcctctccaatccccatgggtaagggattacc

SEQ ID NO: 107250 - DNA, 2746 bp, Zea Mays
ccattatataatgtgtgtgtgtttgtactatccactgcaccggcgagacgcgacggcgagtgctctccacttgtagcatccactcactcaactctccactccgctgatgatgatgcataagaagcggcagctctgagcccaagcgtcgattcagctcagcgcgcagctcacttcatccggcgtcgattcagctcagcgtaccagttggggctgcctctgacgcccgcgatcatgtttcccgccgcgccgttcggggccatcagcctcttgctgctggcgtgcgccgctgcggctgcggcggcggacggtgagcgtcgaccgtacatcgtccgcatggacgcggagaagatgccggcgccgttcgtggagcacgaggggtggtaccgctcggtgctgtcgtcgctgccgtccggcgcggcgccgccggttcacctgtacacgtacacgcacgtcatgcacgggtttagcgcggtgctcaactcgcggcagctggaggagctcaagggcgtggacgggcacgtggccgcgttcccggagacgtacggccggctgcacaccacgcacacgccggcgttcctcgggctggtgagtggcggctcgggcgtctggccggcgtccaagtacggcgacggcgtcatcatcgggatcgtcgacacgggcgtctggcccgagagcgagagcttcagcgacgccggcatgggccccgtcccggcggggtggaagggcgcgtgcgaggccggccaggcgttcagggcctccgcgtgcaaccggaagctcatcggggcgcgctctttcagcaagggcctcaagcagcgcggcatcacggtctcgcccgacgactacgactcgccgcgggactactacggccacggctcgcacacgtcgtccacggcggccggcgccgccgtcggcggcgcgagctacttcggctacgccaacggcacggccaccggcatcgccccgaaggccagggtggccatgtacaaggccgtgttctcgggagacacgctggagtccgcgtccaccgacgtgctggccgccatggaccaggccatcgccgacggcgtccacgtgatgtcgttgtctctggggttccccgagacgtcctacgacaccaatgtgatagccattggggccttcgccgccatgcggaagggcatcttcgtcgcgtgctcggccgggaacgacggctccgacgggtacaccatcatgaacggcgcgccctggatcacgaccgtcggcgccgcgagcatcgacagggacttcaccgcgaccgtcacgctcggcagcggcgcggccgtccagggcaagtcggtgtacccgctgagcacgccgaccgtcagcgcgagcctctactacggccatggcaacaggagcaagcagaggtgcgagtactccagcctgagaagcaaggacgtgagggggaagtacgtgctgtgcaccggcggcccgagcaccgagatcgagcagcagatggacgaggtgcagagcaacggcggcctcggcgccatcatcgcgagcgacatgaaggagttcctccagccgacggagtacaccatgccgctggtgctggtcacccagccggacggcgcggccatcgccaagtacgcgacgacggcggcagggtcagccagagccggaggaggggcgcccagggcgagcatccggttcggcggcacggcgctcggcgtcaagccggcgccgaccgtgtcctacttctccgcccgcgggccgggcctgatcagcccgacgatcctgaagccggacatcgtcgcgccgggggtggacatcctcgcggcgtgggtgcccaacaaggagatcatggagctcggaaggcagaagctctacaccaagtacgcgctcgtgtccgggacgtccatgtcgtcgccgcacgccgccggcgtggccgccctcctgcggtcggtgcaccctgactggagcccggcggccatcaggtccgccatgatgacgacggcgtacgtgaaggacagcgccagcaacgtcatcgtcagcatgccgagcgggtcaccgggaacgccgctggacttcggcagcggccacgtcagccccaacgaggccgtggaccctggcctcgtgtacgacgcggcggccgacgactacgtcgacttgctgtgcgccctacgctacagcggcagccagatatccaccatcaccgggcggccgaaccccagctgcgccggagcaaacctggacctgaactacccgtccttcacgatcatcctcaacaggaccaactcggccacgcacacgttcaagagggtactcacaaacgtcgcggccgcaccggctaagtacagtgtgtccgtgacggcgccggcagggatgaaggtgacggtttcgccgacggcgctgtccttcggcggcaagggcagcaagcagccgttcacagtcacggtgcaggtcagcaaggtgaaaaggaactcaaatgactacaactacgctgggaactatgggttcctgagctggaacgaagttggaggcaagcatgttgtcaggagcccgatagtctctgcatttgcccaatgaccggggaagacatgttagcaatgcacgaacaaaaaaataagactataaggtagaaaagataattattatatttacgattcatcctgatcaggaacattaagaaatatagatagactgaacaaaaggtggggagagcatcgacagatactgcagttgacaagtgtattttatacctgataaatcaaattataggtttctc

SEQ ID NO: 107251 - DNA, 1755 bp, Zea Mays
gcgacggcgagtgctctccacttgtagcatccactcactcaactctccactccgctgatgatgatgcataagaagcggcagctctgagcccaagcgtcgattcagctcagcgcgcagctcacttcatccggcgtcgattcagctcagcgtaccagttggggccccgtcccggcggggtggaagggcgcgtgcgaggccggccaggcgttcagggcctccgcgtgcaaccggaagctcatcggggcgcgctctttcagcaagggcctcaagcagcgcggcatcacggtctcgcccgacgactacgactcgccgcgggactactacggccacggctcgcacacgtcgtccacggcggccggcgccgccgtcggcggcgcgagctacttcggctacgccaacggcacggccaccggcatcgccccgaaggccagggtggccatgtacaaggccgtgttctcgggagacacgctggagtccgcgtccaccgacgtgctggccgccatggaccaggccatcgccgacggcgtccacgtgatgtcgttgtctctggggttccccgagacgtcctacgacaccaatgtgatagccattggggccttcgccgccatgcggaagggcatcttcgtcgcgtgctcggccgggaacgacggctccgacgggtacaccatcatgaacggcgcgccctggatcacgaccgtcggcgccgcgagcatcgacagggacttcaccgcgaccgtcacgctcggcagcggcgcggccgtccagggcaagtcggtgtacccgctgagcacgccgaccgtcagcgcgagcctctactacggccatggcaacaggagcaagcagaggtgcgagtactccagcctgagaagcaaggacgtgagggggaagtacgtgctgtgcaccggcggcccgagcaccgagatcgagcagcagatggacgaggtgcagagcaacggcggcctcggcgccatcatcgcgagcgacatgaaggagttcctccagccgacggagtacaccatgccgctggtgctggtcacccagccggacggcgcggccatcgccaagtacgcgacgacggcggcagggtcagccagagccggaggaggggcgcccagggcgagcatccggttcggcggcacggcgctcggcgtcaagccggcgccgaccgtgtcctacttctccgcccgcgggccgggcctgatcagcccgacgatcctgaagccggacatcgtcgcgccgggggtggacatcctcgcggcgtgggtgcccaacaaggagatcatggagctcggaaggcagaagctctacaccaagtacgcgctcgtgtccgggacgtccatgtcgtcgccgcacgccgccggcgtggccgccctcctgcggtcggtgcaccctgactggagcccggcggccatcaggtccgccatgatgacgacggcgtacgtgaaggacagcgccagcaacgtcatcgtcagcatgccgagcgggtcaccgggaacgccgctggacttcggcagcggccacgtcagccccaacgaggccgtggaccctggcctcgtgtacgacgcggcggccgacgactacgtcgacttgctgtgcgccctacgctacagcggcagccagatatccaccatcaccgggcggccgaaccccagctgcgccggagcaaacctggacctgaactacccgtccttcacgatcatcctcaacaggaccaactcggccacgcacacgttcaagagggtactcacaaacgtc

SEQ ID NO: 107252 - DNA, 1516 bp, Zea Mays
ccctcccaccccacccccaccctcctcgtctactacttctaccgcccgctgacctgaccgagtgcacctccacctttccactaccccccgcacagtgcacacgcagttcgcacccacgccccccgcaggccggaggagccagccgcgatggcgcagcagcccccgcaccggcacgccaagacggactcggaggcgacgtccagcatggcggcggcctactacgtgcagtcgccgagccacgacgacggcgagaacaagacggccgcgtcctccttccactcgtccccggcggcgtccccgccgcggtcgctgggccgggcgtcaagggactcctcctcgtcctcccgcttctcctccgccaaggccgcctcctcctccgtcgctgtccccgtccccggcgccggcgccggcgggcggcggcgcggcagcccgtggatgaaggaggcggccatcgaggaggagggtctcctcggcatgtccgacgacgacgacggcgacggcaccagccgcggcgcgctcagcgcgatccctaagagggcgcgctacgcgctgggcttcgcgggcgccttcctcgcgctcttcttcctcttcgcgctcgtcctgtggggcgccagccgcgcccagcgccccgtcgtcaccctgcgctccgtcaccttccaccgcttcgtcgtccaggccggcaccgacgcgtcgctcgtgcccaccgagatggcctcgctcaacgccaccgtcgccctcgccttccgcaacgccggcaccttcttcggcgtccacgtctccgccgaccccgtcacgctccactacacccagctccagctcgcgtcgggcgatatcaagtatttctaccagccgcggaagagccagcgcgggctggcggtggcggtggtgggcgacaaggtgccgctgtacggcggcgggtcgggcctgagcagcaccgcgacgacgctgccgccgcccaggaagcgcgcgccggcggtggtggtgccgccgccgcccgtgccgctgcagctggcggtgcggctgcggtcgcgcgcgttcgtgctgggcaggctcgtcgcccccaagttctacaccgaggcgcggtgccgcgtcaccatggaccagaccaggctcggcaggcccgtctccctcgccaaggcctgcacctacacccactagctagagcgaaagcgaaacacgcgcgcgcgcgcgcctgctgccctcgccgttttgttcttcacttgagttctctctccgtcgtcgttatactactactaccgcctgcgtgtgcttgcgtgcgtgcgttacatttggatgcatggggccattgttgctcggttgttgtcatgtatgtacagaggatttctttttttttctttttcttttttggtgttggagagttttcattgttgctcgcttcttgttctccttcgtgaccagcttcgtgtagatctgactcttgctgagatataactgaagcgcatccgtatcactgctgtgccaagtcgcagtggcacacgtaaaggatggatgcggg

SEQ ID NO: 107253 - DNA, 258 bp, Zea Mays
gggtgtgacaaggtggctgcgattgacacccagttgcaggacagggatgaatttcttgctgaaatcaaggaccgactagtgcaagcccaagtaactatgaagagttatcaggataaacgacgtcgggaggtggaattcaacattggtgattgggtatggctacgattgcaacaaaggactgttgtgggcgtcacctcagctgcaccatccaaattggggcccaaattctttggtccatatcaagtcattcagaggata

SEQ ID NO: 107254 - DNA, 2438 bp, Zea Mays
acctccgccatcttgtcggggaacaagataatgtcaccttgaatacctgccgtgatgctgcttttgttgcactttgaacatatctggaccagctccaactggacttgttgcgccagatatttctcctagtccacttacggtgcaagttcctgtagtgccacccaagcatcatcgcagttacaagcttgttctgttcccagctattggagttttagtcactggtgtagcaattctactaatgatagtactgattttcctaatccgtagaaagaataaagaactcaaaaagatggaaggaaataaccctctggatgcatggagtttttcctgtgtcaagaaaggccaagaaggcaattccaccatttttggcagatttagttacaaagaaatgaagaatgcaacaaggaacttcagcacagtgttaggaggaggtgaaaatggtacagtattcagaggacaactaaatgatggatctgtggttgctatcagacgcgttgagagttcaccaaaacaaagtcacaatgaattttgtaaagaaatggaatttcttgggcggttgcatcatcgacatcttgttggactaaaagggttttgttcaacaagatttgagagatttcaggtgtatgaatacatggaaaatggaagccttcaagatcacctacattcgccaagtaaacatctgctaccatggaaaaatagggtccaaattgccatcgatgttgccaatgctctggagtaccttcatttttattgtgatcctccactataccatggagatgttaagcctagcaatgtcttcttggacaagaattaccttgcaaagcttgctggttgcggtcttgcacaccactctagtagtggcaatacaactcccagttgcacaccagtaaatgtcaaggcccaagcaactcctggctacgtagaccccgagtacatggtgacccaggagttgaccccgaagagcgacgtgtacagctacggcgtgctgttgctggagctggtgacggggaagccggtgatccaggacaacaagagtctggtggagtggtcccgcgagctgatcggcacggactaccggctccacgagctggtcgacccgtctgtggcggacgcgttcgacctggacgagttgcaggtggtggcggacgtgattcactggtgcacgcaccgggacggcgcagcgcggccgtccatgaagcaggtgctccgcatcctgtatgagcggctggacccgctgtccgggcggttcgcgcgcgccgtggagggcgaggaggggtactactactgccacggtggcgggcgggtgaaggggaagcaggcgggcgacggcgtgatccagttcagcggcgacgcggcgcggtcttggctgccgtcgtcgagcagcacgtccaggtcgcactgcagccgcagcgtgctgctggagtgcaactcgcccgagccgcagtcgtccccggcccacggcaacggagcgttcctggcttgatagcaccggtccgtcacccgtgttgcgtccgtttcatggtctgcactgcaccgcaggtctggcttgatggctctgccagctgccattttttgagaggaccttgtgataatggtagggatcgatccgtgcaccgttcatggtggttcgtgatgactgacgagtgacgactgacggatcctgctacgggatcgggagcccgtgcatggctgcatgagagtcatgtggagccagaggcagagagtgatgggagcacaactgtgctctgtgcaagaggtacactgacactgactgctgtttttcggttcgcttccctaggtgttggtggttgtttttcattgatctatgcattgatgtgcttcgggaacatggctacgcattcgaagtcgtgacagggatttcactgatactcctacttccattgttccgtactatactctgttctggcttcatcgtgggcagctgggctctggacttgtgggagagccggagaggcttgctcaagtttcctctgcgagaattttggctactgctccagttctacttgtacgtttcacttctgctttgctgatgcttgcatgatgtcacctgcttgaacgtccttgcctccttggggggtccattctcagtatctgtcaagtgagtccttggaactctgttatagactcttttgtgggccggcaatatgccaggcgccagaataattagacccagctatttgttagatggtggctgagtgttagagaagttttaggaggcttatcctccctggagcttatctccttaataatctcctaagttgttctctggagcttatctcttaataatctcctaagttgttaggccccggagctataagggtgcctcagattgtaatagggttttttatcaaaagaagtcgcacctgcgtgggcggttgcttgatcacaatggcgacccacacgcgccctggtgatcg

SEQ ID NO: 107255 - DNA, 1399 bp, Zea Mays
cgctctcctgctcgcgagggcctggttgttaggcttgcagttgcagctgccgttgttttgcacaaaaaagaggactgcacctgcccggtcaggtatttcacagaagtgtcggtgatgctgtgttcgggtagagatggccgatgaaggcaggcagccatgcgggcagatggatggagactgatgatggtcttccagactgaaattcggctgcaccctgcaagtcctgggtccacctggagatgagacgacggcaggcaagcaaggaccgagagcgagaggagctggccccgacgacgatgagtggaataatatcagcctccacgggcccggtggaatcgctgtccaaacacgcgcctgaaaggccccgcttctatttttgacgcttataccctcgctctgctcatcgaaccaaaccctacaccgcggcgacaggtataaaagacatctcccgacccgtgccctactcgccgccgccaccgccaccgccacctacgcaacaccagacgctccagcagtccagcactcggagctcgcgcgcccgacggcccaccatgatcatccccaagaagaaccgcaatgagatctgcaagtacctcttcaaggagggcgtgctgtatgccaagaaggactacaacctggcgaagcacccacagattgatgtgcccaacctccaggtgatcaagctcatgcagagcttcaagtccaaggagtatgtcagagagaccttctcctggcagtactactactggtacctcaccaacgatggcattgagcacctacgcaactacctgaacctcccgtctgagatcgtgcctgccacgctcaagaagtctgccaggccactgggccgtccatttggctctggccctcctggtgaccgcccaaggggccctggtcgttttgaagacagaccaaggtttggagacagggatgagtaccgtggtggccctcgtggtgctcccggtgactttggtggcgataagagtggagctcctgctgagttccagccatctttcaggagttctggcgcaaggcctggctttggccgtggtggtggcagcggctttggcgctggcccgacctcttccatggagtgaacagtgaagctgcccttagtttggacatgatgtttcccctcccgtgaggcgtttaattttgaaggacggttattatgtactagtaatgttttccggatcggctagtgctgacatgcaaaaaaaatgttccatatttatacattggttccagtatagtagtctttgcaaaacgtttggattttcaagtaagtacgttttcgctaatttacgagtaatcagtcctccgtatggtggttgactggtctgaagggttggtgatgctattttgttcttttgttgtttctagttgtttgcctgtttcc

SEQ ID NO: 107256 - DNA, 2644 bp, Zea Mays
ttggcctgtaatgatcgccaccaaccacccagccacccaggccagccacacaccttaccacggcagacggcaccaccctcctccacctccacgccagaatccatgctttcagagctaaattaaccacgcttcgctcatcgctcctcccacctccaaaataatccagtctcagcccccacactgcccgcaaatccaacctttttgggctcaatcaacctccaaatctacctttttcgtcactccatcctgtcctaaatcccgtccctcccccccaaagtcatacctttcccactgcgcccccctgcagaaatccatagattcttcgccacttcgattgtccgctgcatgaatccggctccgcgcgcccaattccctgcaaagccccagtctctggcgatttttttcttggaagatttcttcattctttagtggcgcccaattctgctgggaggggggttcttgggagggagatccaccatttcgtttcggcttgagcagccggggagctgagcagcgcggcgcccatgtcggactccgagctgtcccagggcacgctagtgttcggcctccacctctgggagctcgtcggcatcggtgtcggtgccgcattcgtgctcctcctcgtcctcctctccctgctctgcctcctcgcctcccgccgccgccgacgccgccgtgctgcccccgtcctccacctccccgccgtcgtgcccaatgcccagcccaagcaccccaccaagccccccaaggacatccaagaggtgccctcccgcggcaccgcggcccccgccgccccggccaaggcgccgctcgcccaggtgctgcaggcgccgccgccggactccatccagatcgagacggggaaggagcaccgtatcacgttcccggagcagccgccgcccccgcaccaccagcggagcggggggccgtcgtctcggggcgccagcggggagagccgtggcggtggtggggaaccgggggtcccggaggtatcgcacctggggtggggccactggtacacactcaaggagctggaggacgccacgtgcatgttcgccgacgagaaggtgatcggcgagggcggctacggcatagtgtaccacggcgtgctggagggcggagtgcaggtcgccgtcaaaaacttgctcaacaacagggggcaggcagaacgggaattcaaggttgaggtggaagctatcgggcgagtgcgacacaagaaccttgttcggttgttaggatactgcgctgaaggcaaccaaaggatgcttgtgtatgagtacgttaataatggaaacttggagcaatggctccatggggatgttggccctgtgagccctcttacatgggatatcagaatgaagattattctgggaacagcaaaagggttaatgtatttgcacgagggacttgagccaaaggttgttcaccgtgatgtcaagtcgagcaatattcttcttgacaagcattggaatgcaaagctttctgattttgggctagcgaaacttttgggttcagaaaggagttatgtcacaaccagggtcatggggacgtttgggtatgttgcaccagagtatgcgggcactggcatgttgaatgaaactagcgatgtctatagtttcggaattcttatcatggaaataatatctggccgtgtacctgttgattacaacaggccgccaggggagattaatctagttgagtggctgaagacgatggtcagcaacagaaattctgagggggttttggatccaaagatgactgagaagcctacttctagggcattgaagaaggctttgctagtggctctgcggtgcgtagaccctgaagctcgcaagaggccaaagattgggcatgtcattcacatgcttgaggttgacgatttcccgtacagagatgagcgccggggtggcaaagctccagcccaagcaagatcggtggaaacgccacctgcaagcgaacctggcgatagcagcggaaacaacactccaaaggacgcaccgaatggagaacctttcaagtggagaaactaagaggactagcttggctagccaccaggaaaacggtggttgcgcttgagtttgtgcctgataaagaagctggatatggttggttggttggttggtcgggcatgcaaactccacaagcaccagtgtcggtcgtcgtcgtcgtgacagtatctgtacattgttgaatcgatatgttagccatagcgatttttttccagttggttttcttggggccgtatatttatgcgaaggatgattttgtgtgataaaggcgcgcgcgctcgtgtgtattcctgaggcgaaaaaaagactgagcattgctatagctgaaaccgttccagtaggattggccgatgacctccaaaccttgctgcctgtttgttgtgccatccgcctgggtatatagcctcggtttctgatgtcatattcgtaccgtatgttgatttagggtctgtttggttaggctgtggctgtgaaaaaagttgctgtgggctgtgagctgtgaaaaaagctgctgtaggctgtgagctgttaaaaagctaaaaaccgtttggtggaaacaactaaaagtcattaaaaattcttcgatatatgttttcacagttccatccgaaaagccactaaaagcaggtccaggg

SEQ ID NO: 107257 - DNA, 2022 bp, Zea Mays
ttggcctgtaatgatcgccaccaaccacccagccacccaggccagccacacaccttaccacggcagacggcaccaccctcctccacctccacgccagaatccatgctttcagagctaaattaaccacgcttcgctcatcgctcctcccacctccaaaataatccagtctcagcccccacactgcccgcaaatccaacctttttgggctcaatcaacctccaaatctacctttttcgtcactccatcctgtcctaaatcccgtccctcccccccaaagtcatacctttcccactgcgcccccctgcagaaatccatagattcttcgccacttcgattgtccgctgcatgaatccggctccgcgcgcccaattccctgcaaagccccagtctctggcgatttttttcttggaagatttcttcattctttagtggcgcccaattctgctgggaggggggttcttgggagggagatccaccatttcgtttcggcttgagcagccggggagctgagcagcgcggcgcccatgtcggactccgagctgtcccagggcacgctagtgttcggcctccacctctgggagctcgtcggcatcggtgtcggtgccgcattcgtgctcctcctcgtcctcctctccctgctctgcctcctcgcctcccgccgccgccgacgccgccgtgctgcccccgtcctccacctccccgccgtcgtgcccaatgcccagcccaagcaccccaccaagccccccaaggacatccaagaggtgccctcccgcggcaccgcggcccccgccgccccggccaaggcgccgctcgcccaggtgctgcaggcgccgccgccggactccatccagatcgagacggggaaggagcaccgtatcacgttcccggagcagccgccgcccccgcaccaccagcggagcggggggccgtcgtctcggggcgccagcggggagagccgtggcggtggtggggaaccgggggtcccggaggtatcgcacctggggtggggccactggtacacactcaaggagctggaggacgccacgtgcatgttcgccgacgagaaggtgatcggcgagggcggctacggcatagtgtaccacggcgtgctggagggcggagtgcaggtcgccgtcaaaaacttgctcaacaacagggggcaggcagaacgggaattcaaggttgaggtggaagctatcgggcgagtgcgacacaagaaccttgttcggttgttaggatactgcgctgaaggcaaccaaaggatgcttgtgtatgagtacgttaataatggaaacttggagcaatggctccatggggatgttggccctgtgagccctcttacatgggatatcagaatgaagattattctgggaacagcaaaagggttaatgtatttgcacgagggacttgagccaaaggttgttcaccgtgatgtcaagtcgagcaatattcttcttgacaagcattggaatgcaaagctttctgattttgggctagcgaaacttttgggttcagaaaggagttatgtcacaaccagggtcatggggacgtttgggtatgttgcaccagagtatgcgggcactggcatgttgaatgaaactagcgatgtctatagtttcggaattcttatcatggaaataatatctggccgtgtacctgttgattacaacaggccgccaggggagattaatctagttgagtggctgaagacgatggtcagcaacagaaattctgagggggttttggatccaaagatgactgagaagcctacttctagggcattgaagaaggctttgctagtggctctgcggtgcgtagaccctgaagctcgcaagaggccaaagattgggcatgtcattcacatgcttgaggttgacgatttcccgtacagagatgtaagttaagatggcatgtgcacacttttgagtacccattgtctcagtatgttaatttgttttgactttattgcccataaatcttgttgtccaccaactctgaagcaagaaggttatcatgatgaac

SEQ ID NO: 107258 - DNA, 1535 bp, Zea Mays
atgacatgcccttgcaggaacacaatcaccattggccatcgagacccacatgttgttgttgtctcttgtcaccagtccgatggagcacatgaccctggcattgatgttgtgggtcgagtcattgttcaggagggcaaggagccagtgaccatggatgtaggcatggaagtgcatgatgtcctcggtgtcaatgttttggctggaaatttgtttggcataccacttcgtggaacacattctcatgcttttgttagctcatatatgagccttgatgagataccaaacaaggccctcaggaacaaagatggctcaagagtttgcgaggattttgttagtttagtgcaagagtggcttcaaaagtttcaggcagcagattcattaggtggtgtatttggtgatacaaataaaagtgagctggctgcatttgcatcctacgcattggcttttccaagcaactttcttgctcttgtggacacatatgacgttatacgaagtggtattccgaatttctgtgcagtggctctagcacttcatgacttagggtacaaggcatctggtattagattagattctggtgatctggcctatttgtccattgaagcacgaaaagtgtttcgtgcagtagagaaggaattcaatctacctggttttgcaaagatggtcattactgctagcaacgatctgaacgaggaaacaattgatgccctcaacaaacagggtcatgaggttgatgcctttggaattggaacttaccttgtgacgtgttattcccaggctgctcttggttgtgtctttaagctagttgaaataaataatagacctcgtattaagctgtctgaggacgtggcaaaagtttccattccatgcaaaaagcgatgctttagactgtatgggaaagaaggctacccactggtagatatcatgattcgtgaaagtgaaccatcacctaaggcaggagaaagaatcctctgccgccatccattcattgaatcaaagagagcatatgttgtcccccagcatgttgaggagcttctacagtactattggccggggacatcagataaacctagagcagagctgccctccttggagaagatcagaagccgctgcatgcagcagcttgaaaagctgcgtccggatcacatccggcggctaaatccaacaccgtacaaggtgagcgtgagtgcgaagctgtacgacttcatccactgcctatggctgaacgaggcaccagttggtgaactgcagtagatgatggccacatgaaagaagttttgggtcatctttgacacagcagcaaaccatacaagaggatcagagcttttctgcgcaatatcagcagttgagcccatggcccatggcaggattttgctcttcagatttccatctctaatccccggtatagaggcaggttaatcaagtcgtctagtttatacatcctttgattggtgggatactatacacatcatcatcatgaaaagaacagaaatcatttggagtcaatgggaagattaatagccaaaaatgtcactata

SEQ ID NO: 107259 - DNA, 827 bp, Zea Mays
ctccttccgggttccggcgcagcctctctcgccccgtccaggacgcaagcgtaccctaggcggagccaccttccactcttccagaaatctctctccggaggccggaggggaggccaggatggcagcaccagcgacgtcggggccgcccgcgagcgccaacggctccctcgcgggggtggccgcggcggtgggagcgcccactaaccccatggcgacggcgatgctcaccgatcaataccagttctctatggcctacgcgtactggaaggccgggaagcacgccgaccgagccgtgtttgacctgtactttaggaaaaatccatttggtggggagttcactgtttttgctggccttgaggagtgcatcaaatttatggcgaattttaagttcacagaacatgacatttctttcctgcaatcagtcatgccaacatgtgcgggtgctttcttcgattatctcggggaagttgactgctctgatgtagaggtgtactctattcctgagggatcagtagtttttccaaaagtgcccttgatgagagttgaaggtccggttgctgtagttcaacttcttgagaccccatttgtaaatcttatcaattatgcttctttggtaactactaatgctgcacgtcatcgtcatgttgctggaaagtcaaaagttctgttagaatttggtttaagacgagcacagggacctgatggagcaataagtgcctcaaaatattgttttatgggaggttttgacgcaactaggtggattatttttgcatttatagtttacaactaaaatccaacatatttatggtccttgctctataataatg

SEQ ID NO: 107260 - DNA, 2189 bp, Zea Mays
cccctgcgaccctgcccaccctcctctcctcctgcatccaccgcgccatgtctcaggaaggagccaacctgccgcaagaagtggtggggagccatgatcaggccaccgccccccacggcagcatccctgcaccggctgattccaaccccagctctgtcagcaacctggccagcgccgtcaacaacggcgggtcgtctgagtgtgccagcccagcggtgctctctgccggcgaggacaacaacgcggcgtcgtccaagaccgccagcccggcggtgctctctgccggcgaggacaacaacgcggcgtcgtccaagaccgccagcccggcggtgctccatgctgccgacgacaacaacgcggcgtccaagatcgcaggcccggcggtgctccttgccggcgaggaaaacaaggccaagctcaagctcgcgagcccggcatcgctccttgccggcgaggagaagggcaacaacgctgatgagttcaagctcgctagcccaaggatgctccatgactgcgacgacaacaatgccgggtcccatgctggcgtgcgcaactgcaacgccgcccagtccaagctcgccaacccggcggttctccatgccggcgatgacaagaagggcggatccaagatcgccggcccggaagtgccccacgccagtgtgaccagcaccaccggatccaagctcaacggcccggcggcgctccatgccggcaatgacaacgacagcggcggatccaggctcccaaaccccgcagtgctccatgccagcaaagacatggacaacaacgccgggcggcccaagttcgccagcccggtgttgctccatgctggcgaggacaacaaagccaggaccaagctcgcaatccaggcgggcggtggcggtaacgccggagccggatcgtccaggctcaccagatcggcggcgctccatgccgggaaggacaacggcgccggatccaagcccgccatccaggtggtgccacgcctccatgccggcggcaaggacaacaacgctgggtcgttcaaggctgccagaccgtcggcggccgactccggcgagagcaacgccaaggagggaaagagcaacgtagctggagaacaacgtgcccgtgaggccggcgtgggctgtggcggcgggaagggcaacgccgccgcggtggaggatgtggaccacgacttgcacatctttacggagagggagcggaggaagaagatgaagaacatgttcagcaccctacacgcgctcctcccgcagctccccgacaaggctgacaaggccaccatagtcggggaggctgtaacctacatcaagactctggaaggcaccgtccagaagctggagaagctgaagctggagcgcaagcgcgcgctggcagcgcagcagcagctgatggctggtgccggcagcaaccgcgcgtcgtccgcgcgccatcccgcaccagcgccgtcgtcaccgtcgtcgtcgtcgagggaggcgaacgtggcggacatggtccacggttggcatgcgcagcaggccgccgcgaacaaggccctggcagcggaggccggggcgggcggctcctcctctgccgccgcctcgctgccccgtggagcggtgcccttccccgcgcccgcggcggggttccagacgtggtccgggcagaacgtcgtggtgagcgtggccagcaacgaggcgtacatcaacctgcactccccgcggcagccggcgggcaccctgaccaaggcgctgttcgtgctggagaggcaccgcatcgacgtcgtcacgacgaccatctccacccaggacggcttccacatgtacggcatccatgcacgcgttaattcggcttccgcttcggctcgctttccggagaatctgtgtgctgaagacaggttcaagctggcggtgtcggagatgctgcagctgatcaacatctgagctaggccaacgcgctcatgctcgccaatgcatctgagctatgctgctgccgtcgtcgtttcgtgttaagtttggtcgtcgtccaactcttttagtttgtttctcttgttcgtgccaagtttggtcgtcgtcggttgaactcttttatgtctcaagacagctggttagtggttcctagcgtatggtaagtactgtttgaggtttaacccgtcgtggatgtagttgtatgatcgggtttcatgtgtgagagttctaaccaatcactag

SEQ ID NO: 107261 - DNA, 2041 bp, Zea Mays
aggcttcccttcagcaaacagcctggtagttctattcagccgcttaccgcgcgctctcttgtgcggcaattgggcgaccgccgccgccctaactcaggtgccgaggtcttcgccagtaacttcaacaggtcctcgcctggtccttcgctggcgaggagcatctccaccagactttctgctggttcaggtgcgaatcatggggaagtttatgcatgacaatccaatgctatcatgtagtgaagtaaacagacatcactatagtcttgcggcagttgctgtcggtttgggactaggagttgccgggttatgcaaggcattgtatagtggtctgtccataccatgggtttctccaaggaatttgttttcgggatcagggagggcatactatgttggaggtctgcgaaatcttggcaacaattgctttcttaatgtcatcctccaggcacttgccagctgtgatggttttatttcctttctagataatttgcttgcaactgatggcttgctacctgaagaaaaggctgtaagaatgcctcttcttcttgctttaagttctctcttggaagacttaatcatagttcgagatgaaaggactgtgttgaatccacatggagtaatgcatgctttgagtttgtatgttggtcacttcaatctgaccagacagcaggatgcttcagaagcttttctccatcttctgatctcattgagggatgaatttgcccattgttatgtaccacataggagttctctggcagacatcaccctttctgactccaaagtatacaagcaaagggaaggtaacctgcctgaatgcaagcgctggaaacaaaacctatttggcccctttgatgggacagttggcagcatattgtcttgcagaaactgttcttctgtgctgtcattggacttcgagaatttccactgcttgcctctttcgccagtccttaatgcaaatggagatattaccagtgggtgtagtttggtggattgcctaaagtacttcactgtggtggagcatcttgacaactatcgttgtgaccggtgttggcacatcattgctgccaaatatctttctcttagatcagaagttgatgaggaaaaggttagcaagcttcaatcctgtgtcgactatggcacttgcagttgcagggatatgttccccctggagtcactgccatgttcatcatcttcacgagcaacaaagcagctgattatcagtcagtgcccgaagattctgtgcattcattttctacgcgcttcagtcggtcttgacggcgagcccatcaaacatcagggacatatttctttccctttgcttctcaatctgtccccgtttacgggaggcgcgtcgagtgctggacctttagcaatgaatgcgcaaagagatggccagcaagctctccatctataccggcaactgaatatgcaggctaatgctgacgtgtccagtagttcatcatcaccaccgcagctatcaaggagcaagttatacggtctcgcggccgtcgtggagcactacgggaagtgtggaggagggcactacgcagtctacaggagagtcgcgtcgaatcctgaccctgatgatccaggcaaacctgttgcaggccttggcaagcggtggttttacatctcagacggctacgtgtcagaagttccagaggaggatgtactgcgcgcggaggccacgctccttttctacgagagattgtagccgcttgttgagtagctaacgtgtgcatcataacaaaatctaggacagttttgttgtgaggagtctgatgttcttagcggtaccgtgagcttccaagtagacgaggaaactagctgtggcacaaaaaacaaagcctctcggcatctcgacgtggactgcaggcgtgtcttaggcagtgtggcctactttttttttgggtccttgcaaacgttaaaataattcttcatgcaatacgtcagtgaggtcttcctcttgagaataaatcagatcaccattgttttgcgacattgtaagcagcagatggtggatcgtgtgagttttgttctgctg

SEQ ID NO: 107262 - DNA, 1943 bp, Zea Mays
aggcttcccttcagcaaacagcctggtagttctattcagccgcttaccgcgcgctctcttgtgcggcaattgggcgaccgccgccgccctaactcaggtgccgaggtcttcgccagtaacttcaacaggtcctcgcctggtccttcgctggcgaggagcatctccaccagactttctgctggttcaggtgcgaatcatggggaagtttatgcatgacaatccaatgctatcatgtagtgaagtaaacagacatcactatagtcttgcggcagttgctgtcggtttgggactaggagttgccgggttatgcaaggcattgtatagtggtctgtccataccatgggtttctccaaggaatttgttttcgggatcagggagggcatactatgttggaggtctgcgaaatcttggcaacaattgctttcttaatgtcatcctccaggcacttgccagctgtgatggttttatttcctttctagataatttgcttgcaactgatggcttgctacctgaagaaaaggctgtaagaatgcctcttcttcttgctttaagttctctcttggaagacttaatcatagttcgagatgaaaggactgtgttgaatccacatggagtaatgcatgctttgagtttgtatgttggtcacttcaatctgaccagacagcaggatgcttcagaagcttttctccatcttctgatctcattgagggatgaatttgcccattgttatgtaccacataggagttctctggcagacatcaccctttctgactccaaagtatacaagcaaagggaagctgtcattggacttcgagaatttccactgcttgcctctttcgccagtccttaatgcaaatggagatattaccagtgggtgtagtttggtggattgcctaaagtacttcactgtggtggagcatcttgacaactatcgttgtgaccggtgttggcacatcattgctgccaaatatctttctcttagatcagaagttgatgaggaaaaggttagcaagcttcaatcctgtgtcgactatggcacttgcagttgcagggatatgttccccctggagtcactgccatgttcatcatcttcacgagcaacaaagcagctgattatcagtcagtgcccgaagattctgtgcattcattttctacgcgcttcagtcggtcttgacggcgagcccatcaaacatcagggacatatttctttccctttgcttctcaatctgtccccgtttacgggaggcgcgtcgagtgctggacctttagcaatgaatgcgcaaagagatggccagcaagctctccatctataccggcaactgaatatgcaggctaatgctgacgtgtccagtagttcatcatcaccaccgcagctatcaaggagcaagttatacggtctcgcggccgtcgtggagcactacgggaagtgtggaggagggcactacgcagtctacaggagagtcgcgtcgaatcctgaccctgatgatccaggcaaacctgttgcaggccttggcaagcggtggttttacatctcagacggctacgtgtcagaagttccagaggaggatgtactgcgcgcggaggccacgctccttttctacgagagattgtagccgcttgttgagtagctaacgtgtgcatcataacaaaatctaggacagttttgttgtgaggagtctgatgttcttagcggtaccgtgagcttccaagtagacgaggaaactagctgtggcacaaaaaacaaagcctctcggcatctcgacgtggactgcaggcgtgtcttaggcagtgtggcctactttttttttgggtccttgcaaacgttaaaataattcttcatgcaatacgtcagtgaggtcttcctcttgagaataaatcagatcaccattgttttgcgacattgtaagcagcagatggtggatcgtgtgagttttgttctgctg

SEQ ID NO: 107263 - DNA, 901 bp, Zea Mays
aggcttcccttcagcaaacagcctggtagttctattcagccgcttaccgcgcgctctcttgtgcggcaattgggcgaccgccgccgccctaactcaggtgccgaggtcttcgccagtaacttcaacaggtcctcgcctggtccttcgctggcgaggagcatctccaccaggtgcgaatcatggggaagtttatgcatgacaatccaatgctatcatgtagtgaagtaaacagacatcactatagtcttgcggcagttgctgtcggtttgggactaggagttgccgggttatgcaaggcattgtatagtggtctgtccataccatgggtttctccaaggaatttgttttcgggatcagggagggcatactatgttggaggtctgcgaaatcttggcaacaattgctttcttaatgtcatcctccaggcacttgccagctgtgatggttttatttcctttctagataatttgcttgcaactgatggcttgctacctgaagaaaaggctgtaagaatgcctcttcttcttgctttaagttctctcttggaaggtaagatttatactatggactattgaacttcttatcattttcgagatccccactgtgaacttctaaatacgactcagtgtccattgcaagtattgtccttttactgcaggcaatttcaggggggtgggggcttctattgagaattttttagctgtatgtgaacccctataatacagtacatggcttataagttcaaagatcatgtggggtcctcagctgcatatgcaacataatgcattcaccggtggtggaatccatgcaacctataatttttttgacagtgttttctcctatgctctgattttcttgggaattgataggtccttgttatttgcattgcttggattctttg

SEQ ID NO: 107264 - DNA, 2154 bp, Zea Mays
ctctacctgttggagagaccctgaccgtcgcccagaccgctctctccgcggacgcaccaggcatctcgtgtatcgtcctcggatccccgcggtcatccccatctcagccgccgttgtccgccttcccctcgacaacaagcctgccgccccgagctgcctccctccgtccgttcggtatcctttagccagttagcctcttccttccgtctgccaccggcacgttctctgccctcgggtacctcgtctgttcagtcttcagagctgggttcggtctattcctcatcctctcttgttgatccggagtgccttaagttttggccgtcttgttactgtctgctgttccacagtcgacgaatcacgaatgctaatggaggaagaatgcgtagaggcaccgtcgtacatccacattgacagcaacgctttctcctacagaaagcataagagtcagacagaggaggacatagctgtgtgtgagtgccagtatgatatcttggatccagagagtccatgtggagaccggtgtttaaatttattgactaacacagaatgcacgcctggctattgccgttgtggtgtgtactgcaagaatcagcggttccaaaaatgtcaatatgccaggacaagacttgtaagaactggagggcgtggatggggccttgtggctgatgagaatattatggctggtcaatttgttatcgaatattgtggagaagtaatatcatggaaggaagccaaacggagagctcaagcttatgaaacccagtgtctgcagatattctctcgcttctcatatttgaattgtggcaaactggcacttttttagctagctataacatctagcttctgtaactgcaggtttaaaggatgcctatatcatttacctcaatgctgatgagtcaattgatgcaacaagaaaagggaaccttgcgagattcatcaaccattcatgccaaccgaattgtgagacaaggaaatggaatgtccttggggaagtaagagttggaatttttgctaagcaaaacattccttttggcacggaattatcctatgactacaattttgagtggtatggtggtgtgatggtgcggtgcctctgtggagccgccagctgttctgggtttcttggggctaaatcacgtggtttccaggaggccacgtacctgtgggaagatgatgatgacaggttttctgttgagaatatccctctttacgattctgctgatgacgaacctacaagcattaacaaggaaatcctcgtatcaagtgatggcatggttacccaatacagcaacatcagcagagtacagagtaccgaaaatcctggaaacactggaacaaatgaatttgcgccaattatcgtcgacgaactgacaagctcaaatggattagcaccaatgaacgttgaaccattgactgtaagctcaaatgagttcacgccatcgaacgccatgccaatggtagctcgtctagtcgagaatgggtcaactggatacagcgcacaggacactcacgacgcttctcagaattcagcgcccaaagctgcaaatcacgcgaaccaaactggacctcagaacaacagcaaccattcagcgttggtccctgtgaagcccgcgccgaaacgccgtggcaggaaaccgaaacgcgttgtgcacaagcagctggacatcccagatatctgcgaccggcttacatcgtctgtggcgtgcgaagaaatactgtactgtgaggaagtgaagaaccaggccgtttctgaaatcgatgccctgtacgacgagataaggcctgcggttgaagagcacgagagggacagccaagatagcgtctccacaagcctcgcggagaagtggatcgaggctagctgccgcaagtacaaggccgaattcgacctgtatgctgcagtactcaagaacgttgcctccactccactacggtcgaaagatgatgtgggcccaagagagcagaacgggttgaagtacctggagaacggctcatgatttttttagctagaagcgtggaatattacgtacgccttcaatttgtagtatagggattgcatttttttttaactgtggttggtcttgtatttaggtagaggcattgtaaggttacatgattttaaatagcgtggaatcatgtcaaacgcacatttgatct

SEQ ID NO: 107265 - DNA, 2063 bp, Zea Mays
ctctacctgttggagagaccctgaccgtcgcccagaccgctctctccgcggacgcaccaggcatctcgtgtatcgtcctcggatccccgcggtcatccccatctcagccgccgttgtccgccttcccctcgacaacaagcctgccgccccgagctgcctccctccgtccgttcggtatcctttagccagttagcctcttccttccgtctgccaccggcacgttctctgccctcgggtacctcgtctgttcagtcttcagagctgggttcggtctattcctcatcctctcttgttgatccggagtgccttaagttttggccgtcttgttactgtctgctgttccacagtcgacgaatcacgaatgctaatggaggaagaatgcgtagaggcaccgtcgtacatccacattgacagcaacgctttctcctacagaaagcataagagtcagacagaggaggacatagctgtgtgtgagtgccagtatgatatcttggatccagagagtccatgtggagaccggtgtttaaatttattgactaacacagaatgcacgcctggctattgccgttgtggtgtgtactgcaagaatcagcggttccaaaaatgtcaatatgccaggacaagacttgtaagaactggagggcgtggatggggccttgtggctgatgagaatattatggctggtcaatttgttatcgaatattgtggagaagtaatatcatggaaggaagccaaacggagagctcaagcttatgaaacccagtgtttaaaggatgcctatatcatttacctcaatgctgatgagtcaattgatgcaacaagaaaagggaaccttgcgagattcatcaaccattcatgccaaccgaattgtgagacaaggaaatggaatgtccttggggaagtaagagttggaatttttgctaagcaaaacattccttttggcacggaattatcctatgactacaattttgagtggtatggtggtgtgatggtgcggtgcctctgtggagccgccagctgttctgggtttcttggggctaaatcacgtggtttccaggaggccacgtacctgtgggaagatgatgatgacaggttttctgttgagaatatccctctttacgattctgctgatgacgaacctacaagcattaacaaggaaatcctcgtatcaagtgatggcatggttacccaatacagcaacatcagcagagtacagagtaccgaaaatcctggaaacactggaacaaatgaatttgcgccaattatcgtcgacgaactgacaagctcaaatggattagcaccaatgaacgttgaaccattgactgtaagctcaaatgagttcacgccatcgaacgccatgccaatggtagctcgtctagtcgagaatgggtcaactggatacagcgcacaggacactcacgacgcttctcagaattcagcgcccaaagctgcaaatcacgcgaaccaaactggacctcagaacaacagcaaccattcagcgttggtccctgtgaagcccgcgccgaaacgccgtggcaggaaaccgaaacgcgttgtgcacaagcagctggacatcccagatatctgcgaccggcttacatcgtctgtggcgtgcgaagaaatactgtactgtgaggaagtgaagaaccaggccgtttctgaaatcgatgccctgtacgacgagataaggcctgcggttgaagagcacgagagggacagccaagatagcgtctccacaagcctcgcggagaagtggatcgaggctagctgccgcaagtacaaggccgaattcgacctgtatgctgcagtactcaagaacgttgcctccactccactacggtcgaaagatgatgtgggcccaagagagcagaacgggttgaagtacctggagaacggctcatgatttttttagctagaagcgtggaatattacgtacgccttcaatttgtagtatagggattgcatttttttttaactgtggttggtcttgtatttaggtagaggcattgtaaggttacatgattttaaatagcgtggaatcatgtcaaacgcacatttgatct

SEQ ID NO: 107266 - DNA, 2103 bp, Zea Mays
ctctacctgttggagagaccctgaccgtcgcccagaccgctctctccgcggacgcaccaggcatctcgtgtatcgtcctcggatccccgcggtcatccccatctcagccgccgttgtccgccttcccctcgacaacaagcctgccgccccgagctgcctccctccgtccgttcggtatcctttagccagttagcctcttccttccgtctgccaccggcacgttctctgccctcgggtacctcgtctgttcagtcttcagagctgggttcggtctattcctcatcctctcttgttgatccggagtgccttaagttttggccgtcttgttactgtctgctgttccacagtcgacgaatcacgaatgctaatggaggaagaatgcgtagaggcaccgtcgtacatccacattgacagcaacgctttctcctacagaaagtgagcagttctgcgttagttctttctcaatctgtccaatgcataagagtcagacagaggaggacatagctgtgtgtgagtgccagtatgatatcttggatccagagagtccatgtggagaccggtgtttaaatttattgactaacacagaatgcacgcctggctattgccgttgtggtgtgtactgcaagaatcagcggttccaaaaatgtcaatatgccaggacaagacttgtaagaactggagggcgtggatggggccttgtggctgatgagaatattatggctggtcaatttgttatcgaatattgtggagaagtaatatcatggaaggaagccaaacggagagctcaagcttatgaaacccagtgtttaaaggatgcctatatcatttacctcaatgctgatgagtcaattgatgcaacaagaaaagggaaccttgcgagattcatcaaccattcatgccaaccgaattgtgagacaaggaaatggaatgtccttggggaagtaagagttggaatttttgctaagcaaaacattccttttggcacggaattatcctatgactacaattttgagtggtatggtggtgtgatggtgcggtgcctctgtggagccgccagctgttctgggtttcttggggctaaatcacgtggtttccaggaggccacgtacctgtgggaagatgatgatgacaggttttctgttgagaatatccctctttacgattctgctgatgacgaacctacaagcattaacaaggaaatcctcgtatcaagtgatggcatggttacccaatacagcaacatcagcagagtacagagtaccgaaaatcctggaaacactggaacaaatgaatttgcgccaattatcgtcgacgaactgacaagctcaaatggattagcaccaatgaacgttgaaccattgactgtaagctcaaatgagttcacgccatcgaacgccatgccaatggtagctcgtctagtcgagaatgggtcaactggatacagcgcacaggacactcacgacgcttctcagaattcagcgcccaaagctgcaaatcacgcgaaccaaactggacctcagaacaacagcaaccattcagcgttggtccctgtgaagcccgcgccgaaacgccgtggcaggaaaccgaaacgcgttgtgcacaagcagctggacatcccagatatctgcgaccggcttacatcgtctgtggcgtgcgaagaaatactgtactgtgaggaagtgaagaaccaggccgtttctgaaatcgatgccctgtacgacgagataaggcctgcggttgaagagcacgagagggacagccaagatagcgtctccacaagcctcgcggagaagtggatcgaggctagctgccgcaagtacaaggccgaattcgacctgtatgctgcagtactcaagaacgttgcctccactccactacggtcgaaagatgatgtgggcccaagagagcagaacgggttgaagtacctggagaacggctcatgatttttttagctagaagcgtggaatattacgtacgccttcaatttgtagtatagggattgcatttttttttaactgtggttggtcttgtatttaggtagaggcattgtaaggttacatgattttaaatagcgtggaatcatgtcaaacgcacatttgatct

SEQ ID NO: 107267 - DNA, 2203 bp, Zea Mays
ctctacctgttggagagaccctgaccgtcgcccagaccgctctctccgcggacgcaccaggcatctcgtgtatcgtcctcggatccccgcggtcatccccatctcagccgccgttgtccgccttcccctcgacaacaagcctgccgccccgagctgcctccctccgtccgttcggtatcctttagccagttagcctcttccttccgtctgccaccggcacgttctctgccctcgggtacctcgtctgttcagtcttcagagctgggttcggtctattcctcatcctctcttgttgatccggagtgccttaagttttggccgtcttgttactgtctgctgttccacagtcgacgaatcacgaatgctaatggaggaagaatgcgtagaggcaccgtcgtacatccacattgacagcaacgctttctcctacagaaagtgagcagttctgcgttagttctttctcaatctgtccaatgtgggttgaactttgatgggactggttcgcaacatttcctctcgttttctgttgttatgggaatgttatacttcctgactacctgtgttatcttttggaggcataagagtcagacagaggaggacatagctgtgtgtgagtgccagtatgatatcttggatccagagagtccatgtggagaccggtgtttaaatttattgactaacacagaatgcacgcctggctattgccgttgtggtgtgtactgcaagaatcagcggttccaaaaatgtcaatatgccaggacaagacttgtaagaactggagggcgtggatggggccttgtggctgatgagaatattatggctggtcaatttgttatcgaatattgtggagaagtaatatcatggaaggaagccaaacggagagctcaagcttatgaaacccagtgtttaaaggatgcctatatcatttacctcaatgctgatgagtcaattgatgcaacaagaaaagggaaccttgcgagattcatcaaccattcatgccaaccgaattgtgagacaaggaaatggaatgtccttggggaagtaagagttggaatttttgctaagcaaaacattccttttggcacggaattatcctatgactacaattttgagtggtatggtggtgtgatggtgcggtgcctctgtggagccgccagctgttctgggtttcttggggctaaatcacgtggtttccaggaggccacgtacctgtgggaagatgatgatgacaggttttctgttgagaatatccctctttacgattctgctgatgacgaacctacaagcattaacaaggaaatcctcgtatcaagtgatggcatggttacccaatacagcaacatcagcagagtacagagtaccgaaaatcctggaaacactggaacaaatgaatttgcgccaattatcgtcgacgaactgacaagctcaaatggattagcaccaatgaacgttgaaccattgactgtaagctcaaatgagttcacgccatcgaacgccatgccaatggtagctcgtctagtcgagaatgggtcaactggatacagcgcacaggacactcacgacgcttctcagaattcagcgcccaaagctgcaaatcacgcgaaccaaactggacctcagaacaacagcaaccattcagcgttggtccctgtgaagcccgcgccgaaacgccgtggcaggaaaccgaaacgcgttgtgcacaagcagctggacatcccagatatctgcgaccggcttacatcgtctgtggcgtgcgaagaaatactgtactgtgaggaagtgaagaaccaggccgtttctgaaatcgatgccctgtacgacgagataaggcctgcggttgaagagcacgagagggacagccaagatagcgtctccacaagcctcgcggagaagtggatcgaggctagctgccgcaagtacaaggccgaattcgacctgtatgctgcagtactcaagaacgttgcctccactccactacggtcgaaagatgatgtgggcccaagagagcagaacgggttgaagtacctggagaacggctcatgatttttttagctagaagcgtggaatattacgtacgccttcaatttgtagtatagggattgcatttttttttaactgtggttggtcttgtatttaggtagaggcattgtaaggttacatgattttaaatagcgtggaatcatgtcaaacgcacatttgatct

SEQ ID NO: 107268 - DNA, 1869 bp, Zea Mays
ctctacctgttggagagaccctgaccgtcgcccagaccgctctctccgcggacgcaccaggcatctcgtgtatcgtcctcggatccccgcggtcatccccatctcagccgccgttgtccgccttcccctcgacaacaagcctgccgccccgagctgcctccctccgtccgttcggtatcctttagccagttagcctcttccttccgtctgccaccggcacgttctctgccctcgggtacctcgtctgttcagtcttcagagctgggttcggtctattcctcatcctctcttgttgatccggagtgccttaagttttggccgtcttgttactgtctgctgttccacagtcgacgaatcacgaatgctaatggaggaagaatgcgtagaggcaccgtcgtacatccacattgacagcaacgctttctcctacagaaagcataagagtcagacagaggaggacatagctgtgtgtgagtgccagtatgatatcttggatccagagagtccatgtggagaccggtgtttaaatttattgactaacacagaatgcacgcctggctattgccgttgtggtgtgtactgcaagaatcagcggttccaaaaatgtcaatatgccaggacaagacttgtaagaactggagggcgtggatggggccttgtggctgatgagaatattatggctggtcaatttgttatcgaatattgtggagaagtaatatcatggaaggaagccaaacggagagctcaagcttatgaaacccagtgtctgcagatattctctcgcttctcatatttgaattgtggcaaactggcacttttttagctagctataacatctagcttctgtaactgcaggtttaaaggatgcctatatcatttacctcaatgctgatgagtcaattgatgcaacaagaaaagggaaccttgcgagattcatcaaccattcatgccaaccgaattgtgagacaaggaaatggaatgtccttggggaagtaagagttggaatttttgctaagcaaaacattccttttggcacggaattatcctatgactacaattttgagtggtatggtggtgtgatggtgcggtgcctctgtggagccgccagctgttctgggtttcttggggctaaatcacgtggtttccaggaggccacgtacctgtgggaagatgatgatgacaggttttctgttgagaatatccctctttacgattctgctgatgacgaacctacaagcattaacaaggaaatcctcgtatcaagtgatggcatggttacccaatacagcaacatcagcagagtacagagtaccgaaaatcctggaaacactggaacaaatgaatttgcgccaattatcgtcgacgaactgacaagctcaaatggattagcaccaatgaacgttgaaccattgactgtaagctcaaatgagttcacgccatcgaacgccatgccaatggtagctcgtctagtcgagaatgggtcaactggatacagcgcacaggacactcacgacgcttctcagaattcagcgcccaaagctgcaaatcacgcgaaccaaactggacctcagaacaacagcaaccattcagcgttggtccctgtgaagcccgcgccgaaacgccgtggcaggaaaccgaaacgcgttgtgcacaagcagctggacatcccagatatctgcgaccggcttacatcgtctgtggcgtgcgaagaaatactgtactgtgaggtaatggtctgctatgactatgatcagaactcccttctcttaaaacagtgtagtagtggcgaacaatgtgaagtttaagacgcatgcaccatgtaatgatccatctgatctcgccaggaagtgaagaaccaggccgtttctg

SEQ ID NO: 107269 - DNA, 891 bp, Zea Mays
tgcaatgattagggcattaaacaaccaaagtagcacaaaacatagacattgcagttcagaagcatggaacaatccatagaagaccggaccatgctcccaaaccatccggctacaaaacttagtacagcaaggttacaaacaaaagtatcacagtttgatgattttgagaaatgggacttgtcgctgcaccgcagcaccttacgccttgagcttgccaaagaacctctgcttctcatcggtagtctggaaacgaccgtgcccaaatttggacgatgtgtcgatgaacttgagcttgatctcctccagcgccagccgggaagtctgcttcaggagggactggcggagggtcaccaccctcttctttggacccacacagcagcccttgatcatcaggtagtcacccttcacgataccataatgggggaagccacccatgggagtgatgtccttctcatacctgtcaaactctgtggaggcatcgtgggtctcttgtccagccttgccgatcttgtaaaccttcttgttcatctcagtgcggtggtggtacccattttgaccagcacgggcaaccgtataggagaccctagccggatgccatgcaccgatacaagcaactttgcggagacccctgtgggtcttgcggggaagccgggtgacaccccaacgagtgaccacaccctcataacctttccccttggtcacaccaatgatgtcaatcatctcatccttctggaagacagcatcaacagggacctctttctcaaagaatttgtagccatagtccaccttgtcagcaatggtaccaccattgacctgaatctccatcaggtgagccttcttctgcttcaaacccttcatcttcctaatctaaaagatacaaatacataagag

SEQ ID NO: 107270 - DNA, 2136 bp, Zea Mays
cccaaccacggcgccctctgttccttccagccggtcgactccctctgcagtcatgcgctcgcccagctcccttgcctcccccatggccagcgcccccttcagctcctctgctcgggtctccctcccatggcgcctccctctgccggccgccaatcttcctgcttggatctcgcccagctcgatctctgcgtctcctgctagccgcgagcccctgctccctgatttctccttgctcgctcctgagccatggagttcctgcgcgctccctctgctctctctccagaccgccggctccagctcgtcgagctcctccttgcttctctccacggcgctcggctgttcctactccctcccttcacgcgcgattctctgctctgtgcgcgcggtatttctccagcatgccgcgccgtccctgctcctccagctcgccgcgccctggattccatggctgcgccctggggttttgcacggagctctgcgcgcccagccccctccgttctcctcctcaccacggagctttccctccagctccttcctctccctctcggttctctgttggccgatgctctgctcgaccgcgccccctgctgcgcgcgctcgtgcgctctgcgctttgctcgccgtcgcagccagcgacgcccctgcttctccctcgtccatgccgcggcgtcctgctcgctccctggtgtcgtgcgggcgtgtcctcgagctccccatggcggtcctgtgctcgcgtcggccctagcttggtctctcccatgacgcgcggcttcctgcgcgagttctgttgcgtccaactccatctcttccccagctcggccgcctgcttctctccgctgcttgtcgcgcccagctgcagctcgccgtgccctcactgctcccttctcctcctctgtctgcccagtctccaagctcgccgtcgaagctctcctgccgcgcccctggctcggctctgcgcgccgcgcgcgccgctccccgagctcacccaaatcagacagtgtctccctcagctcgattcctgccgtgcagctctccggctcaccggcgtttcacccgtgcgcgcacgctctggccgagttcggccctgtctatttcgccgcgcttggtctctaactccctgtgcacgccgttgcgagctcgtcagccaccgttgccttgtcacagaaaccccaaccccaacgccgtcatccatggtcacgaccttaccaaatgcgttcgtcgcttggccctgtgtcgtcgtcgaccttgtccgctgtcgcgtgctcttgttcttgatgcgcatcgcgcagtagttaggtctcgcgtgcgtggttttgaagctatgcgcgttcgtcgtgccgcgtcgtgtgccgatattctctcccgacagacctcgccgtcgaccatgttcaagtaattgttcggctcgtcgcatcccgtctattcgataaaacacctaaattcatagactgtcgacgcactgctgccatacgcggctgtctctgtcacttgcgtcagctcgccagacctacagctctacatacgtcaccctctcgtatcgtcgtcgagcttgtcgaacctcgttcttctctgctcgatctcgtcgaaccccgaatcccggacattagacaaaaataagcgaggtccttgtgcatcgtttatcaagtgctcggtcgaagatttcaatcgaagatcgtcgtcgatccgtgcgtcagcaagaaatcccaaaaatcgggtgaagacgaagctagcagcgcgatattccccaagcgctcgataaattgcctagatcggaaaatcgctaccgatcacgcggattcgtgtcagctgtggaaacagtaagctgataaattattcaaaatagttcgatcgttgaataaattaatgtttagtgcgatgctcattaggtgctcgataattgcgtgagtcacgaaactctcgtcaacttcgcgattcctgcgattatcaagccagattcagttttagcgagttattttgctattctgattaattagctgaattagtggaccgagtagaattttggtaggcatgtgtgttgataaaatattttagtcacttataaagatgtagtttaatttataaagcaagtgataagtttagaacttaattaattaattgataagttgtgattgggct

SEQ ID NO: 107271 - DNA, 126 bp, Zea Mays
tttctttttcaaagttacaaatttatatttcaagcctaaagttgatcaaattaatagtgcccttagttcttttaagataataattctaaccaaatctaatgttttactatttattcatgtaaaagc

SEQ ID NO: 107272 - DNA, 1893 bp, Zea Mays
gcatttcggtccggcgtgattgaaaccctcgcactgggacccctttatatatataactaacctctcctagggtttacgcgcattgtggctcctcacttctgcgccgccacccactacaggtaaggaagaggaggagggcaggatgtcgcaccgtaagttcgagcacccgaggcacggctccctcggcttccttcccaggaagcgctcctcccgccaccgcggcaaggtgaagtcatttcccagggatgaccccaagaagccttgccatctcactgccttccttggctacaaggctggcatgactcacattgtccgtgaggttgagaagccaggatccaaactccataagaaggaaacttgtgaggctgttaccatcattgaaacccctcctcttgtcattgttgggctcgtggcatatgtgaagactcctcgtggcctccgcacactcaactctgtttgggcccaacatcttagcgaagaagtgaggagaaggttctacaagaactggtgcaagagcaagaagaaggctttcacaaagtatgctctcaaatatgaaaatgatgctggcaagaaggaaattcagctgcagcttgagaagatgaagaaatatgcttctgttatccgtgtcattgctcatacccagattaggaagatgaagggtttgaagcagaagaaggctcacctgatggagattcaggtcaatggtggtaccattgctgacaaggtggactacggctataaattttttgagaaagaggtccctgttgatgctgtcttccagaaggatgagatgattgacatcattggtgtgaccaaaggtaaaggttatgagggtgtggtcactcgttggggtgtcacccgccttccccgcaaaacccacaggggtctccgcaaggttgcttgtatcggtgcatggcatccggctagggtctcgtatacggttgcccgtgctggtcagaatgggtaccaccaccgcactgagatgaacaagaaggtctacaagatcggcaaggctggacaagagacccacgatgcctccacagagtttgacaggaccgagaaggacatcactcccatgggtggcttcccccactatggtatcgtgaagggtgactacctgatgatcaagggatgctgtgtgggtccaaagaagagggtggtgaccctccgccagtccctcctgaagcagacttcccggctggcgctggaggagatcaagctcaagttcattgacacatcgtccaaatttgggcacggtcgcttccagactaccgatgagaagcagaggttctttggtaagctcaaggcgtaaggtgctgcggtgcagcgaaagtcccatttgtcaaaatcatcaaactgtgaaacctttgtttgttaccttgctgtaccaagttttgtagcaggatgatttgggagcatgttccggtcttcaatggattgttctacgcttcagaactgcagtgactatgttttgtgctattttggttgttttaatgccctaatcactgcaagtgttttggtgtttgatgatcaacataactatttatattaattgtttgctagtgtttaaaaatatagtttggacggtgcaacgtggatttcgatgaagacatcgtggtgatcaagaaaatcatcttaaagtagtacagtagaagatttattgaagacttatgtagatcatgtaagtgtccacacaagacttctcgttggattttggcaaaaaagaaggaaataatagatctatttgggctcgtcgagaaggactacctttcgatgaagtcgtatgcggatggatgttggttagcttctcgttggagttggaaagatgatcagtgtgcggcgacagtaatcgttggatttcggcaaaaaagataataatagatctaaacgggt

SEQ ID NO: 107273 - DNA, 2035 bp, Zea Mays
gcatttcggtccggcgtgattgaaaccctcgcactgggacccctttatatatataactaacctctcctagggtttacgcgcattgtggctcctcacttctgcgccgccacccactacaggtgaatgaatataacgaatccgccgccggcgtcatctcctcctcccacctcgactcgccttggtcgccgtcggcggccatttcgtcgccgcgcggcgagccgcccatgttgagctcgcggcggatctgatgggcttgttgtgatctcctgcaggtaaggaagaggaggagggcaggatgtcgcaccgtaagttcgagcacccgaggcacggctccctcggcttccttcccaggaagcgctcctcccgccaccgcggcaaggtgaagtcatttcccagggatgaccccaagaagccttgccatctcactgccttccttggctacaaggctggcatgactcacattgtccgtgaggttgagaagccaggatccaaactccataagaaggaaacttgtgaggctgttaccatcattgaaacccctcctcttgtcattgttgggctcgtggcatatgtgaagactcctcgtggcctccgcacactcaactctgtttgggcccaacatcttagcgaagaagtgaggagaaggttctacaagaactggtgcaagagcaagaagaaggctttcacaaagtatgctctcaaatatgaaaatgatgctggcaagaaggaaattcagctgcagcttgagaagatgaagaaatatgcttctgttatccgtgtcattgctcatacccagattaggaagatgaagggtttgaagcagaagaaggctcacctgatggagattcaggtcaatggtggtaccattgctgacaaggtggactacggctataaattttttgagaaagaggtccctgttgatgctgtcttccagaaggatgagatgattgacatcattggtgtgaccaaaggtaaaggttatgagggtgtggtcactcgttggggtgtcacccgccttccccgcaaaacccacaggggtctccgcaaggttgcttgtatcggtgcatggcatccggctagggtctcgtatacggttgcccgtgctggtcagaatgggtaccaccaccgcactgagatgaacaagaaggtctacaagatcggcaaggctggacaagagacccacgatgcctccacagagtttgacaggaccgagaaggacatcactcccatgggtggcttcccccactatggtatcgtgaagggtgactacctgatgatcaagggatgctgtgtgggtccaaagaagagggtggtgaccctccgccagtccctcctgaagcagacttcccggctggcgctggaggagatcaagctcaagttcattgacacatcgtccaaatttgggcacggtcgcttccagactaccgatgagaagcagaggttctttggtaagctcaaggcgtaaggtgctgcggtgcagcgaaagtcccatttgtcaaaatcatcaaactgtgaaacctttgtttgttaccttgctgtaccaagttttgtagcaggatgatttgggagcatgttccggtcttcaatggattgttctacgcttcagaactgcagtgactatgttttgtgctattttggttgttttaatgccctaatcactgcaagtgttttggtgtttgatgatcaacataactatttatattaattgtttgctagtgtttaaaaatatagtttggacggtgcaacgtggatttcgatgaagacatcgtggtgatcaagaaaatcatcttaaagtagtacagtagaagatttattgaagacttatgtagatcatgtaagtgtccacacaagacttctcgttggattttggcaaaaaagaaggaaataatagatctatttgggctcgtcgagaaggactacctttcgatgaagtcgtatgcggatggatgttggttagcttctcgttggagttggaaagatgatcagtgtgcggcgacagtaatcgttggatttcggcaaaaaagataataataga

SEQ ID NO: 107274 - DNA, 623 bp, Zea Mays
gcatttcggtccggcgtgattgaaaccctcgcactgggacccctttatatatataactaacctctcctagggtttacgcgcattgtggctcctcacttctgcgccgccacccactacaggaagaggaggagggcaggatgtcgcaccgtaagttcgagcacccgaggcacggctccctcggcttccttcccaggaagcgctcctcccgccaccgcggcaaggtgaagtcatttcccagggatgaccccaagaagccttgccatctcactgccttccttggctacaaggctggcatgactcacattgtccgtgaggttgagaagccaggatccaaactccataagaaggaaacttgtgaggctgttaccatcattgaaacccctcctcttgtcattgttgggctcgtggcatatgtgaagactcctcgtggcctccgcacactcaactctgtttgggcccaacatcttagcgaagaagtgaggagaaggttctacaagaactggtgcaagagcaagaagaaggctttcacaaagtatgctctcaaatatgaaaatgatgctggcaagaaggaaattcagctgcagcttgagacttcccggctggcgctggaggagatcaagctc

SEQ ID NO: 107275 - DNA, 932 bp, Zea Mays
aattccaaaaccttttctccgtcccatcgccggcgatcttctccttcgccgccaatggatctctccgctgtccaggctgccgccgcgtcccagggattcaccaccgacgaatggccctactctgtccacctgcttgcccacctctacatcaatgacctgaacagcgcgcggttcttctggaagtcgttgccgcaggaggtcaaggacacgcggccggagctcgccgctgtctggaggattggtcagtgcctctggaaaagagattatgctggcgtcaacacggctgcacaggggttcgagtggggtcctgacctcgctgacttcatcactgccttcctagagagctacagacagaggatattcaagctgttgacttctgcatattccacaattagagttgctgatgtggctcatttcatggggatgagtgaggaggatgcgacaaactatgctgtgcaaaacggttggagtttggatgcagcggccaagatgcttactgtcaaaaagccaaagtctcagaccaaccagaagcttgatgctagcaaactgcagcgtttgactgagtgtgttttccaccttgagaactgatgttcactgtcaatcgtgttgtgtccctgtttcttctctgctccacattgtaagaagcatgtttaccatgtgacagctatatgcctgagcgacttggcccctttcggccgaaaaggggtgatctctgaatttgcatcttatgtgatttctgacagcgtgctatgggttaatgtgcctattggtgacccctcctgccagtggctcattgaaatgagtcacactttgtcattagggcaagtataataacagcctataagccggctaaatgctgggttgtatgagagagaagagagaaaaaacgggctgtaaacttatagttaccttagacagaagaacaaaaaaaa

SEQ ID NO: 107276 - DNA, 1040 bp, Zea Mays
aaatccgaattcaagagtccccgagtcgacaggccacaaatcccaattccaaaaccttttctccgtcccatcgccggcgatcttctccttcgccgccaatggatctctccgctgtccaggctgccctctccgacaagtcctactccaccctcgcctccctctgcgacgaacttctcctccaggccgcgtcccagggattcaccaccgacgaatggccctactctgtccacctgcttgcccacctctacatcaatgaccttgagcaggaacagcgcgcggttcttctggaagtcgttgccgcaggaggtcaaggacacgcggccggagctcgccgctgtctggaggattggtcagtgcctctggaaaagagattatgctggcgtcaacacggctgcacaggggttcgagtggggtcctgacctcgctgacttcatcactgccttcctagagagctacagacagaggatattcaagctgttgacttctgcatattccacaattagagttgctgatgtggctcatttcatggggatgagtgaggaggatgcgacaaactatgctgtgcaaaacggttggagtttggatgcagcggccaagatgcttactgtcaaaaagccaaagtctcagaccaaccagaagcttgatgctagcaaactgcagcgtttgactgagtgtgttttccaccttgagaactgatgttcactgtcaatcgtgttgtgtccctgtttcttctctgctccacattgtaagaagcatgtttaccatgtgacagctatatgcctgagcgacttggcccctttcggccgaaaaggggtgatctctgaatttgcatcttatgtgatttctgacagcgtgctatgggttaatgtgcctattggtgacccctcctgccagtggctcattgaaatgagtcacactttgtcattagggcaagtataataacagcctataagccggctaaatgctgggttgtatgagagagaagagagaaaaaacgggctgtaaacttatagttaccttagacagaagaacaaaaaaaa

SEQ ID NO: 107277 - DNA, 1045 bp, Zea Mays
ggaactgctccgaaatccgaattcaagagtccccgagtcgacaggccacaaatcccaattccaaaaccttttctccgtcccatcgccggcgatcttctccttcgccgccaatggatctctccgctgtccaggctgccctctccgacaagtcctactccaccctcgcctccctctgcgacgaacttctcctccaggccgcgtcccagggattcaccaccgacgaatggccctactctgtccacctgcttgcccacctctacatcaatgacctgaacagcgcgcggttcttctggaagtcgttgccgcaggaggtcaaggacacgcggccggagctcgccgctgtctggaggattggtcagtgcctctggaaaagagattatgctggcgtcaacacggctgcacaggggttcgagtggggtcctgacctcgctgacttcatcactgccttcctagagagctacagacagaggatattcaagctgttgacttctgcatattccacaattagagttgctgatgtggctcatttcatggggatgagtgaggaggatgcgacaaactatgctgtgcaaaacggttggagtttggatgcagcggccaagatgcttactgtcaaaaagccaaagtctcagaccaaccagaagcttgatgctagcaaactgcagcgtttgactgagtgtgttttccaccttgagaactgatgttcactgtcaatcgtgttgtgtccctgtttcttctctgctccacattgtaagaagcatgtttaccatgtgacagctatatgcctgagcgacttggcccctttcggccgaaaaggggtgatctctgaatttgcatcttatgtgatttctgacagcgtgctatgggttaatgtgcctattggtgacccctcctgccagtggctcattgaaatgagtcacactttgtcattagggcaagtataataacagcctataagccggctaaatgctgggttgtatgagagagaagagagaaaaaacgggctgtaaacttatagttaccttagacagaagaacaaaaaaaa

SEQ ID NO: 107278 - DNA, 669 bp, Zea Mays
aaatccgaattcaagagtccccgagtcgacaggccacaaatcccaattccaaaaccttttctccgtcccatcgccggcgatcttctccttcgccgccaatggatctctccgctgtccaggctgccctctccgacaagtcctactccaccctcgcctccctctgcgacgaacttctcctccaggccgcgtcccagggattcaccaccgacgaatggccctactctgtccacctgcttgcccacctctacatcaatgacctgaacagcgcgcggttcttctggaagtcgttgccgcaggaggtcaaggacacgcggccggagctcgccgctgtctggaggattggtcagtgcctctggaaaagagattatgctggcgtcaacacggctgcacaggggttcgagtggggtcctgacctcgctgacttcatcactgccttcctaggtataggtcttgcttgtattgttatgaatgacatagaattttcctatggttatgtggtagtgaagcgaaacttgaattgttcgctttcatagagatttggtagtagcatgggttggtagaggctgttgaccatattgtcaccattgatttgtagtgggagaatctaatagaattgagctgcactgggaataagatatcctatgtgaatatgatgatggagaagttcgc

SEQ ID NO: 107279 - DNA, 423 bp, Zea Mays
atggaagacacatctcacgtcttccttcactaccagtttgcacaatccttctggcgtgtgatcaacattgcagtgtcgggcgatatgtccatggcgatggatttccagaaggacatagttagagcagctgaaggtttagtgtctattggaaacaaacatattgaagtgggaataaaattttctgaggactgctatagatatggaagcgaaaataatgcaagcgacgaagcccttagaaaagcagcatcactatacggaggtgctttgagaaatattgagaaagagtatgaagatttcaacagaattttatcttctcaggcaggaaatataggtgatatggggattggaaaatgcatatttatgggtacagttaccagtttaccactcatggagcgagttgctgattgggatggatttgaataa

SEQ ID NO: 107280 - DNA, 1401 bp, Zea Mays
tccacactccgtcaataaatcaactcgagcaaagctagtaccatcgtgcgagtgtgagcaagctactgagagaactcggaacgttgcttgacagcttgagtaggtaaataatctatggcgcgccaacagtggagcagcggcggcctcgcggtcgcggtgctggccgtgctgtcgtccgtgctcatctgctcgggccacccggtgccgggcgggctccccctgctgccgcacttctacggccacgcgtgcccgcagatggaggccatcgtggggtccctcgtggcgaaggcgcacgcggaggacccgcgcatggcggcgtccctgctgcggatgcacttccacgactgcttcgtgcagggctgcgacgcctccgtgctgctggacgccgacggcagcggcaggttcgtcaccgagaaacggtccaaccccaacaaggactcgctccgggggttcgaggtcatcgacgagatcaaggccgcgctcgagcacgcctgcccgcacaccgtctcctgcgccgacatcgtcgccgtcgccgccagggactccgtcgtcctgaccggcggacctggctgggaggtgccactggggaggagggactcgctgacggccagcctgagcggctccaacaacctcatccctgctcccaacgactccctccccaccatcatcggcaagttcgccaaccaaggcctcgacatcgtcgacctcgtcgcactctcaggggggcacaccatcggcgactcgcggtgcgtgagcttccggcagcggctgtacggccagaacaacaacgggcaggtggaccggacgctgaacccggcgtacgcggcggagctgcggggccggtgcccgcggtcgggcggcgaccagaacctgttcgcgctggacctggtgacccagttccggttcgacaaccagtactaccacaacatcctggccatgaacgggctgctcagctccgacgagatcctgctcacgcagagccgcgagaccatggacctcgtccaccgctacgccgccgaccagggcctcttcttcgaccacttcgccaagtccatggtcaagatgggcaacatctcgccgctcaccgggagcgccggcgagatcaggcacaactgcaggagggtcaaccacttctagcttccatggagtggccatccgtgcagtggtgttcttgctttggtttcatttctggatgcatgcgtcatctttcatacttggatttaagtgtgcagtagtcgtaaatgattggaatttctgttttagtttggtgcccattcgatctcgagtcgattttcactcatgtaatttgcaaatcttgtacgaagaaatgatccaataaaattcagcatttgtgtcattgctagactactcaaaagtaaggatggtatgcatgggtaccaa

SEQ ID NO: 107281 - DNA, 1447 bp, Zea Mays
aaatcaactcgagcaaagctagtaccatcgtgcgagtgtgagcaagctactgagagaactcggaacgttgcttgacagcttgagtaggtaaataatctatggcgcgccaacagtggagcagcggcggcctcgcggtcgcggtgctggccgtgctgtcgtccgtgctcatctgctcgggccacccggtgccgggcgggctccccctgctgccgcacttctacggccacgcgtgcccgcagatggaggccatcgtggggtccctcgtggcgaaggcgcacgcggaggacccgcgcatggcggcgtccctgctgcggatgcacttccacgactgcttcgtgcagggctgcgacgcctccgtgctgctggacgccgacggcagcggcaggttcgtcaccgagaaacggtccaaccccaacaaggactcgctccgggggttcgaggtcatcgacgagatcaaggccgcgctcgagcacgcctgcccgcacaccgtctcctgcgccgacatcgtcgccgtcgccgccagggactccgtcgtcctggtacccatcgatacgaactgatgcagccttgcagcgtcgtctatacatttacattatcgtcaccccgatcgtcgatggtctcggtcgccgatcgagctgcatgcagaccggcggacctggctgggaggtgccactggggaggagggactcgctgacggccagcctgagcggctccaacaacctcatccctgctcccaacgactccctccccaccatcatcggcaagttcgccaaccaaggcctcgacatcgtcgacctcgtcgcactctcaggggggcacaccatcggcgactcgcggtgcgtgagcttccggcagcggctgtacggccagaacaacaacgggcaggtggaccggacgctgaacccggcgtacgcggcggagctgcggggccggtgcccgcggtcgggcggcgaccagaacctgttcgcgctggacctggtgacccagttccggttcgacaaccagtactaccacaacatcctggccatgaacgggctgctcagctccgacgagatcctgctcacgcagagccgcgagaccatggacctcgtccaccgctacgccgccgaccagggcctcttcttcgaccacttcgccaagtccatggtcaagatgggcaacatctcgccgctcaccgggagcgccggcgagatcaggcacaactgcaggagggtcaaccacttctagcttccatggagtggccatccgtgcagtggtgttcttgctttggtttcatttctggatgcatgcgtcatctttcatacttggatttaagtgtgcagtagtcgtaaatgattggaatttctgttttagtttggtgcccattcgatctcgagtcgattttcactcatgtaatttgcaaatcttgtacgaagaaatgatccaataaaattcagcatttgtgtca

SEQ ID NO: 107282 - DNA, 91 bp, Zea Mays
accgacggaaatagttgcctattttcgtcgaacttattttcgtcggctattttcgtcggtttacgcttattttcgtgggtttttggcccac

SEQ ID NO: 107283 - DNA, 1760 bp, Zea Mays
aaatatcaaaggagtaaaggacctaacactcgcactcagttttggtatttttgtttcttttgagcagctgttgttgatacatgacagtgccctgattagtagtgtattggtaatttgcttgtgaaaaaagattatcttgactcacatggtcacagtcacacttactgtattctgcaagttacacactagtgcagtagtgcctagttcatagctacgccacttgataaaattgtcaacttatcttgaaaactttggtttctctgctttttagcagaggaatgcaaaatgttgagttgttgaccaaccctgtccgttttgatgtagctttctatacaatagtattaatgtttttcactagcgattagtcaatgtgtactggttatcttagcaaaatttagttgatattgtcgaagttccagattgaggccaccatccatagatggaaaatagacttttgtggtatttgtaccggatgtatttcaaattaaatattttattcgcttatgttgggatgctcataagagttcttttcaggaagcaagacattcggatttgtggtcaaagtataaatttatttgttcttgcaggcgatgtattgcatcaccagagccatacactgatcttattctgaattgtgatgtgagggacttggataaagcagaagcagagggtactgttacacctccagcaattgagaatttgggtgatgtcctacaacaggcaatatctgagtacacgtcaaatgatgaccctgaagcttgctgtgatatgattgaaaccatgctttccaacaggttggtgagtggtttgaagcaagaggatatttcagggagaaaacatatactacagcctcttcaccatatctgtcttactgcttacatgacacttgcctctgcttaccggtttcgcgccttaagtttagaagaagctgtccgttcagatggagaaaatactgatgaattttttagaatggctaaagcagcagcagcgtattccctggtacttgcagggagtacacaccatttgttcttatcagaatgttctcttatgatccccctgtctcattttttgttaaacactggacagtctctgttatatcttgttgagtctatcaagggaaagacaaggcaaaatatatccgaggccaggctcagcttttcttcatgtccagcaagttctacagacaatgattctccaccgtaccatgtgttcagatcaacctgtgaagcgtttggcaagcaaatgttatccctgtcactgcggtgctggtcatttctagtgcgaggtttaccctgcctggaaaagataaagagccccatggaatttagtatgcccggaacaacaatatttcagtctgtcctttctgaggaagaccatgccaacctttccgcgcacgagccagtaggtttcacggagagacaagcggggtgcatccttagtttggctctatgttgtatcacctactgcaaatatcttgctaccatatgctacggcccacatcattatctggcagaccatgcaaaatatctacttgaaggtatcgatcctgcacaatgaatcttctttcttggcataggtgtgttgtgaaatcttatgctcttatgagttaatgtaaaacgtgtcgtgattatcaaggctgttgagcttattttctatatgattgtatgctgagctcgttatttattattttgtatggaagcaccatttttctaaaaaaatttggtcactgggaagttgtatcactgatcttgcacctttcc

SEQ ID NO: 107284 - DNA, 2570 bp, Zea Mays
cttgctcttgctcttgtattcttgcttatactgtgggccatgctcgggaactagggctgaagattgatgcagtgccattgtgccaataagcaagaaaggcccactaaagggcaattgacgctgggcggcgacggcggggggagactgagcggccgaggagccggtgtggcatcggtgcatcgcagcggcctgaggtcgcgagcagcacagcagggtgcgccaggcgccgacgcggtacggggcaccgcgcgacgcgtgagcgcgtggccggtctcagcaccaagacgcatcaaagccggcgctaggcagggcactatcgcgctgctgcgcagctgtgcctgcgctggtccctggaggattagtgacagcactcaccaatttgtgttttgcagaattgggagaaatcaaataacttcacaacagatcaggaagctttagagcttggcaatggagatgagagcccgggaatctgtaagcatgtcgaaggatctaactggggaaatcacaccttttgccactgccctacatgatgtgttcctccactcccattgctcatcatgcttcaccaagttacttccacaaaccccttgtgtcatgtcttgcatgacatgctgttctcttcgatactgctgttcagagtgcttacgtgcggattcagtggtgcatgtttcctctggtgaatgttgcttttttgtggatcacctcaagagagcctccccttcctatgttactgaaggaacgagtgatttgcgtgctgccctccgccttctgtgtgtgcttgagatacatggtcttgtttcgcctgattcaatcaatcactacagtagaattggtggactttcagcaagtggtattgaggaagctttgaaggaaggtgaggttattgctgagaggatactggaggggagcttattgatgtcatctgctagaaaatcgagggcacagacttgtgttattttttcagacaggcttaaacttgagaagatggcattatgggcagtgattatcaatagcgtcgaggtgcaacttagtgaagggttagctttgggagttgcagtgtatggcccgagtttctcatggttcaaccatagttgctttcccagtgcttcttaccggtttgtactggctccaaggaatgaagactgtgcttcacagaaatcaaaatccagtgtagtccctgctagcaaaggagttgcagctgatgtgtggcatgcttggcaatacgaagatcattctactcatgcactgtgcaaatatggcccaagagttgttgttcgttgcataaaaccaattaacaagggagatgaagtgtgcataacatacattgatcttctccagaccagggaagcaagacattcggatttgtggtcaaagtataaatttatttgttcttgcaggcgatgtattgcatcaccagagccatacactgatcttattctgaattgtgatgtgagggacttggataaagcagaagcagagggtactgttacacctccagcaattgagaatttgggtgatgtcctacaacaggcaatatctgagtacacgtcaaatgatgaccctgaagcttgctgtgatatgattgaaaccatgctttccaacaggttggtgagtggtttgaagcaagaggatatttcagggagaaaacatatactacagcctcttcaccatatctgtcttactgcttacatgacacttgcctctgcttaccggtttcgcgccttaagtttagaagaagctgtccgttcagatggagaaaatactgatgaattttttagaatggctaaagcagcagcagcgtattccctggtacttgcagggagtacacaccatttgttcttatcagaatgttctcttatgatccccctgtctcattttttgttaaacactggacagtctctgttatatcttgttgagtctatcaagggaaagacaaggcaaaatatatccgaggccaggctcagcttttcttcatgtccagcaagttctacagacaatgattctccaccgtaccatgtgttcagatcaacctgtgaagcgtttggcaagcaaatgttatccctgtcactgcggtgctggtcatttctagtgcgaggtttaccctgcctggaaaagataaagagccccatggaatttagtatgcccggaacaacaatatttcagtctgtcctttctgaggaagaccatgccaacctttccgcgcacgagccagtaggtttcacggagagacaagcggggtgcatccttagtttggctctatgttgtatcacctactgcaaatatcttgctaccatatgctacggcccacatcattatctggcagaccatgcaaaatatctacttgaaggtatcgatcctgcacaatgaatcttctttcttggcataggtgtgttgtgaaatcttatgctcttatgagttaatgtaaaacgtgtcgtgattatcaaggctgttgagcttattttctatatgattgtatgctgagctcgttatttattattttgtatggaagcaccatttttctaaaaaaatttggtcactgggaagttgtatcactgatcttgcacctttcc

SEQ ID NO: 107285 - DNA, 1436 bp, Zea Mays
gtcgaaatatatagtggtttatttctttcattaaaaataaaatatacagatgaagagaaagcttttattctcaaagcgttgataaaaagccgagcgaaaaccacgtgcacacatatatagacacaccacatatatactatatcagtagagagagaaaaaacgcagagtaggaaaatgtccatgcagagacacacacaccacacatcgatcaccaaacacgcgtacgaagtaccatgcacacacatcatcagtaactacacatgatatacatagacgggcaatcaaacccccgtgacttcgttcgccctccatgcatgctccttctggtcctggggagcagcctacgtacgcaagtagatcgatcgagcagcagcccgatcagccgaagaagtggtgcttcttcttcccctcgccgcggcggccggactcctcctcctccccggcgtcctccgccgcgtctttggcctccttcttgtcgtggtgctcgtggaacgcgaagccgccgctgcccagggcagccaccgccgccacgccctcctcgatcttgtgccgctgcgcgtgctccgggtccttcttcgcctcgtgcctctcgtactgcatgcgtcggtccggtcgatcatgcatgcatgcacatggtcgtcacgaaagttgtcacagtgacacgaagaacatgcgcgacagtcacaatcacaaagcacggcgtcagctcgttcatcagttcgtgcgtgtgcaaggaaggaaggaaacgatggacgttggttcgttaccagggcgaaggcgccggcggcgagggcgcccatctcgccgaggtgctccttgtgcttgtgctccttctcctccttcctgtacttctccgagtcgtcccgggaggagccgtactctccgccctcgtccgcgcctccaccggactgcttgccgtacccgccaccgccgccgccggcgtacgcgtcgtcgccagagggcttgctgccgtacccgccgccggtgccacggccgtattcgtcgtcgttggtggtgcccgatctgttgtacccgctgtcgtagccgtcgtttccggacttgttgtacccgccaccgccggtgccacggccgtagtcgtcgccgccgctacggccgtagtcatcgccgccgccggacttgttgtagccaccgccgccggtgccacggccgtagtcgtcgccgccggacctgccgtacccatcgccgccgctgcggccgtagtcgtcatcgccgcccgacttgttgtagccaccttcgccacggccgtagtcatcagtgccggacttgctgttgtagccgctgtcgtagtcgtcgccggcgccggacctgccgtagccgctgcggccgtactcgtccgccatggttcacgcttattgttatctagtcacacgttcagtacagaagaagagtagagcttgctgctttgcagttgcttg

SEQ ID NO: 107286 - DNA, 951 bp, Zea Mays
atgatatacatagacgggcaatcaaacccccgtgacttcgttcgccctccatgcatgctccttctggtcctggggagcagcctacgtacgcaagtagatcgatcgagcagcagcccgatcagccgaagaagtggtgcttcttcttcccctcgccgcggcggccggactcctcctcctccccggcgtcctccgccgcgtctttggcctccttcttgtcgtggtgctcgtggaacgcgaagccgccgctgcccagggcagccaccgccgccacgccctcctcgatcttgtgccgctgcgcgtgctccgggtccttcttcgcctcgtgcctctcgtactgggcgaaggcgccggcggcgagggcgcccatctcgccgaggtgctccttgtgcttgtgctccttctcctccttcctgtacttctccgagtcgtcccgggaggagccgtactctccgccctcgtccgcgcctccaccggactgcttgccgtacccgccaccgccgccgccggcgtacgcgtcgtcgccagagggcttgctgccgtacccgccgccggtgccacggccgtattcgtcgtcgttggtggtgcccgatctgttgtacccgctgtcgtagccgtcgtttccggacttgttgtacccgccaccgccggtgccacggccgtagtcgtcgccgccgctacggccgtagtcatcgccgccgccggacttgttgtagccaccgccgccggtgccacggccgtagtcgtcgccgccggacctgccgtacccatcgccgccgctgcggccgtagtcgtcatcgccgcccgacttgttgtagccaccttcgccacggccgtagtcatcagtgccggacttgctgttgtagccgctgtcgtagtcgtcgccggcgccggacctgccgtagccgctgcggccgtactcgtccgccatggttcacgcttattgttatctag

SEQ ID NO: 107287 - DNA, 1089 bp, Zea Mays
atgagtaaagcaaagatgacagagggtcaatctgaagaaactgcaagtgcaccagagggagttagtgtccttagaagaaattcagatgatgtgggatgggagtatggggttcttgttgatgtaaacaataaggacaaggtaaagtgcatactgtgtgacaagcaaatgtgtggaggggtttatcggttgaagcaacatatcgcccaggaaggaaagaatgcgaagaaatgccaaggcattaagaccaccaaagagaaattgctggaggctcaagaaaagtgcaagaaagcgctagatggagcaaaaaggaaaagggaggtgaagactgttcgtgagctagaacttagagaggaagttcatgtgtctagggttggaggatcagaagaagtgacttgtgttggaagttcagagcctcacaaattaggccccatggacaaatggacaaaagctattgatcctacagcaactaaatctgaatctttgactcaacagaggctgaacaaggaactttggaaagaaagattacatgagcaatatcattcaatgcatgtgacaacgatgagttcaagcaaatgtgtgaagcaattggacaatttgggcctggaattgaacctccaactatgtttgacctgcgagggagattgttggaagaagaatatgcaaacaccagctctaactaatagagaggtgcacactaagaagagaaataggcttactacagaccgcctcaacaagttggtctacgttcagttcaacaacaggctaattaataagagagcaaagatcaagtccaagaaaattactgatgttctcttgtctagtggtccaactgaagctcaaggtttcctccaagagaatggagatgattgtgcattagtctcctttagagatgacgaagacgaggaagaagtcatggaaggtacagggataccttggtctgtgcttggagatgcagtgggagcagaagaacaactagagctgcgtagaagtgcaagggtgagagagctcaatgaagaagagtttgagtccgaagaagaagagtttgatgaagatgaggatgaggatgagatggatgaaaccggcgtgtga

SEQ ID NO: 107288 - DNA, 1038 bp, Zea Mays
atgggtggatgcagttcaagctccacgaccgagaccgtccaggatgagggctcaaagaccgcgaaagatcagggtccaaagatcgcggaagatgtcacccaattgatcggcaagaccccgttggtgtacctgaacaaggtggtggctggctgcgaggcgcgtgtagctgccaagcttgagatcatggcgccctgctccagcgtcaaggacaggattggctacagcatgatcgccgacgcggaggagaagggcctgatcacccctgggaagagcgtcctgatcgagccgacgggcggcaacaccggcatcgggctggcgttcatggcggcggccaaggggtacaggctggtcgtggcgatgccatcgtcggtgagcacggagcggcgggccgtgctgagggccttcggcgccgaggtggtgctgacggacccgctgctgagcatggacggcgtggtgcgcaaggcgcaggaggtggcggcgcggacgcccggcgcccacgtgctgcagcagttcgccaacccggccaaccccagggcgcactacgaggcgacggggcccgagatctggagcgccacggcgggcaaggtggacgccctcgtcgccggcataggcaccgggggcaccgtcaccggcgccggcaggtacctcaaggagaagaaccccgccatcaaggtctatggcgtcgagccgtccgacagcgcggttctgtctggagggaaacctggtccgcacaagatccagggcctcggtgctggcttcgttcccggcgttctcgatgtcagcctcctcgacgaggtcttccaggtctccaacgaggaagccgccggcatggcgaagcagatcgcgcgggaagaagggctactggtcgggatatcgtccggtgcggccgcggtcgccgccgtcagagtcgccaggagggccgagaacaggggcaagctcatcgtcgctatcttcgcgagcttcggcgagcgatacctgtcgtcgttcatgtacgagtccctcaaggaggaggctgaaagcatggccttcgagccatga

SEQ ID NO: 107289 - DNA, 679 bp, Zea Mays
aagttttagttgcttcacttggtgtcttagcggttcgtgtttgtaagtctaagctcctcttcccagccaccaactcgatctgccctagtcttcccatctcctacttaagtcatggtccagtaggccgtgcagtcctagagctcgagtgatctccttggctcttgtagcctatgtttcctcggagttaatcccctcccaatatcttggtccatctgcccagagcttggtgtaccagtccctaggtggtgaccatcatcggcagttagtccacctcgccgtgaccagattagctgaaaactggattgcagcagattgctcagtttggagctctcctatgaccagttcatgaggttttgggttaccagttgtatagaaaagtcaaagaccagatgaaggtgaacaagcttcatcagaggagtggggtttactactgtgtaaaatatggagaaatatgtgctgcaattttctatgtcaggtgttgtgttcaggtctttttcagttagctgaaatttagcctttgcgtttccacttcaagtttggtgctctgtaacttgagatctgtttagggttagctagtagctgttgtaacaaagatggagagagattatagaggaaccattcatagtaaggaaatacattgagccctcgtatggaattgcgagaaaatagtgttacaaaa

SEQ ID NO: 107290 - DNA, 1315 bp, Zea Mays
tgctccttcgcttttcacgcagcaagcagcagtgcactgagctgcagagccagcgcgccaaccgaagctaggcctcaacggcctcaaacggccacggccggcagcaaatagcgtcagactcagagcacgctcctgcgtagtgcgtactagtgcgctgccctgcgcccgcgcggcatggcattcgcattgctggtggcagcagcgagagcggagagtgctggaagcactcgcagcccagccgcagccgcaggcggaggccgagcaatgggaggaggatggccgcgtcccggcggggccttggcggcgccgcgcttgctcctccgagcgctgctgctctgctccctcctcgcgcagccgcatccgtcgcgcgccttcttcttcttcggcggcgtgcgcaccagcttgcacgtcccccagcaccgcggtggtggacgcgaggagaaggtgcccatgaccgtcgtcgtcccggactactcgccgcggcccgcgccgctcggcctctcgccctcagccgcgcccgcgcccgcgccggtgcccggctcggacggcgacgaagacggcacgccgaggctgccgtcagagcggcggggcacgggcgcgccctcgtcgaccggtcacagcgcgagcgcacaggcgccggccgcggccaccagcaccgacttcgtcagcagcagccccgccgtgccgctcccggccggcgtcacggactccgccaccgtcctgcccatgcccactcccggacagcatctccgggacgacgtggggatgggcacccggcggcttcaggctagggtgttgcagctcgccgtccctcttctcatgatgctgtcttttgcggctacctctgtctctgctggagttgttatgtgatcacaagggctctctctctctctctctctctctctgtactgtagcctccactgacactcatagatcatcatcacctcatctgtaaccaaggtcgccatgcttgctattgctgctgattcctgagttcatgccttatacatgcgtcacgcagagctccgttctctagctagcactcctttcgtttcatcttcacagcgggattgtaggaactggttctttgcagcagtatccaacggtggcacggatggacctcgccagtgaatacaaaatccacctggtgtcaagcagctcgtgggcaaccacacatcactgtggtaacagtgacatctgtgcagccacagctgctgcccgctgctaatagagcaagcccaacaggccctgattctggtttgttggaaacccccacatgcccattaaaaaatggatcgggtatttgcaaacgagc

SEQ ID NO: 107291 - DNA, 350 bp, Zea Mays
atggggacagtaaattctggaggcattacggcggcctctctgtttactttagtttgtgcctttcgtcgagcttttctcccgtctttgcaagctttgctttcccgttgctttgcatctaccgagcttttcgctttcctgcaccttgccctgacttctttcccacccttgctgacgacgacgctttttaatttgcaggacgacgtggggatgggcacccggcggcttcaggctagggtgttgcagctcgccgtccctcttctcatgatgctgtcttttgcggctacctctgtctctgctggagttgttatgtgatcacaagggctctctctctctctctctctctctctgta

SEQ ID NO: 107292 - DNA, 2658 bp, Zea Mays
atgcatgttgtccgtgcttttgttctctccgtgctcctcgtcatcctgcacgcgccctcgccttacgccgccacagacacgctgcgacacggccatgcacttgccggcagcgacaagctcgtctcaggcaacggcaagttcgcgctcggcttcctgcagctccaaccagggagctcctactacctcggcatatggttcgacaaagtccccgtgcttacccctgtgtgggcagccaacagggacaatccggtgtcggccaactccacttggcgggagctcgtcatctccgacgacggcaacatggtcttccaagcccagggcgccaccgtctggtcgacccgggcaaacacgacgaccaacgacaccgtcgccgtgctcctgggcaacggcaacctcgtcctgcggagcgcctccaactcgtcgctcacgttctgggagagcttcgactacccgaccgacacccagctgcccggcgtcaaggtcgggtggaacaaggtcaccggcctgaaccgccggctcgtttcgcggaagaacgccgtcgatctgtcctcgggcatatactcgtcgacgctgggccgcgacggagtggccaggatgctgtggaactcgtcgtccgtgtactggtcgagcacgtggaacggcaggttcttcagcgccgtgccggagatgtctgcgggttcccctctcgccaacttcaccttcgtcaacaacgaccaggaggtctacttcacctacaacatattcgacgagagcacgatcgtacgcaccacgctgcacgtgtccggccagaaccaagtgcgcgtctggaccgggcaggactggatgacggggaacaaccagccggcacaccagtgcgacgtgtacgctgtctgtggccctttcgcggtctgcgaaccgaatggagacactctttgcagctgcatgaaggggttctccgtgagatcgccgtcggactgggaggtagaggatcgaacaggcgggtgcgtcagagacactccgctgctgagctgcggcgctggcgacggaaacagcggcacaggtatggcggccgacaaattctactccatgccgggcatcaggctgccccagaacggcaaagccatgccagcagatgcgtcgagcgcgaagcagtgcgcgcaggtctgtttgagcagctgctcttgcactgcatattcttacggaaaagatggctgctccatctggcatggcgagctacttaacgtagctactgaaggagatagtgatgacactatttaccttcgccttgctgcgaaagagtttcggagcgggaaaggaagcagcaggagtggcgtggtcatcggtgctgccgtcggagcaagcgttgctgctgctgctgctttggttttcgttctcctcgtattgatctggcggagaaatgggaggcggtggtctaggcccgtagtacacaacgataaaggtagcgtcgttggcatagtcgcgttcaagtacgcggacctgcaggacgcgacgaagaaattctcggagaagctaggcgaaggtggctttggctccgtgttcaaagggtgtctaggtgactcgactactaccgtagtagcagtgaagaggctggacggcgctcgacagggagagaagcagttcagggcagaagtgaactcgatcgggatcgtccagcatataaacctagtcagactgatcgggttctgctgcgaaggcgacaggaggctgctcgtgtacgagcacatgccaaacggctccctggactcccatctgttccgaagccatggcggcgccggcgtcggcgccggggcagctctagactggaacgttaggtacaagatagctgtcggggtcgcgagaggtctggcgtacctgcaccatggctgccgggactgcatcatacactgcgacatcaaaccgcagaacatacttctggacgcgtcgttccttcccaagatcgccgacttcgggatggccaagttcctcgggagggacttcagccgcgtcgtgacgacgatgcgaggaaccgtcgggtacctcgccccggaatggatcagcgggacaccgatcacttccaagatcgatgtctacagctacgggatggtcttgctggagatcgtatcggggaagaggaactctattactcagcagtcttcaagccatactattgaaggtcaacaaggggactatttaccagtgcaggttgcgggcaagcttcttcgtggagacgttttgagcgtcgtggatgcagatctgcgtggcgacgtgaacgtggaggaggtcgaaagggtttgcaggatcgcgtgttggtgcatccaggatcgcgagttcgatcggccgacgatggttgaggtggtacagtttctcgaagggatttgcgagccggaaattcctccgatgccaaggctactccatgctattgcaggaggcggctcaaatcagacggccggagtgtgagtcgtagctttctcggcaaattcaacaatcgtctatgatatgtctgtcagttgttatggcaaataaatttgttttctggaatatctaatatcctgccatgtaatatttcgatataccctgagatttgtaacatgtcgggtttcaatgtgccaatgggtcctgtctcgtaaacaaccctctgtgtatgtaccccactttgactatcaacaaatattgttattt

SEQ ID NO: 107293 - DNA, 725 bp, Zea Mays
tacgtaccccttcggccctcttgcacttctcctccccacccaacgaggcggagctccttttacctccacagcgtcggctgtgcgcctgtacttcacaccgacgtcaccctctcctccagaactcatcaccggagccaccctcacctcgtcacgccctcctccgctaagtgcagcaagtgttgatcagtccagttagcacactctccttcaaatctagagtcacttcttcaaagtgggtgggagggagatggtgctgaggcgggcggcaaccgaatgtcctaagaaggttgtggggctgaaggatttggtgaacctgccgacccagctgtgagagttcaccggaggccggtccaaaatgtcacatatctccttcctccgtgtctgctcgtacatcaaggacaacaaacttcaggacccaacgaataataacattctgaagtgtgatgagaagctgaagaccatattattgggcaggtccaaagcgacaccgtctgaactcccaatgattgtacattgcttggcggttgccgattgttttccccctttggtgccagcttcccagcaaaacttcaacctttggatctcattcttcacgtagaaatcggcatctgccccacaatatttttttccgttatcttgcgaaattctatggttgtggtcatgtgtttgcaggtgaacctcaaggaatgttcattgctactagaattacaaatccatttgagata

SEQ ID NO: 107294 - DNA, 840 bp, Zea Mays
caaatatcccacctggaatgcccgatccagacacgcgaatcctccaatctgcccttgccgccgccgccgacggatccaggtctgtagactgctcactcctctacgctccgctccgaatggcccgcacgaagcagacggcgcgcaagtcgaccggcggcaaggcgccgcggaagcagctggccaccaaggcggcgcgcaagtcggccccggccacgggcggcgtgaagaagccgcaccgcttccgccccggcaccgtcgcgctccgcgagatccgcaagtaccagaagagcactgagctgctcatccgcaagctccccttccagcgcctggtccgcgagatcgcgcaggacttcaagacggacctgcggttccagtcgtcggcggtggcggcgctgcaggaggccgcggaggcgtacctggtggggctcttcgaggacaccaacctctgcgccatccacgccaagagggtcaccatcatgcccaaggacatccagctcgcccgccgcatcaggggcgagagggcttgagctgtcgcgctgctgttcgtcgttgtaatatttgaagatggcgggttcgtttcatgtcgtgcttatcgtggatgtgttgccctcactgaatggaatgcgactgcccttgtccgaaattaatgaatgcccttgttccttcaaagattttggtgacttgtttaatgggcacagtgtagtcggaggtcgcaggcataccattatgtgacttgtttacatggttcaatggcgtgttgattgcttgcaatggtctcaggcataccattatgtgaatgctgaagatgaaatctgtgtgcactattgattaatctgtgtg

SEQ ID NO: 107295 - DNA, 333 bp, Zea Mays
tttctaaatcatgctacagtgcacgcgcttggctgactgcccagttagctatttgcatacaccaagcggcagtgtatatatattttgtcggtttaaggaccatctgcaatacaatagatcgatcgtcagccgcttaagaggagcagctccttttatggttttgtgttctcacaatttatggtaggatgccatgcaaaacccttttggttcaatcactcacttcatagttcatactgtatggtgatttacttctacaacaacatgatatcattagcaaccctttttctgtgagactatccttgtcccccatacaatacatctaggagtcttgtg

SEQ ID NO: 107296 - DNA, 297 bp, Zea Mays
atggtgctgaggcgggcggcaaccgaatgccccaagaaggttgcggggctgaaggatctggtgaacctgccaacccagctgcgagagttcgccggaggccggtcccaaatgtcacatatctccttcttcctcagtgtctggtcgtacatcaaggacaacaaacttcaggacccaacgaataagaacattgtgaagtgtgatgagaagctgaagaccgtattattgggcaggtccaaagtgcaactgtctgaactcccaatgattgttaagctccatttcccaaaattgccaaagtag

SEQ ID NO: 107297 - DNA, 694 bp, Zea Mays
cagtaacccgcatcccacatcactcatccacagctcgcagccgtattcctgtctcgaatcctctctcgccgctccgatggcccgcacgaagcaaacagcaaggaagtcgaccggcggcaaggccccccggaagcagctggccactaaggctgcgcgcaagtcggccccggccaccggcggcgtgaagaagccccaccgcttccgccccggcaccgtcgcgctccgcgagatccgcaagtaccagaagagcactgagctgctcatccgcaagctccccttccagcgcctcgtccgcgagatcgcgcaggacttcaagactgatctgaggttccagtcctccgccgtcgcggcgctgcaggaggccgccgaggcgtacctggtggggctcttcgaggacaccaacctttgcgccatccacgccaagcgcgtcactatcatgcccaaggacatccagctcgcgcggcgcatcaggggcgagagggcttgagcgcccgtcgtgctgctcgtcgttgtagtgttactagaagtagatggtggcattcgtttcgtggcttccttatcctgtaggagtaatgttctagatgtcttggcttcagtgcaatggactgtgattgctcatttctgaaatttatcaatggacttgttcttgcaaagatttgccgtctgttttttacttttggaagacgtcgaacac

SEQ ID NO: 107298 - DNA, 270 bp, Zea Mays
gcattcttttctctatgcgtagtatctcccctctcccctcaggcacgcccactgcgctatagcctcagaaccgtccgtgtgcagcccattcaagcacctcgacgtcctttcccgctctccctcctctctccaaaacaactaccgcatcgccctcctgcagtgccaagccatggaggtcgcagaccacaattccttcccatggccgcacctccctggcatccctcatcatgtagcaacagcggcggcaagctcgctctggccgaccaagga

SEQ ID NO: 107299 - DNA, 186 bp, Zea Mays
cgtagtactatgaccgtagtactgctagccttaagagcagaagtgcatgcgacaggaagatgcatccaccgtgtagcggcagcagcacaaaatcgagatgcccacaaattacctacccgtagctacgggagtagtagtattagtaattaaaggcacggaaccaggaggaaaaaaaaaaggaaacaa
